United States Patent Application Publication US 2020/0163878 A1 - sequence listing, part 54

SEQ ID NO: 203435 - RNA, 1701 nt, Artificial Sequence
  derived and/or modified CDS sequence (opt5) from hemagglutinin__InfluenzaA__AHL95116
augaagaccaucauugcccugagcuacauccucugccugguguucgcucaggagcuucccggcaacgacgauuccacagccacgcugugucucgggcacuaugcggucccuaauggaaccauuguuaaaacaaucaccaacgaccaaauugaagugacaaaugcuaccgagcuggugcagucuagcuccacaggcgaaaucugcaacucuccgcaucagauccuugauggggagaauuguacccugauugacgcccuccugggagauccccagugcgacggcuuucaaaacaagaaaugggaucuguucgucgaaagaagcaaggcccacuccaauuguuacccuuaugacgugcccgauuacgcuucucuccggagccugguugccuccagcgggacgcuugaguuuaacaaugagucuuucaacuggaccggagugacacagaauggcaccuccagcgcuugcauccgcagaucuaacaauuccuuuuucagccggcugaacuggcucacacaucugaauuuuaaauauccugcccuuaacgucaccaugcccaacaaugaacaguucgacaagcuguacauuuggggcgugcaccauccugggacggauaaggaccagaucuuucucuaugcgaaagccucuggacgcauuacaguuuccaccaagagaagccaacaggcugugaucccgaacauuggcucccggccccgcgucagaaauaucccuucucgggugagcaucuacuggacaauugugaaacccggggauauccugcugauuaacuccaccggaaaucucaucgccccucgcggcuacuucaagauuagaagcgggaaaucuuccaucaugcggagcgacgcucccaucggaaaguguaacucugccugcauuaccccgaauggcagcaucccuaacgacaagcccuuucagaaugucaaccgcauuacauauggcgcguguccuagauacguuaaacagaauacgcugaaacuugccaccgggaugcggaacgugcccgagaagcaaacacgcggaaucuucggcgcuauugccggguuuaucgaaaauggaugggagggcaugguggaugggugguauggauucagacaccagaacuccgagggccggggccaggcugccgaccugaagucuacccaagccgcuaucgaucagauuaaugggaaacucaacagacugaucggaaagacaaacgaaaaauuccaccagauugagaaggaauuuagcgaggucgaaggccgcauccaggaccuugagaaguacguggaggauaccaaaauugaccugugguccuauaaugcggaacuccugguugcccuggagaaccaacauacgaucgaucucacagacagcgaaaugaauaagcuguucgagaaaaccaagaaacagcuucgggaaaacgcugaggauauggggaauggaugcuuuaagauuuaccacaagugugacaacgccugcaucggcucuaucagaaaugggaccuaugaucaugacguguaccgcgacgaggcccugaacaaucgguuccagauuaaaggcgucgaacucaaguccggauacaaagauuggauccuguggauuagcuuugcuaucucuugcuuccuucuguguguggcccuccugggcuuuauuaugugggcgugccagaaggggaacaucagauguaauaucugcauuuga

SEQ ID NO: 203436 - RNA, 1701 nt, Artificial Sequence; identical to SEQ ID NO: 201907
  derived and/or modified CDS sequence (opt5) from hemagglutinin__InfluenzaA__AHL95128

SEQ ID NO: 203437 - RNA, 1701 nt, Artificial Sequence; identical to SEQ ID NO: 201930
  derived and/or modified CDS sequence (opt5) from hemagglutinin__InfluenzaA__AHL95140

SEQ ID NO: 203438 - RNA, 1701 nt, Artificial Sequence; identical to SEQ ID NO: 201940
  derived and/or modified CDS sequence (opt5) from hemagglutinin__InfluenzaA__AHL95152

SEQ ID NO: 203439 - RNA, 1701 nt, Artificial Sequence; identical to SEQ ID NO: 201907
  derived and/or modified CDS sequence (opt5) from hemagglutinin__InfluenzaA__AHL95164

SEQ ID NO: 203440 - RNA, 1701 nt, Artificial Sequence; identical to SEQ ID NO: 201940
  derived and/or modified CDS sequence (opt5) from hemagglutinin__InfluenzaA__AHL95176

SEQ ID NO: 203441 - RNA, 1701 nt, Artificial Sequence; identical to SEQ ID NO: 201940
  derived and/or modified CDS sequence (opt5) from hemagglutinin__InfluenzaA__AHL95188

SEQ ID NO: 203442 - RNA, 1701 nt, Artificial Sequence; identical to SEQ ID NO: 202066
  derived and/or modified CDS sequence (opt5) from hemagglutinin__InfluenzaA__AHL95200

SEQ ID NO: 203443 - RNA, 1701 nt, Artificial Sequence; identical to SEQ ID NO: 201940
  derived and/or modified CDS sequence (opt5) from hemagglutinin__InfluenzaA__AHL95212

SEQ ID NO: 203444 - RNA, 1701 nt, Artificial Sequence; identical to SEQ ID NO: 201930
  derived and/or modified CDS sequence (opt5) from hemagglutinin__InfluenzaA__AHL95224

SEQ ID NO: 203445 - RNA, 1701 nt, Artificial Sequence; identical to SEQ ID NO: 201930
  derived and/or modified CDS sequence (opt5) from hemagglutinin__InfluenzaA__AHL95236

SEQ ID NO: 203446 - RNA, 1701 nt, Artificial Sequence; identical to SEQ ID NO: 201955
  derived and/or modified CDS sequence (opt5) from hemagglutinin__InfluenzaA__AHL95248

SEQ ID NO: 203447 - RNA, 1701 nt, Artificial Sequence
  derived and/or modified CDS sequence (opt5) from hemagglutinin__InfluenzaA__AHL95260
augaagaccaucauugcccugagcuacauccucugccugguguucgcucagaaacuucccggcaacgacaauuccacagccacgcugugucucgggcaccaugcggucccuaacggaaccauuguuaagacaaucaccaaugauagaauugaggugacaaacgcuaccgaacuggugcaaaauucuagcaucuccgagaucugcgacucuccgcaccagauucuugauggcgaaaacuguacacugaucgacgcccuccugggggauccccagugcgacggauuucagaauaaaaagugggaucuguucgucgagcggagcaaagccuauuccaacuguuacccuuaugacgugcccgauuacgcuucucuccgcagccugguugccuccagcggcacccuugaauuuaauaacgagucuuucaauugggcuggggugacgcaaaacggaaccuccagcgccugcauuagaggcucuaauuccagcuuuuucucucggcugaacuggcucacacaucugaauuuuaaguauccugcgcuuaacgucaccaugcccaacaaugagcaguucgacaagcuguacaucuggggcgugcaccauccugggacagauaaagaccagauuuuucucuaugcccaguccagcggacgcaucaccguuuccacgaagagaucucaacaggcugugauuccgaacaucggcagccggccccgcaucagaaauauuccuucccggaucagcauuuacuggacaaucgucaaacccggggauauucugcugaucaacucuaccggaaaucucaucgccccucgcggcuacuucaagauuagauccgggaaaagcucuaucaugcggagcgacgcucccauuggaaaguguaaguccgaaugcaucacaccgaacggcucuauuccuaaugacaaacccuuucagaacgugaaucgcaucaccuauggcgccuguccuagauacgugaagcagagcacccugaaacuugcgacagggaugcggaacguccccgagaagcaaacgcgcggaaucuucggcgccauugcuggguuuaucgaaaauggaugggagggcaugguugaugggugguauggauucagacaccagaacuccgagggccggggccaggccgcugaccugaaaagcacccaagccgccauugaucagaucaaugggaagcucaacagacugauuggaaaaacaaaugaaaaguuccaccagaucgagaaggaauuuucugagguggaaggccgcauucaggaccuugagaaauacguggaggauaccaagaucgaccugugguccuauaacgcugaacuccuggucgcgcuggagaaccaacauacaaucgaucucaccgacagcgaaaugaauaaacuguucgagaagacgaaaaagcagcuucgggaaaacgccgaggauauggggaauggaugcuuuaagauuuaccacaaaugugacaacgcuugcaucggcucuauuagaaaugggacauaugaucaugacguguaccgcgacgaggcccugaacaaucgguuccagaucaagggcguugaacucaaauccggauacaaggauuggauucuguggaucagcuuugccaucuccugcuuccuucuguguguggcucuccugggcuuuauuaugugggccugccagaaagggaacaucagauguaauauuugcaucuga

SEQ ID NO: 203448 - RNA, 1701 nt, Artificial Sequence; identical to SEQ ID NO: 201940
  derived and/or modified CDS sequence (opt5) from hemagglutinin__InfluenzaA__AHL95272

SEQ ID NO: 203449 - RNA, 1701 nt, Artificial Sequence; identical to SEQ ID NO: 202066
  derived and/or modified CDS sequence (opt5) from hemagglutinin__InfluenzaA__AHL95284

SEQ ID NO: 203450 - RNA, 1701 nt, Artificial Sequence
  derived and/or modified CDS sequence (opt5) from hemagglutinin__InfluenzaA__AHL95296
augaaggccauccuggugguccuccuguacaccuucgcuacagccaacgcggacacgcuuugcauuggcuaucacgcuaauaacagcaccgauacaguugacaccgugcuggagaagaaugugacagucacccauuccgugaaccuccuggaagauaagcacaaugggaaacuuuguaagcugagaggaguugcuccccuccaucugggcaaaugcaacaucgccggguggauucugggaaauccugagugugaaucucucagcacagccuccucuuggagcuacaucguggagaccuccucuagcgacaacggcacgugcuauccgggggauuuuauuaauuacgaagaacugcgggagcagcuuuccagcgucucuuccuucgaacgcuuugagauguuccccaagaccagcucuuggccuaaccacgacuccaauaagggagugacagccgcuuguccccaugccggcgcgaaaucuuuuuauaagaaccugaucuggcucguuaaaaagggcaauagcuacccuaaacuguccaagagcuauaucaacgauaaggggaaagaagugcuuguccuguggggcauucaccaccccuccaccacagccgaccaacagucucucuaccagaaugcugaugccuacguguucgugggaaccagcaaguauuccaaaaaguuuaaaccugagaucgcuauuagaccgaagguccgggaccaggaggggcgcaugaacuacuauuggacgcugaucgaacccggagauaaaauuacauucgaggccaccggcaaccugguugugccuagauacgcguuugccauggaacggaaugcugggagcggaaucauuaucucugacacacccgugcaugauugcaacaccaccugucaaacaccugagggcgccaucaauacgucccuccccuuccagaacauucacccgaucaccauuggcaagugcccuaaguaugucaaaagcacaaagcugcgccuugcuaccgggcugagaaaugugcccucuauccagagccggggacucuuuggcgccauugccggguucaucgaaggaggcuggacagggaugguugacggaugguacggcuaucaucaccagaacgagcaaggcuccggguacgcugcggaccugaaaucuacccagaaugccaucgauaagauuacgaacaaagugaauagcgucaucgagaagaugaacacacaguuuaccgcugugggaaaggaguucaaucaccuugagaaacgcauugaaaaccugaauaagaaaguugacgauggcuuccucgacaucuggaccuacaacgccgagcugcuggugcuccuggaaaaugagagaacacuugauuaucaugacuccaacgucaagaaccuguacgagaaagugcggaaucagcucaaggauaacgccaaggaaauugggaauggauguuuugaguucuaucacaaaugcgacaacaccuguauggaaagcgucaagaauggcacauacgauuauccuaaauacucugaggaagcuaagcugaaccgcgagaaaaucgacggggugaaacuugaguccacgagaaucuaucaaauucuggccaucuacagcaccguugcgucuucccucgugcuggucgugagccugggcgcuauuuccuuuuggaugugcucuaauggaagccuccagugccggaucuguauuuga

SEQ ID NO: 203451 - RNA, 1701 nt, Artificial Sequence; identical to SEQ ID NO: 201907
  derived and/or modified CDS sequence (opt5) from hemagglutinin__InfluenzaA__AHL95307

SEQ ID NO: 203452 - RNA, 1701 nt, Artificial Sequence; identical to SEQ ID NO: 201930
  derived and/or modified CDS sequence (opt5) from hemagglutinin__InfluenzaA__AHL95319

SEQ ID NO: 203453 - RNA, 1701 nt, Artificial Sequence
  derived and/or modified CDS sequence (opt5) from hemagglutinin__InfluenzaA__AHL95331
augaagaccaucauugcccugagcuacauccucugccugguguucgcucagaaacuucccggcgacgauaacuccacagccacgcugugucucgggcaccaugcggucccuaauggaaccauuguuaagacaaucaccaacgacagaauugaggugacaaaugcuaccgaacuggugcaaaacucuagcaucggcgagaucugcgauuccccgcaccagauucuugacggggaaaauuguacacugaucgaugcccuccugggagacccccagugcgauggcuuucagaacaaaaagugggaccuguucgucgagcggucuaaagccuauagcaauuguuacccuuaugaugugcccgacuacgcuucccuccgcucucugguugccagcuccgggacccuugaauuuaacaaugagagcuucaacugggcuggagugacgcaaaauggcaccucuuccgccugcauuagaggcagcaacucuuccuuuuucagccggcugaauuggcucacacaucugaacuuuaaguauccugcgcuuaaugucaccaugcccaacaacgagcaguucgauaagcuguacaucuggggagugcaccauccugggacagacaaagaucagauuuuucucuaugcccagucuuccggccgcaucaccguuagcacgaagagaucccaacaggcugugauuccgaauaucgggucucggccccgcaucagaaacauuccuagccggaucuccauuuacuggacaaucgucaaacccggagacauucugcugaucaauagcaccggcaaccucaucgccccucgcggguacuucaagauuagaucuggaaaauccagcaucaugcggucugacgcucccauuggcaaguguaagagcgaaugcaucacaccgaauggcuccauuccuaacgauaaacccuuucagaaugugaaccgcaucaccuauggggccuguccuagauacgugaagcagucuacccugaaacuugcgacaggaaugcggaauguccccgagaagcaaacgcgcggcaucuucggggccauugcuggauuuaucgaaaacggcugggaggggaugguugacggaugguauggcuucagacaccagaauagcgagggccgggggcaggccgcugaucugaaauccacccaagccgccauugaccagaucaacggaaagcucaauagacugauuggcaaaacaaacgaaaaguuccaccagaucgagaaggaauuuagcgagguggaagggcgcauucaggaucuugagaaauacguggaggacaccaagaucgaucuguggucuuauaaugcugaacuccuggucgcgcuggagaaccaacauacaaucgaccucaccgauuccgaaaugaacaaacuguucgagaagacgaaaaagcagcuucgggaaaaugccgaggacaugggaaacggcugcuuuaagauuuaccacaaaugugauaaugcuugcaucgggagcauuagaaacggcacauaugaccaugacguguaccgcgaugaggcccugaauaaccgguuccagaucaagggaguugaacucaaaucuggcuacaaggacuggauucuguggaucuccuuugccaucagcugcuuccuucuguguguggcucuccugggguuuauuaugugggccugccagaaaggaaauaucagauguaacauuugcaucuga

SEQ ID NO: 203454 - RNA, 1701 nt, Artificial Sequence
  derived and/or modified CDS sequence (opt5) from hemagglutinin__InfluenzaA__AHL95343
augaagaccaucauugcccugagcuacauccucugccugguguucgcucagaaacuucccggcaacgacaauuccacagccacgcugugucucgggcaccaugcggucccuaacggaaccauuguuaagacaaucaccaaugauagaauugaggugacaaacgcuaccgaacuggugcaaaauucuagcaucggcgagaucugcgacuccccgcaccagauucuugauggggaaaacuguacacugaucgacgcccuccugggagauccccagugcgacggcuuucagaauaaaaagugggaucuguucgucgagcggucuaaagccuauagcaacuguuacccuuaugacgugcccgauuacgcuucccuccgcucucugguugccagcuccgggacccuugaauuuaauaacgagagcuucaauugggcuggagugacgcaaaacggcaccucuuccgccugcauuagaggcagcaauucuuccuuuuucagccggcugaacuggcucacacaucugaauuuuaaguauccugcgcuuaacgucaccaugcccaacaaugagcaguucgacaagcuguacaucuggggagugcaccauccugggacagauaaagaccagauuuuucucuaugcccagucuuccggccgcaucaccguuagcacgaagagaucccaacaggcugugauuccgaacaucgggucucggccccgcaucagaaauauuccuagccggaucuccauuuacuggacaaucgucaaacccggagauauucugcugaucaacagcaccggcaaucucaucgccccucgcggguacuucaagauuagaucuggaaaauccagcaucaugcggucugacgcucccauuggcaaguguaagagcgaaugcaucacaccgaacggcuccauuccuaaugacaaacccuuucagaacgugaaucgcaucaccuauggggccuguccuagauacgugaagcagucuacccugaaacuugcgacaggaaugcggaacguccccgagaagcaaacgcgcggcaucuucggggccauugcuggauuuaucgaaaauggcugggaggggaugguugauggaugguauggcuucagacaccagaacagcgagggccgggggcaggccgcugaccugaaauccacccaagccgccauugaucagaucaauggaaagcucaacagacugauuggcaaaacaaaugaaaaguuccaccagaucgagaaggaauuuagcgagguggaagggcgcauucaggaccuugagaaauacguggaggauaccaagaucgaccuguggucuuauaacgcugaacuccuggucgcgcuggagaaccaacauacaaucgaucucaccgacuccgaaaugaauaaacuguucgagaagacgaaaaagcagcuucgggaaaacgccgaggauaugggaaauggcugcuuuaagauuuaccacaaaugugacaacgcuugcaucgggagcauuagaaauggcacauaugaucaugacguguaccgcgacgaggcccugaacaaucgguuccagaucagaggaguugaacucaagucuggcuacaaagauuggauucuguggaucuccuuugccaucagcugcuuccuucuguguguggcucuccugggguuuauuaugugggccugccagaagggaaacauccgcuguaauauuugcaucuga

SEQ ID NO: 203455 - RNA, 1701 nt, Artificial Sequence; identical to SEQ ID NO: 201930
  derived and/or modified CDS sequence (opt5) from hemagglutinin__InfluenzaA__AHL95432

SEQ ID NO: 203456 - RNA, 1701 nt, Artificial Sequence; identical to SEQ ID NO: 202066
  derived and/or modified CDS sequence (opt5) from hemagglutinin__InfluenzaA__AHL95444

SEQ ID NO: 203457 - RNA, 1701 nt, Artificial Sequence; identical to SEQ ID NO: 201930
  derived and/or modified CDS sequence (opt5) from hemagglutinin__InfluenzaA__AHL95457

SEQ ID NO: 203458 - RNA, 1701 nt, Artificial Sequence
  derived and/or modified CDS sequence (opt5) from hemagglutinin__InfluenzaA__AHL95470
augaagaccaucauugcccugagcuacauccucugccugguguucgcucagaaacuucccggcaacgacaauuccacagccacgcugugucucgggcaccaugcggucccuaacggaaccauuguuaagacaaucaccaaugaucaaauugaggugacaaacgcuaccgaacuggugcagucuagcuccacaggcgagaucugcaauucuccgcaccagauccuugacggggaaaacuguacccugauugaugcccuccugggagacccccagugcgauggcuuucaaaauaaaaagugggaccuguucgucgagagaagcaaagccuauuccaacuguuacccuuaugaugugcccgacuacgcuucucuccggagccugguugccuccagcgggacgcuugaauuuaauaacgagucuuucaauuggaccggagugaagcagaacggcacauccagcgcuugcauccgcagaucuaauuccagcuuuuucucucggcugaacuggcucacccaucugaauuuuaaguauccugcccuuaacgucacaaugcccaacaaugagcaguucgauaaacuguacauuuggggcgugcaccauccugggaccgacaaggaucagaucuuucucuaugcgcaauccagcggacgcauuacgguuuccacaaaaagaucucagcaggccgugaucccgaacauuggcagccggccccgcaucagaaauaucccuucccggauuagcaucuacuggaccauuguccgccccggggacauccugcugauuaacucuacaggaaaucucaucgcuccuagaggcuacuucaagauccgguccgggaaaagcucuauuaugcgcagcgaugcccccaucggaaaguguaacuccgaaugcauuaccccgaauggcucuaucccuaacgacaagcccuuucagaaugugaacagaauuaccuauggcgcuuguccucgguacgugaaacaaagcacacugaagcuggccacggggaugcgcaauguccccgagaaacagaccagaggaaucuucggcgcgaucgccggguuuauugaaaacggaugggagggcaugguugacgggugguauggauuccggcaccaaaauuccgagggcagaggccaggcugccgaucuuaagagcacacaggcugccaucgaccagauuaacgggaaacucaaucgccugaucggaaagaccaacgaaaaauuccaccagauugagaaggaauuuucugagguggaaggccggauccaagaucuugagaaguacguggaggacacaaaaauugaucugugguccuauaacgccgaacuccuggucgcucuggagaaucagcauaccaucgaccucacggauagcgaaaugaacaagcuguucgagaaaacaaagaaacagcuuagagaaaaugcggaggacauggggaacggaugcuuuaagaucuaccacaagugugauaaugccugcauuggcucuauccgcaacgggaccuauaaucaugacguguaccgggaugaggcucugaacaauagauuccagauuaaaggcguugaacucaaguccggauacaaagacuggauccuguggauuagcuuugccaucuccugcuuccuucuguguguggcccuccugggcuuuaucaugugggcuugccaaaaggggaacauucgcuguaauaucugcauuuga

SEQ ID NO: 203459 - RNA, 1701 nt, Artificial Sequence; identical to SEQ ID NO: 202066
  derived and/or modified CDS sequence (opt5) from hemagglutinin__InfluenzaA__AHL95482

SEQ ID NO: 203460 - RNA, 1701 nt, Artificial Sequence; identical to SEQ ID NO: 202066
  derived and/or modified CDS sequence (opt5) from hemagglutinin__InfluenzaA__AHL95494

SEQ ID NO: 203461 - RNA, 1701 nt, Artificial Sequence
  derived and/or modified CDS sequence (opt5) from hemagglutinin__InfluenzaA__AHL95506
augaagaccaucauugcccugagcuacauccucugccugguguucgcucagaaacuucccggcaacgacaauuccacagccacgcugugucucgggcaccaugcggucccuaacggaaccauuguuagaacaaucaccaaugaucggauugaggugacaaacgcuaccgaacuggugcaaaauucuagcaucggcgagaucugcgacuccccgcaccagauucuugauggggaaaacuguacacugaucgacgcccuccugggagauccccagugcgacggcuuucagaauaagaaaugggaucuguucgucgagcgcucuaaggccuauagcaacuguuacccuuaugacgugcccgauuacgcuucccucagaucucugguugccagcuccgggacccuugaauuuaauaacgagagcuucaauugggcuggagugacgcaaaacggcaccucuuccgccugcauucggggcagcaauucuuccuuuuucagccgccugaacuggcucacacaucugaauuuuaaauauccugcgcuuaacgucaccaugcccaacaaugagcaguucgacaagcuguacaucuggggagugcaccauccugggacagauaaggaccagauuuuucucuaugcccagucuuccggcagaaucaccguuagcacgaaacggucccaacaggcugugauuccgaacaucgggucucgccccagaauccggaauauuccuagccgcaucuccauuuacuggacaaucgucaagcccggagauauucugcugaucaacagcaccggcaaucucaucgccccuagaggguacuucaaaauucggucuggaaaguccagcaucaugcgcucugacgcucccauuggcaaauguaagagcgaaugcaucacaccgaacggcuccauuccuaaugacaagcccuuucagaacgugaauagaaucaccuauggggccuguccucgguacgugaaacagucuacccugaaacuugcgacaggaaugcgcaacguccccgagaagcaaacgagaggcaucuucggggccauugcuggauuuaucgaaaauggcugggaggggaugguugauggaugguauggcuuccggcaccagaacagcgagggcagagggcaggccgcugaccugaaguccacccaagccgccauugaucagaucaauggaaaacucaaccgccugauuggcaagacaaaugaaaaauuccaccagaucgagaaggaauuuagcgagguggaagggcggauucaggaccuugagaaguacguggaggauaccaaaaucgaccuguggucuuauaacgcugaacuccuggucgcgcuggagaaccaacauacaaucgaucucaccgacuccgaaaugaauaagcuguucgagaaaacgaagaaacagcuuagagaaaacgccgaggauaugggaaauggcugcuuuaagauuuaccacaagugugacaacgcuugcaucgggagcauucgcaauggcacauaugaucaugacguguaccgggacgaggcccugaacaauagauuccagaucaaaggaguugaacucaagucuggcuacaaagauuggauucuguggaucuccuuugccaucagcugcuuccuucuguguguggcucuccugggguuuauuaugugggccugccagaagggaaacauccgcuguaauauuugcaucuga

SEQ ID NO: 203462 - RNA, 1701 nt, Artificial Sequence
  derived and/or modified CDS sequence (opt5) from hemagglutinin__InfluenzaA__AHL95518
augaagaccaucauugcccugagcuacauccucugccugguguucgcucagaaacuucccggcaacgacaauuccacagccacgcugugucucgggcaccaugcggucccuaacggaaccauuguuaagacaaucaccaaugauagaauugaggugacaaacgcuaccgaacuggugcaaaauucuagcaucggcgagaucugcgacuccccgcaccagauucuugauggggaaaacuguacacugaucgacgcccuccugggagauccccagugcgacggcuuucagaauaaaaagugggaucuguucgucgagcggucuaaagccuauagcaacuguuacccuuaugacgugcccgauuacgcuucccuccgcucucugguugccagcuccgggacccuugaauuuaauaacgagagcuucaauugggcuggagugacgcaaaacggcaccucuuccgccugcauuagaggcagcaauucuuccuuuuucagccggcugaacuggcucacacaucugaauuuuaaguauccugcgcuuaacgucaccaugcccaacaaugagcaguucgacaagcuguacaucuggggagugcaccauccugggacagauaaagaccagauuuuucucuaugcccagucuuccggccgcaucaccguuagcacgaagagaucccaacaggcugugauuccgaacaucgggucucggccccgcaucagaaaugucccuagccggauuuccaucuacuggacaauugugaaacccggagauauccugcugauuaacagcaccggcaaucucaucgccccucgcggguacuucaagaucagaucuggaaaauccagcauuaugcggucugacgcucccaucggcaaguguaagagcgaaugcauuacaccgaacggcuccaucccuaaugacaaacccuuucagaacgugaaucgcauuaccuauggggccuguccuagauacgucaagcagucuacccugaaacuugcgacaggaaugcggaacguucccgagaagcaaacgcgcggcaucuucggggccaucgcuggauuuauugaaaauggcugggaggggaugauggauggaugguauggcuucagacaccagaacagcgagggccgggggcaggccgcugaccugaaauccacccaagccgccaucgaucagauuaauggaaagcucaacagacugaucggcaaaacaaaugaaaaguuccaccagauugagaaggaauuuagcgagguggaagggcgcauccaggaccuugagaaauacguggaggauaccaagauugaccuguggucuuauaacgcugaacuccuggucgcgcuggagaaccaacauacaaucgaucucaccgacuccgaaaugaauaaacuguucgagaagacgaaaaagcagcuucgggaaaacgccgaggauaugggaaauggcugcuuuaagaucuaccacaaaugugacaacgcuugcauugggagcaucagaaauggcacauaugaucaugacguguaccgcgacgaggcccugaacaaucgguuccagauuaagggaguugaacucaaaucuggcuacaaggauuggauccuguggauuuccuuugccaucagcugcuuccuucuguguguggcucuccugggguuuaucaugugggccugccagaaaggaaacauuagauguaauaucugcauuuga

SEQ ID NO: 203463 - RNA, 1701 nt, Artificial Sequence; identical to SEQ ID NO: 201940
  derived and/or modified CDS sequence (opt5) from hemagglutinin__InfluenzaA__AHL95530

SEQ ID NO: 203464 - RNA, 1701 nt, Artificial Sequence; identical to SEQ ID NO: 201940
  derived and/or modified CDS sequence (opt5) from hemagglutinin__InfluenzaA__AHL95542

SEQ ID NO: 203465 - RNA, 1701 nt, Artificial Sequence
  derived and/or modified CDS sequence (opt5) from hemagglutinin__InfluenzaA__AHL95554
augaagaccaucauugcccugagcuacauccucugccugguguucgcucagaaacuucccggcaacgacaauuccauggccacacugugucucgggcaccaugcggucccuaacggaacgauuguuaagaccaucacaaaugauagaauugaggugaccaacgcuacagaacuggugcaaaauucuagcaucggcgagaucugcgacuccccgcaccagauucuugauggggaaaacuguacccugaucgacgcccuccugggagauccccagugcgacggcuuucagaauaaaaagugggaucuguucgucgagcggucuaaagccuauagcaacuguuacccuuaugacgugcccgauuacgcuucccuccgcucucugguugccagcuccgggacacuugaauuuaauaacgagagcuucaauuggaccggagugacgcaaaacggcaccucuuccgcuugcauuagacggagcaauucuuccuuuuucagccgccugaacuggcucacacaucugaauuuuaaguauccugcccuuaacgucaccaugcccaacaaugagcaguucgacaagcuguacaucuggggcgugcaccauccugggacagauaaagaccagauuuuucucuaugcgcagucuuccggaagaaucaccguuagcacgaagcggucccaacaggccgugauuccgaacaucggcucucgccccagaauccggaauauuccuagccgcaucuccauuuacuggacaaucgucaaacccggggauauucugcugaucaacagcaccggaaaucucaucgcuccuagaggcuacuucaagauucggucugggaaauccagcaucaugcgcucugacgcccccauuggaaaguguaagagcgaaugcaucacaccgaacggcuccauuccuaaugacaaacccuuucagaacgugaauagaaucaccuauggcgcuuguccucgguacgugaagcagucuacccugaaacuugccacagggaugcgcaacguccccgagaagcaaacgagaggaaucuucggcgcgauugccggguuuaucgaaaauggaugggagggcaugguugaugggugguauggauuccggcaccagaacagcgagggcagaggccaggcugccgaccugaaauccacccaagcugccauugaucagaucaaugggaagcucaaccgccugauuggaaaaacaaaugaaaaguuccaccagaucgagaaggaauuuagcgagguggaaggccggauucaggaccuugagaaauacguggaggauaccaagaucgaccuguggucuuauaacgccgaacuccuggucgcucuggagaaccaacauacaaucgaucucaccgacuccgaaaugaauaaacuguucgagaagacgaaaaagcagcuuagagaaaacgcggaggauauggggaauggaugcuuuaagauuuaccacaaaugugacaacgccugcaucggcagcauucgcaaugggacauaugaucauaacguguaccgggacgaggcucugaauaacagauuccagaucaagggcguugaacucaaaucuggauacaaggacuggauucuguggaucuccuuugccaucagcugcuuccuucuguguguggcccuccugggcuuuauuaugugggcuugccagaaagggaauauccgcuguaacauuugcaucuga

SEQ ID NO: 203466 - RNA, 1701 nt, Artificial Sequence
  derived and/or modified CDS sequence (opt5) from hemagglutinin__InfluenzaA__AHL95566
augaagaccaucauugcccugagcuacauccucugccugguguucgcucagaaacuucccggcaacgacaauuccacagccacgcugugucucgggcaccaugcggucccuaacggaaccauuguuaagacaaucaccaaugauagaauugaggugacaaacgcuaccgaacuggugcaaaauucuagcaucggcgagaucugcgacuccccgcaccagauucuugauggggaaaacuguacacugaucgacgcccuccugggagauccccagugcgacggcuuucagaauaaaaagugggaucuguucgucgagcggucuaaagccuauagcaacuguuacccuuaugacgugcccgauuacgcuucccuccgcucucugguugccagcuccgggacccuugaauuuaauaacgagagcuucaauugggcuggagugacgcaaaacggcaccucuuccgccugcauuagaggcagcaauucuuccuuuuucagccggcugaacuggcucacacaucugaauuuuaaguauccugcgcuuaacgucaccaugcccaacaaugagcaguucgacaagcuguacaucuggggagugcaccauccugggacagauaaagaccagauuuuucucuaugccagaucuuccggccgcaucaccguuagcacgaagcggucccagcaagcugugauuccgaacaucgggucucgccccagaauccggaauauuccuagccgcaucuccauuuacuggacaaucgucaaacccggagauauucugcugaucaacagcaccggcaaucucaucgccccuagaggguacuucaagauucggucuggaaaauccagcaucaugcgcucugacgcucccauuggcaaguguaagagcgaaugcaucacaccgaacggcuccauuccuaaugacaaacccuuucagaacgugaauagaaucaccuauggggccuguccucgguacgugaagcagucuacccugaaacuugcgacaggaaugcgcaacguccccgagaagcagacgagaggcaucuucggggccauugcuggauuuaucgaaaauggcugggaggggaugguugauggaugguauggcuuccggcaccaaaacagcgagggcagagggcaggccgcugaccugaaauccacccaggccgccauugaucaaaucaauggaaagcucaaccgccugauuggcaaaacaaaugaaaaguuccaccagaucgagaaggaauuuagcgagguggaagggcggauucaggaccuugagaaauacguggaggauaccaagaucgaccuguggucuuauaacgcugaacuccuggucgcgcuggagaaccagcauacaaucgaucucaccgacuccgaaaugaauaaacuguucgagaagacgaaaaagcaacuuagagaaaacgccgaggauaugggaaauggcugcuuuaagauuuaccacaaaugugacaacgcuugcaucgggagcauucgcaauggcacauaugaucaugacguguaccgggacgaggcccugaacaauagauuccagaucaagggaguugaacucaaaucuggcuacaaggauuggauucuguggaucuccuuugccaucagcugcuuccuucuguguguggcucuccugggguuuauuaugugggccugccagaaaggaaacauccgcuguaauauuugcaucuga

SEQ ID NO: 203467 - RNA, 1701 nt, Artificial Sequence
  derived and/or modified CDS sequence (opt5) from hemagglutinin__InfluenzaA__AHL95578
augaagaccaucauugcccugagcuacauccucugccugguguucgcucagaaacuucccggcaacgacgauuccacagccacgcugugucucgggcaccaugcggucccuaauggaaccauuguuaagacaaucaccaacgacagaauugaggugacaaaugcuaccgaacuggugcaaaacucuagcaucggcgagaucugcgauuccccgcaccagauucuugacggggaaaauuguacacugaucgaugcccuccugggagacccccagugcgauggcuuucagaacaaaaagugggaccuguucgucgagcggucuaaagccuauagcaauuguuacccuuaugaugugcccgacuacgcuucccuccgcucucugguugccagcuccgggacccuugaauuuaacaaugagagcuucaacugggcuggagugacgcaaaauggcaccucuuccgccugcauuagaggcagcaacucuuccuuuuucagccggcugaauuggcucacacaucugaacuuuaaguauccugcgcuuaaugucaccaugcccaacaacgagcaguucgauaagcuguacaucuggggagugcaccauccugggacagacaaagaucagauuuuucucuaugcccagucuuccggccgcaucaccguuagcacgaagagaucccaacaggcugugauuccgaauaucgggucucggccccgcaucagaaacauuccuagccggaucuccauuuacuggacaaucgucaaacccggagacauucugcugaucaauagcaccggcaaccucaucgccccucgcggguacuucaagauuagaucuggaaaauccagcaucaugcggucugacgcucccauuggcaaguguaagagcgaaugcaucacaccgaauggcuccauuccuaacgauaaacccuuucagaaugugaaccgcaucaccuauggggccuguccuagauacgugaagcagucuacccugaaacuugcgacaggaaugcggaauguccccgagaagcaaacgcgcggcaucuucggggccauugcuggauuuaucgaaaacggcugggaggggaugauggacggaugguauggcuucagacaccagaauagcgagggccgggggcaggccgcugaucugaaauccacccaagccgccauugaccagaucaacggaaagcucaauagacugauuggcaaaacaaacgaaaaguuccaccagaucgagaaggaauuuagcgagguugaagggcgcauucaggaucuugagaaauacguggaggacaccaagaucgaucuguggucuuauaaugcugaacuccugguggcgcuggagaaccaacauacaaucgaccucaccgauuccgaaaugaacaaacuguucgagaagacgaaaaagcagcuucgggaaaaugccgaggacaugggaaacggcugcuuuaagauuuaccacaaaugugauaaugcuugcaucgggagcauuagaaacggcacauaugaccaugacgucuaccgcgaugaggcccugaauaaccgguuccagaucaagggaguggaacucaaaucuggcuacaaggacuggauucuguggaucuccuuugccaucagcugcuuccuucuguguguugcucuccugggguuuauuaugugggccugccagaaaggaaauaucagauguaacauuugcaucuga

SEQ ID NO: 203468 - RNA, 1701 nt, Artificial Sequence
  derived and/or modified CDS sequence (opt5) from hemagglutinin__InfluenzaA__AHL95590
augaagaccaucauugcccugagcuacauccucugccugguguucgcucagaaacuucccggcaacgacaauuccacagccacgcugugucucgggcaccaugcggucccuaacggaaccauuguuaagacaaucaccaaugauagaauugaggugacaaacgcuaccgaacuggugcaaaauucuagcaucggcgagaucugcgacuccccgcaccagauucuugauggggaaaacuguacacugaucgacgcccuccugggagauccccagugcgacggcuuucagaauaaaaagugggaucuguucgucgagcggucuaaagccuauagcaacuguuacccuuaugacgugcccgauuacgcuucccuccgcucucugguugccagcuccgggacccuugaauuuaauaacgagagcuucaauuggacgggagugacccaaaacggcacaucuuccagcugcauuagacggucuaauuccagcuuuuucucucgccugaacuggcucacccaucugaauuuuaaguauccugcucuuaacgucacaaugcccaacaaugagcaguucgacaagcuguacaucuggggcgugcaccauccugggaccgauaaagaccagauuuuucucuaugcccaguccagcggaagaaucacgguuuccacaaagcggucucaacaggcggugauuccgaacaucggcagccgccccagaauccggaauauuccuucccgcaucagcauuuacuggaccaucgucaaacccggggauauucugcugaucaacucuacaggaaaucucaucgccccuagaggcuacuucaagauucgguccgggaaaagcucuaucaugcgcagcgacgcucccauuggaaaguguaaguccgaaugcaucaccccgaacggcucuauuccuaaugacaaacccuuucagaacgugaauagaaucaccuauggcgccuguccucgguacgugaagcagagcacacugaaacuugcuacggggaugcgcaacguccccgagaagcaaaccagaggaaucuucggcgccauugcgggguuuaucgaaaauggaugggagggcaugguugaugggugguauggauuccggcaccagaacuccgagggcagaggccaggccgcugaccugaaaagcacacaagccgcuauugaucagaucaaugggaagcucaaccgccugauuggaaaaaccaaugaaaaguuccaccagaucgagaaggaauuuucugagguggaaggccggauucaggaccuugagaaauacguggaggauacaaagaucgaccugugguccuauaacgccgaacuccuggucgcccuggagaaccaacauaccaucgaucucacggacagcgaaaugaauaaacuguucgagaagaccaaaaagcagcuuagagaaaacgcugaggauauggggaauggaugcuuuaagauuuaccacaaaugugacaacgcgugcaucggcucuauucgcaaugggacauaugaucauaacguguaccgggacgaggcccugaauaacagauuccagaucaagggcguugaacucaaauccggauacaaggacuggauucuguggaucagcuuugcuaucuccugcuuccuucuguguguggcccuccugggcuuuauuaugugggccugccagaaagggaauauccgcuguaacauuugcaucuga

SEQ ID NO: 203469 - RNA, 1701 nt, Artificial Sequence; identical to SEQ ID NO: 201940
  derived and/or modified CDS sequence (opt5) from hemagglutinin__InfluenzaA__AHL95602

SEQ ID NO: 203470 - RNA, 1701 nt, Artificial Sequence; identical to SEQ ID NO: 201940
  derived and/or modified CDS sequence (opt5) from hemagglutinin__InfluenzaA__AHL95614

SEQ ID NO: 203471 - RNA, 1701 nt, Artificial Sequence
  derived and/or modified CDS sequence (opt5) from hemagglutinin__InfluenzaA__AHL95626
augaagaccaucauugcccugagcuacgugcucugccuggucuucgcucagaaacuucccggcaacgacaauuccacagccacgcugugucucgggcaccaugcgguuccuaacggaaccaucgugaagacaauuaccaaugauagaaucgaggugacaaacgcuaccgaacugguccaaaauucuagcauuggcgagaucugcgacuccccgcaccagauccuugauggggaaaacuguacacugauugacgcccuccugggagauccccagugcgacggcuuucagaauaaaaagugggaucuguucguggagcggucuaaagccuauagcaacuguuacccuuaugacguucccgauuacgcuucccuccgcucucugguggccagcuccgggacccuugaauuuaauaacgagagcuucaauugggcuggagucacgcaaaacggcaccucuuccgccugcaucagaggcagcaauucuuccuuuuucagccggcugaacuggcucacacaucugaauuuuaaguauccugcgcuuaacgugaccaugcccaacaaugagcaguucgacaagcuguacauuuggggaguucaccauccugggacagauaaagaccagaucuuucucuaugcccagucuuccggccgcauuaccgugagcacgaagagaucccaacaggcugucaucccgaacauugggucucggccccgcaucagaaauaucccuagccggauuuccaucuacuggacaauugugaaacccggagauauccugcugauuaacagcaccggcaaucucaucgccccucgcggguacuucaagaucagaucuggaaaauccagcauuaugcggucugacgcucccaucggcaaguguaagagcgaaugcauuacaccgaacggcuccaucccuaaugacaaacccuuucagaacgugaaucgcauuaccuauggggccuguccuagauacgucaagcagucuacccugaaacuugcgacaggaaugcggaacguucccgagaagcaaacgcgcggcaucuucggggccaucgcuggauuuauugaaaauggcugggaggggaugguggauggaugguauggcuucagacaccagaacagcgagggccgggggcaggccgcugaccugaaauccacccaagccgccaucgaucagauuaauggaaagcucaacagacugaucggcaaaacaaaugaaaaguuccaccagauugagaaggaauuuagcgagguggaagggcgcauccaggaccuugagaaauacgucgaggauaccaagauugaccuguggucuuauaacgcugaacuccugguggcgcuggagaaccaacauacaaucgaucucaccgacuccgaaaugaauaaacuguucgagaagacgaaaaagcagcuucgggaaaacgccgaggauaugggaaauggcugcuuuaagaucuaccacaaaugugacaacgcuugcauugggagcaucagaaauggcacauaugaucaugacguuuaccgcgacgaggcccugaacaaucgguuccagauuaagggaguggaacucaaaucuggcuacaaggauuggauccuguggauuuccuuugccaucagcugcuuccuucugugugucgcucuccugggguuuaucaugugggccugccagaaaggaaacauuagauguaauaucugcauuuga

SEQ ID NO: 203472 - RNA, 1701 nt, Artificial Sequence; identical to SEQ ID NO: 201940
  derived and/or modified CDS sequence (opt5) from hemagglutinin__InfluenzaA__AHL95638

SEQ ID NO: 203473 - RNA, 1701 nt, Artificial Sequence; identical to SEQ ID NO: 201940
  derived and/or modified CDS sequence (opt5) from hemagglutinin__InfluenzaA__AHL95650

SEQ ID NO: 203474 - RNA, 1701 nt, Artificial Sequence
  derived and/or modified CDS sequence (opt5) from hemagglutinin__InfluenzaA__AHL95662
augaagaccaucauugcccugagcuacauccucugccugguguucgcucagaaacuucccggcaacgacaauuccacagccacgcugugucucgggcaccaugcggucccuaacggaaccauuguuaagacaaucaccaaugauagaauugaggugacaaacgcuaccgaacuggugcaaaauucuagcaucggcgagaucugcgacuccccgcaccagauucuugauggggaaaacuguacacugaucgacgcccuccugggagauccccagugcgacggcuuucagaauaaaaagugggaucuguucgucgagcggucuaaagccuauagcaacuguuacccuuaugacgugcccgauuacgcuucccuccgcucucugguugccagcuccgggacccuugaauuuaauaacgagagcuucaauugggcuggagugacgcaaaacggcaccucuuccgccugcauuagaggcagcaauucuuccuuuuucagccggcugaacuggcucacacaucugaauuuuaaguauccugcgcuuaacgucaccaugcccaacaaugagcaguucgacaagcuguacaucuggggagugcaccauccugggacagauaaagaccagauuuuucucuaugcccagucuuccggccgcaucaccguuagcacgaagagaucccaacaggcugugauuccgaacaucgggucucggccccgcaucagaaauauuccuagccggaucuccauuuacuggacaaucgucaaacccggagauauucugcugaucaacagcaccggcaaucucaucgccccucgcggguacuucaagauuagaucuggaaaauccagcaucaugcggucugacgcucccauuggcaaguguaagagcgaaugcaucacaccgaacggcuccauuccuaaugacaaacccuuucagaacgugaaucgcaucaccuauggggccuguccuagauacgugaagcagucuacccugaaacuugcgacaggaaugcggaacguccccgagaagcaaacgcgcggcaucuucggggccauugcuggauuuaucgaaaauggcugggaggggaugauggauggaugguauggcuucagacaccagaacagcgagggccgggggcaggccgcugaccugaaauccacccaagccgccauugaucagaucaauggaaagcucaacagacugauuggcaaaacaaaugaaaaguuccaccagaucgagaaggaauuuagcgagguugaagggcgcauucaggaccuugagaaauacguggaggauaccaagaucgaccuguggucuuauaacgcugaacuccuggugacacuggagaaccaacauaccaucgaucucacggacuccgaaaugaauaaacuguucgagaagaccaaaaagcagcuucgggaaaacgcggaggauaugggaaauggcugcuuuaagauuuaccacaaaugugacaacgccugcaucgggagcauuagaaauggcacauaugaucaugacgucuaccgcgacgaggcucugaacaaucgguuccagaucaagggaguggaacucaaaucuggcuacaaggauuggauucuguggaucuccuuugccaucagcugcuuccuucuguguguugcccuccugggguuuauuaugugggcuugccagaaaggaaacaucagauguaauauuugcaucuga

SEQ ID NO: 203475 - RNA, 1701 nt, Artificial Sequence; identical to SEQ ID NO: 202066
  derived and/or modified CDS sequence (opt5) from hemagglutinin__InfluenzaA__AHL95686

SEQ ID NO: 203476 - RNA, 1701 nt, Artificial Sequence; identical to SEQ ID NO: 202066
  derived and/or modified CDS sequence (opt5) from hemagglutinin__InfluenzaA__AHL95698

SEQ ID NO: 203477 - RNA, 1701 nt, Artificial Sequence; identical to SEQ ID NO: 201940
  derived and/or modified CDS sequence (opt5) from hemagglutinin__InfluenzaA__AHL95710

SEQ ID NO: 203478 - RNA, 1701 nt, Artificial Sequence; identical to SEQ ID NO: 203454
  derived and/or modified CDS sequence (opt5) from hemagglutinin__InfluenzaA__AHL95722

SEQ ID NO: 203479 - RNA, 1701 nt, Artificial Sequence; identical to SEQ ID NO: 201930
  derived and/or modified CDS sequence (opt5) from hemagglutinin__InfluenzaA__AHL95734

SEQ ID NO: 203480 - RNA, 1701 nt, Artificial Sequence; identical to SEQ ID NO: 201930
  derived and/or modified CDS sequence (opt5) from hemagglutinin__InfluenzaA__AHL95746

SEQ ID NO: 203481 - RNA, 1701 nt, Artificial Sequence; identical to SEQ ID NO: 202069
  derived and/or modified CDS sequence (opt5) from hemagglutinin__InfluenzaA__AHL95758

SEQ ID NO: 203482 - RNA, 1701 nt, Artificial Sequence; identical to SEQ ID NO: 201940
  derived and/or modified CDS sequence (opt5) from hemagglutinin__InfluenzaA__AHL95770

SEQ ID NO: 203483 - RNA, 1701 nt, Artificial Sequence
  derived and/or modified CDS sequence (opt5) from hemagglutinin__InfluenzaA__AHL95782
augaagaccaucauugcccugagcuacauccucugccugguguucgcucagaaacuucccggcaacgacaauuccacagccacgcugugucucgggcaccaugcggucccuaacggaaccauuguuaagacaaucaccaaugauagaauugaggugacaaacgcuaccgaacuggugcaaaauucuagcaucggcgagaucugcaacuccccgcaccagauucuugacggggaaaauuguacacugaucgaugcccuccugggagacccccagugcgauggcuuucagaacaaaaagugggaccuguucgucgagcggucuaaagccuauagcaauuguuacccuuaugaugugcccgacuacgcuucccuccgcucucugguugccagcuccgggacccuugaauuuaacaaugagagcuucaacuggacgggagugacccaaaauggcacaucuuccgcuugcauuagacggagcaacucuuccuuuuucagccgccugaauuggcucacccaucugaacuuuaaguauccugcccuuaacgucacaaugcccaauaacgagcaguucgauaagcuguacaucuggggcgugcaccauccugggaccgacaaagaucagauuuuucucuaugcgcagucuuccggaagaaucacgguuagcacaaagcggucccaacaggccgugauuccgaauaucggcucucgccccagaauccggaacauuccuagccgcaucuccauuuacuggaccaucgucaaacccggggacauucugcugaucaauagcacaggaaaccucaucgcuccuagaggcuacuucaagauucggucugggaaauccagcaucaugcgcucugaugcccccauuggaaaguguaagagcgaaugcaucaccccgaauggcuccauuccuaacgacaaacccuuucagaaugugaacagaaucaccuauggcgcuuguccucgguacgugaagcagucuacacugaaacuugccacggggaugcgcaauguccccgagaagcaaaccagaggaaucuucggcgcgauugccggguuuaucgaaaacggaugggagggcaugguugacgggugguauggauuccggcaccagaauagcgagggcagaggccaggcugccgaucugaaauccacacaagcugccauugaccagaucaacgggaagcucaaucgccugauuggaaaaaccaacgaaaaguuccaccagaucgagaaggaauuuagcgagguggaaggccggauucaggaucuugagaaauacguggaggacacaaagaucgaucuguggucuuauaacgccgaacuccuggucgcucuggagaaucaacauaccaucgaccucacggauuccgaaaugaacaaacuguucgagaagaccaaaaagcagcuuagagaaaaugcggaggacauggggaacggaugcuuuaagauuuaccacaaaugugauaaugccugcaucggcagcauucgcaacgggacauaugaccaugauguguaccgggacgaggcucugaauaacagauuccagaucaagggcguugaacucaaaucuggauacaaggacuggauucuguggaucuccuuugccaucagcugcuuccuucuguguguggcccuccugggcuuuauuaugugggcuugccagaaagggaauauccgcuguaacauuugcaucuga

SEQ ID NO: 203484 - RNA, 1701 nt, Artificial Sequence
  derived and/or modified CDS sequence (opt5) from hemagglutinin__InfluenzaA__AHL95794
augaagaccaucauugcccugagcuacauccucugccugguguucgcucagaaacuucccggcaacgacaauuccacagccacgcugugucucgggcaccaugcggucccuaacggaaccauuguuaagacaaucaccaaugauagaauugaggugacaaacgcuaccgaacuggugcaaaauucuagcaucggcgagaucugcgacuccccgcaccagauucuugauggggaaaacuguacacugaucgacgcccuccugggagauccccagugcgacggcuuucagaauaaaaagugggaucuguucgucgagcggaacaaagccuauucuaauuguuacccuuaugacgugcccgauuacgcuagccuccgcucccugguugccucuagcgggacccuugaauuuaacaaugaguccuucaacugggcuggagugacgcaaaauggcaccagcucugccugcauuagaggcuccaacagcuccuuuuucucucggcugaauuggcucacacaucugaacuuuaaguauccugcgcuuaacgucaccaugcccaauaacgagcaguucgacaagcuguacaucuggggagugcaccauccugggacagauaaagaccagauuuuucucuaugcccagagcucuggccgcaucaccguuuccacgaagagaagccaacaggcugugauuccgaauaucgggucccggccccgcaucagaaacauuccuucucggaucagcauuuacuggacaaucgucaaacccggagauauucugcugaucaauuccaccggcaaccucaucgccccucgcggguacuucaagauuagaagcggaaaaucuuccaucaugcggagcgacgcucccauuggcaaguguaagucugaaugcaucacaccgaauggcagcauuccuaacgacaaacccuuucagaaugugaaccgcaucaccuauggggccuguccuagauacgugaagcaguccacccugaaacuugcgacaggaaugcggaauguccccgagaagcaaacgcgcggcaucuucggggccauugcuggauuuaucgaaaacggcugggaggggaugguugauggaugguauggcuucagacaccaaaauucugagggccgggggcaggccgcugaccugaaaagcacccaggccgccauugaucagaucaacggaaagcucaauagacugauuggcaaaacaaacgaaaaguuccaccagaucgagaaggaauuuuccgagguggaagggcgcauucaggaccuugagaaauacguggaggauaccaagaucgaccuguggagcuauaacgcugaacuccuggucgcgcuggagaaucaacauacaaucgaucucaccgacucugaaaugaacaaacuguucgagaagacgaaaaagcagcuucgggaaaaugccgaggauaugggaaacggcugcuuuaagauuuaccacaaaugugacaaugcuugcaucggguccauuagaaacggcacauaugaucaugacguguaccgcgacgaggcccugaauaaccgguuccagaucaagggaguugaacucaaaagcggcuacaaggauuggauucuguggaucucuuuugccaucuccugcuuccuucuguguguggcucuccugggguuuauuaugugggccugccagaaaggaaauaucagauguaacauuugcaucuga

SEQ ID NO: 203485 - RNA, 1701 nt, Artificial Sequence
  derived and/or modified CDS sequence (opt5) from hemagglutinin__InfluenzaA__AHL95806
augaagaccaucauugcccugagcuacauccucugccugguguucgcucagaaacuucccggcaacgacaauuccacagccacgcugugucucgggcaccaugcggucccuaacggaaccauuguuaagacaaucaccaaugauagaauugaggugacaaacgcuaccgaacuggugcaaaauucuagcaucggcgagaucugcgacuccccgcaccagauucuugauggggaaaacuguacacugaucgacgcccuccugggagauccccagugcgacggcuuucagaauaaaaagugggaucuguucgucgagcggucuaaagccuauagcaacuguuacccuuaugacgugcccgauuacgcuucccuccgcucucugguugccagcuccgggacccuugaauuuaauaacgagagcuucaauugggcuggagugacgcaaaacggcaccucuuccgccugcauuagaggcagcaauucuuccuuuuucagccggcugaacuggcucacacaucugaauuuuaaguauccugcgcuuaacgucaccaugcccaacaaugagcaguucgacaagcuguacaucuggggagugcaccauccugggacagauaaagaccagauuuuucucuaugcccagucuuccggccgcaucaccguuagcacgaagagaucccaacaggcugugauuccgaacaucgggucucggccccgcaucagaaauauuccuagccggaucuccauuuacuggacaaucgucaaacccggagauauucugcugaucaacagcaccggcaaucucaucgccccucgcggguacuucaagauuagaucuggaaaauccagcaucaugcggucugacgcucccauuggcaaguguaagagcgaaugcaucacaccgaacggcuccauuccuaaugacaaacccuuucagaacgugaaucgcaucaccuauggggccuguccuagauacgugaagcagucuacccugaaacuugcgacaggaaugcggaacguccccgagaagcaaacgcgcggcaucuucggggccauugcuggauuuaucgaaaauggcugggaggggaugguugauggaugguauggcuucagacaccagaacagcgagggccgggggcaggccgcugaccugaaauccacccaagccgccauugaucagaucaauggaaagcucaacagacugauuggcaaaacaaaugaaaaguuccaccagaucgagaaggaauuuagcgagguggaagggcgcauucaggaccuugagaaauacguggaggauaccaagaucgaccuguggucuuauaacgcugaacuccuggucgcgcuggagaaccaacauacaaucgaucucaccgacuccgaaaugaauaaacuguucgagaagacgaaaaagcagcuucgggaaaacgccgaggauaugggaaauggcugcuuuaagauuuaccacaaaugugacaacgcuugcaucgggagcauuagaaauggcacauaugaucaugacguguaccgcgacgaggcccugaacaaucgguuccagaucaagggaguugaacucaaaucuggcuacaaggauuggauucuguggaucuccuuugccaucagcugcuuccuucuguguguggcucuccugggguccauuaugugggccugccagaaaggaaacaucagauguaauauuugcaucuga

SEQ ID NO: 203486 - RNA, 1701 nt, Artificial Sequence; identical to SEQ ID NO: 202066
  derived and/or modified CDS sequence (opt5) from hemagglutinin__InfluenzaA__AHL95818

SEQ ID NO: 203487 - RNA, 1701 nt, Artificial Sequence; identical to SEQ ID NO: 201930
  derived and/or modified CDS sequence (opt5) from hemagglutinin__InfluenzaA__AHL95830

SEQ ID NO: 203488 - RNA, 1701 nt, Artificial Sequence; identical to SEQ ID NO: 202066
  derived and/or modified CDS sequence (opt5) from hemagglutinin__InfluenzaA__AHL95842

SEQ ID NO: 203489 - RNA, 1701 nt, Artificial Sequence; identical to SEQ ID NO: 201930
  derived and/or modified CDS sequence (opt5) from hemagglutinin__InfluenzaA__AHL95854

SEQ ID NO: 203490 - RNA, 1701 nt, Artificial Sequence; identical to SEQ ID NO: 201940
  derived and/or modified CDS sequence (opt5) from hemagglutinin__InfluenzaA__AHL95866

SEQ ID NO: 203491 - RNA, 1701 nt, Artificial Sequence
  derived and/or modified CDS sequence (opt5) from hemagglutinin__InfluenzaA__AHL95878
augaaggccauccuggugauuaugcucuacaccuucgcuacagccaacgcggacacgcugugcaucggcuaucacgcuaauaacagcaccgauacagucgacaccguucuugagaaaaaugugacagugacccauuccgucaaccugcucgaagauaagcacaaugggaaacuguguaaacuuagaggagugucuccccugcaucucggcaagugcaacauugccggguggauccugggaaauccugagugugaaagccuguccacagccucuagcugguccuacauuguugagaccucuggcagcgacaacgggacgugcuauccgggagauuuuaucgacuacgaggagcuccgggagcagcuguccagcgugucuuccuucgaacgcuuugagaucuuccccaagaccagcucuuggccuaaucacgauuccaacaagggcgucacagcugccuguccccaugcuggcgccaaaggguuuuauaagaaucuuauuuggcuggugaaaaagggaaacagcuacccuaaacucucuaucuccuauauuaaugacaagggcaaggaaguucuggugcuuugggggauccaccaccccagcaccacagcggaucaacagucccuguaccagaacgccgacaccuacgucuucgugggaacgucuagauauagcaaaaaguuuaaaccugagauugcuauccggccgaaggugcgcgaucaggagggcagaaugaauuacuauuggacacucgucgaacccggggacaaaauuaccuucgaggccacaggaaaccugguugugccucgguacgcuuuugccauggaacgcaacgcgggcuccggcaucaucauuagcgauacccccgugcaugacugcaauaccacaugucaaacgccuaagggggccaucaacaccucucugcccuuccagaauauucacccgaucacaauuggaaaaugcccuaaguaugucaaguccaccaaacucagacuggcuacaggccuucggaacgugcccagcauccagucucgcgggcuguuuggagccaucgcuggcuucauugaagggggauggaccggcaugguugacggcugguacggguaucaucaccagaaugaacaaggaagcggcuacgccgccgaucucaaguccacgcagaacgcuaucgacaaaauuacaaauaaggugaacucugucaucgagaaaaugaauacccaguuuaccgcgguggggaaggaguucaaccaccuggaaaagagaauugagaaucuuaacaaaaagguugaugacggauuccuggauaucuggacauacaaugccgaacuccuggugcugcucgagaacgaacggacccuggacuaucaugauagcaaugucaaaaaccuuuacgagaaggugcgcaaccagcugaaaaauaacgcuaaggagaucggcaauggguguuuugaguucuaucacaagugcgacaacacauguauggaauccgucaaaaauggcacguacgauuauccuaaguacagcgaagaggccaaacucaacagagaagagauugacggagugaagcuggagucuacccggaucuaucaaauucuugccaucuacuccacagcugccagcucucugguucucguggucucccugggcgcgauuagcuuuuggaugugcuccaaugggucucugcagugccgcaucuguauuuga

SEQ ID NO: 203492 - RNA, 1701 nt, Artificial Sequence; identical to SEQ ID NO: 201940
  derived and/or modified CDS sequence (opt5) from hemagglutinin__InfluenzaA__AHL95889

SEQ ID NO: 203493 - RNA, 1701 nt, Artificial Sequence; identical to SEQ ID NO: 202066
  derived and/or modified CDS sequence (opt5) from hemagglutinin__InfluenzaA__AHL95901

SEQ ID NO: 203494 - RNA, 1701 nt, Artificial Sequence; identical to SEQ ID NO: 202066
  derived and/or modified CDS sequence (opt5) from hemagglutinin__InfluenzaA__AHL95913

SEQ ID NO: 203495 - RNA, 1701 nt, Artificial Sequence
  derived and/or modified CDS sequence (opt5) from hemagglutinin__InfluenzaA__AHL95937
augaagaccaucauugcccugagcuacauccucugccugguguucgcucagaaacuucccggcaacgacaauuccacagccacgcugugucucgggcaccaugcggucccuaacggaaccauuguuaagacaaucaccaaugauagaauugaggugacaaacgcuaccgaacuggugcaaaauucuagcaucggcgagaucugcgacuccccgcaccagauucuugauggggaaaacuguacacugaucgacgcccuccugggagauccccagugcgacggcuuucagaauaaaaagugggaucuguucgucgagcggucuaaagccuauagcaacuguuacccuuaugacgugcccgauuacgcuucccuccgcucucugguugccagcuccgggacccuugaauuuaauaacgagagcuucaauugggcuggagugacgcaaaacggcaccucuuccgccugcauuagaggcagcaauucuuccuuuuucagccggcugaacuggcucacacaucugaauuuuaaguauccugcgcuuaacgucaccaugcccaacaaugagcaguucgacaagcuguacaucuggggagugcaccauccugggacagauaaagaccagauuuuucucuaugcccagucuuccggccgcaucaccguuagcacgaagagaucccaacaggcugugauuccgaacaucgggucucggccccgcaucagaaauauuccuagccggaucuccauuuacuggacaaucgucaaacccggagauauucugcugaucaacagcaccggcaaucucaucgccccucgcggguacuucaagauuagaucuggaaaauccagcaucaugcggucugacgcucccauuggcaaguguaagagcgaaugcaucacaccgaacggcuccauuccuaaugacaaacccuuucagaacgugaaucgcaucaccuauggggccuguccuagauacgugaagcagucuacccugaaacuugcgacaggaaugcggaacguccccgagaagcaaacgcgcggcaucuucggggccauugcuggauuuaucgaaaauggcugggaggggaugguugauggaugguauggcuucagacaccagaacagcgagggccgggggcaggccgcugaccugaaauccacccaagccgccauugaucagaucaauggaaagcucaacagacugauuggcaaaacaaaugaaaaguuccaccagaucgagaaggaauuuagcgagguggaagggcgcauucaggaccuugagaaauacguggaggauaccaagacagaccuguggucuuauaacgcugaacuccuggucgcgcuggagaaccaacauaccaucgaucucacggacuccgaaaugaauaaacuguucgagaagaccaaaaagcagcuucgggaaaacgccgaggauaugggaaauggcugcuuuaagaucuaccacaaaugugacaacgcuugcauugggagcaucagaaauggcacauaugaucaugacguguaccgcgacgaggcccugaacaaucgguuccagauuaagggaguugaacucaaaucuggcuacaaggauuggauccuguggauuuccuuugccaucagcugcuuccuucuguguguggcucuccugggguuuaucaugugggccugccagaaaggaaacauuagauguaauaucugcauuuga

SEQ ID NO: 203496 - RNA, 1701 nt, Artificial Sequence
  derived and/or modified CDS sequence (opt5) from hemagglutinin__InfluenzaA__AHL95949
augaagaccaucauugcccugagcuacauccucugccugguguucgcucagaaacuucccggcaacgacaauuccacagccacgcugugucucgggcaccaugcggucccuaacggaaccauuguuaagacaaucaccaaugauagaauugaggugacaaacgcuaccgaacuggugcaaaauucuagcaucggcgagaucugcgacuccccgcaccagauucuugauggggaaaacuguacacugaucgacgcccuccugggagauccccagugcgacggcuuucagaauaaaaagugggaucuguucgucgagcggucuaaagccuauagcaacuguuacccuuaugacgugcccgauuacgcuucccuccgcucucugguugccagcuccgggacccuugaauuuaauaacgagagcuucaauuggacgggagugacccaaaacggcacaucuuccgcuugcauuagacggagcaauaacuccuuuuucucucgccugaauuggcucacccauagcaacuuuaaguauccugcccugaacaugacaaugcccaauaacgagcaguucgacaaacuuuacaucuggggcguccaccauccugggaccgauaaagaccagauuuuucuguaugcgcagucuuccggaagaaucacggugagcacaaagcggucccaacaggccguuauuccgaauaucggcucucgccccagaauccggaacauuccuagccgcaucuccauuuacuggaccaucgugaaacccggggauauucuccugaucaauagcacaggaaaccugaucgcuccuagaggcuacuucaagauucggucugggaaauccagcaucaugcgcucugacgcccccauuggaaaguguaagagcgaaugcaucaccccgaauggcuccauuccuaacgacaaacccuuucagaaugucaacagaaucaccuauggcgcuuguccucgguacgugaagcagucuacacucaaacuggccacggggaugcgcaaugugcccgagaagcaaaccagaggaaucuucggcgcgauugccggguuuaucgaaaacggaugggagggcaugauggaugggugguauggauuccggcaccagaauagcgagggcagaggccaggcugccgaccuuaaauccacacaagcugccauugaucagaucaacgggaagcugaaucgccucauuggaaaaaccaacgaaaaguuccaccagaucgagaaggaauuuagcgaggucgaaggccggauucaggaccuggagaaauacguugaggauacaaagaucgaccuuuggucuuauaacgccgaacugcucguggcucuggagaaucaacauaccaucgaucugacggacuccgaaaugaacaaacucuucgagaagacaaagaagcagcugagagaaaaugcggaggauauggggaacggaugcuuuaagauuuaccacaaaugugacaaugccugcaucggcagcauucgcaacgggaccuaugaucaugacguguaccgggacgaggcucuuaauaacagauuccagaucaagggcgucgaacugaaaucuggauacaaggauuggauucucuggaucuccuuugccaucagcugcuuccugcuuuguguggcccugcucggcuuuauuaugugggcuugccagaaagggaauauccgcuguaacauuugcaucuga

SEQ ID NO: 203497 - RNA, 1701 nt, Artificial Sequence; identical to SEQ ID NO: 201940
  derived and/or modified CDS sequence (opt5) from hemagglutinin__InfluenzaA__AHL95961

SEQ ID NO: 203498 - RNA, 1701 nt, Artificial Sequence; identical to SEQ ID NO: 201940
  derived and/or modified CDS sequence (opt5) from hemagglutinin__InfluenzaA__AHL95973

SEQ ID NO: 203499 - RNA, 1701 nt, Artificial Sequence; identical to SEQ ID NO: 201940
  derived and/or modified CDS sequence (opt5) from hemagglutinin__InfluenzaA__AHL95985

SEQ ID NO: 203500 - RNA, 1701 nt, Artificial Sequence
  derived and/or modified CDS sequence (opt5) from hemagglutinin__InfluenzaA__AHL95997
augaagaccaucauugcccugagcuacauccucugccugguguucgcucagaaacuucccggcaacgacaauuccacagccacgcugugucucgggcaccaugcggucccuaacggaaccauuguuaagacaaucaccaaugauagaauugaggugacaaacgcuaccgaacuggugcaaaauucuagcaucggcgagaucugcgacuccccgcaccagauucuugauggggaaaacuguacacugaucgacgcccuccugggagauccccagugcgacggcuuucagaauaaaaagugggaucuguucgucgagcggucuaaagccuauagcaacuguuacccuuaugacgugcccgauuacgcuucccuccgcucucugguugccagcuccgggacccuugaauuuaauaacgagagcuucaauugggcuggagugacgcaaaacggcaccucuuccagcugcauuagaggcucuaaguccagcuuuuucucucggcugaauuggcucacacaucugaacuuuaaguauccugcccuuaaugucaccaugcccaacaacgagcaguucgacaaacuguacaucuggggagugcaccauccugggacagauaaggaccagauuuuucucuaugcgcaguccagcggccgcaucaccguuuccacgaaaagaucucaacaggccgugauuccgaauaucgggagccggccccgcaucagaaacauuccuucccggaucagcauuuacuggacaaucgucaagcccggagauauucugcugaucaauucuaccggcaaccucaucgcuccucgcggguacuucaaaauuagauccggaaagagcucuaucaugcggagcgacgcccccauuggcaaguguaaauccgaaugcaucacaccgaauggcucuauuccuaacgacaagcccuuucagaaugugaaccgcaucaccuauggggcuuguccuagauacgugaaacagagcacccugaagcuggccacaggaaugcggaauguccccgagaaacaaacgcgcggcaucuucggggcgauugccggauuuaucgaaaacggcugggaggggaugauggauggaugguauggcuucagacaccaaaauuccgagggccgggggcaggcugccgaccuuaagagcacccaggcugccauugaucagaucaacggaaaacucaauagacugauuggcaagacaaacgaaaaguuccaccagaucgagaaagaauuuucugagguugaagggcgcauucaggaccuugagaaguacguggaggauaccaaaaucgaccugugguccuauaaugccgaacuccugguggcucuggagaaccaacauacaaucgaucucaccgacagcgaaaugaacaagcuguucgagaaaacgaagaagcagcuucgggaaaaugcggaggauaugggaaacggcugcuuuaaaauuuaccacaagugugacaaugccugcaucgggucuauuagaaacggcacauaugaucaugacgucuaccgcgacgaggcucugaauaaccgguuccagaucaaaggaguggaacucaaguccggcuacaaagauuggauucuguggaucagcuuugccaucuccugcuuccuucuguguguugcccuccugggguuuauuaugugggcuugccagaagggaaauaucagauguaacauuugcaucuga

SEQ ID NO: 203501 - RNA, 1701 nt, Artificial Sequence
  derived and/or modified CDS sequence (opt5) from hemagglutinin__InfluenzaA__AHL96021
augaagaccaucauugcccugagcuacauccucugccugguguucgcucagaaacuucccggcaacgacaauuccacagccacgcugugucucgggcaccaugcggucccuaacggaaccauuguuaagacaaucaccaaugauagaauugaggugacaaacgcuaccgaacuggugcaaaauucuagcaucggcgagaucugcgacuccccgcaccagauucuugauggggaaaacuguacacugaucgacgcccuccugggagauccccagugcgacggcuuucagaauaaaaagugggaucuguucgucgagcggucuaaagccuauagcaacuguuacccuuaugacgugcccgauuacgcuucccuccgcucucugguugccagcuccgggacccuugaauuuaauaacgagagcuucaauugggcuggagugacgcaaaacggcaccucuuccgccugcauuagaggcagcaagucuuccuuuuucagccggcugaauuggcucacacaucugaacuuuaaguauccugcgcuuaaugucaccaugcccaacaacgagcaguucgacaaacuguacaucuggggagugcaccauccugggacagauaaggaccagauuuuucucuaugcccagucuuccggccgcaucaccguuagcacgaaaagaucccaacaggcugugauuccgaauaucgggucucggccccgcaucagaaacauuccuagccggaucuccauuuacuggacaaucgucaagcccggagauauucugcugaucaauagcaccggcaaccucaucgccccucgcggguacuucaaaauuagaucuggaaaguccagcaucaugcggucugacgcucccauuggcaaguguaaaagcgaaugcaucacaccgaauggcuccauuccuaacgacaagcccuuucagaaugugaaccgcaucaccuauggggccuguccuagauacgugaaacagucuacccugaaacuugcgacaggaaugcggaauguccccgagaagcaaacgcgcggcaucuucggggccauugcuggauuuaucgaaaacggcugggaggggaugauggauggaugguauggcuucagacaccagaauagcgagggccgggggcaggccgcugaccugaaguccacccaagccgccauugaucagaucaacggaaaacucaauagacugauuggcaagacaaacgaaaaguuccaccagaucgagaaagaauuuagcgagguugaagggcgcauucaggaccuugagaaguacguggaggauaccaaaaucgaccuguggucuuauaaugcugaacuccugguggcgcuggagaaccaacauacaaucgaucucaccgacuccgaaaugaacaagcuguucgagaaaacgaagaagcagcuucgggaaaaugccgaggauaugggaaacggcugcuuuaaaauuuaccacaagugugacaaugcuugcaucgggagcauuagaaacggcacauaugaucaugacgucuaccgcgacgaggcccugaauaaccgguuccagaucaaaggaguggaacucaagucuggcuacaaagauuggauucuguggaucuccuuugccaucagcugcuuccuucuguguguugcucuccugggguuuauuaugugggccugccagaagggaaauaucagauguaacauuugcaucuga

SEQ ID NO: 203502 - RNA, 1701 nt, Artificial Sequence; identical to SEQ ID NO: 201940
  derived and/or modified CDS sequence (opt5) from hemagglutinin__InfluenzaA__AHL96033

SEQ ID NO: 203503 - RNA, 1701 nt, Artificial Sequence; identical to SEQ ID NO: 202195
  derived and/or modified CDS sequence (opt5) from hemagglutinin__InfluenzaA__AHL96045

SEQ ID NO: 203504 - RNA, 1701 nt, Artificial Sequence; identical to SEQ ID NO: 202066
  derived and/or modified CDS sequence (opt5) from hemagglutinin__InfluenzaA__AHL96056

SEQ ID NO: 203505 - RNA, 1701 nt, Artificial Sequence; identical to SEQ ID NO: 201930
  derived and/or modified CDS sequence (opt5) from hemagglutinin__InfluenzaA__AHL96068

SEQ ID NO: 203506 - RNA, 1701 nt, Artificial Sequence; identical to SEQ ID NO: 201940
  derived and/or modified CDS sequence (opt5) from hemagglutinin__InfluenzaA__AHL96080

SEQ ID NO: 203507 - RNA, 1701 nt, Artificial Sequence
  derived and/or modified CDS sequence (opt5) from hemagglutinin__InfluenzaA__AHL96092
augaagaccaucauugcccugagcuacauccucugccugguguucgcucagaaacuucccggcaacgacaauuccacagccacgcugugucucgggcaccaugcggucccuaacggaaccauuguuaagacaaucaccaaugauagaauugaggugacaaacgcuaccgaacuggugcaaaauucuagcaucggcgagaucugcgacuccccgcaccagauucuugauggggaaaacuguacacugaucgacgcccuccugggagauccccagugcgacggcuuucagaauaaaaagugggaucuguucauugagcggucuaaagccuauagcaacuguuacccuuaugacguccccgauuacgcuucccuccgcucucugguggccagcuccgggacccuugaauuuaauaacgagagcuucaauugggcuggaguuacgcaaaacggcaccucuuccgccugcaucagaggcagcaauucuuccuuuuucagccggcugaacuggcucacacaucugaauuuuaaguauccugcgcuuaacgugaccaugcccaacaaugagcaguucgacaagcuguacauuuggggaguccaccauccugggacagauaaagaccagaucuuucucuaugcccagucuuccggccgcauuaccgugagcacgaagagaucccaacaggcuguuaucccgaacaucgggucucggccccgcauuagaaauaucccuagccggauuuccaucuacuggacaauugugaaacccggagauauccugcugaucaacagcaccggcaaucucauugccccucgcggguacuucaagaucagaucuggaaaauccagcauuaugcggucugacgcucccaucggcaaguguaagagcgaaugcauuacaccgaacggcuccaucccuaaugacaaacccuuucagaacgucaaucgcaucaccuauggggccuguccuagauacgugaagcagucuacccugaaacuugcgacaggaaugcggaacgugcccgagaagcaaacgcgcggcauuuucggggccaucgcuggauuuauugaaaauggcugggaggggauggucgauggaugguauggcuucagacaccagaacagcgagggccgggggcaggccgcugaccugaaauccacccaagccgccaucgaucagauuaauggaaagcucaacagacugaucggcaaaacaaaugaaaaguuccaccagauugagaaggaauuuagcgagguugaagggcgcauccaggaccuugagaaauacguggaggauaccaagaucgaccuguggucuuauaacgcugaacuccugguggcgcuggagaaccaacauacaauugaucucaccgacuccgaaaugaauaaacuguucgagaagacgaaaaagcagcuucgggaaaacgccgaggauaugggaaauggcugcuuuaagaucuaccacaaaugugacaacgcuugcauugggagcaucagaaauggcacauaugaucaugacgucuaccgcgacgaggcccugaacaaucgguuccagauuaagggaguggaacucaaaucuggcuacaaggauuggauccuguggaucuccuuugccauuagcugcuuccuucuguguguugcucuccugggguuuaucaugugggccugccagaaaggaaacauuagauguaauaucugcauuuga

SEQ ID NO: 203508 - RNA, 1701 nt, Artificial Sequence
  derived and/or modified CDS sequence (opt5) from hemagglutinin__InfluenzaA__AHL96104
augaagaccaucauugcccugagcuacauccucugccugguguucgcucagaaacuucccggcaacgacaauuccacagccacgcugugucucgggcaccaugcggucccuaacggaaccauuguuaagacaaucaccaaugauagaauugaggugacaaacgcuaccgaacuggugcaaaauucuagcaucggcgagaucugcgacuccccgcaccagauucuugauggggaaaacuguacacugaucgacgcccuccugggagauccccagugcgacggcuuucagaauaaaaagugggaucuguucgucgagcggucuaaagccuauagcaacuguuacccuuaugacgugcccgauuacgcuucccuccgcucucugguugccagcuccgggacccuugaauuuaauaacgagagcuucaauuggacgggagugacccaaaacggcacaucuuccgcuugcauuagacggagcaauucuuccuuuuucagccgccugaacuggcucacccaucugaauuuuaaguauccugcccuuaacgucacaaugcccaacaaugagcaguucgacaagcuguacaucuggggcgugcaccauccugggaccgauaaagaccagauuuuucucuaugcgcagucuuccggaagaaucacgguuagcacaaagcggucccaacaggccgugauuccgaacaucggcucucgccccagaauccggaauauuccuagccgcaucuccauuuacuggaccaucgucaaacccggggauauucugcugaucaacagcacaggaaaucucaucgcuccuagaggcuacuucaagauucggucugggaaauccagcaucaugcgcucugacgcccccauuggaaaguguaagagcgaaugcaucaccccgaacggcuccauuccuaaugacaaacccuuucagaacgugaauagaaucaccuauggcgcuuguccucgguacgugaagcagucuacacugaaacuugccacggggaugcgcaacguccccgagagacaaacccggggaaucuucggcgcgauugccggguuuaucgaaaauggaugggagggcaugguugaugggugguauggauucagacaccagaacagcgagggccgcggccaggcugccgaccugaaguccacacaagcugccauugaucagaucaaugggaaacucaaccggcugauuggaaagaccaaugaaaaauuccaccagaucgagaaggaauuuagcgagguggaaggccgcauucaggaccuugagaaguacguggaggauacaaaaaucgaccuguggucuuauaacgccgaacuccuggucgcucuggagaaccaacauaccaucgaucucacggacuccgaaaugaauaagcuguucgagaaaacaaagaaacagcuuagagaaaacgcggaggauauggggaauggaugcuuuaagauuuaccacaagugugacaacgccugcaucggcagcauucggaaugggaccuaugaucauaacguguacagagacgaggcucugaauaaccgcuuccagaucaaaggcguugaacucaagucuggauacaaagacuggauucuguggaucuccuuugccaucagcugcuuccuucuguguguggcccuccugggcuuuauuaugugggcuugccagaaggggaauauccgguguaacauuugcaucuga

SEQ ID NO: 203509 - RNA, 1701 nt, Artificial Sequence; identical to SEQ ID NO: 202554
  derived and/or modified CDS sequence (opt5) from hemagglutinin__InfluenzaA__AHL96116

SEQ ID NO: 203510 - RNA, 1701 nt, Artificial Sequence; identical to SEQ ID NO: 201930
  derived and/or modified CDS sequence (opt5) from hemagglutinin__InfluenzaA__AHL96128

SEQ ID NO: 203511 - RNA, 1701 nt, Artificial Sequence; identical to SEQ ID NO: 202066
  derived and/or modified CDS sequence (opt5) from hemagglutinin__InfluenzaA__AHL96152

SEQ ID NO: 203512 - RNA, 1701 nt, Artificial Sequence
  derived and/or modified CDS sequence (opt5) from hemagglutinin__InfluenzaA__AHL96164
augaagaccaucauugcccugagcuacauccucugccugguguucgcucagaaacuucccggcaacgacaauuccacagccacgcugugucucgggcaccaugcggucccuaacggaaccauuguuaagacaaucaccaaugauagaauugaggugacaaacgcuaccgaacuggugcaaaauucuagcaucggcgagaucugcgacuccccgcaccagauucuugauggggaaaacuguacacugaucgacgcccuccugggagauccccagugcgacggcuuucagaauaaaaagugggaucuguucgucgagcggucuaaagccuauagcaacuguuacccuuaugacgugcccgauuacgcuucccuccgcucucugguugccagcuccgggacccuugaauuuaauaacgagagcuucaauugggcuggagugacgcaaaacggcaccucuuccgccugcauuagaggcagcaauucuuccuuuuucagccggcugaacuggcucacacaucugaauuuuaaguauccugcgcuuaacgucaccaugcccaacaaugagcaguucgacaagcuguacaucuggggagugcaccauccugggacagauaaagaccagauuuuucucuaugcccagucuuccggccgcaucaccguuagcacgaagagaucccaacaggcugugauuccgaacaucgggucucggccccgcaucagaaauauuccuagccggaucuccauuuacuggacaaucgucaaacccggagauauucugcugaucaacagcaccggcaaucucaucgccccucgcggguacuucaagauuagaucuggaaaauccagcaucaugcggucugacgcucccauuggcaaguguaagagcgaaugcaucacaccgaacggcuccauuccuaaugacaaacccuuucagaacgugaaucgcaucaccuauggggccuguccuagauacgugaagcagucuacccugaaacuugcgacaggaaugcggaacguccccgagaagcaaacgcgcggcaucuucggggccauugcuggauuuaucgaaaauggcugggaggggaugguugauggaugguauggcuucagacaccagaacagcgagggccgggggcaggccgcugaccugaaauccacccaagccgccauugaucagaucaauggaaagcucaacagacugauuggcaaaacaaaugaaaaguuccaccagaucgagaaggaauuuagcgagguggaagggcgcauucaggaccuugagaaauacguggaggauaccaagaucgaccuguggucuuauaacgcugaacuccuggucgcgcuggagaaccaacauacaaucgaucucaccgacuccgaaaugaauaaacuguucgagaagacgaaaaagcagcuucgggaaaacgccgaggauaugggaaauggcugcuuuaagauuuaccacaaaugugacaacgcuugcaucgggagcauuagaaauggcacauaugaucaugacguguaccgcgacgaggcccugaacaaucgguuccagaucaagggaguugaacucaaaucuggcuacaagaacuggauucuguggaucuccuuugccaucagcugcuuccuucuguguguggcucuccugggguuuauuaugugggccugccagaaaggaaauaucagauguaacauuugcaucuga

SEQ ID NO: 203513 - RNA, 1701 nt, Artificial Sequence; identical to SEQ ID NO: 202066
  derived and/or modified CDS sequence (opt5) from hemagglutinin__InfluenzaA__AHL96176

SEQ ID NO: 203514 - RNA, 1701 nt, Artificial Sequence; identical to SEQ ID NO: 202066
  derived and/or modified CDS sequence (opt5) from hemagglutinin__InfluenzaA__AHL96188

SEQ ID NO: 203515 - RNA, 1701 nt, Artificial Sequence
  derived and/or modified CDS sequence (opt5) from hemagglutinin__InfluenzaA__AHL96200
augaagaccaucauugcccugagcuacauccucugccugguguucgcucagaaacuucccggcaacgacaauuccacagccacgcugugucucgggcaccaugcggucccuaacggaaccauuguuaagacaaucaccaaugauagaauugaggugacaaacgcuaccgaacuggugcaaaauucuagcaucggcgagaucugcgacuccccgcaccagguccuugauggggaaaacuguacacugauugacgcccuccugggagauccccagugcgacggcuuucagaauaaaaagugggaucuguucguggagcggucuaaagccuauagcaacuguuacccuuaugacguucccgauuacgcuucccuccgcucucugguggccagcuccgggacccuugaauuuaauaacgagagcuucaauugggcuggagucacgcaaaacggcaccucuuccgccugcaucagaggcagcaauucuuccuuuuucagccggcugaacuggcucacacaucugaauuuuaaguauccugcgcuuaacgugaccaugcccaacaaugagcaguucgacaagcuguacauuuggggaguucaccauccugggacagauaaagaccagaucuuucucuaugcccagucuuccggccgcauuaccgugagcacgaagagaucccaacaggcugucaucccgaacauugggucucggccccgcaucagaaauaucccuagccggauuuccaucuacuggacaauugugaaacccggagauauccugcugauuaacagcaccggcaaucucaucgccccucgcggguacuucaagaucagaucuggaaaauccagcauuaugcggucugacgcucccaucggcaaguguaagagcgaaugcauuacaccgaacggcuccaucccuaaugacaaacccuuucagaacgugaaucgcauuaccuauggggccuguccuagauacgucaagcagucuacccugaaacuugcgacaggaaugcggaacguucccgagaagcaaacgcgcggcaucuucggggccaucgcuggauuuauugaaaauggcugggaggggaugguggauggaugguauggcuucagacaccagaacagcgagggccgggggcaggccgcugaccugaaauccacccaagccgccaucgaucagauuaauggaaagcucaacagacugaucggcaaaacaaaugaaaaguuccaccagauugagaaggaauuuagcgagguggaagggcgcauccaggaccuugagaaauacgucgaggauaccaagauugaccuguggucuuauaacgcugaacuccugguggcgcuggagaaccaacauacaaucgaucucaccgacuccgaaaugaauaaacuguucgagaagacgaaaaagcagcuucgggaaaacgccgaggauaugggaaauggcugcuuuaagaucuaccacaaaugugacaacgcuugcauugggagcaucagaaauggcacauaugaucaugacguuuaccgcgacgaggcccugaacaaucgguuccagauuaagggaguggaacucaaaucuggcuacaaggauuggauccuguggauuuccuuugccaucagcugcuuccuucugugugucgcucuccugggguuuaucaugugggccugccagaaaggaaacauuagauguaauaucugcauuuga

SEQ ID NO: 203516 - RNA, 1701 nt, Artificial Sequence; identical to SEQ ID NO: 201930
  derived and/or modified CDS sequence (opt5) from hemagglutinin__InfluenzaA__AHL96212

SEQ ID NO: 203517 - RNA, 1701 nt, Artificial Sequence; identical to SEQ ID NO: 202539
  derived and/or modified CDS sequence (opt5) from hemagglutinin__InfluenzaA__AHL96224

SEQ ID NO: 203518 - RNA, 1701 nt, Artificial Sequence
  derived and/or modified CDS sequence (opt5) from hemagglutinin__InfluenzaA__AHL96236
augaagaccaucauugcccugagcuacauccucugccugguguucgcucagaaacuucccggcaacgacaauuccacagccacgcugugucucgggcaccaugcggucccuaacggaaccauuguuaagacaaucaccaaugauagaauugaggugacaaacgcuaccgaacuggugcaaaauucuagcaugggcgagaucugcgacuccccgcaccagauccuugauggggaaaacuguacacugauugacgcccuccugggagauccccagugcgacggcuuucagaauaaaaagugggaucuguucgucgagcggucuaaagccuauagcaacuguuacccuuaugacgugcccgauuacgcuucccuccgcucucugguugccagcuccgggacccuugaauuuaauaacgagagcuucaauuggacgggagugacccaaaacggcacaucuuccgcuugcaucagacggagcaauucuuccuuuuucagccgccugaacuggcucacccaucugaauuuuaaguauccugcccuuaacgucacaaugcccaacaaugagcaguucgacaagcuguacauuuggggcgugcaccauccugggaccgauaaagaccagaucuuucucuaugcgcagucuuccggaagaauuacgguuagcacaaagcggucccaacaggccgugaucccgaacauuggcucucgccccagaauccggaauaucccuagccgcauuuccaucuacuggaccauugucaaacccggggauauccugcugauuaacagcacaggaaaucucaucgcuccuagaggcuacuucaagauccggucugggaaauccagcauuaugcgcucugacgcccccaucggaaaguguaagagcgaaugcauuaccccgaacggcuccaucccuaaugacaaacccuuucagaacgugaauagaauuaccuauggcgcuuguccucgguacgugaagcagucuacacugaaacuugccacggggaugcgcaacguccccgagaagcaaaccagaggaaucuucggcgcgaucgccggguuuauugaaaauggaugggagggcaugguugaugggugguauggauuccggcaccagaacagcgagggcagaggccaggcugccgaccugaaauccacacaagcugccaucgaucagauuaaugggaagcucaaccgccugaucggaaaaaccaaugaaaaguuccaccagauugagaaggaauuuagcgagguggaaggccggauccaggaccuugagaaauacguggaggauacaaagauugaccuguggucuuauaacgccgaacuccuggucgcucuggagaaccaacauaccaucgaucucacggacuccgaaaugaauaaacuguucgagaagaccaaaaagcagcuuagagaaaacgcggaggauauggggaauggaugcuuuaagaucuaccacaaaugugacaacgccugcauugagagcauccgcaauggcacauaugaucaugacguguaccgggacgaagcucugaacaauagauuccagauuaaggggguugagcucaaaucuggcuacaagaacuggauccuguggauuuccuuugccaucagcugcuuccuucuguguguggcccuccugggauuuaucaugugggcuugccagaaaggcaauauucgcuguaacaucugcauuuga

SEQ ID NO: 203519 - RNA, 1701 nt, Artificial Sequence
  derived and/or modified CDS sequence (opt5) from hemagglutinin__InfluenzaA__AHL96248
augaagaccaucauugcccugggcuacauccucugccugguguucgcucagaaacuucccgggaacgacaauagcacagccacgcugugucucggacaccaugcggucccuaacggcaccauuguuaagacaaucaccaaugauagaauugaggugacaaacgcuaccgaacuggugcaaaauuccucuaucggggagaucugcgacagcccgcaccagauucuugauggagaaaacuguacacugaucgacgcccuccugggcgauccccagugcgacggguuucagaauaaaaagugggaucuguucauugagcgguccaaagccuauucuaacuguuacccuuaugacguccccgauuacgcuagccuccgcucccugguggccucuagcggaacccuugaauuuaauaacgaguccuucaauuggacgggcguuacccaaaacggcacaagcucugcuugcaucagacgguccaauagcuccuuuuucucucgccugaacuggcucacccaucugaauuuuaaguauccugcccuuaacgugacaaugcccaacaaugagcaguucgacaagcuguacauuuggggaguccaccauccugggaccgauaaagaccagaucuuucucuaugcgcagagcucuggcagaauuacgguguccacaaagcggagccaacaggccguuaucccgaacaucgggucccgcccccggauuagaaauaucccuucucgcauuagcaucuacuggaccauugugaaacccggagauauccugcugaucaacuccacaggcaaucucauugcuccuagaggguacuucaagauccggagcggaaaaucuuccauuaugcgcagcgacgcccccaucggcaaguguaagucugaaugcauuaccccgaacggcagcaucccuaaugacaaacccuuucagaacgucaauagaaucaccuauggggcuuguccucgguacgugaagcaguccacacugaaacuugccacgggaaugcgcaacgugcccgagaagcaaaccagaggcauuuucggggcgaucgccggauuuauugaaaauggcugggaggggauggucgauggaugguauggcuuccggcaccagaacucugagggcagagggcaggcugccgaccugaaaagcacacaagcugccaucgaucagauuaauggaaagcucaaccgccugaucggcaaaaccaaugaaaaguuccaccagauugagaaggaauuuuccgagguugaagggcggauccaggaccuugagaaauacguggaggauacaaagaucgaccuguggagcuauaacgccgaacuccugguggcucuggagaaccaacauaccauugaucucacggacucugaaaugaauaaacuguucgagaagaccaaaaagcagcuuagagaaaacgcggaggauaugggaaauggcugcuuuaagaucuaccacaaaugugacaacgccugcauuggguccauccgcaauggcacauaugaucaugacgucuaccgggacgaggcucugaacaauagauuccagauuaagggaguggaacucaaaagcggcuacaaggauuggauccuguggaucucuuuugccauuuccugcuuccuucuguguguugcccuccugggguuuaucaugugggcuugccagaaaggaaacauucgcuguaauaucugcauuuga

SEQ ID NO: 203520 - RNA, 1701 nt, Artificial Sequence; identical to SEQ ID NO: 202066
  derived and/or modified CDS sequence (opt5) from hemagglutinin__InfluenzaA__AHL96260

SEQ ID NO: 203521 - RNA, 1701 nt, Artificial Sequence; identical to SEQ ID NO: 201930
  derived and/or modified CDS sequence (opt5) from hemagglutinin__InfluenzaA__AHL96274

SEQ ID NO: 203522 - RNA, 1701 nt, Artificial Sequence; identical to SEQ ID NO: 202066
  derived and/or modified CDS sequence (opt5) from hemagglutinin__InfluenzaA__AHL96304

SEQ ID NO: 203523 - RNA, 1701 nt, Artificial Sequence; identical to SEQ ID NO: 201907
  derived and/or modified CDS sequence (opt5) from hemagglutinin__InfluenzaA__AHL96318

SEQ ID NO: 203524 - RNA, 1701 nt, Artificial Sequence; identical to SEQ ID NO: 202066
  derived and/or modified CDS sequence (opt5) from hemagglutinin__InfluenzaA__AHL96330

SEQ ID NO: 203525 - RNA, 1701 nt, Artificial Sequence; identical to SEQ ID NO: 202069
  derived and/or modified CDS sequence (opt5) from hemagglutinin__InfluenzaA__AHL96342

SEQ ID NO: 203526 - RNA, 1701 nt, Artificial Sequence
  derived and/or modified CDS sequence (opt5) from hemagglutinin__InfluenzaA__AHL96354
augaagaccaucauugcccugagcuacauccucugccugguguucgcucagaaacuucccggcaacgacaauuccacagccacgcugugucucgggcaccaugcggucccuaacggaaccauuguuaagacaaucaccaaugauagaauugaggugacaaacgcuaccgaacuggugcaaaauucuagcaucggcgagaucugcgacuccccgcaccagauucuugauggggaaaacuguacacugaucgacgcccuccugggagauccccagugcgacggcuuucagaauaaaaagugggaucuguucgucgagcggucuaaagccuauagcaacuguuacccuuaugacgugcccgauuacgcuucccuccgcucucugguugccagcuccgggacccuugaauuuaauaacgagagcuucaauugggcuggagugacgcaaaacggcaccucuuccgccugcauuagaggcagcaauucuuccuuuuucagccggcugaacuggcucacacaucugaauuuuaaguauccugcgcuuaacgucaccaugcccaacaaugagcaguucgacaagcuguacaucuggggagugcaccauccugggacagauaaagaccagauuuuucucuaugcccagucuuccggccgcaucaccguuagcacgaagagaucccaacaggcugugauuccgaacaucgggucucggccccgcaucagaaauauuccuagccggaucuccauuuacuggacaaucgucaaacccggagauauucugcugaucaacagcaccggcaaucucaucgccccucgcggguacuucaagauuagaucuggaaaauccagcaucaugcggucugacgcucccauuggcaaguguaagagcgaaugcaucacaccgaacggcuccauuccuaaugacaaacccuuucagaacgugaaucgcaucaccuauggggccuguccuagauacgugaagcagucuacccugaaacuugcgacaggaaugcggaacguccccgagaagcaaacgcgcggcaucuucggggccauugcuggauuuaucgaaaauggcugggaggggaugguugauggaugguauggcuucagacaccugaacagcgagggccgggggcaggccgcugaccucaaauccacccaggccgccauugaucaaaucaauggaaagcugaacagacuuauuggcaaaacaaaugaaaaguuccaccagaucgagaaggaauuuagcgagguggaagggcgcauucaggaccuggagaaauacguggaggauaccaagaucgaccucuggucuuauaacgcugaacugcuggucgcgcucgagaaccagcauacaaucgaucugaccgacuccgaaaugaauaaacuuuucgagaagacgaaaaagcaacugcgggaaaacgccgaggauaugggaaauggcugcuuuaagauuuaccacaaaugugacaacgcuugcaucgggagcauuagaaauggcacauaugaucaugacguguaccgcgacgaggcccucaacaaucgguuccagaucaagggaguugaacugaaaucuggcuacaaggauuggauucuuuggaucuccuuugccaucagcugcuuccugcucuguguggcucugcugggguuuauuaugugggccugccagaaaggaaacaucagauguaauauuugcaucuga

SEQ ID NO: 203527 - RNA, 1701 nt, Artificial Sequence
  derived and/or modified CDS sequence (opt5) from hemagglutinin__InfluenzaA__AHL96366
augaagaccaucauugcccugagcuacauccucugccugguguucgcucagaaacuucccgagaacgacaauuccacagccacgcugugucucggccaccaugcggucccuaacgggaccauuguuaagacaaucaccaaugauagaauugaagugacaaacgcuaccgagcuggugcaaaauucuagcaucggagaaaucugcgacuccccgcaccagauucuugauggcgagaacuguacacugaucgacgcccuccugggggauccccagugcgacggauuucagaauaaaaagugggaucuguucgucgaacggucuaaagccuauagcaacuguuacccuuaugacgugcccgauuacgcuucccuccgcucucugguugccagcuccggcacccuugaguuuaauaacgagagcuucaauugggcuggggugacgcaaaacggaaccucuuccgccugcauuagaggcagcaauucuuccuuuuucagccggcugaacuggcucacacaucugaauuuuaaguauccugcgcuuaacgucaccaugcccaacaaugaacaguucgacaagcuguacaucuggggcgugcaccauccugggacagauaaagaccagauuuuucucuaugcccagucuuccggacgcaucaccguuagcacgaagagaucccaacaggcugugauuccgaacaucggcucucggccccgcaucagaaauauuccuagccggaucuccauuuacuggacaaucgucaaacccggggauauucugcugaucaacagcaccggaaaucucaucgccccucgcggcuacuucaagauuagaucugggaaauccagcaucaugcggucugacgcucccauuggaaaguguaagagcgagugcaucacaccgaacggcuccauuccuaaugacaaacccuuucagaacgugaaucgcaucaccuauggcgccuguccuagauacgugaagcagucuacccugaaacuugcgacagggaugcggaacguccccgaaaagcaaacgcgcggaaucuucggcgccauugcuggguuuaucgagaauggaugggagggcaugguugaugggugguauggauucagacaccagaacagcgaaggccggggccaggccgcugaccugaaauccacccaagccgccauugaucagaucaaugggaagcucaacagacugauuggaaaaacaaaugagaaguuccaccagaucgaaaaggaguuuagcgaaguggagggccgcauucaggaccuugagaaauacguggaagauaccaagaucgaccuguggucuuauaacgcugagcuccuggucgcgcuggaaaaccaacauacaaucgaucucaccgacuccgagaugaauaaacuguucgaaaagacgaaaaagcagcuucgggagaacgccgaggauauggggaauggaugcuuuaagauuuaccacaaaugugacaacgcuugcaucggcagcauuagaaaugggacauaugaucaugacguguaccgcgacgaagcccugaacaaucgguuccagaucaagggcguugagcucaaaucuggauacaaggauuggauucuguggaucuccuuugccaucagcugcuuccuucuguguguggcucuccugggcuuuauuaugugggccugccagaaagggaacaucagauguaauauuugcaucuga

SEQ ID NO: 203528 - RNA, 1701 nt, Artificial Sequence; identical to SEQ ID NO: 201940
  derived and/or modified CDS sequence (opt5) from hemagglutinin__InfluenzaA__AHL96378

SEQ ID NO: 203529 - RNA, 1701 nt, Artificial Sequence; identical to SEQ ID NO: 201930
  derived and/or modified CDS sequence (opt5) from hemagglutinin__InfluenzaA__AHL96390

SEQ ID NO: 203530 - RNA, 1701 nt, Artificial Sequence
  derived and/or modified CDS sequence (opt5) from hemagglutinin__InfluenzaA__AHL96402
augaagaccaucauugcccugagcuacauccucugccugguguucgcucagaaaauucccggcaacgacaauuccacagccacgcuuugucuggggcaccaugcggucccuaacggaaccaucguuaagacaauuaccaaugauagaaucgaggugacaaacgcuaccgaacucgugcaaaauucuagcaucggcgagauuugcgacuccccgcaccagauccuggauggggaaaacuguacacuuauugacgcccugcucggagauccccagugcgacggcuuucagaauaaaaagugggaucuguucgucgagcggucuaaagccuauagcaacuguuacccuuaugacgugcccgauuacgcuucccugcgcucucucguugccagcuccgggacccuggaauuuaauaacgagagcuucaauuggacgggagugacccaaaacggcacaucuuccgcuugcaucagaggcagcaauucuuccuuuuucagccggcuuaacuggcugacccaucucaauuuuaaguauccugcccugaacgucacaaugcccaacaaugagcaguucgacaaacuuuacauuuggggagugcaccauccugggaccgauaaagaccagaucuuucuguaugcgcagucuuccggccgcauuacgguuagcacaaagagaucccaacaggccgugaucccgaacaucgggucucggccccgcauuagaaauaucccuagccggauuuccaucuacuggaccauugucaaacccggagauauccuccugaucaacagcacaggcaaucugauugcuccucgcggguacuucaagaucagaucuggaaaauccagcauuaugcggucugacgcccccaucggcaaguguaagagcgaaugcauuaccccgaacggcuccaucccuaaugacaaacccuuucagaacgugaaucgcaucaccuauggggcuuguccuagauacgugaagcagucuacacucaaacuggccacgggaaugcggaacguccccgagaagcaaacccgcggcauuuucggggcgaucgccggauuuauugaaaauggcugggaggggaugguugauggaugguauggcuucagacaccagaacagcgagggccgggggcaggcugccgaccuuaaauccacacaagcugccaucgaucagauuaauggaaagcugaacagacucaucggcaaaaccaauaagaaguuccaccagauugaaaaagaguuuagcgaaguggaggggcgcauccaggaccuggaaaaguacguggaggauacaaaaaucgaccuuuggucuuauaacgccgagcugcucgucgcucuggaaaaccaacauaccauugaucugacggacuccgagaugaauaaacucuucgaaaagacaaagaagcagcugcgggagaacgcggaagauaugggaaauggcugcuuuaagaucuaccacaagugugacaacgccugcauugggagcaucagaaauggcaccuaugaucaugacguguaccgcgacgaggcucuuaacaaucgguuccagauuaaaggaguugagcugaagucuggcuacaaagauuggauccucuggaucuccuuugccauuagcugcuuccugcuuuguguggcccugcucggguuuaucaugugggcuugccagaagggaaacauuagauguaauaucugcauuuga

SEQ ID NO: 203531 - RNA, 1701 nt, Artificial Sequence; identical to SEQ ID NO: 201940
  derived and/or modified CDS sequence (opt5) from hemagglutinin__InfluenzaA__AHL96414

SEQ ID NO: 203532 - RNA, 1701 nt, Artificial Sequence; identical to SEQ ID NO: 202066
  derived and/or modified CDS sequence (opt5) from hemagglutinin__InfluenzaA__AHL96426

SEQ ID NO: 203533 - RNA, 1701 nt, Artificial Sequence
  derived and/or modified CDS sequence (opt5) from hemagglutinin__InfluenzaA__AHL96438
augaagaccaucauugcccugagcuacauccucugccugguguucgcucaggagcuucccggcaacgacgauuccacagccacgcugugucucgggcaccaugcggucccuaauggaaccauuguuaaaacaaucaccaacgaccaaauugaagugacaaaugcuaccgagcuggugcagucuagcuccacaggcgaaaucugcaacucuccgcaccagauccuugauggggagaauuguacccugauugacgcccuccugggagauccccagugcgacggcuuucaaaacaagaaaugggaucuguucgucgaaagaagcaaggcccauuccaauuguuauccuuacgacgugcccgauuaugcuucucuccggagccugguugccuccagcgggacgcuugaguuuaacaaugagucuuucaacuggaccggagugacacagaauggcaccuccagcgcuugcauccgcagaucuaacaauuccuuuuucagccggcugaacuggcucacacaccugaauuuuaaauacccugcccuuaacgucaccaugcccaacaaugaacaguucgacaagcuguauauuuggggcgugcaucacccugggacggauaaggaccagaucuuucucuacgcgcaagccucuggacgcauuacaguuuccaccaaaagaagccagcaggcugugaucccgaacauuggcucccggccccgcgucagaaauaucccuucucgggugagcaucuauuggacaauugugaagcccggggauauccugcugauuaacuccaccggaaaucucaucgccccucgcggcuacuucaaaauuagaagcgggaagucuuccaucaugcggagcgacgcucccaucggaaaauguucuagcgccugcauuaccccgaacggcuccaucccuaaugacaagcccuuucagaacgucaaucgcauuacauacggcgcguguccuagauauguuaagcaaaacacgcugaaacuugccaccgggaugcggaaugugcccgagaagcagacacgcggaaucuucggcgcuauugccggguuuaucgaaaacggaugggagggcaugguggaugggugguacggauucagacaccaaaauucugagggccggggccaggcugccgaccugaaaagcacccaggccgcuaucgaucagauuaacgggaagcucaauagacugaucggaaaaacaaacgaaaaguuccaucagauugagaaagaauuuuccgaggucgaaggccgcauccaagaccuugagaaguauguggaggauaccaagauugaccuguggagcuacaacgcggaacuccugguugcccuggagaaucagcacacgaucgaucucacagacucugaaaugaacaaacuguucgagaagaccaaaaagcagcuucgggaaaaugcugaggauauggggaacggaugcuuuaaaauuuaucauaagugugacaaugccugcaucggcuccaucagaaacgggaccuacgaucacgacguguaucgcgacgaggcccugaauaaccgguuccagauuaagggcgucgaacucaaaagcggauacaaggauuggauccuguggauuucuuuugcuaucuccugcuuccuucuguguguggcccuccugggcuuuauuaugugggcgugccaaaaagggaauaucagauguaacaucugcauuuga

SEQ ID NO: 203534 - RNA, 1701 nt, Artificial Sequence; identical to SEQ ID NO: 201940
  derived and/or modified CDS sequence (opt5) from hemagglutinin__InfluenzaA__AHL96450

SEQ ID NO: 203535 - RNA, 1701 nt, Artificial Sequence; identical to SEQ ID NO: 202066
  derived and/or modified CDS sequence (opt5) from hemagglutinin__InfluenzaA__AHL96462

SEQ ID NO: 203536 - RNA, 1701 nt, Artificial Sequence
  derived and/or modified CDS sequence (opt5) from hemagglutinin__InfluenzaA__AHL96474
augaaggccauccugguggucaugcucuacaccuucgcuacagccaacgcggacacgcugugcauuggcuaucacgcuaauaacagcaccgauacaguugacaccgugcuugagaaaaaugugacagucacccauuccgugaaccugcucgaagauaagcacaaugggaaacuguguaaacuuagaggaguuucuccccugcaucucggcaagugcaacaucgccggguggauucugggaaauccugagugugaaagccuguccacagccucuagcugguccuacaucguggagaccucuggcagcgacaacgggacgugcuauccgggagauuuuauugacuacgaggagcuccgggagcagcuguccagcgucucuuccuucgaacgcuuugagaucuuccccaagaccagcucuuggccuaaucacgauuccaacaagggcgugacagcugccuguccccaugcuggcgccaaaggguuuuauaagaaucuuaucuggcugguuaaaaagggaaacagcuacccuaaacucucuauuuccuauaucaaugacaagggcaaggaagugcugguccuuugggggauucaccaccccagcaccacagcggaucaacagucccuguaccagaacgccgacaccuacguguucgugggaacgucuagauauagcaaaaaguuuaaaccugagaucgcuauucggccgaagguccgcgaucaggagggcagaaugaauuacuauuggacacucguugaacccggggacaaaaucaccuucgaggccacaggaaaccugguggugccucgguacgcuuuugccauggaacgcaacgcgggcuccggcauuaucaucagcgauacccccguccaugacugcaauaccacaugucaaacgccuaagggggccauuaacaccucucugcccuuccagaauauccacccgauuacaaucggaaaaugcccuaaguaugugaaguccaccaaacucagacuggcuacaggccuucggaacguucccagcauucagucucgcgggcuguuuggagccaucgcuggcuucaucgaagggggauggaccggcaugguggacggcugguacggguaucaucaccagaaugaacaaggaagcggcuacgccgccgaucucaaguccacgcagaacgcuauugacaaaaucacaaauaaggucaacucugugauugagaaaaugaauacccaguuuaccgcgguugggaaggaguucaaccaccuggaaaagagaaucgagaaucuuaacaaaaagguggaugacggauuccuggauauuuggacauacaaugccgaacuccugguccugcucgagaacgaacggacccuggacuaucaugauagcaaugugaaaaaccuuuacgagaagguccgcaaccagcugaaaaauaacgcuaaggagaucggcaauggguguuuugaguucuaucacaagugcgacaacacauguauggaauccgugaaaaauggcacguacgauuauccuaaguacagcgaagaggccaaacucaacagagaagagaucgacggaguuaagcuggagucuacccggauuuaucaaauccuugccauuuacuccacagcugccagcucucuggugcucgucgugucccugggcgcgaucagcuuuuggaugugcuccaaugggucucugcagugccgcauuuguaucuga

SEQ ID NO: 203537 - RNA, 1701 nt, Artificial Sequence
  derived and/or modified CDS sequence (opt5) from hemagglutinin__InfluenzaA__AHL96485
augaagaccaucauugcccugagcuacauccucugccugguguucgcucagaaacuucccggcaacgacaauuccacagccacgcugugucucgggcaccaugcggucccuaacggaaccauuguuaagacaaucaccaaugauagaauugaggugacaaacgcuaccgaacuggugcaaaauucuagcaucggcgagaucugcgacuccccgcaccagauucuugauggggaaaacuguacacugaucgacgcccuccugggagauccccagugcgacggcuuucagaauaaaaagugggaucuguucgucgagcggucuaaagccuauagcaacuguuacccuuaugacgugcccgauuacgcuucccuccgcucucugguugccagcuccgggacccuugaauuuaauaacgagagcuucaauuggacgggagugacccaaaacggcacaucuuccgcuugcauuagacggagcaauucuuccuuuuucagccgccugaacuggcucacccaucugaauuuuaaguauccugcccuuaacgucacaaugcccaacaaugagcaguucgacaagcuguacaucuggggcgugcaccauccugggaccgauaaagaccagauuuuucucuaugcgcagucuuccggaagaaucacgguuagcacaaagcggucccaacaggccgugauuccgaacaucggcucucgccccagaauccggaauauuccuagccgcaucuccauuuacuggaccaucgucaaacccggggauauucugcugaucaacagcacaggaaaucucaucgcuccuagaggcuacuucaagauucggucugggaaauccagcaucaugaagucugacgcccccauuggaaaguguaaaagcgaaugcaucaccccgaacggcuccauuccuaaugacaagcccuuucagaacgugaaucgcaucaccuauggcgcuuguccuagauacgugaaacagucuacacugaaacuugccacggggaugcggaacguccccgagaagcaaacccgcggaaucuucggcgcgauugccggguuuaucgaaaauggaugggagggcaugguugaugggugguauggauucagacaccagaacagcgagggccggggccaggcugccgaccugaaguccacacaagcugccauugaucagaucaaugggaaacucaacagacugauuggaaagaccaaugaaaaguuccaccagaucgagaaagaauuuagcgagguggaaggccgcauucaggaccuugagaaguacguggaggauacaaaaaucgaccuguggucuuauaacgccgaacuccuggucgcucuggagaaccaacauaccaucgaucucacggacuccgaaaugaauaagcuguucgagaaaacaaagaagcagcuucgggaaaacgcggaggauauggggaauggaugcuuuaaaauuuaccacaagugugacaacgccugcaucggcagcauuagaaaugggaccuaugaucauaacguguaccgcgacgaggcucugaauaaccgguuccagaucaaaggcguugaacucaagucuggauacaaagacuggauucuguggaucuccuuugccaucagcugcuuccuucuguguguggcccuccugggcuuuauuaugugggcuugccagaaggggaauaucagauguaacauuugcaucuga

SEQ ID NO: 203538 - RNA, 1701 nt, Artificial Sequence; identical to SEQ ID NO: 202066
  derived and/or modified CDS sequence (opt5) from hemagglutinin__InfluenzaA__AHL96497

SEQ ID NO: 203539 - RNA, 1701 nt, Artificial Sequence; identical to SEQ ID NO: 201940
  derived and/or modified CDS sequence (opt5) from hemagglutinin__InfluenzaA__AHL96509

SEQ ID NO: 203540 - RNA, 1701 nt, Artificial Sequence; identical to SEQ ID NO: 201907
  derived and/or modified CDS sequence (opt5) from hemagglutinin__InfluenzaA__AHL96521

SEQ ID NO: 203541 - RNA, 1701 nt, Artificial Sequence; identical to SEQ ID NO: 202066
  derived and/or modified CDS sequence (opt5) from hemagglutinin__InfluenzaA__AHL96533

SEQ ID NO: 203542 - RNA, 1701 nt, Artificial Sequence; identical to SEQ ID NO: 201930
  derived and/or modified CDS sequence (opt5) from hemagglutinin__InfluenzaA__AHL96545

SEQ ID NO: 203543 - RNA, 1701 nt, Artificial Sequence
  derived and/or modified CDS sequence (opt5) from hemagglutinin__InfluenzaA__AHL96569
augaagaccaucauugcccugagcuacauccucugccugguguucgcucagaaacuucccggcaacgacaauuccacagccacgcugugucucgggcaccaugcggucccuaacggaaccauuguuaagacaaucaccaaugauagaauugaggugacaaacgcuaccgaacuggugcaaaauucuagcaucggcgagaucugcgacuccccgcaccagauucuugauggggaaaacuguacacugaucgacgcccuccugggagauccccagugcgacggcuuucagaauaaaaagugggaucuguucgucgagcggucuaaagccuauagcaacuguuacccuuaugacgugcccgauuacgcuucccuccgcucucugguugccagcuccgggacccuugaauuuaauaacgagagcuucaauuggacgggagugacccaaaacggcacaucuuccgcuugcauuagacggagcaauucuuccuuuuucagccgccugaacuggcucacccaucugaauuuuaaguauccugcccuuaacgucacaaugcccaacaaugagcaguucgacaagcuguacaucuggggcgugcaccauccugggaccgauaaagaccagauuuuucucuaugcgcagucuuccggaagaguuacggugagcacaaagcggucccaacaggccgucaucccgaacauuggcucucgccccagaauccggaauaucccuagccgcauuuccaucuacuggaccauugugaaacccggggauauccugcugauuaacagcacaggaaaucucaucgcuccuagaggcuacuucaagauccggucugggaaauccagcauuaugcgcucugacgcccccaucggaaaguguaagagcgaaugcauuaccccgaacggcuccaucccuaaugacaaacccuuucagaacgugaauagaauuaccuauggcgcuuguccucgguacgucaagcagucuacacugaaacuugccacggggaugcgcaacguucccgagaagcaaaccagaggaaucuucggcgcgaucgccggguuuauugaaaauggaugggagggcaugguggaugggugguauggauuccggcaccagaacagcgagggcagaggccaggcugccgaccugaaauccacacaagcugccaucgaucagauuaaugggaagcucaaccgccugaucggaaaaaccaaugaaaaguuccaccagauugagaaggaauuuagcgagguggaaggccggauccaggaccuugagaaauacgucgaggauacaaagauugaccuguggucuuauaacgccgaacuccugguggcucuggagaaccaacauaccaucgaucucacggacuccgaaaugaauaaacuguucgagaagaccaaaaagcagcuuagagaaaacgcggaggauauggggaauggaugcuuuaagaucuaccacaaaugugacaacgccugcauuggcagcauccgcaaugggacauaugaucaugacguuuaccgggacgaggcucugaacaauagauuccagauuaagggcguggaacucaaaucuggauacaaggauuggauccuguggauuuccuuugccaucagcugcuuccuucugugugucgcccuccugggcuuuaucaugugggcuugccagaaagggaacauucgcuguaauaucugcauuuga

SEQ ID NO: 203544 - RNA, 1701 nt, Artificial Sequence; identical to SEQ ID NO: 203536
  derived and/or modified CDS sequence (opt5) from hemagglutinin__InfluenzaA__AHL96581

SEQ ID NO: 203545 - RNA, 1701 nt, Artificial Sequence
  derived and/or modified CDS sequence (opt5) from hemagglutinin__InfluenzaA__AHL96592
augaagaccaucauugcccugggcuacauccucugccugguguucgcucagaaaauucccgggaacgacaauagcacagccacgcuuugucugggacaccaugcggucccuaacggcaccaucguuaagacaauuaccaaugauagaaucgaggugacaaacgcuaccgaacucgugcaaaauuccucuaucggggagauuugcgacagcccgcaccagauccuggauggagaaaacuguacacuuauugacgcccugcucggcgauccccagugcgacggguuucagaauaaaaagugggaucuguucaucgagcgguccaaagccuauucuaacuguuacccuuaugacguccccgauuacgcuagccugcgcucccucguggccucuagcggaacccuggaauuuaauaacgaguccuucaauuggacgggcguuacccaaaacggcacaagcucugcuugcauuagacgguccaauagcuccuuuuucucucgccuuaacuggcugacccaucucaauuuuaaguauccugcccugaacgugacaaugcccaacaaugagcaguucgacaaacuuuacaucuggggaguccaccauccugggaccgauaaagaccagauuuuucuguaugcgcagagcucuggcagaaucacgguguccacaaagcggagccaacaggccguuaucccgaacauugggucccgccccagaauccggaauauuccuucucgcaucagcauuuacuggaccaucgugaaacccggagauauccuccugauuaacuccacaggcaaucugaucgcuccuagaggguacuucaagauucggagcggaaaaucuuccaucaugcgcagcgacgcccccauuggcaaguguaagucugaaugcaucaccccgaacggcagcaucccuaaugacaaacccuuucagaacgucaauagaauuaccuauggggcuuguccucgguacgugaagcaguccacacucaaacuggccacgggaaugcgcaacgugcccgagaagcaaaccagaggcaucuucggggcgauugccggauuuaucgaaaauggcugggaggggauggucgauggaugguauggcuuccggcaccagaacucugagggcagagggcaggcugccgaccuuaaaagcacacaagcugccauugaucagaucaauggaaagcugaaccgccucauuggcaaaaccaaugaaaaguuccaccagaucgagaaggaauuuuccgagguugaagggcggauccaggaccuggagaaauacguggaggauacaaagauugaccuuuggagcuauaacgccgaacugcucguggcucuggagaaccaacauaccaucgaucugacggacucugaaaugaauaaacucuucgagaagacaaagaagcagcugagagaaaacgcggaggauaugggaaauggcugcuuuaagauuuaccacaaaugugacaacgccugcaucggguccauucgcaauggcaccuaugaucaugacgucuaccgggacgaggcucuuaacaauagauuccagaucaagggaguggaacugaaaagcggcuacaaggauuggauccucuggauuucuuuugccaucuccugcuuccugcuuuguguugcccugcucggguuuauuaugugggcuugccagaaaggaaacauccgcuguaauauuugcaucuga

SEQ ID NO: 203546 - RNA, 1701 nt, Artificial Sequence; identical to SEQ ID NO: 202066
  derived and/or modified CDS sequence (opt5) from hemagglutinin__InfluenzaA__AHL96604

SEQ ID NO: 203547 - RNA, 1701 nt, Artificial Sequence; identical to SEQ ID NO: 202066
  derived and/or modified CDS sequence (opt5) from hemagglutinin__InfluenzaA__AHL96616

SEQ ID NO: 203548 - RNA, 1701 nt, Artificial Sequence
  derived and/or modified CDS sequence (opt5) from hemagglutinin__InfluenzaA__AHL96628
augaagaccaucauugcccugagcuacauccucugccugguguucgcucagaaacuucccggcaacgacaauuccacagccacgcugugucucgggcaccaugcggucccuaacggaaccauuguuaagacaaucaccaaugauagaauugaggugacaaacgcuaccgaacuggugcaaaauucuagcaucggcgagaucugcgacuccccgcaccagauucuugauggggaaaacuguacacugaucgacgcccuccugggagauccccagugcgacggcuuucagaauaaaaagugggaucuguucgucgagcggucuaaagccuauagcaacuguuacccuuaugacgugcccgauuacgcuucccuccgcucucugguugccagcuccgggacccuugaauuuaauaacgagagcuucaauuggacgggagugacccaaaacggcacaucuuccgcuugcauuagacggagcaauucuuccuuuuucagccgccugaacuggcucacccaucugaauuuuaaguauccugcccuuaacgucacaaugcccaacaaugagcaguucgacaagcuguacaucuggggcgugcaccauccugggaccgauaaagaccagauuuuucucuaugcgcagucuuccggaagaaucacgguuagcacaaagcggucccaacaggccgugauuccgaacaucggcucucgccccagaauccggaauauuccuagccgcaucuccauuuacuggaccaucgucaaacccggggauauucugcugaucaacagcacaggaaaucucaucgcuccuagaggcuacuucaagauucggucugggaaauccagcaucaugcgcucugacgcccccauuggaaaguguaagagcgaaugcaucaccccgaacggcuccauuccuaaugacaaacccuuucagaacgugaauagaaucaccuauggcgcuuguccucgguacgugaagcagucuacacugaaacuugccacggggaugcgcaacguccccgagaagcaaaccagaggaaucuucggcgcgauugccggguuuaucgaaaauggauggggcgggaugguugauggaugguauggcuuccggcaccagaacagcgagggcagagggcaggcugccgaccugaaauccacacaagcugccauugaucagaucaauggaaagcucaaccgccugauuggcaaaaccaaugagaaguuccaccagaucgaaaaggaguuuagcgaaguggaggggcggauucaggaccuugaaaaauacguggaggauacaaagaucgaccuguggucuuauaacgccgagcuccuggucgcucuggaaaaccaacauaccaucgaucucacggacuccgagaugaauaaacuguucgaaaagaccaaaaagcagcuuagagagaacgcggaagauaugggaaauggcugcuuuaagauuuaccacaaaugugacaacgccugcaucgggagcauucgcaauggcacauaugaucauaacguguaccgggacgaggcucugaauaacagauuccagaucaagggaguugagcucaaaucuggcuacaaggacuggauucuguggaucuccuuugccaucagcugcuuccuucuguguguggcccuccugggguuuauuaugugggcuugccagaaaggaaauauccgcuguaacauuugcaucuga

SEQ ID NO: 203549 - RNA, 1701 nt, Artificial Sequence; identical to SEQ ID NO: 203537
  derived and/or modified CDS sequence (opt5) from hemagglutinin__InfluenzaA__AHL96640

SEQ ID NO: 203550 - RNA, 1701 nt, Artificial Sequence
  derived and/or modified CDS sequence (opt5) from hemagglutinin__InfluenzaA__AHL96652
augaagaccaucauugcccugagcuacauccucugccugguguucgcucagaaacuucccggcaacgacaauuccacagccacgcugugucucgggcaccaugcggucccuaacggaaccauuguuaagacaaucaccaaugauagaauugaggugacaaacgcuaccgaacuggugcaagacucuagcaucggcgagaucugcgauuccccgcaccagauucuugacggggaaaauuguacacugaucgaugcccuccugggagacccccagugcgauggcuuucagaacaaaaagugggaccuguucgucgagcggucuaaagccuauagcaauuguuacccuuaugaugugcccgacuacgcuucccuccgcucucugguugccagcuccgggacccuugaauuuaacaaugagagcuucaacugggcuggagugacgcaaaauggcaccucuuccgccugcauuagaggcagcaacucuuccuuuuucagccggcugaauuggcucacacaucugaacuuuaaguauccugcgcuuaaugucaccaugcccaacaacgagcaguucgauaagcuguacaucuggggagugcaccauccugggacagacaaagaucagauuuuucucuaugcccagucuuccggccgcaucaccguuagcacgaagagaucccaacaggcugugauuccgaauaucgggucucggccccgcaucagaaacauuccuagccggaucuccauuuacuggacaaucgucaaacccggagacauucugcugaucaauagcaccggcaaccucaucgccccucgcggguacuucaagauuagaucuggaaaauccagcaucaugcggucugacgcucccauuggcaaguguaagagcgaaugcaucacaccgaauggcuccauuccuaacgauaaacccuuucagaaugugaaccgcaucaccuauggggccuguccuagauacgugaagcagucuacccugaaacuugcgacaggaaugcggaauguccccgagaagcaaacgcgcggcaucuucggggccauugcuggauuuaucgaaaacggcugggaggggaugguugacggaugguauggcuucagacaccagaauagcgagggccgggggcaggccgcugaucugaaauccacccaagccgccauugaccagaucaacggaaagcucaauagacugauuggcaaaacaaacgaaaaguuccaccagaucgagaaggaauuuagcgagguggaagggcgcauucaggaucuugagaaauacguggaggacaccaagaucgaucuguggucuuauaaugcugaacuccuggucgcgcuggagaaccaacauacaaucgaccucaccgauuccgaaaugaacaaacuguucgagaagacgaaaaagcagcuucgggaaaaugccgaggacaugggaaacggcugcuuuaagauuuaccacaaaugugauaaugcuugcaucgggagcauuagaaacggcacauaugaccaugacguguaccgcgaugaggcccugaauaaccgguuccagaucaagggaguugaacucaaaucuggcuacaaggacuggauucuguggaucuccuuugccaucagcugcuuccuucuguguguggcucuccugggguuuauuaugugggccugccagaaaggaaauaucagauguaacauuugcaucuga

SEQ ID NO: 203551 - RNA, 1701 nt, Artificial Sequence; identical to SEQ ID NO: 202539
  derived and/or modified CDS sequence (opt5) from hemagglutinin__InfluenzaA__AHL96664

SEQ ID NO: 203552 - RNA, 1701 nt, Artificial Sequence
  derived and/or modified CDS sequence (opt5) from hemagglutinin__InfluenzaA__AHL96676
augaagaccaucauugcccugagcuacauccucugccugguguucgcucagaaacuucccggcaacgacaauuccacagccacgcugugucucgggcaccaugcggucccuaacggaaccauuguuaagacaaucaccaaugauagaauugaggugacaaacgcuaccgaacuggugcaaaauucuagcaucggcgagaucugcgacuccccgcaccagauucuugauggggaaaacuguacacugaucgacgcccuccugggagauccccagugcgacggcuuucagaauaaaaagugggaucuguucgucgagcggucuaaagccuauagcaacuguuacccuuaugacgugcccgauuacgcuucccuccgcucucugguugccagcuccgggacccuugaauuuaauaacgagagcuucaauuggacgggagugacccaaaacggcacaucuuccgcuugcauuagacggagcaauucuuccuuuuucagccgccugaacuggcucacccaucugaauuuuaaguauccugcccuuaacgucacaaugcccaacaaugagcaguucgacaagcuguacaucuggggcgugcaccauccugggaccgauaaagaccagauuuuucucuaugcgcagucuuccggaagaaucacgguuagcacaaagcggucccaacaggccgugauuccgaacaucggcucucgccccagaauccggaauauuccuagccgcaucuccauuuacuggaccaucgucaaacccggggauauucugcugaucaacagcacaggaaaucucaucgcuccuagaggcuacuucaagauucggucugggaaauccagcaucaugcgcucugacgcccccauuggaaaguguaagagcgaaugcaucaccccgaacggcuccauuccuaucgacaaacccuuucagaaugugaacagaaucaccuauggcgcuuguccucgguacgugaagcagucuacacugaaacuugccacggggaugcgcaauguccccgagaagcaaaccagaggaauuuucggcgcgaucgccggguuuauugaaaacggaugggagggcaugguugaugggugguauggauuccggcaccagaauagcgagggcagaggccaggcugccgaccugaaauccacacaagcugccaucgaucagauuaacgggaagcucaaucgccugaucggaaaaaccaacgaaaaguuccaccagauugagaaggaauuuagcgagguggaaggccggauccaggaccuugagaaauacguggaggauacaaagaucgaccuguggucuuauaaugccgaacuccuggucgcucuggagaaccaacauaccauugaucucacggacuccgaaaugaacaaacuguucgagaagaccaaaaagcagcuuagagaaaaugcggaggauauggggaacggaugcuuuaagaucuaccacaaaugugacaaugccugcauuggcagcauccgcaacgggacauaugaucaugacguguaccgggacgaggcucugaauaacagauuccagauuaagggcguugaacucaaaucuggauacaaggauuggauccuguggaucuccuuugccauuagcugcuuccuucuguguguggcccuccugggcuuuaucaugugggcuugccagaaagggaauauucgcuguaacaucugcauuuga

SEQ ID NO: 203553 - RNA, 1701 nt, Artificial Sequence; identical to SEQ ID NO: 202066
  derived and/or modified CDS sequence (opt5) from hemagglutinin__InfluenzaA__AHL96688

SEQ ID NO: 203554 - RNA, 1701 nt, Artificial Sequence; identical to SEQ ID NO: 202066
  derived and/or modified CDS sequence (opt5) from hemagglutinin__InfluenzaA__AHL96700

SEQ ID NO: 203555 - RNA, 1701 nt, Artificial Sequence; identical to SEQ ID NO: 202066
  derived and/or modified CDS sequence (opt5) from hemagglutinin__InfluenzaA__AHL96712

SEQ ID NO: 203556 - RNA, 1701 nt, Artificial Sequence; identical to SEQ ID NO: 201940
  derived and/or modified CDS sequence (opt5) from hemagglutinin__InfluenzaA__AHL96724

SEQ ID NO: 203557 - RNA, 1701 nt, Artificial Sequence; identical to SEQ ID NO: 201930
  derived and/or modified CDS sequence (opt5) from hemagglutinin__InfluenzaA__AHL96748

SEQ ID NO: 203558 - RNA, 1701 nt, Artificial Sequence; identical to SEQ ID NO: 201940
  derived and/or modified CDS sequence (opt5) from hemagglutinin__InfluenzaA__AHL96784

SEQ ID NO: 203559 - RNA, 1701 nt, Artificial Sequence
  derived and/or modified CDS sequence (opt5) from hemagglutinin__InfluenzaA__AHL96796
augaagaccaucauugcccugagcuacauccucugccugguguucgcucagaaacuucccggcaacgacaauuccacagccacgcugugucucgggcaccaugcggucccuaacggaaccauuguuaagacaaucaccaaugauagaauugaggugacaaacgcuaccgaacuggugcaaaauucuagcaucggcgagaucugcgacuccccgcaccagauucuugauggggaaaacuguacacugaucgacgcccuccugggagauccccagugcgacggcuuucagaauaaaaagugggaucuguucauugagcggucuaaagccuauagcaacuguuacccuuaugacguccccgauuacgcuucccuccgcucucugguggccagcuccgggacccuugaauuuaauaacgagagcuucaauuggacgggaguuacccaaaacggcacaucuuccgcuugcaucagacggagcaauucuuccuuuuucagccgccugaacuggcucacccaucugaauuuuaaguauccugcccuuaacgugacaaugcccaacaaugagcaguucgacaagcuguacauuuggggcguccaccauccugggaccgauaaagaccagaucuuucucuaugcgcagucuuccggaagaauuacggugagcacaaagcggucccaacaggccguuaucccgaacaucggcucucgcccccggauuagaaauaucccuagccgcauuuccaucuacuggaccauugugaaacccggggauauccugcugaucaacagcacaggaaaucucauugcuccuagaggcuacuucaagauccggucugggaaauccagcauuaugcgcucugacgcccccaucggaaaguguaagagcgaaugcauuaccccgaacggcuccaucccuaaugacaaacccuuucagaacgucaauagaaucaccuauggcgcuuguccucgguacgugaagcagucuacacugaaacuugccacggggaugcgcaacgugcccgagaagcaaaccagaggaauuuucggcgcgaucgccggguuuauugaaaauggaugggagggcauggucgaugggugguauggauuccggcaccagaacagcgagggcagaggccaggcugccgaccugaaauccacacaagcugccaucgaucagauuaaugggaagcucaaccgccugaucggaaaaaccaaugaaaaguuccaccagauugagaaggaauuuagcgagguugaaggccggauccaggaccuugagaaauacguggaggauacaaagaucgaccuguggucuuauaacgccgaacuccugguggcucuggagaaccaacauaccauugaucucacggacuccgaaaugaauaaacuguucgagaagaccaaaaagcagcuuagagaaaacgcggaggauauggggaauggaugcuuuaagaucuaccacaaaugugacaacgccugcauuggcagcauccgcaaugggacauaugaucaugacgucuaccgggacgaggcucugaacaauagauuccagauuaagggcguggaacucaaaucuggauacaaggauuggauccuguggaucuccuuugccauuagcugcuuccuucuguguguugcccuccugggcuuuaucaugugggcuugccagaaagggaacauucgcuguaauaucugcauuuga

SEQ ID NO: 203560 - RNA, 1701 nt, Artificial Sequence; identical to SEQ ID NO: 201930
  derived and/or modified CDS sequence (opt5) from hemagglutinin__InfluenzaA__AHL96808

SEQ ID NO: 203561 - RNA, 1701 nt, Artificial Sequence; identical to SEQ ID NO: 201930
  derived and/or modified CDS sequence (opt5) from hemagglutinin__InfluenzaA__AHL96820

SEQ ID NO: 203562 - RNA, 1701 nt, Artificial Sequence; identical to SEQ ID NO: 201940
  derived and/or modified CDS sequence (opt5) from hemagglutinin__InfluenzaA__AHL96832

SEQ ID NO: 203563 - RNA, 1701 nt, Artificial Sequence; identical to SEQ ID NO: 201940
  derived and/or modified CDS sequence (opt5) from hemagglutinin__InfluenzaA__AHL96844

SEQ ID NO: 203564 - RNA, 1701 nt, Artificial Sequence; identical to SEQ ID NO: 201940
  derived and/or modified CDS sequence (opt5) from hemagglutinin__InfluenzaA__AHL96856

SEQ ID NO: 203565 - RNA, 1701 nt, Artificial Sequence
  derived and/or modified CDS sequence (opt5) from hemagglutinin__InfluenzaA__AHL96868
augaagaccaucauugcccugagcuacauccucugccugguguucgcucagaaacuucccggcaacgacaauuccacagccacgcugugucucgggcaccaugcggucccuaacggaaccauuguuaagacaaucaccaaugauagaauugaggugacaaacgcuaccgaacuggugcaaaauucuagcaucggcgagaucugcgacuccccgcaccagauucuugaugggggaaacuguacacugaucgacgcccuccugggcgauccccagugcgacggguuucagaauaaaaagugggaucuguucgucgaacggucuaaagccuauagcaacuguuacccuuaugacgugcccgauuacgcuucccuccgcucucugguugccagcuccggaacccuugaguuuaauaacgagagcuucaauuggacgggcgugacccaaaacggcacaucuuccgcuugcauuagacggagcaauucuuccuuuuucagccgccugaacuggcucacccaucugaauuuuaaguauccugcccuuaacgucacaaugcccaacaaugaacaguucgacaagcuguacaucuggggagugcaccauccugggaccgauaaagaccagauuuuucucuaugcgcagucuuccggcagaaucacgguuagcacaaagcggucccaacaggccguggucccgaacauugggucucgccccagaauccggaauaucccuagccgcauuuccaucuacuggaccauugugaaacccggagauauccugcugauuaacagcacaggcaaucucaucgcuccuagaggguacuucaagauccggucuggaaaauccagcauuaugcgcucugacgcccccaucggcaaguguaagagcgagugcauuaccccgaacggcuccaucccuaaugacaaacccuuucagaacgugaauagaauuaccuauggggcuuguccucgguacgucaagcagucuacacugaaacuugccacgggaaugcgcaacguucccgaaaagcaaaccagaggcaucuucggggcgaucgccggauuuauugagaauggcugggaagggaugauggauggaugguauggcuuccggcaccagaacagcgagggcagagggcaggcugccgaccugaaauccacacaagcugccaucgaucagauuaauggaaagcucaaccgccugaucggcaaaaccaaugagaaguuccaccagauugaaaaggaguuuagcgaaguggaggggcggauccaggaccuugaaaaauacguggaggauacaaagauugaccuguggucuuauaacgccgagcuccuggucgcucuggaaaaccaacauaccaucgaucucacggacuccgagaugaauaaacuguucgaaaagaccaaaaagcagcuuagagagaacgcggaagauaugggaaauggcugcuuuaagaucuaccacaaaugugacaacgccugcauugggagcauccgcaauggcacauaugaucaugacguguaccgggacgaggcucugaacaauagauuccagauuaagggaguugagcucaaaucuggcuacaaggauuggauccuguggauuuccuuugccaugagcugcuuccuucuguguguggcccuccugggguuuaucaugugggcuugccagaaaggaaacauccgcuguaauauuugcaucuga

SEQ ID NO: 203566 - RNA, 1701 nt, Artificial Sequence; identical to SEQ ID NO: 201930
  derived and/or modified CDS sequence (opt5) from hemagglutinin__InfluenzaA__AHL96880

SEQ ID NO: 203567 - RNA, 1701 nt, Artificial Sequence
  derived and/or modified CDS sequence (opt5) from hemagglutinin__InfluenzaA__AHL96892
augaagaccaucauugcccugagcuacauccucugccugguguucgcucagaaacuucccggcaacgacaauuccacagccacgcugugucucgggcaccaugcggucccuaacggaaccauuguuaagacaaucaccaaugauagaauugaggugacaaacgcuaccgaacuggugcaaaauucuagcaucggcgagaucugcgacuccccgcaccagauucuugauggggaaaacuguacacugaucgacgcccuccugggagauccccagugcgacggcuuucagaauaaaaagugggaucuguucgucgagcggucuaaagccuauagcaacuguuacccuuaugacgugcccgauuacgcuucccuccgcucucugguugccagcuccgggacccuugaauuuaauaacgagagcuucaauugggcuggagugacgcaaaacggcaccucuuccgccugcauuagaggcagcaauucuuccuuuuucagccggcugaacuggcucacacaucugaauuuuaaguauccugcgcuuaacgucaccaugcccaacaaugagcaguucgacaagcuguacaucuggggagugcaccauccugggacagauaaagaccagauuuuucucuaugcccagucuuccggccgcaucaccguuagcacgaagagaucccaacaggcugugauuccgaacaucgggucucggccccgcaucagaaauauuccuagccggaucuccauuuacuggacaaucgucaaacccggagauauucugcugaucaacagcaccggcaaucucaucgccccucgcggguacuucaagauuagaucuggaaaauccagcaucaugcggucugacgcucccauuggcaaguguaagagcgaaugcaucacaccgaacggcuccauuccuaaugacaaacccuuucagaacgugaaucgcaucaccuauggggccuguccuagauacgugaagcagucuacccugaaacuugcgacaggaaugcggaacguccccgagaagcaaacgcgcggcaucuucggggccauugcuggauuuaucgaaaauggcugggaggggaugguugauggaugguauggcuucagacaccagaacagcgagggccgggggcaggccgcugaccugaaauccacccaagccgccauugaucagaucaauggaaagcucaacagacugauuggcaaaacaaaugaaaaguuccaccagaucgagaaggaauuuagcgagguggaagggcgcgugcaggaccuugagaaauacgucgaggauaccaagauugaccuguggucuuauaacgcugaacuccugguggcgcuggagaaccaacauacaaucgaucucaccgacuccgaaaugaauaaacuguucgagaagacgaaaaagcagcuucgggaaaacgccgaggauaugggaaauggcugcuuuaagaucuaccacaaaugugacaacgcuugcauugggagcaucagaaauggcacauaugaucaugacguuuaccgcgacgaggcccugaacaaucgguuccagauuaagggaguggaacucaaaucuggcuacaaggauuggauccuguggauuuccuuugccaucagcugcuuccuucugugugucgcucuccugggguuuaucaugugggccugccagaaaggaaacauuagauguaauaucugcauuuga

SEQ ID NO: 203568 - RNA, 1701 nt, Artificial Sequence
  derived and/or modified CDS sequence (opt5) from hemagglutinin__InfluenzaA__AHL96904
augaagaccaucauugcccugagcuacauccucugccugguguucgcucagaaacuucccggcaacgacaauuccacagccacgcugugucucgggcaccaugcggucccuaacggaaugauuguuaagaccaucacaaaugauagaauugaggugaccaacgcuacagaacuggugcaaaauucuagcaucggcgagaucugcgacuccccgcaccagauucuugauggggaaaacuguacccugaucgacgcccuccugggagauccccagugcgacggcuuucagaauaaaaagugggaucuguucgucgagcggucuaaagccuauagcaacuguuacccuuaugacgugcccgauuacgcuucccuccgcucucugguugccagcuccgggacacuugaauuuaauaacgagagcuucaauuggaccggagugacgcaaaacggcaccucuuccgcuugcauuagacggagcaauucuuccuuuuucagccgccugaacuggcucacacaucugaauuuuaaguauccugcccuuaacgucaccaugcccaacaaugagcaguucgacaagcuguacaucuggggcgugcaccauccugggacagauaaagaccagauuuuucucuaugcgcagucuuccggaagaaucaccguuagcacgaagcggucccaacaggccguggucccgaacauuggcucucgccccagaauccggaauaucccuagccgcauuuccaucuacuggacaauugugaaacccggggauauccugcugauuaacagcaccggaaaucucaucgcuccuagaggcuacuucaagauccggucugggaaauccagcauuaugcgcucugacgcccccaucggaaaguguaagagcgaaugcauuacaccgaacggcuccaucccuaaugacaaacccuuucagaacgugaauagaauuaccuauggcgcuuguccucgguacgucaagcagucuacccugaaacuugccacagggaugcgcaacguucccgagaagcaaacgagaggaaucuucggcgcgaucgccggguuuauugaaaauggaugggagggcaugguggaugggugguauggauuccggcaccagaacagcgagggcagaggccaggcugccgaccugaaauccacccaagcugccaucgaucagauuaaugggaagcucaaccgccugaucggaaaaacaaaugaaaaguuccaccagauugagaaggaauuuagcgagguggaaggccggauccaggaccuugagaaauacgucgaggauaccaagauugaccuguggucuuauaacgccgaacuccugguggcucuggagaaccaacauacaaucgaucucaccgacuccgaaaugaauaaacuguucgagaagacgaaaaagcagcuuagagaaaacgcggaggauauggggaauggaugcuuuaagaucuaccacaaaugugacaacgccugcauuggcagcauccgcaaugggacauaugaucaugacguuuaccgggacgaggcucugaacaauagauuccagauuaagggcguggaacucaaaucuggauacaaggauuggauccuguggauuuccuuugccaugagcugcuuccuucugugugucgcccuccugggcuccaucaugugggcuugccagaaagggaacauccgcuguaauauuugcaucuga

SEQ ID NO: 203569 - RNA, 1701 nt, Artificial Sequence; identical to SEQ ID NO: 201930
  derived and/or modified CDS sequence (opt5) from hemagglutinin__InfluenzaA__AHL96916

SEQ ID NO: 203570 - RNA, 1701 nt, Artificial Sequence; identical to SEQ ID NO: 201930
  derived and/or modified CDS sequence (opt5) from hemagglutinin__InfluenzaA__AHL96928

SEQ ID NO: 203571 - RNA, 1701 nt, Artificial Sequence; identical to SEQ ID NO: 201930
  derived and/or modified CDS sequence (opt5) from hemagglutinin__InfluenzaA__AHL96940

SEQ ID NO: 203572 - RNA, 1701 nt, Artificial Sequence; identical to SEQ ID NO: 201940
  derived and/or modified CDS sequence (opt5) from hemagglutinin__InfluenzaA__AHL96952

SEQ ID NO: 203573 - RNA, 1701 nt, Artificial Sequence; identical to SEQ ID NO: 201940
  derived and/or modified CDS sequence (opt5) from hemagglutinin__InfluenzaA__AHL96964

SEQ ID NO: 203574 - RNA, 1701 nt, Artificial Sequence; identical to SEQ ID NO: 202098
  derived and/or modified CDS sequence (opt5) from hemagglutinin__InfluenzaA__AHL96976

SEQ ID NO: 203575 - RNA, 1701 nt, Artificial Sequence
  derived and/or modified CDS sequence (opt5) from hemagglutinin__InfluenzaA__AHL96988
augaagaccaucauugcccugagcuacauccucugccugguguucgcucagaaacuucccggcaacgacaauuccacagccacgcugugucucgggcaccaugcggucccuaacggaaccauuguuaagacaaucaccaaugauagaauugaggugacaaacgcuaccgaacuggugcaaaauucuagcaucggcgagaucugcgacuccccgcaccagauucuugauggggaaaacuguacacugaucgacgcccuccugggagauccccagugcgacggcuuucagaauaaaaagugggaucuguucgucgagcggucuaaagccuauagcaacuguuacccuuaugacgugcccgauuacgcuucccuccgcucucugguugccagcuccgggacccuugaauuuaauaacgagagcuucaauuggacgggagugacccaaaacggcacaucuuccgcuugcauuagacggagcaauucuuccuuuuucagccgccugaacuggcucacccaucugaauuuuaaguauccugcccuuaacgucacaaugcccaacaaugagcaguucgacaagcuguacaucuggggcgugcaccauccugggaccgauaaagaccagauuuuucucuaugcgcagucuuccggaagaaucacgguuagcacaaagcggucccaacaggccgugauuccgaacaucggcucucgccccagaauccggaauauuccuagccgcaucuccauuuacuggaccaucgucagacccggggauauucugcugaucaacagcacaggaaaucucaucgcuccucggggcuacuucaaaauucgcucugggaaguccagcaucaugagaucugacgcccccauuggaaaauguaagagcgaaugcaucaccccgaacggcuccauuccuaaugacaagcccuuucagaacgugaaucggaucaccuauggcgcuuguccucgcuacgugaaacagucuacacugaaacuugccacggggaugagaaacguccccgagaagcaaacccggggaaucuucggcgcgauugccggguuuaucgaaaauggaugggagggcaugguugaugggugguauggauucagacaccagaacagcgagggccgcggccaggcugccgaccugaaguccacacaagcugccauugaucagaucaaugggaaacucaaccggcugauuggaaagaccaaugaaaaauuccaccagaucgagaaggaauuuagcgagguggaaggccgcauucaggaccuugagaaguacguggaggauacaaaaaucgaccuguggucuuauaacgccgaacuccuggucgcucuggagaaccaacauaccaucgaucucacggacuccgaaaugaauaagcuguucgagaaaacaaagaaacagcuuagagaaaacgcggaggauauggggaauggaugcuuuaagauuuaccacaagugugacaacgccugcaucggcagcauucggaaugggaccuaugaucauaacguguacagagacgaggcucugaauaaccgcuuccagaucaaaggcguugaacucaagucuggauacaaagacuggauucuguggaucuccuuugccaucagcugcuuccuucuguguguggcccuccugggcuuuauuaugugggcuugccagaaggggaauauccgguguaacauuugcaucuga

SEQ ID NO: 203576 - RNA, 1701 nt, Artificial Sequence; identical to SEQ ID NO: 201940
  derived and/or modified CDS sequence (opt5) from hemagglutinin__InfluenzaA__AHL97000

SEQ ID NO: 203577 - RNA, 1701 nt, Artificial Sequence; identical to SEQ ID NO: 202066
  derived and/or modified CDS sequence (opt5) from hemagglutinin__InfluenzaA__AHL97012

SEQ ID NO: 203578 - RNA, 1701 nt, Artificial Sequence
  derived and/or modified CDS sequence (opt5) from hemagglutinin__InfluenzaA__AHL97024
augaagaccaucauugcccugagcuacauccucugccugguguucgcucagaaacuucccggcaacgacaauuccacagccacgcugugucucgggcaccaugcggucccuaacggaaccauuguuaagacaaucaugaaugauagaauugaggugaccaacgcuacagaacuggugcaaaauucuagcaucggcgagaucugcgacuccccgcaccagauucuugauggggaaaacuguacccugaucgacgcccuccugggagauccccagugcgacggcuuucagaauaaaaagugggaucuguucgucgagcggucuaaagccuauagcaacuguuacccuuaugacgugcccgauuacgcuucccuccgcucucugguugccagcuccgggacacuugaauuuaauaacgagagcuucaauugggcuggagugacccaaaacggcacgucuuccgccugcauuagaggcagcaauucuuccuuuuucagccggcugaacuggcucacccaucugaauuuuaaguauccugcgcuuaacgucacaaugcccaacaaugagcaguucgacaagcuguacaucuggggagugcaccauccugggaccgauaaagaccagauuuuucucuaugcccagucuuccggccgcaucacaguuagcaccaagagaucccaacaggcugugauuccgaacaucgggucucggccccgcaucagaaauauuccuagccggaucuccauuuacuggacgaucgucaaacccggagauauucugcugaucaacagcacaggcaaucucaucgccccucgcggguacuucaagauuagaucuggaaaauccagcaucaugcggucugacgcucccauuggcaaguguaagagcgaaugcaucaccccgaacggcuccauuccuaaugacaaacccuuucagaacgugaaucgcaucacauauggggccuguccuagauacgugaagcagucuacccugaaacuugcgaccggaaugcggaacguccccgagaagcaaacacgcggcaucuucggggccauugcuggauuuaucgaaaauggcugggaggggaugauggauggaugguauggcuucagacaccagaacagcgagggccgggggcaggccgcugaccugaaauccacgcaagccgccauugaucagaucaauggaaagcucaacagacugauuggcaaaaccaaugaaaaguuccaccagaucgagaaggaauuuagcgagguugaagggcgcauucaggaccuugagaaauacguggaggauacaaagaucgaccuguggucuuauaacgcugaacuccugguggcgcuggagaaccaacauaccaucgaucucacagacuccgaaaugaauaaacuguucgagaagaccaaaaagcagcuucgggaaaacgccgaggauaugggaaauggcugcuuuaagauuuaccacaaaugugacaacgcuugcaucgggagcauuagaaauggcacguaugaucaugacgucuaccgcgacgaggcccugaacaaucgguuccagaucaagggaguggaacucaaaucuggcuacaaggauuggauucuguggaucuccuuugccaucagcugcuuccuucuguguguugcucuccugggguuuauuaugugggccugccagaaaggaaacaucagauguaauauuugcaucuga

SEQ ID NO: 203579 - RNA, 1701 nt, Artificial Sequence
  derived and/or modified CDS sequence (opt5) from hemagglutinin__InfluenzaA__AHL97036
augaagaccaucauugcccugagcuacauccucugccugguguucgcucagaaacuucccggcaacgacaauuccacagccacgcugugucucgggcaccaugcggucccuaacggaaccauuguuaagacaaucaccaaugauagaauugaggugacaaacgcuaccgaacuggugcaaaauucuagcaucggcgagaucugcgacuccccgcaccagauucuugauggggaaaacuguacacugaucgacgcccuccugggagauccccagugcgacggcuuucagaauaaaaagugggaucuguucgucgagcggucuaaagccuauagcaacuguuacccuuaugacgugcccgauuacgcuucccuccgcucucugguugccagcuccgggacccuugaauuuaauaacgagagcuucaauuggacgggagugacccaaaacggcacaucuuccgcuugcauuagacggagcaauucuuccuuuuucagccgccugaacuggcucacccaucugaauuuuaaguauccugcccuuaacgucacaaugcccaacaaugagcaguucgacaagcuguacaucuggggcgugcaccauccugggaccgauaaagaccagauuuuucucuaugcgcagucuuccggaagaaucacgguuagcacaaagcggucccaacaggccgugauuccgaacaucggcucucgccccagaauccggaauauuccuagccgcaucuccauuuacuggaccaucgucaaacccggggauauucugcugaucaacagcacaggaaaucucaucgcuccuagaggcuacuucaagauucggucugggaaauccagcaucaugcgcucugacgcccccauuggaaaguguaagagcgaaugcaucaccccgaacggcuccauuccuaaugacaaacccuuucagaacgugaauagaaucaccuauggcgcuuguccucgguacgugaagcagucuacacugaaacuugccacggggaugcgcaacguccccgagaagcaaaccagaggaaucuucggcgcgauugccggguuuaucgaaaauggaugggagggcaugguugaugggugguauggauuccggcaccagaacagcgagggcagaggccaggcugccgaccugaaauccacacaagcugccauugaucagaucaaugggaagcucaaccgccugauuggaaaaaccaaugaaaaguuccaccagaucgagaaggaauuuagcgagguggaaggccggauucaggaccuugagaaauacguggaggauacaaagaucgaccuguggucuuauaacgccgaacuccuggucgcucuggagaaccaacauaccaucgaucucacggacuccgaaaugaauaaacuguucgagaagaccaaaaagcagcuuagagaaaacgcggaggauauggggaauggaugcuuuaagauuuaccacaaaugugacaacacaugcaucggcagcauucgcaaugggaccuaugaucaugacguguaccgggacgaggcccugaacaauagauuccagaucaagggcguugaacucaaaucuggauacaaggauuggauucuguggaucuccuuugcuaucagcugcuuccuucuguguguggcccuccugggcuuuauuaugugggccugccagaaagggaacauccgcuguaauauuugcaucuga

SEQ ID NO: 203580 - RNA, 1701 nt, Artificial Sequence; identical to SEQ ID NO: 201955
  derived and/or modified CDS sequence (opt5) from hemagglutinin__InfluenzaA__AHL97048

SEQ ID NO: 203581 - RNA, 1701 nt, Artificial Sequence
  derived and/or modified CDS sequence (opt5) from hemagglutinin__InfluenzaA__AHL97060
augaagaccaucauugcccugagcuacauccucugccugguguucgcucagaaaauucccggcaacgacaauuccacagccacgcuuugucuggggcaccaugcggucccuaacggaaccaucguuaagacaauuaccaaugauagaaucgaggugacaaacgcuaccgaacucgugcaaaauucuagcaucggcgagauuugcgacuccccgcaccagauccuggauggggaaaacuguacacuuauugacgcccugcucggagauccccagugcgacggcuuucagaauaaaaagugggaucuguucgucgagcggucuaaagccuauagcaacuguuacccuuaugacgugcccgauuacgcuucccugcgcucucucguugccagcuccgggacccuggaauuuaauaacgagagcuucaauuggacgggagugacccaaaacggcacaucuuccgcuugcaucagacggagcaauucuuccuuuuucagccgccuuaacuggcugacccaucucaauuuuaaguauccugcccugaacgucacaaugcccaacaaugagcaguucgacaaacuuuacauuuggggcgugcaccauccugggaccgauaaagaccagaucuuucuguaugcgcagucuuccggaagaauuacgguuagcacaaagcggucccaacaggccgugaucccgaacaucggcucucgcccccggauuagaaauaucccuagccgcauuuccaucuacuggaccauugucaaacccggggauauccuccugaucaacagcacaggaaaucugauugcuccuagaggcuacuucaagauccggucugggaaauccagcauuaugcgcucugacgcccccaucggaaaguguaagagcgaaugcauuaccccgaacggcuccaucccuaaugacaaacccuuucagaacgugaauagaaucaccuauggcgcuuguccucgguacgugaagcagucuacacucaaacuggccacggggaugcgcaacguccccgagaagcaaaccagaggaauuuucggcgcgaucgccggguuuauugaaaauggaugggagggcaugguugaugggugguauggauuccggcaccagaacagcgagggcagaggccaggcugccgaccuuaaauccacacaagcugccaucgaucagauuaaugggaagcugaaccgccucaucggaaaaaccaaugaaaaguuccaccagauugagaaggaauuuagcgagguggaaggccggauccaggaccuggagaaauacguggaggauacaaagaucgaccuuuggucuuauaacgccgaacugcucgucgcucuggagaaccaacauaccauugaucugacggacuccgaaaugaauaaacucuucgagaagacaaagaagcagcugagagaaaacgcggaggauauggggaauggaugcuuuaagaucuaccacaaaugugacaacgccugcauuggcagcauccgcaaugggaccuaugagcaugauguguaccgggacgaagcucuuaacaauagauuccagauuaagggcguugagcugaaaucuggauacaaggacuggauccucuggaucuccuuugccauuagcugcuuccugcuuuguguggcccugcucggcuuuaucaugugggcuugccagaaagggaacauucgcuguaauaucugcauuuga

SEQ ID NO: 203582 - RNA, 1701 nt, Artificial Sequence; identical to SEQ ID NO: 202066
  derived and/or modified CDS sequence (opt5) from hemagglutinin__InfluenzaA__AHL97072

SEQ ID NO: 203583 - RNA, 1701 nt, Artificial Sequence; identical to SEQ ID NO: 202066
  derived and/or modified CDS sequence (opt5) from hemagglutinin__InfluenzaA__AHL97084

SEQ ID NO: 203584 - RNA, 1701 nt, Artificial Sequence; identical to SEQ ID NO: 201907
  derived and/or modified CDS sequence (opt5) from hemagglutinin__InfluenzaA__AHL97096

SEQ ID NO: 203585 - RNA, 1701 nt, Artificial Sequence; identical to SEQ ID NO: 202069
  derived and/or modified CDS sequence (opt5) from hemagglutinin__InfluenzaA__AHL97108

SEQ ID NO: 203586 - RNA, 1701 nt, Artificial Sequence
  derived and/or modified CDS sequence (opt5) from hemagglutinin__InfluenzaA__AHL97120
augaagaccaucauugcccugagcuacauccucugccugguguucgcucagaaacuucccggcaacgacaauuccacagccacgcugugucucgggcaccaugcggucccuaacggaaccauuguuaagacaaucaccaaugauagaauugaggugacaaacgcuaccgaacuggugcaaaauucuagcaucggcgagaucugcgacuccccgcaccagauucuugauggggaaaacuguacacugaucgacgcccuccugggagauccccagugcgacggcuuucagaauaaaaagugggaucuguucgucgagcggucuaaagccuauagcaacuguuacccuuaugacgugcccgauuacgcuucccuccgcucucugguugccagcuccgggacccuugaauuuaauaacgagagcuucaauugggcuggagugacgcaaaacggcaccucuuccgccugcauuagaggcagcaauucuuccuuuuucagccggcugaacuggcucacacaucugaauuuuaaguauccugcgcuuaacgucaccaugcccaacaaugagcaguucgacaagcuguacaucuggggagugcaccauccugggacagauaaagaccagauuuuucucuaugcccagucuuccggccgcaucaccguuagcacgaagagaucccaacaggcugugauuccgaacaucgggucucggccccgcaucagaaauauuccuagccggaucuccauuuacuggacaaucgucaaacccggagauauucugcugaucaacagcaccggcaaucucaucgccccucgcggguacuucaagauuagaucuggaaaauccagcaucaugcggucugacgcucccauuggcaaguguaagagcgaaugcaucacaccgaacggcuccauuccuaaugacaaacccuuucagaacgugaaucgcgugaccuauggggccuguccuagauacgucaagcagucuacccugaaacuugcgacaggaaugcggaacguucccgagaagcaaacgcgcggcaucuucggggccaucgcuggauuuauugaaaauggcugggaggggaugguggauggaugguauggcuucagacaccagaacagcgagggccgggggcaggccgcugaccugaaauccacccaagccgccaucgaucagauuaauggaaagcucaacagacugaucggcaaaacaaaugaaaaguuccaccagauugagaaggaauuuagcgagguggaagggcgcauccaggaccuugagaaauacgucgaggauaccaagauugaccuguggucuuauaacgcugaacuccugguggcgcuggagaaccaacauacaaucgaucucaccgacuccgaaaugaauaaacuguucgagaagacgaaaaagcagcuucgggaaaacgccgaggauaugggaaauggcugcuuuaagaucuaccacaaaugugacaacgcuugcauugggagcaucauuaauggcacauaugaucaugacguuuacagagacgaggcccugaacaaucgcuuccagaucaagggaguggaacucaaaucuggcuacaaggauuggauucuguggaucuccuuugccaucagcugcuuccuucugugugucgcucuccugggguuuauuaugugggccugccagaaaggaaacauccgguguaauauuugcaucuga

SEQ ID NO: 203587 - RNA, 1701 nt, Artificial Sequence
  derived and/or modified CDS sequence (opt5) from hemagglutinin__InfluenzaA__AHL97132
augaagaccaucauugcccugagcuacauccucugccugguguucgcucagaaacuucccggcaacgacaauuccacagccacgcugugucucgggcaccaugcggucccuaacggaaccauuguuaagacaaucaccaaugaucaaauugaggugacaaacgcuaccgaacuggugcaaaauucuagcaucggcgagaucugcgacuccccgcaccagauucuugauggggaaaacuguacacugaucgacgcccuccugggagauccccagugcgacggcuuucagaauaaaaagugggaucuguucgucgagagaucuaaagccuauagcaacuguuacccuuaugacgugcccgauuacgcuucccuccggucucugguugccagcuccgggacccuugaauuuaauaacgagagcuucaauugggcuggagugacgcagaacggcaccucuuccgccugcauucgcggcagcaauucuuccuuuuucagcagacugaacuggcucacacaucugaauuuuaaguauccugcgcuuaacgucaccaugcccaacaaugagcaguucgacaagcuguacaucuggggagugcaccauccugggacagauaaagaccagauuuuucucuaugcccaaucuuccggccggaucaccguuagcacgaagcgcucccagcaggcugugauuccgaacaucgggucuagaccccggauccgcaauauuccuagcagaaucuccauuuacuggacaaucgucaaacccggagauauucugcugaucaacagcaccggcaaucucaucgccccucggggguacuucaagauucgcucuggaaaauccagcaucaugagaucugacgcucccauuggcaaguguaagagcgaaugcaucacaccgaacggcuccauuccuaaugacaaacccuuucagaacgugaaucggaucaccuauggggccuguccucgcuacgugaagcaaucuacccugaaacuugcgacaggaaugagaaacguccccggcaagcagacgcgggggaucuucggagccauugcuggcuuuaucgagaaugggugggaaggaaugguugauggcugguauggcuuccgccaccagaacagcgaggggagaggacaagccgcugaccugaaauccacccaggccgccauugaucagaucaauggcaagcucaaccggcugauugggaaaacaaaugagaaguuccaccagaucgaaaaggaguuuagcgaaguggagggacgcauucaagaccuugaaaaauacguggaggauaccaagaucgaccuguggucuuauaacgcugagcuccuggucgcgcuggaaaaccagcauacaaucgaucucaccgacuccgagaugaauaaacuguucgaaaagacgaaaaagcagcuuagagagaacgccgaagauaugggcaaugggugcuuuaagauuuaccacaaaugugacaacgcuugcaucggcagcauucggaauggaacauaugaucaugacguguacagagacgaggcccugaacaaucgcuuccagaucaagggcguugagcucaaaucuggguacaaggauuggauucuguggaucuccuuugccaucagcugcuuccuucuguguguggcucuccugggauuuauuaugugggccugccaaaaaggcaacauccgguguaauauuugcaucuga

SEQ ID NO: 203588 - RNA, 1701 nt, Artificial Sequence; identical to SEQ ID NO: 202066
  derived and/or modified CDS sequence (opt5) from hemagglutinin__InfluenzaA__AHL97144

SEQ ID NO: 203589 - RNA, 1701 nt, Artificial Sequence; identical to SEQ ID NO: 202066
  derived and/or modified CDS sequence (opt5) from hemagglutinin__InfluenzaA__AHL97156

SEQ ID NO: 203590 - RNA, 1701 nt, Artificial Sequence; identical to SEQ ID NO: 202066
  derived and/or modified CDS sequence (opt5) from hemagglutinin__InfluenzaA__AHL97168

SEQ ID NO: 203591 - RNA, 1701 nt, Artificial Sequence; identical to SEQ ID NO: 201940
  derived and/or modified CDS sequence (opt5) from hemagglutinin__InfluenzaA__AHL97180

SEQ ID NO: 203592 - RNA, 1701 nt, Artificial Sequence; identical to SEQ ID NO: 202066
  derived and/or modified CDS sequence (opt5) from hemagglutinin__InfluenzaA__AHL97192

SEQ ID NO: 203593 - RNA, 1701 nt, Artificial Sequence; identical to SEQ ID NO: 202066
  derived and/or modified CDS sequence (opt5) from hemagglutinin__InfluenzaA__AHL97204

SEQ ID NO: 203594 - RNA, 1701 nt, Artificial Sequence; identical to SEQ ID NO: 202066
  derived and/or modified CDS sequence (opt5) from hemagglutinin__InfluenzaA__AHL97216

SEQ ID NO: 203595 - RNA, 1701 nt, Artificial Sequence
  derived and/or modified CDS sequence (opt5) from hemagglutinin__InfluenzaA__AHL97228
augaagaccaucauugcccugagcuacauccucugccugguguucgcucagaaacuucccggcaacgacaauuccacagccacgcugugucucgggcaccaugcggucccuaacggaaccguugugaagacaauuaccaaugauagaaucgaggugacaaacgcuaccgaacugguccaaaauucuagcauuggcgagaucugcgacuccccgcaccagauccuugauggggaaaacuguacacugauugacgcccuccugggagauccccagugcgacggcuuucagaauaaaaagugggaucuguucguggagcggucuaaagccuauagcaacuguuacccuuaugacguucccgauuacgcuucccuccgcucucugguggccagcuccgggacccuugaauuuaauaacgagagcuucaauuggacgggagucacccaaaacggcacaucuuccgcuugcaucagacggagcaauaacuccuuuuucucucgccugaauuggcucacccaucugaacuuuaaguauccugcccuuaacgugacaaugcccaauaacgagcaguucgacaagcuguacauuuggggcguucaccauccugggaccgauaaagaccagaucuuucucuaugcgcagagcucuggaagaauuacgguguccacaaagcggagccaacaggccgucaucccgaauauuggcucccgccccagaauccggaacaucccuucucgcauuagcaucuacuggaccauugugaaacccggggauauccugcugauuaauuccacaggaaaccucaucgcuccuagaggcuacuucaagauccggagcgggaaaucuuccauuaugcgcagcgacgcccccaucggaaaguguaagucugaaugcauuaccccgaauggcagcaucccuaacgacaaacccuuucagaaugugaacagaauuaccuauggcgcuuguccucgguacgucaagcaguccacacugaaacuugccacggggaugcgcaauguucccgagaagcaaaccagaggaaucuucggcgcgaucgccggguuuauugaaaacggaugggagggcaugguggaugggugguauggauuccggcaccaaaauucugagggcagaggccaggcugccgaccugaaaagcacacaggcugccaucgaucagauuaacgggaagcucaaucgccugaucggaaaaaccaacgaaaaguuccaccagauugagaaggaauuuuccgagguggaaggccggauccaggaccuugagaaauacgucgaggauacaaagauugaccuguggagcuauaacgccgaacuccugguggcucuggagaaucaacauaccaucgaucucacggacucugaaaugaacaaacuguucgagaagaccaaaaagcagcuuagagaaaaugcggaggauauggggaacggaugcuuuaagaucuaccacaaaugugacaaugccugcauuggcuccauccgcaacgggacauaugaucaugacguuuaccgggacgaggcucugaauaacagauuccagauuaagggcguggaacucaaaagcggauacaaggauuggauccuguggauuucuuuugccaucuccugcuuccuucugugugucgugcuccugggcuuuaucaugugggccugccagaaagggaauauucgcuguaacaucugcauuuga

SEQ ID NO: 203596 - RNA, 1701 nt, Artificial Sequence; identical to SEQ ID NO: 202066
  derived and/or modified CDS sequence (opt5) from hemagglutinin__InfluenzaA__AHL97240

SEQ ID NO: 203597 - RNA, 1701 nt, Artificial Sequence
  derived and/or modified CDS sequence (opt5) from hemagglutinin__InfluenzaA__AHL97252
augaagaccaucauugcccugagcuacauccucugccugguguucgcucaggagcuucccggcaacgacgauuccacagccacgcugugucucgggcaccaugcggucccuaauggaaccauuguuaaaacaaucaccaacgaccaaauugaagugacaaaugcuaccgagcuggugcagucuagcuccacaggcgaaaucugcaacucuccgcaccagauccuugauggggagaauuguacccugauugacgcccuccugggagauccccagugcgacggcuuucaaaacaagaaaugggaucuguucgucgaaagaagcaaggcccauuccaauuguuauccuuacgacgugcccgauuaugcuucucuccggagccugguugccuccagcgggacgcuugaguuuaacaaugagaacuucaauuggaccggagugacacagaacggcaccucuuccgcuugcauccgcagaagcaauaacagcuuuuucucccggcugaauuggcucacacaccugaacuuuaaauacccugcccuuaacgucaccaugcccaauaacgaacaguucgacaagcuguauauuuggggcgugcaucacccugggacggauaaggaccagaucuuucucuacgcgcaagccagcggacgcauuacaguuucuaccaaaagaucccagcaggcugugaucccgaauauuggcagccggccccgcgucagaaacaucccuucccgggugucuaucuauuggacaauugugaagcccggggauauccugcugauuaauagcaccggaaaccucaucgccccucgcggcuacuucaaaauuagauccgggaagucuucuaucaugcgguccgacgcucccaucggaaaauguaauagcgccugcauuaccccgaacggcucuaucccuaaugacaagcccuuucagaacgucaaucgcauuacauacggcgcguguccuagauauguuaagcaaaacacgcugaaacuugccaccgggaugcggaaugugcccgagaagcagacacgcggaaucuucggcgcuauugccggguuuaucgaaaacggaugggagggcaugguggaugggugguacggauucagacaccagaauagcgagggccggggccaagcugccgaccugaaauccacccaggccgcuaucgaucagauuaacgggaagcucaacagacugaucggaaaaacaaaugaaaaguuccaucagauugagaaagaauuuucugaggucgaaggccgcauccaagaccuugagaaguauguggaggauaccaagauugaccuguggagcuacaacgcggaacuccugguugcccuggagaaucagcacacgaucgaucucacagacuccgaaaugaacaaacuguucgagaagaccaaaaagcagcuucgggaaaaugcugaggauauggggaacggaugcuuuaaaauuuaucauaagugugacaaugccugcaucggcagcaucagaaacgggaccuacgaucacgacguguaucgcgacgaggcccugaauaaccgguuccagauuaagggcgucgaacucaaaucuggauacaaggauuggauccuguggauuuccuuugcuaucagcugcuuccuucuguguguggcccuccugggcuuuauuaugugggcgugccaaaaagggaauaucagauguaacaucugcauuuga

SEQ ID NO: 203598 - RNA, 1701 nt, Artificial Sequence; identical to SEQ ID NO: 201930
  derived and/or modified CDS sequence (opt5) from hemagglutinin__InfluenzaA__AHL97264

SEQ ID NO: 203599 - RNA, 1701 nt, Artificial Sequence; identical to SEQ ID NO: 202066
  derived and/or modified CDS sequence (opt5) from hemagglutinin__InfluenzaA__AHL97276

SEQ ID NO: 203600 - RNA, 1701 nt, Artificial Sequence
  derived and/or modified CDS sequence (opt5) from hemagglutinin__InfluenzaA__AHL97288
augaagaccaucauugcccugagcuacauccucugccugguguucgcucagaaacuucccggcaacgacaauuccacagccacgcugugucucgggcaccaugcggucccuaacggaaccauuguuaagacaaucaccaaugauagaauugaggugacaaacgcuaccgaacuggugcaaaauucuagcaucggcgagaucugcaacuccccgcaccagauucuugacggggaaaauuguacacugaucgaugcccuccugggagacccccagugcgauggcuuucagaacaaaaagugggaccuguucgucgagcggucuaaagccuauagcaauuguuacccuuaugaugugcccgacuacgcuucccuccgcucucugguugccagcuccgggacccuugaauuuaacaaugagagcuucaacuggacgggagugacccaaaauggcacaucuuccgcuugcauuagacggagcaacucuuccuuuuucagccgccugaauuggcucacccaucugaacuuuaaguauccugcccuuaacgucacaaugcccaauaacgagcaguucgauaagcuguacaucuggggcgugcaccauccugggaccgacaaagaucagauuuuucucuaugcgcagucuuccggaagaaucacgguuagcacaaagcggucccaacaggccgugauuccgaauaucggcucucgccccagaauccggaacauuccuagccgcaucuccauuuacuggaccaucgucaaacccggggacauucugcugaucaauagcacaggaaaccucaucgcuccuagaggcuacuucaagauucggucugggaaauccagcaucaugcgcucugaugcccccauuggaaaguguaagagcgaaugcaucaccccgaauggcuccauuccuaacgacaaacccuuucagaaugugaacagaaucaccuauggcgcuuguccucgguacgugaagcagucuacacugaaacuugccacggggaugcgcaauguccccgagaagcaaaccagaggaaucuucggcgcgauugccggguuuaucgaaaacggaugggagggcaugguugacgggugguauggauuccggcaccagaauagcgagggcagaggccaggcugccgaucugaaauccacacaagcugccauugaccagaucaacgggaagcucaaucgccugauuggaaaaaccaacgaaaaguuccaccagaucgagaaggaauuuagcgagguggaaggccggauucaggaucuugagaaauacguggaggacacaaagaucgaucuguggucuuauaacgccgaacuccuggucgcucuggagaaucaacauaccaucgaccucacggauuccgaaaugaacaaacuguucgagaagauuaaaaagcagcuuagagaaaaugcggaggacauggggaacggaugcuuuaagaucuaccacaaaugugauaaugccugcauuggcagcauccgcaacgggacauaugaccauaauguguaccgggaugaggcucugaacaauagauuccagauuaagggcguugaacucaaaucuggauacaaggacuggauccuguggaucuccuuugccauuagcugcuuccuucuguguguggcccuccugggcuuuaucaugugggcuugccagaaagggaacauucgcuguaauaucugcauuuga

SEQ ID NO: 203601 - RNA, 1701 nt, Artificial Sequence; identical to SEQ ID NO: 201940
  derived and/or modified CDS sequence (opt5) from hemagglutinin__InfluenzaA__AHL97300

SEQ ID NO: 203602 - RNA, 1701 nt, Artificial Sequence; identical to SEQ ID NO: 202066
  derived and/or modified CDS sequence (opt5) from hemagglutinin__InfluenzaA__AHL97312

SEQ ID NO: 203603 - RNA, 1701 nt, Artificial Sequence; identical to SEQ ID NO: 202066
  derived and/or modified CDS sequence (opt5) from hemagglutinin__InfluenzaA__AHL97336

SEQ ID NO: 203604 - RNA, 1701 nt, Artificial Sequence; identical to SEQ ID NO: 202066
  derived and/or modified CDS sequence (opt5) from hemagglutinin__InfluenzaA__AHL97348

SEQ ID NO: 203605 - RNA, 1701 nt, Artificial Sequence
  derived and/or modified CDS sequence (opt5) from hemagglutinin__InfluenzaA__AHL97372
augaagaccaucauugcccugagcuacauccucugccugguguucgcucagaaacuucccggcaacgacaauuccacagccacgcugugucucgggcaccaugcggucccuaacggaaccauuguuaagacaaucaccaaugauagaauugaggugacaaacgcuaccgaacuggugcaaaauucuagcaucggcgagaucugcgacuccccgcaccagauucuugauggggaaaacuguacacugaucgacgcccuccugggagauccccagugcgacggcuuucagaauaaaaagugggaucuguucgucgagcggucuaacgccuauagcaauuguuacccuuaugacgugcccgauuacgcuucccuccgcucucugguugccagcuccgggacccuugaauuuaacaaugagagcuucaacugggcuggagugacgcaaaauggcaccucuuccgccugcauuagaggcagcaacucuuccuuuuucagccggcugaauuggcucacacaucugaacuuuaaauauccugcgcuuaacgucaccaugcccaauaacgagcaguucgacaagcuguacaucuggggagugcaccauccugggacagauaaggaccagauuuuucucuaugcccagucuuccggccgcaucaccguuagcacgaaaagaucccaacaggcugugauuccgaauaucgggucucggccccgcaucagaaacauuccuagccggaucuccauuuacuggacaaucgucaagcccggagauauucugcugaucaauagcaccggcaaccucaucgccccucgcggguacuucaaaauuagaucuggaaaguccagcaucaugcggucugacgcucccauuggcaaauguaagagcgaaugcaucacaccgaauggcuccauuccuaacgacaagcccuuucagaaugugaaccgcaucaccuauggggccuguccuagauacgugaaacagucuacccugaaacuugcgacaggaaugcggaauguccccgagaagcaaacgcgcggcaucuucggggccauugcuggauuuaucgaaaacggcugggaggggaugguugauggaugguauggcuucagacaccagaauagcgagggccgggggcaggccgcugaccugaaguccacccaagccgccauugaucagaucaacggaaaacucaauagacugauuggcaagacaaacgaaaaauuccaccagaucgagaaggaauuuagcgagguggaagggcgcauucaggaccuugagaaguacguggaggauaccaaaaucgaccuguggucuuauaacgcugaacuccuggucgcgcuggagaaucaacauacaaucgaucucaccgacuccgaaaugaacaagcuguucgagaaaacgaagaaacagcuucgggaaaaugccgaggauaugggaaacggcugcuuuaagauuuaccacaagugugacaaugcuugcaucgggagcauuagaaacggcacauaugaucaugacguguaccgcgacgaggcccugaauaaccgguuccagaucaaaggaguugaacucaagucuggcuacaaagauuggauucuguggaucuccuuugccaucagcugcuuccuucuguguguggcucuccugggguuuauuaugugggccugccagaagggaaauaucagauguaacauuugcaucuga

SEQ ID NO: 203606 - RNA, 1701 nt, Artificial Sequence; identical to SEQ ID NO: 202066
  derived and/or modified CDS sequence (opt5) from hemagglutinin__InfluenzaA__AHL97384

SEQ ID NO: 203607 - RNA, 1701 nt, Artificial Sequence; identical to SEQ ID NO: 201930
  derived and/or modified CDS sequence (opt5) from hemagglutinin__InfluenzaA__AHL97396

SEQ ID NO: 203608 - RNA, 1701 nt, Artificial Sequence; identical to SEQ ID NO: 201907
  derived and/or modified CDS sequence (opt5) from hemagglutinin__InfluenzaA__AHL97408

SEQ ID NO: 203609 - RNA, 1701 nt, Artificial Sequence; identical to SEQ ID NO: 203578
  derived and/or modified CDS sequence (opt5) from hemagglutinin__InfluenzaA__AHL97420

SEQ ID NO: 203610 - RNA, 1701 nt, Artificial Sequence
  derived and/or modified CDS sequence (opt5) from hemagglutinin__InfluenzaA__AHL97444
augaagaccaucauugcccugagcuacauccucugccugguguucgcucagaaacuucccggcaacgacaauuccacagccacgcugugucucgggcaccaugcggucccuaacggaaccauuguuaagacaaucaccaaugauagaauugaggugacaaacgcuaccgaacuggugcaaaauucuagcaucggcgagaucugcgacuccccgcaccagauucuugauggggaaaacuguacacugaucgacgcccuccugggagauccccagugcgacggcuuucagaauaaaaagugggaucuguucgucgagcggucuaaagccuauagcaacuguuacccuuaugacgugcccgauuacgcuucccuccgcucucugguugccagcuccgggacccuugaauuuaauaacgagagcuucaauugggcuggagugacgcaaaacggcaccucuuccgccugcauuagaggcagcaauucuuccuuuuucagccggcugaacuggcucacacaucugaauuuuaaguauccugcgcuuaacgucaccaugcccaacaaugagcaguucgacaagcuguacaucuggggagugcaccauccugggacagauaaagaccagauuuuucucuaugcccagucuuccggccgcaucaccguuagcacgaagagaucccaacaggcugugauuccgaacaucgggucucggccccgcaucagaaauauuccuagccggaucuccauuuacuggacaaucgucaaacccggagauauucugcugaucaacagcaccggcaaucucaucgccccucgcggguacuucaagauuagaucuggaaaauccagcaucaugcggucugacgcucccauuggcaaguguaagagcgaaugcaucacaccgaacggcuccauuccuaaugacaaacccuuucagaacgugaaucgcaucaccuaugggaccuguccuagauacgugaagcagucuacacugaaacuugccacgggaaugcggaacguccccgagaagcaaacccgcggcaucuucggggcgauugccggauuuaucgaaaauggcugggaggggaugguugauggaugguauggcuucagacaccagaacagcgagggccgggggcaggcugccgaccugaaauccacacaagcugccauugaucagaucaauggaaagcucaacagacugauuggcaaaaccaaugaaaaguuccaccagaucgagaaggaauuuagcgagguggaagggcgcauucaggaccuugagaaauacguggaggauacaaagaucgaccuguggucuuauaacgccgaacuccuggucgcucuggagaaccaacauaccaucgaucucacggacuccgaaaugaauaaacuguucgagaagaccaaaaagcagcuucgggaaaacgcggaggauaugggaaauggcugcuuuaagauuuaccacaaaugugacaacgccugcaucgggagcauuagaaauggcacauaugaucaugacguguaccgcgacgaggcucugaacaaucgguuccagaucaagggaguugaacucaaaucuggcuacaaggauuggauucuguggaucuccuuugccaucagcugcuuccuucuguguguggcccuccugggguuuauuaugugggcuugccagaaaggaaacaucagauguaauauuugcaucuga

SEQ ID NO: 203611 - RNA, 1701 nt, Artificial Sequence; identical to SEQ ID NO: 201940
  derived and/or modified CDS sequence (opt5) from hemagglutinin__InfluenzaA__AHL97456

SEQ ID NO: 203612 - RNA, 1701 nt, Artificial Sequence
  derived and/or modified CDS sequence (opt5) from hemagglutinin__InfluenzaA__AHL97468
augaagaccaucauugcccugagcuacauccucugccugguguucgcucagaaacuucccggcaacgacaauuccacagccacgcugugucucgggcaccaugcggucccuaacggaaccauuguuaagacaaucaccaaugauagaauugaggugacaaacgcuaccgaacuggugcaaaauucuagcaucggcgagaucugcgacuccccgcaccagauucuugauggggaaaacuguacacugaucgacgcccuccugggagauccccagugcgacggcuuucagaauaaaaagugggaucuguucgucgagcggucuaaagccuauagcaacuguuacccuuaugacgugcccgauuacgcuucccuccgcucucugguugccagcuccgggacccuugaauuuaauaacgagagcuucaauuggacgggagugacccaaaacggcacaucuuccgcuugcauuagacggagcaauucuuccuuuuucagccgccugaacuggcucacccaucugaauuuuaaguauccugcccuuaacgucacaaugcccaacaaugagcaguucgacaagcuguacaucuggggcgugcaccauccugggaccgauaaagaccagauuuuucucuaugcgcagucuuccggaagaaucacgguuagcacaaagcggucccaacaggccgugauuccgaacaucggcucucgccccagaauccggaauauuccuagccgcaucuccauuuacuggaccaucgucaaacccggggauauucugcugaucaacagcacaggaaaucucaucgcuccuagaggcuacuucaagauucggucugggaaauccagcaucaugcgcucugacgcccccauuggaaaguguaagagcgaaugcaucaccccgaacggcuccauuccuaaugacaaacccuuucagaacgugaauagaaucaccuauggcgcuuguccucgguacgugaagcagucuacacugaaacuugccacggggaugcgcaacguccccgagaagcaaaccagaggaaucuucggcgcgauugccggguuuaucgaaaauggaugggagggcaugauggaugggugguauggauuccggcaccagaacagcgagggcagaggccaggcugccgaccugaaauccacacaagcugccauugaucagaucaaugggaagcucaaccgccugauuggaaaaaccaaugaaaaguuccaccagaucgagaaggaauuuagcgagguugaaggccggauucaggaccuugagaaauacguggaggauacaaagaucgaccuguggucuuauaacgccgaacuccugguggcucuggagaaccaacauaccaucgaucucacggacuccgaaaugaauaaacuguucgagaagaccaaaaagcagcuuagagaaaacgcggaggauauggggaauggaugcuuuaagauuuaccacaaaugugacaacgccugcaucggcagcauucgcaaugggacauaugaucauaacgucuaccgggacgaggcucugaauaacagauuccagaucaagggcguggaacucaaaucuggauacaaggacuggauucuguggaucuccuuugccaucagcugcuuccuucuguguguugcccuccugggcuuuauuaugugggcuugccagaaagggaauauccgcuguaacauuugcaucuga

SEQ ID NO: 203613 - RNA, 1701 nt, Artificial Sequence; identical to SEQ ID NO: 202066
  derived and/or modified CDS sequence (opt5) from hemagglutinin__InfluenzaA__AHL97480

SEQ ID NO: 203614 - RNA, 1701 nt, Artificial Sequence; identical to SEQ ID NO: 202066
  derived and/or modified CDS sequence (opt5) from hemagglutinin__InfluenzaA__AHL97493

SEQ ID NO: 203615 - RNA, 1701 nt, Artificial Sequence; identical to SEQ ID NO: 203578
  derived and/or modified CDS sequence (opt5) from hemagglutinin__InfluenzaA__AHL97505

SEQ ID NO: 203616 - RNA, 1701 nt, Artificial Sequence
  derived and/or modified CDS sequence (opt5) from hemagglutinin__InfluenzaA__AHL97517
augaagaccaucauugcccugagcuacauccucugccugguguucgcucagaaacuucccggcaacgacaauuccacagccacgcugugucucgggcaccaugcggucccuaacggaaccauuguuaagacaaucaccaaugauagaauugaggugacaaacgcuaccgaacuggugcaaaauucuagcaucggcgagaucugcgacuccccgcaccagauucuugauggggaaaacuguacacugaucgacgcccuccugggagauccccagugcgacggcuuucagaauaaaaagugggaucuguucgucgagcggucuaaagccuauagcaacuguuacccuuaugacgugcccgauuacgcuucccuccgcucucugguugccagcuccgggacccuugaauuuaauaacgagagcuucaauuggacgggagugacccaaaacggcacaucuuccgcuugcauuagacggagcaauucuuccuuuuucagccgccugaacuggcucacccaucugaauuuuaaguauccugcccuuaacgucacaaugcccaacaaugagcaguucgacaagcuguacaucuggggcgugcaccauccugggaccgauaaagaccagauuuuucucuaugcgcagucuuccggaagaaucacgguuagcacacaacggucccagcaggccgugauuccgaacaucggcucucgccccagaauccggaauauuccuagccgcaucuccauuuacuggaccaucgucaagcccggggauauucugcugaucaacagcacaggaaaucucaucgcuccuagaggcuacuucaaaauucggucugggaaguccagcaucaugcgcucugacgcccccauuggaaaauguaagagcgaaugcaucaccccgaacggcuccauuccuaaugacaagcccuuucagaacgugaauagaaucaccuauggcgcuuguccucgguacgugaaacaaucuacacugaaacuugccacggggaugcgcaacguccccgagaagcagaccagaggaaucuucggcgcgauugccggguuuaucgaaaauggaugggagggcaugguugaugggugguauggauuccggcaccagaacagcgagggcagaggccaagcugccgaccugaaguccacacaggcugccauugaucagaucaaugggaaacucaaccgccugauuggaaagaccaaugaaaaauuccaccagaucgagaaggaauuuagcgagguggaaggccggauucaagaccuugagaaguacguggaggauacaaaaaucgaccuguggucuuauaacgccgaacuccuggucgcucuggagaaccagcauaccaucgaucucacggacuccgaaaugaauaagcuguucgagaaaacaaagaaacagcuuagagaaaacgcggaggauauggggaauggaugcuuuaagauuuaccacaagugugacaacgccugcaucggcagcauucgcaaugggaccuaugaucauaacguguaccgggacgaggcucugaauaacagauuccagaucaaaggcguugaacucaagucuggauacaaagacuggauucuguggaucuccuuugccaucagcugcuuccuucuguguguggcccuccugggcuuuauuaugugggcuugccaaaaggggaauauccgcuguaacauuugcaucuga

SEQ ID NO: 203617 - RNA, 1701 nt, Artificial Sequence; identical to SEQ ID NO: 201955
  derived and/or modified CDS sequence (opt5) from hemagglutinin__InfluenzaA__AHL97529

SEQ ID NO: 203618 - RNA, 1701 nt, Artificial Sequence; identical to SEQ ID NO: 201940
  derived and/or modified CDS sequence (opt5) from hemagglutinin__InfluenzaA__AHL97541

SEQ ID NO: 203619 - RNA, 1701 nt, Artificial Sequence; identical to SEQ ID NO: 202066
  derived and/or modified CDS sequence (opt5) from hemagglutinin__InfluenzaA__AHL97553

SEQ ID NO: 203620 - RNA, 1701 nt, Artificial Sequence; identical to SEQ ID NO: 201907
  derived and/or modified CDS sequence (opt5) from hemagglutinin__InfluenzaA__AHL97565

SEQ ID NO: 203621 - RNA, 1701 nt, Artificial Sequence
  derived and/or modified CDS sequence (opt5) from hemagglutinin__InfluenzaA__AHL97577
augaagaccaucauugcccugagcuacauccucugccugguguucgcucagaaaauucccggcaacgacaauuccacagccacgcuuugucuggggcaccaugcggucccuaacggaaccaucguuaagacaauuaccaaugauagaaucgaggugacaaacgcuaccgaacucgugcaaaauucuagcaucggcgagauuugcgacuccccgcaccagauccuggauggggaaaacuguacacuuauugacgcccugcucggagauccccagugcgacggcuuucagaauaaaaagugggaucuguucgucgagcggucuaaagccuauagcaacuguuacccuuaugacgugcccgauuacgcuucccugcgcucucucguugccagcuccgggacccuggaauuuaauaacgagagcuucaauuggacgggagugacccaaaacggcacaucuuccgcuugcaucagaggcagcaauucuuccuuuuucagccggcuuaacuggcugacccaucucaauuuuaaguauccugcccugaacgucacaaugcccaacaaugagcaguucgacaaacuuuacauuuggggagugcaccauccugggaccgauaaggaccagaucuuucuguaugcgcagucuuccggccgcauuacgguuagcacaaagagaucccaacaggccgugaucccgaacaucgggucucggccccgcauuagaaauaucccuagccggauuuccaucuacuggaccauugucaaacccggagauauccuccugaucaacagcacaggcaaucugauugcuccucgcggguacuucaagaucagaucuggaaaauccagcauuaugcggucugacgcccccaucggcaaguguaagagcgaaugcauuaccccgaacggcuccaucccuaaugacaaacccuuucagaacgugaaucgcaucaccuauggggcuuguccuagauacgugaagcagucuacacucaaacuggccacgggaaugcggaacguccccgagaagcaaacccgcggcauuuucggggcgaucgccggauuuauugaaaauggcugggaggggaugguugauggaugguauggcuucagacaccagaacagcgagggccgggggcaggcugccgaccuuaaauccacacaagcugccaucgaucagauuaauggaaagcugaacagacucaucggcaaaaccaaugaaaaguuccaccagauugagaaggaauuuagcgagguggaagggcgcauccaggaccuggagaaauacguggaggauacaaagaucgaccuuuggucuuauaacgccgaacugcucgucgcucuggagaaccaacauaccauugaucugacggacuccgaaaugaauaaacucuucgagcggacaaagaaacagcugagagaaaacgcggaggauaugggaaauggcugcuuuaagaucuaccacaagugugacaacgccugcauugggagcauccgcaauggcaccuaugaucaugacguguaccgggacgaggcucuuaacaauagauuccagauuaaaggaguugaacugaagcccggcuacaaagauuggauccucuggaucucuuuugccauuuccugcuuccugcuuuguguggcccugcucggguuuaucaugugggcuugccagaagggaaacauucgcuguaauaucugcauuuga

SEQ ID NO: 203622 - RNA, 1701 nt, Artificial Sequence; identical to SEQ ID NO: 202095
  derived and/or modified CDS sequence (opt5) from hemagglutinin__InfluenzaA__AHL97589

SEQ ID NO: 203623 - RNA, 1701 nt, Artificial Sequence; identical to SEQ ID NO: 202066
  derived and/or modified CDS sequence (opt5) from hemagglutinin__InfluenzaA__AHL97601

SEQ ID NO: 203624 - RNA, 1701 nt, Artificial Sequence; identical to SEQ ID NO: 201930
  derived and/or modified CDS sequence (opt5) from hemagglutinin__InfluenzaA__AHL97613

SEQ ID NO: 203625 - RNA, 1701 nt, Artificial Sequence; identical to SEQ ID NO: 203612
  derived and/or modified CDS sequence (opt5) from hemagglutinin__InfluenzaA__AHL97625

SEQ ID NO: 203626 - RNA, 1701 nt, Artificial Sequence; identical to SEQ ID NO: 201940
  derived and/or modified CDS sequence (opt5) from hemagglutinin__InfluenzaA__AHL97637

SEQ ID NO: 203627 - RNA, 1701 nt, Artificial Sequence
  derived and/or modified CDS sequence (opt5) from hemagglutinin__InfluenzaA__AHL97661
augaagaccaucauugcccugggcuacauccucugccugguguucgcucagaaacuucccgggaacgacaauagcacagccacgcugugucucggacaccaugcggucccuaacggcaccauuguuaagacaaucaccaaugauagaauugaggugacaaacgcuaccgaacuggugcaaaauuccucuaucggggagaucugcgacagcccgcaccagauucuugauggagaaaacuguacacugaucgacgcccuccugggcgauccccagugcgacggguuucagaauaaaaagugggaucuguucgucgagcgguccaaagccuauucuaacuguuacccuuaugacgugcccgauuacgcuagccuccgcucccugguugccucuagcggaacccuugaauuuaauaacgaguccuucaauuggacgggcgugacccaaaacggcacaagcucugcuugcauuagacgguccaauagcuccuuuuucucucgccugaacuggcucacccaucugaauuuuaaguauccugcccuuaacgucacaaugcccaacaaugagcaguucgacaagcuguacaucuggggagugcaccauccugggaccgauaaagaccagauuuuucucuaugcgcagagcucuggcagaaucacgguuuccacaaagcggagccaacaggccgugauuccgaacaucgggucccgccccagaauccggaauauuccuucucgcaucagcauuuacuggaccaucgucaaacccggagauauucugcugaucaacuccacaggcaaucucaucgcuccuagaggguacuucaagauucggagcggaaaaucuuccaucaugcgcagcgacgcccccauuggcaaguguaagucugaaugcaucaccccgaacggcagcauuccuaaugacaaacccuuucagaacgugaauagaaucaccuauggggcuuguccucgguacgugaagcaguccacacugaaacuugccacgggaaugcgcaacguccccgagaagcaaaccagaggcaucuucggggcgauugccggauuuaucgaaaauggcugggaggggaugguugauggaugguauggcuuccggcaccagaacucugagggcagagggcaggcugccgaccugaaaagcacacaagcugccauugaucagaucaauggaaagcucaaccgccugauuggcaaaaccaaugaaaaguuccaccagaucgagaaggaauuuuccgagguggaagggcggauucaggaccuugagaaauacguggaggauacaaagaucgaccuguggagcuauaacgccgaacuccuggucgcucuggagaaccaacauaccaucgaucucacggacucugaaaugaauaaacuguucgagaagaccaaaaagcagcuuagagaaaacgcggaggauaugggaaauggcugcuuuaagauuuaccacaaaugugacaacgccugcaucggguccauucgcaauggcacauaugaucauaacguguaccgggacgaggcucugaauaacagauuccagaucaagggaguugaacucaaaagcggcuacaaggacuggauucuguggaucucuuuugccaucuccugcuuccuucuguguguggcccuccugggguuuauuaugugggcuugccagaaaggaaauauccgcuguaacauuugcaucuga

SEQ ID NO: 203628 - RNA, 1701 nt, Artificial Sequence
  derived and/or modified CDS sequence (opt5) from hemagglutinin__InfluenzaA__AHL97673
augaagaccacaaucgcccugagcuacauucucugccugguguucgcucaggagcuucccggcaacgacgauuccacggccacccugugucucgggcaccaugcggucccuaauggaacaaucguuaaaaccauuacaaacgaccaaaucgaagugaccaaugcuacagagcuggugcagucuagcuccaccggcgaaauuugcaacucuccgcaccagauccuugauggggagaauuguacgcugaucgacgcccuccugggagauccccagugcgacggcuuucaaaacaagaaaugggaucuguucgucgaaagaagcaaggcccauuccaauuguuauccuuacgacgugcccgauuaugcuucucuccggagccugguugccuccagcgggacccuugaguuuaacaaugagucuuucaacuggacaggagugacccagaauggcacauccagcgcuugcauucgcagaucuaacaauuccuuuuucagccggcugaacuggcucacccaccugaauuuuaaauacccugcccuuaacgucacgaugcccaacaaugaacaguucgacaagcuguauaucuggggcgugcaucacccugggacagauaaggaccagauuuuucucuacgcgcaagccucuggacgcaucaccguuuccacaaaaagaagccagcaggcugugauuccgaacaucggcucccggccccgcgucagaaauauuccuucucgggugagcaucuauuggaccaucgugaagcccggggauauucugcugaucaacuccaccggaaaucucauugccccucgcggcuacuucaaaaucagaagcgggaagucuuccauuaugcggagcgacgcucccaucggaaaauguaacucugccugcaucacaccgaauggcagcauuccuaacgacaagcccuuucagaaugucaaccgcaucacguacggcgcguguccuagauauguuaagcaaaauacccugaaacuugccacagggaugcggaacgugcccgagaagcagacccgcggaauuuucggcgcuaucgccggguuuauugaaaauggaugggagggcaugguggaugggugguacggauucagacaccagaacuccgagggccggggccaagcugccgaccugaaaucuacacaggccgcuaucgaucagaucaaugggaagcucaacagacugauuggaaaaaccaacgaaaaguuccaucagaucgagaaagaauuuagcgaggucgaaggccgcauucaagaccuugagaaguauguggaggauacgaagaucgaccugugguccuacaaugcggaacuccugguugcccuggagaaccagcacacaauugaucucaccgacagcgaaaugaauaaacuguucgagaagaccaaaaagcagcuucgggaaaacgcugaggauauggggaauggaugcuuuaaaaucuaucauaagugugacaacgccugcauuggcucuaucagaaaugggacauacgaucacgacguguaucgcgacgaggcccugaacaaucgguuccagaucaagggcgucgaacucaaauccggauacaaggauuggauucuguggaucagcuuugcuauuucuugcuuccuucuguguguggcccuccugggcuuuaucaugugggcgugccaaaaagggaacauuagauguaauaucugcaucuga

SEQ ID NO: 203629 - RNA, 1701 nt, Artificial Sequence; identical to SEQ ID NO: 202066
  derived and/or modified CDS sequence (opt5) from hemagglutinin__InfluenzaA__AHL97685

SEQ ID NO: 203630 - RNA, 1701 nt, Artificial Sequence
  derived and/or modified CDS sequence (opt5) from hemagglutinin__InfluenzaA__AHL97697
augaagaccaucauugcccugagcuacauccucugccugguguucgcucagaaacuucccggcaacgacaauuccacagccacgcugugucucgggcaccaugcggucccuaacggaaccauuguuaagacaaucaccaaugauagaauugaggugacaaacgcuaccgaacuggugcaaaauucuagcaucggcgagaucugcgacuccccgcaccagauucuugauggggaaaacuguacacugaucgacgcccuccugggagauccccagugcgacggcuuucagaauaaaaagugggaucuguucgucgagcgggggaaagccuauucuaacuguuacccuuaugacgugcccgauuacgcuagccuccgcucccugguugccucuagcggaacccuugaauuuaauaacgaguccuucaauugggcuggcgugacgcaaaacggcaccagcucugccugcauuagaggguccaauagcuccuuuuucucucggcugaacuggcucacacaucugaauuuuaaguauccugcgcuuaacgucaccaugcccaacaaugagcaguucgacaagcuguacaucuggggagugcaccauccuggcacagauaaagaccagauuuuucucuaugcccagagcucugggcgcaucaccguuuccacgaagagaagccaacaggcugugauuccgaacaucggaucccggccccgcaucagaaauauuccuucucggaucagcauuuacuggacaaucgucaaacccggcgauauucugcugaucaacuccaccgggaaucucaucgccccucgcggauacuucaagauuagaagcggcaaaucuuccaucaugcggagcgacgcucccauuggcaaguguaagucugaaugcaucacaccgaacgggagcauuccuaaugacaaacccuuucagaacgugaaucgcaucaccuauggagccuguccuagauacgugaagcaguccacccugaaacuugcgacaggcaugcggaacguccccgagaagcaaacgcgcgggaucuucggagccauugcuggcuuuaucgaaaaugggugggagggaaugguugauggcugguauggcuucagacaccagaacucugaggggcggggacaggccgcugaccugaaaagcacccaagccgccauugaucagaucaauggcaagcucaacagacugauugggaaaacaaaugaaaaguuccaccagaucgagaaggaauuuuccgagguggaaggacgcauucaggaccuugagaaauacguggaggauaccaagaucgaccuguggagcuauaacgcugaacuccuggucgcgcuggagaaccaacauacaaucgaucucaccgacucugaaaugaauaaacuguucgagaagacgaaaaagcagcuucgggaaaacgccgaggauaugggcaaugggugcuuuaagauuuaccacaaaugugacaacgcuugcaucggcuccauuagaaauggaacauaugaucaugacguguaccgcgacgaggcccugaacaaucgguuccagaucaagggcguugaacucaaaagcggguacaaggauuggauucuguggaucucuuuugccaucuccugcuuccuucuguguguggcucuccugggauuuauuaugugggccugccagaaaggcaacaucagauguaauauuugcaucuga

SEQ ID NO: 203631 - RNA, 1701 nt, Artificial Sequence; identical to SEQ ID NO: 201940
  derived and/or modified CDS sequence (opt5) from hemagglutinin__InfluenzaA__AHL97709

SEQ ID NO: 203632 - RNA, 1701 nt, Artificial Sequence; identical to SEQ ID NO: 202066
  derived and/or modified CDS sequence (opt5) from hemagglutinin__InfluenzaA__AHL97721

SEQ ID NO: 203633 - RNA, 1701 nt, Artificial Sequence; identical to SEQ ID NO: 201940
  derived and/or modified CDS sequence (opt5) from hemagglutinin__InfluenzaA__AHL97733

SEQ ID NO: 203634 - RNA, 1701 nt, Artificial Sequence; identical to SEQ ID NO: 201930
  derived and/or modified CDS sequence (opt5) from hemagglutinin__InfluenzaA__AHL97745

SEQ ID NO: 203635 - RNA, 1701 nt, Artificial Sequence; identical to SEQ ID NO: 202066
  derived and/or modified CDS sequence (opt5) from hemagglutinin__InfluenzaA__AHL97757

SEQ ID NO: 203636 - RNA, 1701 nt, Artificial Sequence; identical to SEQ ID NO: 202066
  derived and/or modified CDS sequence (opt5) from hemagglutinin__InfluenzaA__AHL97769

SEQ ID NO: 203637 - RNA, 1701 nt, Artificial Sequence
  derived and/or modified CDS sequence (opt5) from hemagglutinin__InfluenzaA__AHL97781
augaagaccaucauugcccugagcuacauccucugccugguguucgcucaggagcuucccggcaacgacgauuccacagccacgcugugucucgggcaccaugcggucccuaauggaaccauuguuaaaacaaucaccaacgaccaaauugaagugacaaaugcuaccgagcuggugcagucuagcuccacaggcgaaaucugcaacucuccgcaccagauccuugauggggagaauuguacccugauugacgcccuccugggagauccccagugcgacggcuuucaaaacaagaaaugggaucuguucgucgaaagaagcaaggcccauuccaauuguuauccuuacgacgugcccgauuaugcuucucuccggagccugguugccuccagcgggacgcuugaguuuaacaaugagucuuucaacuggaccggagugacacagaauggcaccuccagcgcuugcauccgcagaucuaacaauuccuuuuucagccggcugaacuggcucacacaccugaauuuuaaauacccugcccuuaacgucaccaugcccaacaaugaacaguucgacaagcuguauauuuggggcgugcaucacccugggacggauaaggaccagaucuuucucuacgcgcaagccucuggacgcauuacaguuuccaccaaaagaagccagcaggcugugaucccgaacauuggcucccggccccgcgucagaaauaucccuucucgggugagcaucuauuggacaauugugaagcccggggauauccugcugauuaacuccaccggaaaucucaucgccccucgcggcuacuucaaaauuagaagcgggaacucuuccaucaugcggagcgacgcucccaucggaaaguguaauucuaccugcauuacaccgaacggcagcaucccuaaugacaaacccuuucagaacgucaaucgcauuacguacggcgccuguccuagauauguuaagcaaaacacccugaaacuugcgacagggaugcggaaugugcccgagaagcagacccgcggaaucuucggcgccauugcuggguuuaucgaaaacggaugggagggcaugguggaugggugguacggauucagacaccaaaauuccgagggccggggccaggccgcugaccugaagucuacacaggccgccaucgaucagauuaacgggaaacucaacagacugaucggaaagaccaaugaaaaauuccaucagauugagaaggaauuuagcgaggucgaaggccgcauccaagaccuugagaaauauguggaggauacgaagauugaccugugguccuacaacgcugaacuccugguugcgcuggagaaucagcacacaaucgaucucaccgacagcgaaaugaacaagcuguucgagaaaaccaagaaacagcuucgggaaaaugccgaggauauggggaacggaugcuuuaagauuuaucauaaaugugacaaugcuugcaucggcucuaucagaaacgggacauacgaucacgacguguaucgcgacgaggcccugaauaaccgguuccagauuaagggcgucgaacucaaguccggauacaaagauuggauccuguggauuagcuuugccaucucuugcuuccuucuguguguggcucuccugggcuuuauuaugugggccugccaaaaggggaauaucagauguaacaucugcauuuga

SEQ ID NO: 203638 - RNA, 1701 nt, Artificial Sequence; identical to SEQ ID NO: 202066
  derived and/or modified CDS sequence (opt5) from hemagglutinin__InfluenzaA__AHL97793

SEQ ID NO: 203639 - RNA, 1701 nt, Artificial Sequence
  derived and/or modified CDS sequence (opt5) from hemagglutinin__InfluenzaA__AHL97805
augaagaccaucauugcccugagcuacauccucugccugguguucgcucagaaacuucccggcaacgacaauuccacagccacgcugugucucgggcaccaugcggucccuaacggaaccauuguuaagacaaucaccaaugauagaauugaggugacaaacgcuaccgaacuggugcaaaauucuagcaucggcgagaucugcgacuccccgcaccagauucuugauggggaaaacuguacacugaucgacgcccuccugggagauccccagugcgacggcuuucagaauaaaaagugggaucuguucgucgagcggucuaaagccuauagcaacuguuacccuuaugacgugcccgauuacgcuucccuccgcucucugguugccagcuccgggacccuugaauuuaauaacgagagcuucaauugggcuggagugacgcaaaacggcaccucuuccgccugcauuagaggcagcaauucuuccuuuuucagccggcugaacuggcucacacaucugaauuuuaaguauccugcgcuuaacgucaccaugcccaacaaugagcaguucgacaagcuguacaucuggggagugcaccauccugggacagauaaagaccagauuuuucucuaugcccagucuuccggccgcaucaccguuagcacgaagagaucccaacaggcugugauuccgaacaucgggucucggccccgcaucagaaauauuccuagccggaucuccauuuacuggacaaucgucaaacccggagauauucugcugaucaacagcaccggcaaucucaucgccccucgcggguacuucaagauuagaucuggaaaauccagcaucaugcggucugacgcucccauuggcaaguguaagagcgaaugcaucacaccgaacggcuccauuccuaaugacaaacccuuucagaacgugaaucgcaucaccuauggggccuguccuagauacgugaagcagucuacccugaaacuugcgacaggaaugcggaacguccccgagaagcaaacgcgcggcaucuucggggccauugcuggauuuaucgaaaauggcugggaggggaugguugauggaugguauggcuucagacaccagaacuacgagggccgggggcaggccgcugaccugaaaagcacccaagccgccauugaucagaucaauggaaagcucaacagacugauuggcaaaacaaaugaaaaguuccaccagaucgagaaggaauuuuccgagguggaagggcgcauucaggaccuugagaaauauguggaggauaccaagaucgaccuguggagcuacaacgcugaacuccuggucgcgcuggagaaccaacauacaaucgaucucaccgacucugaaaugaauaaacuguucgagaagacgaaaaagcagcuucgggaaaacgccgaggauaugggaaauggcugcuuuaagauuuaucacaaaugugacaacgcuugcaucggguccauuagaaauggcacauacgaucaugacguguaccgcgacgaggcccugaacaaucgguuccagaucaagggaguugaacucaaaagcggcuauaaggauuggauucuguggaucucuuuugccaucuccugcuuccuucuguguguggcucuccugggguuuauuaugugggccugccagaaaggaaacaucagauguaauauuugcaucuga

SEQ ID NO: 203640 - RNA, 1701 nt, Artificial Sequence; identical to SEQ ID NO: 201940
  derived and/or modified CDS sequence (opt5) from hemagglutinin__InfluenzaA__AHL97817

SEQ ID NO: 203641 - RNA, 1701 nt, Artificial Sequence; identical to SEQ ID NO: 203630
  derived and/or modified CDS sequence (opt5) from hemagglutinin__InfluenzaA__AHL97829

SEQ ID NO: 203642 - RNA, 1701 nt, Artificial Sequence; identical to SEQ ID NO: 202066
  derived and/or modified CDS sequence (opt5) from hemagglutinin__InfluenzaA__AHL97841

SEQ ID NO: 203643 - RNA, 1701 nt, Artificial Sequence; identical to SEQ ID NO: 202066
  derived and/or modified CDS sequence (opt5) from hemagglutinin__InfluenzaA__AHL97853

SEQ ID NO: 203644 - RNA, 1701 nt, Artificial Sequence; identical to SEQ ID NO: 202066
  derived and/or modified CDS sequence (opt5) from hemagglutinin__InfluenzaA__AHL97865

SEQ ID NO: 203645 - RNA, 1701 nt, Artificial Sequence; identical to SEQ ID NO: 202066
  derived and/or modified CDS sequence (opt5) from hemagglutinin__InfluenzaA__AHL97877

SEQ ID NO: 203646 - RNA, 1701 nt, Artificial Sequence; identical to SEQ ID NO: 201940
  derived and/or modified CDS sequence (opt5) from hemagglutinin__InfluenzaA__AHL97889

SEQ ID NO: 203647 - RNA, 1701 nt, Artificial Sequence; identical to SEQ ID NO: 201940
  derived and/or modified CDS sequence (opt5) from hemagglutinin__InfluenzaA__AHL97901

SEQ ID NO: 203648 - RNA, 1701 nt, Artificial Sequence; identical to SEQ ID NO: 201930
  derived and/or modified CDS sequence (opt5) from hemagglutinin__InfluenzaA__AHL97913

SEQ ID NO: 203649 - RNA, 1701 nt, Artificial Sequence
  derived and/or modified CDS sequence (opt5) from hemagglutinin__InfluenzaA__AHL97925
augaagaccaucauugcccugagcuacauccucugccugguguucgcucagaaacuucccggcaacgacaauuccacagccacgcugugucucgggcaccaugcggucccuaacggaaccauuguuaagacaaucaccaaugauagaauugaggugacaaacgcuaccgaacuggugcaaaauucuagcaucggcgagaucugcgacuccccgcaccagauucuugauggggaaaacuguacacugaucgacgcccuccugggagauccccagugcgacggcuuucagaauaaaaagugggaucuguucgucgagcggucuaaagccuauagcaacuguuacccuuaugacgugcccgauuacgcuucccuccgcucucugguugccagcuccgggacccuugaauuuaauaacgagagcuucaauuggacgggagugacccaaaacggcacaucuuccgcuugcauuagacggagcaauaacuccuuuuucucucgccugaauuggcucacccauagcaacuuuaaguauccugcccugaacgucacaaugcccaauaacgagcaguucgacaaacuuuacaucuggggcgugcaccauccugggaccgauaaagaccagauuuuucuguaugcgcagucuuccggaagaaucacgguuagcacaaagcggucccaacaggccgugauuccgaauaucggcucucgccccagaauccggaacauuccuagccgcaucuccauuuacuggaccaucgucaaacccggggauauucuccugaucaauagcacaggaaaccugaucgcuccuagaggcuacuucaagauucggucugggaaauccagcaucaugcgcucugacgcccccauuggaaaguguaagagcgaaugcaucaccccgaauggcuccauuccuaacgacaaacccuuucagaaugugaacagaaucaccuauggcgcuuguccucgguacgugaagcagucuacacucaaacuggccacggggaugcgcaauguccccgagaagcaaaccagaggaaucuucggcgcgauugccggguuuaucgaaaacggaugggagggcaugauggaugggugguauggauuccggcaccagaauagcgagggcagaggccaggcugccgaccuuaaauccacacaagcugccauugaucagaucaacgggaagcugaaucgccucauuggaaaaaccaacgaaaaguuccaccagaucgagaaggaauuuagcgagguugaaggccggauucaggaccuggagaaauacguggaggauacaaagaucgaccuuuggucuuauaacgccgaacugcucguggcucuggagaaucaacauaccaucgaucugacggacuccgaaaugaacaaacucuucgagaagacaaagaagcugcuuagagaaaaugcggaggauauggggaacggaugcuuuaagauuuaccacaaaugugacaaugccugcaucggcagcauucgcaacgggaccuaugaucaugacgucuaccgggacgaggcucugaauaacagauuccagaucaagggcguggaacucaaaucuggauacaaggauuggauucuguggaucuccuuugccaucagcugcuuccuucuguguguugcccuccugggcuuuauuaugugggcuugccagaaagggaauauccgcuguaacauuugcaucuga

SEQ ID NO: 203650 - RNA, 1701 nt, Artificial Sequence; identical to SEQ ID NO: 201930
  derived and/or modified CDS sequence (opt5) from hemagglutinin__InfluenzaA__AHL97937

SEQ ID NO: 203651 - RNA, 1701 nt, Artificial Sequence; identical to SEQ ID NO: 203610
  derived and/or modified CDS sequence (opt5) from hemagglutinin__InfluenzaA__AHL97949

SEQ ID NO: 203652 - RNA, 1701 nt, Artificial Sequence; identical to SEQ ID NO: 201940
  derived and/or modified CDS sequence (opt5) from hemagglutinin__InfluenzaA__AHL97961

SEQ ID NO: 203653 - RNA, 1701 nt, Artificial Sequence; identical to SEQ ID NO: 201940
  derived and/or modified CDS sequence (opt5) from hemagglutinin__InfluenzaA__AHL97973

SEQ ID NO: 203654 - RNA, 1701 nt, Artificial Sequence; identical to SEQ ID NO: 201940
  derived and/or modified CDS sequence (opt5) from hemagglutinin__InfluenzaA__AHL97985

SEQ ID NO: 203655 - RNA, 1701 nt, Artificial Sequence
  derived and/or modified CDS sequence (opt5) from hemagglutinin__InfluenzaA__AHL97997
augaagaccaucauugcccugagcuacauccucugccugguguucgcucagaaacuucccggcaacgacaauuccacagccacgcugugucucgggcaccaugcggucccuaacggaaccauuguuaagacaaucaccaaugauagaauugaggugacaaacgcuaccgaacuggugcaaaauucuagcaucggcgagaucugcgacuccccgcaccagauucuugauggggaaaacuguacacugaucgacgcccuccugggagauccccagugcgacggcuuucagaauaaaaagugggaucuguucgucgagcggucuaaagccuauagcaacuguuacccuuaugacgugcccgauuacgcuucccuccgcucucugguugccagcuccgggacccuugaauuuaauaacgagagcuucaauuggacgggagugacccaaaacggcacaucuuccgcuugcauuagacggagcaauucuuccuuuuucagccgccugaacuggcucacccaucugaauuuuaaguauccugcccuuaacgucacaaugcccaacaaugagcaguucgacaagcuguacaucuggggcgugcaccauccugggaccgauaaagaccagauuuuucucuaugcgcagucuuccggaagaaucacgguuagcacaaagcggucccaacaggccgugauuccgaacaucggcucucgccccagaauccggaauauuccuagccgcaucuccauuuacuggaccaucgucaaacccggggauauucugcugaucaacagcacaggaaaucucaucgcuccuagaggcuacuucaagauucggucugggaaauccagcaucaugcgcucugacgcccccauuggaaaguguaagagcgaaugcaucaccccgaacggcuccauuccuaaugacaaacccuuucagaacgugaauagaaucaccuauggcgcuuguccucgguacgugaagcagucuacacugaaacuugccacggggaugcgcaacguccccgagaagcaaaccagaggaaucuucggcgcgauugccggguuuaucgaaaauggaugggagggcaugguugaugggugguauggauuccggcaccagaacagcgagggcagaggccaggcugccgaccugaaauccacacaagcugccauugaucagaucaaugggaagcucaaccgccugauuggaaaaaccaaugaaaaguuccaccagaucgagaaggaauuuagcgagguggaaggccggauucaggaccuugagaaauacguggaggauacaaagaucgaccuguggucuuauaacgccgaacuccuggucgcucuggagaaccaacauaccaucgaucucacggacuccgaaaugaauaaacuguucgagaagaccaaaaagcagcuuagagaaaacgcggaggauauggggaauggaugcuuuaagauuuaccacaaaugugacaacgccugcaucggcagcauucgcaaugggacauaugaucaugacguguaccgggacgaggcucugaacaauagauuccagauccgcggcguugaacucaagucuggauacaaagauuggauucuguggaucuccuuugccaucagcugcuuccuucuguguguggcccuccugggcuuuauuaugugggcuugccagaaggggaacauccgguguaauauuugcaucuga

SEQ ID NO: 203656 - RNA, 1701 nt, Artificial Sequence; identical to SEQ ID NO: 202066
  derived and/or modified CDS sequence (opt5) from hemagglutinin__InfluenzaA__AHL98009

SEQ ID NO: 203657 - RNA, 1701 nt, Artificial Sequence
  derived and/or modified CDS sequence (opt5) from hemagglutinin__InfluenzaA__AHL98021
augaagaccaucauugcccugagcuacauccucugccugguguucgcucagaaacuucccggcaacgacaauuccacagccacgcugugucucgggcaccaugcggucccuaacggaaccauuguuaagacaaucaccaaugauagaauugaggugacaaacgcuaccgaacuggugcaaaauucuagcaucggcaaaaucugcgacuccccgcaccagauucuugauggggagaacuguacacugauggacgcccuccugggagauccccagugcgacggcuuucagaauaagaaaugggaucuguucgucgaacggucuaaggccuauagcaacuguuacccuuaugacgugcccgauuacgcuucccuccgcucucugguugccagcuccgggacccuugaguuuaauaacgagagcuucaauugggcuggagugacgcaaaacggcaccucuuccgccugcaucagacggagcaauucuuccuuuuucagccgccugaacuggcucacacaucugaauuuuaaguauccugcgcuuaacgucaccaugcccaacaaugaacaguucgacaaacuguacauuuggggcgugcaccauccugggacagauaaggaccagaucuuucucuaugcccagucuuccggaagaauuaccguuagcacgaaacggucccaacaggcugugaucccgaacauuggcucucgccccagaauccggaauaucccuagccgcauuuccaucuacuggacaauugucaagcccggggauauccugcugauuaacagcaccggaaaucucaucgccccuagaggcuacuucaaaauccggucugggaaguccagcauuaugcgcucugacgcucccaucggaaaguguaaaagcgagugcauuacaccgaacggcuccaucccuaaugacaagcccuuucagaacgugaauagaauuaccuauggcgccuguccucgguacgugaaacagucuacccugaaacuugcgacagggaugcgcaacguccccgaaaaacaaacgagaggaaucuucggcgccaucgcuggguuuauugagaauggaugggaaggcaugauggaugggugguauggauuccggcaccagaacagcgagggcagaggccaggccgcugaccugaaguccacccaagccgccaucgaucagauuaaugggaaacucaaccgccugaucggaaagacaaaugagaaguuccaccagauugaaaaagaguuuagcgaaguugagggccggauccaggaccuugaaaaguacguggaggauaccaaaauugaccuguggucuuauaacgcugagcuccugguggcgcuggaaaaccaacauacaaucgaucucaccgacuccgagaugaauaagcuguucgaaaagacgaagaagcagcuuagagagaacgccgaagauauggggaauggaugcuuuaaaaucuaccacaagugugacaacgcuugcauuggcagcauccgcaaugggacauaugaucauaacgucuaccgggacgaggcccugaauaacagauuccagauuaaaggcguggagcucaagucuggauacaaagacuggauccuguggauuuccuuugccaucagcugcuuccuucuguguguugcucuccugggcuuuaucaugugggccugccagaaggggaauauucgcuguaacaucugcauuuga

SEQ ID NO: 203658 - RNA, 1701 nt, Artificial Sequence; identical to SEQ ID NO: 201940
  derived and/or modified CDS sequence (opt5) from hemagglutinin__InfluenzaA__AHL98033

SEQ ID NO: 203659 - RNA, 1701 nt, Artificial Sequence; identical to SEQ ID NO: 203537
  derived and/or modified CDS sequence (opt5) from hemagglutinin__InfluenzaA__AHL98045

SEQ ID NO: 203660 - RNA, 1701 nt, Artificial Sequence; identical to SEQ ID NO: 203537
  derived and/or modified CDS sequence (opt5) from hemagglutinin__InfluenzaA__AHL98057

SEQ ID NO: 203661 - RNA, 1701 nt, Artificial Sequence; identical to SEQ ID NO: 203537
  derived and/or modified CDS sequence (opt5) from hemagglutinin__InfluenzaA__AHL98069

SEQ ID NO: 203662 - RNA, 1701 nt, Artificial Sequence
  derived and/or modified CDS sequence (opt5) from hemagglutinin__InfluenzaA__AHL98081
augaagaccaucauugcccugagcuacauccucugccugguguucgcucagaaacuucccggcaacgacaauuccacagccacgcugugucucgggcaccaugcggucccuaacggaaccauuguuaagacaaucaccaaugauagaauugaggugacaaacgcuaccgaacuggugcaaaauucuagcaucggcgagaucugcgacuccccgcaccagauucuugauggggaaaacuguacacugaucgacgcccuccugggagauccccagugcgacggcuuucagaauaaaaagugggaucuguucgucgagcggucuaaagccuauagcaacuguuacccuuaugacgugcccgauuacgcuucccuccgcucucugguugccagcuccgggacccuugaauuuaauaacgagagcuucaauuggacgggagugacccaaaacggcacaucuuccgcuugcauuagaaagagcaauucuuccuuuuucagccggcugaacuggcucacccaucugaauuuuaaguauccugcccuuaacgucacaaugcccaacaaugagcaguucgacaaacuguacaucuggggcgugcaccauccugggaccgauaaggaccagauuuuucucuaugcgcagucuuccggacgcaucacgguuagcacacaaagaucccagcaggccgugauuccgaacaucggcucucggccccgcaucagaaauauuccuagccggaucuccauuuacuggaccaucgucaaacccggggauauucugcugaucaacagcacaggaaaucucaucgcuccucgcggcuacuucaagauuagaucugggaaauccagcaucaugcggucugacgcccccauuggaaaguguaagagcgaaugcaucaccccgaacggcuccauuccuaaugacaaacccuuucagaacgugaaucgcaucaccuauggcgcuuguccuagauacgugaagcaaucuacacugaaacuugccacggggaugcggaacguccccgagaagcagacccgcggaaucuucggcgcgauugccggguuuaucgaaaauggaugggagggcaugguugaugggugguauggauucagacaccagaacagcgagggccggggccaagcugccgaccugaaauccacacaggcugccauugaucagaucaaugggaagcucaacagacuggugggaaaaaccaaugaaaaguuccaccagauugagaaggaauuuagcgagguggaaggccgcauccaagaccuugagaaauacgucgaggauacaaagauugaccuguggucuuauaacgccgaacuccugguggcucuggagaaccagcauaccaucgaucucacggacuccgaaaugaauaaacuguucgagaagaccaaaaagcagcuucgggaaaacgcggaggauauggggaauggaugcuuuaagaucuaccacaaaugugacaacgccugcauuggcagcaucagaaaugggacauaugaucaugacguuuaccgcgacgaggcucugaacaaucgguuccagauuaagggcguggaacucaaaucuggauacaaggauuggauccuguggauuuccuuugccaucagcugcuuccuucugugugucgcccuccugggcuuuaucaugugggcuugccaaaaagggaacauuagauguaauaucugcauuuga

SEQ ID NO: 203663 - RNA, 1701 nt, Artificial Sequence; identical to SEQ ID NO: 201930
  derived and/or modified CDS sequence (opt5) from hemagglutinin__InfluenzaA__AHL98093

SEQ ID NO: 203664 - RNA, 1701 nt, Artificial Sequence
  derived and/or modified CDS sequence (opt5) from hemagglutinin__InfluenzaA__AHL98105
augaaggccauccugguggucaugcucuacaccuucgcuacagccaacgcggacacgcugugcauuggcuaucacgcuaauaacagcaccgauacaguugacaccgugcuugagaaaaaugugacagucacccauuccgugaaccugcucgaagauaagcacaaugggaaacuguguaaacuuagaggaguugcuccccugcaucucggcaagugcaacaucgccggguggauucugggaaauccugagugugaaucucugagcacagccuccucuuggagcuacaucguggagaccuccggcucugacaacgggacgugcuauccgggagauuuuauugacuacgaggagcuccgggagcagcugagcuccgucagcucuuucgaacgcuuugagaucuuccccaagaccuccagcuggccuaaucacgauucuaacaagggcgugacagccgcuuguccccaugccggcgcgaaaggguuuuauaagaaucuuaucuggcugguuaaaaagggaaacuccuacccuaaacucagcauuucuuauaucaaugacaagggcaaggaagugcugguccuuugggggauucaccaccccuccaccacagccgaucaacagagccuguaccagaacgcugacaccuacguguucgugggagccuccagauauucuaaaaaguuuaaaccugagaucgcuauucggccgaagguccgcgaucaggagggcagaaugaauuacuauuggacgcucguugaacccggggacaaaaucacauucgaggccaccggaaaccugguggugccucgguacgcguuugccauggaacgcaacgcuggcagcggcauuaucaucuccgauacacccguccaugacugcaauaccaccugucaaacaccuaagggggccauuaacacgagccugcccuuccagaauauccacccgauuaccaucggaaaaugcccuaaguaugugaagucuacaaaacucagacuggcuaccggccuucggaacguucccuccauucagagccgcgggcuguuuggagccaucgccggcuucaucgaagggggauggacaggcaugguggacggcugguacggguaucaucaccagaaugaacaaggaucuggcuacgcugcggaucucaagagcacccagaacgccauugacaaaaucacgaauaaggucaacuccgugauugagaaaaugaauacacaguuuaccgcuguugggaaggaguucaaccaccuggaaaagagaaucgagaaucuuaacaaaaagguggaugacggauuccuggauauuuggaccuacaaugccgaacuccugguccugcucgagaacgaacggacacuggacuaucaugauucuaaugugaaaaaccuuuacgagaagguccgcaaccagcugaaaaauaacgccaaggagaucggcaauggguguuuugaguucuaucacaagugcgacaacaccuguauggaaagcgugaaaaauggcacauacgauuauccuaaguacuccgaagaggcuaaacucaacagagaagagaucgacggaguuaagcuggagagcacgcggauuuaucaaauccuugccauuuacucuaccgcggcuuccagccuggugcucgucgugucucugggcgccaucuccuuuuggaugugcagcaaugggucccugcagugccgcauuuguaucuga

SEQ ID NO: 203665 - RNA, 1701 nt, Artificial Sequence; identical to SEQ ID NO: 201930
  derived and/or modified CDS sequence (opt5) from hemagglutinin__InfluenzaA__AHL98116

SEQ ID NO: 203666 - RNA, 1701 nt, Artificial Sequence; identical to SEQ ID NO: 201940
  derived and/or modified CDS sequence (opt5) from hemagglutinin__InfluenzaA__AHL98128

SEQ ID NO: 203667 - RNA, 1701 nt, Artificial Sequence; identical to SEQ ID NO: 201930
  derived and/or modified CDS sequence (opt5) from hemagglutinin__InfluenzaA__AHL98140

SEQ ID NO: 203668 - RNA, 1701 nt, Artificial Sequence; identical to SEQ ID NO: 201930
  derived and/or modified CDS sequence (opt5) from hemagglutinin__InfluenzaA__AHL98152

SEQ ID NO: 203669 - RNA, 1701 nt, Artificial Sequence; identical to SEQ ID NO: 201940
  derived and/or modified CDS sequence (opt5) from hemagglutinin__InfluenzaA__AHL98164

SEQ ID NO: 203670 - RNA, 1701 nt, Artificial Sequence; identical to SEQ ID NO: 201940
  derived and/or modified CDS sequence (opt5) from hemagglutinin__InfluenzaA__AHL98176

SEQ ID NO: 203671 - RNA, 1701 nt, Artificial Sequence; identical to SEQ ID NO: 201930
  derived and/or modified CDS sequence (opt5) from hemagglutinin__InfluenzaA__AHL98188

SEQ ID NO: 203672 - RNA, 1701 nt, Artificial Sequence; identical to SEQ ID NO: 202095
  derived and/or modified CDS sequence (opt5) from hemagglutinin__InfluenzaA__AHL98200

SEQ ID NO: 203673 - RNA, 1701 nt, Artificial Sequence; identical to SEQ ID NO: 201930
  derived and/or modified CDS sequence (opt5) from hemagglutinin__InfluenzaA__AHL98212

SEQ ID NO: 203674 - RNA, 1701 nt, Artificial Sequence; identical to SEQ ID NO: 201930
  derived and/or modified CDS sequence (opt5) from hemagglutinin__InfluenzaA__AHL98224

SEQ ID NO: 203675 - RNA, 1701 nt, Artificial Sequence; identical to SEQ ID NO: 202066
  derived and/or modified CDS sequence (opt5) from hemagglutinin__InfluenzaA__AHL98236

SEQ ID NO: 203676 - RNA, 1701 nt, Artificial Sequence; identical to SEQ ID NO: 201940
  derived and/or modified CDS sequence (opt5) from hemagglutinin__InfluenzaA__AHL98248

SEQ ID NO: 203677 - RNA, 1701 nt, Artificial Sequence; identical to SEQ ID NO: 201930
  derived and/or modified CDS sequence (opt5) from hemagglutinin__InfluenzaA__AHL98260

SEQ ID NO: 203678 - RNA, 1701 nt, Artificial Sequence; identical to SEQ ID NO: 201940
  derived and/or modified CDS sequence (opt5) from hemagglutinin__InfluenzaA__AHL98272

SEQ ID NO: 203679 - RNA, 1701 nt, Artificial Sequence; identical to SEQ ID NO: 203536
  derived and/or modified CDS sequence (opt5) from hemagglutinin__InfluenzaA__AHL98284

SEQ ID NO: 203680 - RNA, 1701 nt, Artificial Sequence
  derived and/or modified CDS sequence (opt5) from hemagglutinin__InfluenzaA__AHL98295
augaagaccaucauugcccugagcuacauccucugccugguguucgcucagaaaauucccggcaacgacaauuccacagccacgcuuugucuggggcaccaugcggucccuaacggaaccaucguuaagacaauuaccaaugauagaaucgaggugacaaacgcuaccgaacucgugcaaaauucuagcaucggcgagauuugcgacuccccgcaccagauccuggauggggaaaacuguacacuuauugacgcccugcucggagauccccagugcgacggcuuucagaauaaaaagugggaucuguucgucgagcggucuaaagccuauagcaacuguuacccuuaugacgugcccgauuacgcuucccugcgcucucucguugccagcuccgggacccuggaauuuaauaacgagagcuucaauugggcuggagugacgcaaaacggcaccucuuccgccugcaucagaggcagcaauucuuccuuuuucagccggcuuaacuggcugacacaucucaauuuuaaguauccugcgcugaacgucaccaugcccaacaaugagcaguucgacaaacuuuacauuuggggagugcaccauccugggacagauaaggaccagaucuuucuguaugcccagucuuccggccgcauuaccguuagcacgaagagaucccaacaggcugugaucccgaacaucgggucucggccccgcauuagaaauaucccuagccggauuuccaucuacuggacaauugucaaacccggagauauccuccugaucaacagcaccggcaaucugauugccccucgcggguacuucaagaucagaucuggaaaauccagcauuaugcggucugacgcucccaucggcaaguguaagagcgaaugcauuacaccgaacggcuccaucccuaaugacaaacccuuucagaacgugaaucgcaucaccuauggggccuguccuagauacgugaagcagucuacccucaaacuggcgacaggaaugcggaacguccccgagaagcaaacgcgcggcauuuucggggccaucgcuggauuuauugaaaauggcugggaggggaugauggauggaugguauggcuucagacaccagaacagcgagggccgggggcaggccgcugaccuuaaauccacccaagccgccaucgaucagauuaauggaaagcugaacagacucaucggcaaaacaaaugaaaaguuccaccagauugagaaggaauuuagcgagguugaagggcgcauccaggaccuggagaaauacguggaggauaccaagaucgaccuuuggucuuauaacgcugaacugcucguggcgcuggagaaccaacauacaauugaucugaccgacuccgaaaugaauaaacucuucgagaagacgaaaaagcagcugcgggaaaacgccgaggauaugggaaauggcugcuuuaagaucuaccacaaaugugacaacgcuugcauugggagcaucagaaauggcacauaugaucaugacgucuaccgcgacgaggcccuuaacaaucgguuccagauuaagggaguggaacugaaaucuggcuacaaggauuggauccucuggaucuccuuugccauuagcugcuuccugcuuuguguugcucugcucggguuuaucaugugggccugccagaaaggaaacauuagauguaauaucugcauuuga

SEQ ID NO: 203681 - RNA, 1701 nt, Artificial Sequence; identical to SEQ ID NO: 203578
  derived and/or modified CDS sequence (opt5) from hemagglutinin__InfluenzaA__AHL98307

SEQ ID NO: 203682 - RNA, 1701 nt, Artificial Sequence; identical to SEQ ID NO: 201940
  derived and/or modified CDS sequence (opt5) from hemagglutinin__InfluenzaA__AHL98319

SEQ ID NO: 203683 - RNA, 1701 nt, Artificial Sequence; identical to SEQ ID NO: 201940
  derived and/or modified CDS sequence (opt5) from hemagglutinin__InfluenzaA__AHL98331

SEQ ID NO: 203684 - RNA, 1701 nt, Artificial Sequence; identical to SEQ ID NO: 202066
  derived and/or modified CDS sequence (opt5) from hemagglutinin__InfluenzaA__AHL98343

SEQ ID NO: 203685 - RNA, 1701 nt, Artificial Sequence; identical to SEQ ID NO: 203578
  derived and/or modified CDS sequence (opt5) from hemagglutinin__InfluenzaA__AHL98354

SEQ ID NO: 203686 - RNA, 1701 nt, Artificial Sequence; identical to SEQ ID NO: 201930
  derived and/or modified CDS sequence (opt5) from hemagglutinin__InfluenzaA__AHL98366

SEQ ID NO: 203687 - RNA, 1701 nt, Artificial Sequence; identical to SEQ ID NO: 201930
  derived and/or modified CDS sequence (opt5) from hemagglutinin__InfluenzaA__AHL98378

SEQ ID NO: 203688 - RNA, 1701 nt, Artificial Sequence; identical to SEQ ID NO: 201930
  derived and/or modified CDS sequence (opt5) from hemagglutinin__InfluenzaA__AHL98390

SEQ ID NO: 203689 - RNA, 1701 nt, Artificial Sequence; identical to SEQ ID NO: 201930
  derived and/or modified CDS sequence (opt5) from hemagglutinin__InfluenzaA__AHL98402

SEQ ID NO: 203690 - RNA, 1701 nt, Artificial Sequence; identical to SEQ ID NO: 201940
  derived and/or modified CDS sequence (opt5) from hemagglutinin__InfluenzaA__AHL98414

SEQ ID NO: 203691 - RNA, 1701 nt, Artificial Sequence
  derived and/or modified CDS sequence (opt5) from hemagglutinin__InfluenzaA__AHL98426
augaagaccaucauugcccugagcuacauccucugccugguguucgcucagaaacuucccggcaacgacaauuccacagccacgcugugucucgggcaccaugcggucccuaacggaaccauuguuaagacaaucaccaaugauagaauugaggugacaaacgcuaccgaacuggugcaaaauucuagcaucggcgagaucugcgacuccccgcaccagauucuugauggggaaaacuguacacugaucgacgcccuccugggagauccccagugcgacggcuuucagaauaaaaagugggaucuguucgucgagcggucuaaagccuauagcaacuguuacccuuaugacgugcccgauuacgcuucccuccgcucucugguugccagcuccgggacccuugaauuuaauaacgagagcuucaauuggacgggagugacccaaaacggcacaucuuccgcuugcauuagacggagcaauaacuccuuuuucucucgccugaauuggcucacccauagcaacuuuaaguauccugcccugaacgucacaaugcccaauaacgagcaguucgacaaacuuuacaucuggggcgugcaccauccugggaccgauaaagaccagauuuuucuguaugcgcagucuuccggaagaaucacgguuagcacaaagcggucccaacaggccgugauuccgaauaucggcucucgccccagaauccggaacauuccuagccgcaucuccauuuacuggaccaucgucaaacccggggauauucuccugaucaauagcacaggaaaccugaucgcuccuagaggcuacuucaagauucggucugggaaauccagcaucaugcgcucugacgcccccauuggaaaguguaagagcgaaugcaucaccccgaauggcuccauuccuaacgacaaacccuuucagaaugugaacagaaucaccuauggcgcuuguccucgguacgugaagcagucuacacucaaacuggccacggggaugcgcaauguccccgagaagcaaaccagaggaaucuucggcgcgauugccggguuuaucgaaaacggaugggagggcaugauggaugggugguauggauuccggcaccagaauagcgagggcagaggccaggcugccgaccuuaaauccacacaagcugccauugaucagaucaacgggaagcugaaucgccucauuggaaaaaccaacgaaaaguuccaccagaucgagaaggaauuuagcgagguugaaggccggauucaggaccuggagaaauacguggaggauacaaagaucgaccuuuggucuuauaacgccgaacugcucguggcucuggagaaucaacauaccaucgaucugacggacuccgaaaugaacaaacucuucgagaagacaaagaagcagcugagagaaaaugcggaggauauggggaacggaugcuuuaagauuuaccacaaaugugacaaugccugcaucggcagcauucgcaacgggaccuaugaucaugacgucuaccgggacgaggcucuuaauaacagauuccaggugaagggcguugaacugaaaucuggauacaaggauuggauccucuggauuuccuuugccaucagcugcuuccugcuuuguguggcccugcucggcuuuaucaugugggcuugccagaaagggaauauucgcuguaacaucugcauuuga

SEQ ID NO: 203692 - RNA, 1701 nt, Artificial Sequence; identical to SEQ ID NO: 202112
  derived and/or modified CDS sequence (opt5) from hemagglutinin__InfluenzaA__AHL98438

SEQ ID NO: 203693 - RNA, 1701 nt, Artificial Sequence; identical to SEQ ID NO: 202112
  derived and/or modified CDS sequence (opt5) from hemagglutinin__InfluenzaA__AHL98449

SEQ ID NO: 203694 - RNA, 1701 nt, Artificial Sequence
  derived and/or modified CDS sequence (opt5) from hemagglutinin__InfluenzaA__AHL98471
augaaggccauccuggugguccuccuguacaccuucgcuacagccaacgcggacacgcuuugcauuggcuaucacgcuaauaacagcaccgauacaguugacaccgugcuggagaaaaaugugacagucacccauuccgugaaccuccuggaagauaagcacaaugggaaacuuuguaagcugagaggaguugcgccccuccaucugggcaaaugcaacaucgccggguggauucugggaaauccugagugugaaucucucagcacagcuuccucuuggagcuacaucguggagaccuccucuagcgacaacggcacgugcuauccgggggauuuuauuaauuacgaagaacugcgggagcagcuuuccagcgucucuuccuucgaaaaguuugagaucuuccccaagaccagcucuuggccuaaccacgacuccaauaaaggagugacagccgcuuguccccaugccggcgccaagagcuuuuauaaaaaccugaucuggcucguuaagaaaggcaauucuuacccuaagcugcgcgaauccuauauuaacgauaaggggaaagaggugcuuguccuguggggaauccaccaccccagcaccacagccgaccaacagucccucuaccagaaugcugaugccuacguguucgugggcaccucuagauauagcaagaaauuuaagccugagauugcuauccggccgaaaguccgcgaccaggaagggagaaugaacuacuauuggacgcugauugagcccggagauaagaucacauucgaagccaccggcaaccugguugugccucgguacgcguuugccauggagcgcaaugcuggguccggaauuaucaucagcgacacacccgugcaugauugcaacaccaccugucaaacaccugaaggcgccauuaauacgucucuccccuuccagaacauccacccgauuaccaucggcaaaugcccuaaguaugucaaguccacaaaacugagacuugcuaccgggcugcggaaugugcccagcauucagucucgcggacucuuuggcgccaucgccggguucaucgagggaggcuggacagggaugguugacggaugguacggcuaucaucaccagaacgagcaaggcagcggguacgcugcggaccugaaguccacccagaaugccauugauaaaaucacgaacaaggucaauucugugauugagaaaaugaacacacaguuuaccgcugugggaaaggaguucaaucaccuugaaaagagaaucgagaaccugaauaaaaagguugacgauggcuuccucgacauuuggaccuacaacgccgaacugcuggugcuccuggagaaugagcggacacuugauuaucaugacagcaacgucaaaaaccuguacgaaaaggugcgcaaucagcucaaaaacaaugccaaggagaucgggaacggauguuuugaguucuaucacaagugcgauaauaccuguauggaauccgucaaaaacggcacauacgacuauccuaaguacagcgaagaggcuaaacugaauagagagaagaucgauggggugaaacuugaaucuacgcggauuuaucaaauccuggccauuuacuccaccguugcgagcucucucgugcuggucgugucccugggcgcuaucagcuuuuggaugugcuccaacggaucucuccagugccgcauuuguaucuga

SEQ ID NO: 203695 - RNA, 1701 nt, Artificial Sequence; identical to SEQ ID NO: 202066
  derived and/or modified CDS sequence (opt5) from hemagglutinin__InfluenzaA__AHL98482

SEQ ID NO: 203696 - RNA, 1701 nt, Artificial Sequence; identical to SEQ ID NO: 201907
  derived and/or modified CDS sequence (opt5) from hemagglutinin__InfluenzaA__AHL98494

SEQ ID NO: 203697 - RNA, 1701 nt, Artificial Sequence; identical to SEQ ID NO: 202066
  derived and/or modified CDS sequence (opt5) from hemagglutinin__InfluenzaA__AHL98506

SEQ ID NO: 203698 - RNA, 1701 nt, Artificial Sequence; identical to SEQ ID NO: 202066
  derived and/or modified CDS sequence (opt5) from hemagglutinin__InfluenzaA__AHL98518

SEQ ID NO: 203699 - RNA, 1701 nt, Artificial Sequence; identical to SEQ ID NO: 201907
  derived and/or modified CDS sequence (opt5) from hemagglutinin__InfluenzaA__AHL98530

SEQ ID NO: 203700 - RNA, 1701 nt, Artificial Sequence; identical to SEQ ID NO: 202066
  derived and/or modified CDS sequence (opt5) from hemagglutinin__InfluenzaA__AHL98542

SEQ ID NO: 203701 - RNA, 1701 nt, Artificial Sequence; identical to SEQ ID NO: 202066
  derived and/or modified CDS sequence (opt5) from hemagglutinin__InfluenzaA__AHL98554

SEQ ID NO: 203702 - RNA, 1701 nt, Artificial Sequence; identical to SEQ ID NO: 201940
  derived and/or modified CDS sequence (opt5) from hemagglutinin__InfluenzaA__AHL98566

SEQ ID NO: 203703 - RNA, 1701 nt, Artificial Sequence; identical to SEQ ID NO: 201940
  derived and/or modified CDS sequence (opt5) from hemagglutinin__InfluenzaA__AHL98578

SEQ ID NO: 203704 - RNA, 1701 nt, Artificial Sequence; identical to SEQ ID NO: 202066
  derived and/or modified CDS sequence (opt5) from hemagglutinin__InfluenzaA__AHL98590

SEQ ID NO: 203705 - RNA, 1701 nt, Artificial Sequence; identical to SEQ ID NO: 201930
  derived and/or modified CDS sequence (opt5) from hemagglutinin__InfluenzaA__AHL98602

SEQ ID NO: 203706 - RNA, 1701 nt, Artificial Sequence; identical to SEQ ID NO: 201907
  derived and/or modified CDS sequence (opt5) from hemagglutinin__InfluenzaA__AHL98614

SEQ ID NO: 203707 - RNA, 1701 nt, Artificial Sequence
  derived and/or modified CDS sequence (opt5) from hemagglutinin__InfluenzaA__AHL98626
augaagaccaucauugcccugagcuacauccucugccugguguucgcucaggagcuucccggcaacgacgauuccacagccacgcugugucucgggcaccaugcggucccuaauggaaccauuguuaaaacaaucaccaacgaccaaauugaagugacaaaugcuaccgagcuggugcagucuagcuccacaggcgaaaucugcaacucuccgcaccagauccuugauggggagaauuguacccugauugacgcccuccugggagauccccagugcgacggcuuucaaaacaagagaugggaucuguucgucgaacggagcaaagcccauuccaauuguuauccuuacgacgugcccgauuaugcuucucuccgcagccugguugccuccagcgggacgcuugaguuuaacaaugagucuuucaacuggaccggagugacacagaauggcaccuccagcgcuugcaucagacggucuaacaauuccuuuuucagccgccugaacuggcucacacaccugaauuuuaaguacccugcccuuaacgucaccaugcccaacaaugaacaguucgacaaacuguauauuuggggcgugcaucacccugggacggauaaggaccagaucuuucucuacgcgcaagccucuggaagaauuacaguuuccaccaagcggagccagcaggcugugaucccgaacauuggcucccgccccagaguccggaauaucccuucucgcgugagcaucuauuggacaauugugaaacccggggauauccugcugauuaacuccaccggaaaucucaucgccccuagaggcuacuucaagauucggagcgggaaaucuuccaucaugcgcagcgacgcucccaucggaaaguguaacucugccugcauuaccccgaauggcagcaucccuaacgacaaacccuuucagaaugucaacagaauuacauacggcgcguguccucgguauguuaagcaaaauacgcugaaacuugccaccgggaugcgcaacgugcccgagaagcagacaagaggaaucuucggcgcuauugccggguuuaucgaaaauggaugggagggcaugguggaugggugguacggauuccggcaccagaacuccgagggcagaggccaagcugccgaccugaagucuacccaggccgcuaucgaucagauuaaugggaaacucaaccgccugaucggaaagacaaacgaaaaauuccaucagauugagaaggaauuuagcgaggucgaaggccggauccaagaccuugagaaauauguggaggauaccaagauugaccugugguccuacaaugcggaacuccugguugcccuggagaaccagcacacgaucgaucucacagacagcgaaaugaauaagcuguucgagaaaaccaagaaacagcuuagagaaaacgcugaggauauggggaauggaugcuuuaagauuuaucauaaaugugacaacgccugcaucggcucuauccgcaaugggaccuacgaucacgacguguaucgggacgaggcccugaacaauagauuccagauuaagggcgucgaacucaaguccggauacaaagauuggauccuguggauuagcuuugcuaucucuugcuuccuucuguguguggcccuccugggcuuuauuaugugggcgugccaaaaggggaacauccgcuguaauaucugcauuuga

SEQ ID NO: 203708 - RNA, 1701 nt, Artificial Sequence; identical to SEQ ID NO: 201930
  derived and/or modified CDS sequence (opt5) from hemagglutinin__InfluenzaA__AHL98638

SEQ ID NO: 203709 - RNA, 1701 nt, Artificial Sequence; identical to SEQ ID NO: 201940
  derived and/or modified CDS sequence (opt5) from hemagglutinin__InfluenzaA__AHL98650

SEQ ID NO: 203710 - RNA, 1701 nt, Artificial Sequence
  derived and/or modified CDS sequence (opt5) from hemagglutinin__InfluenzaA__AHL98662
augaagaccaucauugcccugagcuacauccucugccugguguucgcucagaaacuucccggcaacgacaauuccacagccacgcugugucucgggcaccaugcggucccuaacggaaccaugguuaagacaauuaccaaugauagaaucgaggugacaaacgcuaccgaacuggugcaaaauucuagcauuggcgagaucugcgacuccccgcaccagauccuugauggggaaaacuguacacugauugacgcccuccugggagauccccagugcgacggcuuucagaauaaaaagugggaucuguucgucgagcggucuaaagccuauagcaacuguuacccuuaugacgugcccgauuacgcuucccuccgcucucugguugccagcuccgggacccuugaauuuaauaacgagagcuucaauuggacgggagugacccaaaacggcacaucuuccgcuugcaucagacggagcaauaacuccuuuuucucucgccugaauuggcucacccauagcaacuuuaaguauccugcccugaacgucacaaugcccaauaacgagcaguucgacaaacuuuacauuuggggcgugcaccauccugggaccgauaaagaccagaucuuucuguaugcgcagucuuccggaagaauuacgguuagcacaaagcggucccaacaggccgugaucccgaauauuggcucucgccccagaauccggaacaucccuagccgcauuuccaucuacuggaccauugucaaacccggggauauccuccugauuaauagcacaggaaaccugaucgcuccuagaggcuacuucaagauccggucugggaaauccagcauuaugcgcucugacgcccccaucggaaaguguaagagcgaaugcauuaccccgaauggcuccaucccuaacgacaaacccuuucagaaugugaacagaauuaccuauggcgcuuguccucgguacgugaagcagucuacacucaaacuggccacggggaugcgcaauguccccgagaagcaaaccagaggaaucuucggcgcgaucgccggguuuauugaaaacggaugggagggcaugauggaugggugguauggauuccggcaccagaauagcgagggcagaggccaggcugccgaccuuaaauccacacaagcugccaucgaucagauuaacgggaagcugaaucgccucaucggaaaaaccaacgaaaaguuccaccagauugagaaggaauuuagcgagguugaaggccggauccaggaccuggagaaauacguggaggauacaaagauugaccuuuggucuuauaacgccgaacugcucguggcucuggagaaucaacauaccaucgaucugacggacuccgaaaugaacaaacucuucgagaagacaaagaagcagcugagagaaaaugcggaggauauggggaacggaugcuuuaagaucuaccacaaaugugacaaugccugcauuggcagcauccgcaacgggaccuaugaucaugacgucuaccgggacgaggcucuuaauaacagauuccagauuaagggcguggaacugaaaucuggauacaaggauuggauccucuggauuuccuuugccaucagcugcuuccugcuuuguguugcccugcucggcuuuaucaugugggcuugccagaaagggaauauucgcuguaacaucugcauuuga

SEQ ID NO: 203711 - RNA, 1701 nt, Artificial Sequence; identical to SEQ ID NO: 203578
  derived and/or modified CDS sequence (opt5) from hemagglutinin__InfluenzaA__AHL98674

SEQ ID NO: 203712 - RNA, 1701 nt, Artificial Sequence; identical to SEQ ID NO: 201930
  derived and/or modified CDS sequence (opt5) from hemagglutinin__InfluenzaA__AHL98686

SEQ ID NO: 203713 - RNA, 1701 nt, Artificial Sequence; identical to SEQ ID NO: 202066
  derived and/or modified CDS sequence (opt5) from hemagglutinin__InfluenzaA__AHL98699

SEQ ID NO: 203714 - RNA, 1701 nt, Artificial Sequence; identical to SEQ ID NO: 202195
  derived and/or modified CDS sequence (opt5) from hemagglutinin__InfluenzaA__AHL98711

SEQ ID NO: 203715 - RNA, 1701 nt, Artificial Sequence; identical to SEQ ID NO: 202539
  derived and/or modified CDS sequence (opt5) from hemagglutinin__InfluenzaA__AHL98722

SEQ ID NO: 203716 - RNA, 1701 nt, Artificial Sequence; identical to SEQ ID NO: 201940
  derived and/or modified CDS sequence (opt5) from hemagglutinin__InfluenzaA__AHL98734

SEQ ID NO: 203717 - RNA, 1701 nt, Artificial Sequence; identical to SEQ ID NO: 202066
  derived and/or modified CDS sequence (opt5) from hemagglutinin__InfluenzaA__AHL98746

SEQ ID NO: 203718 - RNA, 1701 nt, Artificial Sequence; identical to SEQ ID NO: 201940
  derived and/or modified CDS sequence (opt5) from hemagglutinin__InfluenzaA__AHL98758

SEQ ID NO: 203719 - RNA, 1701 nt, Artificial Sequence; identical to SEQ ID NO: 201930
  derived and/or modified CDS sequence (opt5) from hemagglutinin__InfluenzaA__AHL98770

SEQ ID NO: 203720 - RNA, 1701 nt, Artificial Sequence; identical to SEQ ID NO: 202069
  derived and/or modified CDS sequence (opt5) from hemagglutinin__InfluenzaA__AHL98782

SEQ ID NO: 203721 - RNA, 1701 nt, Artificial Sequence
  derived and/or modified CDS sequence (opt5) from hemagglutinin__InfluenzaA__AHL98794
augaagaccaucauugcccugagcuacauccucugccugguguucgcucagaaacuucccggcaacgacaauuccacagccacgcugugucucgggcaccaugcggucccuaacggaaccauuguuaagacaaucaccaaugauagaauugaggugacaaacgcuaccgaacuggugcaaaauucuagcaucggcgagaucugcgacuccccgcaccagauucuugauggggaaaacuguacacugaucgacgcccuccugggagauccccagugcgacggcuuucagaauaaaaagugggaucuguucgucgagcggucuaaagccuauagcaacuguuacccuuaugacgugcccgauuacgcuucccuccgcucucugguugccagcuccgggacccuugaauuuaauaacgagagcuucaauugggcuggagugacgcaaaacggcaccucuuccgccugcauuagaggcagcaauucuuccuuuuucagccggcugaacuggcucacacaucugaauuuuaaguauccugcgcuuaacgucaccaugcccaacaaugagcaguucgacaagcuguacaucuggggagugcaccauccugggacagauaaagaccagauuuuucucuaugcccagucuuccggccgcaucaccguuagcacgaagagaucccaacaggcugugauuccgaacaucgggucucggccccgcaucagaaauauuccuagccggaucuccauuuacuggacaaucgucaaacccggagauauucugcugaucaacagcaccggcaaucucaucgccccucgcggguacuucaagauuagaucuggaaaauccagcaucaugcggucugacgcucccauuggcaagugucgcagcgaaugcaucacaccgaacggcuccauuccuaaugacaagcccuuucagaacgugaauagaaucaccuauggggccuguccucgguacgugaaacagucuacccugaaacuugcgacaggaaugcgcaacguccccgagaagcaaacgagaggcaucuucggggccauugcuggauuuaucgaaaauggcugggaggggaugguugauggaugguauggcuuccggcaccagaacagcgagggcagagggcaggccgcugaccugaaguccacccaagccgccauugaucagaucaauggaaaacucaaccgccugauuggcaagacaaaugaaaaauuccaccagaucgagaaggaauuuagcgagguggaagggcggauucaggaccuugagaaguacguggaggauaccaaaaucgaccuguggucuuauaacgcugaacuccuggucgcgcuggagaaccaacauacaaucgaucucaccgacuccgaaaugaauaagcuguucgagaaaacgaagaaacagcuuagagaaaacgccgaggauaugggaaauggcugcuuuaagauuuaccacaagugugacaacgcuugcaucgggagcauucgcaauggcacauaugaucaugacguguaccgggacgaggcccugaacaauagauuccagaucaaaggaguugaacucaagucuggcuacaaagauuggauucuguggaucuccuuugccaucagcugcuuccuucuguguguggcucuccugggguuuauuaugugggccugccagaagggaaacauccgcuguaauauuugcaucuga

SEQ ID NO: 203722 - RNA, 1701 nt, Artificial Sequence
  derived and/or modified CDS sequence (opt5) from hemagglutinin__InfluenzaA__AHL98806
augaagaccaucauugcccugagcuacauccucugccugguguucgcucagaaacuucccggcaacgacaauuccacagccacgcugugucucgggcaccaugcggucccuaacggaaccauuguuaagacaaucaccaaugauagaauugaggugacaaacgcuaccgaacuggugcaaaauucuagcaucggcgagaucugcgacuccccgcaccagauucuugauggggaaaacuguacacugaucgacgcccuccugggagauccccagugcgacggcuuucagaauaaaaagugggaucuguucgucgagcggucuaaagccuauagcaacuguuacccuuaugacgugcccgauuacgcuucccuccgcucucugguugccagcuccgggacccuugaauuuaauaacgagagcuucaauugggcuggagugacgcaaaacggcaccucuuccgccugcauuagaggcagcaauucuuccuuuuucagccggcugaacuggcucacacaucugaauuuuaaguauccugcgcuuaacgucaccaugcccaacaaugagcaguucgacaagcuguacaucuggggagugcaccauccugggacagauaaagaccagauuuuucucuaugcccagucuuccggccgcaucaccguuagcacgaagagaucccaacaggcugugauuccgaacaucgggucucggccccgcaucagaaauauuccuagccggaucuccauuuacuggacaaucgucaaacccggagauauucugcugaucaacagcaccggcaaucucaucgccccucgcggguacuucaagauuagaucuggaaaauccagcaucaugcggucugacgcucccauuggcaaguguaagagcgaaugcaucacaccgaacggcuccauuccuaaugacaaacccuuucagaacgugaaucgcaucaccuauggggccuguccuagauacgugaagcagucuacccugaaacuugcgacaggaaugcggaacguccccgagaagcaaacgcgcggcaucuucggggccauugcuggauuuaucgaaaauggcugggaggggaugguugauggaugguauggcuucagacaccagaacagcgagggccgggggcaggccgcugaccugaaauccacccaaacagccauugaucagaucaauggaaagcucaacagacugauuggcaaaaccaaugaaaaguuccaccagaucgagaaggaauuuagcgagguggaagggcgcauucaggaccuugagaaauacguggaggauacaaagaucgaccuguggucuuauaacgccgaacuccuggucgcucuggagaaccaacauaccaucgaucucacggacuccgaaaugaauaaacuguucgagaagaccaaaaagcagcuucgggaaaacgcggaggauaugggaaauggcugcuuuaagauuuaccacaaaugugacaacgccugcaucgggagcauuagaaauggcacauaugaucaugacguguaccgcgacgaggcucugaacaaucgguuccagaucaagggaguugaacucaaaucuggcuacaaggauuggauucuguggaucuccuuugccaucagcugcuuccuucuguguguggcccuccugggguuuauuaugugggcuugccagaaaggaaacaucagauguaauauuugcaucuga

SEQ ID NO: 203723 - RNA, 1701 nt, Artificial Sequence; identical to SEQ ID NO: 201930
  derived and/or modified CDS sequence (opt5) from hemagglutinin__InfluenzaA__AHL98818

SEQ ID NO: 203724 - RNA, 1701 nt, Artificial Sequence; identical to SEQ ID NO: 201940
  derived and/or modified CDS sequence (opt5) from hemagglutinin__InfluenzaA__AHL98830

SEQ ID NO: 203725 - RNA, 1701 nt, Artificial Sequence; identical to SEQ ID NO: 201930
  derived and/or modified CDS sequence (opt5) from hemagglutinin__InfluenzaA__AHL98842

SEQ ID NO: 203726 - RNA, 1701 nt, Artificial Sequence; identical to SEQ ID NO: 201930
  derived and/or modified CDS sequence (opt5) from hemagglutinin__InfluenzaA__AHL98854

SEQ ID NO: 203727 - RNA, 1701 nt, Artificial Sequence
  derived and/or modified CDS sequence (opt5) from hemagglutinin__InfluenzaA__AHL98878
augaagaccaucauugcccugagcuacauccucugccugguguucacacagaaacuucccggcaacgacaauuccacggcuacccugugucucgggcaccaugccgucccuaacggaacaauuguuaagaccaucacaaaugauagaauugaggugaccaacgcgacagaacuggugcaaaauucuagcaucggcgagaucugcgacuccccgcaccagauucuugauggggaaaacuguacccugaucgacgcucuccugggagauccccagugcgacggcuuucagaauaaaaagugggaucuguucgucgagcggucuaaagccuauagcaacuguuacccuuaugacgugcccgauuacgccucccuccgcucucugguugcuagcuccgggacgcuugaauuuaauaacgagagcuucaauuggaccggagugacacaaaacggcaccucuuccgccugcauuagacggagcaauucuuccuuuuucagccgccugaacuggcucacacaucugaauuuuaaguauccugcucuuaacgucaccaugcccaacaaugagcaguucgacaagcuguacaucuggggcgugcaccauccugggacggauaaagaccagauuuuucucuaugcccagucuuccggaagaaucacaguuagcaccaagcggucccaacaggcggugauuccgaacaucggcucucgccccagaauccggaauauuccuagccgcaucuccauuuacuggacaaucgucaaacccggggauauucugcugaucaacagcaccggaaaucucaucgccccuagaggcuacuucaagauucggucugggaaauccagcaucaugcgcucugacgcucccauuggaaaguguaagagcgaaugcaucaccccgaacggcuccauuccuaaugacaaacccuuucagaacgugaauagaaucacauauggcgccuguccucgguacgugaagcagucuacgcugaaacuugcuaccgggaugcgcaacguccccgagaagcaaacaagaggaaucuucggcgccauugcgggguuuaucgaaaauggaugggagggcaugguugaugggugguauggauuccggcaccagaacagcgagggcagaggccaggccgcugaccugaaauccacccaagccgcuauugaucagaucaaugggaagcucaaccgccugauuggaaaaacaaaugaaaaguuccaccagaucgagaaggaauuuagcgagguggaaggccggauucaggaccuugagaaauacguggaggauaccaagaucgaccuguggucuuauaacgccgaacuccuggucgcccuggagaaccaacauacgaucgaucucacagacuccgaaaugaauaaacuguucgagaagaccaaaaagcagcuuagagaaaacgcugaggauauggggaauggaugcuuuaagauuuaccacaaaugugacaacgcgugcaucggcagcauucgcaaugggaccuaugaucauaacguguaccgggacgaggcccugaauaacagauuccagaucaagggcguugaacucaaaucuggauacaaggacuggauucuguggaucuccuuugcuaucagcugcuuccuucuguguguggcccuccugggcuuuauuaugugggccugccagaaagggaauauccgcuguaacauuugcaucuga

SEQ ID NO: 203728 - RNA, 1701 nt, Artificial Sequence
  derived and/or modified CDS sequence (opt5) from hemagglutinin__InfluenzaA__AHL98890
augaagaccaucauugcccugagcuacauccucugccugguguucgcucagaaacuucccggcaacgacaauuccacagccacgcugugucucgggcaccaugcggucccuaacggaaccauuguuaagacaaucaccaaugauagaauugaggugacaaacgcuaccgaacuggugcaaaauucuagcaucggcgagaucugcgacuccccgcaccagauucuugauggggaaaacuguacacugaucgacgcccuccugggagauccccagugcgacggcuuucagaauaaaaagugggaucuguucgucgagcggucuaaagccuauagcaacuguuacccuuaugacgugcccgauuacgcuucccuccgcucucugguugccagcuccgggacccuugaauuuaauaacgagagcuucaauugggcuggagugacgcaaaacggcaccucuuccgccugcauuagaggcagcaauucuuccuuuuucagccggcugaacuggcucacacaucugaauuuuaaguauccugcgcuuaacgucaccaugcccaacaaugagcaguucgacaagcuguacaucuggggagugcaccauccugggacagauaaagaccagauuuuucucuaugcccagucuuccggccgcaucaccguuagcacgaagagaucccaacaggcugugauuccgaacaucgggucucggccccgcaucagaaauauuccuagccggaucuccauuuacuggacaaucgucaaacccggagauauucugcugaucaacagcaccggcaaucucaucgccccucgcggguacuucaagauuagaucuggaaaauccagcaucaugcggucugacgcucccauuggcaaguguaagagcgaaugcaucacaccgaacggcuccauuccuaaugacaaacccuuucagaacgugaaucgcaucaccuauggggccuguccuagauacgugaagcagucuacccugaaacuugcgacaggaaugcggaacguccccgagaagcaaacgcgcggcaucuucggggccauugcuggauuuaucgaaaauggcugggaggggaugguugauggaugguauggcuucagacaccagaacagcgagggccgggggcaggccgcugaccugaaauccacccaagccgccauugaucagaucaauggaaagcucaacagacugauuggcaaaacaaaugaaaaguuccaccagaucgagaaggaauuuagcgagguggaagggcgcauucaggaccuugagaaauacguggaggauaccaagaucgaccuguggucuuauaacgcugaacuccuggucgcgcuggagaaccaacauacaaucgaucucaccgacuccgaaaugaauaaacuguucgagaagacgaaaaagcagcuucgggaaaacgccgaggauaugggaaauggcugcuuuaagauuuaccacaaaugugacaacgcuugcaucgggagcauuagaaauggcacauaugaucaugacguguaccgcgacgaggcccugaacaaucgguuccagaucaagggaguugaacucaaaucuggcuacaaggauuggauucuguggaucuccuuugccaucagcugccuucugcucuguguggcucugcugggguucauuaugugggccugccagaaaggaaacaucagauguaauauuugcaucuga

SEQ ID NO: 203729 - RNA, 1701 nt, Artificial Sequence
  derived and/or modified CDS sequence (opt5) from hemagglutinin__InfluenzaA__AHL98902
augaagaccaucauugcccugagcuacauccucugccugguguucgcucagaaacuucccggcaacgacaauuccacagccacgcugugucucgggcaccaugcggucccuaacggaaccguugugaagacaauuaccaaugauagaaucgaggugacaaacgcuaccgaacugguccaaaauucuagcauuggcgagaucugcgacuccccgcaccagauccuugauggggaaaacuguacacugauugacgcccuccugggagauccccagugcgacggcuuucagaauaaaaagugggaucuguucguggagcggucuaaagccuauagcaacuguuacccuuaugacguucccgauuacgcuucccuccgcucucugguggccagcuccgggacccuugaauuuaauaacgagagcuucaauugggcuggagucacgcaaaacggcaccucuuccgccugcaucagaggcagcaauucuuccuuuuucagccggcugaacuggcucacacaucugaauuuuaaguauccugcgcuuaacgugaccaugcccaacaaugagcaguucgacaagcuguacauuuggggaguucaccauccugggacagauaaagaccagaucuuucucuaugcccagucuuccggccgcauuaccgugagcacgaagagaucccaacaggcugucaucccgaacauugggucucggccccgcaucagaaauaucccuagccggauuuccaucuacuggacaauugugaaacccggagauauccugcugauuaacagcaccggcaaucucaucgccccucgcggguacuucaagaucagaucuggaaaauccagcauuaugcggucugacgcucccaucggcaaguguaagagcgaaugcauuacaccgaacggcuccaucccuaaugacaaacccuuucagaacgugaaucgcauuaccuauggggccuguccuagauacgucaagcagucuacccugaaacuugcgacaggaaugcggaacguucccgagaagcaaacgcgcggcaucuucggggccaucgcuggauuuauugaaaauggcugggaggggaugguggauggaugguauggcuucagacaccagaacagcgagggccgggggcaggccgcugaccugaaauccacccaagccgccaucgaucagauuaauggaaagcucaacagacugaucggcaaaacaaaugaaaaguuccaccagauugagaaggaauuuagcgagguggaagggcgcauccaggaccuugagaaauacgucgaggauaccaagauugaccuguggucuuauaacgcugaacuccugguggcgcuggagaaccaacauacaaucgaucucaccgacuccgaaaugaauaaacuguucgagaagacgaaaaagcagcuucgggaaaacgccgaggauaugggaaauggcugcuuuaagaucuaccacaaaugugacaacgcuugcauugggagcaucagaaauggcacauaugaucaugacguuuaccgcgacgaggcccugaacaaucgguuccagauuaagggaguggaacucaaaucuggcuacaaggauuggauccuguggauuuccuuugccaucagcugcuuccuucugugugucgcucuccugggguuuaucaugugggccugccagaaaggaaacauuagauguaauaucugcauuuga

SEQ ID NO: 203730 - RNA, 1701 nt, Artificial Sequence; identical to SEQ ID NO: 201940
  derived and/or modified CDS sequence (opt5) from hemagglutinin__InfluenzaA__AHL98913

SEQ ID NO: 203731 - RNA, 1701 nt, Artificial Sequence; identical to SEQ ID NO: 201930
  derived and/or modified CDS sequence (opt5) from hemagglutinin__InfluenzaA__AHL98925

SEQ ID NO: 203732 - RNA, 1701 nt, Artificial Sequence; identical to SEQ ID NO: 202069
  derived and/or modified CDS sequence (opt5) from hemagglutinin__InfluenzaA__AHL98937

SEQ ID NO: 203733 - RNA, 1701 nt, Artificial Sequence; identical to SEQ ID NO: 202066
  derived and/or modified CDS sequence (opt5) from hemagglutinin__InfluenzaA__AHL98961

SEQ ID NO: 203734 - RNA, 1701 nt, Artificial Sequence
  derived and/or modified CDS sequence (opt5) from hemagglutinin__InfluenzaA__AHL98973
augaagaccaucauugcccugagcuacauccucugccugguguucgcucagaaacuucccggcaacgacaauuccacagccacgcugugucucgggcaccaugcggucccuaacggaaccauuguuaagacaaucaccaaugauagaauugaggugacaaacgcuaccgaacuggugcaaaauucuagcaucggcgagaucugcgacuccccgcaccagauucuugauggggaaaacuguacacugaucgacgcccuccugggagauccccagugcgacggcuuucagaauaaaaagugggaucuguucgucgagcggucuaaagccuauagcaacuguuacccuuaugacgugcccgauuacgcuucccuccgcucucugguugccagcuccgggacccuugaauuuaauaacgagagcuucaauuggacgggagugacccaaaacggcacaucuuccgcuugcauuagacggagcaauucuuccuuuuucagccgccugaacuggcucacccaucugaauuuuaaguauccugcccuuaacgucacaaugcccaacaaugagcaguucgacaagcuguacaucuggggcgugcaccauccugggaccgauaaagaccagauuuuucucuaugcgcagucuuccggaagaaucacgguuagcacaaagcggucccaacaggccguggucccgaacauuggcucucgccccagaauccggaauaucccuagccgcauuuccaucuacuggaccauugugaaacccggggauauccugcugauuaacagcacaggaaaucucaucgcuccuagaggcuacuucaagauccggucugggaaauccagcauuaugcgcucugacgcccccaucggaaaguguaagagcgaaugcauuaccccgaacggcuccaucccuaaugacaaacccuuucagaacgugaauagaauuaccuauggcgcuuguccucgguacgucaagcagucuacacugaaacuugccacggggaugcgcaacguucccgagaagcaaaccagaggaaucuucggcgcgaucgccggguuuauugaaaauggaugggagggcaugguggaugggugguauggauuccggcaccagaacagcgagggcagaggccaggcugccgaccugaaauccacacaagcugccaucgaucagauuaaugggaagcucaaccgccugaucggaaaaaccaaugaaaaguuccaccagauugagaaggaauuuagcgagguggaaggccggauccaggaccuugagaaauacgucgaggauacaaagauugaccuguggucuuauaacgccgaacuccugguggcucuggagaaccaacauaccaucgaucucacggacuccgaaaugaauaaacuguucgagaagaccaaaaagcagcuuagagaaaacgcggaggauauggggaauggaugcuuuaagaucuaccacaaaugugacaacgccugcauuggcagcauccgcaaugggacauaugaucaugacguuuaccgggacgaggcucugaacaauagauuccagauuaagggcguggaacucaaaucuggauacaaggauuggauccuguggauuuccuuugccaugagcugcuuccuucugugugucgcccuccugggcuuuaucaugugggcuugccagaaagggaacauccgcuguaauauuugcaucuga

SEQ ID NO: 203735 - RNA, 1701 nt, Artificial Sequence
  derived and/or modified CDS sequence (opt5) from hemagglutinin__InfluenzaA__AHL98985
augaagaccaucauugcccugagcuacauccucugccugguguucgcucagaaacuucccggcaacgacaauuccacagccacgcugugucucgggcaccaugcggucccuaacggaaccauuguuaagacaaucaccaaugauagaauugaggugacaaacgcuaccgaacuggugcaaaauucuagcaucggcgagaucugcgacuccccgcaccagauucuugauggggaaaacuguacaaucauugacgcccugcucggagauccccagugcgacggcuuucagaauaaaaagugggaucuguucgucgagcggucuaaagccuauagcaacuguuacccuuaugacgugcccgauuacgcuucccugcgcucucucguugccagcuccgggacccuggaauuuaauaacgagagcuucaauugggcuggagugacgcaaaacggcaccucuuccgccugcaucagaggcagcaauucuuccuuuuucagccggcuuaacuggcugacacaucucaauuuuaaguauccugcgcugaacgucaccaugcccaacaaugagcaguucgacaaacuuuacauuuggggagugcaccauccugggacagauaaggaccagaucuuucuguaugcccagucuuccggccgcauuaccguuagcacgaagagaucccaacaggcugugaucccgaacaucgggucucggccccgcauuagaaauaucccuagccggauuuccaucuacuggacaauugucaaacccggagauauccuccugaucaacagcaccggcaaucugauugccccucgcggguacuucaagaucagaucuggaaaauccagcauuaugcggucugacgcucccaucggcaaguguaagagcgaaugcauuacaccgaacggcuccaucccuaaugacaaacccuuucagaacgugaaucgcaucaccuauggggccuguccuagauacgugaagcagucuacccucaaacuggcgacaggaaugcggaacguccccgagaagcaaacgcgcggcauuuucggggccaucgcuggauuuauugaaaauggcugggaggggaugguugauggaugguauggcuucagacaccagaacagcgagggccgggggcaggccgcugaccuuaaauccacccaagccgccaucgaucagauuaauggaaagcugaacagacucaucggcaaaacaaaugaaaaguuccaccagauugagaaggaauuuagcgagguggaagggcgcauccaggaccuggagaaauacguggaggauaccaagaucgaccuuuggucuuauaacgcugaacugcucgucgcgcuggagaaccaacauacaauugaucugaccgacuccgaaaugaauaaacucuucgagaagacgaaaaagcagcugcgggaaaacgccgaggauaugggaaauggcugcuuuaagaucuaccacaaaugugacaacgcuugcauugggagcaucagaaauggcacauaugaucaugacguguaccgcgacgaggcccuuaacaaucgguuccagauuaagggaguugaacugaaaucuggcuacaaggauuggauccucuggaucuccuuugccauuagcugcuuccugcuuuguguggcucugcucggguuuaucaugugggccugccagaaaggaaacauuagauguaauaucugcauuuga

SEQ ID NO: 203736 - RNA, 1701 nt, Artificial Sequence; identical to SEQ ID NO: 202066
  derived and/or modified CDS sequence (opt5) from hemagglutinin__InfluenzaA__AHL98997

SEQ ID NO: 203737 - RNA, 1701 nt, Artificial Sequence; identical to SEQ ID NO: 201930
  derived and/or modified CDS sequence (opt5) from hemagglutinin__InfluenzaA__AHL99009

SEQ ID NO: 203738 - RNA, 1701 nt, Artificial Sequence; identical to SEQ ID NO: 201940
  derived and/or modified CDS sequence (opt5) from hemagglutinin__InfluenzaA__AHL99021

SEQ ID NO: 203739 - RNA, 1701 nt, Artificial Sequence
  derived and/or modified CDS sequence (opt5) from hemagglutinin__InfluenzaA__AHL99045
augaagaccaucauugcccugagcuacauccucugccugguguucgcucagaaaauucccggcaacgacaauuccacagccacgcuuugucuggggcaccaugcggucccuaacggaaccaucguuaagacaauuaccaaugauagaaucgaggugacaaacgcuaccgaacucgugcaaaauucuagcaucggcgagauuugcgacuccccgcaccagauccuggauggggaaaacuguacacuuauugacgcccugcucggagauccccagugcgacggcuuucagaauaaaaagugggaucuguucgucgagcggucuaaagccuauagcaacuguuacccuuaugacgugcccgauuacgcuucccugcgcucucucguugccagcuccgggacccuggaauuuaauaacgagagcuucaauuggacgggagugacccaaaacggcacaucuuccgcuugcaucagacggagcaauucuuccuuuuucagccgccuuaacuggcugacccaucucaauuuuaaguauccugcccugaacgucacaaugcccaacaaugagcaguucgacaaacuuuacauuuggggcgugcaccauccugggaccgauaaagaccagaucuuucuguaugcgcagucuuccggaagaauuacgguuagcacaaagcggucccaacaggccgugaucccgaacaucggcucucgcccccggauuagaaauaucccuagccgcauuuccaucuacuggaccauugucaaacccggggauauccuccugaucaacagcacaggaaaucugauugcuccuagaggcuacuucaagauccggucugggaaauccagcauuaugcgcucugacgcccccaucggaaaguguaagagcgaaugcauuaccccgaacggcuccaucccuaaugacaaacccuuucagaacgugaauagaaucaccuauggcccuuguccccgguacgugaagcagucuacacucaaacuggcuacggggaugcgcaacguccccgagaagcaaaccagaggaauuuucggcgccaucgcgggguuuauugaaaauggaugggagggcaugguugaugggugguauggauuccggcaccagaacagcgagggcagaggccaggccgcugaccuuaaauccacacaagccgcuaucgaucagauuaaugggaagcugaaccgccucaucggaaaaaccaaugaaaaguuccaccagauugagaaggaauuuagcgagguggaaggccggauccaggaccuggagaaauacguggaggauacaaagaucgaccuuuggucuuauaacgccgaacugcucgucgcccuggagaaccaacauaccauugaucugacggacuccgaaaugaauaaacucuucgagaagacaaagaagcagcugagagaaaacgcugaggauauggggaauggaugcuuuaagaucuaccacaaaugugacaacgcgugcauuggcagcauccgcaaugggaccuaugaucaugacguguaccgggacgaggcccuuaacaauagauuccagauuaagggcguugaacugaaaucuggauacaaggauuggauccucuggaucuccuuugcuauuagcugcuuccugcuuuguguggcccugcucggcuuuaucaugugggccugccagaaagggaacauucgcuguaauaucugcauuuga

SEQ ID NO: 203740 - RNA, 1701 nt, Artificial Sequence
  derived and/or modified CDS sequence (opt5) from hemagglutinin__InfluenzaA__AHL99057
augaagaccaucauugcccugagcuacauccucugccugguguucgcucagaaacuucccggcaacgacaauuccacagccacgcugugucucgggcaccaugcggucccuaacggaaccauuguuaagacaaucaccaaugauagaauugaggugacaaacgcuaccgaacuggugcaaaauucuagcaucggcgagaucugcgacuccccgcaccagauuaucgauggggaaaacuguacacuuauugacgcccugcucggagauccccagugcgacggcuuucagaauaaaaagugggaucuguucgucgagcggucuaaagccuauagcaacuguuacccuuaugacgugcccgauuacgcuucccugcgcucucucguugccagcuccgggacccuggaauuuaauaacgagagcuucaauugggcuggagugacgcaaaacggcaccucuuccgccugcaucagaggcagcaauucuuccuuuuucagccggcuuaacuggcugacacaucucaauuuuaaguauccugcgcugaacgucaccaugcccaacaaugagcaguucgacaaacuuuacauuuggggagugcaccauccugggacagauaaggaccagaucuuucuguaugcccagucuuccggccgcauuaccguuagcacgaagagaucccaacaggcugugaucccgaacaucgggucucggccccgcauuagaaauaucccuagccggauuuccaucuacuggacaauugucaaacccggagauauccuccugaucaacagcaccggcaaucugauugccccucgcggguacuucaagaucagaucuggaaaauccagcauuaugcggucugacgcucccaucggcaaguguaagagcgaaugcauuacaccgaacggcuccaucccuaaugacaaacccuuucagaacgugaaucgcaucaccuauggggccuguccuagauacgugaagcagucuacccucaaacuggcgacaggaaugcggaacguccccgagaagcaaacgcgcggcauuuucggggccaucgcuggauuuauugaaaauggcugggaggggaugguugauggaugguauggcuucagacaccagaacagcgagggccgggggcaggccgcugaccuuaaauccacccaagccgccaucgaucagauuaauggaaagcugaacagacucaucggcaaaacaaaugaaaaguuccaccagauugagaaggaauuuagcgagguggaagggcgcauccaggaccuggagaaauacguggaggauaccaagaucgaccuuuggucuuauaacgcugaacugcucgucgcgcuggagaaccaacauacaauugaucugaccgacuccgaaaugaauaaacucuucgagaagacgaaaaagcagcugcgggaaaacgccgaggauaugggaaauggcugcuuuaagaucuaccacaaaugugacaacgcuugcauugggagcaucagaaauggcacauaugaucaugacguguaccgcgacgaggcccuuaacaaucgguuccagauuaagggaguugaacugaaaucuggcuacaaggauuggauccucuggaucuccuuugccauuagcugcuuccugcuuuguguggcucugcucggguuuaucaugugggccugccagaaaggaaacauuagauguaauaucugcauuuga

SEQ ID NO: 203741 - RNA, 1701 nt, Artificial Sequence
  derived and/or modified CDS sequence (opt5) from hemagglutinin__InfluenzaA__AHL99069
augaagaccaucauugcccugagcuacauccucugccugguguucgcucagaaacuucccggcaacgacaauuccacagccacgcugugucucgggcaccaugcggucccuaacggaaccauuguuaagacaaucaccaaugauagaauugaggugacaaacgcuaccgaacuggugcaaaauucuagcaucggcgagaucugcgacuccccgcaccagauucuugauggggaaaacuguacacugaucgacgcccuccugggagauccccagugcgacggcuuucagaauaaaaagugggaucuguucgucgagcggucuaaagccuauagcaacuguuacccuuaugacgugcccgauuacgcuucccuccgcucucugguugccagcuccgggacccuugaauuuaauaacgagagcuucaauugggcuggagugacgcaaaacggcaccucuuccgccugcauuagaggcagcaauucuuccuuuuucagccggcugaacuggcucacacaucugaauuuuaaguauccugcgcuuaacgucaccaugcccaacaaugagcaguucgacaagcuguacaucuggggagugcaccauccugggacagauaaagaccagauuuuucucuaugcccagucuuccggccgcaucaccguuagcacgaagagaucccaacaggcugugauuccgaacaucgggucucggccccgcaucagaaauauuccuagccggaucuccauuuacuggacaaucgucaaacccggagauacccugcugauuaacagcacaggcaaucucaucgccccucgcggguacuucaagaucagaucuggaaaauccagcauuaugcggucugacgcucccaucggcaaguguaagagcgaaugcauuaccccgaacggcuccaucccuaaugacaaacccuuucagaacgugaaucgcauuaccuauggggccuguccuagauacgugaagcagucuacacugaaacuugcgacgggaaugcggaacguccccgagaagcaaacccgcggcaucuucggggccaucgcuggauuuauugaaaauggcugggaggggaugguugauggaugguauggcuucagacaccagaacagcgagggccgggggcaggccgcugaccugaaauccacacaagccgccaucgaucagauuaauggaaagcucaacagacugaucggcaaaaccaaugaaaaguuccaccagauugagaaggaauuuagcgagguggaagggcgcauccaggaccuugagaaauacguggaggauacaaagauugaccuguggucuuauaacgcugaacuccuggucgcgcuggagaaccaacauaccaucgaucucacggacuccgaaaugaauaaacuguucgagaagaccaaaaagcagcuucgggaaaacgccgaggauaugggaaauggcugcuuuaagaucuaccacaaaugugacaacgcuugcauugggagcaucagaaauggcacauaugaucauaacguguaccgcgacgaggcccugaauaaccgguuccagauuaagggaguugaacucaaaucuggcuacaaggacuggauccuguggauuuccuuugccaucagcugcuuccuucuguguguggcucuccugggguuuaucaugugggccugccagaaaggaaauauuagauguaacaucugcauuuga

SEQ ID NO: 203742 - RNA, 1701 nt, Artificial Sequence
  derived and/or modified CDS sequence (opt5) from hemagglutinin__InfluenzaA__AHL99081
augaagaccaucauugcccugagcuacauccucugccugguguucgcucagaaacuucccggcaacgacaauuccacagccacgcugugucucgggcaccaugcggucccuaacggaaccauuguuaagacaaucaccaaugauagaauugaggugacaaacgcuaccgaacuggugcaaaauucuagcaucggcgagaucugcgacuccccgcaccagauucuugauggggaaaacuguacacugaucgacgcccuccugggagauccccagugcgacggcuuucagaauaaaaagugggaucuguucgucgagcggucuaaagccuauagcaacuguuacccuuaugacgugcccgauuacgcuucccuccgcucucugguugccagcuccgggacccuugaauuuaauaacgagagcuucaauuggacgggagugacccaaaacggcacaucuuccgcuugcauuagacggagcaauucuuccuuuuucagccgccugaacuggcucacccaucugaauuuuaaguauccugcccuuaacgucacaaugcccaacaaugagcaguucgacaagcuguacaucuggggcgugcaccauccugggaccgauaaagaccagauuuuucucuaugcgcagucuuccggaagaaucacgguuagcacaaagcggucccaacaggccgugauuccgaacaucggcucucgccccagaauccggaauauuccuagccgcaucuccauuuacuggaccaucgucaaacccggggauauucugcugaucaacagcacaggaaaucucaucgcuccuagaggcuacuucaagauucggucugggaaauccagcaucaugcgcucugacgcccccauuggaaaguguaagagcgaaugcaucaccccgaacggcuccauuccuaaugacaaacccuuucagaacgugaauagaaucaccuauggcgcuuguccucgguacgugaagcaggggacacugaaacuugccacgggaaugcgcaacguccccgagaagcaaaccagaggcaucuucggggcgauugccggauuuaucgaaaauggcugggaggggaugguugauggaugguauggcuuccggcaccagaacucugagggcagagggcaggcugccgaccugaaaagcacacaagcugccauugaucagaucaauggaaagcucaaccgccugauuggcaaaaccaaugaaaaguuccaccagaucgagaaggaauuuuccgagguggaagggcggauucaggaccuugagaaauacguggaggauacaaagaucgaccuguggagcuauaacgccgaacuccuggucgcucuggagaaccaacauaccaucgaucucacggacucugaaaugaauaaacuguucgagaagaccaaaaagcagcuuagagaaaacgcggaggauaugggaaauggcugcuuuaagauuuaccacaaaugugacaacgccugcaucggguccauucgcaauggcacauaugaucauaacguguaccgggacgaggcucugaauaacagauuccagaucaagggaguugaacucaaaagcggcuacaaggacuggauucuguggaucucuuuugccaucuccugcuuccuucuguguguggcccuccugggguuuauuaugugggcuugccagaaaggaaauauccgcuguaacauuugcaucuga

SEQ ID NO: 203743 - RNA, 1701 nt, Artificial Sequence
  derived and/or modified CDS sequence (opt5) from hemagglutinin__InfluenzaA__AHL99093
augaagaccaucauugcccugagcuacauccucugccugauuuucgcucagaaacuucccggcaacgacaauuccacagccacgcugugucucgggcaccaugcggugccuaacggaaccaucgucaagacaauuaccaaugauagaaucgagguuacaaacgcuaccgaacuggugcaaaauucuagcaucggcgagauuugcgacuccccgcaccagauccuugauggggaaaacuguacacugauugacgcccuccugggagauccccagugcgacggcuuucagaauaaaaagugggaucuguucguggagcggucuaaagccuauagcaacuguuacccuuaugacguccccgauuacgcuucccuccgcucucugguggccagcuccgggacccuugaauuuaauaacgagagcuucaauuggacgggaguuacccaaaacggcacaucuuccgcuugcaucagacggagcaauucuuccuuuuucagccgccugaacuggcucacccaucugaauuuuaaguauccugcccuuaacgugacaaugcccaacaaugagcaguucgacaagcuguacauuuggggcguccaccauccugggaccgauaaagaccagaucuuucucuaugcgcagucuuccggaagaauuacggugagcacaaagcggucccaacaggccguuaucccgaacaucggcucucgcccccggauuagaaauaucccuagccgcauuuccaucuacuggaccauugugaaacccggggauauccugcugaucaacagcacaggaaaucucauugcuccuagaggcuacuucaagauccggucugggaaauccagcauuaugcgcucugacgcccccaucggaaaguguaagagcgaaugcauuaccccgaacggcuccaucccuaaugacaaacccuuucagaacgucaauagaaucaccuauggcgcuuguccucgguacgugaagcagucuacacugaaacuugccacggggaugcgcaacgugcccgagaagcaaaccagaggaauuuucggcgcgaucgccggguuuauugaaaauggaugggagggcauggucgaugggugguauggauuccggcaccagaacagcgagggcagaggccaggcugccgaccugaaauccacacaagcugccaucgaucagauuaaugggaagcucaaccgccugaucggaaaaaccaaugaaaaguuccaccagauugagaaggaauuuagcgagguugaaggccggauccaggaccuugagaaauacguggaggauacaaagaucgaccuguggucuuauaacgccgaacuccugguggcucuggagaaccaacauaccauugaucucacggacuccgaaaugaauaaacuguucgagaagaccaaaaagcagcuuagagaaaacgcggaggauauggggaauggaugcuuuaagaucuaccacaaaugugacaacgccugcauuggcagcauccgcaaugggacauaugaucauaacgucuaccgggacgaggcucugaauaacagauuccagauuaagggcguggaacucaaaucuggauacaaggacuggauccuguggaucuccuuugccauuagcugcuuccuucuguguguugcccuccugggcuuuaucaugugggcuugccagaaagggaauauuaaguguaacaucugcauuuga

SEQ ID NO: 203744 - RNA, 1701 nt, Artificial Sequence; identical to SEQ ID NO: 201930
  derived and/or modified CDS sequence (opt5) from hemagglutinin__InfluenzaA__AHL99117

SEQ ID NO: 203745 - RNA, 1701 nt, Artificial Sequence
  derived and/or modified CDS sequence (opt5) from hemagglutinin__InfluenzaA__AHL99129
augaagaccaucauugcccugagcuacauccucugccugguguucgcucagaaacuucccggcaacgacaauuccacagccacgcugugucucgggcaccaugcggucccuaacggaaccauuguuaagacaaucaccaaugauagaauugaggugacaaacgcuaccgaacuggugcaaaauucuagcaucggcgagaucugcgacuccccgcaccagauucuugauggggaaaacuguacacugaucgacgcccuccugggagauccccagugcgacggcuuucagaauaaaaagugggaucuguucgucgagcggucuaaagccuauagcaacuguuacccuuaugacgugcccgauuacgcuucccuccgcucucugguugccagcuccgggacccuugaauuuaauaacgagagcuucaauuggacgggagugacccaaaacggcacaucuuccgcuugcauuagacggagcaauucuuccuuuuucagccgccugaacuggcucacccaucugaauuuuaaguauccugcccuuaacgucacaaugcccaacaaugagcaguucgacaagcuguacaucuggggcgugcaccauccugggaccgauaaagaccagauuuuucucuaugcgcagucuuccggaagaaucacgguuagcacaaagcggucccaacaggccgugauuccgaacaucggcucucgccccagaauccggaauauuccuagccgcaucuccauuuacuggaccaucgucaaacccggggauauucugcugaucaacagcacaggaaaucucaucgcuccuagaggcuacuucaagauucggucugggaaauccagcaucaugcgcucugacgcccccauuggaaaguguaagagcgaaugcaucaccccgaacggcuccauuccuaaugacaaacccuuucagaacgugaauagaaucaccuauggcgcuuguccucgguacgugaagcagucuacacugaaacuugccacggggaugcgcaacguccccgagaagcaaaccagaggaaucuucggcgcgauugccggguuuaucgaaaauggaugggagggcaugguugaugggugguauggauuccggcaccagaacagcgagggcagaggccaggcugccgaccugaaauccacacaagcugccauugaucagaucaaugggaagcucaaccgccugauuggaaaaaccaaugaaaaguuccaccagaucgagaaggaauuuagcgagguggaaggccggauucaggacaucgagaaauacguggaggauacaaagaucgaccuuuggucuuauaacgccgaacugcucgucgcucuggagaaccaacauaccauugaucugacggacuccgaaaugaauaaacucuucgagaagaccaaaaagcagcugagagaaaacgcggaggauauggggaauggaugcuuuaagaucuaccacaaaugugacaacgccugcauuggcagcauccgcaaugggacauaugaucauaacguguaccgggacgaggcucuuaauaacagauuccagauuaagggcguugaacugaaaucuggauacaaggacuggauccucuggaucuccuuugccauuagcugcuuccugcuuuguguggcccugcucggcuuuaucauuugggcuugccagaaagggaauauccgcuguaacauuugcaucuga

SEQ ID NO: 203746 - RNA, 1701 nt, Artificial Sequence
  derived and/or modified CDS sequence (opt5) from hemagglutinin__InfluenzaA__AHL99141
augaagaccaucauugcccugagcuacauccucugccugguguucgcucagaaacuucccggcaacgacaauuccacagccacgcugugucucgggcaccaugcggucccuaacggaaccauuguuaagacaaucaccaaugaucaaauugaggugacaaacgcuaccgaacuggugcaaaauucuagcaucggcgagaucugcgacuccccgcaccagauucuugauggggaaaacuguacacugaucgacgcccuccugggagauccccagugcgacggcuuucagaauaaaaagugggaucuguucgucgagagaucuaaagccuauagcaacuguuacccuuaugacgugcccgauuacgcuucccuccggucucugguugccagcuccgggacccuugaauuuaauaacgagagcuucaauuggacgggagugacccagaacggcacaucuuccgcuugcauucgcagaagcaauucuuccuuuuucagccggcugaacuggcucacccaucuggacuuuaaguauccugcccuuaaugucacaaugcccaacaacgagcaguucgauaagcuguacaucuggggcgugcaccauccugggaccgacaaagaucagauuuuucucuaugcgcaaucuuccggacgcaucacgguuagcacaaagagaucccagcaggccgugauuccgaauaucggcucucggccccgcaucagaaacauuccuagccggaucuccauuuacuggaccaucgucaaacccggggacauucugcugaucaauagcacaggaaaccucaucgcuccucgcggcuacuucaagauuagaucugggaaauccagcaucaugcggucugacgcccccauuggaaaguguaagagcgaaugcaucaccccgaauggcuccauuccuaacgauaaacccuuucagaaugugaaccgcaucaccuauggcgcuuguccuagauacgugaagcaaucuacacugaaacuugccacggggaugcggaauguccccgagaagcagacccgcggaaucuucggcgcgauugccggguuuaucgaaaacggaugggagggcaugguugacgggugguauggauucagacaccagaauagcgagggccggggccaagcugccgaucugaaauccacacaggcugccauugaccagaucaacgggaagcucaauagacugauuggaaaaaccaacgaaaaguuccaccagaucgagaaggaauuuagcgagguggaaggccgcauucaagaucuugagaaauacguggaggacacaaagaucgaucuguggucuuauaaugccgaacuccuggucgcucuggagaaccagcauaccaucgaccucacggauuccgaaaugaacaaacuguucgagaagaccaaaaagcagcuucgggaaaaugcggaggacauggggaacggaugcuuuaagauuuaccacaaaugugauaaugccugcaucggcagcauuagaaacgggacauaugaccaugacguguaccgcgaugaggcucugaauaaccgguuccagaucaagggcguugaacucaaaucuggauacaaggacuggauucuguggaucuccuuugccaucagcugcuuccuucuguguguggcccuccugggcuuuauuaugugggcuugccaaaaagggaauaucagauguaacauuugcaucuga

SEQ ID NO: 203747 - RNA, 1701 nt, Artificial Sequence
  derived and/or modified CDS sequence (opt5) from hemagglutinin__InfluenzaA__AHL99153
augaagaccaucauugcccugagcuacauccucugccugguguucgcucagaaacuucccggcaacgacaauuccacagccacgcugugucucgggcaccaugcggucccuaacggaaccauuguuaagacaaucaccaaugauagaauugaggugacaaacgcuaccgaacuggugcaaaauucuagcaucggcgagaucugcgacuccccgcaccagauucuugauggggaaaacuguacacugaucgacgcccuccugggagauccccagugcgacggcuuucagaauaaaaagugggaucuguucgucgagcggucuaaagccuauagcaacuguuacccuuaugacgugcccgauuacgcuucccuccgcucucugguugccagcuccgggacccuugaauuuaauaacgagagcuucaauugggcuggagugacgcaaaacggcaccucuuccgccugcauuagaggcagcaauucuuccuuuuucagccggcugaacuggcucacacaucugaauuuuaaguauccugcgcuuaacgucaccaugcccaacaaugagcaguucgacaagcuguacaucuggggagugcaccauccugggacagauaaagaccagauuuuucucuaugcccagucuuccggccgcaucaccguuagcacgaagagaucccaacaggcugugacaccgaacauugggucucggccccgcaucagagauaucccuagccggauuuccaucuacuggaccauugucaaacccggagacauccugcugauuaauagcacaggcaaccucaucgccccucgcggguacuucaagaucagaucuggaaaauccagcauuaugcggucugacgcucccaucggcaaguguaagagcgaaugcauuaccccgaauggcuccaucccuaacgauaaacccuuucagaaugugaaccgcauuaccuauggggccuguccuagauacgugaagcagucuacacugaaacuugcgacgggaaugcggaauguccccgagaagcaaacccgcggcaucuucggggccaucgcuggauuuauugaaaacggcugggaggggaugauggacggaugguauggcuucagacaccagaauagcgagggccgggggcaggccgcugaucugaaauccacacaagccgccaucgaccagauuaacggaaagcucaauagacugaucggcaaaaccaacgaaaaguuccaccagauugagaaggaauuuagcgagguugaagggcgcauccaggaucuugagaaauacguggaggacacaaagauugaucuguggucuuauaaugcugaacuccugguggcgcuggagaaccaacauaccaucgaccucacggauuccgaaaugaacaaacuguucgagaagaccaaaaagcagcuucgggaaaaugccgaggacaugggaaacggcugcuuuaagaucuaccacaaaugugauaaugcuugcauugggagcaucagaaacggcacauaugaccaugacgucuaccgcgaugaggcccugaauaaccgguuccagauuaagggaguggaacucaaaucuggcuacaaggacuggauccuguggauuuccuuugccaucagcugcuuccuucuguguguugcucuccugggguuuaucaugugggccugccagaaaggaaauauuagauguaacaucugcauuuga

SEQ ID NO: 203748 - RNA, 1701 nt, Artificial Sequence; identical to SEQ ID NO: 202069
  derived and/or modified CDS sequence (opt5) from hemagglutinin__InfluenzaA__AHL99165

SEQ ID NO: 203749 - RNA, 1701 nt, Artificial Sequence; identical to SEQ ID NO: 202554
  derived and/or modified CDS sequence (opt5) from hemagglutinin__InfluenzaA__AHL99177

SEQ ID NO: 203750 - RNA, 1701 nt, Artificial Sequence; identical to SEQ ID NO: 201930
  derived and/or modified CDS sequence (opt5) from hemagglutinin__InfluenzaA__AHL99189

SEQ ID NO: 203751 - RNA, 1701 nt, Artificial Sequence; identical to SEQ ID NO: 202066
  derived and/or modified CDS sequence (opt5) from hemagglutinin__InfluenzaA__AHL99225

SEQ ID NO: 203752 - RNA, 1701 nt, Artificial Sequence; identical to SEQ ID NO: 202539
  derived and/or modified CDS sequence (opt5) from hemagglutinin__InfluenzaA__AHL99237

SEQ ID NO: 203753 - RNA, 1701 nt, Artificial Sequence; identical to SEQ ID NO: 201940
  derived and/or modified CDS sequence (opt5) from hemagglutinin__InfluenzaA__AHL99249

SEQ ID NO: 203754 - RNA, 1701 nt, Artificial Sequence; identical to SEQ ID NO: 201930
  derived and/or modified CDS sequence (opt5) from hemagglutinin__InfluenzaA__AHL99261

SEQ ID NO: 203755 - RNA, 1701 nt, Artificial Sequence; identical to SEQ ID NO: 202069
  derived and/or modified CDS sequence (opt5) from hemagglutinin__InfluenzaA__AHL99273

SEQ ID NO: 203756 - RNA, 1701 nt, Artificial Sequence
  derived and/or modified CDS sequence (opt5) from hemagglutinin__InfluenzaA__AHL99285
augaagaccaucauugcccugagcuacauccucugccugguguucgcucagaaacuucccggcaacgacaauuccacagccacgcugugucucgggcaccaugcggucccuaacggaaccauuguuaagacaaucaccaaugauagaauugaggugacaaacgcuaccgaacuggugcaaaauucuagcaucggcgagaucugcgacuccccgcaccagauucuugauggggaaaacuguacacugaucgacgcccuccugggagauccccagugcgacggcuuucagaauaaaaagugggaucuguucgucgagcggucuaaagccuauagcaacuguuacccuuaugacgugcccgauuacgcuucccuccgcucucugguugccagcuccgggacccuugaauuuaauaacgagagcuucaauuggacgggagugacccaaaacggcacaucuuccgcuugcauuagacggagcaauucuuccuuuuucagccgccugaacuggcucacccaucugaauuuuaaguauccugcccuuaacgucacaaugcccaacaaugagcaguucgacaagcuguacaucuggggcgugcaccauccugggaccgauaaagaccagauuuuucucuaugcgcagucuuccggaagaaucacgguuagcacaaagcggucccaacaggccgugauuccgaacaucggcucucgccccagaauccggaauauuccuagccgcaucuccauuuacuggaccaucgucaaacccggggauauucugcugaucaacagcacaggaaaucucaucgcuccuagaggcuacuucaagauucagucugggaaauccagcaucaugcggucugacgcccccauuggaaaguguaagagcgaaugcaucaccccgaacggcuccauuccuaaugacaaacccuuucagaacgugaaucgcaucaccuauggcgcuuguccuagauacgugaagcaaucuacacugaaacuugccacggggaugcggaacguccccgagaagcagacccgcggaaucuucggcgcgauugccggguuuaucgaaaauggaugggagggcaugguugaugggugguauggauucagacaccagaacagcgagggccggggccaagcugccgaccugaaauccacacaggcugccauugaucagaucaaugggaagcucaacagacugauuggaaaaaccaaugaaaaguuccaccagaucgagaaggaauuuagcgagguggaaggccgcauucaagaccuugagaaauacguggaggauacaaagaucgaccuguggucuuauaacgccgaacuccuggucgcucuggagaaccagcauaccaucgaucucacggacuccgaaaugaauaaacuguucgagaagaccaaaaagcagcuucgggaaaacgcggaggauauggggaauggaugcuuuaagauuuaccacaaaugugacaacgccugcaucggcagcauuagaaaugggacauaugaucauaacguguaccgcgacgaggcucugaauaaccgguuccagaucaagggcguugaacucaaaucuggauacaaggacuggauucuguggaucuccuuugccaucagcugcuuccuucuguguguggcccuccugggcuuuauuaugugggcuugccaaaaagggaauaucagauguaacauuugcaucuga

SEQ ID NO: 203757 - RNA, 1701 nt, Artificial Sequence; identical to SEQ ID NO: 202095
  derived and/or modified CDS sequence (opt5) from hemagglutinin__InfluenzaA__AHL99297

SEQ ID NO: 203758 - RNA, 1701 nt, Artificial Sequence; identical to SEQ ID NO: 201940
  derived and/or modified CDS sequence (opt5) from hemagglutinin__InfluenzaA__AHL99309

SEQ ID NO: 203759 - RNA, 1701 nt, Artificial Sequence
  derived and/or modified CDS sequence (opt5) from hemagglutinin__InfluenzaA__AHL99321
augaagaccaucauugcccugagcuacauccucugccugguguucacacagaaacuucccggcaacgacaauuccacggcuacccugugucucgggcaccaugccgucccuaacggaacaauuguuaagaccaucacaaaugaucaaauugaggugaccaacgcgacagaacuggugcaaaauucuagcaucggcgagaucugcgacuccccgcaccagauucuugauggggaaaacuguacccugaucgacgcucuccugggagauccccagugcgacggcuuucagaauaaaaagugggaucuguucgucgagagaucuaaagccuauagcaacuguuacccuuaugacgugcccgauuacgccucccuccggucucugguugcuagcuccgggacgcuugaauuuaauaacgagagcuucaauugggccggagugacccagaacggcacaucuuccgcuugcauucgcggcagcaauucuuccuuuuucagcagacugaacuggcucacccaucugaauuuuaaguauccugcccuuaacgucacaaugcccaacaaugagcaguucgacaagcuguacaucuggggagugcaccauccugggaccgauaaagaccagauuuuucucuaugcgcaaucuuccggccggaucacgguuagcacaaagcgcucccagcaggccgugauuccgaacaucgggucuagaccccggauccgcaauauuccuagcagaaucuccauuuacuggaccaucgucaaacccggagauauucugcugaucaacagcacaggcaaucucaucgcuccucggggguacuucaagauucgcucuggaaaauccagcaucaugagaucugacgcccccauuggcaaguguaagagcgaaugcaucaccccgaacggcuccauuccuaaugacaaacccuuucagaacgugaaucggaucaccuauggggcuuguccucgcuacgugaagcaaucuacacugaaacuugccacgggaaugagaaacguccccgagaagcagacccggggcaucuucggggcgauugccggauuuaucgaaaauggcugggaggggaugguugauggaugguauggcuuccgccaccagaacagcgagggcagagggcaagcugccgaccugaaauccacacaggcugccauugaucagaucaauggaaagcucaaccggcugauuggcaaaaccaaugaaaaguuccaccagaucgagaaggaauuuagcgagguggaagggcgcauucaagaccuugagaaauacguggaggauacaaagaucgaccuguggucuuauaacgccgaacuccuggucgcucuggagaaccagcauaccaucgaucucacggacuccgaaaugaauaaacuguucgagaagaccaaaaagcagcuuagagaaaacgcggaggauaugggaaauggcugcuuuaagauuuaccacaaaugugacaacgccugcaucgggagcauucggaauggcacauaugaucaugacguguacagagacgaggcucugaacaaucgcuuccagaucaagggaguugaacucaaaucuggcuacaaggauuggauucuguggaucuccuuugccaucagcugcuuccuucuguguguggcccuccugggguuuauuaugugggcuugccaaaaaggaaacauccgguguaauauuugcaucuga

SEQ ID NO: 203760 - RNA, 1701 nt, Artificial Sequence
  derived and/or modified CDS sequence (opt5) from hemagglutinin__InfluenzaA__AHL99333
augaagaccaucauugcccugagcuacauccucugccugguguucgcucaggagcuucccggcaacgacgauuccacagccacgcugugucucgggcaccaugcggucccuaauggaaccauuguuaaaacaaucaccaacgaccaaauugaagugacaaaugcuaccgagcuggugcagucuagcuccacaggcgaaaucugcaacucuccgcaccagauccuugauggggagaauuguacccugauugacgcccuccugggagauccccagugcgacggcuuucaaaacaagaaaugggaucuguucgucgaaagaagcaaggcccauuccaauuguuauccuuacgacgugcccgauuaugcuucucuccggagccugguugccuccagcgggacgcuugaguuuaacaaugagucuuucaacuggaccggagugacacagaauggcaccuccagcgcuugcauccgcagaucuaacaauuccuuuuucagccggcugaacuggcucacacaccugaauuuuaaauacccugcccuuaacgucaccaugcccaacaaugaacaguucgacaagcuguauauuuggggcgugcaucacccugggacggauaaggaccagaucuuucucuacgcgcaagccucuggacgcauuacaguuuccaccaaaagaagccagcaggcugugaucccgaacauuggcucccggccccgcgucagaaauaucccuucucgggugagcaucuauuggacaauugugaagcccggggauauccugcugauuaacuccaccggaaaucucaucgccccucgcggcuacuucaaaauuagaagcgggaagucuuccaucaugcggagcgacgcucccaucggaaaauguaacucugccugcauuaccccgaauggcagcaucccuaacgacaagcccuuucagaaugucaaccgcauuacauacggcgcguguccuagauauguuaagcaaaauacgcugaaacuugccaccgggaugcggaacgugcccgagaagcagacacgcggaaucuucggcgcuauugccggguuuaucgaaaauggaugggagggcaugguggaugggugguacggauucagacaccagaacuccgagggccggggccaagcugccgaccugaaaucuacccaggccgcuaucgaucagauuaaugggaagcucaacagacugaucggaaaaacaaacgaaaaguuccaucagauugagaaagaauuuagcgaggucgaaggccgcauccaagaccuugagaaguauguggaggauaccaagauugaccugugguccuacaaugcggaacuccugguugcccuggagaaccagcacacgaucgaucucacagacagcgaaaugaauaaacuguucgagaagaccaaaaagcagcuucgggaaaacgcugaggauauggggaauggaugcuuuaaaauuuaucauaagugugacaacgccugcaucggcucuaucagaaaugggaccuacgaucacaacguguaucgcgacgaggcccugaauaaccgguuccagauuaagggcgucgaacucaaauccggauacaaggacuggauccuguggauuagcuuugcuaucucuugcuuccuucuguguguggcccuccugggcuuuauuaugugggcgugccaaaaagggaauaucagauguaacaucugcauuuga

SEQ ID NO: 203761 - RNA, 1701 nt, Artificial Sequence
  derived and/or modified CDS sequence (opt5) from hemagglutinin__InfluenzaA__AHL99356
augaaggccauccuggugguccuccuguacaccuucgcuacagccaacgcggacacgcuuugcauuggcuaucacgcuaauaacagcaccgauacaguugacaccgugcuggagaagaaugugacagucacccauuccgugaaccuccuggaagauaagcacaaugggaaacuuuguaagcugagaggaguugcuccccuccaucugggcaaaugcaacaucgccggguggauucugggaaauccugagugugaaucucucagcacagccuccucuuggagcuacaucguggagaccuccucuagcgacaacggcacgugcuauccgggggauuuuauuaauuacgaagaacugcgggagcagcuuuccagcgucucuuccuucgaacgcuuugagaucuuccccaagaccagcucuuggccuaaccacgacuccaauaagggagugacagccgcuuguccccaugccggcgcgaaaucuuuuuauaagaaccugaucuggcucguuaaaaagggcaauagcuacccuaaacuguccaagagcuauauuaacgauaaggggaaagaagugcuuguccuguggggaauccaccaccccuccaccacagccgaccaacagucucucuaccagaaugcugaugccuacguguucgugggcaccagcaaguauuccaaaaaguuuaaaccugagauugcuaucagaccgaagguccgggaccaggaggggcgcaugaacuacuauuggacgcugauugaacccggagauaaaaucacauucgaggccaccggcaaccugguugugccuagauacgcguuugccauggaacggaaugcugggagcggaauuaucaucucugacacacccgugcaugauugcaacaccaccugucaaacaccugagggcgccauuaauacgucccuccccuuccagaacauccacccgauuaccaucggcaagugcccuaaguaugucaaaagcacaaagcugcgccuugcuaccgggcugagaaaugugcccucuauucagagccggggacucuuuggcgccaucgccggguucaucgaaggaggcuggacagggaugguugacggaugguacggcuaucaucaccagaacgagcaaggcuccggguacgcugcggaccugaaaucuacccagaaugccauugauaagaucacgaacaaagugaauagcgucauugagaagaugaacacacaguuuaccgcugugggaaaggaguucaaucaccuugagaaacgcaucgaaaaccugaauaagaaaguugacgauggcuuccucgacauuuggaccuacaacgccgagcugcuggugcuccuggaaaaugagagaacacuugauuaucaugacuccaacgucaagaaccuguacgagaaagugcggaaucagcucaagaacaaugccaaggaaaucgggaacggauguuuugaguucuaucacaaaugcgauaauaccuguauggaaagcgucaagaacggcacauacgacuauccuaaauacucugaggaagcuaagcugaaucgcgagaaaaucgauggggugaaacuugaguccacgagaauuuaucaaauccuggccauuuacagcaccguugcgucuucccucgugcuggucgugagccugggcgcuaucuccuuuuggaugugcucuaacggaagccuccagugccggauuuguaucuga

SEQ ID NO: 203762 - RNA, 1701 nt, Artificial Sequence; identical to SEQ ID NO: 201955
  derived and/or modified CDS sequence (opt5) from hemagglutinin__InfluenzaA__AHL99367

SEQ ID NO: 203763 - RNA, 1701 nt, Artificial Sequence
  derived and/or modified CDS sequence (opt5) from hemagglutinin__InfluenzaA__AHL99379
augaaggccauccugguggucaugcucuacaccuucgcuacagccaacgcggacacgcugugcauuggcuaucacgcuaauaacagcaccgauacaguugacaccgugcuugagaaaaaugugacagucacccauuccgugaaccugcucgaagauaagcacaaugggaaacuguguaaacuuagaggaguugcuccccugcaucucggcaagugcaacaucgccggguggauucugggaaauccugagugugaaucucugagcacagccuccucuuggagcuacaucguggagaccuccggcucugacaacgggacgugcuauccgggagauuuuauugacuacgaggagcuccgggagcagcugagcuccgucagcucuuucgaacgcuuugagaucuuccccaagaccuccagcuggccuaaucacgauucuaacaagggcgugacagccgcuuguccccaugccggcgcgaaaggguuuuauaagaaucuuaucuggcugguuaaaaagggaaacuccuacccuaaacucagcauuucuuauaucaaugacaagggcaaggaagugcugguccuuugggggauucaccaccccuccaccacagccgaucaacagagccuguaccagaacgcugacaccuacguguucgugggaacguccagauauucuaaaaaguuuaaaccugagaucgccauucggccgaagguccgcgaucaggagggcagaaugaauuacuauuggacacucguugaacccggggacaaaaucaccuucgaggcuacaggaaaccugguggugccucgguacgccuuugcgauggaacgcaacgccggcagcggcauuaucaucuccgauacccccguccaugacugcaauaccacaugucaaacgccuaagggggcuauuaacaccagccugcccuuccagaauauccacccgauuacaaucggaaaaugcccuaaguaugugaagucuaccaaacucagacuggccacaggccuucggaacguucccuccauucagagccgcgggcuguuuggagcuaucgccggcuucaucgaagggggauggaccggcaugguggacggcugguacggguaucaucaccagaaugaacaaggaucuggcuacgccgcugaucucaagagcacgcagaacgcgauugacaaaaucacaaauaaggucaacuccgugauugagaaaaugaauacccaguuuaccgccguugggaaggaguucaaccaccuggaaaagagaaucgagaaucuuaacaaaaagguggaugacggauuccuggauauuuggacauacaaugcugaacuccugguccugcucgagaacgaacggacccuggacuaucaugauucuaaugugaaaaaccuuuacgagaagguccgcaaccagcugaaaaauaacgccaaggagaucggcaauggguguuuugaguucuaucacaagugcgacaacacauguauggaaagcgugaaaaauggcacguacgauuauccuaaguacuccgaagaggccaaacucaacagagaaaagaucgacggaguuaaacuggagagcacccggauuuaucaaauccuugcuauuuacucuacagccgcguccagccuggugcucgucgugucucugggcgcuaucuccuuuuggaugugcagcaaugggucccugcagugccgcauuuguaucuga

SEQ ID NO: 203764 - RNA, 1701 nt, Artificial Sequence; identical to SEQ ID NO: 203756
  derived and/or modified CDS sequence (opt5) from hemagglutinin__InfluenzaA__AHL99390

SEQ ID NO: 203765 - RNA, 1701 nt, Artificial Sequence; identical to SEQ ID NO: 201930
  derived and/or modified CDS sequence (opt5) from hemagglutinin__InfluenzaA__AHL99402

SEQ ID NO: 203766 - RNA, 1701 nt, Artificial Sequence
  derived and/or modified CDS sequence (opt5) from hemagglutinin__InfluenzaA__AHL99426
augaagaccaucauugcccugagcuacauccucugccugguguucgcucagaaacuucccggcaacgacaauuccacagccacgcugugucucgggcaccaugcggucccuaacggaaccauuguuaagacaaucaccaaugauagaauugaggugacaaacgcuaccgaacuggugcaaaauucuagcaucggcgagaucugcgacuccccgcaccagauucuugauggggaaaacuguacacugaucgacgcccuccugggagauccccagugcgacggcuuucagaauaaaaagugggaucuguucgucgagcggucuaaagccuauagcaacuguuacccuuaugacgugcccgauuacgcuucccuccgcucucugguugccagcuccgggacccuugaauuuaauaacgagagcuucaauuggacgggagugacccaaaacggcacaucuuccgcuugcauuagacggagcaauucuuccuuuuucagccgccugaacuggcucacccaucugaauuuuaaguauccugcccuuaacgucacaaugcccaacaaugagcaguucgacaagcuguacaucuggggcgugcaccauccugggaccgauaaagaccagauuuuucucuaugcgcagucuuccggaagaaucacgguuagcacaaagcggucccaacaggccgugauuccgaacaucggcucucgccccagaauccggaauauuccuagccgcaucuccauuuacuggaccaucgucaaacccggggauauucugcugaucaacagcacaggaaaucucaucgcuccuagaggcuacuucaagauucggucugggaaauccagcaugaugcgcucugacgcccccaucggaaaguguaagagcgaaugcauuaccccgaacggcuccaucccuaaugacaaacccuuucagaacgugaauagaauuaccuauggcgcuuguccucgguacgugaagcagucuacacugaaacuugccacggggaugcgcaacguccccgagaagcaaaccagaggaaucuucggcgcgaucgccggguuuauugaaaauggaugggagggcaugguugaugggugguauggauuccggcaccagaacagcgagggcagaggccaggcugccgaccugaaauccacacaagcugccaucgaucagauuaaugggaagcucaaccgccugaucggaaaaaccaaugaaaaguuccaccagauugagaaggaauuuagcgagguggaaggccggauccaggaccuugagaaauacguggaggauacaaagauugaccuguggucuuauaacgccgaacuccuggucgcucuggagaaccaacauaccaucgaucucacggacuccgaaaugaauaaacuguucgagaagaccaaaaagcagcuuagagaaaacgcggaggauauggggaauggaugcuuuaagaucuaccacaaaugugacaacgccugcauuggcagcauccgcaaugggacauaugaucaugacguguaccgggacgaggcucugaacaauagauuccagauuaagggcguugaacucaaaucuggauacaaggauuggauccuguggauuuccuuugccaucagcugcuuccuucuguguguggcccuccugggcuuuaucaugugggcuugccagaaagggaacauucgcuguaauaucugcauuuga

SEQ ID NO: 203767 - RNA, 1701 nt, Artificial Sequence
  derived and/or modified CDS sequence (opt5) from hemagglutinin__InfluenzaA__AHL99438
augaagaccaucauugcccugagcuacauccucugccugguguucgcucagaaacuucccggcaacgacaauuccacagccacgcugugucucgggcaccaugcggucccuaacggaaccauuguuaagacaaucaccaaugauagaauugaggugacaaacgcuaccgaacuggugcaaaauucuagcaucggcgagaucugcgacuccccgcaccagauucuugauggggaaaacuguacacugaucgacgcccuccugggagauccccagugcgacggcuuucagaauaaaaagugggaucuguucgucgagcggucuaaagccuauagcaacuguuacccuuaugacgugcccgauuacgcuucccuccgcucucugguugccagcuccgggacccuugaauuuaauaacgagagcuucaauuggacgggagugacccaaaacggcacaucuuccgcuugcauuagacggagcaauucuuccuuuuucagccgccugaacuggcucacccaucugaauuuuaaguauccugcccuuaacgucacaaugcccaacaaugagcaguucgacaagcuguacaucuggggcgugcaccauccugggaccgauaaagaccagauuuuucucuaugcgcagucuuccggaagaaucacgguuagcacaaagcggucccaacaggccgugauuccgaacaucggcucucgccccagaauccggaauauuccuagccgcaucuccauuuacuggaccaucgucaaacccggggauauucugcugaucaacagcacaggaaaucucaucgcuccuagaggcuacuucaagauucagucugggaaauccagcaucaugcggucugacgcccccauuggaaaguguaagagcgaaugcaucaccccgaacggcuccauuccuaaugacaaacccuuucagaacgugaaucgcaucaccuauggcgcuuguccuagauacgugaagcaaucuacacugaaacuugccacggggaugcggaacguccccgagaagcagacccgcggaaucuucggcgcgauugccggguuuaucgaaaauggaugggagggcaugguugaugggugguauggauucagacaccagaacagcgagggccggggccaagcugccgaccugaaauccacacaggcugccauugaucagaucaaugggaagcucaacagacugauuggaaaaaccaaugaaaaguuccaccagaucgagaaggaauuuagcgagguggaaggccgcauucaagaccuugagaaauacguggaggauacaaagaucgaccuguggucuuauaacgccgaacuccuggucgcucuggagaaccagcauaccaucgaucucacggacuccgaaaugaauaaacuguucgagaagaccaaaaagcagcuucgggaaaacgcggaggauauggggaauggaugcuuuaagauuuaccacaaaugugacaacgccugcaucggcagcauuagaaaugggacauaugaucaugacguguaccgcgacgaggcucugaacaaucgguuccagaucaagggcguugaacucaaaucuggauacaaggauuggauucuguggaucuccuuugccaucagcugcuuccuucuguguguggcccuccugggcuuuauuaugugggcuugccaaaaagggaacaucagauguaauauuugcaucuga

SEQ ID NO: 203768 - RNA, 1701 nt, Artificial Sequence; identical to SEQ ID NO: 202066
  derived and/or modified CDS sequence (opt5) from hemagglutinin__InfluenzaA__AHL99450

SEQ ID NO: 203769 - RNA, 1701 nt, Artificial Sequence; identical to SEQ ID NO: 202539
  derived and/or modified CDS sequence (opt5) from hemagglutinin__InfluenzaA__AHL99462

SEQ ID NO: 203770 - RNA, 1701 nt, Artificial Sequence; identical to SEQ ID NO: 202069
  derived and/or modified CDS sequence (opt5) from hemagglutinin__InfluenzaA__AHL99474

SEQ ID NO: 203771 - RNA, 1701 nt, Artificial Sequence; identical to SEQ ID NO: 202095
  derived and/or modified CDS sequence (opt5) from hemagglutinin__InfluenzaA__AHL99486

SEQ ID NO: 203772 - RNA, 1701 nt, Artificial Sequence; identical to SEQ ID NO: 202066
  derived and/or modified CDS sequence (opt5) from hemagglutinin__InfluenzaA__AHL99498

SEQ ID NO: 203773 - RNA, 1701 nt, Artificial Sequence; identical to SEQ ID NO: 201930
  derived and/or modified CDS sequence (opt5) from hemagglutinin__InfluenzaA__AHL99510

SEQ ID NO: 203774 - RNA, 1701 nt, Artificial Sequence; identical to SEQ ID NO: 201930
  derived and/or modified CDS sequence (opt5) from hemagglutinin__InfluenzaA__AHL99522

SEQ ID NO: 203775 - RNA, 1701 nt, Artificial Sequence; identical to SEQ ID NO: 201955
  derived and/or modified CDS sequence (opt5) from hemagglutinin__InfluenzaA__AHL99534

SEQ ID NO: 203776 - RNA, 1701 nt, Artificial Sequence; identical to SEQ ID NO: 201930
  derived and/or modified CDS sequence (opt5) from hemagglutinin__InfluenzaA__AHL99546

SEQ ID NO: 203777 - RNA, 1701 nt, Artificial Sequence; identical to SEQ ID NO: 201930
  derived and/or modified CDS sequence (opt5) from hemagglutinin__InfluenzaA__AHL99558

SEQ ID NO: 203778 - RNA, 1701 nt, Artificial Sequence
  derived and/or modified CDS sequence (opt5) from hemagglutinin__InfluenzaA__AHL99570
augaagaccaucauugcccugagcuacauccucugccugguguucgcucagaaacuucccggcaacgacaauuccacagccacgcugugucucgggcaccaugcggucccuaacggaaccauuguuaagacaaucaccaaugauagaauugaggugacaaacgcuaccgaacuggugcaaaauucuagcaucggcgagaucugcgacuccccgcaccagauucuugauggggaaaacuguacacugaucgacgcccuccugggagauccccagugcgacggcuuucagaauaaaaagugggaucuguucgucgagcggucuaaagccuauagcuccuguuacccuuaugacgugcccgauuacgcuucucuccgcagccugguugccuccagcgggacccuugaauuuaacaaugagucuuucaacuggacgggagugacccaaaauggcacauccagcgcuugcauuagacggucuaacuccagcuuuuucucucgccugaauuggcucacccaucugaacuuuaaguauccugcccuuaaugucacaaugcccaacaacgagcaguucgacaagcuguacaucuggggcgugcaccauccugggaccgauaaagaccagauuuuucucuaugcgcaguccagcggaagaaucacgguuuccacaaagcggucucaacaggccgugauuccgaauaucggcagccgccccagaauccggaacauuccuucccgcaucagcauuuacuggaccaucgucaaacccggggauauucugcugaucaauucuacaggaaaccucaucgcuccuagaggcuacuucaagauucgguccgggaaaagcucuaucaugcgcagcgacgcccccauuggaaaguguaaguccgaaugcaucaccccgaauggcucuauuccuaacgacaaacccuuucagaaugugaacagaaucaccuauggcgcuuguccucgguacaucaagcagagcacacugaaacuugccacggggaugcgcaaugugcccgagaagcaaaccagaggaauuuucggcgcgaucgccggguuuauugaaaacggaugggagggcauggucgaugggugguauggauuccggcaccaaaauuccgagggcagaggccaggcugccgaccugaaaagcacacaggcugccaucgaucagauuaacgggaagcucaaucgccugaucggaaaaaccaacgaaaaguuccaccagauugagaaggaauuuucugagguugaaggccggauccaggaccuugagaaauacguggaggauacaaagaucgaccugugguccuauaaugccgaacuccugguggcucuggagaaccaacauaccauugaucucacggacagcgaaaugaacaaacuguucgagaagaccaaaaagcagcuuagagaaaaugcggaggauauggggaacggaugcuuuaagaucuaccacaaaugugacaaugccugcauuggcucuauccgcaacgggacauaugaucaugacgucuaccgggacgaggcucugaauaacagauuccagauuaagggcguggaacucaaauccggauacaaggauuggauccuguggaucagcuuugccauuuccugcuuccuucuguguguugcccuccugggcuuuaucaugugggcuugccagaaagggaauauucgcuguaacaucugcauuuga

SEQ ID NO: 203779 - RNA, 1701 nt, Artificial Sequence; identical to SEQ ID NO: 201930
  derived and/or modified CDS sequence (opt5) from hemagglutinin__InfluenzaA__AHL99582

SEQ ID NO: 203780 - RNA, 1701 nt, Artificial Sequence
  derived and/or modified CDS sequence (opt5) from hemagglutinin__InfluenzaA__AHL99594
augaaggccauccugguggucaugcucuacaccuucgcuacagccaacgcggacacgcugugcauuggcuaucacgcuaauaacagcaccgauacaguugacaccgugcuugagaaaaaugugacagucacccauuccgugaaccugcucgaagauaagcacaaugggaaacuguguaaacuuagaggaguugcuccccugcaucucggcaagugcaacaucgccggguggauucugggaaauccugagugugaaucucugagcacagccuccucuuggagcuacaucguggagaccuccggcucugacaacgggacgugcuauccgggagauuuuauugacuacgaggagcuccgggagcagcugagcuccgucagcucuuucgaacgcuuugagaucuuccccaagaccuccagcuggccuaaucacgauucuaacaagggcgugacagccgcuugucccagagccggcgcgaaaggguuuuauaagaaucuuaucuggcugguuaaaaagggaaacuccuacccuaaacucagcauuucuuauaucaaugacaagggcaaggaagugcugguccuuugggggauucaucaccccuccaccacagccgaucaacagagccuguaccagaacgcugacaccuacguguucgugggaacgucccgguauucuaaaaaguuuaaaccugagaucgccauucgcccgaaggucagagaucaggagggccggaugaauuacuauuggacacucguugaacccggggacaaaaucaccuucgaggcuacaggaaaccugguggugccucgcuacgccuuugcgauggaaagaaacgccggcagcggcauuaucaucuccgauacccccguccacgacugcaauaccacaugucaaacgccuaagggggcuauuaacaccagccugcccuuccagaauauccauccgauuacaaucggaaaaugcccuaaguaugugaagucuaccaaacuccggcuggccacaggccuucgcaacguucccuccauucagagcagagggcuguuuggagcuaucgccggcuucaucgaagggggauggaccggcaugguggacggcugguacggguaucaccaucagaaugaacaaggaucuggcuacgccgcugaucucaagagcacgcagaacgcgauugacaaaaucacaaauaaggucaacuccgugauugagaaaaugaauacccaguuuaccgccguugggaaggaguucaaccaccuggaaaagcggaucgagaaucuuaacaaaaagguggaugacggauuccuggauauuuggacauacaaugcugaacuccugguccugcucgagaacgaacgcacccuggacuaucacgauucuaaugugaaaaaccuuuacgagaaggucagaaaccagcugaaaaauaacgccaaggagaucggcaauggguguuuugaguucuaucauaagugcgacaacacauguauggaaagcgugaaaaauggcacguacgauuauccuaaguacuccgaagaggccaaacucaaccgggaagagaucgacggaguuaagcuggagagcacccgcauuuaucaaauccuugcuauuuacucuacagccgcguccagccuggugcucgucgugucucugggcgcuaucuccuuuuggaugugcagcaaugggucccugcagugcagaauuuguaucuga

SEQ ID NO: 203781 - RNA, 1701 nt, Artificial Sequence; identical to SEQ ID NO: 202539
  derived and/or modified CDS sequence (opt5) from hemagglutinin__InfluenzaA__AHL99605

SEQ ID NO: 203782 - RNA, 1701 nt, Artificial Sequence; identical to SEQ ID NO: 202069
  derived and/or modified CDS sequence (opt5) from hemagglutinin__InfluenzaA__AHL99617

SEQ ID NO: 203783 - RNA, 1701 nt, Artificial Sequence; identical to SEQ ID NO: 201930
  derived and/or modified CDS sequence (opt5) from hemagglutinin__InfluenzaA__AHL99629

SEQ ID NO: 203784 - RNA, 1701 nt, Artificial Sequence
  derived and/or modified CDS sequence (opt5) from hemagglutinin__InfluenzaA__AHL99641
augaagaccaucauugcccugagcuacauccucugccugguguucgcucagaaacuucccggcaacgacaauuccacagccacgcugugucucgggcaccaugcggucccuaacggaaccauuguuaagacaaucaccaaugauagaauugaggugacaaacgcuaccgaacuggugcaaaauucuagcaucggcgagaucugcgacuccccgcaccagauucuugauggggaaaacuguacacugaucgacgcccuccugggagauccccagugcgacggcuuucagaauaaaaagugggaucuguucgucgagcggucuaaagccuauagcaacuguuacccuuaugacgugcccgauuacgcuucccuccgcucucugguugccagcuccgggacccuugaauuuaauaacgagagcuucaauuggacgggagugacccaaaacggcacaucuuccgcuugcauuagacggagcaauucuuccuuuuucagccgccugaacuggcucacccaucugaauuuuaaguauccugcccuuaacgucacaaugcccaacaaugagcaguucgacaagcuguacaucuggggcgugcaccauccugggaccgauaaagaccagauuuuucucuaugcgcagucuuccggaagaaucacgguuagcacaaagcggucccaacaggccguggucccgaacauuggcucucgccccagaauccggaauaucccuagccgcauuuccaucuacuggaccauugugaaacccggggauauccugcugauuaacagcacaggaaaucucaucgcuccuagaggcuacuucaagauccggucugggaaauccagcauuaugcgcucugacgcccccaucggaaaguguaagagcgaaugcauuaccccgaacggcuccaucccuaaugacaaacccuuucagaacgugaauagaauuaccuauggcgcuuguccucgguacgucaagcagucuacacugaaacuugccacggggaugcgcaacguucccgagaagcaaaccagaggaaucuucggcgcgaucgccggguuuauugaaaauggaugggagggcaugguggaugggugguauggauuccggcaccagaacagcgagggcagaggccaggcugccgaccugaaauccacacaagcugccaucgaucagauuaaugggaagcucaaccgccugaucggaaaaaccaaugaaaaguuccaccagauugagaaggaauuuagcgagguggaaggccggauccaggaccuugagaaauacgucgaggauacaaagauugaccuguggucuuauaacgccgaacuccugguggcucuggagaaccaacauaccaucgaucucacggacuccgaaaugaauaaacuguucgagaagaccaaaaagcagcuuagagaaaacgcggaggauauggggaauggaugcuuuaagaucuaccacaaaugugacaacgccugcauuggcagcauccgcaaugggacauauaaccaugauguuuaccgggacgaggcucugaauaacagauuccagauuaagggcguggaacucaaaucuggauacaaggacuggauccuguggauuuccuuugccaugagcugcuuccuucugugugucgcccuccugggcuuuaucaugugggcuugccagaaagggaauauccgcuguaacauuugcaucuga

SEQ ID NO: 203785 - RNA, 1701 nt, Artificial Sequence
  derived and/or modified CDS sequence (opt5) from hemagglutinin__InfluenzaA__AHL99665
augaagaccaucauugcccugagcuacauccucugccugguguucgcucagaaacuucccggcaacgacaauuccacagccacgcugugucucgggcaccaugcggucccuaacggaaccauuguuaagacaaucaccaaugauagaauugaggugacaaacgcuaccgaacuggugcaaaauucuagcaucggcgagaucugcgacuccccgcaccagauucuugauggggaaaacuguacacugaucgacgcccuccugggagauccccagugcgacggcuuucagaauaaaaagugggaucuguucgucgagcggucuaaagccuauagcaacuguuacccuuaugacgugcccgauuacgcuucccuccgcucucugguugccagcuccgggacccuugaauuuaauaacgagagcuucaauuggacgggagugacccaaaacggcacaucuuccgcuugcauuagacggagcaauucuuccuuuuucagccgccugaacuggcucacccaucugaauuuuaaguauccugcccuuaacgucacaaugcccaacaaugagcaguucgacaagcuguacaucuggggcgugcaccauccugggaccgauaaagaccagauuuuucucuaugcgcagucuuccggaagaaucacgguuagcacaaagcggucccaacaggccgugauuccgaacaucggcucucgccccagaauccggaauauuccuagccgcaucuccauuuacuggaccaucgucaaacccggggauauucugcugaucaacagcacaggaaaucucaucgcuccuagaggcuacuucaagauucggucugggaaauccagcaucaugcgcucugacgcccccauuggaaaguguaagagcgaaugcaucaccccgaacggcuccauuccuaaugacaaacccuuucagaacgugaauagaaucaccuauggcgcuuguccucgguacaucaagcagucuacacugaaacuugccacggggaugcgcaacgugcccgagaagcaaaccagaggaauuuucggcgcgaucgccggguuuauugaaaauggaugggagggcauggucgaugggugguauggauuccggcaccagaacagcgagggcagaggccaggcugccgaccugaaauccacacaagcugccaucgaucagauuaaugggaagcucaaccgccugaucggaaaaaccaaugaaaaguuccaccagauugagaaggaauuuagcgagguugaaggccggauccaggaccuugagaaauacguggaggauacaaagaucgaccuguggucuuauaacgccgaacuccugguggcucuggagaaccaacauaccauugaucucacggacuccgaaaugaauaaacuguucgagaagaccaaaaagcagcuuagagaaaacgcggaggauauggggaauggaugcuuuaagaucuaccacaaaugugacaacgccugcauuggcagcauccgcaaugggacauaugaucaugacgucuaccgggacgaggcucugaacaauagauuccagauuaagggcguggaacucaaaucuggauacaaggauuggauccuguggaucuccuuugccauuagcugcuuccuucuguguguugcccuccugggcuuuaucaugugggcuugccagaaagggaacauucgcuguaauaucugcauuuga

SEQ ID NO: 203786 - RNA, 1701 nt, Artificial Sequence; identical to SEQ ID NO: 201930
  derived and/or modified CDS sequence (opt5) from hemagglutinin__InfluenzaA__AHL99677

SEQ ID NO: 203787 - RNA, 1701 nt, Artificial Sequence; identical to SEQ ID NO: 201930
  derived and/or modified CDS sequence (opt5) from hemagglutinin__InfluenzaA__AHL99689

SEQ ID NO: 203788 - RNA, 1701 nt, Artificial Sequence
  derived and/or modified CDS sequence (opt5) from hemagglutinin__InfluenzaA__AHL99701
augaagaccaucauugcccugagcuacauccucugccugguguucgcucagaaacuucccggcaacgacaauuccacagccacgcugugucucgggcaccaugcggucccuaacggaaccauuguuaagacaaucaccaaugauagaauugaggugacaaacgcuaccgaacuggugcaaaauucuagcaucggcgagaucugcgacuccccgcaccagauucuugauggggaaaacuguacacugaucgacgcccuccugggagauccccagugcgacggcuuucagaauaaaaagugggaucuguucgucgagcggucuaaagccuauagcaacuguuacccuuaugacgugcccgauuacgcuucccuccgcucucugguugccagcuccgggacccuugaauuuaauaacgagagcuucaauugggcuggagugacgcaaaacggcaccucuuccgccugcauuagaggcagcaauucuuccuuuuucagccggcugaacuggcucacacaucugaauuuuaaguauccugcgcuuaacgucaccaugcccaacaaugagcaguucgacaagcuguacaucuggggagugcaccauccugggacagauaaagaccagauuuuucucuaugcccagucuuccggccgcaucaccguuagcacgaagagaucccaacaggcugugacaccgaacauugggucucggccccgcaucagaaauaucccuagccggauuuccaucuacuggaccauugucaaacccggagauauccugcugauuaacagcacaggcaaucucaucgccccucgcggguacuucaagaucagaucuggaaaauccagcauuaugcggucugacgcucccaucggcaaguguaagagcgaaugcauuaccccgaacggcuccaucccuaaugacaaacccuuucagaacgugaaucgcauuaccuauggggccuguccuagauacgugaagcagucuacacugaaacuugcgacgggaaugcggaacguccccgagaagcaaacccgcggcaucuucggggccaucgcuggauuuauugaaaauggcugggaggggaugauggauggaugguauggcuucagacaccagaacagcgagggccgggggcaggccgcugaccugaaauccacacaagccgccaucgaucagauuaauggaaagcucaacagacugaucggcaaaaccaaugaaaaguuccaccagauugagaaggaauuuagcgagguugaagggcgcauccaggaccuugagaaauacguggaggauacaaagauugaccuguggucuuauaacgcugaacuccugguggcgcuggagaaccaacauaccaucgaucucacggacuccgaaaugaauaaacuguucgagaagaccaaaaagcagcuucgggaaaacgccgaggauaugggaaauggcugcuuuaagaucuaccacaaaugugacaacgcuugcauugggagcaucagaaauggcacauaugaucaugacgucuaccgcgacgaggcccugaacaaucgguuccagauuaagggaguggaacucaaaucuggcuacaaggauuggauccuguggauuuccuuugccaucagcugcuuccuucuguguguugcucuccugggguuuaucaugugggccugccagaaaggaaacauuagauguaauaucugcauuuga

SEQ ID NO: 203789 - RNA, 1701 nt, Artificial Sequence
  derived and/or modified CDS sequence (opt5) from hemagglutinin__InfluenzaA__AHL99713
augaagaccaucauugcccugagcuacauccucugccugguguucgcucagaaacuucccggcaacgacaauuccacagccacgcugugucucgggcaccaugcggucccuaacggaaccauuguuaagacaaucaccaaugauagaauugaggugacaaacgcuaccgaacuggugcaaaauucuagcaucggcgagaucugcgacuccccgcaccagauucuugauggggaaaacuguacacugaucgacgcccuccugggagauccccagugcgacggcuuucagaauaaaaagugggaucuguucgucgagcggucuaaagccuauagcaacuguuacccuuaugacgugcccgauuacaccucccuccgcucucugguugcuagcuccgggacgcuugaauuuaauaacgagagcuucaauuggaccggagugacacaaaacggcaccucuuccgccugcauuagacggagcaauucuuccuuuuucagccgccugaacuggcucacacaucugaauuuuaaguauccugcucuuaacgucaccaugcccaacaaugagcaguucgacaagcuguacaucuggggcgugcaccauccugggacggauaaagaccagauuuuucucuaugcccagucuuccggaagaaucacaguuagcaccaagcggucccaacaggcggugauuccgaacaucggcucucgccccagaauccggaauauuccuagccgcaucuccauuuacuggacaaucgucaaacccggggauauucugcugaucaacagcaccggaaaucucaucgccccuagaggcuacuucaagauucggucugggaaauccagcaucaugcgcucugacgcucccauuggaaaguguaagagcgaaugcaucaccccgaacggcuccauuccuaaugacaaacccuuucagaacgugaauagaaucacauauggcgccuguccucgguacgugaagcagucuacgcugaaacuugcuaccgggaugcgcaacguccccgagaagcaaacaagaggaaucuucggcgccauugcgggguuuaucgaaaauggaugggagggcaugguugaugggugguauggauuccggcaccagaacagcgagggcagaggccaggccgcugaccugaaauccacccaagccgcuauugaucagaucaaugggaagcucaaccgccugauuggaaaaacaaaugaaaaguuccaccagaucgagaaggaauuuagcgagguggaaggccggauucaggaccuugagaaauacguggaggauaccaagaucgaccuguggucuuauaacgccgaacuccuggucgcccuggagaaccaacauacgaucgaucucacagacuccgaaaugaauaaacuguucgagaagaccaaaaagcagcuuagagaaaacgcugaggauauggggaauggaugcuuuaagauuuaccacaaaugugacaacgcgugcaucggcagcauucgcaaugggaccuaugaucaugacguguaccgggacgaggcccugaacaauagauuccagaucaagggcguugaacucaaaucuggauacaaggauuggauucuguggaucuccuuugcuaucacaugcuuccuucuguguguggcccuccugggcuuuauuaugugggccugccagaaagggaacauccgcuguaauauuugcaucuga

SEQ ID NO: 203790 - RNA, 1701 nt, Artificial Sequence; identical to SEQ ID NO: 201930
  derived and/or modified CDS sequence (opt5) from hemagglutinin__InfluenzaA__AHL99725

SEQ ID NO: 203791 - RNA, 1701 nt, Artificial Sequence; identical to SEQ ID NO: 202132
  derived and/or modified CDS sequence (opt5) from hemagglutinin__InfluenzaA__AHL99737

SEQ ID NO: 203792 - RNA, 1701 nt, Artificial Sequence; identical to SEQ ID NO: 201930
  derived and/or modified CDS sequence (opt5) from hemagglutinin__InfluenzaA__AHL99748

SEQ ID NO: 203793 - RNA, 1701 nt, Artificial Sequence; identical to SEQ ID NO: 201930
  derived and/or modified CDS sequence (opt5) from hemagglutinin__InfluenzaA__AHL99760

SEQ ID NO: 203794 - RNA, 1701 nt, Artificial Sequence; identical to SEQ ID NO: 201940
  derived and/or modified CDS sequence (opt5) from hemagglutinin__InfluenzaA__AHL99772

SEQ ID NO: 203795 - RNA, 1701 nt, Artificial Sequence; identical to SEQ ID NO: 201955
  derived and/or modified CDS sequence (opt5) from hemagglutinin__InfluenzaA__AHL99784

SEQ ID NO: 203796 - RNA, 1701 nt, Artificial Sequence; identical to SEQ ID NO: 202095
  derived and/or modified CDS sequence (opt5) from hemagglutinin__InfluenzaA__AHL99796

SEQ ID NO: 203797 - RNA, 1701 nt, Artificial Sequence; identical to SEQ ID NO: 201930
  derived and/or modified CDS sequence (opt5) from hemagglutinin__InfluenzaA__AHL99808

SEQ ID NO: 203798 - RNA, 1701 nt, Artificial Sequence
  derived and/or modified CDS sequence (opt5) from hemagglutinin__InfluenzaA__AHL99820
augaagaccaucauugcccugagcuacauccucugccugguguucgcucagaaacuucccggcaacgacaauuccacagccacgcugugucucgggcaccaugcggucccuaacggaaccauuguuaagacaaucaccaaugauagaauugaggugacaaacgcuaccgaacuggugcaaaauucuagcaucggcgagaucugcgacuccccgcaccagauucuugauggggaaaacuguacacugaucgacgcccuccugggagauccccagugcgacggcuuucagaauaaaaagugggaucuguucgucgagcggucuaaagccuauagcaacuguuacccuuaugacgugcccgauuacgcuucccuccgcucucugguugccagcuccgggacccuugaauuuaauaacgagagcuucaauuggacgggagugacccaaaacggcacaucuuccgcuugcauuagacggagcaauucuuccuuuuucagccgccugaacuggcucacccaucugaauuuuaaguauccugcccuuaacgucacaaugcccaacaaugagcaguucgacaagcuguacaucuggggcgugcaccauccugggaccgauaaagaccagauuuuucucuaugcgcagucuuccggaagaaucacgguuagcacaaagcggucccaacaggccgugauuccgaacaucggcucucgccccagaauccggaauauuccuagccgcaucuccauuuacuggaccaucgucaaacccggggauauucugcugaucaacagcacaggaaaucucaucgcuccuagaggcuacuucaagauucggucugggaaauccagcaucaugcgcucugacgcccccauuggaaaguguaagagcgaaugcaucaccccgaacggcuccauuccuaaugacaaacccuuucagaacgugaauagaaucaccuauggcgcuuguccucgguacgugaagcagucuacacugaaacuugccacggggaugcgcaacguccccgagaagcaaaccagaggaaucuucggcgcgauugccggguuuaucgaaaauggaugggagggcaugguugaugggugguauggauuccggcaccagaacagcgacggcagaggccaggcugccgaucugaaauccacacaagcugccauugaccagaucaaugggaagcucaaccgccugauuggaaaaaccaaugagaaguuccaccagaucgaaaaggaguuuagcgaaguggagggccggauucaggaucuugaaaaauacguggaggacacaaagaucgaucuguggucuuauaacgccgagcuccuggucgcucuggaaaaccaacauaccaucgaccucacggauuccgagaugaauaaacuguucgaaaagaccaaaaagcagcuuagagagaacgcggaagacauggggaauggaugcuuuaagauuuaccacaaaugugauaacgccugcaucggcagcauucgcaaugggacauaugaccaugacguguaccgggaugaggcucugaacaauagauuccagaucaagggcguugagcucaaaucuggauacaaggacuggauucuguggaucuccuuugccaucagcugcuuccuucugugugugguccuccugggcuuuauuaugugggccugccagaaagggaacauccgcuguaauauuugcaucuga

SEQ ID NO: 203799 - RNA, 1701 nt, Artificial Sequence; identical to SEQ ID NO: 201930
  derived and/or modified CDS sequence (opt5) from hemagglutinin__InfluenzaA__AHL99832

SEQ ID NO: 203800 - RNA, 1701 nt, Artificial Sequence; identical to SEQ ID NO: 201955
  derived and/or modified CDS sequence (opt5) from hemagglutinin__InfluenzaA__AHL99844

SEQ ID NO: 203801 - RNA, 1701 nt, Artificial Sequence; identical to SEQ ID NO: 201907
  derived and/or modified CDS sequence (opt5) from hemagglutinin__InfluenzaA__AHL99856

SEQ ID NO: 203802 - RNA, 1701 nt, Artificial Sequence
  derived and/or modified CDS sequence (opt5) from hemagglutinin__InfluenzaA__AHL99868
augaagaccaucauugcccugagcuacauccucugccugguguucgcucaggagcuucccggcaacgacgauuccacagccacgcugugucucgggcaccaugcggucccuaauggaaccauuguuaaaacaaucaccaacgaccaaauugaagugacaaaugcuaccgagcuggugcagucuagcuccacaggcgaaaucugcaacucuccgcaccagauccuugauggggagaauuguacccugauugacgcccuccugggagauccccagugcgacggcuuucaaaacaagaaaugggaucuguucgucgaaagaagcaaggcccauuccaauuguuauccuuacgacgugcccgauuaugcuucucuccggagccugguugccuccagcgggacgcuugaguuuaacaaugagucuuucaacuggaccggagugacacagaauggcaccuccagcgcuugcauccgcagaucuaacaauuccuuuuucagccggcugaacuggcucacacaccugaauuuuaaauacccugcccuuaacgucaccaugcccaacaaugaacaguucgacaagcuguauauuuggggcgugcaucacccugggacggauaaggaccagaucuuucucuacgcgcaagccucuggacgcauuacaguuuccaccaaaaagagccagcaggcugugaucccgaacauuggcuccagaccccggguccgcaauaucccuucuagagugagcaucuauuggacaauugugaaacccggggauauccugcugauuaacuccaccggaaaucucaucgccccucggggcuacuucaagauucgcagcgggaaaucuuccaucaugagaagcgacgcucccaucggaaaguguaacucugccugcauuaccccgaauggcagcaucccuaacgacaagcccuuucagaaugucaaccggauuacauacggcgcguguccucgcuauguuaaacaaaauacgcugaaacuugccaccgggaugagaaacgugcccgagaagcagacacggggaaucuucggcgcuauugccggguuuaucgaaaauggaugggagggcaugguggaugggugguacggauuccgccaccagaacuccgagggcagaggccaagcugccgaccugaagucuacccaggccgcuaucgaucagauuaaugggaaacucaaccggcugaucggaaagacaaacgaaaaauuccaucagauugagaaggaauuuagcgaggucgaaggcagaauccaagaccuugagaaguauguggaggauaccaaaauugaccugugguccuacaaugcggaacuccugguugcccuggagaaccagcacacgaucgaucucacagacagcgaaaugaauaagcuguucgagaaaaccaagaaacagcuucgcgaaaacgcugaggauauggggaauggaugcuuuaagauuuaucauaagugugacaacgccugcaucggcucuauccggaaugggaccuacgaucacgacguguauagagacgaggcccugaacaaucgcuuccagauuaaaggcgucgaacucaaguccggauacaaagauuggauccuguggauuagcuuugcuaucucuugcuuccuucuguguguggcccuccugggcuuuauuaugugggcgugccaaaaggggaacauccgguguaauaucugcauuuga

SEQ ID NO: 203803 - RNA, 1701 nt, Artificial Sequence; identical to SEQ ID NO: 202069
  derived and/or modified CDS sequence (opt5) from hemagglutinin__InfluenzaA__AHL99880

SEQ ID NO: 203804 - RNA, 1701 nt, Artificial Sequence; identical to SEQ ID NO: 201930
  derived and/or modified CDS sequence (opt5) from hemagglutinin__InfluenzaA__AHL99892

SEQ ID NO: 203805 - RNA, 1701 nt, Artificial Sequence; identical to SEQ ID NO: 202066
  derived and/or modified CDS sequence (opt5) from hemagglutinin__InfluenzaA__AHL99904

SEQ ID NO: 203806 - RNA, 1701 nt, Artificial Sequence
  derived and/or modified CDS sequence (opt5) from hemagglutinin__InfluenzaA__AHL99916
augaagaccaucauugcccugagcuacauccucugccugguguucgcucagaaacuucccggcaacgacaauuccacagccacgcugugucucgggcaccaugcggucccuaacggaaccauuguuaagacaaucaccaaugauagaauugaggugacaaacgcuaccgaacuggugcaaaauucuagcaucggcgagaucugcgacuccccgcaccagauucuugauggggaaaacuguacacugaucgacgcccuccugggagauccccagugcgacggcuuucagaauaaaaagugggaucuguucgucgagcggucuaaagccuauagcaacuguuacccuuaugacgugcccgauuacgcuucccuccgcucucugguugccagcuccgggacccuugaauuuaauaacgagagcuucaauugggcuggagugacgcaaaacggcaccucuuccgccugcauuagaggcagcaauucuuccuuuuucagccggcugaacuggcucacacaucugaauuuuaaguauccugcgcuuaacgucaccaugcccaacaaugagcaguucgacaagcuguacaucuggggagugcaccauccugggacagauaaagaccagauuuuucucuaugcccagucuuccggccgcaucaccguuagcacgaagagaucccaacaggcugugauuccgaacaucgggucucggccccgcaucagaaauauuccuagccggaucuccauuuacuggacaaucgucaaacccggagauauucugcugaucaacagcaccggcaaucucaucgccccucgcggguacuucaagaugagaucuggaaaauccagcauuaugcggucugacgcucccaucggcaaguguaagagcgaaugcauuacaccgaacggcuccaucccuaaugacaaacccuuucagaacgugaaucgcauuaccuauggggccuguccuagauacgugaagcagucuacccugaaacuugcgacaggaaugcggaacguccccgagaagcaaacgcgcggcaucuucggggccaucgcuggauuuauugaaaauggcugggaggggaugauggauggaugguauggcuucagacaccagaacagcgagggccgggggcaggccgcugaccugaaauccacccaagccgccaucgaucagauuaauggaaagcucaacagacugaucggcaaaacaaaugaaaaguuccaccagauugagaaggaauuuagcgagguugaagggcgcauccaggaccuugagaaauacguggaggauaccaagauugaccuguggucuuauaacgcugaacuccugguggcgcuggagaaccaacauacaaucgaucucaccgacuccgaaaugaauaaacuguucgagaagacgaaaaagcagcuucgggaaaacgccgaggauaugggaaauggcugcuuuaagaucuaccacaaaugugacaacgcuugcauugggagcaucagaaauggcacauaugaucaugacgucuaccgcgacgaggcccugaacaaucgguuccagauuaagggaguggaacucaaaucuggcuacaaggauuggauccuguggauuuccuuugccaucagcugcuuccuucuguguguugcucuccugggguuuaucaugugggccugccagaaaggaaacauuagauguaauaucugcauuuga

SEQ ID NO: 203807 - RNA, 1701 nt, Artificial Sequence; identical to SEQ ID NO: 201955
  derived and/or modified CDS sequence (opt5) from hemagglutinin__InfluenzaA__AHL99928

SEQ ID NO: 203808 - RNA, 1701 nt, Artificial Sequence
  derived and/or modified CDS sequence (opt5) from hemagglutinin__InfluenzaA__AHL99940
augaagaccaucauugcccugagcuacauccucugccugguguucgcucagaaacuucccggcaacgacaauuccacagccacgcugugucucgggcaccaugcggucccuaacggaaccauuguuaagacaaucaccaaugauagaauugaggugacaaacgcuaccgaacuggugcaaaauucuagcaucggcgagaucugcgacuccccgcaccagauucuugauggggaaaacuguacacugaucgacgcccuccugggagauccccagugcgacggcuuucagaauaaaaagugggaucuguucgucgagcggucuaaagccuauagcaacuguuacccuuaugacgugcccgauuacgcuucccuccgcucucugguugccagcuccgggacccuugaauuuaauaacgagagcuucaauuggacgggagugacccaaaacggcacaucuuccgcuugcauuagacggagcaauucuuccuuuuucagccgccugaacuggcucacccaucugaauuuuaaguauccugcccuuaacgucacaaugcccaacaaugagcaguucgacaagcuguacaucuggggcgugcaccauccugggaccgauaaagaccagauuuuucucuaugcgcagucuuccggaagaaucacgguuagcacaaagcggucccaacaggccgugauuccgaacaucggcucucgccccagaauccggaauauuccuagccgcaucuccauuuacuggaccaucgucaaacccggggauauucugcugaucaacagcacaggaaaucucaucgcuccuagaggcuacuucaagauucggucugggaaauccagcaucaugcgcucugacgcccccauuggaaaguguaagagcgaaugcaucaccccgaacggcuccauuccuaaugacaaacccuuucagaacgugaauagaaucaccuauggcgcuuguccucgguacgugaagcagucuacacugaaacuugccacggggaugcgcaacguccccgagaagcaaaccagaggaaucuucggcgcgauugccggguuuaucgaaaauggaugggagggcaugguugaugggugguauggauuccggcaccagaacagcgagggcagaggccaggcugccgaccugaaauccacacaagcugccauugaucagaucaaugggaagcucaaccgccugauuggaaaaaccaaugaaaaguuccaccagaucgagaaggaauuuagcggcguggaggggcggauucaggaccuugaaaaauacguggaggauacaaagaucgaccuguggucuuauaacgccgagcuccuggucgcucuggaaaaccaacauaccaucgaucucacggacuccgagaugaauaaacuguucgaaaagaccaaaaagcagcuuagagagaacgcggaagauaugggaaauggcugcuuuaagauuuaccacaaaugugacaacgccugcaucgggagcauucgcaauggcacauaugaucaugacguguaccgggacgaggcucugaacaauagauuccagaucaagggaguugagcucaaaucuggcuacaaggauuggauucuguggaucuccuuugccaucagcugcuuccuucuguguguggcccuccugggguuuauuaugugggcuugccagaaaggaaacauccgcuguaauauuugcaucuga

SEQ ID NO: 203809 - RNA, 1701 nt, Artificial Sequence; identical to SEQ ID NO: 201930
  derived and/or modified CDS sequence (opt5) from hemagglutinin__InfluenzaA__AHL99952

SEQ ID NO: 203810 - RNA, 1701 nt, Artificial Sequence; identical to SEQ ID NO: 201955
  derived and/or modified CDS sequence (opt5) from hemagglutinin__InfluenzaA__AHL99964

SEQ ID NO: 203811 - RNA, 1701 nt, Artificial Sequence; identical to SEQ ID NO: 201955
  derived and/or modified CDS sequence (opt5) from hemagglutinin__InfluenzaA__AHL99976

SEQ ID NO: 203812 - RNA, 1701 nt, Artificial Sequence; identical to SEQ ID NO: 201955
  derived and/or modified CDS sequence (opt5) from hemagglutinin__InfluenzaA__AHL99988

SEQ ID NO: 203813 - RNA, 1701 nt, Artificial Sequence; identical to SEQ ID NO: 201930
  derived and/or modified CDS sequence (opt5) from hemagglutinin__InfluenzaA__AHM00001

SEQ ID NO: 203814 - RNA, 1701 nt, Artificial Sequence; identical to SEQ ID NO: 201930
  derived and/or modified CDS sequence (opt5) from hemagglutinin__InfluenzaA__AHM00013

SEQ ID NO: 203815 - RNA, 1701 nt, Artificial Sequence; identical to SEQ ID NO: 201940
  derived and/or modified CDS sequence (opt5) from hemagglutinin__InfluenzaA__AHM00025

SEQ ID NO: 203816 - RNA, 1701 nt, Artificial Sequence; identical to SEQ ID NO: 201955
  derived and/or modified CDS sequence (opt5) from hemagglutinin__InfluenzaA__AHM00037

SEQ ID NO: 203817 - RNA, 1701 nt, Artificial Sequence; identical to SEQ ID NO: 201955
  derived and/or modified CDS sequence (opt5) from hemagglutinin__InfluenzaA__AHM00061

SEQ ID NO: 203818 - RNA, 1701 nt, Artificial Sequence; identical to SEQ ID NO: 201930
  derived and/or modified CDS sequence (opt5) from hemagglutinin__InfluenzaA__AHM00073

SEQ ID NO: 203819 - RNA, 1701 nt, Artificial Sequence; identical to SEQ ID NO: 201930
  derived and/or modified CDS sequence (opt5) from hemagglutinin__InfluenzaA__AHM00085

SEQ ID NO: 203820 - RNA, 1701 nt, Artificial Sequence
  derived and/or modified CDS sequence (opt5) from hemagglutinin__InfluenzaA__AHM00097
augaaggccauccuggugguccuccuguacaccuucgcuacagccaacgcggacacgcuuugcauuggcuaucacgcuaauaacagcaccgauacaguugacaccgugcuggagaaaaaugugacagucacccauuccgugaaccuccuggaagauaagcacaaugggaaacuuuguaagcugagaggaguugcuccccuccaucugggcaaaugcaacaucgccggguggauucugggaaauccugagugugaaucucucagcacagccuccucuuggagcuacaucguggagaccuccucuagcgacaacggcacgugcuauccgggggauuuuauugacuacgaagaacugcgggagcagcuuuccagcgucucuuccuucgaacgcuuugagaucuuccccaagaccagcucuuggccuaaucacgauuccaacaagggagugacagccgcuuguccccaugccggcgcgaaaggcuuuuauaagaaucugaucuggcucguuaaaaaggggaacagcuacccuaaacugucuaauuccuauauuaacgacaagggaaaggaagugcuuguccuguggggcauccaccaccccagcaccacagccgaucaacagucccucuaccagaaugcugacaccuacguguucguggggacgucuagauauagcaaaaaguuuaaaccugagauugccauccggccgaagguccgcgaucaggagggaagaaugaacuacuauuggacacugguugaacccggcgacaaaauuaccuucgaggcuacagggaaccugguggugccucgguacgccuuugcgauggaacgcaaugccggauccggcaucauuaucagcgauaccaccguccaugacugcaacacaacgugucaaacccccaagggcgcuaucaauacaucucucccuuuccagaacauucaccccaucaccauugggaaaugcccgaaguaugugaaguccacaaaacugagacuugccaccggacugcggaauguuccuagcauccagucucgcggccucuuuggggcuauugccggauucaucgagggcggguggacgggaaugguggacggcugguacggcuaucaucaccagaacgaacaagggagcggauacgccgcugaucugaaguccacacagaaugcgaucgacaaaauuaccaacaaggucaauucugugaucgagaaaaugaacacccaguuuacagccguuggcaaggaguucaaucaccuugaaaagagaauugagaaccugaauaaaaagguggaugacggguuccucgauaucuggaccuacaacgcugaacugcugguccuccuggagaaugaacggacacuugacuaucaugauagcaacgugaaaaaccuguacgagaagguccgcaaucagcucaaaaacaaugccaaggagauuggaaacggcuguuuugaguucuaucacaagugcgacaauauguguauggaguccgugaaaaacgggacguacgauuaucccaaguacagcgaagaggccaaacugaauagagaaaagaucgacggcguuaaacuugagucuacccggaucuaucaaauucuggcuaucuacuccacaguggccagcucucucguccuggugguuucccugggagcgauuagcuuuuggaugugcuccaacggcucucuccagugccgcaucuguauuuga

SEQ ID NO: 203821 - RNA, 1701 nt, Artificial Sequence; identical to SEQ ID NO: 201955
  derived and/or modified CDS sequence (opt5) from hemagglutinin__InfluenzaA__AHM00108

SEQ ID NO: 203822 - RNA, 1701 nt, Artificial Sequence; identical to SEQ ID NO: 201955
  derived and/or modified CDS sequence (opt5) from hemagglutinin__InfluenzaA__AHM00120

SEQ ID NO: 203823 - RNA, 1701 nt, Artificial Sequence
  derived and/or modified CDS sequence (opt5) from hemagglutinin__InfluenzaA__AHM00132
augaagaccaucauugcccugagcuacauccucugccugguguucgcucaggagcuucccggcaacgacgauuccacagccacgcugugucucgggcaccaugcggucccuaauggaaccauuguuaaaacaaucaccaacgaccaaauugaagugacaaaugcuaccgagcuggugcagucuagcuccacaggcgaaaucugcaacucuccgcaccagauccuugauggggagaauuguacccugauugacgcccuccugggagauccccagugcgacggcuuucaaaacaagaaaugggaucuguucgucgaaagaagcaaggcccauuccaauuguuauccuuacgacgugcccgauuaugcuucucuccggagccugguugccuccagcgggacgcuugaguuuaacaaugagucuuucaacuggaccggagugacacagaauggcaccuccagcgcuugcauccgcagaucuaacaauuccuuuuucagccggcugaacuggcucacacaccugaauuuuaaauacccugcccuuaacgucaccaugcccaacaaugaacaguucgacaagcuguauauuuggggcgugcaucacccugggacggauaaggaccagaucucucucuacgcgcaagccuccggacgcauuacaguuagcaccaaaagaucccagcaggcugugaucccgaacauuggcucucggccccgcgucagaaauaucccuagccggguguccaucuauuggacaauugugaagcccggggauauccugcugauuaacagcaccggaaaucucaucgccccucgcggcuacuuuaaaauuagaucugggaaguccagcaucaugcggucugacgcucccaucggaaaauguaacagcgccugcauuaccccgaauggcuccaucccuaacgacaagcccuuccagaaugucaaccgcauuacauacggcgcguguccuagauauguuaagcaaaauacgcugaaacuugccaccgggaugcggaacgugcccgagaagcagacacgcggaaucuuuggcgcuauugccggguucaucgaaaauggaugggagggcaugguggaugggugguacggauuuagacaccagaacucugagggccggggccaagcugccgaccugaaaagcacccaggccgcuaucgaucagauuaaugggaagcucaacagacugaucggaaaaacaaacgaaaaguuccaucagauugagaaagaguucuccgaagucgaaggccgcauccaagaccuugagaaguauguggaggauaccaagauugaccuguggagcuacaaugcggaacuccugguugcccuggagaaccagcacacgaucgaucucacagacucugaaaugaauaaacuguuugagaagaccaaaaagcagcuucgggaaaacgcugaggauauggggaauggaugcuucaaaauuuaucauaagugugacaacgccugcaucggcuccaucagaaaugggaccuacgaucacgacguguaucgcgacgaggcccugaacaaucgguuucagauuaagggcgucgaacucaaaagcggauacaaggauuggauccuguggauuucuuucgcuaucuccugcuuucuucuguguguggcccuccugggcuucauuaugugggcgugccaaaaagggaacaucagauguaauaucugcauuuga

SEQ ID NO: 203824 - RNA, 1701 nt, Artificial Sequence; identical to SEQ ID NO: 201930
  derived and/or modified CDS sequence (opt5) from hemagglutinin__InfluenzaA__AHM00144

SEQ ID NO: 203825 - RNA, 1701 nt, Artificial Sequence; identical to SEQ ID NO: 201955
  derived and/or modified CDS sequence (opt5) from hemagglutinin__InfluenzaA__AHM00156

SEQ ID NO: 203826 - RNA, 1701 nt, Artificial Sequence; identical to SEQ ID NO: 201930
  derived and/or modified CDS sequence (opt5) from hemagglutinin__InfluenzaA__AHM00168

SEQ ID NO: 203827 - RNA, 1701 nt, Artificial Sequence
  derived and/or modified CDS sequence (opt5) from hemagglutinin__InfluenzaA__AHM00180
augaagaccaucauugcccugagcuacauccucugccugguguucgcucagaaacuucccggcaacgacaauuccacagccacgcugugucucgggcaccaugcggucccuaacggaaccauuguuaagacaaucaccaaugauagaauugaggugacaaacgcuaccgaacuggugcaaaauucuagcaucggcgagaucugcgacaacccgcaccagauucuugauggggaaaauuguacacugaucgacgcccuccugggagauccccagugcgacggcuuucagaacaaaaagugggaucuguucgucgagcgguccaaagccuauucuaauuguuacccuuaugacgugcccgauuacgcuagccuccgcucccugguugccucuagcgggacccuugaauuuaacaaugaguccuucaacuggacgggagugacccaaaauggcacaagcucugcuugcauuagacgguccaacagcuccuuuuucucucgccugaauuggcucacccaucugaacuuuaaguauccugcccuuaacgucacaaugcccaauaacgagcaguucgacaagcuguacaucuggggcgugcaccauccugggaccgauaaagaccagauuuuucucuaugcgcagagcucuggaagaaucacgguuuccacaaagcggagccaacaggccgugauuccgaauaucggcucccgccccagaauccggaacauuccuucucgcaucagcauuuacuggaccaucgucaaacccggggauauucugcugaucaauuccacaggaaaccucaucgcuccuagaggcuacuucaagauucggagcgggaaaucuuccaucaugcgcagcgacgcccccauuggaaaguguaagucugaaugcaucaccccgaauggcagcauuccuaacgacaaacccuuucagaaugugaacagaaucaccuauggcgcuuguccucgguacgugaagcaguccacacugaaacuugccacggggaugcgcaauguccccgagaagcaaaccagaggaaucuucggcgcgauugccggguuuaucgaaaacggaugggagggcaugguugaugggugguauggauuccggcaccaaaauucugagggcagaggccaggcugccgaccugaaaagcacacaggcugccauugaucagaucaacgggaagcucaaucgccugauuggaaaaaccaacgaaaaguuccaccagaucgagaaggaauuuuccgagguggaaggccggauucaggaccuugagaaauacguggaggauacaaagaucgaccuguggagcuauaacgccgaacuccuggucgcucuggagaaucaacauaccaucgaucucacggacucugaaaugaacaaacuguucgagaagaccaaaaagcagcuuagagaaaaugcggaggauauggggaacggaugcuuuaagauuuaccacaaaugugacaaugccugcaucggcuccauucgcaacgggacauaugaucauaauguguaccgggacgaggcucugaacaauagauuccagaucaagggcguugaacucaaaagcggauacaaggacuggauucuguggaucucuuuugccaucuccugcuuccuucuguguguggcccuccugggcuuuauuaugugggcuugccagaaagggaacauccgcuguaauauuugcaucuga

SEQ ID NO: 203828 - RNA, 1701 nt, Artificial Sequence; identical to SEQ ID NO: 201907
  derived and/or modified CDS sequence (opt5) from hemagglutinin__InfluenzaA__AHM00192

SEQ ID NO: 203829 - RNA, 1701 nt, Artificial Sequence; identical to SEQ ID NO: 201955
  derived and/or modified CDS sequence (opt5) from hemagglutinin__InfluenzaA__AHM00204

SEQ ID NO: 203830 - RNA, 1701 nt, Artificial Sequence; identical to SEQ ID NO: 201955
  derived and/or modified CDS sequence (opt5) from hemagglutinin__InfluenzaA__AHM00216

SEQ ID NO: 203831 - RNA, 1701 nt, Artificial Sequence; identical to SEQ ID NO: 201930
  derived and/or modified CDS sequence (opt5) from hemagglutinin__InfluenzaA__AHM00228

SEQ ID NO: 203832 - RNA, 1701 nt, Artificial Sequence; identical to SEQ ID NO: 201930
  derived and/or modified CDS sequence (opt5) from hemagglutinin__InfluenzaA__AHM00240

SEQ ID NO: 203833 - RNA, 1701 nt, Artificial Sequence; identical to SEQ ID NO: 201930
  derived and/or modified CDS sequence (opt5) from hemagglutinin__InfluenzaA__AHM00252

SEQ ID NO: 203834 - RNA, 1701 nt, Artificial Sequence; identical to SEQ ID NO: 201930
  derived and/or modified CDS sequence (opt5) from hemagglutinin__InfluenzaA__AHM00264

SEQ ID NO: 203835 - RNA, 1701 nt, Artificial Sequence; identical to SEQ ID NO: 201907
  derived and/or modified CDS sequence (opt5) from hemagglutinin__InfluenzaA__AHM00276

SEQ ID NO: 203836 - RNA, 1701 nt, Artificial Sequence; identical to SEQ ID NO: 201930
  derived and/or modified CDS sequence (opt5) from hemagglutinin__InfluenzaA__AHM00288

SEQ ID NO: 203837 - RNA, 1701 nt, Artificial Sequence; identical to SEQ ID NO: 201930
  derived and/or modified CDS sequence (opt5) from hemagglutinin__InfluenzaA__AHM00300

SEQ ID NO: 203838 - RNA, 1701 nt, Artificial Sequence; identical to SEQ ID NO: 201955
  derived and/or modified CDS sequence (opt5) from hemagglutinin__InfluenzaA__AHM00312

SEQ ID NO: 203839 - RNA, 1701 nt, Artificial Sequence; identical to SEQ ID NO: 201907
  derived and/or modified CDS sequence (opt5) from hemagglutinin__InfluenzaA__AHM00324

SEQ ID NO: 203840 - RNA, 1701 nt, Artificial Sequence; identical to SEQ ID NO: 201907
  derived and/or modified CDS sequence (opt5) from hemagglutinin__InfluenzaA__AHM00336

SEQ ID NO: 203841 - RNA, 1701 nt, Artificial Sequence; identical to SEQ ID NO: 201955
  derived and/or modified CDS sequence (opt5) from hemagglutinin__InfluenzaA__AHM00348

SEQ ID NO: 203842 - RNA, 1701 nt, Artificial Sequence
  derived and/or modified CDS sequence (opt5) from hemagglutinin__InfluenzaA__AHM00360
augaagaccaucauugcccugagcuacauccucugccugguguucgcucagaaacuucccggcaacgacaauuccacagccacgcugugucucgggcaccaugcggucccuaacggaaccauuguuaagacaaucaccaaugaucaaauugaggugacaaacgcuaccgaacuggugcaaaauucuagcaucggcgagaucugcgacuccccgcaccagauucuugauggggaaaacuguacacugaucgacgcccuccugggagauccccagugcgacggcuuucagaauaaaaagugggaucuguucgucgagagaucuaaagccuauagcaacuguuacccuuaugacgugcccgauuacgcuucccuccggucucugguugccagcuccgggacccuugaauuuaauaacgagagcuucaauuggacgggagugacccagaacggcacaucuuccgcuugcauucgcagaagcaauucuuccuuuuucagccggcugaacuggcucacccaucugaauuuuaaguauccugcccuuaacgucacaaugcccaacaaugagcaguucgacaagcuguacaucuggggcgugcaccauccugggaccgauaaagaccagauuuuucucuaugcgcaaucuuccggacgcaucacgguuagcacaaagagaucccagcaggccgugauuccgaacaucggcucucggccccgcaucagaaauauuccuagccggaucuccauuuacuggaccaucgucaaacccggggauauucugcugaucaacagcacaggaaaucucaucgcuccucgcggcuacuucaagauuagaucugggaaauccagcaucaugcggucugacgcccccauuggaaaguguaagagcgaaugcaucaccccgaacggcuccauuccuaaugacaaacccuuucagaacgugaaucgcaucaccuauggcgcuuguccuagauacgugaagcaaucuacacugaaacuugccacggggaugcggaacguccccgagaagcagacccgcggaaucuucggcgcgauugccggguuuaucgaaaauggaugggagggcaugguugaugggugguauggauucagacaccagaacagcgagggccggggccaagcugccgaccugaaauccacacaggcugccauugaucagaucaaugggaagcucaacagacugauuggaaaaaccaaugaaaaguuccaccagaucgagaaggaauuuagcgagguggaaggccgcauucaagaccuugagaaauacguggaggauacaaagaucgaccuguggucuuauaacgccgaacuccuggucgcucuggagaaccagcauaccaucgaucucacggacuccgaaaugaauaaacuguucgagaagaccaaaaagcagcuucgggaaaacgcggaggauauggggaauggaugcuuuaagauuuaccacaaaugugacaacgccugcaucggcagcauuagaaaugggacauaugaucaugacguguaccgcgacgaggcucugaacaaucgguuccagaucaagggcguugaacucaaaucuggauacaaggauuggauucuguggaucuccuuugccaucagcugcuuccuucuguguguggcccuccugggcuuuauuaugugggcuugccaaaaagggaacaucagauguaauauuugcaucuga

SEQ ID NO: 203843 - RNA, 1701 nt, Artificial Sequence; identical to SEQ ID NO: 201955
  derived and/or modified CDS sequence (opt5) from hemagglutinin__InfluenzaA__AHM00372

SEQ ID NO: 203844 - RNA, 1701 nt, Artificial Sequence; identical to SEQ ID NO: 201955
  derived and/or modified CDS sequence (opt5) from hemagglutinin__InfluenzaA__AHM00395

SEQ ID NO: 203845 - RNA, 1701 nt, Artificial Sequence; identical to SEQ ID NO: 201930
  derived and/or modified CDS sequence (opt5) from hemagglutinin__InfluenzaA__AHM00407

SEQ ID NO: 203846 - RNA, 1701 nt, Artificial Sequence; identical to SEQ ID NO: 201930
  derived and/or modified CDS sequence (opt5) from hemagglutinin__InfluenzaA__AHM00419

SEQ ID NO: 203847 - RNA, 1701 nt, Artificial Sequence; identical to SEQ ID NO: 201930
  derived and/or modified CDS sequence (opt5) from hemagglutinin__InfluenzaA__AHM00443

SEQ ID NO: 203848 - RNA, 1701 nt, Artificial Sequence; identical to SEQ ID NO: 201955
  derived and/or modified CDS sequence (opt5) from hemagglutinin__InfluenzaA__AHM00455

SEQ ID NO: 203849 - RNA, 1701 nt, Artificial Sequence; identical to SEQ ID NO: 201955
  derived and/or modified CDS sequence (opt5) from hemagglutinin__InfluenzaA__AHM00467

SEQ ID NO: 203850 - RNA, 1701 nt, Artificial Sequence; identical to SEQ ID NO: 201955
  derived and/or modified CDS sequence (opt5) from hemagglutinin__InfluenzaA__AHM00479

SEQ ID NO: 203851 - RNA, 1701 nt, Artificial Sequence; identical to SEQ ID NO: 201955
  derived and/or modified CDS sequence (opt5) from hemagglutinin__InfluenzaA__AHM00491

SEQ ID NO: 203852 - RNA, 1701 nt, Artificial Sequence; identical to SEQ ID NO: 201930
  derived and/or modified CDS sequence (opt5) from hemagglutinin__InfluenzaA__AHM00503

SEQ ID NO: 203853 - RNA, 1701 nt, Artificial Sequence; identical to SEQ ID NO: 201930
  derived and/or modified CDS sequence (opt5) from hemagglutinin__InfluenzaA__AHM00515

SEQ ID NO: 203854 - RNA, 1701 nt, Artificial Sequence
  derived and/or modified CDS sequence (opt5) from hemagglutinin__InfluenzaA__AHM00527
augaagaccaucauugcccugagcuacauccucugccugguguucgcucagaaacuucccggcaacgacaauuccacagccacgcugugucucgggcaccaugcggucccuaacggaaccauuguuaagacaaucaccaaugauagaauugaggugacaaacgcuaccgaacuggugcaaaauucuccgaucggcgagaucugcgacagcccccaccagauucuugauggggaaaacuguacacugaucgacgcccuccugggagauccucagugcgacggcuuucagaauaaaaagugggaucuguucgucgagcgguccaaagccuauucuaacuguuaccccuaugacgugccugauuacgcuagccuccgcucccugguugccucuagcgggacccuugaauuuaauaacgaguccuucaauuggacgggagugacccaaaacggcacaagcucugcuugcauuagacgguccaauagcuccuuuuucucucgccugaacuggcucacccaucugaauuuuaaguaucccgcccuuaacgucacaaugccuaacaaugagcaguucgacaagcuguacaucuggggcgugcaccauccggggaccgauaaagaccagauuuuucucuaugcgcagagcucuggaagaaucacgguuuccacaaagcggagccaacaggccgugauucccaacaucggcucccgcccuagaauccggaauauucccucucgcaucagcauuuacuggaccaucgucaaaccuggggauauucugcugaucaacuccacaggaaaucucaucgcucccagaggcuacuucaagauucggagcgggaaaucuuccaucaugcgcagcgacgccccgauuggaaaguguaagucugaaugcaucaccccuaacggcagcauucccaaugacaaaccuuuucagaacgugaauagaaucaccuauggcgcuuguccccgguacgugaagcaguccacacugaaacuugccacggggaugcgcaacguccccgagaagcaaaccagaggaaucuucggcgcgauugccggguuuaucgaaaauggaugggagggcaugguugaugggugguauggauuccggcaccagaacucugagggcagaggccaggcugccgaccugaaaagcacacaagcugccauugaucagaucaaugggaagcucaaccgccugauuggaaaaaccaaugaaaaguuccaccagaucgagaaggaauuuuccgagguggaaggccggauucaggaccuugagaaauacguggaggauacaaagaucgaccuguggagcuauaacgccgaacuccuggucgcucuggagaaccaacauaccaucgaucucacggacucugaaaugaauaaacuguucgagaagaccaaaaagcagcuuagagaaaacgcggaggauauggggaauggaugcuuuaagauuuaccacaaaugugacaacgccugcaucggcuccauucgcaaugggacauaugaucauaacguguaccgggacgaggcucugaauaacagauuccagaucaagggcguugaacucaaaagcggauacaaggacuggauucuguggaucucuuuugccaucuccugcuuccuucuguguguggcccuccugggcuuuauuaugugggcuugccagaaagggaauauccgcuguaacauuugcaucuga

SEQ ID NO: 203855 - RNA, 1701 nt, Artificial Sequence; identical to SEQ ID NO: 201907
  derived and/or modified CDS sequence (opt5) from hemagglutinin__InfluenzaA__AHM00539

SEQ ID NO: 203856 - RNA, 1701 nt, Artificial Sequence
  derived and/or modified CDS sequence (opt5) from hemagglutinin__InfluenzaA__AHM00543
augaagaccaucauugcccugagcuacauccucugccugguguucgcucaggagcuucccggcaacgacgauuccacagccacgcugugucucgggcaccaugcggucccuaauggaaccauuguuaaaacaaucaccaacgaccaaauugaagugacaaaugcuaccgagcuggugcagucuagcuccacaggcgaaaucugcaacucuccgcaccagauccuugauggggagaauuguacccugauugacgcccuccugggagauccccagugcgacggcuuucaaaacaagaaaugggaucuguucgucgaaagaagcaaggcccauuccaauuguuauccuuacgacgugcccgauuaugcuucucuccggagccugguugccuccagcgggacgauggaguuuaacaaugagucuuucaacuggaccggagugacacagaauggcaccuccagcgcuugcauccgcagaucuaacaauuccuuuuucagccggcuuaacuggcugacacaccucaauuuuaaauacccugcccugaacgucaccaugcccaacaaugaacaguucgacaaacuuuauauuuggggcgugcaucacccugggacggauaaggaccagaucuuucuguacgcgcaagccucuggacgcauuacaguuuccaccaagagaagccagcaggcugugaucccgaacauuggcucccggccccgcgucagaaauaucccuucucgggugagcaucuauuggacaauugugaagcccggggauauccuccugauuaacuccaccggaaaucugaucgccccucgcggcuacuucaaaauuagaagcgggaagucuuccaucaugcggagcgacgcucccaucggaaaauguaacucugccugcauuaccccgaauggcagcaucccuaacgacaagcccuuucagaaugucaaccgcauuacauacggcgcguguccuagauauguuaagcaaaauacgcucaaacuggccaccgggaugcggaacgugcccgagaagcagacacgcggaaucuucggcgcuauugccggguuuaucgaaaauggaugggagggcaugguggaugggugguacggauucagacaccagaacuccgagggccggggccaagcugccgaccuuaaaucuacccaggccgcuaucgaucagauuaaugggaagcugaacagacucaucggaaaaacaaacgaaaaguuccaucagauugagaaagaauuuagcgaggucgaaggccgcauccaagaccuggagaaguauguggaggauaccaagauugaccuuugguccuacaaugcggaacugcucguugcccuggagaaccagcacacgaucgaucugacagacagcgaaaugaauaaacucuucgagaagaccaaaaagcagcugcgggaaaacgcugaggauauggggaauggaugcuuuaaaauuuaucauaagugugacaacgccugcaucggcucuaucagaaaugggaccuacgaucacgacguguaucgcgacgaggcccuuaacaaucgguuccagauuaagggcgucgaacugaaauccggauacaaggauuggauccucuggauuagcuuugcuaucucuugcuuccugcuuuguguggcccugcucggcuuuauuaugugggcgugccaaaaagggaacaucagauguaauaucugcauuuga

SEQ ID NO: 203857 - RNA, 1701 nt, Artificial Sequence; identical to SEQ ID NO: 201930
  derived and/or modified CDS sequence (opt5) from hemagglutinin__InfluenzaA__AHM00555

SEQ ID NO: 203858 - RNA, 1701 nt, Artificial Sequence
  derived and/or modified CDS sequence (opt5) from hemagglutinin__InfluenzaA__AHM00567
augaagaccaucauugcccugagcuacauccucugccugguguucgcucagaaacuucccggcaacgacaauuccacagccacgcugugucucgggcaccaugcggucccuaacggaaccauuguuaagacaaucaccaaugauagaauugaggugacaaacgcuaccgaacuggugcaaaauucuagcaucggcgagaucugcgacuccccgcaccagauucuugauggggaaaacuguacacugaucgacgcccuccugggagauccccagugcgacggcuuucagaauaaaaagugggaucuguucgucgagcggucuaaagccuauagcaacuguuacccuuaugacgugcccgauuacgcuucccuccgcucucugguugccagcuccgggacccuugaauuuaauaacgagagcuucaauuggacgggagugacccaaaacggcacaucuuccgcuugcauuagaaagagcaauucuuccuuuuucagccggcugaacuggcucacccaucugaauuuuaaguauccugcccuuaacgucacaaugcccaacaaugagcaguucgacaaacuguacaucuggggcgugcaccauccugggaccgauaaggaccagauuuuucucuaugcgcagucuuccggacgcaucacgguuagcacaaaaagaucccaacaggccgugauuccgaacaucggcucucggccccgcaucagaaauauuccuagccggaucuccauuuacuggaccaucgucaagcccggggauauucugcugaucaacagcacaggaaaucucaucgcuccucgcggcuacuucaaaauuagaucugggaaguccagcaucaugcggucugacgcccccauuggaaaguguaaaagcgaaugcaucaccccgaacggcuccauuccuaaugacaagcccuuucagaacgugaaucgcaucaccuauggcgcuuguccuagauacgugaaacagucuacacugaaacuugccacggggaugcggaacguccccgagaagcaaacccgcggaaucuucggcgcgauugccggguuuaucgaaaauggaugggagggcaugguugaugggugguauggauucagacaccagaacagcgagggccggggccaggcugccgaccugaaguccacacaagcugccauugaucagaucaaugggaaacucaacagacugauuggaaagaccaaugaaaaguuccaccagaucgagaaagaauuuagcgagguggaaggccgcauucaggaccuugagaaguacguggaggauacaaaaaucgaccuguggucuuauaacgccgaacuccuggucgcucuggagaaccaacauaccaucgaucucacggacuccgaaaugaauaagcuguucgagaaaacaaagaagcagcuucgggaaaacgcggaggauauggggaauggaugcuuuaaaauuuaccacaagugugacaacgccugcaucggcagcauuagaaaugggaccuaugaucaugacguguaccgcgacgaggcucugaacaaucgguuccagaucaaaggcguugaacucaagucuggauacaaagauuggauucuguggaucuccuuugccaucagcugcuuccuucuguguguggcccuccugggcuuuauuaugugggcuugccagaaggggaacaucagauguaauauuugcaucuga

SEQ ID NO: 203859 - RNA, 1701 nt, Artificial Sequence; identical to SEQ ID NO: 201930
  derived and/or modified CDS sequence (opt5) from hemagglutinin__InfluenzaA__AHM00579

SEQ ID NO: 203860 - RNA, 1701 nt, Artificial Sequence; identical to SEQ ID NO: 201955
  derived and/or modified CDS sequence (opt5) from hemagglutinin__InfluenzaA__AHM00591

SEQ ID NO: 203861 - RNA, 1701 nt, Artificial Sequence; identical to SEQ ID NO: 201930
  derived and/or modified CDS sequence (opt5) from hemagglutinin__InfluenzaA__AHM00603

SEQ ID NO: 203862 - RNA, 1701 nt, Artificial Sequence; identical to SEQ ID NO: 201930
  derived and/or modified CDS sequence (opt5) from hemagglutinin__InfluenzaA__AHM00615

SEQ ID NO: 203863 - RNA, 1701 nt, Artificial Sequence
  derived and/or modified CDS sequence (opt5) from hemagglutinin__InfluenzaA__AHM00627
augaagaccacaaucgcccugagcuacauucucugccugguguucgcucagaaacuucccggcaacgacaauuccacggccacccugugucucgggcaccaugcggucccuaacggaacaaucguuaagaccauuacaaaugauagaaucgaggugaccaacgcuacagaacuggugcaaaauucuagcauuggcgagaucugcgacuccccgcaccagauccuugauggggaaaacuguacccugauugacgcccuccugggagauccccagugcgacggcuuucagaauaaaaagugggaucuguucgucgagcggucuaaagccuauagcaacuguuacccuuaugacgugcccgauuacgcuucccuccgcucucugguugccagcuccgggacgcuugaauuuaauaacgagagcuucaauuggaccggagugacacaaaacggcaccucuuccgcuugcaucagacggagcaauucuuccuuuuucagccgccugaacuggcucacacaucugaauuuuaaguauccugcccuuaacgucaccaugcccaacaaugagcaguucgacaagcuguacauuuggggcgugcaccauccugggacggauaaagaccagaucuuucucuaugcgcagucuuccggaagaauuacaguuagcaccaagcggucccaacaggccgugaucccgaacauuggcucucgccccagaauccggaauaucccuagccgcauuuccaucuacuggacaauugucaaacccggggauauccugcugauuaacagcaccggaaaucucaucgcuccuagaggcuacuucaagauccggucugggaaauccagcauuaugcgcucugacgcccccaucggaaaguguaagagcgaaugcauuaccccgaacggcuccaucccuaaugacaaacccuuucagaacgugaauagaauuacauauggcgcuuguccucgguacgugaagcagucuacgcugaaacuugccaccgggaugcgcaacguccccgagaagcaaacaagaggaaucuucggcgcgaucgccggguuuauugaaaauggaugggagggcaugguugaugggugguauggauuccggcaccagaacagcgagggcagaggccaggcugccgaccugaaauccacccaagcugccaucgaucagauuaaugggaagcucaaccgccugaucggaaaaacaaaugaaaaguuccaccagauugagaaggaauuuagcgagguggaaggccggauccaggaccuugagaaauacguggaggauaccaagauugaccuguggucuuauaacgccgaacuccuggucgcucuggagaaccaacauacgaucgaucucacagacuccgaaaugaauaaacuguucgagaagaccaaaaagcagcuuagagaaaacgcggaggauauggggaauggaugcuuuaagaucuaccacaaaugugacaacgccugcauuggcagcauccgcaaugggaccuaugaucauaacguguaccgggacgaggcucugaauaacagauuccagauuaagggcguugaacucaaaucuggauacaaggacuggauccuguggauuuccuuugccaucagcugcuuccuucuguguguggcccuccugggcuuuaucaugugggcuugccagaaagggaauauucgcuguaacaucugcauuuga

SEQ ID NO: 203864 - RNA, 1701 nt, Artificial Sequence; identical to SEQ ID NO: 201930
  derived and/or modified CDS sequence (opt5) from hemagglutinin__InfluenzaA__AHM00639

SEQ ID NO: 203865 - RNA, 1701 nt, Artificial Sequence; identical to SEQ ID NO: 201907
  derived and/or modified CDS sequence (opt5) from hemagglutinin__InfluenzaA__AHM00651

SEQ ID NO: 203866 - RNA, 1701 nt, Artificial Sequence; identical to SEQ ID NO: 202066
  derived and/or modified CDS sequence (opt5) from hemagglutinin__InfluenzaA__AHM00663

SEQ ID NO: 203867 - RNA, 1701 nt, Artificial Sequence; identical to SEQ ID NO: 201955
  derived and/or modified CDS sequence (opt5) from hemagglutinin__InfluenzaA__AHM00675

SEQ ID NO: 203868 - RNA, 1701 nt, Artificial Sequence; identical to SEQ ID NO: 203017
  derived and/or modified CDS sequence (opt5) from hemagglutinin__InfluenzaA__AHM00687

SEQ ID NO: 203869 - RNA, 1701 nt, Artificial Sequence
  derived and/or modified CDS sequence (opt5) from hemagglutinin__InfluenzaA__AHM00698
augaagaccaucauugcccugagcuacauccucugccugguguucgcucaggagcuucccggcaacgacgauuccacagccacgcugugucucgggcaccaugcggucccuaauggaaccauuguuaaaacaaucaccaacgaccaaauugaagugacaaaugcuaccgagcuggugcagucuagcuccacaggcgaaaucugcaacucuccgcaccagauccuugauggggagaauuguacccugauugacgcccuccugggagauccccagugcgacggcuuucaaaacaagaaaugggaucuguucgucgaaagaagcaaggcccauuccaauuguuauccuuacgacgugcccgauuaugcuucucuccggagccugguugccuccagcgggacgcuugaguuuaacaaugagucuuucaacuggaccggagugacacagaauggcaccuccagcgcuugcacacgcagaucuaacaauuccuuuuucagccggcugaacuggcucacccaccugaauuuuaaauacccugcccuuaacgucacgaugcccaacaaugaacaguucgacaagcuguauaucuggggcgugcaucacccugggacagauaaggaccagauuuuucucuacgcgcaagccucuggacgcaucaccguuuccacaaaaagaagccagcaggcugugauuccgaacaucggcucccggccccgcgucagaaauauuccuucucgggugagcaucuauuggaccaucgugaagcccggggauauucugcugaucaacuccaccggaaaucucauugccccucgcggcuacuucaaaaucagaagcgggaagucuuccauuaugcggagcgacgcucccaucggaaaauguaacucugccugcaucacaccgaauggcagcauuccuaacgacaagcccuuucagaaugucaaccgcaucacguacggcgcguguccuagauauguuaagcaaaauacccugaaacuugccacagggaugcggaacgugcccgagaagcagacccgcggaauuuucggcgcuaucgccggguuuauugaaaauggaugggagggcaugguggaugggugguacggauucagacaccagaacuccgagggccggggccaagcugccgaccugaaaucuacacaggccgcuaucgaucagaucaaugggaagcucaacagacugauuggaaaaaccaacgaaaaguuccaucagaucgagaaagaauuuagcgaggucgaaggccgcauucaagaccuugagaaguauguggaggauacgaagaucgaccugugguccuacaaugcggaacuccugguugcccuggagaaccagcacacaauugaucucaccgacagcgaaaugaauaaacuguucgagaagaccaaaaagcagcuucgggaaaacgcugaggauauggggaauggaugcuuuaaaaucuaucauaagugugacaacgccugcauuggcucuaucagaaaugggacauacgaucacgacguguaucgcgacgaggcccugaacaaucgguuccagaucaagggcgucgaacucaaauccggauacaaggauuggauucuguggaucagcuuugcuauuucuugcuuccuucuguguguggcccuccugggcuuuaucaugugggcgugccaaaaagggaacauuagauguaauaucugcaucuga

SEQ ID NO: 203870 - RNA, 1701 nt, Artificial Sequence; identical to SEQ ID NO: 201930
  derived and/or modified CDS sequence (opt5) from hemagglutinin__InfluenzaA__AHM00710

SEQ ID NO: 203871 - RNA, 1701 nt, Artificial Sequence; identical to SEQ ID NO: 201930
  derived and/or modified CDS sequence (opt5) from hemagglutinin__InfluenzaA__AHM00722

SEQ ID NO: 203872 - RNA, 1701 nt, Artificial Sequence; identical to SEQ ID NO: 201930
  derived and/or modified CDS sequence (opt5) from hemagglutinin__InfluenzaA__AHM00734

SEQ ID NO: 203873 - RNA, 1701 nt, Artificial Sequence; identical to SEQ ID NO: 202065
  derived and/or modified CDS sequence (opt5) from hemagglutinin__InfluenzaA__AHM00746

SEQ ID NO: 203874 - RNA, 1701 nt, Artificial Sequence; identical to SEQ ID NO: 201930
  derived and/or modified CDS sequence (opt5) from hemagglutinin__InfluenzaA__AHM00758

SEQ ID NO: 203875 - RNA, 1701 nt, Artificial Sequence; identical to SEQ ID NO: 202098
  derived and/or modified CDS sequence (opt5) from hemagglutinin__InfluenzaA__AHM00770

SEQ ID NO: 203876 - RNA, 1701 nt, Artificial Sequence; identical to SEQ ID NO: 201907
  derived and/or modified CDS sequence (opt5) from hemagglutinin__InfluenzaA__AHM00782

SEQ ID NO: 203877 - RNA, 1701 nt, Artificial Sequence
  derived and/or modified CDS sequence (opt5) from hemagglutinin__InfluenzaA__AHM00794
augaagaccaucauugcccugagcuacauccucugccugguguucacacagaaacuucccggcaacgacaauuccacggcuacccugugucucgggcaccaugccgucccuaacggaacaauuguuaagaccaucacaaaugauagaauugaggugaccaacgcgacagaacuggugcaaaauucuagcaucggcgagaucugcgacuccccgcaccagauucuugauggggaaaacuguacccugaucgacgcucuccugggagauccccagugcgacggcuuucagaauaaaaagugggaucuguucgucgagcggucuaaagccuauagcaacuguuacccuuaugacgugcccgauuacgccucccuccgcucucugguugcuagcuccgggacgcuugaauuuaauaacgagagcuucaauuggaccggagugacacaaaacggcaccucuuccgccugcauuagacggagcaauucuuccuuuuucagccgccugaacuggcucacacaucugaauuuuaaguauccugcucuuaacgucaccaugcccaacaaugagcaguucgacaagcuguacaucuggggcgugcaccauccugggacggauaaagaccagauuuuucucuaugcccagucuuccggaagaaucacaguuagcaccaagcggucccaacaggcggugauuccgaacaucggcucucgccccagaauccggaauauuccuagccgcaucuccauuuacuggacaaucgucaaacccggggauauucugcugaucaacagcaccggaaaucucaucgccccuagaggcuacuucaagauucggucugggaaauccagcaucaugcgcucugacgcucccauuggaaaguguaagagcgaaugcaucaccccgaacggcuccauuccuaaugacaaacccuuucagaacgugaauagaaucacauauggcgccuguccucgguacgugaagcagucuacgcugaaacuugcuaccgggaugcgcaacguccccgagaagcaaacaagaggaaucuucggcgccauugcgggguuuaucgaaaauggaugggagggcaugguugaugggugguauggauuccggcaccagaacagcgagggcagaggccaggccgcugaccugaaauccacccaagccgcuauugaucagaucaaugggaagcucaaccgccugauuggaaaaacaaaugaaaaguuccaccagaucgagaaggaauuuagcgagguggaaggccggauucaggaccuugagaaauacguggaggauaccaagaucgaccuguggucuuauaacgccgaacuccuggucgcccuggagaaccaacauacgaucgaucucacagacuccgaaaugaauaaacuguucgagaagaccaaaaagcagcuuagagaaaacgcugaggauauggggaauggaugcuuuaagauuuaccacaaaugugacaacgcgugcaucggcagcauucgcaaugggaccuaugaucaugacguguaccgggacgaggcccugaacaauagauuccagaucaagggcguugaacucaaaucuggauacaaggauuggauucuguggaucuccuuugcuaucagcugcuuccuucuguguguggcccuccugggcuuuauuaugugggccugccagaaagggaacauccgcuguaauauuugcaucuga

SEQ ID NO: 203878 - RNA, 1701 nt, Artificial Sequence; identical to SEQ ID NO: 202098
  derived and/or modified CDS sequence (opt5) from hemagglutinin__InfluenzaA__AHM00806

SEQ ID NO: 203879 - RNA, 1701 nt, Artificial Sequence
  derived and/or modified CDS sequence (opt5) from hemagglutinin__InfluenzaA__AHM00818
augaagaccaucauugcccugagcuacauccucugccugguguucgcucagaaacuucccggcaacgacaauuccacagccacgcugugucucgggcaccaugcggucccuaacggaaccauuguuaagacaaucaccaaugauagaauugaggugacaaacgcuaccgaacuggugcaaaauucuagcaucggcgagaucugcgacuccccgcaccagauucuugauggggaaaacuguacacugaucgacgcccuccugggagauccccagugcgacggcuuucagaauaaaaagugggaucuguucgucgagcggucuaaagccuauagcaacuguuacccuuaugacgugcccgauuacgcuucccuccgcucucugguugccagcuccgggacccuugaauuuaauaacgagaauuucaacuggacgggagugacccaaaauggcacaagcucugcuugcauuagacgguccaacagcuccuuuuucucucgccugaauuggcucacccaucugaacuuuaaguauccugcccuuaacgucacaaugcccaauaacgagcaguucgacaagcuguacaucuggggcgugcaccauccugggaccgauaaagaccagauuuuucucuaugcgcagagcucuggaagaaucacgguuuccacaaagcggagccaacaggccgugauuccgaauaucggcucccgccccagaauccggaacauuccuucucgcaucagcauuuacuggaccaucgucaaacccggggauauucugcugaucaauuccacaggaaaccucaucgcuccuagaggcuacuucaagauucggagcgggaaaucuuccaucaugcgcagcgacgcccccauuggaaaguguaagucugaaugcaucaccccgaauggcagcauuccuaacgacaaacccuuucagaaugugaacagaaucaccuauggcgcuuguccucgguacgugaagcaguccacacugaaacuugccacggggaugcgcaauguccccgagaagcaaaccagaggaaucuucggcgcgauugccggguuuaucgaaaacggaugggagggcaugguugaugggugguauggauuccggcaccaaaauucugagggcagaggccaggcugccgaccugaaaagcacacaggcugccauugaucagaucaacgggaagcucaaucgccugauuggaaaaaccaacgaaaaguuccaccagaucgagaaggaauuuuccgagguggaaggccggauucaggaccuugagaaauacguggaggauacaaagaucgaccuguggagcuauaacgccgaacuccuggucgcucuggagaaucaacauaccaucgaucucacggacucugaaaugaacaaacuguucgagaagaccaaaaagcagcuuagagaaaaugcggaggauauggggaacggaugcuuuaagauuuaccacaaaugugacaaugccugcaucggcuccauucgcaacgggacauaugaucaugacguguaccgggacgaggcucugaauaacagauuccagaucaagggcguugaacucaaaagcggauacaaggauuggauucuguggaucucuuuugccaucuccugcuuccuucuguguguggcccuccugggcuuuauuaugugggcuugccagaaagggaauauccgcuguaacauuugcaucuga

SEQ ID NO: 203880 - RNA, 1701 nt, Artificial Sequence; identical to SEQ ID NO: 201955
  derived and/or modified CDS sequence (opt5) from hemagglutinin__InfluenzaA__AHM00830

SEQ ID NO: 203881 - RNA, 1701 nt, Artificial Sequence; identical to SEQ ID NO: 201955
  derived and/or modified CDS sequence (opt5) from hemagglutinin__InfluenzaA__AHM00842

SEQ ID NO: 203882 - RNA, 1701 nt, Artificial Sequence; identical to SEQ ID NO: 203858
  derived and/or modified CDS sequence (opt5) from hemagglutinin__InfluenzaA__AHM00854

SEQ ID NO: 203883 - RNA, 1701 nt, Artificial Sequence; identical to SEQ ID NO: 203858
  derived and/or modified CDS sequence (opt5) from hemagglutinin__InfluenzaA__AHM00866

SEQ ID NO: 203884 - RNA, 1701 nt, Artificial Sequence; identical to SEQ ID NO: 201930
  derived and/or modified CDS sequence (opt5) from hemagglutinin__InfluenzaA__AHM00878

SEQ ID NO: 203885 - RNA, 1701 nt, Artificial Sequence; identical to SEQ ID NO: 201907
  derived and/or modified CDS sequence (opt5) from hemagglutinin__InfluenzaA__AHM00890

SEQ ID NO: 203886 - RNA, 1701 nt, Artificial Sequence; identical to SEQ ID NO: 201940
  derived and/or modified CDS sequence (opt5) from hemagglutinin__InfluenzaA__AHM00902

SEQ ID NO: 203887 - RNA, 1701 nt, Artificial Sequence; identical to SEQ ID NO: 201930
  derived and/or modified CDS sequence (opt5) from hemagglutinin__InfluenzaA__AHM00914

SEQ ID NO: 203888 - RNA, 1701 nt, Artificial Sequence; identical to SEQ ID NO: 201930
  derived and/or modified CDS sequence (opt5) from hemagglutinin__InfluenzaA__AHM00926

SEQ ID NO: 203889 - RNA, 1701 nt, Artificial Sequence; identical to SEQ ID NO: 201907
  derived and/or modified CDS sequence (opt5) from hemagglutinin__InfluenzaA__AHM00938

SEQ ID NO: 203890 - RNA, 1701 nt, Artificial Sequence
  derived and/or modified CDS sequence (opt5) from hemagglutinin__InfluenzaA__AHM00950
augaagaccaucauugcccugagcuacauccucugccugguguucgcucagaaacuucccggcaacgacaauuccacagccacgcugugucucgggcaccaugcggucccuaacggaaccauuguuaagacaaucaccaaugauagaauugaggugacaaacgcuaccgaacuggugcaaaauucuagcaucggcgagaucugcgacuccccgcaccagauucuugauggggaaaacuguacacugaucgacgcccuccugggagauccccagugcgacggcuuucagaauaaaaagugggaucuguucgucgagcggucuaaagccuauagcaacuguuacccuuaugacgugcccgauuacguuucccuccgcucucugguggcuagcuccgggacccuugaauuuaauaacgagagcuucaauuggacgggagucacccaaaacggcacaucuuccgccugcauuagacggagcaauucuuccuuuuucagccgccugaacuggcucacccaucugaauuuuaaguauccugcucuuaacgugacaaugcccaacaaugagcaguucgacaagcuguacaucuggggcguucaccauccugggaccgauaaagaccagauuuuucucuaugcccagucuuccggaagaaucacggugagcacaaagcggucccaacaggcggucauuccgaacaucggcucucgccccagaauccggaauauuccuagccgcaucuccauuuacuggaccaucgugaaacccggggauauucugcugaucaacagcacaggaaaucucaucgccccuagaggcuacuucaagauucggucugggaaauccagcaucaugcgcucugacgcucccauuggaaaguguaagagcgaaugcaucaccccgaacggcuccauuccuaaugacaaacccuuucagaacgugaauagaaucaccuauggcgccuguccucgguacgucaagcagucuacacugaaacuugcuacggggaugcgcaacguucccgagaagcaaaccagaggaaucuucggcgccauugcgggguuuaucgaaaauggaugggagggcaugguggaugggugguauggauuccggcaccagaacagcgagggcagaggccaggccgcugaccugaaauccacacaagccgcuauugaucagaucaaugggaagcucaaccgccugauuggaaaaaccaaugaaaaguuccaccagaucgagaaggaauuuagcgagguggaaggccggauucaggaccuugagaaauacgucgaggauacaaagaucgaccuguggucuuauaacgccgaacuccugguggcccuggagaaccaacauaccaucgaucucacggacuccgaaaugaauaaacuguucgagaagaccaaaaagcagcuuagagaaaacgcugaggauauggggaauggaugcuuuaagauuuaccacaaaugugacaacgcgugcaucggcagcauucgcaaugggacauaugaucauaacguuuaccgggacgaggcccugaauaacagauuccagaucaagggcguggaacucaaaucuggauacaaggacuggauucuguggaucuccuuugcuaugagcugcuuccuucugugugucgcccuccugggcuuuaucaugugggccugccagaaagggaauauucgcuguaacaucugcauuuga

SEQ ID NO: 203891 - RNA, 1701 nt, Artificial Sequence; identical to SEQ ID NO: 201907
  derived and/or modified CDS sequence (opt5) from hemagglutinin__InfluenzaA__AHM00962

SEQ ID NO: 203892 - RNA, 1701 nt, Artificial Sequence
  derived and/or modified CDS sequence (opt5) from hemagglutinin__InfluenzaA__AHM00974
augaagaccaucauugcccugagcuacauccucugccugguguucgcucaggagcuucccggcaacgacgauuccacagccacgcugugucucgggcaccaugcggucccuaauggaaccauuguuaaaacaaucaccaacgaccaaauugaagugacaaaugcuaccgagcuggugcagucuagcuccacaggcgaaaucugcaacucuccgcaccagauccuugauggggagaauuguacccugauugacgcccuccugggagauccccagugcgacggcuuucaaaacaagaaaugggaucuguucgucgaaagaagcaaggcccauuccaauuguuauccuuacgacgugcccgauuaugcuucucuccggagccugguugccuccagcgggacgcuugaguuuaacaaugagucuuucaacuggaccggagugacacagaauggcaccuccagcgcuugcauccgcagaucuaacaauuccuuuuucagccggcugaacuggcucacacaccugaauuuuaaauacccugcccuuaacgucaccaugcccaacaaugaacaguucgacaagcuguauauuuggggcgugcaucacccugggacggauaaggaccagaucuuucucuacgcgcaagccucuggaggcauuacaguuuccaccaaacgcagccagcaggcugugaucccgaacauuggguccagaccccggguccgcaauaucccuucuagagugagcaucuauuggacaauugugaagcccggagauauccugcugauuaacuccaccggcaaucucaucgccccucggggguacuucaaaauucgcagcggaaagucuuccaucaugagaagcgacgcucccaucggcaaauguaacucugccugcauuaccccgaauggcagcaucccuaacgacaagcccuuucagaaugucaaccggauuacauacggggcguguccucgcuauguuaagcaaaauacgcugaaacuugccaccggaaugagaaacgugcccgagaagcagacacggggcaucuucggggcuauugccggauuuaucgaaaauggcugggaggggaugguggauggaugguacggcuuccgccaccagaacuccgagggcagagggcaagcugccgaccugaaaucuacccaggccgcuaucgaucagauuaauggaaagcucaaccggcugaucggcaaaacaaacgaaaaguuccaucagauugagaaagaauuuagcgaggucgaagggagaauccaagaccuugagaaguauguggaggauaccaagauugaccugugguccuacaaugcggaacuccugguugcccuggagaaccagcacacgaucgaucucacagacagcgaaaugaauaaacuguucgagaagaccaaaaagcagcuucgcgaaaacgcugaggauaugggaaauggcugcuuuaaaauuuaucauaagugugacaacgccugcaucgggucuauccggaauggcaccuacgaucacgacguguauagagacgaggcccugaacaaucgcuuccagauuaagggagucgaacucaaauccggcuacaaggauuggauccuguggauuagcuuugcuaucucuugcuuccuucuguguguggcccuccugggguuuauuaugugggcgugccaaaaaggaaacauccgguguaauaucugcauuuga

SEQ ID NO: 203893 - RNA, 1683 nt, Artificial Sequence
  derived and/or modified CDS sequence (opt5) from hemagglutinin__InfluenzaA__AHM24224
augaacacccagauccugguguucgcccucauugcuaucauucccacaaaugccgacaagaucugccugggccaccaugcggucagcaacgggacgaaaguuaauacccuuacagagagaggaguggaaguggucaacgcuaccgagacaguggaacggaccaauauuccucgcaucuguuccaagggcaaaagaacaguugaucuggggcaaugcggacuccugggcaccaucacggggccgccccagugugaccaguuucuugaguucucugccgaucugauuaucgaacggcgcgagggaagcgacgugugcuacccuggcaaguuugucaaagaggaagcccucagacagauucugcgggaguccggcgggaucgauaaggaagcuaugggauucaccuauucuggcauucgcacaaacggggccaccagcgcuuguagacgguccggaucuagcuuuuacgccgagaugaaguggcugcucuccaauacagacaacgcggccuucccccaaaugaccaaaagcuauaagaauacgcgcaaaucuccugcucugaucguguggggcauucaccauuccguuagcacagccgagcagaccaaacuuuacgggucuggaaacaagcuggugacagucggcuccagcaauuaucagcagucuuuugugcccuccccuggcgcuagaccgcaagugaacgggcucagcggacggaucgauuuccacuggcugaugcuuaaucccaacgacaccgucaccuuuuccuucaauggcgccuuuaucgcgccugaucgcgccucuuuccugagaggaaagagcauggggauucaguccggcguucagguggacgcuaacugcgaaggggauuguuaccauagcggaggcacaaucauuucuaaccuccccuuucagaauaucgacucccgggccgugggcaagugcccucgcuaugucaaacaaagaagccugcugcucgcuacggggaugaagaacgugcccgagauuccgaaaggacggggccuguucggggccaucgccggauucaucgaaaauggcugggaggggcuuauugauggcugguacggauuuagacaccagaacgcucagggcgaagggaccgcggccgacuacaagucuacacaaagcgcuaucgaccagauuaccggaaaacugaaucgccucaucgagaagacaaaccagcaguucgagcugauugauaaugaauuuaacgagguugaaaaacaaaucggcaaugugaucaacuggacccgggacuccauuacggaggucuggucuuauaaugccgaacuucugguggccauggagaaccagcacacaaucgaucucgcugacagcgagauggauaagcuguacgaaagaguuaagcgccagcugcgggagaaugccgaagaggacgggaccggauguuucgaaauuuuucauaaaugcgaugacgauuguauggcguccaucagaaacaauaccuaugaccacagcaaguaccgcgaggaggcuaugcagaaccggauucaaaucgauccugugaaacucucuuccggcuauaaggacgucauucugugguucagcuuuggggccucuugcuucauccuucuggccaucgugaugggccucgucuuuauuugcgugaaaaacggaaauaugagauguacaaucugcauuuga

SEQ ID NO: 203894 - RNA, 1683 nt, Artificial Sequence; identical to SEQ ID NO: 202060
  derived and/or modified CDS sequence (opt5) from hemagglutinin__InfluenzaA__AHM24236

SEQ ID NO: 203895 - RNA, 1683 nt, Artificial Sequence; identical to SEQ ID NO: 202060
  derived and/or modified CDS sequence (opt5) from hemagglutinin__InfluenzaA__AHM24248

SEQ ID NO: 203896 - RNA, 1701 nt, Artificial Sequence
  derived and/or modified CDS sequence (opt5) from hemagglutinin__InfluenzaA__AHM98309
augaaggccauccuggugguccuccuguacaccuucgcuacagccaacgcggacacgcuuugcauuggcuaucacgcuaauaacagcaccgauacaguugacaccgugcuggagaaaaaugugacagucacccauuccgugaaccuccuggaagauaagcacaaugggaaacuuuguaagcugagaggaguugcuccccuccaucugggcaaaugcaacaucgccggguggauucugggaaauccugagugugaaucucucagcacagccuccucuuggagcuacaucguggagaccuccucuagcgacaacggcacgugcuauccgggggauuuuauuaauuacgaagaacugcgggagcagcuuuccagcgucucuuccuucgaacgcuuugagguguuccccaagaccagcucuuggccuaaccacgacuccaauaagggaguuacagccgcuuguccccaugccggcgcgaaaucuuuuuauaagaaccugaucuggcucgugaaaaagggcaauagcuacccuaaacuguccaagagcuauaucaacgauaaggggaaagaaguccuugugcuguggggcauucaccaccccuccaccacagccgaccaacagucucucuaccagaaugcugaugccuacguguucgucggaaccagcagauauuccaagaaauuuaagccugagaucgcuauucggccgaaaguucgcgaccaggaggggagaaugaacuacuauuggacgcugguggaacccggagauaagaucacauucgaggccaccggcaaccugguggucccucgguacgcguuugccauggaacgcaaugcugggagcggaauuaucauuucugacacacccgugcaugauugcaacaccaccugucaaacaccuaaaggcgccaucaauacgucccuccccuuccagaacauccacccgauuaccaucggcaagugcccuaaguauguuaaaagcacaaagcugagacuugcuaccgggcugcggaaugugcccucuauucagagccgcggacucuuuggcgccaucgccggguucauugagggaggcuggacagggauggucgacggaugguacggcuaucaucaccagaacgaacaaggcuccggguacgcugcggaccugaaaucuacccagaaugccaucgauaagaucacgaacaaagugaauagcguuauugagaagaugaacacacaguuuaccgcugugggaaaggaguucaaucaccuugagaaaagaaucgagaaccugaauaagaaagucgacgauggcuuccucgacauuuggaccuacaacgccgaacugcuggugcuccuggagaaugaacggacacuugauuaucaugacuccaacgucaagaaccuguacgagaaagugcgcaaucagcucaagaacaaugccaaggagaucgggaacggauguuuugaguucuaucacaaaugcgauaauaccuguauggaaagcguuaagaacggcacauacgacuauccuaaauacucugaagaggcuaagcugaauagagaagagauugauggggugaaacuugaguccacgcggaucuaucaaauccuggccauuuacagcaccgucgcgucuucccucgugcugguugugagccugggcgcuaucuccuuuuggaugugcucuaacggaagccuccagugccgcauuuguaucuga

SEQ ID NO: 203897 - RNA, 1710 nt, Artificial Sequence
  derived and/or modified CDS sequence (opt5) from hemagglutinin__InfluenzaA__AHM98339
augaaggccauccuggugguccuccuguacaccuucgcuacagccaacgcggacacgcuuugcauuggcuaucacgcuaauaacagcaccgauacaguugacaccgugcuggagaaaaaugugacagucacccauuccgugaaccuccuggaagauaagcacaaugggaaacuuuguaagcugagaggaguugcuccccuccaucugggcaaaugcaacaucgccggguggauucugggaaauccugagugugaaucucucagcacagccuccucuuggagcuacaucguggagaccuccucuagcgacaacggcacgugcuauccgggggauuuuauugacuacgaagaacugcgggagcagcuuuccagcgucucuuccuucgaacgcuuugagaucuuccccaagaccagcucuuggccuaaucacgauuccaacaagggagugacagccgcuuguccccaugccggcgcgaaaucuuuuuauaagaaucugaucuggcucguuaaaaagggcaacagcuacccuaaacuguccaagagcuauauuaaugacaaggggaaagaagugcuuguccuguggggaauccaccaccccuccaccacagccgaucaacagucucucuaccagaacgcugacgccuacguguucgugggcaccagcagauauuccaagaaauuuaagccugagauugcuauccggccgaaaguccgcgaucaggaggggagaaugaauuacuauuggacgcugguugaacccggagacaagauuacauucgaggccaccggcaaccugguggugccucgguacgcguuugccauggaacgcaacgcugggagcggaaucauuaucucugauacacccguccaugacugcaauaccaccugucaaacaccuaaaggcgccaucaacacgucccucaccagccugcccuuccagaauauucacccgaucacaauuggcaagugcccuaaguaugugaaaucuaccaaacuuagacuggcuacagggcuccggaacguucccagcauccagucccgcggacuguuuggcgccauugccggguucaucgagggaggcuggaccgggaugguggacggaugguacggcuaucaucaccagaaugaacaaggcucuggguacgcugcggaucuuaaaagcacgcagaacgccaucgacaagauuacaaauaaagucaacuccgugaucgagaagaugaauacccaguuuaccgcuguuggaaaggaguucaaccaccuggaaaagagaauugagaaucucaacaagaaaguggaugacggcuuccuggauaucuggacauacaaugccgaacugcucguccugcuugagaacgaacggacccuggacuaucaugauagcaaugugaagaaccucuacgagaaaguccgcaaccagcugaagaauaacgccaaggagauugggaauggauguuuugaguucuaucacaaaugcgacaacacauguauggagucugugaagaauggcacguacgauuauccuaaauacuccgaagaggcuaaacuuaacagagaagagaucgacgggguuaagcuggagagcacccggaucuaucaaauucucgccaucuacucuacaguggcguccagccugguccuggugguuucccucggcgcuauuucuuuuuggaugugcagcaauggaucccugcagugccgcaucuguauuuga

SEQ ID NO: 203898 - RNA, 1701 nt, Artificial Sequence
  derived and/or modified CDS sequence (opt5) from hemagglutinin__InfluenzaA__AHM98350
augaaggccauccugguggucaugcucuacaccuucgcuacagccaacgcggacacgcugugcauuggcuaucacgcuaauaacagcaccgauacaguugacaccgugcuugagaaaaaugugacagucacccauuccgugaaccugcucgaagauaagcacaaugggaaacuguguaaacuuagaggaguugcuccccugcaucucggcaaaugcaacaucgccggguggauucugggaaauccugagugugaaucucugagcacagccuccucuuggagcuacaucguggagaccuccucuagcgacaacggcacgugcuauccgggggauuuuauugacuacgaagaacuccgggagcagcuguccagcgucucuuccuucgaacgcuuugagaucuuccccaagaccagcucuuggccuaaucacgaugccaacaagggagugacagcugccuguccccaugcgggcgccaaaggcuuuuauaagaaucuuaucuggcugguuaaaaaggggaacuccuacccuaaacucagcaagucuuauauuaaugacaagggaaaagaagugcugguccuuuggggcauccaccaccccuccaccacagcugaucaacagagccuguaccagaacgccgacaccuacguguucguggggacguccagauauucuaagaaauuuaagccugagauugcuauccggccgaaaguccgcgaucaggagggaagaaugaauuacuauuggacacucguugaacccggcgacaagauuaccuucgaggccacagggaaccugguggugccucgguacgcguuugccauggaacgcaacgcuggaagcggcaucauuaucuccgauacccccguccaugacugcaauaccacaugucaaacgccuaaaggcgccaucaacaccagccugcccuuccagaauauucacccgaucacaauugggaagugcccuaaguaugugaaaucuaccaagcucagacuggcuacaggacuucggaacguucccuccauccagagccgcggccuguuuggggccauugccggauucaucgagggcggguggaccggaaugguggacggcugguacggcuaucaucaccagaaugaacaagggucuggauacgcugcggaucucaaaagcacgcagaacgccaucgacaagauuacaaauaaagucaacuccgugaucgagaagaugaauacccaguuuaccgcuguuggcaaggaguucaaccaccuggaaaagagaauugagaaucuuaacaagaaaguggaugacggguuccuggauaucuggacauacaaugccgaacuccugguccugcucgagaacgaacggacccuggacuaucaugauucuaaugugaagaaccuuuacgagaaaguccgcaaccagcugaagaauaacgccaaggagauuggaaauggcuguuuugaguucuaucacaaaugcgacaacacauguauggagagcgugaagaaugggacguacgauuauccuaaauacuccgaagaggcuaagcucaacagagaagagaucgacggcguuaaacuggagagcacccggaucuaucaaauucuugccaucuacucuacaguggcguccagccugguccucgugguuucucugggagcuauuuccuuuuggaugugcagcaauggcucccugcagugccgcaucuguauuuga

SEQ ID NO: 203899 - RNA, 1701 nt, Artificial Sequence; identical to SEQ ID NO: 198526
  derived and/or modified CDS sequence (opt5) from hemagglutinin__InfluenzaA__AHM98361

SEQ ID NO: 203900 - RNA, 1701 nt, Artificial Sequence; identical to SEQ ID NO: 198939
  derived and/or modified CDS sequence (opt5) from hemagglutinin__InfluenzaA__AHM98372

SEQ ID NO: 203901 - RNA, 1701 nt, Artificial Sequence; identical to SEQ ID NO: 198939
  derived and/or modified CDS sequence (opt5) from hemagglutinin__InfluenzaA__AHM98383

SEQ ID NO: 203902 - RNA, 1701 nt, Artificial Sequence; identical to SEQ ID NO: 198896
  derived and/or modified CDS sequence (opt5) from hemagglutinin__InfluenzaA__AHM98394

SEQ ID NO: 203903 - RNA, 1701 nt, Artificial Sequence
  derived and/or modified CDS sequence (opt5) from hemagglutinin__InfluenzaA__AHM98405
augaaggccauccuggugguccuccuguacaccuucgcuacagccaacgcggacacgcuuugcauuggcuaucacgcuaauaacagcaccgauacaguugacaccgugcuggagaagaaugugacagucacccauuccgugaaccuccuggaagauaagcacaaugggaaacuuuguaagcugagaggaguugcuccccuccaucugggcaaaugcaacaucgccggguggauucugggaaauccugagugugaaucucucagcacagccuccucuuggagcuacaucguggagaccuccucuagcgacaacggcacgugcuauccgggggauuuuauugacuacgaggaacugcgggagcagcuuuccagcgucucuuccuucaagcgcuuugaaaucuuccccaagaccagcucuuggccuaaucacgauuccaacaaaggagugacagccgcuuguccccaugccggcgcgaagggcuuuuauaaaaaucugaucuggcucguuaagaaagggaacagcuacccuaagcugucuaaguccuauauuaaugacaaaggaaaggaggugcuuguccuguggggcauccaccaccccagcaccacagccgaucaacagucccucuaccagaacgcugacaccuacguguucguggggacgucuagauauagcaaaaaguuuaaaccugaaauugccauccggccgaagguccgcgaucaggagggaagaaugaauuacuauuggacacugguugagcccggcgacaaaauuaccuucgaagcuacagggaaccugguggugccucgguacgccuuugcgauggagcgcaacgccggauccggcaucauuaucagcgauacccccguccaugacugcaauaccacaugucaaacgccuaagggcgcuaucaacaccucucuccccuuccagaauauucacccgaucacaauugggaagugcccuaaauaugugaaguccaccaaacugagacuugccacaggacugcggaacguucccagcauccagucucgcggccucuuuggggcuauugccggauucaucgaaggcggguggaccggaaugguggacggcugguacggcuaucaucaccagaaugagcaagggagcggauacgccgcugaucugaaguccacgcagaacgcgaucgacaaaauuacaaauaaggucaacucugugaucgaaaagaugaauacccaguuuaccgccguuggcaaagaguucaaccaccuugagaagagaauugaaaaucugaacaaaaagguggaugacggguuccucgauaucuggacauacaaugcugagcugcugguccuccuggaaaacgagcggacccuugacuaucaugauagcaaugugaaaaaccuguacgaaaagguccgcaaccagcucaagaauaacgccaaagagauuggaaauggcuguuuugaguucuaucacaagugcgacaacacauguauggaauccgugaaaaaugggacguacgauuauccuaaguacagcgaggaagccaaacugaacagagaggaaaucgacggcguuaaacuugagucuacccggaucuaucaaauucuggcuaucuacuccacaguggccagcucucucguccuggugguuucccugggagcgauuagcuuuuggaugugcuccaauggcucucuccagugccgcaucuguauuuga

SEQ ID NO: 203904 - RNA, 1701 nt, Artificial Sequence; identical to SEQ ID NO: 203903
  derived and/or modified CDS sequence (opt5) from hemagglutinin__InfluenzaA__AHM98416

SEQ ID NO: 203905 - RNA, 1701 nt, Artificial Sequence; identical to SEQ ID NO: 198896
  derived and/or modified CDS sequence (opt5) from hemagglutinin__InfluenzaA__AHM98427

SEQ ID NO: 203906 - RNA, 1701 nt, Artificial Sequence; identical to SEQ ID NO: 199114
  derived and/or modified CDS sequence (opt5) from hemagglutinin__InfluenzaA__AHM98438

SEQ ID NO: 203907 - RNA, 1701 nt, Artificial Sequence; identical to SEQ ID NO: 200258
  derived and/or modified CDS sequence (opt5) from hemagglutinin__InfluenzaA__AHM98449

SEQ ID NO: 203908 - RNA, 1701 nt, Artificial Sequence
  derived and/or modified CDS sequence (opt5) from hemagglutinin__InfluenzaA__AHM98460
augaaggccauccuggugguccuccugugcaccuucgcuacagccaacgcggacacgcuuuguauuggcuaccacgcuaauaacagcaccgauacaguugacaccgugcuggagaaaaaugugacagucacccauuccgugaaccuccuggaagauaagcacaaugggaaacuuugcaagcugagaggaguugcuccccuccaucugggcaaauguaacaucgccggguggauucugggaaauccugagugcgaaucucucagcacagccuccucuuggagcuauaucguggagaccuccucuagcgacaacggcacguguuacccgggggauuuuauugacuaugaagaacugcgggagcagcuuuccagcgucucuuccuucgaacgcuuugagaucuuccccaagaccagcucuuggccuaaucacgauuccaacaagggagugacagccgcuugcccccaugccggcgcgaaaggcuuuuacaagaaucugaucuggcucguuaaaaaggggaacagcuauccuaaacugucuaaguccuacauuaaugacaagggaaaagaagugcuuguccuguggggcauccaccaccccagcaccacagccgaucaacagucccucuaucagaacgcugacaccuacguguucguggggacgucuagauacagcaagaaauuuaagccugagauugccauccggccgaaaguccgcgaucaggagggaagaaugaauuauuacuggacacugguugaacccggcgacaagauuaccuucgaggcuacagggaaccugguggugccucgguaugccuuugcgauggaacgcaacgccggauccggcaucauuaucagcgauaccaccguccaugacuguaauacaacgugccaaacccccaaaggcgcuaucaacacaucucucccuuuccagaauauucaccccaucaccauugggaaguguccgaaguacgugaaauccacaaagcugagacuugccaccggacugcggaacguuccuagcauccagucucgcggccucuuuggggcuauugccggauucaucgagggcggguggacgggaaugguggacggcugguauggcuaccaucaccagaaugaacaagggagcggauaugccgcugaucugaaauccacacagaacgcgaucgacaagauuaccaauaaagucaacucugugaucgagaagaugaauacccaguuuacagccguuggcaaggaguucaaccaccuugaaaagagaauugagaaucugaacaagaaaguggaugacggguuccucgauaucuggaccuacaaugcugaacugcugguccuccuggagaacgaacggacacuugacuaccaugauagcaaugugaagaaccuguaugagaaaguccgcaaccagcucaagaauaacgccaaggagauuggaaauggcugcuuugaguucuaccacaaaugugacaacacgugcauggaguccgugaagaaugggaccuaugauuaccccaaauauagcgaagaggccaagcugaacagagagaaaaucgacggcguuaaacuugaaucuacacggaucuaccaaauucuggcuaucuauuccaccguggccagcucucucguccuggugguuucccugggagcgauuagcuuuuggaugugcuccaauggcucucuccagugucgcaucugcauuuga

SEQ ID NO: 203909 - RNA, 1701 nt, Artificial Sequence; identical to SEQ ID NO: 198939
  derived and/or modified CDS sequence (opt5) from hemagglutinin__InfluenzaA__AHM98471

SEQ ID NO: 203910 - RNA, 1701 nt, Artificial Sequence
  derived and/or modified CDS sequence (opt5) from hemagglutinin__InfluenzaA__AHM98482
augaaggccauccuggugguccuccuguacaccuucgcuacagccaacgcggacacgcuuugcauuggcuaucacgcuaauaacagcaccgauacaguugacaccgugcuggagaaaaaugugacagucacccauuccgugaaccuccuggaagauaagcacaaugggaaacuuuguaagcugagaggaguugcuccccuccaucugggcaaaugcaacaucgccggguggauucugggaaauccugagugugaaucucucagcacagccuccucuuggagcuacaucguggagaccuccucuagcgacaacggcacgugcuauccgggggauuuuauugacuacgaggaacugcgggagcagcuuuccagcgucucuuccuucgaacgcuuugagaucuuccccaagaccagcucuuggccuaaucacgauuccaacaagggagugacagccgcuuguccccaugccggcgcgaaaggcuuuuauaagaaucugaucuggcucguuaaaaaggggaacagcuacccuaaacugucuaaguccuauauuaaugacaagggaaaagaagugcuuguccuguggggcauccaccaccccagcaccacagccgaucaacagucccucuaccagaacgcugacaccuacguguucguggggacgucuagauauagcaagaaauuuaagccugagauugccauccggccgaaaguccgcgaucaggagggaagaaugaauuacuauuggacacugguugaacccggcgacaagauuaccuucgaggcuacagggaaccugguggugccucgguacgccuuugcgauggaacgcaacgccggauccggcaucauuaucagcgauacccccguccaugacugcaauaccacaugucaaacgccuaaaggcgcuaucaacaccucucuccccuuccagaauauucacccgaucacaauugggaagugcccuaaguaugugaaauccaccaagcugagacuugccacaggacugcggaacguucccagcauccagucucgcggccucuuuggggcuauugccggauucaucgagggcggguggaccggaaugguggacggcugguacggcuaucaucaccagaaugaacaagggagcggauacgccgcugaucugaaauccacgcagaacgcgaucgacaagauuacaaauaaagucaacucugugaucgauaagaugaauacccaguuuaccgccguuggcaaggaguucaaccaccuugagaaaagaauugaaaaucugaacaagaaaguggacgauggguuccucgacaucuggacauacaaugcugagcugcugguccuccuggaaaacgagcggacccuugauuaucaugacagcaaugugaagaaccuguacgaaaaaguccgcaaccagcucaagaauaacgccaaggagauuggaaauggcuguuuugaguucuaucacaaaugcgauaacacauguauggaauccgugaagaaugggacguacgacuauccuaaauacagcgaggaagccaagcugaacagagaggaaaucgauggcguuaaacuugagucuacccggaucuaucaaauucuggcuaucuacuccacaguggccagcucucucguccuggugguuucccugggagcgauuagcuuuuggaugugcuccaauggcucucuccagugccgcaucuguauuuga

SEQ ID NO: 203911 - RNA, 1701 nt, Artificial Sequence
  derived and/or modified CDS sequence (opt5) from hemagglutinin__InfluenzaA__AHM98493
augaaggccauccuggugguccuccuguacaccuucgcuacagccaacgcggacacgcuuugcauuggcuaucacgcuaauaacagcaccgauacaguugacaccgugcuggagaaaaaugugacagucacccauuccgugaaccuccuggaagauaagcacaaugggaaacuuuguaagcugagaggaguugcuccccuccaucugggcaaaugcaacaucgccggguggauucugggaaauccugagugugaaucucucagcacagccuccucuuggagcuacaucguggagaccuccucuagcgacaacggcacgugcuauccgggggauuuuauuaauuacgaagaacugcgggagcagcuuuccagcgucucuuccuucgaacgcuuugagaucuuccccaagaccagcucuuggccuaaccacgacuccaauaagggagugacagccgcuuguccccaugccggcgcgaaaucuuuuuauaagaaccugaucuggcucguuaaaaagggcaauagcuacccuaaacuguccaagagcuauauuaacgauaaggggaaagaagugcuuguccuguggggaauccaccaccccuccaccucugccgaccaacagagccucuaccagaaugcugaugccuacguguucgugggcacauccaaguauagcaaaaaguuuaaaccugagauugcugucagaccgaagguucgggaccaggaggggcgcaugaacuacuauuggacccugguggaacccggagauaaaaucacguucgaggccacaggcaaccugcucgugccuagauacgcguuugccauggaacggaaugcugggucuggaauuaucauuuccgacacccccguccaugauugcaacacaaccugucaaaccccuaagggcgccaucaauacaagccugcccuuccagaacauccacccgauuacgaucggcaaguauccuaaauacgugaagucuaccaaacuucgccuggcuacagggcucagaaauguucccagcauucagucccggggacuguuuggcgccaucgccggguucauugagggaggcuggaccgggaugguggacggaugguauggcuaccaucaccagaacgaacaaggcucuggguacgcugcggaccuuaagagcacacagaaugccaucgauaaaaucaccaacaaggucaauuccgugauugagaagaugaacacgcaguuuacagcuguuggaaaagaguucaaucaccuggaaaagcgcaucgagaaccucaauaaaaagguggacgauggcuuccuggacauuuggaccuauaacgccgaacugcucguccugcuugagaaugaaagaacccuggauuaccaugacagcaacgugaaaaaccucuaugagaagguccggucucagcugaagaauaacgccaaagagaucgggaauggaugcuuugaguucuaccacaagugugauaacacaugcauggaguccgugaaaaauggcaccuaugacuacccuaaguauagcgaagaggcuaaacuuaaccgcgaagagauugaugggguuaagcuggagucuacaagaaucuaccaaauccucgccauuuacuccacgguggcgagcucccugguccuggugguuucucucggcgcuaucagcuuuuggauguguuccaauggaucucugcagugccggauuugcaucuga

SEQ ID NO: 203912 - RNA, 1701 nt, Artificial Sequence
  derived and/or modified CDS sequence (opt5) from hemagglutinin__InfluenzaA__AHM98504
augaaggccauccuggugguccuccuguacaccuucgcuacagccaacgcggacacgcuuugcauuggcuaucacgcuaauaacagcaccgauacaguugacaccgugcuggagaaaaaugugacagucacccauuccgugaaccuccuggaagauaagcacaaugggaaacuuuguaagcugagaggaguugcuccccuccaucugggcaaaugcaacaucgccggguggauucugggaaauccugagugugaaucucucagcacagccuccucuuggagcuacaucguggagaccuccucuagcgacaacggcacgugcuauccgggggauuuuauuaauuacgaagaacugcgggagcagcuuuccagcgucucuuccuucgaacgcuuugagaucuuccccaagaccagcucuuggccuaaccacgacuccaauaagggagugacagccgcuuguccccaugccggcgcgaaaucuuuuuauaagaaccugaucuggcucguuaaaaagggcaauagcuacccuaaacuguccaagagcuauauuaacgauaaggggaaagaagugcuuguccuguggggaauccaccaccccuccaccacagccgaccaacagucucucuaccagaaugcugaugccuacguguucgugggcaccagcagauauuccaagaaauuuaagccugagauugcuauccggccgaaaguccgcgaccaggaggggagaaugaacuacuauuggacgcugguugaacccggagauaagauuacauucgaggccaccggcaaccugguggugccucgguacgcguuugccauggaacgcaaugcugggagcggaaucauuaucucugacacacccguccaugauugcaacaccaccugucaaacaccuaaaggcgccaucaauacgucccuccccuuccagaacauucacccgaucaccauuggcaagugcccuaaguaugugaaaagcacaaagcugagacuugcuaccgggcugcggaauguucccucuauccagagccgcggacucuuuggcgccauugccggguucaucgagggaggcuggacagggaugguggacggaugguacggcuaucaucaccagaacgaacaaggcuccggguacgcugcggaccugaaaucuacccagaaugccaucgauaagauuacgaacaaagucaauagcgugaucgagaagaugaacacacaguuuaccgcuguuggaaaggaguucaaucaccuugaaaagagaauugagaaccugaauaagaaaguggacgauggcuuccucgacaucuggaccuacaacgccgaacugcugguccuccuggagaaugaacggacacuugauuaucaugacuccaacgugaagaaccuguacgagaaaguccgcaaucagcucaagaacaaugccaaggagauugggaacggauguuuugaguucuaucacaaaugcgauaauaccuguauggagagcgugaagaacggcacauacgacuauccuaaauacucuaaggaagcuaaacugaauagagaggaaaucgaugggguuaaacuugaguccacgcggaucuaucaaauucuggccaucuacagcaccguggcgucuucccucguccuggugguuagccugggcgcuauuuccuuuuggaugugcucuaacggaagccuccagugccgcaucuguauuuga

SEQ ID NO: 203913 - RNA, 1701 nt, Artificial Sequence; identical to SEQ ID NO: 198526
  derived and/or modified CDS sequence (opt5) from hemagglutinin__InfluenzaA__AHM98515

SEQ ID NO: 203914 - RNA, 1701 nt, Artificial Sequence
  derived and/or modified CDS sequence (opt5) from hemagglutinin__InfluenzaA__AHM98526
augaaggccauccuggugguccuccugcacaccuucgcuacagccaacgcggacacgcuuugcauuggcuaccaugcuaauaacagcaccgauacaguugacaccgugcuggagaagaaugugacagucacccacuccgugaaccuccuggaagauaagcauaaugggaaacuuuguaagcugagaggaguugcuccccuccaccugggcaaaugcaacaucgccggguggauucugggaaauccugagugugaaucucucagcacagccuccucuuggagcuauaucguggagaccuccucuagcgacaacggcacgugcuacccgggggauuuuauugacuaugaagaacugcgggagcagcuuuccagcgucucuuccuucgaacgcuuugagaucuuccccaagaccagcucuuggccuaaucaugauuccaacaagggagugacagccgcuuguccccacgccggcgcgaaaggcuuuuacaagaaucugaucuggcucguuaaaaaggggaacagcuauccuaaacugucuaaguccuacauuaaugacaagggaaaagaagugcuuguccuguggggcauccaccaucccagcaccacagccgaucaacagucccucuaucagaacgcugacaccuacguguucguggggacgucuagauacagcaagaaauuuaagccugagauugccauccggccgaaaguccgcgaucaggagggaagaaugaauuauuacuggacacugguugaacccggcgacaagauuaccuucgaggcuacagggaaccugguggugccucgguaugccuuugcgauggaacgcaacgccggauccggcaucauuaucagcgauacccccguccacgacugcaauaccacaugucaaacgccuaaaggcgcuaucaacaccucucuccccuuccagaauauucauccgaucacaauugggaagugcccuaaguacgugaaauccaccaagcugagacuugccacaggacugcggaacguucccagcauccagucucgcggccucuuuggggcuauugccggauucaucgagggcggguggaccggaaugguggacggcugguauggcuaccaccaccagaaugaacaagggagcggauaugccgcugaucugagauccacgcagaacgcgaucgacaaaauuacaaauaaggucaacucugugaucgagaaaaugaauacccaguuuaccgccguuggcaaggaguucaaccaucuugaaaagcggauugagaaucugaacaaaaagguggaugacggguuccucgauaucuggacauacaaugcugaacugcugauucuccuggagaacgaacgcacccuugacuaccacgauagcaaugucaaaaaccuguaugagaaggugagaaaccagcucaaaaauaacgccaaggagaucggaaauggcuguuuugaguucuaccauaagugcgacaacacauguauggaguccgucaaaaaugggacguaugauuacccuaaguauagcgaagaggccaaacugaaccgggaagagaucgacggcgugaaacuugagucuacccgcauuuaccaaauccuggcuauuuauuccacaguugccagcucucucgugcuggucgugucccugggagcgaucagcuuuuggaugugcuccaauggcucucuccagugcagaauuuguaucuga

SEQ ID NO: 203915 - RNA, 1701 nt, Artificial Sequence; identical to SEQ ID NO: 198526
  derived and/or modified CDS sequence (opt5) from hemagglutinin__InfluenzaA__AHM98537

SEQ ID NO: 203916 - RNA, 1701 nt, Artificial Sequence
  derived and/or modified CDS sequence (opt5) from hemagglutinin__InfluenzaA__AHM98548
augaaggccauccuggugguccuccuguacaccuucgcuacagccaacgcggacacgcuuugcauuggcuaucacgcuaauaacagcaccgauacaguugacaccgugcuggagaaaaaugugacagucacccauuccgugaaccuccuggaagauaagcacaaugggaaacuuuguaagcugagaggaguugcuccccuccaucugggcaaaugcaacaucgccggguggauucugggaaauccugagugugaaucucucagcacagccuccucuuggagcuacaucguggagaccuccucuagcgacaacggcacgugcuauccgggggauuuuauuaauuacgaagaacugcgggagcagcuuuccagcgucucuuccuucgaacgcuuugagaucuuccccaagaccagcucuuggccuaaccacgacuccaauaagggagugacagccgcuuguccccaugccggcgcgaaaucuuuuuauaagaaccugaucuggcucguuaaaaagggcaauagcuacccuaaacuguccaagagcuauauuaacgauaaggggaaagaagugcuuguccuguggggaauccaccaccccuccaccacagccgaccaacagucucucuaccagaaugcugaugccuacguguucgugggcaccagcagauauuccaagaaauuuaagccugagauugcuauccggccgaaaguccgcgaccaggaggggagaaugaacuacuauuggacgcugguugaacccggagauaagauuacauucgaggccaccggcaaccugguggugccucgguacgcguuugccauggaacgcaaugcugggagcggaaucauuaucucugacacacccguccaugauugcaacaccaccugucaaacaccuaaaggcgccaucaauacgucccuccccuuccagaacauucacccggugaccaucggcaagugcccuaaguauguuaaaagcacaaagcugagacuugcuaccgggcugcggaaugugcccucuauucagagccgcggacucuuuggcgccaucgccggguucauugagggaggcuggacagggauggucgacggaugguacggcuaucaucaccagaacgaacaaggcuccggguacgcugcggaccugaaaucuacccagaaugccaucgauaagaucacgaacaaagugaauagcguuauugagaagaugaacacacaguuuaccgcugugggaaaggaguucaaucaccuugagaaaagaaucgagaaccugaauaagaaagucgacgauggcuuccucgacauuuggaccuacaacgccgaacugcuggugcuccuggagaaugaacggacacuugauuaucaugacuccaacgucaagaaccuguacgagaaagugcgcaaucagcucaagaacaaugccaaggagaucgggaacggauguuuugaguucuaucacaaaugcgauaauaccuguauggaaagcguuaagaacggcacauacgacuauccuaaauacucugaagaggcuaagcugaauagagaagagauugauggggugaaacuugaguccacgcggaucuaucaaauccuggccauuuacagcaccgucgcgucuucccucgugcugguugugagccugggcgcuaucuccuuuuggaugugcucuaacggaagccuccagugccgcauuuguaucuga

SEQ ID NO: 203917 - RNA, 1701 nt, Artificial Sequence
  derived and/or modified CDS sequence (opt5) from hemagglutinin__InfluenzaA__AHM98559
augaaggccauccuggugguccuccuguacaccuucgcuacagccaaggcggacacgcuuugcauuggcuaucacgcuaacaauagcaccgauacaguugacaccgugcuggagaagaacgugacagucacccauuccgugaaucuccuggaagauaaacacaacgggaaacuuuguaagcugagaggaguugcgccccuccaucugggcaagugcaauaucgccggguggauucugggaaacccugagugugaaucucucagcacagcuuccucuuggagcuacaucguggagaccuccucuagcgacaauggcacgugcuauccgggggauuuuauuaacuacgaagaacugcgggagcagcuuuccagcgucucuuccuucgaacgcuuugagaucuuccccaagaccagcucuuggccuaaucacgacuccaacaaaggagugacagccgcuuguccccaugccggcgccaagagcuuuuauaaaaaucugaucuggcucguuaagaaaggcaacucuuacccuaagcuguccaagagcuauauuaaugauaaagggaaggaagugcuuguccuguggggaauccaccaccccuccaccacagccgaccaacagucucucuaccagaacgcugaugccuacguguucgugggcaccagcagauauuccaaaaaguuuaaaccugagauugcuauccggccgaagguccgcgaccaggaggggagaaugaauuacuauuggacgcugguugaacccggagauaaaauuacauucgaggccaccggcaaccugguggugccucgguacgcguuugccauggaacgcaacgcugggagcggaaucauuaucucugacacacccguccaugauugcaauaccaccugucaaacaccuaagggcgccaucaacacgucccuccccuuccagaauauucacccgaucaccauuggcaagugcccuaaauauguuaagagcacaaaacugagacuugcuaccgggcugcggaacgugcccucuauccagagccgcggacucuuuggcgccauugccggguucaucgagggaggcuggacagggaugguggacggaugguacggcuaucaucaccagaaugaacaaggcuccggguacgcugcggaccugaagucuacccagaacgccaucgauaaaauuacgaauaaggucaacagcgugaucgagaagaugaauacacaguuuaccgcuguuggaaaagaguucaaccaccuugaaaagagaauugagaaucugaacaaaaagguggacgauggcuuccucgacaucuggaccuacaaugccgaacugcugguccuccuggagaacgaacggacacuugauuaucaugacuccaaugugaaaaaccuguacgagaagguccgcaaccagcucaagaauaacgccaaagagauugggaauggauguuuugaguucuaucacaagugcgauaacaccuguauggagagcgugaaaaauggcacauacgacuauccuaaguacucugaagaggcuaaacugaacagagaagagaucgaugggguuaaacuugaguccacgcggaucuaucaaauucuggccaucuacagcaccguggcgucuucccucguccuggugguuagccugggcgcuauuuccuuuuggaugugcucuaauggaagccuccagugccgcaucuguauuuga

SEQ ID NO: 203918 - RNA, 1701 nt, Artificial Sequence; identical to SEQ ID NO: 198896
  derived and/or modified CDS sequence (opt5) from hemagglutinin__InfluenzaA__AHM98570

SEQ ID NO: 203919 - RNA, 1701 nt, Artificial Sequence
  derived and/or modified CDS sequence (opt5) from hemagglutinin__InfluenzaA__AHM98581
augaaggccauccuggugguccuccuguacaccuucgcuacagccaacgcggacacgcuuugcauuggcuaucacgcuaauaacagcaccgauacaguugacaccgugcuggagaaaaaugugacagucacccauuccgugaaccuccuggaagauaagcacaaugggaaacuuuguaagcugagaggaguugcuccccuccaucugggcaaaugcaacaucgccggguggauucugggaaauccugagugugaaucucucagcacagcccgguccuggucuuacaucguggagaccagcuccucugacaacggcacgugcuauccgggggauuuuauugacuacgaggaacugcgcgagcagcuuagcuccgucagcucuuucaagagauuugaaaucuuccccaagaccuccagcuggccuaaucacgauucuaacaaaggagugacagccgcuuguccccaugccggcgcgaagggcuuuuauaaaaaucugaucuggcucguuaagaaagggaacuccuacccuaagcugagcaagucuuauauuaaugacaaaggaaaggaggugcuuguccuguggggcauccaccaccccuccaccacagccgaucaacagagccucuaccagaacgcugacaccuacguguucguggggacgucccgguauucuaaaaaguuuaaaccugaaauugccauccgcccgaaggucagagaucaggagggacggaugaauuacuauuggacacugguugagcccggcgacaaaauuaccuucgaagcuacagggaaccugguggugccucgcuacgccuuugcgauggagagaaacgccggaagcggcaucauuaucuccgauacccccguccaugacugcaauaccacaugucaaacgccuaagggcgcuaucaacaccagccuccccuuccagaauauucacccgaucacaauugggaagugcccuaaauaugugaagucuaccaaacugcggcuugccacaggacugcgcaacguucccuccauccagagcagaggccucuuuggggcuauugccggauucaucgaaggcggguggaccggaaugguggacggcugguacggcuaucaucaccagaaugagcaagggucuggauacgccgcugaucuuaagagcacgcagaacgcgaucgacaaaauuacaaauaaggucaacuccgugaucgaaaagaugaauacccaguuuaccgccguuggcaaagaguucaaccaccuugagaagcggauugaaaaucugaacaaaaagguggaugacggguuccucgauaucuggacauacaaugcugagcugcugguccuccuggaaaacgagcgcacccuugacuaucaugauucuaaugugaaaaaccuguacgaaaaggucagaaaccagcucaagaauaacgccaaagagauuggaaauggcuguuuugaguucuaucacaagugcgacaacacauguauggaaagcgugaaaaaugggacguacgauuauccuaaguacuccgaggaagccaaacugaaccgggaggaaaucgacggcguuaagcuggagagcacccgcaucuaucaaauucuggcuaucuacucuacaguggccuccagccucguccuggugguuucucugggagcgauuuccuuuuggaugugcagcaauggcucccuccagugcagaaucuguauuuga

SEQ ID NO: 203920 - RNA, 1701 nt, Artificial Sequence; identical to SEQ ID NO: 198896
  derived and/or modified CDS sequence (opt5) from hemagglutinin__InfluenzaA__AHM98592

SEQ ID NO: 203921 - RNA, 1701 nt, Artificial Sequence; identical to SEQ ID NO: 198939
  derived and/or modified CDS sequence (opt5) from hemagglutinin__InfluenzaA__AHM98603

SEQ ID NO: 203922 - RNA, 1701 nt, Artificial Sequence; identical to SEQ ID NO: 198526
  derived and/or modified CDS sequence (opt5) from hemagglutinin__InfluenzaA__AHM98614

SEQ ID NO: 203923 - RNA, 1701 nt, Artificial Sequence; identical to SEQ ID NO: 203903
  derived and/or modified CDS sequence (opt5) from hemagglutinin__InfluenzaA__AHM98625

SEQ ID NO: 203924 - RNA, 1701 nt, Artificial Sequence; identical to SEQ ID NO: 203903
  derived and/or modified CDS sequence (opt5) from hemagglutinin__InfluenzaA__AHM98636

SEQ ID NO: 203925 - RNA, 1701 nt, Artificial Sequence
  derived and/or modified CDS sequence (opt5) from hemagglutinin__InfluenzaA__AHM98647
augaaggccauccuggugguccuccuguacaccuucgcuacagccaaagcggacacgcuuugcauuggcuaucacgcuaacaauagcaccgauacaguugacaccgugcuggagaagaacgugacagucacccauuccgugaaucuccuggaagauaaacacaacgggaaacuuuguaaacugagaggaguugcgccccuccaucugggcaagugcaauaucgccggguggauucugggaaacccugagugugaaucucucagcacagcuuccucuuggagcuacaucguggagaccuccucuagcgacaauggcacgugcuauccgggggauuuuauuaacuacgaagaacugcgggagcagcuuuccagcgucucuuccuucgaacgcuuugagaucuuccccaagaccagcucuuggccuaaucacgacuccaacaaaggagugacagccgcuuguccccaugccggcgccaagagcuuuuauaaaaaucugaucuggcucguuaagaaaggcaacucuuacccuaagcugucccaaagcuauauuaaugauaaggggaaagaagugcuuguccuguggggaauccaccaccccuccaccacagccgaccagcagucucucuaccagaacgcugaugccuacguguucgugggcaccagcagauauuccaagaaauuuaagccugagauugcuauccggccgaaaguccgcgaccaagaggggagaaugaauuacuauuggacgcugguugaacccggagauaagauuacauucgaggccaccggcaaccugguggugccucgguacgcguuugccauggaacgcaacgcugggagcggaaucauuaucucugacacacccguccaugauugcaauaccaccugucagacaccuaaaggcgccaucaacacgucccuccccuuccagaauauucacccgaucaccauuggcaagugcccuaaguaugugaaaagcacaaagcugagacuugcuaccgggcugcggaacguucccucuauccagagccgcggacucuuuggcgccauugccggguucaucgagggaggcuggacagggaugguggacggaugguacggcuaucaucaccaaaaugaacagggcuccggguacgcugcggaccugaaaucuacccagaacgccaucgauaagauuacgaauaaagucaacagcgugaucgagaagaugaauacacaguuuaccgcuguuggaaaggaguucaaccaccuugaaaagagaauugagaaucugaacaagaaaguggacgauggcuuccucgacaucuggaccuacaaugccgaacugcugguccuccuggagaacgaacggacacuugauuaucaugacuccaaugugaagaaccuguacgagaaaguccgcaaccaacucaagaauaacgccaaggagauugggaauggauguuuugaguucuaucacaaaugcgauaacaccuguauggagagcgugaagaauggcacauacgacuauccuaaauacucugaagaggcuaagcugaacagagaagagaucgaugggguuaaacuugaguccacgcggaucuaucagauucuggccaucuacagcaccguggcgucuucccucguccuggugguuagccugggcgcuauuuccuuuuggaugugcucuaauggaagccuccagugccgcaucuguauuuga

SEQ ID NO: 203926 - RNA, 1701 nt, Artificial Sequence; identical to SEQ ID NO: 198939
  derived and/or modified CDS sequence (opt5) from hemagglutinin__InfluenzaA__AHM98658

SEQ ID NO: 203927 - RNA, 1701 nt, Artificial Sequence; identical to SEQ ID NO: 198896
  derived and/or modified CDS sequence (opt5) from hemagglutinin__InfluenzaA__AHM98669

SEQ ID NO: 203928 - RNA, 1701 nt, Artificial Sequence; identical to SEQ ID NO: 200258
  derived and/or modified CDS sequence (opt5) from hemagglutinin__InfluenzaA__AHM98701

SEQ ID NO: 203929 - RNA, 1701 nt, Artificial Sequence; identical to SEQ ID NO: 200258
  derived and/or modified CDS sequence (opt5) from hemagglutinin__InfluenzaA__AHM98712

SEQ ID NO: 203930 - RNA, 1701 nt, Artificial Sequence
  derived and/or modified CDS sequence (opt5) from hemagglutinin__InfluenzaA__AHM98723
augaaggccauccuggugguccuccuguacaccuucgcuacagccaacgcggacacgcuuugcauuggcuaucacgcuaauaacagcaccgauacaguugacaccgugcuggagaaaaaugugacagucacccauuccgugaaccuccuggaagauaagcacaaugggaaacuuuguaagcugagaggaguugcgccccuccaucugggcaacugcaauaucgccggguggauucugggaaacccugagugugaaucucucagcacagcuuccucuuggagcuacaucguggagaccuccucuagcgacaauggcacgugcuauccgggggauuuuauuaacuacgaggaacugcgggagcagcuuuccagcgucucuuccuucgaacgcuuugagauccugcccaaaaccagcucuuggccuaaucacgacuccaacaagggagugacagccgcuuguccccaagccggcgccaagagcuucuauaaaaaucucaucuggcugguuaagaaaggcaacucuuacccuaaacuuuccaagagcuauauuaaugauaaggggaaggaagugcugguccucuggggaauccaucaccccuccaccucugccgaccagcagagccuguaccagaacgcugaugccuacguguuugugggcacauccaaauauagcaagaaauucaagccugagauugcugucagaccgaaaguucgggaccaagaggggcgcaugaacuacuauuggacccugaucgaacccggagauaagauuacguuugaggccacaggcaaucuccuggugccuagauacgcguucgccauggaacggaacgcugggucuggaaucauuaucuccgacacccccgugcacgauugcaauacaaccugucagaccccuaaaggcgccaucaacacaagccuucccuuucagaauauucauccgaucacgauuggcaagugcccuaaguaugucaaaucuaccaagcugcgccucgcuacagggcugagaaacgugcccagcauccagucccggggacuuuucggcgccauugccggguuuaucgagggaggcuggaccgggaugguugacggaugguacggcuaucaccaucaaaaugcucagggcucuggguacgcggccgaccugaaaagcacacagaacgcuaucgauaagauuaccaauaaagugaacuccgucaucgaaaagaugaauacgcaguucacagccgugggaaaggaguuuaaccaccucgagaaacgcauugaaaaucugaacaagaaaguugacgauggcuuccuggacaucuggaccuacaaugccgagcuccuggugcuucuggaaaacgagagaacccucgauuaucacgacagcaacgucaagaaucuguacgaaaaagugcggucucaacuuaagaacaaugcuaaggagauugggaacggauguuucgaguuuuaucauaaaugcgauaauacauguauggaauccgucaagaacggcaccuacgacuauccucgcuacagcgaggaagccaaacugaauagagaggaaaucgauggggugaagcucgagucuacacggaucuaucagauucuggcgaucuacuccacgguugcuagcucccuggugcucauugucucucugggcgccaucagcuucuggaugugcuccaacggaucucuucagugccgcauuuguaucuga

SEQ ID NO: 203931 - RNA, 1701 nt, Artificial Sequence
  derived and/or modified CDS sequence (opt5) from hemagglutinin__InfluenzaA__AHM98734
augaaggccauccuggugguccuccuguacaccuucgcuacagccaacgcggacacgcuuugcauuggcuaucacgcuaauaacagcaccgauacaguugacaccgugcuggagaaaaaugugacagucacccauuccgugaaccuccuggaagauaagcacaaugggaaacuuuguaagcugagaggaguugcuccccuccaucugggcaaaugcaacaucgccggguggauucugggaaauccugagugugaaacacucucuaccgccagcuccuggucuuacaucguggagacgagcaacuccgacaaugggaccugcuauccgggggauuuuauugacuacgaagaacugcgggagcagcuuucuagcgucuccagcuucgaacgcuuugagaucuuccccaagacaucuuccuggccuaaccacgauagcaauaagggagugaccgccgcuuguccccaugccggcucuaaaggcuuuuauaagaaccugaucuggcucguuaaaaagggcaauuccuacccuaaacugagcaagucuuauauuaacgacaagggaaaagaagugcuuguccuguggggcauccaccaccccuccacaaccgcggaucaacagagccucuaccagaaugccgacacguacguguucguggggacauccagauauucuaagaaauuuaagccugagauugcuauccggccgaaaguccgcgaucaggagggaagaaugaacuacuauuggacccugguugaacccggcgacaagauuacauucgaggccaccgggaaccugguggugccucgguacgcuuuugccauggaacgcgaugcgggaagcggcaucauuaucuccgacacccccguccaugacugcaauacaacgugucaaaccccuaaaggcgccaucaacacaagccuccccuuccagaauauucacccgaucaccauugggaagugcccuaaguaugugaaaucuacaaagcugagacuugcuaccggacugcggaacguucccuccauccagagccgcggccucuuuggggccauugcuggauucaucgagggcggguggacgggaaugguggauggcugguacggcuaucaucaccagaaugaacaagggucuggauacgccgccgaccugaaaagcacacagaacgcuaucgauaagauuaccaauaaagucaacuccgugaucgagaagaugaauacccaguuuacagcgguuggcaaggaguucaaccaccuugagaaaagaauugagaaucugaacaagaaaguggacgauggguuccucgacaucuggaccuacaaugccgaacugcugguccuccuggagaacgaacggacacuugauuaucaugacucuaaugugaagaaccuguacgagaaaguccgcaaccagcucaagaauaacgcuaaggagauuggaaauggcuguuuugaguucuaucacaaaugcgauaacacguguauggaaagcgugaagaaugggaccuacgacuauccuaaauacuccgaagaggccaagcugaacagagaagagaucgauggcguuaaacuugagagcacacggaucuaucaaauucuggccaucuacucuaccgcugccuccagccucgugcuggucgugucucugggagcgauuuccuuuuggaugugcagcaauggcucccuccagugccgcaucuguauuuga

SEQ ID NO: 203932 - RNA, 1701 nt, Artificial Sequence; identical to SEQ ID NO: 200258
  derived and/or modified CDS sequence (opt5) from hemagglutinin__InfluenzaA__AHM98745

SEQ ID NO: 203933 - RNA, 1701 nt, Artificial Sequence
  derived and/or modified CDS sequence (opt5) from hemagglutinin__InfluenzaA__AHM98756
augaaggccauccuggugguccuccuguacaccuucgcuacagccaacgcggacacgcuuugcauuggcuaucacgcuaauaacagcaccgauacaguugacaccgugcuggagaaaaaugugacagucacccauuccgugaaccuccuggaagauaagcacaaugggaaacuuuguaagcugagaggaguugcuccccuccaucugggcaaaugcaacaucgccggguggauucugggaaauccugagugugaaacacucucuaccgccagcuccuggucuuacaucguggagacgagcuccucugacaacgggaccugcuauccgggcgauuuuauugacuacgaggaacugcgggagcagcuuagcuccgucagcucuuucgaacgcuuugagaucuuccccaagacauccagcuggccuaaucacgauucuaacaagggagugaccgccgcuuguccccaugccggcgcgaaaggcuuuuauaagaaucugaucuggcucguuaaaaaggggaacuccuacccuaaacugagcaagucuuauauuaaugacaagggaaaagaagugcuuguccuguggggcauccaccaccccuccacaaccgccgaucaacagagccucuaccagaacgcugacacguacguguucguggggacauccagauauucuaagaaauuuaagccugagauugccauccggccgaaaguccgcgaucaggagggaagaaugaauuacuauuggacccugguugaacccggcgacaagauuacauucgaggcuaccgggaaccugguggugccucgguacgccuuugcgauggaacgcgaugccggaagcggcaucauuaucuccgacacccccguccaugacugcaacacaacgugucaaaccccuaaaggcgcuaucaauacaagccuccccuuccagaacauucacccgaucaccauugggaagugcccuaaguaugugaaaucuacaaagcugagacuugccaccggacugcggaauguucccuccauccagagccgcggccucuuuggggcuauugccggauucaucgagggcggguggacgggaaugguggauggcugguacggcuaucaucaccagaacgaacaagggucuggauacgccgcugaccugaaaagcacacagaaugcgaucgauaagauuaccaacaaagucaauuccgugaucguuaagaugaacacccaguuuacagccgugggcaaggaguucaaucaccuugagaaaagaauugaaaaccugaauaagaaagucgacgauggguuccucgacaucuggaccuacaacgcugagcugcuggugcuccuggaaaaugagcggacacuugauuaucaugacucuaacgucaagaaucuguacgaaaaagugcgcaaccagcucaagaacaaugccaaggagauuggaaacggcuguuuugaguucuaucacaaaugcgauaauacguguauggaaagcguuaagaacgggaccuacgacuauccuaaauacuccgaggaagccaagcugaauagagaggaaaucgauggcgugaaacuugagagcacacggaucuaucaaauucuggcuaucuacucuaccgccgcguccagccucguccuggugguuucucugggagcuauuuccuuuuggaugugcagcaacggcucccuccagugccgcaucuguauuuga

SEQ ID NO: 203934 - RNA, 1701 nt, Artificial Sequence; identical to SEQ ID NO: 200258
  derived and/or modified CDS sequence (opt5) from hemagglutinin__InfluenzaA__AHM98767

SEQ ID NO: 203935 - RNA, 1701 nt, Artificial Sequence
  derived and/or modified CDS sequence (opt5) from hemagglutinin__InfluenzaA__AHM98778
augaaggccauccuggugguccuccuguacaccuucgcuacagccaacgcggacacgcuuugcauuggcuaucacgcuaauaacagcaccgauacaguugacaccgugcuggagaaaaaugugacagucacccauuccgugaaccuccuggaagauaagcacaauagaaaacuuuguaagcugcgcgggguugcuccccuccaucugggaaaaugcaacaucgccggcuggauucuggggaauccugagugugaaucucucagcacagccuccucuuggagcuacaucguggagaccuccucuagcgacaacggaacgugcuauccgggcgauuuuauuaauuacgaggagcugcgggagcagcuuuccagcgucucuuccuucgaaagauuugagaucuuccccaagaccagcucuuggccuaaccacgacuccaauaagggggugacagccgcuuguccccgggccggagcgaaaucuuuuuauaagaaccugaucuggcucguuaaaaagggcaauagcuacccuaaacuguccaagagcuauauuaacgauaagggcaaagaagugcuuguccugugggggauccaucaccccuccaccacagccgaccaacagucucucuaccagaaugcugaugccuacguguucgugggaaccagccgcuauuccaagaaauuuaagccugagauugcuaucagaccgaaaguccgggaccaggagggccgcaugaacuacuauuggacgcugguugaacccggggauaagauuacauucgaggccaccggaaaccugcucgugccuagauacgcguuugccauggaacggaaugcuggcagcgggaucauuaucucugacacacccgugcacgauugcaacaccaccugucaaacaccuaaaggagccaucaauacgucccugcccuuccagaacauucauccgaucaccauuggcaagugcccuaaguaugucaaaagcacaaaacuucgccuggcuaccggccucagaaaugugcccucuauccagagccgggggcuguuuggagccauugccggcuucaucgaagggggauggacaggcaugguugacgggugguacggauaucaccaucagaacgaacaaggcuccggcuacgcugcggaccuuaagucuacccagaaugccaucgauaagauuacgaacaaagugaauagcgucaucgagaagaugaacacacaguuuaccgcuguggggaaggaguucaaucaccuggaaaaacgcauugagaaccucaauaagaaaguugacgauggauuccuggacaucuggaccuacaacgccgaacugcucgugcugcuugagaaugaaagaacacuggauuaucacgacuccaacgucaagaaccucuacgagaaagugcggaaucagcugaagaacaaugccaaggagauuggcaacggguguuuugaguucuaucauaaaugcgauaauaccuguauggaaagcgucaagaacggaacauacgacuauccuaaauacucugaagaggcuaaacuuaaucgcgaagagaucgauggcgugaagcuggaguccacgagaaucuaucaaauucucgccaucuacagcaccguugcgucuucccuggugcuggucgugagccucggggcuauuuccuuuuggaugugcucuaacggcagccugcagugccggaucuguauuuga

SEQ ID NO: 203936 - RNA, 1701 nt, Artificial Sequence; identical to SEQ ID NO: 199122
  derived and/or modified CDS sequence (opt5) from hemagglutinin__InfluenzaA__AHM98798

SEQ ID NO: 203937 - RNA, 1701 nt, Artificial Sequence; identical to SEQ ID NO: 198896
  derived and/or modified CDS sequence (opt5) from hemagglutinin__InfluenzaA__AHM98809

SEQ ID NO: 203938 - RNA, 1701 nt, Artificial Sequence; identical to SEQ ID NO: 198896
  derived and/or modified CDS sequence (opt5) from hemagglutinin__InfluenzaA__AHM98820

SEQ ID NO: 203939 - RNA, 1701 nt, Artificial Sequence; identical to SEQ ID NO: 198896
  derived and/or modified CDS sequence (opt5) from hemagglutinin__InfluenzaA__AHM98831

SEQ ID NO: 203940 - RNA, 1701 nt, Artificial Sequence
  derived and/or modified CDS sequence (opt5) from hemagglutinin__InfluenzaA__AHM98836
augaaggccauccugguggucaugcucuacaccuucgcuacagccaacgcggacacgcugugcauuggcuaucacgcuaauaacagcaccgauacaguugacaccgugcuugagaaaaaugugacagucacccauuccgugaaccugcucgaagauaagcacaaugggaaacuguguaaacuuagaggaguugcuccccugcaucucggcaaaugcaacaucgccggguggauucugggaaauccugagugugaaucucugagcacagccuccucuuggagcuacaucguggagaccuccucuagcgacaacggcacgugcuauccgggggauuuuauugacuacgaagaacuccgggagcagcuguccagcgucucuuccuucgaacgcuuugagaucuuccccaagaccagcucuuggccuaaucacgauuccaacaagggagugacagccgcuuguccccaugccggcgcgaaaggcuuuuauaagaaucuuaucuggcugguuaaaaaggggaacagcuacccuaaacucucuaaguccuauauuaaugacaagggaaaagaagugcugguccuuuggggcauccaccaccccagcaccacagccgaucaacagucccuguaccagaacgcugacaccuacguguucguggggacgucuagauauagcaagaaauuuaagccugagauugccauccggccgaaaguccgcgaucaggagggaagaaugaauuacuauuggauucucguugaacccggcgacaagaucacauucgaggcuaccgggaaccugguggugccucgguacgccuuugcgauggaacgcaacgccggauccggcauuaucaucagcgauacacccguccaugacugcaauaccaccugucaaacaccuaaaggcgcuauuaacacgucucugcccuuccagaauauccacccgauuaccaucgggaagugcccuaaguaugugaaauccacaaagcucagacuggccaccggacuucggaacguucccagcauucagucucgcggccuguuuggggcuaucgccggauucaucgagggcggguggacaggaaugguggacggcugguacggcuaucaucaccagaaugaacaagggagcggauacgccgcugaucucaaauccacccagaacgcgauugacaagaucacgaauaaagucaacucugugauugagaagaugaauacacaguuuaccgccguuggcaaggaguucaaccaccuggaaaagagaaucgagaaucuuaacaagaaaguggaugacggguuccuggauauuuggaccuacaaugcugaacuccugguccugcucgagaacgaacggacacuggacuaucaugauagcaaugugaagaaccuuuacgagaaaguccgcaaccagcugaagaauaacgccaaggagaucggaaauggcuguuuugaguucuaucacaaaugcgacaacaccuguauggaguccgugaagaaugggacauacgauuauccuaaauacagcgaagaggccaagcucaacagagaagagaucgacggcguuaaacuggagucuacgcggauuuaucaaauccuugcuauuuacuccaccguggccagcucucugguccucgugguuucccugggagcgaucagcuuuuggaugugcuccaauggcucucugcagugccgcauuuguaucuga

SEQ ID NO: 203941 - RNA, 1701 nt, Artificial Sequence
  derived and/or modified CDS sequence (opt5) from hemagglutinin__InfluenzaA__AHM98847
augaaggccauccugguggucaugcucuacaccuucgcuacagccaacgcggacacgcugugcauuggcuaucacgcuaauaacagcaccgauacaguugacaccgugcuugagaaaaaugugacagucacccauuccgugaaccugcucgaagauaagcacgacgggaaacuguguaaacuuagaggaguugcuccccugcaucucggcaaaugcaauaucgccggguggauucugggaaacccugagugugaaucucugagcacagccuccucuuggagcuacaucguggagaccuccucuagcgauaauggcacgugcuauccgggggacuuuauugauuacgaagaacuccgggagcagcuguccagcgucucuuccuucgaacgcuuugagaucuuccccaagaccagcucuuggccuaaccacgacuccaauaagggagugacagccgcuuguccccaugccggcgcgaaaggcuuuuauaagaaccuuaucuggcugguuaaaaaggggaauagcuacccuaaacucucuaaguccuauauuaacgauaagggaaaagaagugcugguccuuuggggcauccaccaccccagcaccacagccgaccaacagucccuguaccagaaugcugauaccuacguguucguggggacgucuagauauagcaagaaauuuaagccugagauugccauccggccgaaaguccgcgaccaggagggaagaaugaacuacuauuggacacucguugaacccggcgauaagauuaccuucgaggcuacagggaaucugguggugccucgguacgccuuugcgauggaacgcaacgccggauccggcaucauuaucagcgacacccccguccaugacugcaacaccacaugucaaacgccuaaaggcgcuaucaauaccucucugcccuuccagaacauucacccgaucacaauugggaagugcccuaaguaugugaaauccaccaagcucagacuggccacaggacuucggaauguucccagcauccagucucgcggccuguuuggggcuauugccggauucaucgagggcggguggaccggaaugguggauggcugguacggcuaucaucaccagaacgaacaagggagcggauacgccgcugaccucaaauccacgcagaaugcgaucgauaagauuacaaacaaagucaauucugugaucgagaagaugaacacccaguuuaccgccguuggcaaggaguucaaucaccuggaaaagagaauugagaaccuuaauaagaaaguggacgauggguuccuggacaucuggacauacaacgcugaacuccugguccugcucgagaaugaacggacccuggauuaucaugacagcaacgugaagaaucuuuacgagaaaguccgcaaccagcugaagaacaaugccaaggagauuggaaacggcuguuuugaguucuaucacaaaugcgauaauacauguauggaguccgugaagaacgggacguacgacuauccuaaauacagcgaagaggccaagcucaauagagaagagaucgauggcguuaaacuggagucuacccggaucuaucaaauucuugcuaucuacuccacaguggccagcucucugguccucgugguuucccugggagcgauuagcuuuuggaugugcuccaacggcucucugcagugccgcaucuguauuuga

SEQ ID NO: 203942 - RNA, 1701 nt, Artificial Sequence; identical to SEQ ID NO: 198896
  derived and/or modified CDS sequence (opt5) from hemagglutinin__InfluenzaA__AHM98858

SEQ ID NO: 203943 - RNA, 1701 nt, Artificial Sequence; identical to SEQ ID NO: 198939
  derived and/or modified CDS sequence (opt5) from hemagglutinin__InfluenzaA__AHM98877

SEQ ID NO: 203944 - RNA, 1701 nt, Artificial Sequence
  derived and/or modified CDS sequence (opt5) from hemagglutinin__InfluenzaA__AHM98898
augaaggccauccuggugguccuccuguacaccuucgcuacagccaacgcggacacgcuuugcauuggcuaucacgcuaauaacagcaccgauacaguugacaccgugcuggagaagaaugugacagucacccauuccgugaaccuccuggaagauaaucacaacgggaaacuuuguaagcugagaggaguugcgccccuccaucugggcaagugcaauaucgccggguggauucugggaaacccugagugugaaucucucagcacagcuuccucuuggagcuacaucguggagaccuccucuagcgacaauggcacgugcuauccgggggauuuuauuaacuacgaagaacugcgggagcagcuuuccagcgucucuuccuucgaacgcuuugagaucuuccccaaaaccagcucuuggccuaaucacgacuccaacaagggagugacagccgcuuguccccaugccggcgccaagagcuuuuauaaaaaucugaucuggcucguuaagaaaggcaacucuuacccuaagcuguccaaaagcuauauuaaugauaaggggaaggaagugcuuguccuguggggaauccaccaccccuccaccacagccgaccaacagucucucuaccagaacgcugaugccuacguguucgugggcaccagcagauauuccaaaaaguuuaaaccugagauugcuauccggccgaagguccgcgaccaggaggggagaaugaacuacuauuggacgcugguugaacccggagauaaaauuacauucgaggccaccggcaaucugguggugccucgguacgcguuugccauggaacgcaacgcugggagcggaaucauuaucucugacacacccguccaugauugcaauaccaccugucaaacaccuaagggcgccaucaacacgucccuccccuuccagaauauucacccgaucaccauuggcaaaugcccuaaguauguuaagagcacaaaacugagacuugcuaccgggcugcggaacgugcccucuauccagagccgcggacucuuuggcgccauugccggguucaucgagggaggcuggacagggaugguggacggaugguacggcuaucaucaccagaaugaacaaggcuccggguacgcugcggaccugaagucuacccagaacgccaucgauaaaauuacgaauaaggucaacagcgugaucgagaaaaugaauacacaguuuaccgcuguuggaaaggaguucaaccaccuugaaaagagaauugagaaucugaacaaaaagguggacgauggcuuccucgacaucuggaccuacaaugccgaacugcugguccuccuggagaacgaacggacacuugauuaucaugacuccaacgugaaaaaucuguacgagaagguccgcaaccagcucaaaaauaacgccaaggagauugggaauggauguuuugaguucuaucacaagugcgauaacaccuguauggagagcgugaaaaauggcacauacgacuauccuaaguacucugaagaggcuaaacugaacagagaagagaucgaugggguuaaacuugaguccacgcggaucuaucaaauucuggccaucuacagcaccguggcgucuucccucguccuggugguuagccugggcgcuauuuccuuuuggaugugcucuaauggaagccuccagugccgcaucuguauuuga

SEQ ID NO: 203945 - RNA, 1701 nt, Artificial Sequence; identical to SEQ ID NO: 202522
  derived and/or modified CDS sequence (opt5) from hemagglutinin__InfluenzaA__AHM98909

SEQ ID NO: 203946 - RNA, 1701 nt, Artificial Sequence
  derived and/or modified CDS sequence (opt5) from hemagglutinin__InfluenzaA__AHM98932
augaaggccauccuggugguccuccuguacaccuucgcuacagccaacgcggacacgcuuugcauuggcuaucacgcuaauaacagcaccgauacaguugacaccgugcuggagaagaaugugacagucacccauuccgugaaccuccuggaagauaagcacaaugggaaacuuuguaagcugggaggcguugcuccccuccaucuggggaaaugcaacaucgccggauggauucugggcaauccugagugugaaucucucagcacagccuccucuuggagcuacaucguggagaccuccucuagcgacaacgggacgugcuauccgggagauuuuauugacuacgaagaacugagagagcagcuuuccagcgucucuuccuucgaacgguuugagaucuuccccaagaccagcucuuggccuaaucacgauuccaacaagggcgugacagccgcuuguccccaugccggcgcgaaaucuuuuuauaagaaucugaucuggcucguuaaaaagggggacagcuacccuaaacuguccaagagcuauauuaacgauaagggaaaagaagugcuuguccuguggggcauccaccaccccuccaccucugccgaccaacagagccucuaccagaaugcugaugccuacguguucgugggguccagccgcuauucuaagaaauuuaagccugagauugcuaucagaccgaaaguccgggaccgcgagggaagaaugaacuacuauuggacacugguugaacccggcgauaagauuaccuucgaggccacggggaaucugguggugccucgguacgcguuugccauggaacgcaacgcuggauccggcaucauuaucagcgacacacccguccaugacugcaacaccacaugucagaccccuaaaggcgccaucaauaccucucuccccuuccaaaacauucacccgaucacaauugggaagugcccuaaguaugugaaaagcacgaagcugagacuugcuaccggacugcggaauguucccuccauccagucucgcggccucuuuggggccauugccggauucaucgagggcggguggacaggaaugguggauggcugguacggcuaucaucaccagaacgaacaggggagcggauacgcugcggaccugaaauccacccaaaaugccaucgaugagauuacaaacaaggucaauagcgugaucgagaaaaugaacacccaguuuacggcuguuggcaaggaguucaaucaccuugagaagagaauugaaaaccugaauaaaaagguggacgauggguuccucgacaucuggacauacaacgccgagcugcugguccuccuggaaaaugagcggacccuugauuaucaugacucuaacgugaaaaaucuguacgagaagguccgcucccagcucaaaaacaacgccaaggaaauuggaaauggcuguuuugaguucuaucacaagugcgauaacaccuguauggaaagcgugaaaaaugggacauacgacuauccuaaguacucugaggaagcuaaacugaacagagaggagaucgauggcguuaaacuugaauccacccggaucuaucagauucuggccaucuacagcacaguggcguccucucucguccuggugguuagccugggagcuauuuccuuuuggaugugcucuaauggcagccuccaaugccgcaucuguauuuga

SEQ ID NO: 203947 - RNA, 1701 nt, Artificial Sequence; identical to SEQ ID NO: 203946
  derived and/or modified CDS sequence (opt5) from hemagglutinin__InfluenzaA__AHM98940

SEQ ID NO: 203948 - RNA, 1701 nt, Artificial Sequence; identical to SEQ ID NO: 203946
  derived and/or modified CDS sequence (opt5) from hemagglutinin__InfluenzaA__AHM98951

SEQ ID NO: 203949 - RNA, 1701 nt, Artificial Sequence
  derived and/or modified CDS sequence (opt5) from hemagglutinin__InfluenzaA__AHM98975
augaaggccauccuggugguccuccuguacaccuucgcuacagccaacgcggacacgcuuugcauuggcuaucacgcuaauaacagcaccgauacaguugacaccgugcuggagaaaaaugugacagucacccauuccgugaaccuccuggaagauaagcacaaugggaaacuuuguaagcugagaggaguugcuccccuccaucugggcaaaugcaacaucgccggguggauucugggaaauccugagugugaaucucucagcacagccuccucuuggagcuacaucguggagaccuccucuagcgacaacggcacgugcuauccgggggauuuuauugacuacgaagaacugcgggagcagcuuuccagcgucucuuccuucgaacgcuuugagaucuuccccaagaccagcucuuggccuaaucacgaauccaacaagggagugacagccgcuuguccccaugccggcgcgaaaucuuuuuauaagaaucugaucuggcucguuaaaaagggcaacagcuacccuaaacuguccaagagcuauauuaaugauaaggggaaagaggugcuuguccuguggggaauccaccaccccuccaccucugccgaccaacagagccucuaccagaacgcugaugccuacguguucgugggcuccagcagauauucuaagaaauuuaagccugagauugcuauccggccgaaaguccgcgaccaggaagggagaaugaauuacuauuggacacugguugagcccggagauaagauuaccuucgaagccacgggcaaccugguggugccucgguacgcguuugccauggagcgcaacgcuggguccggaaucauuaucagcgacacacccguccaugauugcaauaccacaugucaaaccccuaaaggcgccaucaacaccucucuccccuuccagaauauucacccgaucacaauuggcaagugcccuaaguaugugaaaagcacgaagcugagacuugcuaccgggcugcggaacguucccuccauccagucucgcggacucuuuggcgccauugccggguucaucgaaggaggcuggacagggaugguggacggaugguacggcuaucaucaccagaaugagcaaggcagcggguacgcugcggaccugaaauccacccagaacgccaucgaugagauuacaaauaaggucaacagcgugaucgaaaagaugaauacccaguuuacggcuguuggaaaggaguucaaccaccuugaaaagagaauugagaaucugaacaaaaagguggacgauggcuuccucgacaucuggacauacaaugccgaacugcugguccuccuggagaacgagcggacccuugauuaucaugacucuaaugugaaaaaccuguacgaaaagguccgcucccagcucaaaaacaaugccaaggagauugggaacggauguuuugaguucuaucacaagugcgauaauaccuguauggagagcgugaaaaacggcacauacgacuauccuaaguacucugaagaggcuaaacugaauagagaggaaaucgaugggguuaaacuugaguccacccggaucuaucaaauucuggccaucuacagcacaguggcguccucucucguccuggugguuagccugggcgcuauuuccuuuuggaugugcucuaacggaagccuccagugccgcaucuguauuuga

SEQ ID NO: 203950 - RNA, 1701 nt, Artificial Sequence
  derived and/or modified CDS sequence (opt5) from hemagglutinin__InfluenzaA__AHM98997
augaaggccauccuggugguccuccuguacaccuucgcuacagccaacgcggacacgcuuugcauuggcuaucacgcuaauaacagcaccgauacaguugacaccgugcuggagaagaaugugacagucacccauuccgugaaccuccuggaagauaagcacaaugggaaacuuuguaagcugagaggaguugcuccccuccaucugggcaaaugcaacaucgccggguggauucugggaaauccugagugugaaucucucagcacagccuccucuuggagcuacaucguggagaccuccucuagcgacaacggcacgugcuauccgggggauuuuauugacuacgaagaacugcgggagcagcuuuccagcgucucuuccuucgaacgcuuugagaucuuccccaagaccagcucuuggccuaaucacgauuccaacaagggagugacagccgcuuguccccaugccggcgcgaaaucuuuuuauaagaaucugaucuggcucguuaaaaagggcgacagcuacccuaaacuguccaagagcuauauuaacgauaaggggaaagaagugcuuguccuguggggaauccaccaccccuccaccucugccgaccaacagagccucuaccagaaugcugaugccuacguguucgugggcuccagcagauauucuaagaaauuuaagccugagauugcuauccggccgaaaguccgcgggcaggagggaagaaugaacuacuauuggacacugguugaacccggcgacaagauuaccuucgaggccacggggaaucugguggugccucgguacgcguuugccauggaacgcaacgcuggauccggcaucauuaucagcgauacacccguccaugacugcaacaccacaugucaaaccccuaaaggcgccaucaauaccucucuccccuuccagaacauucacccgaucacaauugggaagugcccuaaguaugugaaaagcacgaagcugagacuugcuaccggacugcggaauguucccuccauccagucucgcggccucuuuggggccauugccggauucaucgagggcggguggacaggaaugguggacggcugguacggcuaucaucaccagaacgaacaagggagcggauacgcugcggaucugaaauccacccagaaugccaucgacgagauuacaaacaaggucaauagcgugaucgagaaaaugaacacccaguuuacggcuguuggcaaggaguucaaucaccuugagaagagaauugaaaaccugaauaaaaagguggaugacggguuccucgauaucuggacauacaacgccgagcugcugguccuccuggaaaaugagcggacccuugacuaucaugauucuaacgugaaaaaucuguacgagaagguccgcucccagcucaaaaacaacgccaaggaaauuggaaauggcuguuuugaguucuaucacaagugcgacaacaccuguauggaaagcgugaaaaaugggacauacgauuauccuaaguacucugaggaagcuaaacugaacagagaggagaucgacggcguuaaacuugaauccacccggaucuaucaaauucuggccaucuacagcacaguggcguccucucucguccuggugguuagccugggagcuauuuccuuuuggaugugcucuaauggcagccuccagugccgcaucuguauuuga

SEQ ID NO: 203951 - RNA, 1701 nt, Artificial Sequence
  derived and/or modified CDS sequence (opt5) from hemagglutinin__InfluenzaA__AHM99019
augaaggccauccuggugguccuccuguacaccuucgcuacagccaacgcggacacgcuuugcauuggcuaucacgcuaauaacagcaccgauacaguugacaccgugcuggagaaaaaugugacagucacccauuccgugaaccuccuggaagauaagcacaaugggaaacuuuguaagcugaaaggaguugcgccccuccaucugggcaagugcaacaucgccggguggauucugggaaauccugagugugaaucucucagcacagcuuccucuuggagcuacaucguggagaccuccucuagcgacaacggcacgugcuauccgggggauuuuauugacuacgaagaacugagagagcagcuuuccagcgucucuuccuucgaacgguuugagaucuuccccaagaccagcucuuggccuaaucacgauuccaacaaaggagugacagccgcuuguccccaugccggcgccaagagcuuuuauaaaaaucugaucuggcucguuaagaaaggcgacucuuacccuaagcuguccaagagcuauauuaacgauaaagggaaggaagugcuuguccuguggggaauccaccaccccuccaccucugccgaccaacagagccucuaccagaaugcugaugccuacguguucgugggcuccagccgcuauucuaaaaaguuuaaaccugagauugcuaucagaccgaagguccgggggcaggagggacgcaugaacuacuauuggacacugguugaacccggcgacaaaauuaccuucgaggccacggggaaucugguggugccuagauacgcguuugccauggaacggaacgcuggauccggcaucauuaucagcgauacacccguccaugacugcaacaccacaugucaaaccccuaagggcgccaucaauaccucucuccccuuccagaacauucacccgaucacaauugggaagugcccuaaauauguuaagagcacgaaacugcgccuugcuaccggacugagaaaugugcccuccauccagucucggggccucuuuggggccauugccggauucaucgagggcggguggacaggaaugguggacggcugguacggcuaucaucaccagaacgaacaagggagcggauacgcugcggaucugaaguccacccagaaugccaucgacgagauuacaaacaaagucaauagcgugaucgagaagaugaacacccaguuuacggcuguuggcaaggaguucaaucaccuugagaaacgcauugaaaaccugaauaagaaaguggaugacggguuccucgauaucuggacauacaacgccgagcugcugguccuccuggaaaaugagagaacccuugacuaucaugauucuaacgugaagaaucuguacgagaaaguccggucccagcucaagaacaacgccaaggaaauuggaaauggcuguuuugaguucuaucacaaaugcgacaacaccuguauggaaagcgugaagaaugggacauacgauuauccuaaauacucugaggaagcuaagcugaaccgcgaggagaucgacggcguuaaacuugaauccaccagaaucuaucaaauucuggccaucuacagcacaguggcguccucucucguccuggugguuagccugggagcuauuuccuuuuggaugugcucuaauggcagccuccagugccggaucuguauuuga

SEQ ID NO: 203952 - RNA, 1701 nt, Artificial Sequence; identical to SEQ ID NO: 203951
  derived and/or modified CDS sequence (opt5) from hemagglutinin__InfluenzaA__AHM99031

SEQ ID NO: 203953 - RNA, 1701 nt, Artificial Sequence; identical to SEQ ID NO: 203951
  derived and/or modified CDS sequence (opt5) from hemagglutinin__InfluenzaA__AHM99043

SEQ ID NO: 203954 - RNA, 1701 nt, Artificial Sequence; identical to SEQ ID NO: 203951
  derived and/or modified CDS sequence (opt5) from hemagglutinin__InfluenzaA__AHM99054

SEQ ID NO: 203955 - RNA, 1701 nt, Artificial Sequence; identical to SEQ ID NO: 203951
  derived and/or modified CDS sequence (opt5) from hemagglutinin__InfluenzaA__AHM99065

SEQ ID NO: 203956 - RNA, 1701 nt, Artificial Sequence
  derived and/or modified CDS sequence (opt5) from hemagglutinin__InfluenzaA__AHM99075
augaaggccauccuggugguccuccuguacaccuucgcuacagccaacgcggacacgcuuugcauuggcuaucacgcuaauaacagcaccgauacaguugacaccgugcuggagaagaaugugacagucacccauuccgugaaccuccuggaagauaagcacaaugggaaacuuuguaagcugagaggaguugcuccccuccaucugggcaaaugcaacaucgccggguggauucugggaaauccugagugugaaucucucagcacagccuccucuuggagcuacaucguggagaccuccucuagcgacaacggcacgugcuauccgggggauuuuauugacuacgaagaacugcgggagcagcuuuccagcgucucuuccuucgaacgcuuugagaucuuccccaagaccagcucuuggccuaaucacgauuccaacaagggagugacagccgcuuguccccaugccggcgcgaaaucuuuuuauaagaaucugaucuggcucguuaaaaagggcgacagcuacccuaaacuguccaagagcuauauuaacgauaaggggaaagaagugcuuguccuguggggaauccaccaccccuccaccucugccgaccaacagagccucuaccagaaugcugaugccuacguguucgugggcuccagcagauauucuaagaaauuuaagccugagauugcuauccggccgaaaguccgcgaccaggaggggagaaugaacuacuauuggacacugguugaacccggagauaagauuaccuucgaggccacgggcaaucugguggugccucgguacgcguuugccauggaacgcaacgcuggguccggaaucauuaucagcgacacacccguccaugacugcaacaccacaugucaaaccccuaaaggcgccaucaauaccucucuccccuuccagaacauucacccgaucacaauuggcaagugcccuaaguaugugaaaagcacgaagcugagacuugcuaccgggcugcggaauguucccuccauccagucucgcggacucuuuggcgccauugccggguucaucgagggaggcuggacagggaugguggauggaugguacggcuaucaucaccagaacgaacaaggcagcggguacgcugcggaccugaaauccacccagaaugccaucgaugagauuacaaacaaggucaauagcgugaucgagaaaaugaacacccaguuuacggcuguuggaaaggaguucaaucaccuugagaagagaauugaaaaccugaauaaaaagguggacgauggcuuccucgacaucuggacauacaacgccgagcugcugguccuccuggaaaaugagcggacccuugauuaucaugacucuaacgugaaaaaucuguacgagaagguccgcucccagcucaaaaacaacgccaaggaaauugggaauggauguuuugaguucuaucacaagugcgauaacaccuguauggaaagcgugaaaaauggcacauacgacuauccuaaguacucugaggaagcuaaacugaacagagaggagaucgaugggguuaaacuugaauccacccggaucuaucaaauucuggccaucuacagcacaguggcguccucucucguccuggugguuagccugggcgcuauuuccuuuuggaugugcucuaauggaagccuccagugccgcaucuguauuuga

SEQ ID NO: 203957 - RNA, 1701 nt, Artificial Sequence
  derived and/or modified CDS sequence (opt5) from hemagglutinin__InfluenzaA__AHN00717
augaaggccauccugcucgugcugcuuugcaccuucgcugccacaaacgcggacacgcuguguauuggcuaccacgcuaauaacagcaccgauacagucgacaccguucucgagaaaaaugugacagugacccauuccgucaaccugcuugaagauagacacaaugggaagcugugcaaacucggaggcaucgcuccccugcaucuggggaaguguaacauugccggauggcuccugggcaauccugagugcgaacuucuguuuacagugucuagcugguccuauaucguugagaccucuaacagcgacaaugggacguguuacccgggagauuucauuaacuaugaggaacuccgggagcagcuguccucugugagcuccuuugaacgcuucgagaucuuucccaaaaccagcucuuggccuaaucacgaaacaaacagaggcgucaccgccgccugccccuacgcuggcgccaauuccuucuaucggaaccuuaucuggcuggugaagaaggggaauagcuacccuaaacucucuaaguccuauguuaacaacaaaggaaaggaggugcugguccuguggggcauucaucaucccccuacaagcaccgaccaacagucucucuaccagaaugcggaugccuacguguuugugggguccagcaaauauaaccgcaaguucaagccggagaucgcugccagacccaaaguccggggacaggcuggccgcaugaauuacuauuggacgcugauugaaccuggggacacaaucaccuuugaggccacaggaaaccuuguugugcccagauacgcguucgccaugaaucggggcccuggcuccgggauuaucauuucugaugcucccgugcacgacuguaacacaaccugccaaaccccgaagggagccaucaauacgagccugccuuuucagaacauccaccccgucaccauuggcgaauguccuaaauaugugaaguccacaaaacuccgcauggcuaccgggcugagaaauauccccagcauucagucucggggacuuuucggcgccaucgccggguuuauugagggaggcuggacaggcaugaucgaugggugguacggauaucaccaucagaacgaacaaggcuccggguacgcugcggaccaaaagagcacccagaaugccaucgauggaauuacgaacaaaguuaauucugugaucaagaagaugaacacacaguucaccgcugucggcaaagaguucaaucaccuggagaagcgcauugaaaaccucaacaaaaagguggacgacggguuucuggauguuuggaccuacaaugccgagcugcucgugcugcuugaaaacgagagaacacuggacuuccacgauagcaaugucaaaaaccucuaugaaaaggugcggucccagcugcgcaauaacgccaaggagaucggcaauggaugcuuugaguucuaccauaaaugugacgauaccugcauggaaucugucaagaacggcacauaugacuaccccaaauauagcgaggaauccaaacuuaauagagaggaaauugauggggugaagcuggagagcacgcggaucuaccagauccucgcuauuuauucuaccgccgcguccagccugguucugcucgugucucugggagcuaucuccuuuuggaugugcagcaacggcucccuucaguguagaauuugcaucuga

SEQ ID NO: 203958 - RNA, 1701 nt, Artificial Sequence
  derived and/or modified CDS sequence (opt5) from hemagglutinin__InfluenzaA__AHN00764
augaaggccauccugcucgugcugcuuugcaccuucgcugccacaaacgcggacacgcuguguauuggcuaccacgcuaauaacagcaccgauacagucgacaccguucucgagaaaaaugugacagugacccauuccgucaaccugcuugaagauaagcacaaugggaaacugugcaagcucggaggcaucgcuccccugcaucuggggaaauguaacauugccggauggcuccugggcaauccugagugcgaacuucuguuuacagugucuagcugguccuauaucguugagaccucuaacagcgacaaugggacguguuacccgggagauuucauuaacuaugaggaacucagagagcagcuguccucugugagcuccuuugaacgguucgagaucuuucccaagaccagcucuuggccuaaucacgaaacaaaccgcggcgucaccgccgccugccccuacgcuggcgccaauuccuucuauagaaaccuuaucuggcuggugaagaaagggaauagcuacccuaagcucucuaaauccuauguuaacaacaagggaaaagaggugcugguccuguggggcauucaucaucccccuacaagcaccgaccaacagucucucuaccagaaugcggaugccuacguguuugugggguccagcaaguauaaccggaaguucaaaccggagaucgcugcccgccccaaggucagaggacaggcuggccggaugaauuacuauuggacgcugauugaaccuggggacacaaucaccuuugaggccacaggaaaccuuguugugccccgcuacgcguucgccaugaauagaggcccuggcuccgggauuaucauuucugaugcucccgugcacgacuguaacacaaccugccaaaccccgaaaggagccaucaauacgagccugccuuuucagaacauccaccccgucaccauuggcgaauguccuaaguaugugaaauccacaaagcuccggauggcuaccgggcugcgcaauauccccagcauucagucuagaggacuuuucggcgccaucgccggguuuauugagggaggcuggacaggcaugaucgaugggugguacggauaucaccaucagaacgaacaaggcuccggguacgcugcggaccagaaaagcacccagaaugccaucgauggaauuacgaacaagguuaauucugugaucaagaaaaugaacacacaguucaccgcugucggcaaggaguucaaucaccuggagaaacggauugaaaaccucaacaagaaaguggacgacggguuucuggauguuuggaccuacaaugccgagcugcucgugcugcuugaaaacgagcgcacacuggacuuccacgauagcaaugucaagaaccucuaugaaaaggugagaucccaacugcggaauaacgccaaagagaucggcaauggaugcuuugaguucuaccauaagugugacgauaccugcauggaaucugucaaaaacggcacauaugacuaccccaaguauagcgaggaauccaaacuuaaucgcgaggaaauugauggggugaagcuggagagcacgagaaucuaccagauccucgcuauuuauucuaccgccgcguccagccugguucugcucgugucucugggagcuaucuccuuuuggaugugcagcaacggcucccuucagugucggauuugcaucuga

SEQ ID NO: 203959 - RNA, 1683 nt, Artificial Sequence
  derived and/or modified CDS sequence (opt5) from hemagglutinin__InfluenzaA__AHN96323
augaacacccagauccugguguucgcccucauugcuaucauucccacaaaugccgacaagaucugccugggccaccaugcggucagcaacgggacgaaaguuaauacccuuacagagagaggaguggaaguggucaacgcuaccgagacaguggaacggaccaauauuccucgcaucuguuccaagggcaaaagaacaguugaucuggggcaaugcggacuccugggcaccaucacggggccgccccagugugaccaguuucuugaguucucugccgaucugauuaucgaacggcgcgagggaagcgacgugugcuacccuggcaaguuugucaacgaggaagcccucagacagauucugcgggaguccggcgggaucgauaaagaagcuaugggauucaccuauucuggcauucgcacaaauggggccaccagcgcuuguagacgguccggaucuagcuuuuacgccgagaugaaguggcugcucuccaacacagacaaugcggccuucccccaaaugaccaagagcuauaaaaacacgcgcaagucuccugcucugaucguguggggcauucaccauuccguuagcacagccgagcagaccaaacuuuacgggucuggaaauaagcuggugacagucggcuccagcaacuaucagcagucuuuugugcccuccccuggcgcuagaccgcaagugaaugggcucagcggacggaucgauuuccacuggcugaugcuuaaccccaaugacaccgucaccuuuuccuucaacggcgccuuuaucgcgccugaucgcgccucuuuccugagagggaaaagcaugggcauucaguccggaguucagguggacgcuaacugcgaaggggauuguuaccauagcggaggcacaaucauuucuaaucuccccuuucagaacaucgacucccgggccgugggcaagugcccucgcuaugucaagcaaagaagccugcugcucgcuacggggaugaaaaaugugcccgagauuccgaagggacggggccuguucggggccaucgccggauucaucgaaaacggcugggaggggcuuauugauggcugguacggauuuagacaccagaaugcucagggcgaagggaccgcggccgacuacaaaucuacacaaagcgcuaucgaccagauuaccggaaagcugaaccgccucaucgagaaaacaaaucagcaguucgagcugauugauaacgaauuuaaugagguugaaaagcaaaucggcaacgugaucaauuggacccgggacuccauuacggaggucuggucuuauaacgccgaacuucugguggccauggagaaucagcacacaaucgaucucgcugacagcgagauggauaaacuguacgaaagaguuaagcgccagcugcgggagaacgccgaagaggacgggaccggauguuucgaaauuuuucauaagugcgaugacgauuguauggcguccaucagaaauaacaccuaugaccacagcaaauaccgcgaggaggcuaugcagaaccggauucaaaucgauccugugaagcucucuuccggcuauaaagacgucauucugugguucagcuuuggggccucuugcuucauccuucuggccaucgugaugggccucgucuuuauuugcgugaagaauggaaacaugagauguacaaucggcauuuga

SEQ ID NO: 203960 - RNA, 1701 nt, Artificial Sequence; identical to SEQ ID NO: 199054
  derived and/or modified CDS sequence (opt5) from hemagglutinin__InfluenzaA__AHN96442

SEQ ID NO: 203961 - RNA, 1701 nt, Artificial Sequence
  derived and/or modified CDS sequence (opt5) from hemagglutinin__InfluenzaA__AHN96443
augaagaccaucauugcccugagcuacauccucugccugguguucgcucagaaacuucccggcaacgacaauuccacagccacgcugugucucgggcaccaugcggucccuaacggaaccauuguuaagacaaucaccaaugaucaaauugaggugacaaacgcuaccgaacuggugcagucuagcuccacaggcgagaucugcaauucuccgcaccagauccuugacggggaaaacuguacccugauugaugcccuccugggagacccccagugcgauggcuuucaaaauaaaaagugggaccuguucgucgagagaagcaaagcccauuccaacuguuauccuuacgaugugcccgacuauacgucucuccggagccugguugcuuccagcgggacccuugaauuuaauaacgagucuuucaauuggacaggagugacccagaacggcacauccagcgccugcauccgcagaucuaauaacuccuuuuucagccggcugaauuggcucacccaccugaacuuuaaguacccugcucuuaacgucacgaugcccaauaacgagcaguucgauaagcuguauauuuggggcgugcaucacccugggacagacaaagaucagaucuuucucuacgcccaagcgucuggacgcauuaccguuuccacaaagagaagccagcaggccgugaucccgaauauuggcucccggccccgcgucagaaacaucccuucucgggugagcaucuauuggaccauugugaaacccggggacauccugcugauuaauuccaccggaaaccucaucgcuccucgcggcuacuucaagauuagaagcgggaaaucuuccaucaugcggagcgaugcccccaucggaaaguguaauucugcuugcauuacaccgaacggcagcaucccuaaugacaagcccuuucagaacgucaaucgcauuacguacggcgccuguccuagauauguuaaacaaaacacccugaaacuugcgacagggaugcggaaugugcccgaaaaacagacccgcggaaucuucggcgccauugcuggguuuaucgagaacggaugggaaggcaugguggacgggugguacggauucagacaccaaaauuccgagggccggggccaggccgcugaucugaagucuacacaggccgccaucgaccagauuaacgggaaacucaacagacugaucggaaagaccaaugagaaauuccaucagauugaaaaggaguuuagcgaagucgagggccgcauccaagaucuugaaaaguauguggaggacacgaaaauugaucugugguccuacaacgcugagcuccugguugcgcuggaaaaucagcacacaaucgaccucaccgauagcgagaugaacaagcuguucgaaaagaccaagaaacagcuucgggagaaugccgaagacauggggaacggaugcuuuaagauuuaucauaagugugauaaugcuugcaucggcucuaucagaaacgggacauacgaccacgauguguaucgcgacgaggcccugaauaaccgguuccagauuaaaggcgucgagcucaaguccggauacaaagacuggauccuguggauuagcuuugccaucucuugcuuccuucuguguguggcucuccugggcuuuauuaugugggccugccaaaaggggaauaucagauguaacaucugcauuuga

SEQ ID NO: 203962 - RNA, 1701 nt, Artificial Sequence
  derived and/or modified CDS sequence (opt5) from hemagglutinin__InfluenzaA__AHN96444
augaagaccaucauugcccugagcuacauccucugccugguguucgcucagaaacuucccggcaacgacaauuccacagccacgcugugucucgggcaccaugcggucccuaacggaaccauuguuaagacaaucaccaaugauagaauugaggugacaaacgcuaccgaacuggugcaaaauucuagcaucggcgagaucugcgacuccccgcaccagauucuugauggggaaaacuguacacugaucgacgcccuccugggagauccccagugcgacggcuuucagaauaaaaagugggaucuguucgucgagcggucuaaagccuauagcaacuguuacccuuaugacgugcccgauuacgcuucccuccgcucucugguugccagcuccgggacccuugaauuuaauaacgagagcuucaauuggacgggagugacccaaaacggcacaucuuccgcuugcauuagacggagcaauaacuccuuuuucucucgccugaauuggcucacccaucugaacuuuaaguauccugcccuuaacgucacaaugcccaauaaccagcaguucgacaagcuguacaucuggggcgugcaccauccugggaccgauaaagaccagauuuuucucuaugcgcaaagcucuggaagaaucacgguuuccacaaagcggagccagcaggccgugauuccgaauaucggcucccgccccagaauccggaacauuccuucucgcaucagcauuuacuggaccaucgucaaacccggggauauucugcugaucaauuccacaggaaaccucaucgcuccuagaggcuacuucaagauucggagcgggaaaucuuccaucaugcgcagcgacgcccccauuggaaaguguaagucugagugcaucaccccgaauggcagcauuccuaacgacaaacccuuucagaaugugaacagaaucaccuauggcgcuuguccucgguacgugaagcaauccacacugaaacuugccacggggaugcgcaauguccccgaaaagcagaccagaggaaucuucggcgcgauugccggguuuaucgagaacggaugggaaggcaugguugaugggugguauggauuccggcaccaaaauucugagggcagaggccaggcugccgaccugaaaagcacacaggcugccauugaucagaucaacgggaagcucaaucgccugauuggaaaaaccaacgagaaguuccaccagaucgaaaaggaguuuuccgaaguggagggccggauucaagaccuugaaaaauacguggaggauacaaagaucgaccuguggagcuauaacgccgagcuccuggucgcucuggaaaaucagcauaccaucgaucucacggacucugagaugaacaaacuguucgaaaagaccaaaaagcagcuuagagagaaugcggaagauauggggaacggaugcuuuaagauuuaccacaaaugugacaaugccugcaucggcuccauucgcaacgggacauaugaucaugacguguaccgggacgaggcucugaauaacagauuccagaucaagggcauugagcucaaaagcggauacaaggauuggauccuguggaucucuuuugccauuuccugcuuccuucuguguguugcccuccugggcuuuaucaugugggcuugccaaaaagggaauauucgcuguaacaucugcauuuga

SEQ ID NO: 203963 - RNA, 1701 nt, Artificial Sequence
  derived and/or modified CDS sequence (opt5) from hemagglutinin__InfluenzaA__AHN96445
augaagaccaucauugcccugagcuacauccucugccugguguucgcucagaaacuucccggcaacgacaauuccacagccacgcugugucucgggcaccaugcggucccuaacggaaccauuguuaagacaaucaccaaugauagaauugaggugacaaacgcuaccgaacuggugcaaaauucuagcaucggcgagaucugcgacuccccgcaccagauucuugauggggaaaacuguacacugaucgacgcccuccugggagauccccagugcgacggcuuucagaauaaaaagugggaucuguucgucgagcggucuaaagccuauagcaacuguuacccuuaugacgugcccgauuacgcuucccuccgcucucugguugccagcuccgggacccuugaauuuaauaacgagagcuucaauuggacgggagugacccaaaacggcacaucuuccgcuugcauuagacggagcaauaacuccuuuuucucucgccugaauuggcucacccaucugaacuuuaaguauccugcccuuaacgucacaaugcccaauaaccagcaguucgacaagcuguacaucuggggcgugcaccauccugggaccgauaaagaccagauuuuucucuaugcgcaaagcucuggaagaaucacgguuuccacaaagcggagccagcaggccgugauuccgaauaucggcucccgccccagaauccggaacauuccuucucgcaucagcauuuacuggaccaucgucaaacccggggauauucugcugaucaauuccacaggaaaccucaucgcuccuagaggcuacuucaagauucugagcgggaaaucuuccaucaugcggagcgacgcccccauuggaaaguguaagucugagugcaucaccccgaauggcagcauuccuaacgacaaacccuuucagaaugugaaccgcaucaccuauggcgcuuguccuagauacgugaagcaauccacacuuaaacuggccacggggaugcggaauguccccgaaaagcagacccgcggaaucuucggcgcgauugccggguuuaucgagaacggaugggaaggcaugguugaugggugguauggauucagacaccaaaauucugagggccggggccaggcugccgaccucaaaagcacacaggcugccauugaucagaucaacgggaagcugaauagacuuauuggaaaaaccaacgagaaguuccaccagaucgaaaaggaguuuuccgaaguggagggccgcauucaagaccuggaaaaauacguggaggauacaaagaucgaccucuggagcuauaacgccgagcugcuggucgcucucgaaaaucagcauaccaucgaucugacggacucugagaugaacaaacuuuucgaaaagaccaaaaagcagcugcgggagaaugcggaagauauggggaacggaugcuuuaagauuuaccacaaaugugacaaugccugcaucggcuccauuagaaacgggacauaugaucaugacguguaccgcgacgaggcucucaauaaccgguuccagaucaagggcguugagcugaaaagcggauacaaggauuggauucuuuggaucucuuuugccaucuccugcuuccugcucuguguggcccugcugggcuuuauuaugugggcuugccaaaaagggaauaucagauguaacauuugcaucuga

SEQ ID NO: 203964 - RNA, 1701 nt, Artificial Sequence
  derived and/or modified CDS sequence (opt5) from hemagglutinin__InfluenzaA__AHN96447
augaagaccaucauugcccugagcuacauccucugccugguguucgcucagaaacuucccggcaacgacaauuccacagccacgcugugucucgggcaccaugcggucccuaacggaaccauuguuaagacaaucaccaaugauagaauugaggugacaaacgcuaccgaacuggugcaaaauucuagcaucggcgagaucugcgacuccccgcaccagauucuugauggggaaaacuguacacugaucgacgcccuccugggagauccccagugcgacggcuuucagaauaaaaagugggaucuguucgucgagcggucuaaagccuauagcaacuguuacccuuaugacgugcccgauuacgcuucccuccgcucucugguugccagcuccgggacccuugaauuuaauaacgagagcuucaauugggcuggagugacgcaaaacggcaccucuuccgccugcauuagaggcagcaauucuuccuuuuucagccggcugaacuggcucacacaucugaauuuuaaguauccugcgcuuaacgucaccaugcccaacaaugagcaguucgacaagcuguacaucuggggagugcaccauccugggacagauaaagaccagauuuuucucuaugcccagucuuccggccgcaucaccguuagcacgaagagaucccaacaggcugugauuccgaacaucgggucucggccccgcaucagaaauauuccuagccggaucuccauuuacuggacaaucgucaaacccggagauauucugcugaucaacagcaccggcaaucucaucgccccucgcggguacuucaagauuagaucuggaaaauccagcaucaugcggucugacgcucccauuggcaaguguaagagcgaaugcaucacaccgaacggcuccauuccuaaugacaaacccuuucagaacgugaaucgcaucaccuauggggccuguccuagauacgugaagcagucuacccugaaacuugcgacaggaaugcggaacguccccgagaagcaaacgcgcggcaucuucggggccauugcuggauuuaucgaaaauggcugggaggggaugguugauggaugguauggcuucagacaccagaacagcgagggccgggggcaggccgcugaccugaaauccacccaagccgccauugaucagaucaauggaaagcucaacagacugauuggcaaaacaaaugaaaaguuccaccagaucgagaaggaauuuagcgagguggaagggcgcauucaggaccuugagaaauacguggaggauaccaagaucgaccuguggucuuauaacgcugaacuccuggucgcgcuggagaaccaacauacaaucgaucucaccgacuccgaaaugaauaaacuguucgagaagacgaaaaagcagcuucgggaaaacgccgaggauaugggaaauggcugcuuuaagauuuaccacaaaugugacaacgcuugcaucgggagcauuagaaauggcacauaugaucaugacguguaccgcgacgaggcccugaacaaucgguuccagaucaagggaguugaacucaaaucuggcuacaaggauuggauucuguggaucuccuuugccaucagcugcuuccuucugugugugguccuccugggguuuauuaugugggcuugccagaaaggaaacaucagauguaauauuugcaucuga

SEQ ID NO: 203965 - RNA, 1701 nt, Artificial Sequence
  derived and/or modified CDS sequence (opt5) from hemagglutinin__InfluenzaA__AHV83765
augaaggccauccuggugguccuccuguacaccuucgcuacagccaacgcggacacgcuuugcauuggcuaucacgcuaauaacagcaccgauacaguugacaccgugcuggagaagaaugugacagucacccauuccgugaaccuccuggaagauaagcacaaugggaaacuuuguaagcugagaggaguugcuccccuccaucugggcaaaugcaacaucgccggguggauucugggaaauccugagugugaaucucucagcacagccuccucuuggagcuacaucguggagaccuccucuagcgacaacggcacgugcuauccgggggauuuuauuaauuacgaagaacugcgggagcagcuuuccagcgucucuuccuucgaacgcuuugagaucuuccccaagaccagcucuuggccuaaccacgacuccaauaagggagugacagccgcuuguccccaugccggcgcgaaaucuuuuuauaagaaccugaucuggcucguuaaaaagggcaauagcuacccuaaacugucccaaagcuauauuaacgauaaggggaaggaagugcuuguccuguggggaauccaccaccccuccaccacagccgaccagcagucucucuaccagaaugcugaugccuacguguucgugggcaccagcagauauuccaaaaaguuuaaaccugagauugcuauccggccgaagguccgcgaccaagaggggagaaugaacuacuauuggacgcugguugaacccggagauaaaauuacauucgaggccaccggcaaccugguggugccucgguacgcguuuacaauggaacgcaaugccgggagcggaaucauuaucucugacacccccguccaugauugcaacaccacaugucagacgccugagggcgcuaucaauaccucccuccccuuccagaacauucacccgaucacaauuggcaagugcccuaaauauguuaagagcaccaagcugagacuugccacagggcugcggaaugugcccucuauccagagccgcggacucuuuggcgcuauugccggguucaucgaaggaggcuggaccgggaugguggacggaugguacggcuaucaucaccaaaacgagcagggcuccggguacgccgcugaccugaaaucuacgcagaaugcgaucgauaagauuacaaacaaagucaauagcgugaucgagaagaugaacacccaguuuaccgccguuggaaaagaguucaaucaccuugagaagagaauugaaaaccugaauaagaaaguggacgauggcuuccucgacaucuggacauacaacgcugagcugcugguccuccuggaaaaugagcggacccuugauuaucaugacuccaacgugaagaaccuguacgagaaaguccgcaaucaacucaagacaaacgccaaagaaauugggaauggauguuuugaguucuaucacaagugcgauaacacguguauggaaagcgugaagaauggcaccuacgacuauccuaaauacucugaggaagccaagcugaacagagagaaaaucgaugggguuaaacuugaguccacacggaucuaucagauucuggcuaucuacagcaccguggccucuucccucguccuggugguuagccugggcgcgauuuccuuuuggaugugcucuaauggaagccuccagugccgcaucuguauuuga

SEQ ID NO: 203966 - RNA, 1701 nt, Artificial Sequence; identical to SEQ ID NO: 203093
  derived and/or modified CDS sequence (opt5) from hemagglutinin__InfluenzaA__AHV83766

SEQ ID NO: 203967 - RNA, 1701 nt, Artificial Sequence; identical to SEQ ID NO: 202112
  derived and/or modified CDS sequence (opt5) from hemagglutinin__InfluenzaA__AHV83767

SEQ ID NO: 203968 - RNA, 1701 nt, Artificial Sequence
  derived and/or modified CDS sequence (opt5) from hemagglutinin__InfluenzaA__AHV83768
augaaggccauccuggugguccuccuguacaccuucacaacggcuaacgccgacacccuuugcauuggcuaucacgcgaauaacagcacagauaccguugacacagugcuggagaaaaaugugaccgucacacauuccgugaaccuccuggaagauaagcacaaugggaaacuuuguaagcugagaggaguugcuccccuccaucugggcaaaugcaacaucgccggguggauucugggaaauccugagugugaaucucucagcaccgccuccucuuggagcuacaucguggagacguccucuagcgacaacgggaccugcuauccgggcgauuuuauuaauuacgaagaacugcgggagcagcuuuccagcgucucuuccuucgaacgcuuugagaucuuccccaagacaagcucuuggccuaaccacgacuccaauaagggagugaccgcugccuguccccaugcuggcgccaagagcuuuuauaagaaccugaucuggcucguuaaaaagggcaauucuuacccuaaacugucccaaagcuauauuaacgauaaggggaaggaagugcuuguccuguggggaauccaccaccccuccacaaccgcggaccagcagucucucuaccagaaugccgaugcuuacguguucgugggcacgagcagauauuccaaaaaguuuaaaccugagauugccauccggccgaagguccgcgaccaagaggggagaaugaacuacuauuggacacugcuggaacccggagauaaaauuaccuucgaggcuacaggcaaccucguugugccucgguacgccuuuaccauggaacgcaaugcggggagcggaaucauuaucucugacacccccgugcaugauugcaacacaacgugucagaccccugagggcgccaucaauacaucccugcccuuccagaacauucacccgaucaccauuggcaagugcccuaaauaugucaagagcacaaaacuuagacuggcuaccgggcuccggaaugugcccucuauccagagccgcggacuguuuggcgccauugcuggguucaucgaaggaggcuggacggggaugguugacggaugguacggcuaucaucaccaaaacgagcagggcuccggguacgccgccgaccuuaaaucuacacagaaugcuaucgauaagauuaccaacaaagugaauagcgucaucgagaagaugaacacccaguuuacagcggugggaaaagaguucaaucaccuggagaagagaauugaaaaccucaauaagaaaguugacgauggcuuccuggacaucuggaccuacaacgccgagcugcucgugcugcuugaaaaugagcggacacuggauuaucaugacuccaacgucaagaaccucuacgagaaagugcgcaaucaacugaagaacaaugcuaaagaaauugggaacggauguuuugaguucuaucacaagugcgauaauacguguauggacagcgucaagaacggcaccuacgauuauccuaaauacucugaagaggccaaacuuaauagagaaaagaucgacggggugaagcuggaguccacacggaucuaucagauucucgccaucuacagcaccguugcuucuucccuggugcuggucgugagccucggcgccauuuccuuuuggaugugcucuaacggaagccugcagugccgcaucuguauuuga

SEQ ID NO: 203969 - RNA, 1701 nt, Artificial Sequence; identical to SEQ ID NO: 203070
  derived and/or modified CDS sequence (opt5) from hemagglutinin__InfluenzaA__AHV83770

SEQ ID NO: 203970 - RNA, 1701 nt, Artificial Sequence
  derived and/or modified CDS sequence (opt5) from hemagglutinin__InfluenzaA__AHV83771
augaaggccauccuggugguccuccuguacaccuucgcuacagccaacgcggacacgcuuugcauuggcuaucacgcuaauaacagcaccgauacaguugacaccgugcuggagaaaaaugugacagucacccauuccgugaaccuccuggaagauaagcacaaugggaaacuuuguaagcugagaggaguugcuccccuccaucugggcaaaugcaacaucgccggguggauucugggaaauccugagugugaaucucucagcacagccuccucuuggagcuacaucguggagaccuccucuagcgacaacggcacgugcuauccgggggauuuuauuaauuacgaagaacugcgggagcagcuuuccagcgucucuuccuucgaacgcuuugagaucuuccccaagaccagcucuuggccuaaccacgacuccaauaagggagugacagccgcuuguccccaugccggcgcgaaaucuuuuuauaagaaccugaucuggcucguuaaaaagggcaauagcuacccuaaacugucccaaagcuauauuaacgauaaggggaaggaagugcuuguccuguggggaauccaccaccccuccaccacaaccgaccagcagucucucuaccagaaugccgaugcuuacguguucgugggcacgagcagauauuccaaaaaguuuaaaccugagauugccauccggccgaagguccgcgaccaagaggggagaaugaacuacuauuggacacugguugaacccggagauaaaauuaccuucgaggcuacaggcaaccugguggugccucgguacgccuuuaccauggaacgcaaugcggggagcggaaucauuaucucugacacccccguccaugauugcaacacaacgugucagaccccugagggcgccaucaauacaucccuccccuuccagaacauucacccgaucaccauuggcaagugcccuaaauauguuaagagcacaaagcugagacuugcuaccgggcugcggaaugugcccucuauccagagccgcggacucuuuggcgccauugcuggguucaucgaaggaggcuggacggggaugguggacggaugguacggcuaucaucaccaaaacgagcagggcuccggguacgccgccgaccagaaaucuacacagaaugcuaucgauaagauuaccaacaaagucaauagcgugaucgagaagaugaacacccaauuuacagcgguuggaaaagaguucaaucaccuggagaagagaauugaaaaccuuaauaagaaaguggacgauggcuuccuggacaucuggaccuacaacgccgagcuccugguccugcucgaaaaugagcggacacuggauuaucaugacuccaacgugaagaaccuuuacgagaaaguccgcaaucagcugaagaacaaugcuaaagaaauugggaacggauguuuugaguucuaucacaagugcgauaauacguguauggaaagcgugaagaacggcaccuacgacuauccuaaauacucugaggaagccaagcucaauagagagaaaaucgaugggguuaagcuggaguccacacggaucuaucagauucuugccaucuacagcaccguggcuucuucccugguccucgugguuagccugggcgccauuuccuuuuggaugugcucuaacggaagccugcaaugccgcaucuguauuuga

SEQ ID NO: 203971 - RNA, 1701 nt, Artificial Sequence; identical to SEQ ID NO: 202112
  derived and/or modified CDS sequence (opt5) from hemagglutinin__InfluenzaA__AHV83772

SEQ ID NO: 203972 - RNA, 1701 nt, Artificial Sequence; identical to SEQ ID NO: 202112
  derived and/or modified CDS sequence (opt5) from hemagglutinin__InfluenzaA__AHV83773

SEQ ID NO: 203973 - RNA, 1701 nt, Artificial Sequence; identical to SEQ ID NO: 202112
  derived and/or modified CDS sequence (opt5) from hemagglutinin__InfluenzaA__AHV83774

SEQ ID NO: 203974 - RNA, 1701 nt, Artificial Sequence
  derived and/or modified CDS sequence (opt5) from hemagglutinin__InfluenzaA__AHV83775
augaaggccauccuggugguccuccuguacaccuucgcuacagccaacgcggacacgcuuugcauuggcuaucacgcuaauaacagcaccgauacaguugacaccgugcuggagaagaaugugacagucacccauuccgugaaccuccuggaagauaagcacaaugggaaacuuuguaagcugagaggaguugcuccccuccaucugggcaaaugcaacaucgccggguggauucugggaaauccugagugugaaucucucagcacagccuccucuuggagcuacaucguggagaccuccucuagcgacaacggcacgugcuauccgggggauuuuauuaauuacgaagaacugcgggagcagcuuuccagcgucucuuccuucgaacgcuuugagaucuuccccaagaccagcucuuggccuaaccacgacuccaauaagggagugacagccgcuuguccccaugccggcgcgaaaucuuuuuauaagaaccugaucuggcucguuaaaaagggcaauagcuacccuaaacugucccaaagcuauauuaacgauaaggggaaggaagugcuuguccuguggggaauccaccaccccuccaccacagccgaccagcagucucucuaccagaaugcugaugccuacguguucgugggcaccagcagauauuccaaaaaguuuaaaccugagauugcuauccggccgaagguccgcgaccaagaggggagaaugaacuacuauuggacgcugguugaacccggagauaaaauuacauucgaggccaccggcaaccugguggugccucgguacgcguuuacaauggaacgcaaugccgggagcggaaucauuaucucugacacccccguccaugauugcaacaccacaugucagacgccugagggcgcuaucaauaccucccuccccuuccagaacauucacccgaucacaauuggcaagugcccuaaauauguuaagagcaccaagcugagacuugccacagggcugcggaauauccccucuauucagagccgcggacucuuuggcgcuaucgccggguucaucgaaggaggcuggaccgggaugguggacggaugguacggcuaucaucaccaaaacgagcagggcuccggguacgccgcugaccugaaaucuacgcagaaugcgauugauaagaucacaaacaaagugaauagcgucauugagaagaugaacacccaguuuaccgccgugggaaaagaguucaaucaccuugagaagagaaucgaaaaccugaauaagaaaguugacgauggcuuccucgacauuuggacauacaacgcugagcugcuggugcuccuggaaaaugagcggacccuugauuaucaugacuccaacgucaagaaccuguacgagaaagugcgcaaucaacucaagaacaaugccaaagaaaucgggaacggauguuuugaguucuaucacaagugcgauaauacauguauggaaagcgucaagaacggcacguacgacuauccuaaauacucugaggaagccaagcugaauagagagaaaaucgauggggugaaacuugaguccacccggauuuaucagauccuggcuauuuacagcacaguugccucuucccucgugcuggucgugagccugggcgcgaucuccuuuuggaugugcucuaacggaagccuccagugccgcauuuguaucuga

SEQ ID NO: 203975 - RNA, 1701 nt, Artificial Sequence; identical to SEQ ID NO: 202112
  derived and/or modified CDS sequence (opt5) from hemagglutinin__InfluenzaA__AHV83776

SEQ ID NO: 203976 - RNA, 1701 nt, Artificial Sequence
  derived and/or modified CDS sequence (opt5) from hemagglutinin__InfluenzaA__AHV83777
augaaggccauccuggugguccuccuguacaccuucgcuacagccaacgcggacacgcuuugcauuggcuaucacgcuaauaacagcaccgauacaguugacaccgugcuggagaagaaugugacagucacccauuccgugaaccuccuggaagauaagcacaaugggaaacuuuguaagcugagaggaguugcuccccuccaucugggcaaaugcaacaucgccggguggauucugggaaauccugagugugaaucucucagcacagccuccucuuggagcuacaucguggagaccuccucuagcgacaacggcacgugcuauccgggggauuuuauuaauuacgaagaacugcgggagcagcuuuccagcgucucuuccuucgaacgcuuugagaucuuccccaagaccagcucuuggccuaaccacgacuccaauaagggagugacagccgcuuguccccaugccggcgcgaaaucuuuuuauaagaaccugaucuggcucguuaaaaagggcaauagcuacccuaaacugucccaaagcuauauuaacgauaaggggaaggaagugcuuguccuguggggaauccaccaccccuccaccacagccgaccagcagucucucuaccagaaugcugaugccuacguguucgugggcaccagcagauauuccaaaaaguuuaaaccugagauugcuauccggccgaagguccgcgaccaagaggggagaaugaacuacuauuggacgcugguugaacccggagauaaaauuacauucgaggccaccggcaaccugguggugccucgguacgcguuuacaauggaacgcaaugccgggagcggaaucauuaucucugacacccccguccaugauugcaacaccacaugucagacgccugagggcgcuaucaauaccucccuccccuuccagaacauucacccgaucacaauuggcaagugcccuaaauauguuaagagcaccaagcugagacuugccacagggcugcggaauauccccucuauucagagccgcggacucuuuggcgcuaucgccggguucaucgaaggaggcuggaccgggaugguggacggaugguacggcuaucaucaccaaaacgagcagggcuccggguacgccgcugaccugaaaucuacgcagaaugcgauugauaagaucacaaacaaagugaauagcgucauugagaagaugaacacccaguuuaccgccgugggaaaagaguucaaucaccuugagaagagaaucgaaaaccugaauaagaaaguugacgauggcuuccucgacauuuggacauacaacgcugagcugcuggugcuccuggaaaaugagcggacccuugauuaucaugacuccaacgucaagaaccuguacgagaaagugcgcaaucaacucaagaacaaugccaaagaaaucgggaacggauguuuugaguucuaucacaagugcgauaauacauguauggaaagcgucaagaacggcacguacgacuauccuaaauacucugaggaagccaagcugaauagagagaaaaucgauggggugaaacuugaguccacccggauuuaucagauccuggcuauuuacagcacaguugccucuucccucgugcuggucgugagccugggcgcgaucugcuuuuggaugugcuccaacggaucucuccagugucgcauuugcaucuga

SEQ ID NO: 203977 - RNA, 1701 nt, Artificial Sequence
  derived and/or modified CDS sequence (opt5) from hemagglutinin__InfluenzaA__AHV83778
augaaggccauccuggugguccuccuguacaccuucacaacggcuaacgccgacacccuuugcauuggcuaucacgcgaauaacagcacagauaccguugacacagugcuggagaaaaaugugaccgucacacauuccgugaaccuccuggaagauaagcacaaugggaaacuuuguaagcugagaggaguugcuccccuccaucugggcaaaugcaacaucgccggguggauucugggaaauccugagugugaaucucucagcaccgccuccucuuggagcuacaucguggagacguccucuagcgacaacgggaccugcuauccgggcgauuuuauuaauuacgaagaacugcgggagcagcuuuccagcgucucuuccuucgaacgcuuugagaucuuccccaagacaagcucuuggccuaaccacgacuccaauaagggagugaccgcugccuguccccaugcuggcgccaagagcuuuuauaagaaccugaucuggcucguuaaaaagggcaauucuuacccuaaacugucccaaagcuauauuaacgauaaggggaaggaagugcuuguccuguggggaauccaccaccccuccacaaccgcggaccagcagucucucuaccagaaugccgaugcuuacguguucgugggcacgagcagauauuccaaaaaguuuaaaccugagauugccauccggccgaagguccgcgaccaagaggggagaaugaacuacuauuggacacugguugaacccggagauaaaauuaccuucgaggcuacaggcaaccugguggugccucgguacgccuuuaccauggaacgcaaugcggggagcggaaucauuaucucugacacccccgucuaugauugcaacacaacgugucagaccccugagggcgccaucaauacaucccuccccuuccagaacauucauccgaucaccauuggcaagugcccuaaauacguuaagagcacaaagcugagacuugcuaccgggcugcggaaugugcccucuauccagagccgcggacucuuuggcgccauugcuggguucaucgaaggaggcuggacggggaugguggacggaugguauggcuaccaccaucaaaacgagcagggcuccggguacgccgccgaccugaaaucuacacagaaugcuaucgauaagauuaccaacaaagucaauagcgugaucgagaagaugaacacccaguuuacagcgguuggaaaagaguucaaucaccuugagaagagaauugaaaaccugaauaagaaaguggacgauggcuuccucgacaucuggaccuauaacgccgagcugcugguccuccuggaaaaugagcggacacuugauuaccacgacuccaacgugaagaaccuguaugagaaaguccgcaaucaacucaagaacaaugcuaaagaaauugggaacggauguuuugaguucuaccauaagugcgauaauacguguauggaaagcgugaagaacggcaccuaugacuacccuaaauauucugaggaagccaagcugaauagagagaaaaucgaugggguuaaacuugaguccacacggaucuaccagauucuggccaucuacagcaccguggcuucuucccucguccuggugguuagccugggcgccauuuccuuuuggaugugcucuaacggaagccuccagugccgcaucuguauuuga

SEQ ID NO: 203978 - RNA, 1701 nt, Artificial Sequence
  derived and/or modified CDS sequence (opt5) from hemagglutinin__InfluenzaA__AHV83779
augaaggccauccuggugguccuccuguacaccuucgcuacaacgaacgccgacacccuuugcauuggcuaucacgcgaauaacagcacagauaccguugacacagugcuggagaaaaaugugaccgucacacauuccgugaaccuccuggaagauaagcacaaugggaaacuuuguaagcugagaggaguugcuccccuccaucugggcaaaugcaacaucgccggguggauucugggaaauccugagugugaaucucucagcaccgccuccucuuggagcuacaucguggagacguccucuagcgacaacgggaccugcuauccgggcgauuuuauuaauuacgaagaacugcgggagcagcuuuccagcgucucuuccuucgaacgcuuugagaucuuccccaagacaagcucuuggccuaaccacgacuccaauaagggagugaccgcugccuguccccaugcuggcgccaagagcuuuuauaagaaccugaucuggcucguuaaaaagggcaauucuuacccuaaacugucccaaagcuauauuaacgauaaggggaaggaagugcuuguccuguggggaauccaccaccccuccacaaccgcggaccagcagucucucuaccagaaugccgaugcuuacguguucgugggcacgagcagauauuccaaaaaguuuaaaccugagauugccauccggccgaagguccgcgaccaagaggggagaaugaacuacuauuggacacugguugaacccggagauaaaauuaccuucgaggcuacaggcaaccugguggugccucgguacgccuuuaccauggaacgcaaugcggggagcggaaucauuaucucugacacccccguccaugauugcaacacaacgugucagaccccugagggcgccaucaauacaucccuccccuuccagaacauucacccgaucaccauuggcaagugcccuaaauauguuaagagcacaaagcugagacuugcuaccgggcugcggaaugugcccucuauccagagccgcggacucuuuggcgccauugcuggguucaucgaaggaggcuggacggggaugguggacggaugguacggcuaucaucaccaaaacgagcagggcuccggguacgccgccgaccugaaaucuacacagaaugcuaucgauaagauuaccaacaaagucaauagcgugaucgagaagaugaacacccaguuuacagcgguuggaaaagaguucaaucaccuugagaagagaauugaaaaccugaauaagaaaguggacgauggcuuccucgacaucuggaccuacaacgccgagcugcugguccuccuggaaaaugagcggacacuugauuaucaugacuccaacgugaagaaccuguacgagaaaguccgcaaucaacucaagaacaaugcuaaagaaacggggaacggauguuuugaguucuaucacaagugcgauaauaccuguauggaaagcgugaagaacggcacauacgacuauccuaaauacucugaggaagccaagcugaauagagagaaaauugaugggguuaaacuugaguccacccggaucuaucagauccuggccauuuacagcacaguggcuucuucccucguccuggugguuagccugggcgccaucuccuuuuggaugugcucuaacggaagccuccagugccgcauuuguaucuga

SEQ ID NO: 203979 - RNA, 1701 nt, Artificial Sequence
  derived and/or modified CDS sequence (opt5) from hemagglutinin__InfluenzaA__AHV83780
augaaggccauccuggugguccuccuguacaccuucgcuacagccaacgcggacacgcuuugcauuggcuaucacgcuaauaacagcaccgauacaguugacaccgugcuggagaagaaugugacagucacccauuccgugaaccuccuggaagauaagcacaaugggaaacuuuguaagcugagaggaguugcuccccuccaucugggcaaaugcaacaucgccggguggauucugggaaauccugagugugaaucucucagcacagccuccucuuggagcuacaucguggagaccuccucuagcgacaacggcacgugcuauccgggggauuuuauuaauuacgaagaacugcgggagcagcuuuccagcgucucuuccuucgaacgcuuugagaucuuccccaagaccagcucuuggccuaaccacgacuccaauaagggagugacagccgcuuguccccaugccggcgcgaaaucuuuuuauaagaaccugaucuggcucguuaaaaagggcaauagcuacccuaaacugagacaauccuauauuaacgauaaggggaaggaagugcuuguccuguggggaauccaccaccccagcaccacaaccgaccagcagucccucuaccagaaugccgaugcuuacguguucgugggcacgucucgguauagcaaaaaguuuaaaccugagauugccauccgcccgaaggucagagaccaagaggggcggaugaacuacuauuggacacugguugaacccggagauaaaauuaccuucgaggcuacaggcaaccugguggugccucgcuacgccuuuaccauggaaagaaaugcgggguccggaaucauuaucagcgacacccccguccaugauugcaacacaacgugucagaccccugagggcgccaucaauacaucucuccccuuccagaacauucacccgaucaccauuggcaagugcccuaaauaugugaaguccacaaagcugcggcuugcuaccgggcugcgcaauguucccagcauccagucuagaggacucuuuggcgccauugcuggguucaucgaaggaggcuggacggggaugguggacggaugguacggcuaucaucaccaaaacgagcagggcagcggguacgccgccgaccugaaauccacacagaaugcuaucgauaagauuaccaacaaagucaauucugugaucgagaagaugaacacccaguuuacagcgguuggaaaagaguucaaucaccuugagaagcggauugaaaaccugaauaagaaaguggacgauggcuuccucgacaucuggaccuacaacgccgagcugcugguccuccuggaaaaugagcgcacacuugauuaucaugacagcaacgugaagaaccuguacgagaaagucagaaaucaacucaagaacaaugcuaaagaaauugggaacggauguuuugaguucuaucacaagugcgauaauacguguauggaauccgugaagaacggcaccuacgacuauccuaaauacagcgaggaagccaagcugaaucgggagaaaaucgaugggguuaaacuugagucuacacgcaucuaucagauucuggccaucuacuccaccguggcuagcucucucguccuggugguuucccugggcgccauuagcuuuuggaugugcuccaacggaucucuccagugcagaaucuguauuuga

SEQ ID NO: 203980 - RNA, 1701 nt, Artificial Sequence; identical to SEQ ID NO: 202112
  derived and/or modified CDS sequence (opt5) from hemagglutinin__InfluenzaA__AHV83781

SEQ ID NO: 203981 - RNA, 1701 nt, Artificial Sequence
  derived and/or modified CDS sequence (opt5) from hemagglutinin__InfluenzaA__AHV83782
augaaggccauccuggugguccuccuguacacccuugcuacagccaacgcggacacgcugugcauuggcuaucacgcuaauaacagcaccgauacaguugacaccgugcucgagaaaaaugugacagucacccauuccgugaaccugcuugaagauaagcacaaugggaaacuguguaagcucagaggaguugcuccccugcaucugggcaaaugcaacaucgccggguggauucucggaaauccugagugugaaucucugagcacagccuccucuuggagcuacaucguggagaccuccucuagcgacaacggcacgugcuauccgggggauuucauuaauuacgaggaacuucgggagcagcuguccagcgucucuuccuuugaacgcuucgagaucuuucccaagaccagcucuuggccuaaccacgacuccaauaagggagugacagccgcuuguccccaugccggcgcgaaaucuuucuauaagaaccucaucuggcugguuaaaaagggcaauagcuacccuaaacuuucccaaagcuauauuaacgauaaggggaaggaagugcugguccucuggggaauccaccaccccuccaccacagccgaccagcagucucuguaccagaaugcugaugccuacguguuugugggcaccagcagauauuccaaaaaguucaaaccugagauugcuauccggccgaagguccgcgaccaagaggggagaaugaacuacuauuggacgcugguugaacccggagauaaaauuacauuugaggccaccggcaaccucguggcgccucgguacgccuucacaauggaacgcaaugcugggagcggaaucauuaucucugacacccccgugcaugauugcaacaccacaugucagacgccugagggcgccaucaauaccucccugcccuuucagaacauucacccgaucacaauuggcaagugcccuaaauaugucaagagcaccaaacuuagacuggcuacagggcuccggaaugugcccucuauccagagccgcggacuguucggcgccauugccggguuuaucgaaggaggcuggaccgggaugguugacggaugguacggcuaucaucaccaaaacgagcagggcuccggguacgcugcggaccuuaagucuacgcagaaugccaucgauaagauuacaaacaaagugaauagcgucaucgagaagaugaacacccaguucaccgcugugggaaaagaauuuaaucaccuggagaagagaauugaaaaccucaauaagaaaguugacgauggcuuccuggacaucuggacauacaacgccgagcugcucgugcugcuugaaaaugagcggacccuggauuaucaugacuccaacgucaagaaccucuacgagaaagugcgcaaucaacugaagaacaaugccaaagaaauugggaacggauguuucgaguuuuaucacaagugcgauaauacauguauggaaagcgucaagaacggcacguacgacuauccuaaauacucugaggaagcuaaacuuaauagagagaagaucgauggggugaagcuggaguccacccggaucuaucagauucucgccaucuacagcacaguugcgucuucccuggugcuggucgugagccucggcgcuauuuccuucuggaugugcucuaacggaagccugcagugccgcaucuguauuuga

SEQ ID NO: 203982 - RNA, 1701 nt, Artificial Sequence
  derived and/or modified CDS sequence (opt5) from hemagglutinin__InfluenzaA__AHV83783
augaaggccauccuggugguccuccuguacaccuucgcuacagccaacgcggacacgcuuugcauuggcuaucacgcuaauaacagcaccgauacaguugacaccgugcuggagaagaauaucacagugacccauuccgucaaccuccuggaagauaagcacaaugggaaacuuuguaagcugagaggaguggcuccccuccaucugggcaaaugcaacauugccggguggauccugggaaauccugagugugaaucucucagcacagccuccucuuggagcuacauuguugagaccuccucuagcgacaacggcacgugcuauccgggggauuuuaucaauuacgaagaacugcgggagcagcuuuccagcgugucuuccuucgaacgcuuugagaucuuccccaagaccagcucuuggccuaaccacgacuccaauaagggagucacagccgcuuguccccaugccggcgcgaaaggcuuuuauaagaaccugauuuggcucgugaaaaaggggaauagcuacccuaaacugagacaaucuuauaucaacgauaagggaaaggaaguucuugugcuguggggcauucaccaccccuccaccacaaccgaccagcagagccucuaccagaaugccgaugcuuacgucuucguggggacgucccgguauucuaaaaaguuuaaaccugagaucgccauucgcccgaaggugagagaccaagagggacggaugaacuacuauuggacacuggucgaacccggcgauaaaaucaccuucgaggcuacagggaaccugguugugccucgcuacgccuuuaccauggaaagaaaugcgggaagcggcauuaucaucuccgacacccccgugcaugauugcaacacaacgugucagaccccugagggcgccauuaauacaagccuccccuuccagaacauccacccgauuaccaucgggaagugcccuaaauaugucaagucuacaaagcugcggcuugcuaccggacugcgcaaugugcccuccauucagagcagaggccucuuuggggccaucgcuggauucaucgaaggcggguggacgggaaugguugacggcugguacggcuaucaucaccaaaacgagcaggggucuggauacgccgccgaccugaaaagcacacagaaugcuauugauaagaucaccaacaaagucaauuccgugauugagaagaugaacacccaguuuacagcggugggcaaagaguucaaucaccuugagaagcggaucgaaaaccugaauaagaaaguugacgauggguuccucgacauuuggaccuacaacgccgagcugcuggugcuccuggaaaaugagcgcacacuugauuaucaugacucuaacgucaagaaccuguacgagaaagugagaaaucaacucaagaacaaugcuaaagaaaucggaaacggcuguuuugaguucuaucacaagugcgauaauacguguauggaaagcgucaagaacgggaccuacgacuauccuaaauacuccgaggaagccaagcugaaucgggagaaaaucgauggcgugaaacuugagagcacacgcauuuaucagauccuggccauuuacucuaccguugcuuccagccucgugcuggucgugucucugggagccaucuccuuuuggaugugcagcaacggcucccuccagugcagaauuuguaucuga

SEQ ID NO: 203983 - RNA, 1701 nt, Artificial Sequence; identical to SEQ ID NO: 202112
  derived and/or modified CDS sequence (opt5) from hemagglutinin__InfluenzaA__AHV83784

SEQ ID NO: 203984 - RNA, 1701 nt, Artificial Sequence; identical to SEQ ID NO: 202112
  derived and/or modified CDS sequence (opt5) from hemagglutinin__InfluenzaA__AHV83785

SEQ ID NO: 203985 - RNA, 1701 nt, Artificial Sequence; identical to SEQ ID NO: 202112
  derived and/or modified CDS sequence (opt5) from hemagglutinin__InfluenzaA__AHV83787

SEQ ID NO: 203986 - RNA, 1701 nt, Artificial Sequence
  derived and/or modified CDS sequence (opt5) from hemagglutinin__InfluenzaA__AHV83788
augaaggccauccuggugguccuccuguacaccuucgcuacagccaacgcggacacgcuuugcauuggcuaucacgcuaauaacagcaccgauacaguugacaccgugcuggagaagaaugugacagucacccauuccgugaaccuccuggaagauaagcacaaugggaaacuuuguaagcugagaggaguuucuccccuccaucugggcaaaugcaacaucgccggguggauucugggaaauccugagugugaaagccucuccacagccucuagcugguccuacaucguggagaccucuagcuccgacaacggcacgugcuauccgggggauuuugucaauuacgaagaacugcgggagcagcuuagcucuguguccagcuucgaacgcuuugagauuuuccccaagaccucuuccuggccuaaccacgacagcaauaagggaguuacagcugccuguccccaugcuggcgccaaaucuuuuuauaagaaccugaucuggcucgugaaaaagggcaauuccuacccuaaacugagccaauccuauaucaacgauaaggggaaggaaguccuugugcuguggggcauucaccaccccucuaccacagcggaccagcagagccucuaccagaaugccgaugcuuacguguucgucggaaccuccagauauagcaaaaaguuuaaaccugagaucgccauucggccgaagguucgcgaccaagaggggagaaugaacuacuauuggacgcugguggaacccggagauaaaaucacauucgaggcuaccggcaaccugguggucccucgguacgccuuuacaauggaacgcaaugcggggucuggaauuaucauuuccgacacccccgugcaugauugcaacaccacaugucagacgccugagggcgccaucaauaccagccuccccuuccagaacauccacccgauuacaaucggcaagugcccuaaauauguuaagucuaccaagcugagacuugcuacagggcugcggaaugugcccagcauucagucccgcggacucuuuggcgccaucgcuggguucauugaaggaggcuggaccgggauggucgacggaugguacggcuaucaucaccaaaacgagcagggcucuggguacgccgccgaccugaaaagcacgcagaaugcuaucgauaagaucacaaacaaaguuaauuccgugauugagaagaugaacacccaguuuaccgcggugggaaaagaguucaaucaccuugagaagagaaucgaaaaccugaauaagaaagucgacgauggcuuccucgacauuuggacauacaacgccgagcugcuggugcuccuggaaaaugagcggacccuugauuaucaugacagcaacgucaagaaccuguacgagaaagugcgcaaucaacucaagaacaaugcuaaagaaaucgggaacggauguuuugaguucuaucacaagugcgauaauacauguauggaaucuguuaagaacggcacguacgacuauccuaaauacuccgaggaagccaagcugaauagagagaaaauugauggggugaaacuugagagcacccggaucuaucagauccuggccauuuacucuacagucgcuuccagccucgugcugguugugucccugggcgccaucucuuuuuggaugugcagcaacggaucccuccagugccgcauuuguaucuga

SEQ ID NO: 203987 - RNA, 1701 nt, Artificial Sequence; identical to SEQ ID NO: 203974
  derived and/or modified CDS sequence (opt5) from hemagglutinin__InfluenzaA__AHV83789

SEQ ID NO: 203988 - RNA, 1701 nt, Artificial Sequence; identical to SEQ ID NO: 202112
  derived and/or modified CDS sequence (opt5) from hemagglutinin__InfluenzaA__AHV83790

SEQ ID NO: 203989 - RNA, 1701 nt, Artificial Sequence; identical to SEQ ID NO: 202112
  derived and/or modified CDS sequence (opt5) from hemagglutinin__InfluenzaA__AHV83791

SEQ ID NO: 203990 - RNA, 1701 nt, Artificial Sequence; identical to SEQ ID NO: 202112
  derived and/or modified CDS sequence (opt5) from hemagglutinin__InfluenzaA__AHV83792

SEQ ID NO: 203991 - RNA, 1701 nt, Artificial Sequence
  derived and/or modified CDS sequence (opt5) from hemagglutinin__InfluenzaA__AHV83793
augaaggccauccuggugguccuccuguacaccuucgcuacagccaacgcggacacgcuuugcauuggcuaucacgcuaauaacagcaccgauacaguugacaccgugcuggagaaaaaugugacagucacccauuccgugaaccuccuggaagauaagcacaaugggaaacuuuguaagcugagaggaguugcgccccuccaucugggcaaaugcaacaucgccggguggauucugggaaauccugagugugaaucucucagcacagcuuccucuuggagcuacaucguggagaccuccucuagcgacaacggcacgugcuauccgggggauuuuauuaauuacgaagaacugcgggagcagcuuuccagcgucucuuccuucgaaaaguuugagaucuuccccaagaccagcucuuggccuaaccacgacuccaauaaaggagugacagccgcuuguccccaugccggcgccaagagcuuuuauaaaaaccugaucuggcucguuaagaaaggcaauucuuacccuaagcugucccaaagcuauauuaacgauaaggggaaagaaauccuugugcuguggggcauucaccaccccuccaccacagccgaccagcagucucucuaccagaaugcugaugccuacgucuucgugggaaccagccgcuauuccaagaaauuuaagccugagaucgcuauuagaccgaaagugcgggaccaagaggggcgcaugaacuacuauuggacgcuggucgaacccggagauaagaucacauucgaggccaccggcaaccugguugugccuagauacgcguuuacaauggaacggaaugccgggagcggaauuaucaucucugacacccccgugcaugauugcaacaccacaugucagacgccugagggcgcuauuaauaccucccuccccuuccagaacauccacccgauuacaaucggcaaaugcccuaaguaugucaagagcaccaaacugcgccuugccacagggcugagaaaugugcccucuauucagagccggggacucuuuggcgcuaucgccggguucaucgaaggaggcuggaccgggaugguugacggaugguacggcuaucaucaccaaaacgagcagggcuccggguacgccgcugaccagaagucuacgcagaaugcgauugauaaaaucacaaacaaggugaauagcgucauugagaaaaugaacacccaauuuaccgccgugggaaaggaguucaaucaccuggagaagcgcaucgaaaaccuuaauaaaaagguugacgauggcuuccuggacauuuggacauacaacgcugagcuccuggugcugcucgaaaaugagagaacccuggauuaucaugacuccaacgucaaaaaccuuuacgagaaggugcggaaucagcugaaaaacaaugccaaggaaaucgggaacggauguuuugaguucuaucacaagugcgauaauacauguauggaaagcgucaaaaacggcacguacgacuauccuaaguacucugaggaagccaaacucaaucgcgagaagaucgauggggugaaacuggaguccaccagaauuuaucagauccuugcuauuuacagcacaguugccucuucccuggugcucgucgugagccugggcgcgaucuccuuuuggaugugcucuaacggaagccugcaaugccggauuuguaucuga

SEQ ID NO: 203992 - RNA, 1701 nt, Artificial Sequence
  derived and/or modified CDS sequence (opt5) from hemagglutinin__InfluenzaA__AHV83794
augaaggccauccuggugguccuccuguacaccuucgcuacagccaacgcggacacgcuuugcauuggcuaucacgcuaauaacagcaccgauacaguugacaccgugcuggagaaaaaugugacagucacccauuccgugaaccuccuggaagauaagcacaaugggaaacuuuguaagcugagaggaguugcuccccuccaucugggcaaaugcaacaucgccggguggauucugggaaauccugagugugaaucucucagcacagccuccucuuggagcuacaucguggagaccuccucuagcgacaacggcacgugcuauccgggggauuuuauuaauuacgaagaacugcgggagcagcuuuccagcgucucuuccuucgaacgcuuugagaucuuccccaagaccagcucuuggccuaaccacgacuccaauaagggagugacagccgcuuguccccaugccggcgcgaaaucuuuuuauaagaaccugaucuggcucguuaaaaagggcaauagcuacccuaaacugucccaaagcuauauuaacgauaaggggaaggaagugcuuguccuguggggaauccaccaccccuccaccacagccgaccagcagucucucuaccagaaugcugaugccuacguguucgugggcaccagcagauauuccaaaaaguuuaaaccugagauugcuauccggccgaagguccgcgaccaagaggggagaaugaacuacuauuggacgcugguugaacccggagauaaaauuacauucgaggccaccggcaaccugguggugccucgguacgcguuuacaauggaacgcaaugccgggagcggaaucauuaucucugacacccccguccaugauugcaacaccacaugucagacgccugagggcgcuaucaauaccucccuccccuuccagaacauucacccgaucacaauuggcaagugcccuaaauauguuaagagcaccaagcugagacuugccacagggcugcggaaugugcccucuauccagagccgcggacucuuuggcgcuauugccggguucaucgaaggaggcuggaccgggaugguggacggaugguacggcuaucaucaccaaaacgagcagggcuccggguacgccgcugaccagaaaucuacgcagaaugcgaucgauaagauuacaaacaaagucaauagcgugaucgagaagaugaacacccaauuuaccgccguuggaaaagaguucaaucaccuggagaagagaauugaaaaccuuaauaagaaaguggacgauggcuuccuggacaucuggacauacaacgcugagcuccugguccugcucgaaaaugagcggacccuggauuaucaugacuccaacgugaagaaccuuuacgagaaaguccgcaaucagcugaagaacaaugccaaagaaauugggaacggauguuuugaguucuaucacaagugcgauaauacauguauggaaagcgugaagaacggcacguacgacuauccuaaauacucugaggaagccaagcucaauagagagaaaaucgaugggguuaagcuggaguccacccggaucuaucagauucuugcuaucuacagcacaguggccucuucccugguccucgugguuagccugggcgcgauuuccuuuuggaugugcucuaacggaagccugcaaugccgcaucuguauuuga

SEQ ID NO: 203993 - RNA, 1701 nt, Artificial Sequence
  derived and/or modified CDS sequence (opt5) from hemagglutinin__InfluenzaA__AHV83795
augaaggccauccuggugguccuccuguacaccuucgcuacagccaacgcggacacgcuuugcauuggcuaucacgcuaauaacagcaccgauacaguugacaccgugcuggagaaaaaugugacagucacccauuccgugaaccuccuggaagauaagcacaaugggaaacuuuguaagcugagaggaguugcuccccuccaucugggcaaaugcaacaucgccggguggauucugggaaauccugagugugaaucucucagcgccgccuccucuuggagcuacaucguggagacauccucuagcgacaacgggaccugcuauccgggcgauuuuauuaauuacgaagaacugcgggagcagcuuuccagcgucucuuccuucgaacgcuuugagaucuuccccaagacgagcucuuggccuaaccacgacuccaauaagggagugaccgcugccuguccccaugcgggcgccaagagcuuuuauaagaaccugaucuggcucguuaaaaagggcaauucuuacccuaaacugucccaaagcuauauuaacgauaaggggaaggaagugcuuguccuguggggaauccaccaccccuccacaaccgcugaccagcagucucucuaccagaaugccgauacauacguguucgugggcaccagcagauauuccaaaaaguuuaaaccugagauugcuauccggccgaagguccgcgaccaagaggggagaaugaacuacuauuggacgcugguugaacccggagauaaaauuacauucgaggccaccggcaaccugguggugccucgguacgcguuuacaauggaacgcaaugccgggagcggaaucauuaucucugacacccccguccaugauugcaacaccacaugucagacgccugagggcgcuaucaauaccucccuccccuuccagaacauucacccgaucacaauuggcaagugcccuaaauaugugaaaagcaccaagcugagacuugccacagggcugcggaauguucccucuauccagagccgcggacucuuuggcgcuauugccggguucaucgaaggaggcuggaccgggaugguggacggaugguacggcuaucaucaccaaaacgagcagggcuccggguacgccgcugaccagaaaucuacgcagaaugcgaucgauaagauuacaaacaaagucaauagcgugaucgagaagaugaacacccaauuuaccgccguuggaaaagaguucaaucaccuggagaagagaauugaaaaccuuaauaagaaaguggacgauggcuuccuggacaucuggacauacaacgcugagcuccugguccugcucgaaaaugagcggacccuggauuaucaugacuccaacgugaagaaccuuuacgagaaaguccgcaaucagcugaagaacaaugccaaagaaauugggaacggauguuuugaguucuaucacaagugcgauaauacauguauggaaagcgugaagaacggcacguacgacuauccuaaauacucugaggaagccaagcucaauagagagaaaaucgaugggguuaagcuggaguccaccaaaaucuaucagauucuugcuaucuacagcacaguggccucuucccugguccucgugguuagccugggcgcgauuuccuuuuggaugugcucuaacggaagccugcaaugccggaucuguauuuga

SEQ ID NO: 203994 - RNA, 1701 nt, Artificial Sequence; identical to SEQ ID NO: 203992
  derived and/or modified CDS sequence (opt5) from hemagglutinin__InfluenzaA__AHV83796

SEQ ID NO: 203995 - RNA, 1701 nt, Artificial Sequence; identical to SEQ ID NO: 202112
  derived and/or modified CDS sequence (opt5) from hemagglutinin__InfluenzaA__AHV83798

SEQ ID NO: 203996 - RNA, 1701 nt, Artificial Sequence; identical to SEQ ID NO: 202112
  derived and/or modified CDS sequence (opt5) from hemagglutinin__InfluenzaA__AHV83799

SEQ ID NO: 203997 - RNA, 1701 nt, Artificial Sequence
  derived and/or modified CDS sequence (opt5) from hemagglutinin__InfluenzaA__AHV83800
augaaggccauccuggugguccuccuguacaccuucgcuacagccaacgcggacacgcuuugcauuggcuaucacgcuaauaacagcaccgauacaguugacaccgugcuggagaaaaaugugacagucacccauuccgugaaccuccuggaagauaagcacaaugggaaacuuuguaagcugagaggaguugcuccccuccaucugggcaaaugcaacaucgccggguggauucugggaaauccugagugugaaucucucagcacagccuccucuuggagcuacaucguggagaccuccucuagcgacaacggcacgugcuauccgggggauuuuauuaauuacgaagaacugcgggagcagcuuuccagcgucucuuccuucgaacgcuuugagaucuuccccaagaccagcucuuggccuaaccacgacuccaauaagggagugacagccgcuuguccccaugccggcgcgaaaucuuuuuauaagaaccugaucuggcucguuaaaaagggcaauagcuacccuaaacugucccaaagcuauauuaacgauaaggggaaggaagugcuuguccuguggggaauccaccaccccuccaccacagccgaccagcagucucucuaccagaaugcugaugccuacguguucgugggcaccagcagauauuccaaaaaguuuaaaccugagauugcuauccggccgaagguccgcgaccaagaggggagaaugaacuacuauuggacgcugguugaacccggagauaaaauuacauucgaggccaccggcaaccugguggugccucgguacgcguuuacaauggaacgcaaugccgggagcggaaucauuaucucugacacccccguccaugauugcaacaccacaugucagacgccugagggcgcuaucaauaccucccuccccuuccagaacauucacccgaucacaauuggcaagugcccuaaauauguuaagagcaccaagcugagacuugccacagggcugcggaaugugcccucuauccagagccgcggacucuuuggcgcuauugccggguucaucgaaggaggcuggaccgggaugguggacggaugguacggcuaucaucaccaaaacgagcagggcuccggguacgccgcugaccugaaaucuacgcagaaugcgaucgauaagauuacaaacaaagucaauagcgugaucgagaagaugaacacccaguuuaccgccguuggaaaagaguucaaucaccuugagaagagaauugaaaaccugaauaagaaaguggacgauggcuuccucgacaucuggacauacaacgcugagcugcugguccuccuggaaaaugagaagacccuugauuaucaugacuccaacgugaaaaaccuguacgagaagguccggaaucaacucaaaaacaaugccaaggaaauugggaacggauguuuugaguucuaucacaagugcgauaauacauguauggaaagcgugaaaaacggcacguacgacuauccuaaguacucugaggaagccaaacugaaucgcgagaagaucgaugggguuaaacuugaguccaccagaaucuaucagauucuggcuaucuacagcacaguggccucuucccucguccuggugguuagccugggcgcgauuuccuuuuggaugugcucuaacggaagccuccagugccggaucuguauuuga

SEQ ID NO: 203998 - RNA, 1701 nt, Artificial Sequence
  derived and/or modified CDS sequence (opt5) from hemagglutinin__InfluenzaA__AHV83801
augaaggccauccuggugguccuccuguacaccuucgcuacagccaacgcggacacgcuuugcauuggcuaucacgcuaauaacagcaccgauacaguugacaccgugcuggagaaaaaugugacagucacccauuccgugaaccuccuggaagauaagcacaaugggaaacuuuguaagcugagaggaguugcuccccuccaucugggcaaaugcaacaucgccggguggauucugggaaauccugagugugaaucucucagcacagccuccucuuggagcuacaucguggagaccuccucuagcgacaacggcacgugcuauccgggggauuuuauuaauuacgaagaacugcgggagcagcuuuccagcgucucuuccuucgaacgcuuugagaucuuccccaagaccagcucuuggccuaaccacgacuccaauaagggagugacagccgcuuguccccaugccggcgcgaaaucuuuuuauaagaaccugaucuggcucguuaaaaagggcaauagcuacccuaaacugucccaaagcuauauuaacgauaaggggaaggaagugcuuguccuguggggaauccaccaccccuccaccacagccgaccagcagucucucuaccagaaugcugaugccuacguguucgugggcaccagcagauauuccaaaaaguuuaaaccugagauugcuauccggccgaagguccgcgaccaagaggggagaaugaacuacuauuggacgcugguugaacccggagauaaaauuacauucgaggccaccggcaaccugguggugccucgguacgcguuuacaauggaacgcaaugccgggagcggaaucauuaucucugacacccccguccaugauugcaacaccacaugucagacgccugagggcgcuaucaauaccucccuccccuuccagaacauucacccgaucacaauuggcaagugcccuaaauauguuaagagcaccaagcugagacuugccacagggcugcggaaugugcccucuauccagagccgcggacucuuuggcgcuauugccggguucaucgaaggaggcuggaccgggaugguggacggaugguacggcuaucaucaccaaaacgagcagggcuccggguacgccgcugaccagaaaucuacgcagaaugcgaucgauaagauuacaaacaaagucaauagcgugaucgagaagaugaacacccaauuuaccgccguuggaaaagaguucaaucaccuggagaagagaauugaaaaccuuaauaagaaaguggacgauggcuuccuggacaucuggacauacaacgcugagcuccugguccugcucgaaaaugagcggacccuggauuaucaugacuccaacgugaagaaccuuuacgagaaaguccgcaaucagcugaagaacaaugccaaagaaauugggaacggauguuuugaguucuaucacaagugcgauaauacauguauggaaagcgugaagaacggcacguacgacuauccuaaauacucugaggaagccaagcucaauagagagaaaaucgaugggguuaagcuggaguccaccaaaaucuaucagauucuugcuaucuacagcacaguggccucuucccugguccucgugguuagccugggcgcgauuuccuuuuggaugugcucuaacggaagccugcaaugccggaucuguauuuga

SEQ ID NO: 203999 - RNA, 1701 nt, Artificial Sequence
  derived and/or modified CDS sequence (opt5) from hemagglutinin__InfluenzaA__AHV83802
augaaggccauccuggugguccuccuguacaccuucgcuacagccaacgcggacacgcuuugcauuggcuaucacgcuaauaacagcaccgauacaguugacaccgugcuggagaagaaugugacagucacccauuccgugaaccuccuggaagauaagcacaaugggaaacuuuguaagcugagaggaguugcuccccuccaucugggcaaaugcaacaucgccggguggauucugggaaauccugagugugaaucucucagcacagccuccucuuggagcuacaucguggagaccuccucuagcgacaacggcacgugcuauccgggggauuuuauuaauuacgaagaacugcgggagcagcuuuccagcgucucuuccuucgaacgcuuugagaucuuccccaagaccagcucuuggccuaaccacgacuccaauaagggagugacagccgcuuguccccaugccggcgcgaaaucuuuuuauaagaaccugaucuggcucguuaaaaagggcaauucuuacccuaaacugucccaaagcuauauuaacgauaaggggaaggaagugcuuguccuguggggaauccaccaccccuccaccacagccgaccagcagggccucuaccagaauguggaugcuuacguguucgucgggaccucuagauauagcaaaaaguuuaaaccugagauugccauccggccgaagguucgcgaccaagagggaagaaugaacuacuauuggacgcugguggaacccggcgauaaaauuacauucgaggcuaccgggaaccugguggucccucgguacgccuuuacaauggaacgcaaugcgggauccggcaucauuaucagcgacacccccgugcaugauugcaacaccacaugucagacgccugagggcgccaucaauaccucucuccccuuccagaacauucacccgaucacaauugggaagugcccuaaauauguuaaguccaccaagcugagacuugcuacaggacugcggaaugugcccagcauccagucucgcggccucuuuggggccauugcuggauucaucgaaggcggguggaccggaauggucgacggcugguacggcuaucaucaccaaaacgagcaggggagcggauacgccgccgaccugaaauccacgcagaaugcuaucgauaagauuacaaacaaagugaauagcguuaucgagaagaugaacacccaguuuaccgcggugggcaaagaguucaaucaccuugagaagagaauugaaaaccugaauaagaaagucgacgauggguuccucgacaucuggacauacaacgccgagcugcuggugcuccuggaaaaugagcggacccuugauuaucaugacagcaacgucaagaaccuguacgagaaagugcgcaaucaacucaagaacaaugcuaaagaaauuggaaacggcuguuuugaguucuaucacaagugcgauaauacauguauggaauccguuaagaacgggacguacgacuauccuaaauacagcgaggaagccaagcugaauagagagaaaaucgauggcgugaaacuugagucuacccggaucuaucagauucuggccaucuacuccacagucgcuagcucucucgugcugguugugucccugggagccauuagcuuuuggaugugcuccaacggcucucuccagugccgcaucuguauuuga

SEQ ID NO: 204000 - RNA, 1701 nt, Artificial Sequence; identical to SEQ ID NO: 202112
  derived and/or modified CDS sequence (opt5) from hemagglutinin__InfluenzaA__AHV83803

SEQ ID NO: 204001 - RNA, 1701 nt, Artificial Sequence; identical to SEQ ID NO: 202112
  derived and/or modified CDS sequence (opt5) from hemagglutinin__InfluenzaA__AHV83804

SEQ ID NO: 204002 - RNA, 1701 nt, Artificial Sequence; identical to SEQ ID NO: 202112
  derived and/or modified CDS sequence (opt5) from hemagglutinin__InfluenzaA__AHV83805

SEQ ID NO: 204003 - RNA, 1701 nt, Artificial Sequence; identical to SEQ ID NO: 203992
  derived and/or modified CDS sequence (opt5) from hemagglutinin__InfluenzaA__AHV83806

SEQ ID NO: 204004 - RNA, 1701 nt, Artificial Sequence
  derived and/or modified CDS sequence (opt5) from hemagglutinin__InfluenzaA__AHV83807
augaaggccauccuggugguccuccuguacaccuucgcuacagccaacgcggacacgcuuugcauuggcuaucacgcuaauaacagcaccgauacaguugacaccgugcuggagaaggaugugacagucacccauuccgugaaucuccuggaagacaagcacaacgggaaacuuuguaagcugagaggaguugcuccccuccaucugggcaaaugcaauaucgccggguggauucugggaaacccugagugugaaucucucagcacagccuccucuuggagcuacaucguggagaccuccucuagcgauaauggcacgugcuauccgggggacuuuauuaacuacgaagaacugcgggagcagcuuuccagcgucucuuccuucgaacgcuuugagaucuuccccaagaccagcucuuggccuaaucacgauuccaacaagggagugacagccgcuuguccccaugccggcgcgaaaucuuuuuauaagaaucugaucuggcucguuaaaaagggcaacagcuacccuaaacugucccaaagcuauauuaaugacaaggggaaggaagugcuuguccuguggggaauccaccaccccuccaccacagccgaucagcagucucucuaccagaacgcugacgccuacguguucgugggcaccagcagauauuccaaaaaguuuaaaccugagauugcuauccggccgaagguccgcgaucaagaggggagaaugaauuacuauuggacgcugguugaacccggagacaaaauuacauucgaggccaccggcaaccugguggugccucgguacgcguuuacaauggaacgcaacgccgggagcggaaucauuaucucugauacccccguccaugacugcaauaccacaugucagacgccugagggcgcuaucaacaccucccuccccuuccagaauauucacccgaucacaauuggcaagugcccuaaauauguuaagagcaccaagcugagacuugccacagggcugcggaacgugcccucuauccagagccgcggacucuuuggcgcuauugccggguucaucgaaggaggcuggaccgggaugguggacggaugguacggcuaucaucaccaaaaugagcagggcuccggguacgccgcugaucugaaaucuacgcagaacgcgaucgacaagauuacaaauaaagucaacagcgugaucgagaagaugaauacccaguuuaccgccguuggaaaagaguucaaccaccuugagaagagaauugaaaaucugaacaagaaaguggaugacggcuuccucgauaucuggacauacaaugcugagcugcugguccuccuggaaaacgagcggacccuugacuaucaugauuccaaugugaagaaccuguacgagaaaguccgcaaccaacucaagaauaacgccaaagaaauugggaauggauguuuugaguucuaucacaagugcgacaacacauguauggaaagcgugaagaauggcacguacgauuauccuaaauacucugaggaagccaagcugaacagagagaaaaucgacgggguuaaacuugaguccacccggaucuaucagauucuggcuaucuacagcacaguggccucuucccucguccuggugguuagccugggcgcgauuuccuuuuggaugugcucuaauggaagccuccagugccgcaucuguauuuga

SEQ ID NO: 204005 - RNA, 1701 nt, Artificial Sequence
  derived and/or modified CDS sequence (opt5) from hemagglutinin__InfluenzaA__AHV83808
augaaggccauccuggugguccuccuguacaccuucgcuacagccaacgcggacacgcuuugcauuggcuaucacgcuaauaacagcaccgauacaguugacaccgugcuggagaagaaugugacagucacccauuccgugaaccuccuggaagauaagcacaaugggaaacuuuguaagcugagaggaguugcuccccuccaucugggcaaaugcaacaucgccggguggauucugggaaauccugagugugaaucucucagcacagccuccucuuggagcuacaucguggagaccuccucuagcgacaacggcacgugcuauccgggggauuuuauuaauuacgaagaacugcgggagcagcuuuccagcgucucuuccuucgaacgcuuugagaucuuccccaagaccagcucuuggccuaaccacgacuccaauaagggagugacagccgcuuguccccaugccggcgcgaaaucuuuuuauaagaaccugaucuggcucguuaaaaagggcaauagcuacccuaaacugucccaaagcuauauuaacgauaaggggaaggaagugcuuguccuguggggaauccaccaccccuccaccacagccgaccagcagucucucuaccagaaugcugaggccuacguguucgugggcaccagcagauauuccaaaaaguuuaaaccugagauugcuauccggccgaagguccgcgaucaagaagggagaaugaacuacuauuggacgcugguugagcccggagacaaaauuacauucgaagccaccggcaaccugguggugccucgguacgcguuuacaauggagcgcaaugccgggagcggaaucauuaucucugauacccccguccaugacugcaacaccacaugucagacgccugaaggcgcuaucaauaccucccuccccuuccagaacauucacccgaucacaauuggcaagugcccuaaauauguuaagagcaccaagcugagacuugccacagggcugcggaaugugcccucuauccagagccgcggacucuuuggcgcuauugccggguucaucgagggaggcuggaccgggaugguggauggaugguacggcuaucaucaccaaaacgagcagggcuccggguacgccgcugaccugaaaucuacgcagaaugcgaucgacaagauuacaaacaaagucaauagcgugaucgaaaagaugaacacccaguuuaccgccguuggaaaagaguucaaucaccuugaaaagagaauugagaaccugaauaagaaaguggaugacggcuuccucgauaucuggacauacaacgcugaacugcugguccuccuggagaaugagcggacccuugacuaucaugauuccaacgugaagaaccuguacgaaaaaguccgcaaucaacucaagaacaaugccaaagagauugggaacggauguuuugaguucuaucacaagugcgacaauauguguauggagagcgugaagaacggcacauacgauuauccuaaauacucugaagaggccaagcugaauagagagaaaaucgacgggguuaaacuugaauccacgcggaucuaucagauucuggcuaucuacagcaccguggccucuucccucguccuggugguuagccugggcgcgauuuccuuuuggaugugcucuaacggaagccuccagugccgcaucuguauuuga

SEQ ID NO: 204006 - RNA, 1701 nt, Artificial Sequence; identical to SEQ ID NO: 202112
  derived and/or modified CDS sequence (opt5) from hemagglutinin__InfluenzaA__AHV83809

SEQ ID NO: 204007 - RNA, 1701 nt, Artificial Sequence; identical to SEQ ID NO: 203093
  derived and/or modified CDS sequence (opt5) from hemagglutinin__InfluenzaA__AHV83810

SEQ ID NO: 204008 - RNA, 1701 nt, Artificial Sequence
  derived and/or modified CDS sequence (opt5) from hemagglutinin__InfluenzaA__AHV83812
augaaggccauccuggugguccuccuguacaccuucacaacggcuaacgccgacacccuuugcauuggcuaucacgcgaauaacagcacagauaccguugacacagugcuggagaaaaaugugaccgucacacauuccgugaaccuccuggaagauaagcacaaugggaaacuuuguaagcugagaggaguugcuccccuccaucugggcaaaugcaacaucgccggguggauucugggaaauccugagugugaaucucucagcaccgccuccucuuggagcuacaucguggagacguccucuagcgacaacgggaccugcuauccgggcgauuuuauuaauuacgaagaacugcgggagcagcuuuccagcgucucuuccuucgaacgcuuugagaucuuccccaagacaagcucuuggccuaaccacgacuccaauaagggagugaccgcugccuguccccaugcuggcgccaagagcuuuuauaagaaccugaucuggcucguuaaaaagggcaauucuuacccuaaacugucccaaagcuauauuaacgauaaggggaaggaagugcuuguccuguggggaauccaccaccccuccacaaccgcggaccagcagucucucuaccagaaugccgaugcuuacguguucgugggcacgagcagauauuccaaaaaguuuaaaccugagauugccauccggccgaagguccgcgaccaagaggggagaaugaacuacuauuggacacugguugaacccggagauaaaauuaccuucgaggcuacaggcaaccugguggugccucgguacgccuuuaccauggaacgcaaugcggggagcggaaucauuaucucugacacccccguccaugauugcaacacaacgugucagaccccugagggcgccaucaauacaucccuccccuuccagaacauucacccgaucaccauuggcaagugcccuaaauauguuaagagcacaaagcugagacuugcuaccgggcugcggaaugugcccucuauccagagccgcggacucuuuggcgccauugcuggguucaucgaaggaggcuggacggggaugguggacggaugguacggcuaucaucaccaaaacgagcagggcuccggguacgccgccgaccugaaaucuacacagaaugcuaucgauaagauuaccaacaaagucaauagcgugaucgagaagaugaacacccaguuuacagcgguuggaaaagaguucaaucaccuugagaagagaauugaaaaccugaauaagaaaguggacgauggcuuccucgacaucuggaccuacaacgccgagcugcugguccuccuggaaaaugagcggacacuugauuaucaugacuccaacgugaagaaccuguacgagaaaguccgcaaucaacucaagaacaaugcuaaagaaauugggaacggauguuuugaguucuaucacaagugcgauaauacguguauggaaagcgugaagaacggcaccuacgaguauccuaaauacucugaagaggccaagcugaauagagagaaaaucgacgggguuaaacuugaauccacaaaaaucuaucagauucuggccaucuacagcaccguggcuucuucccucguccuggugguuagccugggcgccauuuccuuuuggaugugcucuaacggaagccuccagugccggaucuguauuuga

SEQ ID NO: 204009 - RNA, 1701 nt, Artificial Sequence; identical to SEQ ID NO: 202112
  derived and/or modified CDS sequence (opt5) from hemagglutinin__InfluenzaA__AHV83813

SEQ ID NO: 204010 - RNA, 1701 nt, Artificial Sequence
  derived and/or modified CDS sequence (opt5) from hemagglutinin__InfluenzaA__AHV83814
augaaggccauccuggugguccuccuguacaccuucgcuacagccaacgcggacacgcuuugcauuggcuaucacgcuaauaacagcaccgauacaguugacaccgugcuggagaagaaugugacagucacccauuccgugaaccuccuggaagauaagcacaaugggaaacuuuguaagcugagaggaguugcuccccuccaucugggcaaaugcaacaucgccggguggauucugggaaauccugagugugaaucucucagcacagccuccucuuggagcuacaucguggagaccuccucuagcgacaacggcacgugcuauccgggggauuuuauuaauuacgaagaacugcgggagcagcuuuccagcgucucuuccuucgaacgcuuugagaucuuccccaagaccagcucuuggccuaaccacgacuccaauaagggagugacagccgcuuguccccaugccggcgcgaaaucuuuuuauaagaaccugaucuggcucguuaaaaagggcaauagcuacccuaaacugucccaaagcuauauuaacgauaaggggaaggaagugcuuguccuguggggaauccaccaccccuccaccacagccgaccagcagucucucuaccagaaugcugaugccuacguguucgugggcaccagcagauauuccaaaaaguuuaaaccugagauugcuauccggccgaagguccgcgaccaagaggggagaaugaacuacuauuggacgcugguugaacccggagauaaaauuacauucgaggccaccggcaaccugguggugccucgguacgcguuuacaauggaacgcaaugccgggagcggaaucauuaucucugacacccccguccaugauugcaacaccacaugucagacgccugagggcgcuaucaauaccucccuccccuuccagaacauucacccgaucacaauuggcaagugcccuaaauauguuaagagcaccaagcugagacuugccacagggcugcggaaugugcccucuauccagagccgcggacucuuuggcgcuauugccggguucaucgaaggaggcuggaccgggaugguggacggaugguacggcuaucaucaccaaaacgagcagggcuccggguacgccgcugaccugaaaucuacgcagaaugcgaucgauaagauuacaaacaaagucaauagcgugaucgagaagaugaacacccaguuuaccgccguuggaaaagaguucaaucaccuugagaagagaauugaaaaccugaauaagaaaguggacgauggcuuccucgacaucuggacauacaacgcugagcugcugguccuccuggaaaaugagcggaaccuugauuaucaugacuccaacgugaagaaucuguacgagaaaguccgcaaccaacucaagaccaaugccaaagaaauugggaacggauguuuugaguucuaucacaagugcgauaauacauguauggaaagcgugaagaacggcacguacgacuauccuaaauacucugaggaagccaagcugaauagagagaaaaucgaugggguuaaacuugaguccacccggaucuaucagauucuggcuaucuacagcacaguggccucuucccucguccuggugguuagccugggcgcgauuuccuuuuggaugugcucuaacggaagccuccagugccgcaucuguauuuga

SEQ ID NO: 204011 - RNA, 1701 nt, Artificial Sequence; identical to SEQ ID NO: 203093
  derived and/or modified CDS sequence (opt5) from hemagglutinin__InfluenzaA__AHV83815

SEQ ID NO: 204012 - RNA, 1701 nt, Artificial Sequence; identical to SEQ ID NO: 202112
  derived and/or modified CDS sequence (opt5) from hemagglutinin__InfluenzaA__AHV83816

SEQ ID NO: 204013 - RNA, 1701 nt, Artificial Sequence
  derived and/or modified CDS sequence (opt5) from hemagglutinin__InfluenzaA__AHV83817
augaaggccauccuggugguccuccuguacaccuucgcuacagccaacgcggacacgcuuugcauuggcuaucacgcuaauaacagcaccgauacaguugacaccgugcuggagaagaaugugacagucacccauuccgugaaccuccuggaagauaagcacaaugggaaacuuuguaagcugagaggaguugcuccccuccaucugggcaaaugcaacaucgccggguggauucugggaaauccugagugugaaucucucagcacagccuccucuuggagcuacaucguggagaccuccucuagcgacaacggcacgugcuauccgggggauuuuauuaauuacgaagaacugcgggagcagcuuuccagcgucucuuccuucgaacgcuuugagaucuuccccaagaccagcucuuggccuaaccacgacuccaauaagggagugacagccgcuuguccccaugccggcgcgaaaucuuuuuauaagaaccugguuuggcucgugaaaaagggcaauagcuacccuaaacugucccaaagcuauaucaacgauaaggggaaggaaguccuugugcuguggggcauucaccaccccuccaccacagccgaccagcagucucucuaccagaaugcugaugccuacguguucgucggaaccagcagauauuccaaaaaguuuaaaccugagaucgcuauucggccgaagguucgcgaccaagaggggagaaugaacuacuauuggacgcugguggaacccggagauaaaaucacauucgaggccaccggcaaccugguggucccucgguacgcguuuacaauggaacgcaaugccgggagcggaauuaucauuucugacacccccgugcaugauugcaacaccacaugucagacgccugagggcgcuaucaauaccucccuccccuuccagaacauccacccgauuacaaucggcaagugcccuaaauauguuaagagcaccaagcugagacuugccacagggcugcggaaugugcccucuauucagagccgcggacucuuuggcgcuaucgccggguucauugaaggaggcuggaccgggauggucgacggaugguacggcuaucaucaccaaaacgagcagggcuccggguacgccgcugaccugaaaucuacgcagaaugcgaucgauaagaucacaaacaaagugaauagcguuauugagaagaugaacacccaguuuaccgccgugggaaaagaguucaaucaccuugagaagagaaucgaaaaccugaauaagaaagucgacgauggcuuccucgacauuuggacauacaacgcugagcugcuggugcuccuggaaaaugagcggacccuugauuaucaugacuccaacgucaagaaccuguacgagaaagugcgcaaucaacucaagaacaaugccaaagaaaucgggaacggauguuuugaguucuaucacaagugcgauaauacauguauggaaagcguuaagaacggcacguacgacuauccuaaauacucugaggaagccaagcugaauagagagaaaauugauggggugaaacuugaguccacccggaucuaucagauccuggcuauuuacagcacagucgccucuucccucgugcugguugugagccugggcgcgaucuccuuuuggaugugcucuaacggaagccuccagugccgcauuuguaucuga

SEQ ID NO: 204014 - RNA, 1701 nt, Artificial Sequence; identical to SEQ ID NO: 203992
  derived and/or modified CDS sequence (opt5) from hemagglutinin__InfluenzaA__AHV83818

SEQ ID NO: 204015 - RNA, 1701 nt, Artificial Sequence; identical to SEQ ID NO: 203974
  derived and/or modified CDS sequence (opt5) from hemagglutinin__InfluenzaA__AHV83819

SEQ ID NO: 204016 - RNA, 1701 nt, Artificial Sequence
  derived and/or modified CDS sequence (opt5) from hemagglutinin__InfluenzaA__AHV83821
augaaggccauccuggugguccuccuguacaccuucgcuacagccaacgcggacacgcuuugcauuggcuaucacgcuaauaacagcaccgauacaguugacaccgugcuggagaagaaugugacagucacccauuccgugaaccuccuggaagauaagcacaaugggaaacuuuguaagcugagaggaguuucuccccuccaucugggcaaaugcaacaucgccggguggauucugggaaauccugagugugaaagccucuccacagccucuagcugguccuacaucguggagaccucuagcuccgacaacggcacgugcuauccgggggauuuugucaauuacgaagaacugcgggagcagcuuagcucuguguccagcuucgaacgcuuugagauuuuccccaagaccucuuccuggccuaaccacgacagcaauaagggaguuacagcugccuguccccaugcuggcgccaaaucuuuuuauaagaaccugaucuggcucgugaaaaagggcaauuccuacccuaaacugagccaauccuauaucaacgauaaggggaaggaaguccuugugcuguggggcauucaccaccccucuaccacagcggaccagcagagccucuaccagaaugccgaugcuuacguguucgucggaaccuccagauauagcaaaaaguuuaaaccugagaucgccauucggccgaagguucgcgaccaagaggggagaaugaacuacuauuggacgcugguggaacccggagauaaaaucacauucgaggcuaccggcaaccugguggucccucgguacgccuuuacaauggaacgcaaugcggggucuggaauuaucauuuccgacacccccgugcauaacugcaauaccacaugucagacgccugagggcgccaucaacaccagccuccccuuccagaauauccacccgauuacaaucggcaagugcccuaaauauguuaagucuaccaagcugagacuugcuacagggcugcggaacgugcccagcauucagucccgcggacucuuuggcgccaucgcuggguucauugaaggaggcuggaccgggauggucgauggaugguacggcuaucaucaccaaaaugagcagggcucuggguacgccgccgaccugaaaagcacgcagaacgcuaucgacaagaucacaaauaaagugaacuccguuauugagaagaugaauacccaguuuaccgcggugggaaaagaguucaaccaccuugagaagagaaucgaaaaucugaacaagaaagucgaugacggcuuccucgauauuuggacauacaaugccgagcugcuggugcuccuggaaaacgagcggacccuugacuaucaugauagcaacgucaagaaucuguacgagaaagugcgcaaccaacucaagaauaacgcuaaagaaaucgggaauggauguuuugaguucuaucacaagugcgacaacacauguauggaaucuguuaagaauggcacguacgauuauccuaaauacuccgaggaagccaagcugaacagagagaaaauugacggggugaaacuugagagcacccggaucuaucagauccuggccauuuacucuacagucgcuuccagccucgugcugguugugucccugggcgccaucucuuuuuggaugugcagcaauggaucccuccagugccgcauuuguaucuga

SEQ ID NO: 204017 - RNA, 1701 nt, Artificial Sequence
  derived and/or modified CDS sequence (opt5) from hemagglutinin__InfluenzaA__AHV83822
augaaggccauccuggugguccuccuguacaccuucgcuacagccaacgcggacacgcuuugcauuggcuaucacgcuaauaacagcaccgauacaguugacaccgugcuggagaagaaugugacagucacccauuccgugaaccuccuggaagauaagcacaaugggaaacuuuguaagcugagaggaguuucuccccuccaucugggcaaaugcaacaucgccggguggauucugggaaauccugagugugaaagccucuccacagccucuagcugguccuacaucguggagaccucuagcuccgacaacggcacgugcuauccgggggauuuugucaauuacgaagaacugcgggagcagcuuagcucuguguccagcuucgaacgcuuugagauuuuccccaagaccucuuccuggccuaaccacgacagcaauaagggaguuacagcugccuguccccaugcuggcgccaaaucuuuuuauaagaaccugaucuggcucgugaaaaagggcaauuccuacccuaaacugagccaauccuauaucaacgauaaggggaaggaaguccuugugcuguggggcauucaccaccccucuaccacagcggaccagcagagccucuaccagaaugccgaugcuuacguguucgucggaaccuccagauauagcaaaaaguuuaaaccugagaucgccauucggccgaagguucgcgaccaagaggggagaaugaacuacuauuggacgcugguggaacccggagauaaaaucacauucgaggcuaccggcaaccugguggucccucgguacgccuuuacaauggaacgcaaugcggggucuggaauuaucauuuccgacacccccgugcaugauugcaacaccacaugucagacgccugagggcgccaucaauaccagccuccccuuccagaacauccacccgauuacaaucggcaagugcccuaaauauguuaagucuaccaagcugagacuugcuacagggcugcggaaugugcccagcauucagucccgcggacucuuuggcgccaucgcuggguucauugaaggaggcuggaccgggauggucgacggaugguacggcuaucaucaccaaaacgagcagggcucuggguacgccgccgaccugaaaagcacgcagaaugcuaucgauaagaucacaaacaaaguuaauuccauuaucgagaagaugaacacccaguuuaccgcggugggaaaagaguucaaucaccuugagaagagaauugaaaaccugaauaagaaaguggacgauggcuuccucgacaucuggacauacaacgccgagcugcugguccuccuggaaaaugagcggacccuugauuaucaugacagcaacgugaagaaccuguacgagaaaguccgcaaucaacucaagaacaaugcuaaagaaauugggaacggauguuuugaguucuaucacaagugcgauaauacauguauggaaucugugaagaacggcacguacgacuauccuaaauacuccgaggaagccaagcugaauagagagaaaaucgaugggguuaaacuugagagcacccggaucuaucagauucuggccaucuacucuacaguggcuuccagccucguccuggugguuucccugggcgccauuucuuuuuggaugugcagcaacggaucccuccagugccgcaucuguauuuga

SEQ ID NO: 204018 - RNA, 1701 nt, Artificial Sequence
  derived and/or modified CDS sequence (opt5) from hemagglutinin__InfluenzaA__AHV83823
augaaggccauccuggugguccuccuguacaccuucgcuacagccaacgcggacacgcuuugcauuggcuaucacgcuaauaacagcaccgauacaguugacaccgugcuggagaaaaaugugacagucacccauuccgugaaccuccuggaagauaagcacaaugggaaacuuuguaagcugagaggaguugcuccccuccaucugggcaaaugcaacaucgccggguggauucugggaaauccugagugugaaucucucagcacagccuccucuuggagcuacaucguggagaccuccucuagcgacaacggcacgugcuauccgggggauuuuauuaauuacgaagaacugcgggagcagcuuuccagcgucucuuccuucgaacgcuuugagaucuuccccaagaccagcucuuggccuaaccacgacuccaauaagggagugacagccgcuuguccccaugccggcgcgaaaucuuuuuauaagaaccugaucuggcucguuaaaaagggcaauagcuacccuaaaauuucccaaagcuauaucaacgauaaggggaaggaagugcugguccuuuggggcauucaccaccccuccaccacagccgaccagcagucucuguaccagaaugcugaugccuacguguucgugggaaccagcagauauuccaaaaaguuuaaaccugagaucgcuauucggccgaagguccgcgaccaagaggggagaaugaacuacuauuggacgcucguugaacccggagauaaaaucacauucgaggccaccggcaaccugguggugccucgguacgcguuuacaauggaacgcaauaccgggagcggaauuaucaucucugacacccccguccaugauugcaacacaacgugucagaccccugagggcgccauuaauacaucccugcccuuccagaacauccacccgauuaccaucggcaagugcccuaaauauguuaagagcacaaagcucagacuggcuaccgggcuucggaaugugcccucuauucagagccgcggacuguuuggcgccaucgcuggguucaucgaaggaggcuggacggggaugguggacggaugguacggcuaucaucaccaaaacgagcagggcuccggguacgccgccgaccucaaaucuacacagaaugcuauugauaagaucaccaacaaagucaauagcgugauugagaagaugaacacccaguuuacagcgguuggaaaagaguucaaucaccuggagaagagaaucgaaaaccuuaauaagaaaguggacgauggcuuccuggacauuuggaccuacaacgccgagcuccugguccugcucgaaaaugagcggacacuggauuaucaugacuccaacgugaagaaccuuuacgagaaaguccgcaaucaacugaagaacaaugcuaaagaaaucgggaacggauguuuugaguucuaucacaagugcgauaauacguguauggaaagcgugaagaacggcaccuacgacuauccuaaauacucugaggaagccaagcucaauagagagaaaaucgaugggguuaagcuggaguccacacggauuuaucagauccuugccauuuacagcaccguggcuucuucccugguccucgugguuagccugggcgccaucuccuuuuggaugugcucuaacggaagccugcagugccgcauuuguaucuga

SEQ ID NO: 204019 - RNA, 1701 nt, Artificial Sequence
  derived and/or modified CDS sequence (opt5) from hemagglutinin__InfluenzaA__AHV83824
augaaggccauccuggugguccuccuguacaccuucgcuacagccaacgcggacacgcuuugcauuggcuaucacgcuaauaacagcaccgauacaguugacaccgugcuggagaagaaugugacagucacccauuccgugaaccuccuggaagauaagcacaaugggaaacuuuguaagcugagaggaguugcuccccuccaucugggcaaaugcaacaucgccggguggauucugggaaauccugagugugaaucucucagcacagccuccucuuggagcuacaucguggagaccuccucuagcgacaacggcacgugcuauccgggggauuuuauuaauuacgaagaacugcgggagcagcuuuccagcgucucuuccuucgaacgcuuugagaucuuccccaagaccagcucuuggccuaaccacgacuccaauaagggagugacagccgcuuguccccaugccggcgcgaaaucuuuuuauaagaaccugaucuggcucguuaaaaagggcaauagcuacccuaaacugagacaauccuauauuaacgauaaggggaaggaagugcuuguccuguggggaauccaccaccccagcaccacaaccgaccagcagucccucuaccagaaugccgaugcuuacguguucgugggcacgucucgguauagcaaaaaguuuaaaccugagauugccauccgcccgaaggucagagaccaagaggggcggaugaacuacuauuggacacugguugaacccggagauaaaauuaccuucgaggcuacaggcaaccugguggugccucgcuacgccuuuaccauggaaagaaaugcgggguccggaaucauuaucagcgacacccccguccaugauugcaacacaacgugucagaccccugagggcgccaucaauacaucucuccccuuccagaacauucacccgaucaccauuggcaagugcccuaaauaugugaaguccacaaagcugcggcuugcuaccgggcugcgcaauguucccagcauccagucuagaggacucuuuggcgccauugcuggguucaucgaaggaggcuggacggggaugguggacggaugguacggcuaucaucaccaaaacgagcagggcagcggguacgccgccgaccugaaauccacacagaaugcuaucgauaagauuaccaacaaagucaauucugugaucgagaagaugaacacccaguuuacagcgguuggaaaagaguucaaucaccuugagaagcggauugaaaaccugaauaagaaaguggacgauggcuuccucgacaucuggaccuacaacgccgagcugcugguccuccuggaaaaugagcgcaaccuugauuaucaugacagcaacgugaagaaucuguacgagaaagucagaaaccaacucaagaauaacgcuaaagaaauugggaauggauguuuugaguucuaucacaagugcgauaacacauguauggaauccgugaagaauggcacguacgacuauccuaaauacagcgaggaagccaagcugaaccgggagaaaaucgaugggguuaaacuugagucuacccgcaucuaucagauucuggccaucuacuccacaguggcuagcucucucguccuggugguuucccugggcgccauuagcuuuuggaugugcuccaauggaucucuccagugcagaaucuguauuuga

SEQ ID NO: 204020 - RNA, 1701 nt, Artificial Sequence; identical to SEQ ID NO: 203992
  derived and/or modified CDS sequence (opt5) from hemagglutinin__InfluenzaA__AHV83825

SEQ ID NO: 204021 - RNA, 1701 nt, Artificial Sequence
  derived and/or modified CDS sequence (opt5) from hemagglutinin__InfluenzaA__AHV83826
augaaggccauccuggugguccuccuguacaccuucgcuacagccaacgcggacacgcuuugcauuggcuaucacgcuaauaacagcaccgauacaguugacaccgugcuggagaagaaugugacagucacccauuccgugaaccuccuggaagauaagcacaaugggaaacuuuguaagcugagaggaguugcuccccuccaucugggcaaaugcaacaucgccggguggauucugggaaauccugagugugaaucucucagcacagccuccucuuggagcuacaucguggagaccuccucuagcgacaacggcacgugcuauccgggggauuuuauuaauuacgaagaacugcgggagcagcuuuccagcgucucuuccuucgaacgcuuugagaucuuccccaagaccagcucuuggccuaaccacgacuccaauaagggagugacagccgcuuguccccaugccggcgcgaaaucuuuuuauaagaaccugaucuggcucguuaaaaagggcaauagcuacccuaaacugucccaaagcuauuucaacgauaaggggaaggaagugcuuguccuguggggcauucaccaccccuccaccacagccgaccagcagucucucuaccagaaugcugaugccuacguguuugugggaaccagcagauauuccaaaaaguucaaaccugagaucgcuauucggccgaagguccgcgaccaagaggggagaaugaacuacuauuggacgcugguugaacccggagauaaaaucacauuugaggccaccggcaaccugguggugccucgguacgcguucacaauggaacgcaaugccgggagcggaauuaucauuucugacacccccguccaugauugcaacaccacaugucagacgccugagggcgcuaucaauaccucccuccccuuucagaacauccacccgauuacaaucggcaagugcccuaaauauguuaagagcaccaagcugagacuugccacagggcugcggaaugugcccucuauucagagccgcggacucuucggcgcuaucgccggguuuauugaaggaggcuggaccgggaugguggacggaugguacggcuaucaucaccaaaacgagcagggcuccggguacgccgcugaccugaaaucuacgcagaaugcgaucgauaagaucacaaacaaagucaauagcgugauugagaagaugaacacccaguucaccgccguuggaaaagaguucaaucaccuugagaagagaaucgaaaaccugaauaagaaaguggacgauggcuuucucgacauuuggacauacaacgcugagcugcugguccuccuggaaaaugagcggacccuugauuaucaugacuccaacgugaagaaccuguacgagaaaguccgcaaucaacucaagaacaaugccaaagaaaucgggaacggauguuucgaguuuuaucacaagugcgauaauacauguauggaaagcgugaagaacggcacguacgacuauccuaaauacucugaggaagccaagcugaauagagagaaaauugaugggguuaaacuugaguccacccggaucuaucagauccuggcuauuuacagcacagccgcgucuucccucgugcuggucgugagccugggcgcuaucuccuucuggaugugcucuaacggaagccuccagugccgcauuuguaucuga

SEQ ID NO: 204022 - RNA, 1701 nt, Artificial Sequence; identical to SEQ ID NO: 202112
  derived and/or modified CDS sequence (opt5) from hemagglutinin__InfluenzaA__AHV83827

SEQ ID NO: 204023 - RNA, 1701 nt, Artificial Sequence; identical to SEQ ID NO: 202112
  derived and/or modified CDS sequence (opt5) from hemagglutinin__InfluenzaA__AHV83828

SEQ ID NO: 204024 - RNA, 1701 nt, Artificial Sequence
  derived and/or modified CDS sequence (opt5) from hemagglutinin__InfluenzaA__AHV83829
auggaggccauccuggugguccuccuguacaccuucgcuacagccaacgcggacacgcuuugcauuggcuaucacgcuaauaacagcaccgauacaguugacaccgugcuggaaaagaaugugacagucacccauuccgugaaccuccuggaggauaaacacaaugggaaacuuuguaaacugagaggaguugcgccccuccaucugggcaagugcaacaucgccggguggauucugggaaauccugaaugugagucucucagcacagcuuccucuuggagcuacaucguggaaaccuccucuagcgacaacggcacgugcuauccgggggauuuuauuaauuacgaggagcugcgggaacagcuuuccagcgucucuuccuucgagcgcuuugaaaucuuccccaaaaccagcucuuggccuaaccacgacuccaauaagggagugacagccgcuuguccccaugccggcgccaagagcuuuuauaaaaaccugaucuggcucguuaagaaaggcaauucuuacccuaagauuucccaaagcuauaucaacgauaaagggaaggaggugcugguccuuuggggcauucaccaccccuccaccacagccgaccagcagucucuguaccagaaugcugaugccuacguguucgugggaaccagcagauauuccaagaaauuuaagccugagaucgcuauucggccgaaaguccgcgaccaagaagggagaaugaacuacuauuggacgcucguugagcccggagauaagaucacauucgaagccaccggcaaccugguggugccucgguacgcguuuacaauggagcgcaaugccgggagcggaauuaucaucucugacacccccguccaugauugcaacaccacaugucagacgccugaaggcgcuauuaauaccucccugcccuuccagaacauccacccgauuacaaucggcaaaugcccuaaguaugugaaaagcaccaagcucagacuggccacagggcuucggaauguucccucuauucagagccgcggacuguuuggcgcuaucgccggguucaucgagggaggcuggaccgggaugguggacggaugguacggcuaucaucaccaaaacgagcagggcuccggguacgccgcugaccucaagucuacgcagaaugcgauugauaaaaucacaaacaaggucaauagcgugauugaaaagaugaacacccaguuuaccgccguuggaaaggaguucaaucaccuggagaaaagaaucgaaaaccuuaauaagaagguggacgauggcuuccuggacauuuggacauacaacgcugaacuccugguccugcucgagaaugagcggacccuggauuaucaugacuccaacgugaaaaaccuuuacgaaaagguccgcaaucaacugaaaaacaaugccaaggagaucgggaacggauguuuugaguucuaucacaaaugcgauaauacauguauggaaagcgugaagaacggcacguacgacuauccuaaguacucugaagaggccaaacucaauagagagaagaucgaugggguuaaacuggaauccacccggauuuaucagauccuugcuauuuacagcacaguggccucuucccugguccucgugguuagccugggcgcgaucuccuuuuggaugugcucuaacggaagccugcagugccgcauuuguaucuga

SEQ ID NO: 204025 - RNA, 1701 nt, Artificial Sequence; identical to SEQ ID NO: 202112
  derived and/or modified CDS sequence (opt5) from hemagglutinin__InfluenzaA__AHV83830

SEQ ID NO: 204026 - RNA, 1701 nt, Artificial Sequence
  derived and/or modified CDS sequence (opt5) from hemagglutinin__InfluenzaA__AHV83831
augaaggccauccuggugguccuccuguacaccuucgcuacagccaacgcggacacgcuuugcauuggcuaucacgcuaauaacagcaccgauacaguugacaccgugcuggagaagaaugugacagucacccauuccgugaaccuccuggaagauaagcacaaugggaaacuuuguaagcugagaggaguugcuccccuccaucugggcaaaugcaacaucgccggguggauucugggaaauccugagugugaaucucucagcacagccuccucuuggagcuacaucguggagaccuccucuagcgacaacggcacgugcuauccgggggauuuuauuaauuacgaagaacugcgggagcagcuuuccagcgucucuuccuucgaacgcuuugagaucuuccccaagaccagcucuuggccuaaccacgacuccaauaagggagugacagccgcuuguccccaugccggcgcgaaaucuuuuuauaagaaccugaucuggcucguuaaaaagggcaauagcuacccuaaacugucccaaagcuauauuaacgauaaggggaaggaagugcuuguccuguggggaauccaccaccccuccaccauugccgaccagcagucucucuaccagaaugcugaugccuacguguucgugggcacaagcagauauuccaaaaaguuuaaaccugagaucgcuauucggccgaagguccgcgaccaagaggggagaaugaacuacuauuggacccugguugaacccggagauaaaaucacguucgaggccacaggcaaccugguggugccucgguacgcguuuaccauggaacgcaaugccgggagcggaauuaucgucucugacacacccgugcaugauugcaacaccaccugucagacaccugagggcgcuaucaauacgucccuccccuuccagaacauucacccgaucaccauuggcaagugcccuaaauauguuaagagcacaaagcugagacuugccaccgggcugcggaaugugcccucuauccagagccgcggacucuuuggcgcuauugccggguucaucgaaggaggcuggacagggauggucgacggaugguacggcuaucaucaccaaaacgagcagggcuccggguacgccgcugaccugaaaucuacccagaaugcgaucgauaagauuacgaacaaagugaauagcguuaucgagaagaugaacacacaguuuaccgccgugggaaaagaguucaaucaccuugagaagagaauugaaaaccugaauaagaaagucgacgauggcuuccucgacaucuggaccuacaacgcugagcugcuggugcuccuggaaaaugagcggacacuugauuaucaugacuccaacgucaagaaccuguacgagaaagugcgcaaucaacucaagaacaaugccaaagaaauugggaacggauguuuugaguucuaucacaagugcgauaauaccuguauggaaagcguuaagaacggcacauacgacuauccuaaauacucugaggaagccaagcugaauagagagaaaaucgauggggugaaacuugaguccacgcggaucuaucagauucuggcuaucuacagcaccgucgccucuucccucgugcugguugugagccugggcgcgauuuccuuuuggaugugcucuaacggaagccuccagugccgcaucuguauuuga

SEQ ID NO: 204027 - RNA, 1701 nt, Artificial Sequence; identical to SEQ ID NO: 203075
  derived and/or modified CDS sequence (opt5) from hemagglutinin__InfluenzaA__AHV83832

SEQ ID NO: 204028 - RNA, 1701 nt, Artificial Sequence; identical to SEQ ID NO: 202112
  derived and/or modified CDS sequence (opt5) from hemagglutinin__InfluenzaA__AHV83833

SEQ ID NO: 204029 - RNA, 1701 nt, Artificial Sequence; identical to SEQ ID NO: 203093
  derived and/or modified CDS sequence (opt5) from hemagglutinin__InfluenzaA__AHV83834

SEQ ID NO: 204030 - RNA, 1701 nt, Artificial Sequence
  derived and/or modified CDS sequence (opt5) from hemagglutinin__InfluenzaA__AHV83836
augaaggccauccuggugguccuccuguacaccuucgcuacagccaacgcggacacgcuuugcauuggcuaucacgcuaauaacagcaccgauacaguugacaccgugcuggagaagaaugugacagucacccauuccgugaaccuccuggaagauaagcacaaugggaaacuuuguaagcugagaggaguugcuccccuccaucugggcaaaugcaacaucgccggguggauucugggaaauccugagugugaaucucucagcacagccuccucuuggagcuacaucguggagaccuccucuagcgacaacggcacgugcuauccgggggauuuuauuaauuacgaggagcugcgggagcagcuuuccagcgucucuuccuucgaacgcuuugagaucuuccccaagaccagcucuuggccuaaccacgacuccaauaagggagugacagccgcuuguccccaugccggcgcgaaaucuuuuuauaagaaccugaucuggcucguuaaaaaggaaaauagcuacccuaaacugagacaauccuauauuaacgauaagggcaaggaggugcuuguccugugggggauccaccaccccagcaccacaaccgaccagcagucccucuaccagaaugccgaugcuuacguguucgugggaacgucucgguauagcaaaaaguuuaaaccugagauugccauccgcccgaaggucagagaccaagaaggccggaugaacuacuauuggacacugguugagcccggggauaaaauuaccuucgaagcuacaggaaaccugguggugccucgcuacgccuuuaccauggagagaaaugcgggcuccgggaucauuaucagcgacacccccguccaugauugcaacacaacgugucagaccccugaaggagccaucaauacaucucuccccuuccagaacauucacccgaucaccauuggcaagugcccuaaauaugugaaguccacaaagcugcggcuugcuaccggccugcgcaauguucccagcauccagucuagagggcucuuuggagccauugcuggcuucaucgaagggggauggacgggcaugguggacgggugguacggauaucaucaccaaaacgagcagggcagcggcuacgccgccgaccugaaauccacacagaaugcuaucgauaagauuaccaacaaagucaauucugugaucgaaaagaugaacacccaguuuacagcgguugggaaagaguucaaucaccuugaaaagcggauugagaaccugaauaagaaaguggacgauggauuccucgacaucuggaccuacaacgccgaacugcugguccuccuggagaaugagcgcacacuugauuaucaugacagcaacgugaagaaccuguacgaaaaagucagaaaucaacucaagaacaaugcuaaagagauuggcaacggguguuuugaguucuaucacaagugcgauaauacguguauggaauccgugaagaacggaaccuacgacuauccuaaauacagcgaagaggccaagcugaaucgggagaaaaucgauggcguuaaacuugaaucuacacgcaucuaucagauucuggccaucuacuccaccguggcuagcucucucguccuggugguuucccugggggccauuagcuuuuggaugugcuccaacggcucucuccagugcagaaucuguauuuga

SEQ ID NO: 204031 - RNA, 1701 nt, Artificial Sequence; identical to SEQ ID NO: 203979
  derived and/or modified CDS sequence (opt5) from hemagglutinin__InfluenzaA__AHV83837

SEQ ID NO: 204032 - RNA, 1701 nt, Artificial Sequence; identical to SEQ ID NO: 202112
  derived and/or modified CDS sequence (opt5) from hemagglutinin__InfluenzaA__AHV83838

SEQ ID NO: 204033 - RNA, 1701 nt, Artificial Sequence; identical to SEQ ID NO: 203075
  derived and/or modified CDS sequence (opt5) from hemagglutinin__InfluenzaA__AHV83839

SEQ ID NO: 204034 - RNA, 1701 nt, Artificial Sequence; identical to SEQ ID NO: 203093
  derived and/or modified CDS sequence (opt5) from hemagglutinin__InfluenzaA__AHV83840

SEQ ID NO: 204035 - RNA, 1701 nt, Artificial Sequence
  derived and/or modified CDS sequence (opt5) from hemagglutinin__InfluenzaA__AHV83841
augaaggccauccuggugguccuccuguacaccuucgcuacagccaacgcggacacgcuuugcauuggcuaucacgcuaauaacagcaccgauacaguugacaccgugcuggagaagaaugugacagucacccauuccgugaaccuccuggaagauaagcacaaugggaaacuuuguaagcugagaggaguugcuccccuccaucugggcaaaugcaacaucgccggguggauucugggaaauccugagugugaaucucucagcacagccuccucuuggagcuacaucguggagaccuccucuagcgacaacggcacgugcuauccgggggauuuuauuaauuacgaagaacugcgggagcagcuuuccagcgucucuuccuucgaacgcuuugagaucuuccccaagaccagcucuuggccuaaccacgacuccaauaagggagugacagccgcuuguccccaugccggcgcgaaaucuuuuuauaagaaccugaucuggcucguuaaaaagggcaauagcuacccuaaacugagacaauccuauauuaacgauaaggggaaggaagugcuuguccuguggggaauccaccaccccagcaccacaaccgaccagcagucccucuaccagaaugccgaugcuuacguguucgugggcacgucucgguauagcaaaaaguuuaaaccugagauugccauccgcccgaaggucagagaccaagaggggcggaugaacuacuauuggacacugguugaacccggagauaaaauuaccuucgaggcuacaggcaaccugguggugccucgcuacgccuuuaccauggaaagaaaugcgggguccggaaucauuaucagcgacacccccguccauaacugcaauacaacgugucagaccccugagggcgccaucaacacaucucuccccuuccagaauauucacccgaucaccauuggcaagugcccuaaauaugugaaguccacaaagcugcggcuugcuaccgggcugcgcaacguucccagcauccagucuagaggacucuuuggcgccauugcuggguucaucgaaggaggcuggacggggaugguggauggaugguacggcuaucaucaccaaaaugagcagggcagcggguacgccgccgaccugaaauccacacagaacgcuaucgacaagauuaccaauaaagucaacucugugaucgagaagaugaauacccaguuuacagcgguuggaaaagaguucaaccaccuugagaagcggauugaaaaucugaacaagaaaguggaugacggcuuccucgauaucuggaccuacaaugccgagcugcugguccuccuggaaaacgagcgcacacuugacuaucaugauagcaacgugaagaaucuguacgagaaagucagaaaccaacucaagaauaacgcuaaagaaauugggaauggauguuuugaguucuaucacaagugcgacaacacguguauggaauccgugaagaauggcaccuacgauuauccuaaauacagcgaggaagccaagcugaaccgggagaaaaucgacgggguuaaacuugagucuacacgcaucuaucagauucuggccaucuacuccaccguggcuagcucucucguccuggugguuucccugggcgccauuagcuuuuggaugugcuccaauggaucucuccagugcagaaucuguauuuga

SEQ ID NO: 204036 - RNA, 1701 nt, Artificial Sequence; identical to SEQ ID NO: 202112
  derived and/or modified CDS sequence (opt5) from hemagglutinin__InfluenzaA__AHV83842

SEQ ID NO: 204037 - RNA, 1701 nt, Artificial Sequence; identical to SEQ ID NO: 202112
  derived and/or modified CDS sequence (opt5) from hemagglutinin__InfluenzaA__AHV83843

SEQ ID NO: 204038 - RNA, 1701 nt, Artificial Sequence; identical to SEQ ID NO: 202112
  derived and/or modified CDS sequence (opt5) from hemagglutinin__InfluenzaA__AHV83844

SEQ ID NO: 204039 - RNA, 1701 nt, Artificial Sequence
  derived and/or modified CDS sequence (opt5) from hemagglutinin__InfluenzaA__AHV83845
augaaggccauccuggugguccuccuguacaccuucgcuacagccaacgcggacacgcuuugcauuggcuaucacgcuaauaacagcaccgauacaguugacaccgugcuggagaagaaugugacagucacccauuccgugaaccuccuggaagauaagcacaaugggaaacuuuguaagcugagaggaguugcuccccuccaucugggcaaaugcaacaucgccggguggauucugggaaauccugagugugaaucucucagcacagccuccucuuggagcuacaucguggagaccuccucuagcgacaacggcacgugcuauccgggggauuuuauuaauuacgaagaacugcgggagcagcuuuccagcgucucuuccuucgaacgcuuugagaucuuccccaagaccagcucuuggccuaaccacgacuccaauaagggagugacagccgcuuguccccaugccggcgcgaaaucuuuuuauaagaaccugaucuggcucguuaaaaagggcaauagcuacccuaaacugucccaaagcuauauuaacgauaaggggaaggaagugcuuguccuguggggaauccaccaucccccuaccacagccgaccagcagucccucuaccagaaugcugaugccuacguguucgugggcaccucuagauauagcaaaaaguuuaaaccggagauugcuauccggcccaagguccgcgaccaagaggggagaaugaacuacuauuggacgcugguugaaccuggagauaaaauuacauucgaggccaccggcaaccugguggugccccgguacgcguuuacaauggaacgcaaugccggguccggaaucauuaucagcgacaccccuguccacgauugcaacaccacaugucagacgcccgagggcgcuaucaauaccucucucccguuccagaacauucacccuaucacaauuggcaagugccccaaauaugugaaguccaccaagcugagacuugccacagggcugcggaauguuccuagcauccagucucgcggacucuuuggcgcuauugccggguucaucgaaggaggcuggaccgggaugguggacggaugguacggcuaucaucaccaaaacgagcagggcagcggguacgccgcugaccugaaauccacgcagaaugcgaucgauaagauuacaaacaaagucaauucugugaucgagaagaugaacacccaguuuaccgccguuggaaaagaguucaaucaccuugagaagagaauugaaaaccugaauaagaaaguggacgauggcuuccucgacaucuggacauacaacgcugagcugcugguccuccuggaaaaugagcggacccuugauuaucaugacagcaacgugaagaaccuguacgagaaaguccgcaaucaacucaagaacaaugccaaagaaauugggaacggauguuuugaguucuaucacaagugcgauaauacauguauggaauccgugaagaacggcacguacgacuaucccaaauacagcgaggaagccaagcugaauagagagaaaaucgaugggguuaaacuugagucuacccggaucuaucagauucuggcuaucuacuccacagccgcgagcucucucgugcuggucgugucccugggcgcuauuagcuuuuggaugugcuccaacggaucucuccagugccgcaucuguauuuga

SEQ ID NO: 204040 - RNA, 1701 nt, Artificial Sequence; identical to SEQ ID NO: 202112
  derived and/or modified CDS sequence (opt5) from hemagglutinin__InfluenzaA__AHV83846

SEQ ID NO: 204041 - RNA, 1701 nt, Artificial Sequence; identical to SEQ ID NO: 202112
  derived and/or modified CDS sequence (opt5) from hemagglutinin__InfluenzaA__AHV83847

SEQ ID NO: 204042 - RNA, 1701 nt, Artificial Sequence; identical to SEQ ID NO: 202112
  derived and/or modified CDS sequence (opt5) from hemagglutinin__InfluenzaA__AHV83848

SEQ ID NO: 204043 - RNA, 1701 nt, Artificial Sequence; identical to SEQ ID NO: 203965
  derived and/or modified CDS sequence (opt5) from hemagglutinin__InfluenzaA__AHV83849

SEQ ID NO: 204044 - RNA, 1701 nt, Artificial Sequence
  derived and/or modified CDS sequence (opt5) from hemagglutinin__InfluenzaA__AHV83850
augaaggccauccuggugguccuccuguacaccuucgcuacaacgaacgccgacacccuuugcauuggcuaucacgcgaauaacagcacagauaccguugacacagugcuggagaaaaaugugaccgucacacauuccgugaaccuccuggaagauaagcacaaugggaaacuuuguaagcugagaggaguugcuccccuccaucugggcaaaugcaacaucgccggguggauucugggaaauccugagugugaaucucucagcaaggccuccucuuggagcuacaucguggagaccuccucuagcgacaacggcacgugcuauccgggggauuuuauuaauuacgaagaacugcgggagcagcuuuccagcgucucuuccuucgaacgcuuugagaucuuccccaagaccagcucuuggccuaaccacgacuccaauaaaggagugacagcugccuguccccaugcuggcgccaagagcuuuuauaaaaaccugaucuggcucguuaagaaaggcaauucuuacccuaagcugucccaaagcuauauuaacgauaaggggaaagaagugcuuguccuguggggaauccaccaccccuccaccacagcggaccagcagucucucuaccagaaugccgaugcuuacguguucgugggcaccagcagauauuccaagaaauuuaagccugagauugccauccggccgaaaguccgcgaccaagaggggagaaugaacuacuauuggacgcugguugaacccggagauaagauuacauucgaggcuaccggcaaccugguggugccucgguacgccuuuacaauggaacgcaaugcggggagcggaaucauuaucucugacacccccguccaugauugcaacaccacaugucagacgccugagggcgccaucaauaccucccuccccuuccagaacauucacccgaucacaauuggcaaaugcccuaaguauguuaagagcaccaaacugagacuugcuacagggcugcggaaugugcccucuauccagagccgcggacucuuuggcgccauugcuggguucaucgaaggaggcuggaccgggaugguggacggaugguacggcuaucaucaccaaaacgagcagggcuccggguacgccgccgaccugaagucuacgcagaaugcuaucgauaaaauuacaaacaaggucaauagcgugaucgagaaaaugaacacccaguuuaccgcgguuggaaaggaguucaaucaccuugagaagagaauugaaaaccugaauaaaaagguggacgauggcuuccucgacaucuggacauacaacgccgagcugcugguccuccuggaaaaugagcggacccuugauuaucaugacuccaacgugaaaaaccuguacgagaagguccgcaaucaacucaaaaacaaugcuaaggaaauugggaacggauguuuugaguucuaucacaagugcgauaauacauguauggaaagcgugaaaaacggcacguacgacuauccuaaguacucugaggaagccaaacugaauagagagaagaucgaugggguuaaacuugaguccacccggaucuaucagauucuggccaucuacagcacaguggcuucuucccucguccuggugguuagccugggcgccauuuccuuuuggaugugcucuaacggaagccuccagugccgcaucuguauuuga

SEQ ID NO: 204045 - RNA, 1701 nt, Artificial Sequence; identical to SEQ ID NO: 202112
  derived and/or modified CDS sequence (opt5) from hemagglutinin__InfluenzaA__AHV83851

SEQ ID NO: 204046 - RNA, 1701 nt, Artificial Sequence; identical to SEQ ID NO: 202112
  derived and/or modified CDS sequence (opt5) from hemagglutinin__InfluenzaA__AHV83852

SEQ ID NO: 204047 - RNA, 1701 nt, Artificial Sequence
  derived and/or modified CDS sequence (opt5) from hemagglutinin__InfluenzaA__AHV83853
augaaggccauccuggugguccuccuguacaccuucgcuacagccaacgcggacacgcuuugcauuggcuaucacgcuaauaacagcaccgauacaguugacaccgugcuggagaaaaaugugacagucacccauuccgugaaccuccuggaagauaagcacaaugggaaacuuuguaagcugagaggaguugcuccccuccaucugggcaaaugcaacaucgccggguggauucugggaaauccugagugugaaacacucucuaccgccagcuccuggucuuacaucguggagacgagcuccucugacaacgggaccugcuauccgggcgauuuuauugacuacgaagaacugcgggagcagcuuagcuccgucagcucuuucgaacgcuuugagaucuuccccaagacauccagcuggccuaaucacgauucuaacaagggagugaccgccgcuuguccccaugccggcgcgaaaggcuuuuauaagaaucugaucuggcucguuaaaaaggggaacuccuacccuaaacugagcaagucuuauauuaaugacaagggaaaagaagugcuuguccuguggggcauccaccaccccuccacaaccgccgaucaacagagccucuaccagaacgcugacacguacguguucguggggacauccagauauucuaagaaauuuaagccugagauugccauccggccgaaaguccgcgaucaggagggaagaaugaauuacuauuggacccugguugaacccggcgacaagauuacauucgaggcuaccgggaaccugguggugccucgguacgccuuugcgauggaacgcgaugccggaagcggcaucauuaucuccgacacccccguccaugacugcaacacaacgugucaaaccccuaaaggcgcuaucaauacaagccuccccuuccagaacauucacccgaucaccauugggaagugcccuaaguaugugaaaucuacaaagcugagacuugccaccggacugcggaauguucccuccauccagagccgcggccucuuuggggcuauugccggauucaucgagggcggguggacgggaaugguggauggcugguacggcuaucaucaccagaacgaacaagggucuggauacgccgcugaccugaaaagcacacagaaugcgaucgauaagauuaccaacaaagucaauuccgugaucgagaagaugaacacccaguuuacagccguuggcaaggaguucaaucaccuugagaaaagaauugagaaccugaauaagaaaguggacgauggguuccucgacaucuggaccuacaacgcugaacugcugguccuccuggagaaugaacggacacuugauuaucaugacucuaacgugaagaaucuguacgagaaaguccgcacgcagcucaagaacaacgccaaggagauuggaaauggcuguuuugaguucuaucacaaaugcgauaacaccuguauggaaagcgugaagaaugggacauacgacuauccuaaauacuccgaagaggccaagcugaacagagaagagaucgauggcguuaaacuugagagcacccggaucuaucaaauucuggcuaucuacucuacagccgcguccagccucgugcuggucgugucucugggagcuauuuccuuuuggaugugcagcaauggcucccuccagugccgcaucuguauuuga

SEQ ID NO: 204048 - RNA, 1701 nt, Artificial Sequence; identical to SEQ ID NO: 203974
  derived and/or modified CDS sequence (opt5) from hemagglutinin__InfluenzaA__AHV83855

SEQ ID NO: 204049 - RNA, 1701 nt, Artificial Sequence
  derived and/or modified CDS sequence (opt5) from hemagglutinin__InfluenzaA__AHV83856
augaaggccauccuggugguccuccuguacaccuucgcuacagccaacgcggacacgcuuugcauuggcuaucacgcuaauaacagcaccgauacaguugacaccgugcuggagaagaaugugacagucacccauuccgugaaccuccuggaagauaagcacaaugggaaacuuuguaagcugagaggaguugcuccccuccaucugggcaaaugcaacaucgccggguggauucugggaaauccugagugugaaucucucagcacagccuccucuuggagcuacaucguggagaccuccucuagcgacaacggcacgugcuauccgggggauuuuauuaauuacgaagaacugcgggagcagcuuuccagcgucucuuccuucgaacgcuuugagaucuuccccaagaccagcucuuggccuaaccacgacuccaauaagggagugacagccgcuuguccccaugccggcgcgaaaucuuuuuauaagaaccugaucuggcucguuaaaaagggcaauagcuacccuaaacugucccaaagcuauauuaacgauaaggggaaggaagugcuuguccuguggggaauccaccaccccuccaccacagccgaccagcagucucucuaccagaaugcugaugccuacguguucgugggcaccagcagauauuccaaaaaguuuaaaccugagauugcuauccggccgaagguccgcgaccaagaggggagaaugaacuacuauuggacgcugguugaacccggagauaaaauuacauucgaggccaccggcaaccugguggugccucgguacgcguuuacaauggaacgcaaugccgggagcggaaucauuaucucugacacccccguccaugauugcaacaccacaugucagacgccugagggcgcuaucaauaccucccuccccuuccagaacauucacccgaucacaauuggcaagugcccuaaauauguuaagagcaccaagcugagacuugccacagggcugcggaaugugcccucuauccagagccgcggacucuuuggcgcuauugccggguucaucgaaggaggcuggaccgggaugguggacggaugguacggcuaucaucaccaaaacgagcagggcuccggguacgccgcugaccugaaaucuacgcagaaugcgaucgauaagauuacaaacaaagucaauagcgugaucgagaagaugaacacccaguuuaccgccguuggaaaagaguucaaucaccuugagaagagaauugaaaaccugaauaagaaaguggacgauggcuuccucgacaucuggacauacaacgcugagcugcugguccuccuggaaaaugagcggacccuugauuaucaugacuccaacgugaagaaccuguacgagaaaguccgcaaucaacucaagaacaaugccaaagaaauugggaacggauguuuugaguucuaucacaagugcgauaauacauguauggaaaucgugaagaacggcacguacgacuauccuaaauacagcgaggaagccaagcugaauagagagaaaaucgaugggguuaaacuugagucuacccggauuuaucagauccuggcuauuuacuccacaguggccagcucucucguccuggugguuucccugggcgcgaucagcuuuuggaugugcuccaacggaucucuccagugccgcauuuguaucuga

SEQ ID NO: 204050 - RNA, 1701 nt, Artificial Sequence; identical to SEQ ID NO: 203974
  derived and/or modified CDS sequence (opt5) from hemagglutinin__InfluenzaA__AHV83857

SEQ ID NO: 204051 - RNA, 1701 nt, Artificial Sequence
  derived and/or modified CDS sequence (opt5) from hemagglutinin__InfluenzaA__AHV83858
augaaggccauccuggugguccuccuguacaccuucgcuacagccaacacggacacccuuugcauuggcuaucacgcgaauaacagcacagauaccguugacacagugcuggagaaaaaugugaccgucacacauuccgugaaccuccuggaagauaagcacaaugggaaacuuuguaagcugagaggaguugcuccccuccaucugggcaaaugcaacaucgccggguggauucugggaaauccugagugugaaucucucagcaccgccuccucuuggagcuacaucguggagacguccucuagcgacaacgggaccugcuauccgggcgauuuuauuaauuacgaagaacugcgggagcagcuuuccagcgucucuuccuucgaacgcuuugagaucuuccccaagacaagcucuuggccuaaccacgacuccaauaagggagugaccgcugccuguccccaugcuggcgccaagagcuuuuauaagaaccugaucuggcucguuaaaaagggcaauucuuacccuaaacugucccaaagcuauauuaacgauaaggggaaggaagugcuuguccuguggggaauccaccaccccuccacaaccgcggaccagcagucucucuaccagaaugccgaugcuuacguguucgugggcacgagcagauauuccaaaaaguuuaaaccugagauugccauccggccgaagguccgcgaccaagaggggagaaugaacuacuauuggacacugguugaacccggagauaaaauuaccuucgaggcuacaggcaaccugguggugccucgguacgccuuuaccauggaacgcaaugcggggagcggaaucauuaucucugacacccccguccaugauugcaacacaacgugucagaccccugagggcgccaucaauacaucccuccccuuccagaacauucacccgaucaccauuggcaagugcccuaaauaugugaaaagcacaaagcugagacuugcuaccgggcugcggaauguucccucuauccagagccgcggacucuuuggcgccauugcuggguucaucgaaggaggcuggacggggaugguggacggaugguacggcuaucaucaccaaaacgagcagggcuccggguacgccgccgaccagaaaucuacacagaaugcuaucgauaagauuaccaacaaagucaauagcgugaucgagaagaugaacacccaauuuacagcgguuggaaaagaguucaaucaccuggagaagagaauugaaaaccuuaauaagaaaguggacgauggcuuccuggacaucuggaccuacaacgccgagcuccugguccugcucgaaaaugagcggacacuggauuaucaugacuccaacgugaagaaccuuuacgagaaaguccgcaaucagcugaagaacaaugcuaaagaaauugggaacggauguuuugaguucuaucacaagugcgauaauacguguauggaaagcgugaagaacggcaccuacgacuauccuaaauacucugaggaagccaagcucaauagagagaaaaucgaugggguuaagcuggaguccacacggaucuaucagauucuugccaucuacagcaccguggcuucuucccugguccucgugguuagccugggcgccauuuccuuuuggaugugcucuaacggaagccugcaaugccgcaucuguauuuga

SEQ ID NO: 204052 - RNA, 1701 nt, Artificial Sequence; identical to SEQ ID NO: 202112
  derived and/or modified CDS sequence (opt5) from hemagglutinin__InfluenzaA__AHV83859

SEQ ID NO: 204053 - RNA, 1701 nt, Artificial Sequence
  derived and/or modified CDS sequence (opt5) from hemagglutinin__InfluenzaA__AHV83861
augaaggccauccuggugguccuccuguacaccuucacaacggcuaacgccgacacccuuugcauuggcuaucacgcgaauaacagcacagauaccguugacacagugcuggagaaaaaugugaccgucacacauuccgugaaccuccuggaagauaagcacaaugggaaacuuuguaagcugagaggaguugcuccccuccaucugggcaaaugcaacaucgccggguggauucugggaaauccugagugugaaucucucagcaccgccuccucuuggagcuacaucguggagacguccucuagcgacaacgggaccugcuauccgggcgauuuuauuaauuacgaagaacugcgggagcagcuuuccagcgucucuuccuucgaacgcuuugagaucuuccccaagacaagcucuuggccuaaccacgacuccaauaagggagugaccgcugccuguccccaugcuggcgccaagagcuuuuauaagaaccugaucuggcucguuaaaaagggcaauucuuacccuaaacugucccaaagcuauauuaacgauaaggggaaggaagugcuuguccuguggggaauccaccaccccuccacaaccgcggaccagcagucucucuaccagaaugccgaugcuuacguguucgugggcacgagcagauauuccaaaaaguuuaaaccugagauugccauccggccgaagguccgcgaccaagaggggagaaugaacuacuauuggacacugguugaacccggagauaaaauuaccuucgaggcuacaggcaaccugguggugccucgguacgccuuuaccauggaacgcaaugcggggagcggaaucauuaucucugacacccccguccaugauugcaacacaacgugucagaccccugagggcgccaucaauacaucccuccccuuccagaacauucacccgaucaccauuggcaagugcccuaaauauguuaagagcacaaagcugagacuugcuaccgggcugcggaaugugcccucuauccagagccgcggacucuuuggcgccauugcuggguucaucgaaggaggcuggacggggaugguggacggaugguacggcuaucaucaccaaaacgagcagggcuccggguacgccgccgaccugaaaucuacacagaaugcuaucgauaagauuaccaacaaagucaauagcgugaucgagaagaugaacacccaguuuacagcgguuggaaaagaguucaaucaccuugagaagagaauugaaaaccugaauaagaaaguggacgauggcuuccucgacaucuggaccuacaacgccgagcugcugguccuccuggaaaaugagcggacacuugauuaucaugacuccaacgugaagaaccuguacgagaaaguccgcaaucaacucaagaacaaugcuaaagaaauugggaacggauguuuugaguucuaucacaagugcgauaauacguguauggaaagcgugaagaacggcaccuacgacuauccuaaauacucugaggaagccaagcugaauagagagaaaaucgaugggguuaaacuugaguccacacggaucuaucagauucuggccaucuacagcaccguggcuucuucccucguccuggugguuagccugggcgccauuuccuuuuggaugugcucuaacggaagccuccagugccgcaucuguauuuga

SEQ ID NO: 204054 - RNA, 1701 nt, Artificial Sequence; identical to SEQ ID NO: 204053
  derived and/or modified CDS sequence (opt5) from hemagglutinin__InfluenzaA__AHV83862

SEQ ID NO: 204055 - RNA, 1701 nt, Artificial Sequence; identical to SEQ ID NO: 202112
  derived and/or modified CDS sequence (opt5) from hemagglutinin__InfluenzaA__AHV83863

SEQ ID NO: 204056 - RNA, 1701 nt, Artificial Sequence; identical to SEQ ID NO: 202112
  derived and/or modified CDS sequence (opt5) from hemagglutinin__InfluenzaA__AHV83864

SEQ ID NO: 204057 - RNA, 1701 nt, Artificial Sequence
  derived and/or modified CDS sequence (opt5) from hemagglutinin__InfluenzaA__AHV83866
augaaggccauccuggugguccuccuguacaccuucgcuacagccaacgcggacacgcuuugcauuggcuaucacgcuaauaacagcaccgauacaguugacaccgugcuggagaagaaugugacagucacccauuccgugaaccuccuggaagauaagcacaaugggaaacuuuguaagcugagaggaguugcuccccuccaucugggcaaaugcaacaucgccggguggauucugggaaauccugagugugaaucucucagcacagccuccucuuggagcuacaucguggagaccuccucuagcgacaacggcacgugcuauccgggggauuuuauuaauuacgaagaacugcgggagcagcuuuccagcgucucuuccuucgaacgcuuugagaucuuccccaagaccagcucuuggccuaaccacgacuccaauaagggagugacagccgcuuguccccaugccggcgcgaaaucuuuuuauaagaaccugaucuggcucguuaaaaagggcaauagcuacccuaaacugucccaaagcuauauuaacgauaaggggaaggaagugcuuguccuguggggaauccaccaccccuccaccacagccgaccagcagucucucuaccagaaugcugaugccuacguguucgugggcaccagcagauauuccaaaaaguuuaaaccugagauugcuauccggccgaagguccgcgaccaagaggggagaaugaacuacuauuggacgcugguugaacccggagauaaaauuacauucgaggccaccggcaaccugguggugccucgguacgcguuuacaauggaacgcaaugccgggagcggaaucauuaucucugacacccccauccaugauugcaacaccacaugucagacgccugagggcgcuauuaauaccucccuccccuuccagaacauccacccgauuacaaucggcaagugcccuaaauaugucaagagcaccaagcugagacuugccacagggcugcggaaugugcccucuauucagagccgcggacucuuuggcgcuaucgccggguucaucgaaggaggcuggaccgggaugguugacggaugguacggcuaucaucaccaaaacgagcagggcuccggguacgccgcugaccugaaaucuacgcagaaugcgauugauaagaucacaaacaaagugaauagcgucauugagaagaugaacacccaguuuaccgccgugggaaaagaguucaaucaccuugagaagagaaucgaaaaccugaauaagaaaguugacgauggcuuccucgacauuuggacauacaacgcugagcugcuggugcuccuggaaaaugagcggacccuugauuaucaugacuccaacgucaagaaccuguacgagaaagugcgcaaucaacucaagaacaaugccaaagaaaucgggaacggauguuuugaguucuaucacaagugcgaugacacauguauggaaagcgucaagaauggcacguacgauuauccuaaauacucugaggaagccaagcugaacagagagaaaaucgacggggugaaacuugaguccacccggauuuaucagauccuggcuauuuacagcacaguugccucuucccucgugcuggucgugagccugggcgcgaucuccuuuuggaugugcucuaauggaagccuccagugccgcauuuguaucuga

SEQ ID NO: 204058 - RNA, 1701 nt, Artificial Sequence
  derived and/or modified CDS sequence (opt5) from hemagglutinin__InfluenzaA__AHV83867
augaaggccauccuggugguccuccuguacaccuucgcuacagccaacgcggacacgcuuugcauuggcuaucacgcuaauaacagcaccgauacaguugacaccgugcuggagaagaaugugacagucacccauuccgugaaccuccuggaagauaagcacaaugggaaacuuuguaagcugagaggaguugcuccccuccaucugggcaaaugcaacaucgccggguggauucugggaaauccugagugugaaucucucagcacagccuccucuuggagcuacaucguggagaccuccucuagcgacaacggcacgugcuauccgggggauuuuauuaauuacgaagaacugcgggagcagcuuuccagcgucucuuccuucgaacgcuuugagaucuuccccaagaccagcucuuggccuaaccacgacuccaauaagggagugacagccgcuuguccccaugccggcgcgaaaucuuuuuauaagaaccugaucuggcucguuaaaaagggcaauagcuacccuaaacugucccaaagcuauauuaacgauaaggggaaggaagugcuuguccuguggggaauccaccaccccuccaccacagccgaccagcagucucucuaccagaaugcugaugccuacguguucgugggcaccagcagauauuccaaaaaguuuaaaccugagauugcuauccggccgaagguccgcgaccaagaggggagaaugaacuacuauuggacgcugguugaacccggagauaaaauuacauucgaggccaccggcaaccugguggugccucgguacgcguuuacaauggaacgcaaugccgggagcggaaucauuaucucugacacccccguccaugauugcaacaccacaugucagacgccugagggcgcuaucaauaccucccuccccuuccagaacauucacccgaucacaauuggcaagugcccuaaauauguuaagagcaccaagcugagacuugccacagggcugcggaaugugcccucuauccagagccgcggacucuuuggcgcuauugccggguucaucgaaggaggcuggaccgggaugguggacggaugguacggcuaucaucaccaaaacgagcagggcuccggguacgccgcugaccugaaaucuacgcagaaugcgaucgauaagauuacaaacaaagucaauagcgugaucgagaagaugaacacccaguuuaccgccguuggaaaagaguucaaucaccuugagaagagaauugaaaaccugaauaagaaaguggacgauggcuuccucgacaucuggacauacaacgcugagcugcugguccuccuggaaaaugagcggacccuugauuaucaugacuccaacgugaagaaccuguacgagaaaguccgcaaucaacucaagaacaaugccaaagaaauugggaacggauguuuugaguucuaucacaagugcgaugacacauguauggaaagcgugaagaauggcacguacgauuauccuaaauacucugaggaagccaagcugaacagagagaaaaucgacgggguuaaacuugaguccacccggaucuaucagauucuggcuaucuacagcacaguggccucuucccucguccuggugguuagccugggcgcgauuuccuuuuggaugugcucuaauggaagccuccagugccgcaucuguauuuga

SEQ ID NO: 204059 - RNA, 1701 nt, Artificial Sequence; identical to SEQ ID NO: 202112
  derived and/or modified CDS sequence (opt5) from hemagglutinin__InfluenzaA__AHV83868

SEQ ID NO: 204060 - RNA, 1701 nt, Artificial Sequence
  derived and/or modified CDS sequence (opt5) from hemagglutinin__InfluenzaA__AHV83869
augaaggccauccuggugguccuccuguacaccuucgcuacagccaacgcggacacgcuuugcauuggcuaucacgcuaauaacagcaccgauacaguugacaccgugcuggagaagaaugugacagucacccauuccgugaaccuccuggaagauaagcacaaugggaaacuuuguaagcugagaggaguugcuccccuccaucugggcaaaugcaacaucgccggguggauucugggaaauccugagugugaaucucucagcacagccuccucuuggagcuacaucguggagaccuccucuagcgacaacggcacgugcuauccgggggauuuuauuaauuacgaagaacugcgggagcagcuuuccagcgucucuuccuucgaacgcuuugagaucuuccccaagaccaacagcuggccuaaucacgacucuaacaagggagugacagccgcuuguccccaugccggcgcgaaauccuuuuauaagaaucugaucuggcucguuaaaaagggcaacagcuacccuaaacugucucaauccuauauuaaugauaaggggaaggaagugcuuguccuguggggaauccaccaccccagcaccacagccgaccagcagucccucuaccagaacgcugaugccuacguguucgugggcaccucuagauauagcaaaaaguuuaaaccugagauugcuauccggccgaagguccgcgaccaagaggggagaaugaacuacuauuggacgcugguugaacccggagauaaaauuacauucgaggccaccggcaaucugguggugccucgguacgcguuuacaauggaacgcaacgccggguccggaaucauuaucagcgacacccccguccaugauugcaauaccacaugucagacgccugagggcgcuaucaacaccucucuccccuuccagaauauucacccgaucacaauuggcaagugcccuaaauaugugaaguccaccaagcugagacuugccacagggcugcggaacguucccagcauccagucucgcggacucuuuggcgcuauugccggguucaucgaaggaggcuggaccgggaugguggacggaugguacggcuaucaucaccaaaaugagcagggcagcggguacgccgcugaccugaaauccacgcagaacgcgaucgauaagauuacaaauaaagucaacucugugaucgagaagaugaauacccaguuuaccgccguuggaaaagaguucaaccaccuugagaagagaauugaaaaucugaacaagaaaguggacgauggcuuccucgacaucuggacauacaaugcugagcugcugguccuccuggaaaacgagcggacccuugauuaucaugacagcaacgugaagaaucuguacgagaaaguccgcaaccaacucaagaauaacgccaaagaaauugggaauggauguuuugaguucuaucacaagugcgauaacacauguauggaauccgugaagaauggcacguacgacuauccuaaauacagcgaggaagccaagcugaacagagagaaaaucgaugggguuaaacuugagucuacccggaucuaucagauucuggcuaucuacuccacaguggccagcucucucguccuggugguuucccugggcgcgauuagcuuuuggaugugcuccaauggaucucuccagugccgcaucuguauuuga

SEQ ID NO: 204061 - RNA, 1701 nt, Artificial Sequence; identical to SEQ ID NO: 202112
  derived and/or modified CDS sequence (opt5) from hemagglutinin__InfluenzaA__AHV83870

SEQ ID NO: 204062 - RNA, 1701 nt, Artificial Sequence; identical to SEQ ID NO: 202112
  derived and/or modified CDS sequence (opt5) from hemagglutinin__InfluenzaA__AHV83871

SEQ ID NO: 204063 - RNA, 1701 nt, Artificial Sequence; identical to SEQ ID NO: 202112
  derived and/or modified CDS sequence (opt5) from hemagglutinin__InfluenzaA__AHV83872

SEQ ID NO: 204064 - RNA, 1701 nt, Artificial Sequence
  derived and/or modified CDS sequence (opt5) from hemagglutinin__InfluenzaA__AHV83873
augaaggccauccuggugguccuccuguacaccuucgcuacaacgaacgccgacacccuuugcauuggcuaucacgcgaauaacagcacagauaccguugacacagugcuggagaaaaaugugaccgucacacauuccgugaaccuccuggaagauaagcacaaugggaaacuuuguaagcugagaggaguugcuccccuccaucugggcaaaugcaacaucgccggguggauucugggaaauccugagugugaaucucucagcaccgccuccucuuggagcuacaucguggagacguccucuagcgacaacgggaccugcuauccgggcgauuuuauuaauuacgaagaacugcgggagcagcuuuccagcgucucuuccuucgaacgcuuugagaucuuccccaagacaagcucuuggccuaaccacgacuccaauaagggagugaccgcugccuguccccaugcuggcgccaagagcuuuuauaagaaccugaucuggcucguuaaaaagggcaauucuuacccuaaacugucccaaagcuauauuaacgauaaggggaaggaagugcuuguccuguggggaauccaccaccccuccacaguggcggaccagcagucucucuaccagaaugccgaugcuuacguguucgucggcaccagcagauauuccaaaaaguuuaaaccugagauugccauccggccgaagguucgcgaccaagaggggagaaugaacuacuauuggacgcugguggaacccggagauaaaauuacauucgaggcuaccggcaaccugguggucccucgguacgccuuuacaauggaacgcaaugcggggagcggaaucauuaucucugacacccccgugcaugauugcaacaccacaugucagacgccugagggcgccaucaauaccucccuccccuuccagaacauucacccgaucacaauuggcaagugcccuaaauauguuaagagcaccaagcugagacuugcuacagggcugcggaaugugcccucuauccagagccgcggacucuuuggcgccauugcuggguucaucgaaggaggcuggaccgggauggucgacggaugguacggcuaucaucaccaaaacgagcagggcuccggguacgccgccgaccugaaaucuacgcagaaugcuaucgauaagauuacaaacaaagugaauagcguuaucgagaagaugaacacccaguuuaccgcggugggaaaagaguucaaucaccuugagaagagaauugaaaaccugaauaagaaagucgacgauggcuuccucgacaucuggacauacaacgccgagcugcuggugcuccuggaaaaugagcggacccuugauuaucaugacuccaacgucaagaaccuguacgagaaagugcgcaaucaacucaagaacaaugcuaaagaaauugggaacggauguuuugaguucuaucacaagugcgauaauacauguauggaaagcguuaagaacggcacguacgacuauccuaaauacucugaggaagccaagcugaauagagagaaaaucgauggggugaaacuugaguccacccggaucuaucagauucuggccaucuacagcacagucgcuucuucccucgugcugguugugagccugggcgccauuuccuuuuggaugugcucuaacggaagccuccagugccgcaucuguauuuga

SEQ ID NO: 204065 - RNA, 1701 nt, Artificial Sequence; identical to SEQ ID NO: 202112
  derived and/or modified CDS sequence (opt5) from hemagglutinin__InfluenzaA__AHV83874

SEQ ID NO: 204066 - RNA, 1701 nt, Artificial Sequence; identical to SEQ ID NO: 202112
  derived and/or modified CDS sequence (opt5) from hemagglutinin__InfluenzaA__AHV83875

SEQ ID NO: 204067 - RNA, 1701 nt, Artificial Sequence; identical to SEQ ID NO: 202112
  derived and/or modified CDS sequence (opt5) from hemagglutinin__InfluenzaA__AHV83876

SEQ ID NO: 204068 - RNA, 1701 nt, Artificial Sequence
  derived and/or modified CDS sequence (opt5) from hemagglutinin__InfluenzaA__AHV83877
augaaggccauccuggugguccuccuguacaccuucgcuacagccaacgcggacacgcuuugcauuggcuaucacgcuaauaacagcaccgauacaguugacaccgugcuggagaaaaaugugacagucacccauuccgugaaccuccuggaagauaagcacaaugggaaacuuuguaagcugagaggaguugcgccccuccaucugggcaaaugcaacaucgccggguggauucugggaaauccugagugugaaucucucagcacagcuuccucuuggagcuacaucguggagaccuccucuagcgacaacggcacgugcuauccgggggauuuuauuaauuacgaagaacugcgggagcagcuuuccagcgucucuuccuucaagcgcuuugaaaucuuccccaagaccagcucuuggccuaaccacgacuccaauaaaggagugacagccgcuuguccccaugccggcgccaagagcuuuuauaaaaaccugaucuggcucguuaagaaaggcaauucuuacccuaagcugucccaaagcuauauuaacgauaaggggaaagaggugcuuguccuguggggaauccaccaccccuccaccacagccgaccagcagucucucuaccagaaugcugaugccuacguguucgugggcaccagcagauauuccaagaaauuuaagccugaaauugcuauccggccgaaaguccgcgaccaagaggggagaaugaacuacuauuggacgcugguugagcccggagauaagauuacauucgaagccaccggcaaccugguggugccucgguacgcguuuacaauggagcgcaaugccgggagcggaaucauuaucucugacacccccguccaugauugcaacaccacaugucagacgccugaaggcgcuaucaauaccucccuccccuuccagaacauucacccgaucacaauuggcaaaugcccuaaguauguuaagagcaccaaacugagacuugccacagggcugcggaaugugcccucuauccagagccgcggacucuuuggcgcuauugccggguucaucgagggaggcuggaccgggaugguggacggaugguacggcuaucaucaccaaaacgaacagggcuccggguacgccgcugaccugaagucuacgcagaaugcgaucgauaaaauuacaaacaaggucaauagcgugaucgagaaaaugaacacccaguuuaccgccguuggaaaggaguucaaucaccuugaaaagagaauugagaaccugaauaaaaagguggacgauggcuuccucgacaucuggacauacaacgcugaacugcugguccuccuggagaaugaacggacccuugauuaucaugacuccaacgugaaaaaccuguacgagaagguccgcaaucaacucaaaaacaaugccaaggagauugggaacggauguuuugaguucuaucacaagugcgauaauacauguauggagagcgugaaaaacggcacguacgacuauccuaaguacucugaagaggccaaacugaauagagaaaagaucgaugggguuaaacuugaguccacccggaucuaucagauucuggcuaucuacagcacaguggccucuucccucguccuggugguuagccugggcgcgauuuccuuuuggaugugcucuaacggaagccuccagugccgcaucuguauuuga

SEQ ID NO: 204069 - RNA, 1701 nt, Artificial Sequence; identical to SEQ ID NO: 203979
  derived and/or modified CDS sequence (opt5) from hemagglutinin__InfluenzaA__AHV83878

SEQ ID NO: 204070 - RNA, 1701 nt, Artificial Sequence; identical to SEQ ID NO: 203979
  derived and/or modified CDS sequence (opt5) from hemagglutinin__InfluenzaA__AHV83879

SEQ ID NO: 204071 - RNA, 1701 nt, Artificial Sequence
  derived and/or modified CDS sequence (opt5) from hemagglutinin__InfluenzaA__AHV83881
augaaggccacccuggugguccuccuguacacauucgcuacggccaacgcggacacccuuugcaucggcuaucacgcuaauaacagcacagauaccguugacacagugcuggagaagaaugugaccgucacacauuccgugaaccuccuggaagauaagcacaaugggaaacuuuguaagcugagaggaguugcuccccuccaucugggcaaaugcaacauugccggguggauccugggaaauccugagugugaaucucucagcaccgccuccucuuggagcuacauuguggagacguccucuagcgacaacggaaccugcuauccgggggauuuuaucaauuacgaagaacugcgggagcagcuuuccagcgucucuuccuucgaacgcuuugagauuuuccccaagacaagcucuuggccuaaccacgacuccaauaagggagugaccgccgcuuguccccaugccggcgcgaaaucuuuuuauaagaaccugaucuggcucguuaaaaagggcaauagcuacccuaaacugucccaaagcuauaucaacgauaaggggaaggaagugcuuguccuguggggcauucaccaccccuccacaaccgccgaccagcagucucucuaccagaaugcugaugccuacguguucgugggcacgagcagauauuccaaaaaguuuaaaccugagaucgcuauucggccgaagguccgcgaccaagaggggagaaugaacuacuauuggacacugguugaacccggagauaaaaucaccuucgaggccacaggcaaccugguggugccucgguacgcguuuaccauggaacgcaaugccgggagcggaauuaucauuucugacacccccguccaugauugcaacacaacgugucagaccccugagggcgcuaucaauacaucccuccccuuccagaacauccacccgauuaccaucggcaagugcccuaaauauguuaagagcacaaagcugagacuugccaccgggcugcggaaugugcccucuauucagagccgcggacucuuuggcgcuaucgccggguucauugaaggaggcuggacggggaugguggacggaugguacggcuaucaucaccaaaacgagcagggcuccggguacgccgcugaccugaaaucuacacagaaugcgaucgauaagaucaccaacaaagucaauagcgugauugagaagaugaacacccaguuuacagccguuggaaaagaguucaaucaccuugagaagagaaucgaaaaccugaauaagaaaguggacgauggcuuccucgacauuuggaccuacaacgcugagcugcugguccuccuggaaaaugagcggacacuugauuaucaugacuccaacgugaagaaccuguacgagaaaguccgcaaucaacucaagaacaaugccaaagaaaucgggaacggauguuuugaguucuaucacaagugcgauaauacguguauggaaagcgugaagaacggcaccuacgacuauccuaaauacucugaggaagccaagcugaauagagagaaaauugaugggguuaaacuugaguccacacggaucuaucagauccuggcuauuuacagcaccguggccucuucccucguccuggugguuagccugggcgcgaucuccuuuuggaugugcucuaacggaagccuccagugccgcauuuguaucuga

SEQ ID NO: 204072 - RNA, 1701 nt, Artificial Sequence; identical to SEQ ID NO: 203093
  derived and/or modified CDS sequence (opt5) from hemagglutinin__InfluenzaA__AHV83882

SEQ ID NO: 204073 - RNA, 1701 nt, Artificial Sequence; identical to SEQ ID NO: 203075
  derived and/or modified CDS sequence (opt5) from hemagglutinin__InfluenzaA__AHV83883

SEQ ID NO: 204074 - RNA, 1701 nt, Artificial Sequence; identical to SEQ ID NO: 202112
  derived and/or modified CDS sequence (opt5) from hemagglutinin__InfluenzaA__AHV83884

SEQ ID NO: 204075 - RNA, 1701 nt, Artificial Sequence
  derived and/or modified CDS sequence (opt5) from hemagglutinin__InfluenzaA__AHV83885
augaaggccauccuggugguccuccuguacaccuucgcuacagccaacgcggacacgcuuugcauuggcuaucacgcuaauaacagcaccgauacaguugacaccgugcuggagaagaaugugacagucacccauuccgugaaccuccuggaagauaagcacaaugggaaacuuuguaagcugagaggaguugcuccccuccaucugggcaaaugcaacaucgccggguggauucugggaaauccugagugugaaucucucagcacagccuccucuuggagcuacaucguggagaccuccucuagcgacaacggcacgugcuauccgggggauuuuauuaauuacgaagaacugcgggagcagcuuuccagcgucucuuccuucgaacgcuuugagaucuuccccaagaccagcucuuggccuaaccacgacuccaauaagggagugacagccgcuuguccccaugccggcgcgaaaucuuuuuauaagaaccugaucuggcucguuaaaaagggcaauagcuacccuaaacugucccaaagcuauauuaacgauaaggggaaggaagugcuuguccuguggggaauccaccaccccuccaccacagccgaccagcagucucucuaccagaaugcugaugccuacguguucgugggcaccagcagauauuccaaaaaguuuaaaccugagauugcuauccggccgaagguccgcgaccaagaggggagaaugaacuacuauuggacgcugguugaacccggagauaaaauuacauucgaggccaccggcaaccugguggugccucgguacgcguuuacaauggaacgcaaugccgggagcggaaucauuaucucugacacccccgucuaugauugcaacaccacaugucagacgccugagggcgcuaucaauaccucccuccccuuccagaacauucauccgaucacaauuggcaagugcccuaaauacguuaagagcaccaagcugagacuugccacagggcugcggaaugugcccucuauccagagccgcggacucuuuggcgcuauugccggguucaucgaaggaggcuggaccgggaugguggacggaugguauggcuaccaccaucaaaacgagcagggcuccggguacgccgcugaccugaaaucuacgcagaaugcgaucgauaagauuacaaacaaagucaauagcgugaucgagaagaugaacacccaguuuaccgccguuggaaaagaguucaaucaccuugagaagagaauugaaaaccugaauaagaaaguggacgauggcuuccucgacaucuggacauauaacgcugagcugcugguccuccuggaaaaugagcggacccuugauuaccacgacuccaacgugaagaaccuguaugagaaaguccgcaaucaacucaagaacaaugccaaagaaauugggaacggauguuuugaguucuaccauaagugcgauaauacauguauggaaagcgugaagaacggcacguaugacuacccuaaauauucugaggaagccaagcugaauagagagaaaaucgaugggguuaaacuugaguccacccggaucuaccagauucuggcuaucuacagcacaguggccucuucccucguccuggugguuagccugggcgcgauuuccuuuuggaugugcucuaacggaagccuccagugccgcaucuguauuuga

SEQ ID NO: 204076 - RNA, 1701 nt, Artificial Sequence; identical to SEQ ID NO: 203992
  derived and/or modified CDS sequence (opt5) from hemagglutinin__InfluenzaA__AHV83887

SEQ ID NO: 204077 - RNA, 1701 nt, Artificial Sequence; identical to SEQ ID NO: 202112
  derived and/or modified CDS sequence (opt5) from hemagglutinin__InfluenzaA__AHV83888

SEQ ID NO: 204078 - RNA, 1701 nt, Artificial Sequence
  derived and/or modified CDS sequence (opt5) from hemagglutinin__InfluenzaA__AHV83889
augaaggccauccuggugguccuccugcacacccuugcuacagccaacgcggacacgcugugcauuggcuaccaugcuaauaacagcaccgauacaguugacaccgugcucgagaaaaaugugacagucacccacuccgugaaccugcuugaagauaagcauaaugggaaacuguguaagcucagaggaguugcuccccugcaccugggcaaaugcaacaucgccggguggauucucggaaauccugagugugaaucucugagcacagccuccucuuggagcuauaucguggagaccuccucuagcgacaacggcacgugcuacccgggggauuucauuaauuaugaggaacuucgggagcagcuguccagcgucucuuccuuugaacgcuucgagaucuuucccaagaccagcucuuggccuaaccaugacuccaauaagggagugacagccgcuuguccccacgccggcgcgaaaucuuucuacaagaaccucaucuggcugguuaaaaagggcaauagcuauccuaaacuuucccaaagcuacauuaacgauaaggggaaggaagugcugguccucuggggaauccaccaucccuccaccacagccgaccagcagucucuguaucagaaugcugaugccuacguguuugugggcaccagcagauacuccaaaaaguucaaaccugagauugcuauccggccgaagguccgcgaccaagaggggagaaugaacuauuacuggacgcugguugaacccggagauaaaauuacauuugaggccaccggcaaccucguggugccucgguaugcguucacaauggaacgcaaugccgggagcggaaucauuaucucugacacccccguccacgauugcaacaccacaugucagacgccugagggcgcuaucaauaccucccugcccuuucagaacauucauccgaucacaauuggcaagugcccuaaauacguuaagagcaccaaacuuagacuggccacagggcuccggaaugugcccucuauccagagccgcggacuguucggcgcuauugccggguuuaucgaaggaggcuggaccgggaugguggacggaugguauggcuaccaccaccaaaacgagcagggcuccggguaugccgcugaccuuaagucuacgcagaaugcgaucgauaagauuacaaacaaagucaauagcgugaucgagaagaugaacacccaguucaccgccguuggaaaagaauuuaaucaucuggagaagagaauugaaaaccucaauaagaaaguggacgauggcuuccuggacaucuggacauacaacgcugagcugcucguccugcuugaaaaugagcggacccuggauuaccacgacuccaacgugaagaaccucuaugagaaaguccgcaaucaacugaagaacaaugccaaagaaauugggaacggauguuucgaguuuuaccauaagugcgauaauacauguauggaaagcgugaagaacggcacguaugacuacccuaaauauucugaggaagccaaacuuaauagagagaagaucgaugggguuaagcuggaguccacccggaucuaccagauucucgcuaucuauagcacaguggccucuucccugguccuggugguuagccucggcgcgauuuccuucuggaugugcucuaacggaagccugcagugccgcaucuguauuuga

SEQ ID NO: 204079 - RNA, 1701 nt, Artificial Sequence; identical to SEQ ID NO: 202112
  derived and/or modified CDS sequence (opt5) from hemagglutinin__InfluenzaA__AHV83890

SEQ ID NO: 204080 - RNA, 1701 nt, Artificial Sequence; identical to SEQ ID NO: 202112
  derived and/or modified CDS sequence (opt5) from hemagglutinin__InfluenzaA__AHV83891

SEQ ID NO: 204081 - RNA, 1701 nt, Artificial Sequence; identical to SEQ ID NO: 202112
  derived and/or modified CDS sequence (opt5) from hemagglutinin__InfluenzaA__AHV83893

SEQ ID NO: 204082 - RNA, 1701 nt, Artificial Sequence; identical to SEQ ID NO: 202112
  derived and/or modified CDS sequence (opt5) from hemagglutinin__InfluenzaA__AHV83894

SEQ ID NO: 204083 - RNA, 1701 nt, Artificial Sequence
  derived and/or modified CDS sequence (opt5) from hemagglutinin__InfluenzaA__AHV83895
augaaggccauccuggugguccuccuguacaccuucgcuacagccaacgcggacacgcuuugcauuggcuaucacgcuaauaacagcaccgauacaguugacaccgugcuggagaagaaugugacagucacccauuccgugaaccuccuggaagauaagcacaaugggaaacuuuguaagcugagaggaguugcuccccuccaucugggcaaaugcaacaucgccggguggauucugggaaauccugagugugaaucucucagcacagccuccucuuggagcuacaucguggagaccuccucuagcgacaacggcacgugcuauccgggggauuuuauuaauuacgaagaacugcgggagcagcuuuccagcgucucuuccuucgaacgcuuugagaucuuccccaagaccagcucuuggccuaaccacgacuccaauaagggagugacagccgcuuguccccaugccggcgcgaaaucuuuuuauaagaaccugaucuggcucguuaaaaagggcaauagcuacccuaaacugucccaaagcuauauuaacgauaaggggaaggaagugcuuguccuguggggaauccaccaccccuccaccacagccgaccagcagucucucuaccagaaugcugaugccuacguguucgugggcaccagcagauauuccaaaaaguuuaaaccugagauugcuauccggccgaagguccgcgaccaagaggggagaaugaacuacuauuggacgcugguugaacccggagauaaaauuacauucgaggccaccggcaaccugguggugccucgguacgcguuuacaauggaacgcaaugccgggagcggaaucauuaucucugacacccccguccaugauugcaacaccacaugucagacgccugagggcgcuaucaauaccucccuccccuuccagaacauucacccgaucacaauuggcaagugcccuaaauauguuaagagcaccaagcugagacuugccacagggcugcggaaugugcccucuauccagagccgcggacucuuuggcgcuauugccggguucaucgaaggaggcuggaccgggaugguggacggaugguacggcuaucaucaccaaaacgagcagggcuccggguacgccgcugaccugaaaucuacgcagaaugcgaucgauaagauuacaaacaaagucaauagcgugaucgagaagaugaacacccaguuuaccgccguuggaaaagaguucaaucaccuugagaagagaauugaaaaccugaauaagaaaguggacgauggcuuccucgacaucuggacauacaacgcugagcugcugguccuccuggaaaaugagcggacccuugauuaucaugacuccaacgugaagaaccuguacgagaaaguccgcaaucaacucaagaacaaugccaaagaaauugggaacggauguuuugaguucuaucacaagugcgauaauacauguauggaaagcgugaagaacggcacguacgacuauccuaaauacucugaggaaaccaagcugaauagagagaaaaucgaugggguuaaacuugaguccacacggaucuaucagauucuggccaucuacagcaccguggcuucuucccucguccuggugguuagccugggcgccauuuccuuuuggaugugcucuaacggaagccuccagugccgcaucuguauuuga

SEQ ID NO: 204084 - RNA, 1701 nt, Artificial Sequence; identical to SEQ ID NO: 202112
  derived and/or modified CDS sequence (opt5) from hemagglutinin__InfluenzaA__AHV83896

SEQ ID NO: 204085 - RNA, 1701 nt, Artificial Sequence; identical to SEQ ID NO: 202112
  derived and/or modified CDS sequence (opt5) from hemagglutinin__InfluenzaA__AHV83897

SEQ ID NO: 204086 - RNA, 1701 nt, Artificial Sequence
  derived and/or modified CDS sequence (opt5) from hemagglutinin__InfluenzaA__AHV83898
augaaggccauccuggugguccuccuguacaccuucgcuacagccaacgcggacacgcuuugcauuggcuaucacgcuaauaacagcaccgauacaguugacaccgugcuggagaagaaugugacagucacccauuccgugaaccuccuggaagauaagcacaaugggaaacuuuguaagcugagaggaguugcuccccuccaucugggcaaaugcaacaucgccggguggauucugggaaauccugagugugaaucucucagcacagccuccucuuggagcuacaucguggagaccuccucuagcgacaacggcacgugcuauccgggggauuuuauuaauuacgaagaacugcgggagcagcuuuccagcgucucuuccuucgaacgcuuugagaucuuccccaagaccagcucuuggccuaaccacgacuccaauaagggagugacagccgcuuguccccaugccggcgcgaaaucuuuuuauaagaaccugaucuggcucguuaaaaagggcaauagcuacccuaaacugucccaaagcuauauuaacgauaaggggaaggaagugcuuguccuguggggaauccaccaccccuccaccacagccgaccagcagucucucuaccagaaugcugaugccuacguguucgugggcaccagcagauauuccaaaaaguuuaaaccugagauugcuauccggccgaagguccgcgaccaagaggggagaaugaacuacuauuggacgcugguugaacccggagauaaaauuacauucgaggccaccggcaaccugguggugccucgguacgcguuuacaauggaacgcaaugccgggagcggaaucauuaucucugacacccccguccaugauugcaacaccacaugucagacgccugagggcgcuaucaauaccucccuccccuuccagaacauucacccgaucacaauuggcaagugcccuaaauauguuaagagcaccaagcugagacuugugacagggcugcggaaugugcccucuauccagagccgcggacucuuuggcgccauugcuggguucaucgaaggaggcuggaccgggauggucgacggaugguacggcuaucaucaccaaaacgagcagggcuccggguacgccgccgaccugaaaucuacgcagaaugcuaucgauaagauuacaaacaaagugaauagcguuaucgagaagaugaacacccaguuuaccgcggugggaaaagaguucaaucaccuugagaagagaauugaaaaccugaauaagaaagucgacgauggcuuccucgacaucuggacauacaacgccgagcugcuggugcuccuggaaaaugagcggacccuugauuaucaugacuccaacgucaagaaccuguacgagaaagugcgcaaucaacucaagaacaaugcuaaagaaauugggaacggauguuuugaguucuaucacaagugcgauaauacauguauggaaagcguuaagaacggcacguacgacuauccuaaauacucugaggaagccaagcugaauagagagaaaaucgauggggugaaacuugaguccacccggaucuaucagauucuggccaucuacagcacagucgcuucuucccucgugcugguugugagccugggcgccauuuccuuuuggaugugcucuaacggaagccuccagugccgcaucuguauuuga

SEQ ID NO: 204087 - RNA, 1701 nt, Artificial Sequence; identical to SEQ ID NO: 202112
  derived and/or modified CDS sequence (opt5) from hemagglutinin__InfluenzaA__AHV83899

SEQ ID NO: 204088 - RNA, 1701 nt, Artificial Sequence; identical to SEQ ID NO: 202112
  derived and/or modified CDS sequence (opt5) from hemagglutinin__InfluenzaA__AHV83900

SEQ ID NO: 204089 - RNA, 1701 nt, Artificial Sequence; identical to SEQ ID NO: 202112
  derived and/or modified CDS sequence (opt5) from hemagglutinin__InfluenzaA__AHV83901

SEQ ID NO: 204090 - RNA, 1701 nt, Artificial Sequence; identical to SEQ ID NO: 202112
  derived and/or modified CDS sequence (opt5) from hemagglutinin__InfluenzaA__AHV83902

SEQ ID NO: 204091 - RNA, 1701 nt, Artificial Sequence; identical to SEQ ID NO: 202112
  derived and/or modified CDS sequence (opt5) from hemagglutinin__InfluenzaA__AHV83903

SEQ ID NO: 204092 - RNA, 1701 nt, Artificial Sequence; identical to SEQ ID NO: 202112
  derived and/or modified CDS sequence (opt5) from hemagglutinin__InfluenzaA__AHV83904

SEQ ID NO: 204093 - RNA, 1701 nt, Artificial Sequence
  derived and/or modified CDS sequence (opt5) from hemagglutinin__InfluenzaA__AHV83905
augaaggccauccuggugguccuccuguacacccuuacaacggcuaacgccgacacccugugcauuggcuaucacgcgaauaacagcacagauaccguugacacagugcucgagaaaaaugugaccgucacacauuccgugaaccugcuugaagauaagcacaaugggaaacuguguaagcucagaggaguugcuccccugcaucugggcaaaugcaacaucgccggguggauucucggaaauccugagugugaaucucugagcaccgccuccucuuggagcuacaucguggagacguccucuagcgacaacgggaccugcuauccgggcgauuucauuaauuacgaggaacuucgggagcagcuguccagcgucucuuccuuugaacgcuucgagaucuuucccaagacaagcucuuggccuaaccacgacuccaauaagggagugaccgcugccuguccccaugcuggcgccaagagcuucuauaagaaccucaucuggcugguuaaaaagggcaauucuuacccuaaacuuucccaaagcuauauuaacgauaaggggaaggaagugcugguccucuggggaauccaccaccccuccacaaccgcggaccagcagucucuguaccagaaugccgaugcuuacguguuugugggcacgagcagauauuccaaaaaguucaaaccugagauugccauccggccgaagguccgcgaccaagaggggagaaugaacuacuauuggacacugguugaacccggagauaaaauuaccuuugaggcuacaggcaaccucguggugccucgguacgccuucaccauggaacgcaaugcggggagcggaaucauuaucucugacacccccguccaugauugcaacacaacgugucagaccccugagggcgccaucaauacaucccugcccuuucagaacauucacccgaucaccauuggcaagugcccuaaauauguuaagagcacaaaacuuagacuggcuaccgggcuccggaaugugcccucuauccagagccgcggacuguucggcgccauugcuggguuuaucgaaggaggcuggacggggaugguggacggaugguacggcuaucaucaccaaaacgagcagggcuccggguacgccgccgaccuuaaaucuacacagaaugcuaucgauaagauuaccaacaaagucaauagcgugaucgagaagaugaacacccaguucacagcgguuggaaaagaauuuaaucaccuggagaagagaauugaaaaccucaauaagaaaguggacgauggcuuccuggacaucuggaccuacaacgccgagcugcucguccugcuugaaaaugagcggacacuggauuaucaugacuccaacgugaagaaccucuacgagaaaguccgcaaucaacugaagaacaaugcuaaagaaauugggaacggauguuucgaguuuuaucacaagugcgauaauacguguauggaaagcgugaagaacggcaccuacgacuauccuaaauacucugaggaagccaaacuuaauagagagaagaucgaugggguuaagcuggaguccacacggaucuaucagauucucgccaucuacagcaccguggcuucuucccugguccuggugguuagccucggcgccauuuccuucuggaugugcucuaacggaagccugcagugccgcaucuguauuuga

SEQ ID NO: 204094 - RNA, 1701 nt, Artificial Sequence; identical to SEQ ID NO: 202112
  derived and/or modified CDS sequence (opt5) from hemagglutinin__InfluenzaA__AHV83906

SEQ ID NO: 204095 - RNA, 1701 nt, Artificial Sequence; identical to SEQ ID NO: 202112
  derived and/or modified CDS sequence (opt5) from hemagglutinin__InfluenzaA__AHV83907

SEQ ID NO: 204096 - RNA, 1701 nt, Artificial Sequence
  derived and/or modified CDS sequence (opt5) from hemagglutinin__InfluenzaA__AHV83908
augaaggccauccuggugguccuccuguacaccuucgcuacagccaacgcggacacgcuuugcauuggcuaucacgcuaauaacagcaccgauacaguugacaccgugcuggagaaaaaugugacagucacccauuccgugaaccuccuggaagauaagcacaaugggaaacuuuguaagcugagaggaguugcuccccuccaucugggcaaaugcaacaucgccggguggauucugggaaauccugagugugaaccgcucucuacagccagcuccuggucuuacaucguggagaccagcuccucugacaacggcacgugcuaucccggggauuuuauuaauuacgaagaacugcgggagcagcuuagcuccgucagcucuuucgaacgcuuugagaucuucccuaagaccuccagcuggcccaaccacgacucuaauaagggagugacagccgcuuguccucaugccggcgcgaaauccuuuuauaagaaccugaucuggcucguuaaaaagggcaauagcuaccccaaacugucucaauccuauauuaacgauaaggggaagaaagugcuuguccuguggggaauccaccacccuagcaccacagccgaccagcagucccucuaccagaaugcugaugccuacguguucgugggcaccucuagauauagcaagaaauuuaagccggaaauugcuauccggcccaaaguccgcgaccaagaggggagaaugaacuacuauuggacgcugguugagccuggagauaagauuacauucgaagccaccggcaaccugguggugccccgguacgcguuuacaauggagcgcaaugccggguccggaaucauuaucagcgacaccccuguccaugauugcaacaccacaugucagacgcccgaaggcgcuaucaauaccucucucccguuccagaacauucacccuaucacaauuggcaaaugccccaaguaugugaaguccaccaaacugagacuugccacagggcugcggaauguuccuagcauccagucucgcggacucuuuggcgcuauugccggguucaucgagggaggcuggaccgggaugguggacggaugguacggcuaucaucaccaaaacgaacagggcagcggguacgccgcugaccugaaguccacgcagaaugcgaucgauaaaauuacaaacaaggucaauucugugaucgagaaaaugaacacccaguuuaccgccguuggaaaggaguucaaucaccuugaaaagagaauugagaaccugaauaaaaagguggacgauggcuuccucgacaucuggacauacaacgcugaacugcugguccuccuggagaaugaacggacccuugauuaucaugacagcaacgugaaaaaccuguacgagaagguccgcaaucaacucaaaaacaaugccaaggagauugggaacggauguuuugaguucuaucacaagugcgauaauacauguauggaguccgugaaaaacggcacguacgacuaucccaaguacagcgaagaggccaaacugaauagagaaaagaucgaugggguuaaacuugagucuacccggaucuaucagauucuggcuaucuacuccacaguggccagcucucucguccuggugguuucccugggcgcgauuagcuuuuggaugugcuccaacggaucucuccagugccgcaucuguauuuga

SEQ ID NO: 204097 - RNA, 1701 nt, Artificial Sequence
  derived and/or modified CDS sequence (opt5) from hemagglutinin__InfluenzaA__AHV83911
augaaggccauccuggugguccuccuguacaccuucgcuacagccaacgcggacacgcuuugcauuggcuaucacgcuaauaacagcaccgauacaguugacaccgugcuggagaagaaugugacagucacccauuccgugaaccuccuggaagauaagcacaaugggaaacuuuguaagcugagaggaguugcuccccuccaucugggcaaaugcaacaucgccggguggauucugggaaauccugagugugaaccgcucucuacagccagcuccuggucuuacaucguggagaccagcuccucugacaacggcacgugcuaucccggggauuuuauuaauuacgaagaacugcgggagcagcuuagcuccgucagcucuuucgaacgcuuugagaucuucccuaagaccuccagcuggcccaaccacgacucuaauaagggagugacagccgcuuguccucaugccggcgcgaaauccuuuuauaagaaccugaucuggcucguuaaaaagggcaauagcuaccccaaacugucucaauccuauauuaacgauaaggggaaggaagugcuuguccuguggggaauccaccacccuagcaccacagccgaccagcagucccucuaccagaaugcugaugccuacguguucgugggcaccucuagauauagcaaaaaguuuaaaccggagauugcuauccggcccaagguccgcgaccaagaggggagaaugaacuacuauuggacgcugguugaaccuggagauaaaauuacauucgaggccaccggcaaccugguggugccccgguacgcguuuacaauggaacgcaaugccggguccggaaucauuaucagcgacaccccuguccaugauugcaacaccacaugucagacgcccgagggcgcuaucaauaccucucucccguuccagaacauucacccuaucacaauuggcaagugccccaaauaugugaaguccaccaagcugagacuugccacagggcugcggaauguuccuagcauccagucucgcggacucuuuggcgcuauugccggguucaucgaaggaggcuggaccgggaugguggacggaugguacggcuaucaucaccaaaacgagcagggcagcggguacgccgcugaccugaaauccacgcagaaugcgaucgauaagauuacaaacaaagucaauucugugaucgagaagaugaacacccaguuuaccgccguuggaaaagaguucaaucaccuugagaagagaauugaaaaccugaauaagaaaguggacgauggcuuccucgacaucuggacauacaacgcugagcugcugguccuccuggaaaaugagcggacccuugauuaucaugacagcaacgugaagaaccuguacgagaaaguccgcaaucaacucaagaacaaugccaaagaaauugggaacggauguuuugaguucuaucacaagugcgauaauacauguauggaauccgugaagaacggcacguacgacuaucccaaauacagcgaggaagccaagcugaauagagagaaaaucgaugggguuaaacuugagucuacccggaucuaucagauucuggcuaucuacuccacaguggccagcucucucguccuggugguuucccugggcgcgauuagcuuuuggaugugcuccaacggaucucuccagugccgcaucuguauuuga

SEQ ID NO: 204098 - RNA, 1701 nt, Artificial Sequence; identical to SEQ ID NO: 202112
  derived and/or modified CDS sequence (opt5) from hemagglutinin__InfluenzaA__AHV83912

SEQ ID NO: 204099 - RNA, 1701 nt, Artificial Sequence; identical to SEQ ID NO: 202112
  derived and/or modified CDS sequence (opt5) from hemagglutinin__InfluenzaA__AHV83913

SEQ ID NO: 204100 - RNA, 1701 nt, Artificial Sequence; identical to SEQ ID NO: 202112
  derived and/or modified CDS sequence (opt5) from hemagglutinin__InfluenzaA__AHV83915

SEQ ID NO: 204101 - RNA, 1701 nt, Artificial Sequence; identical to SEQ ID NO: 202112
  derived and/or modified CDS sequence (opt5) from hemagglutinin__InfluenzaA__AHV83916

SEQ ID NO: 204102 - RNA, 1701 nt, Artificial Sequence; identical to SEQ ID NO: 204097
  derived and/or modified CDS sequence (opt5) from hemagglutinin__InfluenzaA__AHV83917

SEQ ID NO: 204103 - RNA, 1701 nt, Artificial Sequence; identical to SEQ ID NO: 203075
  derived and/or modified CDS sequence (opt5) from hemagglutinin__InfluenzaA__AHV83919

SEQ ID NO: 204104 - RNA, 1701 nt, Artificial Sequence; identical to SEQ ID NO: 203992
  derived and/or modified CDS sequence (opt5) from hemagglutinin__InfluenzaA__AHV83920

SEQ ID NO: 204105 - RNA, 1701 nt, Artificial Sequence; identical to SEQ ID NO: 203093
  derived and/or modified CDS sequence (opt5) from hemagglutinin__InfluenzaA__AHV83921

SEQ ID NO: 204106 - RNA, 1701 nt, Artificial Sequence
  derived and/or modified CDS sequence (opt5) from hemagglutinin__InfluenzaA__AHV83922
augaaggccauccuggugguccuccuguacaccuucgcuacagccaacgcggacacgcuuugcauuggcuaucacgcuaauaacagcaccgauacaguugacaccgugcuggagaagaaugugacagucacccauuccgugaaccuccuggaagauaagcacaaugggaaacuuuguaagcugagaggaguugcuccccuccaucugggcaaaugcaacaucgccggguggauucugggaaauccugagugugaaucucucagcacagccuccucuuggagcuacaucguggagaccuccucuagcgacaacggcacgugcuauccgggggauuuuauuaauuacgaagaacugcgggagcagcuuuccagcgucucuuccuucgaacgcuuugagaucuuccccaagaccagcucuuggccuaaccacgacuccaauaagggagugacagccgcuuguccccaugccggcgcgaaaucuuuuuauaagaaccugaucuggcucguuaaaaagggcaauagcuacccuaaacugucccaaagcuauauuaacgauaaggggaaggaagugcuuguccuguggggaauccaccaccccuccaccacagccgaccagcagucucucuaccagaaugcugaugccuacguguucgugggcaccagcagauauuccaaaaaguuuaaaccugagauugcuauccggccgaagguccgcgaccaagaggggagaaugaacuacuauuggacgcugguugaacccggagauaaaauuacauucgaggccaccggcaaccugguggugccucgguacgcguuuacaauggaacgcaaugccgggagcggaaucauuaucucugacacccccguccaugauugcaacaccacaugucagacgccugagggcgcuaucaauaccucccuccccuuccagaacauucacccgaucacaauuggcaagugcccuaaauauguuaagagcaccaagcugagacuugccacagggcugcggaaugugcccucuauccagagccgcggacucuuuggcgcuauugccggguucaucgaaggaggcuggaccgggaugguggacggaugguacggcuaucaucaccaaaacgagcagggcuccggguacgccgcugaccugaaaucuacgcagaaugcgaucgauaagauuacaaacaaagucaauagcgugaucgagaagaugaacacccaguuuaccgccguuggaaaagaguucucccaccuugagaagagaauugaaaaucugaacaagaaaguggacgauggcuuccucgacaucuggacauacaaugcugagcugcugguccuccuggaaaacgagcggacccuugauuaucaugacagcaaugugaagaaccuguacgagaaaguccgcaaccaacucaagaauaacgccaaagaaauugggaauggauguuuugaguucuaucacaagugcgauaacacauguauggaaucugugaagaauggcacguacgacuauccuaaauacuccgaggaagccaagcugaacagagagaaaaucgaugggguuaaacuugagagcacccggaucuaucagauucuggcuaucuacucuacaguggccuccagccucguccuggugguuucccugggcgcgauuucuuuuuggaugugcagcaauggaucccuccagugccgcaucuguauuuga

SEQ ID NO: 204107 - RNA, 1701 nt, Artificial Sequence; identical to SEQ ID NO: 204008
  derived and/or modified CDS sequence (opt5) from hemagglutinin__InfluenzaA__AHV83923

SEQ ID NO: 204108 - RNA, 1701 nt, Artificial Sequence; identical to SEQ ID NO: 203992
  derived and/or modified CDS sequence (opt5) from hemagglutinin__InfluenzaA__AHV83924

SEQ ID NO: 204109 - RNA, 1701 nt, Artificial Sequence; identical to SEQ ID NO: 204008
  derived and/or modified CDS sequence (opt5) from hemagglutinin__InfluenzaA__AHV83925

SEQ ID NO: 204110 - RNA, 1701 nt, Artificial Sequence; identical to SEQ ID NO: 203992
  derived and/or modified CDS sequence (opt5) from hemagglutinin__InfluenzaA__AHV83926

SEQ ID NO: 204111 - RNA, 1701 nt, Artificial Sequence; identical to SEQ ID NO: 204097
  derived and/or modified CDS sequence (opt5) from hemagglutinin__InfluenzaA__AHV83927

SEQ ID NO: 204112 - RNA, 1701 nt, Artificial Sequence
  derived and/or modified CDS sequence (opt5) from hemagglutinin__InfluenzaA__AHV83928
augaaggccauccuggugguccuccuguacaccuucacaacggcuaacgccgacacccuuugcauuggcuaucacgcgaauaacagcacagauaccguugacacagugcuggagaaaaaugugaccgucacacauuccgugaaccuccuggaagauaagcacaaugggaaacuuuguaagcugagaggaguugcuccccuccaucugggcaaaugcaacaucgccggguggauucugggaaauccugagugugaaucucucagcaccgccuccucuuggagcuacaucguggagacguccucuagcgacaacgggaccugcuauccgggcgauuuuauuaauuacgaagaacugcgggagcagcuuuccagcgucucuuccuucgaacgcuuugagaucuuccccaagacaagcucuuggccuaaccacgacuccaauaagggagugaccgcugccuguccccaugcuggcgccaagagcuuuuauaagaaccugaucuggcucguuaaaaagggcaauucuuacccuaaacugucccaaagcuauauuaacgauaaggggaaggaagugcuuguccuguggggaauccaccaccccuccacaaccgcggaccagcagucucucuaccagaaugccgaugcuuacguguucgugggcacgagcagauauuccaaaaaguuuaaaccugagauugccauccggccgaagguccgcgaccaagaggggagaaugaacuacuauuggacacugguugaacccggagauaaaauuaccuucgaggcuacaggcaaccugguggugccucgguacgccuuuaccauggaacgcaaugcggggagcggaaucauuaucucugacacccccguccaugauugcaacacaacgugucagaccccugagggcgccaucaauacaucccuccccuuccagaacauucacccgaucaccauuggcaagugcccuaaauaugugaaaagcacaaagcugagacuugcuaccgggcugcggaauguucccucuauccagagccgcggacucuuuggcgccauugcuggguucaucgaaggaggcuggacggggaugguggacggaugguacggcuaucaucaccaaaacgagcagggcuccggguacgccgccgaccagaaaucuacacagaaugcuaucgauaagauuaccaacaaagucaauagcgugaucgagaagaugaacacccaauuuacagcgguuggaaaagaguucaaucaccuggagaagagaauugaaaaccuuaauaagaaaguggacgauggcuuccuggacaucuggaccuacaacgccgagcuccugguccugcucgaaaaugagcggacacuggauuaucaugacuccaacgugaagaaccuuuacgagaaaguccgcaaucagcugaagaacaaugcuaaagaaauugggaacggauguuuugaguucuaucacaagugcgauaauacguguauggaaagcgugaagaacggcaccuacgacuauccuaaauacucugaggaagccaagcucaauagagagaaaaucgaugggguuaagcuggaguccacacggaucuaucagauucuugccaucuacagcaccguggcuucuucccugguccucgugguuagccugggcgccauuuccuuuuggaugugcucuaacggaagccugcaaugccgcaucuguauuuga

SEQ ID NO: 204113 - RNA, 1701 nt, Artificial Sequence; identical to SEQ ID NO: 203992
  derived and/or modified CDS sequence (opt5) from hemagglutinin__InfluenzaA__AHV83929

SEQ ID NO: 204114 - RNA, 1701 nt, Artificial Sequence
  derived and/or modified CDS sequence (opt5) from hemagglutinin__InfluenzaA__AHV83930
augaaggccauccuggugauucuccuguacaccuucgcuacagccaacgcggacacgcuuugcaucggcuaucacgcuaauaacagcaccgauacagucgacaccguucuggagaagaaugugacagugacccauuccgucaaccuccuggaagauaagcacaaugggaaacuuuguaagcugagaggaguggcuccccuccaucugggcaaaugcaacauugccggguggauccugggaaauccugagugugaaucucucagcacagccuccucuuggagcuacauuguugagaccuccucuagcgacaacggcacgugcuauccgggggauuuuaucaauuacgaagaacugcgggagcagcuuuccagcgugucuuccuucgaacgcuuugagaucuuccccaagaccagcucuuggccuaaccacgacuccaauaagggagucacagccgcuuguccccaugccggcgcgaaaucuuuuuauaagaaccugauuuggcucgugaaaaagggcaauagcuacccuaaacugucccaaagcuauaucaacgauaaggggaaggaaguucuugugcuguggggcauucaccaccccuccaccacagccgaccagcagucucucuaccagaaugcugaugccuacgucuucgugggaaccagcagauauuccaaaaaguuuaaaccugagaucgcuauucggccgaaggugcgcgaccaagaggggagaaugaacuacuauuggacgcuggucgaacccggagauaaaaucacauucgaggccaccggcaaccugguugugccucgguacgcguuuacaauggaacgcaaugccgggagcggaauuaucaucucugacacccccgugcaugauugcaacaccacaugucagacgccugagggcgcuauuaauaccucccuccccuuccagaacauccacccgauuacaaucggcaagugcccuaaauaugucaagagcaccaagcugagacuugccacagggcugcggaaugugcccucuauucagagccgcggacucuuuggcgcuaucgccggguucaucgaaggaggcuggaccgggaugguugacggaugguacggcuaucaucaccaaaacgagcagggcuccggguacgccgcugaccugaaaucuacgcagaaugcgauugauaagaucacaaacaaagugaauagcgucauugagaagaugaacacccaguuuaccgccgugggaaaagaguucaaucaccuugagaagagaaucgaaaaccugaauaagaaaguugacgauggcuuccucgacauuuggacauacaacgcugagcugcuggugcuccuggaaaaugagcggacccuugauuaucaugacuccaacgucaagaaccuguacgagaaagugcgcaaucaacucaagaacaaugccaaagaaaucgggaacggauguuuugaguucuaucacaagugcgauaauacauguauggaaagcgucaagaacggcacguacgacuauccuaaauacucugaggaagccaagcugaauagagagaaaaucgauggggugaaacuugaguccacccggauuuaucagauccuggcuauuuacagcacaguugccucuucccucgugcuggucgugagccugggcgcgaucuccuuuuggaugugcucuaacggaagccuccagugccgcauuuguaucuga

SEQ ID NO: 204115 - RNA, 1701 nt, Artificial Sequence; identical to SEQ ID NO: 203992
  derived and/or modified CDS sequence (opt5) from hemagglutinin__InfluenzaA__AHV83931

SEQ ID NO: 204116 - RNA, 1701 nt, Artificial Sequence; identical to SEQ ID NO: 202112
  derived and/or modified CDS sequence (opt5) from hemagglutinin__InfluenzaA__AHV83932

SEQ ID NO: 204117 - RNA, 1701 nt, Artificial Sequence
  derived and/or modified CDS sequence (opt5) from hemagglutinin__InfluenzaA__AHV83933
augaaggccauccuggugguccuccuguacaccuucgcuacagccaacgcggacacgcuuugcauuggcuaucacgcuaauaacagcaccgauacaguugacaccgugcuggagaaaaaugugacagucacccauuccgugaaccuccuggaagauaagcacaaugggaaacuuuguaagcugagaggaguuacaccccuccaucugggcaaaugcaacaucgccggguggauucugggaaauccugagugugaaucucucagcaccgccuccucuuggagcuacaucguggagacguccucuagcgacaacgggaccugcuauccgggcgauuuuauuaauuacgaagaacugcgggagcagcuuuccagcgucucuuccuucgaacgcuuugagaucuuccccaagacaagcucuuggccuaaccacgacuccaauaagggagugaccgcugccuguccccaugcuggcgccaagagcuuuuauaagaaccugaucuggcucguuaaaaagggcaauucuuacccuaaacugucccaaagcuauauuaacgauaaggggaaggaagugcuuguccuguggggaauccaccaccccuccacaaccgcggaccagcagucucucuaccagaaugccgaugcuuacguguucgugggcacgagcagauauuccaaaaaguuuaaaccugagauugccauccggccgaagguccgcgaccaagaggggagaaugaacuacuauuggacacugguugaacccggagauaaaauuaccuucgaggcuacaggcaaccugguggugccucgguacgccuuuaccauggaacgcaaugcggggagcggaaucauuaucucugacacccccguccaugauugcaacacaacgugucagaccccugagggcgccaucaauacaucccuccccuuccagaacauucacccgaucaccauuggcaagugcccuaaauaugugaaaagcacaaagcugagacuugcuaccgggcugcggaauguucccucuauccagagccgcggacucuuuggcgccauugcuggguucaucgaaggaggcuggacggggaugguggacggaugguacggcuaucaucaccaaaacgagcagggcuccggguacgccgccgaccagaaaucuacacagaaugcuaucgauaagauuaccaacaaagucaauagcgugaucgagaagaugaacacccaauuuacagcgguuggaaaagaguucaaucaccuggagaagagaauugaaaaccuuaauaagaaaguggacgauggcuuccuggacaucuggaccuacaacgccgagcuccugguccugcucgaaaaugagcggacacuggauuaucaugacuccaacgugaagaaccuuuacgagaaaguccgcaaucagcugaagaacaaugcuaaagaaauugggaacggauguuuugaguucuaucacaagugcgauaauacguguauggaaagcgugaagaacggcaccuacgacuauccuaaauacucugaggaagccaagcucaauagagagaaaaucgaugggguuaagcuggaguccacacggaucuaucagauucuugcccuguacagcaccguggcuucuucccucguccuggugguuagccugggcgccaucuccuuuuggaugugcucuaacggaagccuccaaugccgcauuuguaucuga

SEQ ID NO: 204118 - RNA, 1701 nt, Artificial Sequence; identical to SEQ ID NO: 203075
  derived and/or modified CDS sequence (opt5) from hemagglutinin__InfluenzaA__AHV83934

SEQ ID NO: 204119 - RNA, 1701 nt, Artificial Sequence; identical to SEQ ID NO: 202112
  derived and/or modified CDS sequence (opt5) from hemagglutinin__InfluenzaA__AHV83935

SEQ ID NO: 204120 - RNA, 1701 nt, Artificial Sequence; identical to SEQ ID NO: 202112
  derived and/or modified CDS sequence (opt5) from hemagglutinin__InfluenzaA__AHV83937

SEQ ID NO: 204121 - RNA, 1701 nt, Artificial Sequence
  derived and/or modified CDS sequence (opt5) from hemagglutinin__InfluenzaA__AHV83938
augaaggccauccuggugguccuccuguacaccuucgcuacagccaacgcggacacgcuuugcauuggcuaucacgcuaauaacagcaccgauacaguugacaccgugcuggagaaaaaugugacagucacccauuccgugaaccuccuggaagauaagcacaaugggaaacuuuguaagcugagaggaguugcuccccuccaucugggcaaaugcaacaucgccggguggauucugggaaauccugagugugaaucucucagcacagccuccucuuggagcuacaucguggagaccuccucuagcgacaacggcacgugcuauccgggggauuuuauuaauuacgaagaacugcgggagcagcuuuccagcgucucuuccuucgaacgcuuugagaucuuccccaagaccagcucuuggccuaaccacgacuccaauaagggagugacagccgcuuguccccaugccggcgcgaaaucuuuuuauaagaaccugaucuggcucguuaaaaagggcaauagcuacccuaaaauuucccaaagcuauaucaacgauaaggggaaggaagugcugguccuuuggggcauucaccaccccuccaccacagccgaccagcagucucuguaccagaaugcugaugccuacguguucgugggaaccagcagauauuccaaaaaguuuaaaccugagaucgcuauucggccgaagguccgcgaccaagaggggagaaugaacuacuauuggacgcucguugaacccggagauaaaaucacauucgaggccaccggcaaccugguggugccucgguacgcguuuacaauggaacgcaaugccgggagcggaauuaucaucucugacacccccguccaugauugcaacaccacaugucagacgccugagggcgcuauuaauaccucccugcccuuccagaacauccacccgauuacaaucggcaagugcccuaaauauguuaagagcaccaagcucagacuggccacagggcuucggaaugugcccucuauucagagccgcggacuguuuggcgcuaucgccggguucaucgaaggaggcuggaccgggaugguggacggaugguacggcuaucaucaccaaaacgagcagggcuccggguacgccgcugaccagaaaucuacgcagaaugcgauugauaagaucacaaacaaagucaauagcgugauugagaagaugaacacccaauuuaccgccguuggaaaagaguucaaucaccucgagaagagaaucgaaaaccugaauaagaaaguggacgauggcuuccuugacauuuggacauacaacgcugagcugcucguccugcuggaaaaugagcggacccucgauuaucaugacuccaacgugaagaaccuguacgagaaaguccgcaaucagcuuaagaacaaugccaaagaaaucgggaacggauguuuugaguucuaucacaagugcgauaauacauguauggaaagcgugaagaacggcacguacgacuauccuaaauacucugaggaagccaagcugaauagagagaaaaucgaugggguuaagcucgaguccacccggauuuaucagauccuggcuauuuacagcacaguggccucuucccuuguccuggugguuagccucggcgcgaucuccuuuuggaugugcucuaacggaagccugcaaugccgcauuuguaucuga

SEQ ID NO: 204122 - RNA, 1701 nt, Artificial Sequence; identical to SEQ ID NO: 204121
  derived and/or modified CDS sequence (opt5) from hemagglutinin__InfluenzaA__AHV83939

SEQ ID NO: 204123 - RNA, 1701 nt, Artificial Sequence
  derived and/or modified CDS sequence (opt5) from hemagglutinin__InfluenzaA__AHV83940
augaaggccauccuggugguccuccuguacaccuucgcuacagccaacgcggacacgcuuugcauuggcuaucacgcuaauaacagcaccgauacaguugacaccgugcuggagaaaaaugugacagucacccauuccgugaaccuccuggaagauaagcacaaugggaaacuuuguaagcugagaggaguugcuccccuccaucugggcaaaugcaacaucgccggguggauucugggaaauccugagugugaaucucucagcacagccuccucuuggagcuacaucguggagaccuccucuagcgacaacggcacgugcuauccgggggauuuuauuaauuacgaagaacugcgggagcagcuuuccagcgucucuuccuucgaacgcuuugagaucuuccccaagaccagcucuuggccuaaccacgacuccaauaagggagugacagccgcuuguccccaugccggcgcgaaaucuuuuuauaagaaccugaucuggcucguuaaaaagggcaauagcuacccuaaacugucccaaagcuauauuaacgauaaggggaaggaagugcuuguccuguggggaauccaccaccccuccaccacagccgaccagcagucucucuaccagaaugcugaugccuacguguucgugggcaccagcagauauuccaaaaaguuuaaaccugagauugcuauccggccgaagguccgcgaccaagaggggagaaugaacuacuauuggacgcugguugaacccggagauaaaauuacauucgaggccaccggcaaccugguggugccucgguacgcguuuacaauggaacgcaaugccgggagcggaaucauuaucucugacacccccguccaugauugcaacaccacaugucagacgccugagggcgcuaucaauaccucccuccccuuccagaacauucacccgaucacaauuggcaagugcccuaaauauguuaagagcaccaagcugagacuugccacagggcugcggaaugugcccucuauccagagccgcggacucuuuggcgcuauugccggguucaucgaaggaggcuggaccgggaugguggacggaugguacggcuaucaucaccaaaacgagcagggcuccggguacgccgcugaccagaaaucuacgcagaaugcgaucgauaagauuacaaacaaagucaauagcgugaucgagaagaugaacacccaauuuaccgccguuggaaaagaguucaaucaccuggagaagagaauugaaaaccuuaauaagaaaguggacgauggcuucauggacaucuggacauacaacgcugagcugcucguccugcuggaaaaugagcggacccucgauuaucaugacuccaacgugaagaaccuguacgagaaaguccgcaaucagcuuaagaacaaugccaaagaaauugggaacggauguuuugaguucuaucacaagugcgauaauacauguauggaaagcgugaagaacggcacguacgacuauccuaaauacucugaggaagccaagcugaauagagagaaaaucgaucggguuaagcucgaguccacccgcaucuaucagauucuggcuaucuacagcacaguggccucuucccuuguccuggugguuagccucggggcgauuuccuuuuggaugugcucuaacggcagccugcaaugcagaaucuguauuuga

SEQ ID NO: 204124 - RNA, 1701 nt, Artificial Sequence; identical to SEQ ID NO: 202112
  derived and/or modified CDS sequence (opt5) from hemagglutinin__InfluenzaA__AHV83941

SEQ ID NO: 204125 - RNA, 1701 nt, Artificial Sequence
  derived and/or modified CDS sequence (opt5) from hemagglutinin__InfluenzaA__AHV83943
augaaggccauccuggugguccuccuguacaccuucgcuacagccaacgcggacacgcuuugcauuggcuaucacgcuaauaacagcaccgauacaguugacaccgugcuggagaagaaugugacagucacccauuccgugaaccuccuggaagauaagcacaaugggaaacuuuguaagcugagaggaguugcuccccuccaucugggcaaaugcaacaucgccggguggauucugggaaauccugagugugaaucucucagcacagccuccucuuggagcuacaucguggagaccuccucuagcgacaacggcacgugcuauccgggggauuuuauuaauuacgaagaacugcgggagcagcuuuccagcgucucuuccuucgaacgcuuugagaucuuccccaagaccagcucuuggccuaaccacgacuccaauaagggagugacagccgcuuguccccaugccggcgcgaaaucuuuuuauaagaaccugaucuggcucguuaaaaagggcaauagcuacccuaaacugucccaaagcuauauuaacgauaaggggaaggaagugcuuguccuguggggaauccaccaccccuccaccacagccgaccagcagucucucuaccagaaugcugaugccuacguguucgugggcaccagcagauauuccaaaaaguuuaaaccugagauugcuauccggccgaagguccgcgaccaagaggggagaaugaacuacuauuggacgcugguugaacccggagauaaaauuacauucgaggccaccggcaaccugguggugccucgguacgcguuuacaauggaacgcaaugccgggagcggaaucauuaucucugacacccccguccaugauugcaacaccacaugucagacgccugagggcgcuaucaauaccucccuccccuuccagaacauucacccgaucacaauuggcaagugcccuaaauauguuaagagcaccaagcugagacuugccacagggcugcggaaugugcccucuauccagagccgcggacucuuuggcgcuauugccggguucaucgaaggaggcuggaccgggaugguggacggaugguacggcuaucaucaccaaaacgagcagggcuccggguacgccgcugaccugaaaucuacgcagaaugcgaucgauaagauuacaaacaaagucaauagcgugaucgagaagaugaacacccaguuuaccgccguuggaaaagaguucaaucaccuugagaagagaauugaaaaccugaauaagaaaguggacgauggcuuccucgacaucuggacauacaacgcugagcugcugguccuccuggaaaaugagcggacccuugauuaucaugacuccaacgugaagaaccuguacgagaaaguccgcaaucaacucaagaacaaugccaaagaaauugggaacggauguuuugaguucuaucacaagugcgauaauauguguauggaaagcgugaagaacggcacauacgacuauccuaaauacucugaggaagccaagcugaauagagagaaaaucgaugggguuaaacuugaguccacgcggaucuaucagauucuggcuaucuacagcaccguggccucuucccucguccuggugguuagccugggcgcgauuuccuuuuggaugugcucuaacggaagccuccagugccgcaucuguauuuga

SEQ ID NO: 204126 - RNA, 1701 nt, Artificial Sequence
  derived and/or modified CDS sequence (opt5) from hemagglutinin__InfluenzaA__AHV83944
augaaggccauccuggugguccuccuguacaccuucgcuacagccaacgcggacacgcuuugcauuggcuaucacgcuaauaacagcaccgauacaguugacaccgugcuggagaaaaaugugacagucacccauuccgugaaccuccuggaagaugagcacaaugggaaacuuuguaaacugagaggaguugcgccccuccaucugggcaagugcaacaucgccggguggauucugggaaauccugaaugugagucucucagcacagcuuccucuuggagcuacaucguggaaaccuccucuagcgacaacggcacgugcuauccgggggauuuuauuaauuacgaggagcugcgggaacagcuuuccagcgucucuuccuucgagcgcuuugaaaucuuccccaaaaccagcucuuggccuaaccacgacuccaauaagggagugacagccgcuuguccccaugccggcgccaagagcuuuuauaaaaaccugaucuggcucguuaagaaaggcaauucuuacccuaagcugucccaaagcuauauuaacgauaaagggaaggaggugcuuguccuguggggaauccaccaccccuccaccacagccgaccagcagucucucuaccagaaugcugaugccuacguguucgugggcaccagcagauauuccaagaaauuuaagccugagauugcuauccggccgaaaguccgcgaccaagaagggagaaugaacuacuauuggacgcugguugagcccggagauaagauuacauucgaagccaccggcaaccugguggugccucgguacgcguuuacaauggagcgcaaugccgggagcggaaucauuaucucugacacccccguccaugauugcaacaccacaugucagacgccugaaggcgcuaucaauaccucccuccccuuccagaacauucacccgaucacaauuggcaaaugcccuaaguaugugaaaagcaccaagcugagacuugccacagggcugcggaauguucccucuauccagagccgcggacucuuuggcgcuauugccggguucaucgagggaggcuggaccgggaugguggacggaugguacggcuaucaucaccaaaacgagcagggcuccggguacgccgcugaccugaagucuacgcagaaugcgaucgauaaaauuacaaacaaggucaauagcgugaucgaaaagaugaacacccaguuuaccgccguuggaaaggaguucaaucaccuugagaaaagaauugaaaaccugaauaagaagguggacgauggcuuccucgacaucuggacauacaacgcugaacugcugguccuccuggagaaugagcggacccuugauuaucaugacuccaacgugaaaaaccuguacgaaaagguccgcaaucaacucaaaaacaaugccaaggagauugggaacggauguuuugaguucuaucacaaaugcgauaauacauguauggaaagcgugaagaacggcacguacgacuauccuaaguacucugaagaggccaaacugaauagagagaagaucgaugggguuaaacuugaauccacccggaucuaucagauucuggcuaucuacagcacaguggccucuucccucguccuggugguuagccugggcgcgauuuccuuuuggaugugcucuaacggaagccuccagugccgcaucuguauuuga

SEQ ID NO: 204127 - RNA, 1701 nt, Artificial Sequence
  derived and/or modified CDS sequence (opt5) from hemagglutinin__InfluenzaA__AHV83945
augaaggccauccuggugguccuccuguacaccuucgcuacagccaacgcggacacgcuuugcauuggcuaucacgcuaauaacagcaccgauacaguugacaccgugcuggagaagaaugugacagucacccauuccgugaaccuccuggaagauaagcacaaugggaaacuuuguaagcugagaggaguugcuccccuccaucugggcaaaugcaacaucgccggguggauucugggaaauccugagugugaaucucucagcacagccuccucuuggagcuacaucguggagaccuccucuagcgacaacggcacgugcuauccgggggauuuuauuaauuacgaagaacugcgggagcagcuuuccagcgucucuuccuucgaacgcuuugagaucuuccccaagaccagcucuuggccuaaccacgacuccaauaagggagugacagccgcuuguccccaugccggcgcgaaaucuuuuuauaagaaccugaucuggcucguuaaaaagggcaauagcuacccuaaacugucccaaagcuauauuaacgauaaggggaaggaagugcuuguccuguggggaauccaccaccccuccaccacaaccgaccagcagucucucuaccagaaugccgaugcuuacguguucgugggcacgagcagauauuccaaaaaguuuaaaccugagauugccauccggccgaagguccgcgaccaagaggggagaaugaacuacuauuggacacugguugaacccggagauaaaauuaccuucgaggcuacaggcaaccugguggugccucgguacgccuuuaccauggaacgcaaugcggggagcggaaucauuaucucugacacccccguccaugauugcaacacaacgugucagaccccugagggcgccaucaauacaucccuccccuuccagaacauucacccgaucaccauuggcaagugcccuaaauauguuaagagcacaaagcugagacuugcuaccgggcugcggaaugugcccucuauccagagccgcggacucuuuggcgccauugcuggguucaucgaaggaggcuggacggggaugguggacggaugguacggcuaucaucaccaaaacgagcagggcuccggguacgccgccgaccugaaaucuacacagaaugcuaucgauaagauuaccaacaaagucaauagcgugaucgagaagaugaacacccaguuuacagcgguuggaaaagaguucaaucaccuugagaagagaauugaaaaccugaauaagaaaguggacgauggcuuccucgacaucuggaccuacaacgccgagcugcugguccuccuggaaaaugagcggacacuugauuaucaugacuccaacgugaagaaccuguacgagaaaguccgcaaucaacucaagaacaaugcuaaagaaauugggaacggauguuuugaguucuaucacaagugcgauaauacguguauggaaagcgugaagaacggcaccuacgacuauccuaaauacucugaggaagccaagcugaauagagagaaaaucgaugggguuaaacuugaguccacacggaucuaucagauucuggccaucuacagcaccguggcuucuucccucguccuggugguuagccugggcgccauuuccuuuuggaugugcucuaacggaagccuccagugccgcaucuguauuuga

SEQ ID NO: 204128 - RNA, 1701 nt, Artificial Sequence
  derived and/or modified CDS sequence (opt5) from hemagglutinin__InfluenzaA__AHV83947
augaaggccauccuggugguccuccuguacaccuucgcuacagccaacgcggacacgcuuugcauuggcuaucacgcuaauaacagcaccgauacaguugacaccgugcuggagaaaaaugugacagucacccauuccgugaaccuccuggaagauaagcacaaugggaaacuuuguaagcugagaggaguugcuccccuccaucugggcaaaugcaacaucgccggguggauucugggaaauccugagugugaaucucucagcacagccuccucuuggagcuacaucguggagaccuccucuagcgacaacggcacgugcuauccgggggauuuuauuaauuacgaagaacugcgggagcagcuuuccagcgucucuuccuucgaacgcuuugagaucuuccccaagaccagcucuuggccuaaccacgacuccaauaagggagugacagccgcuuguccccaugccggcgcgaaaucuuuuuauaagaaccugaucuggcucguuaaaaagggcaauagcuacccuaaacugucccaaagcuauauuaacgauaaggggaaggaagugcuuguccuguggggaauccaccaccccuccaccacagccgaccagcagucucucuaccagaaugcugaugccuacguguucgugggcaccagcagauauuccaaaaaguuuaaaccugagauugcuauccggccgaagguccgcgaccaagaggggagaaugaacuacuauuggacgcugguugaacccggagauaaaauuacauucgaggccaccggcaaccugguggugccucgguacgcguuuacagucaagcgcaaugccgggagcggaaucauuaucucugacacccccgugcaugauugcaacaccacaugucagacgccugaaggcgcuaucaauaccucccuccccuuccagaacauucacccgaucacaauuggcaaaugcccuaaguauguuaagagcaccaaacugagacuugccacagggcugcggaaugugcccucuauccagagccgcggacucuuuggcgcuauugccggguucaucgagggaggcuggaccgggauggucgacggaugguacggcuaucaucaccaaaacgaacagggcuccggguacgccgcugaccagaagucuacgcagaaugcgaucgauaaaauuacaaacaaggugaauagcguuaucgagaaaaugaacacccaauuuaccgccgugggaaaggaguucaaucaccuggaaaagagaauugagaaccuuaauaaaaaggucgacgauggcuuccuggacaucuggacauacaacgcugaacuccuggugcugcucgagaaugaacggacccuggauuaucaugacuccaacgucaaaaaccuuuacgagaaggugcgcaaucagcugaaaaacaaugccaaggagauugggaacggauguuuugaguucuaucacaagugcgauaauacauguauggagagcguuaaaaacggcacguacgacuauccuaaguacucugaagaggccaaacucaauagagaaaagaucgauggggugaaacuggaguccacccggaucuaucagauucuugcuaucuacagcacagucgccucuucccuggugcucguugugagccugggcgcgauuuccuuuuggaugugcucuaacggaagccugcaaugccgcaucuguauuuga

SEQ ID NO: 204129 - RNA, 1701 nt, Artificial Sequence; identical to SEQ ID NO: 202112
  derived and/or modified CDS sequence (opt5) from hemagglutinin__InfluenzaA__AHV83948

SEQ ID NO: 204130 - RNA, 1701 nt, Artificial Sequence; identical to SEQ ID NO: 202112
  derived and/or modified CDS sequence (opt5) from hemagglutinin__InfluenzaA__AHV83949

SEQ ID NO: 204131 - RNA, 1701 nt, Artificial Sequence; identical to SEQ ID NO: 202112
  derived and/or modified CDS sequence (opt5) from hemagglutinin__InfluenzaA__AHV83950

SEQ ID NO: 204132 - RNA, 1701 nt, Artificial Sequence
  derived and/or modified CDS sequence (opt5) from hemagglutinin__InfluenzaA__AHV83953
augaagaccaucauugcccugagcuacauccucugccugguguucgcucagaaacuucccggcaacgacaauuccacagccacgcugugucucgggcaccaugcggucccuaacggaaccauuguuaagacaaucaccaaugauagaauugaggugacaaacgcuaccgaacuggugcaaaauucuagcaucggcgagaucugcgacuccccgcaccagauucuugauggggaaaacuguacacugaucgacgcccuccugggagauccccagugcgacggcuuucagaauaaaaagugggaucuguucgucgagcggucuaaagccuauagcaacuguuacccuuaugacgugcccgauuacgcuucccuccgcucucugguugccagcuccgggacccuugaauuuaauaacgagagcuucaauugggcuggagugacgcaaaacggcaccucuuccgccugcauuagaggcagcaauucuuccuuuuucagccggcugaacuggcucacacaucugaauuuuaaguauccugcgcuuaacgucaccaugcccaacaaugagcaguucgacaagcuguacaucuggggagugcaccauccugggacagauaaagaccagauuuuucucuaugcccagucuuccggccgcaucaccguuagcacgaagagaucccaacaggcugugauuccgaacaucgggucucggccccgcaucagaaauauuccuagccggaucuccauuuacuggacaaucgucaaacccggagauauucugcugaucaacagcaccggcaaucucaucgccccucgcggguacuucaagauuagaucuggaaaauccagcaucaugcggucugacgcucccauuggcaaguguaagagcgaaugcaucacaccgaacggcuccauuccuaaugacaaacccuuucagaacgugaaucgcaucaccuauggggccuguccuagauacgugaagcagucuacccugaaacuugcgacaggaaugcggaacguccccgagaagcaaacgcgcggcaucuucggggccauugcuggauuuaucgaaaauggcugggaggggaugauggauggaugguauggcuucagacaccagaacagcgagggccgggggcaggccgcugaccugaaauccacccaagccgccauugaucagaucaauggaaagcucaacagacugauuggcaaaacaaaugaaaaguuccaccagaucgagaaggaauuuagcgagguugaagggcgcauucaggaccuugagaaauacguggaggauaccaagaucgaccuguggucuuauaacgcugaacuccugguggcgcuggagaaccaacauacaaucgaucucaccgacuccgaaaugaauaaacuguucgagaagacgaaaaagcagcuucgggaaaacgccgaggaucugggaaauggcugcuuuaagauuuaccacaaaugugacaacgcuugcaucgggagcauuagaaauggcacauaugaucaugacgucuaccgcgacgaggcccucaacaaucgguuccagaucaagggaguggaacugaaaucuggcuacaaggauuggauucuuuggaucuccuuugccaucagcugcuuccugcucuguguugcucugcugggguuuauuaugugggccugccagaaaggaaacaucagauguaauauuugcaucuga

SEQ ID NO: 204133 - RNA, 1701 nt, Artificial Sequence; identical to SEQ ID NO: 203964
  derived and/or modified CDS sequence (opt5) from hemagglutinin__InfluenzaA__AHV83954

SEQ ID NO: 204134 - RNA, 1701 nt, Artificial Sequence
  derived and/or modified CDS sequence (opt5) from hemagglutinin__InfluenzaA__AHV83956
augaagaccaucauugcccugagcuacauccucugccugguguucgcucagaaacuucccggcaacgacaauuccacagccacgcugugucucgggcaccaugcggucccuaacggaaccauuguuaagacaaucaccaaugauagaauugaggugacaaacgcuaccgaacuggugcaaaauucuagcaucggcgagaucugcgacuccccgcaccagauucuugauggggaaaacuguacacugaucgacgcccuccugggagauccccagugcgacggcuuucagaauaaaaagugggaucuguucgucgagcggucuaaagccuauagcaacuguuacccuuaugacgugcccgauuacgcuucccuccgcucucugguugccagcuccgggacccuugaauuuaauaacgagaauuucaacugggcuggagugacgcaaaauggcaccagcucugccugcauuagaggcuccaacagcagcuuuuucucccggcugaauuggcucacacaucugaacuuuaaguauccugcgcuuaacgucaccaugcccaauaacgagcaguucgacaagcuguacaucuggggagugcaccauccugggacagauaaagaccagauuuuucucuaugcccagagcucuggccgcaucaccguuuccacgaagagaagccaacaggcugugauuccgaauaucgggucccggccccgcaucagaaacauuccuucucggaucagcauuuacuggacaaucgucaaacccggagauauucugcugaucaauuccaccggcaaccucaucgccccucgcggguacuucaagauuagaagcggaaaaucuuccaucaugcggagcgacgcucccauuggcaaguguaagucugaaugcaucacaccgaauggcagcauuccuaacgacaaacccuuucagaaugugaaccgcaucaccuauggggccuguccuagauacgugaagcaguccacccugaaacuugcgacaggaaugcggaauguccaagagaagcagacgcgcggcaucuucggggccauugcuggauuuaucgaaaacggcugggaggggaugaaagauggaugguauggcuucagacaccaaaauucugagggccgggggcaggccgcugaccugaagucuacccaggccgccauugaucagaucaacggaaaacucaauagacugauuggcaagacaaacgaaaaguuccaccagaucgagaaagaauuuuccgagguugaagggcgcauucaagaccuugagaaguacguggaggauaccaaaaucgaccuguggagcuauaacgcugaacuccugguggcgcuggagaaucagcauacaaucgaucucaccgacucugaaaugaacaagcuguucgagaaaacgaagaagcagcuucgggaaaaugccgaggauaugggaaacggcugcuuuaaaauuuaccacaagugugacaaugcuugcaucggguccauuagaaacggcacauaugaucaugacgucuaccgcgacgaggcccugaauaaccgguuccagaucaaaggaguggaacucaagagcggcuacaaagauuggauucuguggaucucuuuugccaucuccugcuuccuucuguguguugcucuccugggguuuauuaugugggccugccaaaagggaaauaucagauguaacauuugcaucuga

SEQ ID NO: 204135 - RNA, 1701 nt, Artificial Sequence
  derived and/or modified CDS sequence (opt5) from hemagglutinin__InfluenzaA__AHZ13523
augaagaccaucauugcccugagcuacaucuucugccucguguuugcucagaaacugcccggcaacgacaauuccacagccacgcuuugucuggggcaccaugcggucccuaacggaacccucguuaagacaauuaccaaugaucaaaucgaggugacaaacgcuaccgaacuggugcagucuagcuccacaggcagaauuugcgacucuccgcaccggauccuugaugggaaaaauuguacccugaucgacgcccuccugggagauccccauugcgacggcuuccagaacgagaagugggaucuguuugucgaacgcagcaaagccuucuccaauuguuauccuuacgacgugcccgauuaugcuucucucagaagccugguugccuccagcgggacgcuugaguuuauuaacgaaggauucaauuggaccggcgugacacagucuggcggguccuacgcuugcaagcggggaagcgucaacuccuuuuucucucgccugaauuggcucuauaagagcgagucuaaauacccugugcugaacguuaccaugcccaauaacggcaaguuugacaaacuuuauaucuggggagugcaccauccuuccacagauaaggagcaaaccaaucuguacgucagagccagcgggcgggugacgguguccacaaaacgcucucagcagaccgucauuccgaacaucggcagcagacccuggguucgggggcucuccagccgcauuucuaucuacuggacaauugugaagccuggagacauccugcugaucaacuccaccggcaaucucauugcgcccagaggcuauuucaagauccggaccgggaaaagcucuauuaugcgcagcgaugccccuaucggaacauguuccuacgaaugcauuacgcccaacggcucuaucccgaaugacaagccuuuucagaacgugaauaaaaucaccuauggggcuugucccagauacgucaagcaaaacacacugaaacuugccaccggaaugcggaaugugccugagaagcagacacgcggcauuuucggggcuaucgccggauuuauugaaaacggcugggagggcaugguugacgggugguauggauucagacaccagaauagcgagggcaccgggcaggcggccgaucugaaauccacgcaagcugccaucgaccagauuaacggaaagcucaaucggcugaucgaaaagacaaacgagaaauuccaccagaucgaaaaggaguuuagcgaaguggagggccgcauucaagaucuugagaaauacgucgaagacaccaagaucgaucuguggucuuauaaugcugagcuccugguggcccuggaaaaccagcauaccauugaccucacagauuccgagaugaauaaacuguucgaaaagaccagaaagcagcuucgggagaacgccgaggacauggggaacggcugcuuuaaaaucuaccacaagugugauaaugcuugcauuggaagcaucagaaacggcacauacaaucaugacguuuaucgcgaugaagcgcugaacaaucgguuccagauuaaagggguggagcucaagucuggauacaaagacuggauccuguggaucuccuuugccauuagcugcuuccuucugugugucgugcuccugggcuuuaucaugugggcuugccaaaaggggaacauuagauguaauaucugcauuuga

SEQ ID NO: 204136 - RNA, 1698 nt, Artificial Sequence; identical to SEQ ID NO: 195688
  derived and/or modified CDS sequence (opt5) from hemagglutinin__InfluenzaA__AHZ13582

SEQ ID NO: 204137 - RNA, 1701 nt, Artificial Sequence
  derived and/or modified CDS sequence (opt5) from hemagglutinin__InfluenzaA__AHZ35584
augaagaccaucauugcccugagcuacauccucugccugauuuucgcucaggagauccccggcaacgacaauuccacagccacgcuuugucuggggcaccaugcggugccuaacggaaccauugucaaaacaaucaccaaugaucaaaucgaaguuacaaacgcuaccgagcucgugcagucuagcuccacaggcgaaauuugcaauucuccgcaccagauccuggacggggagaacuguacccuuauugaugcccugcucggagacccccagugcgaugacuuucaaaauaagaaaugggaucuguucguggaaagaagcaaggcccauuccaacuguuauccuuacgacguccccgauuaugcuucucugcggagccucguggccuccagcggcacgcuggaguuuaauaacgagucuuucaauuggaccgggguuacacagaacggaaccuccagcgcuugcauccgcagaucuaauaacuccuuuuucagccggcuuaauuggcugacacaccucaacuuuaaauacccugcccugaacgugaccaugcccaauaacgaacaguucgacaaacuuuauauuuggggcguccaucacccuggcacggauaaggaccagaucuuucuguacgcgcaagccucugggcgcauuacaguguccaccaagagaagccagcaggcuguuaucccgaauaucggaucccggccccgcgugagaaacauuccuucucgggucagcaucuauuggacaauugugaagcccggcgauauccuccugauuaauuccaccgggaaccugaucgccccucgcggauacuucaaaaucagaagcggcaagucuuccauuaugcggagcgacgcucccaucgggaaauguaauucugccugcauuaccccgaacggaagcaucccuaaugacaagcccuuucagaacgugaaucgcauuacauacggcgcguguccuagauaugucaagcaaaacacgcucaaacuggccaccggcaugcggaauguucccgagaagcagacacgcgggaucuucggagcuaucgccggcuuuauugaaaacgggugggagggaaugguggauggcugguacggguucagacaccaaaauuccgagggacggggccaggcugccgaccuuaaaucuacccaggccgcuaucgaucagauuaacggcaagcugaacagacucaucgggaaaacaaaugaaaaguuccaucagauugagaaagaauuuagcgagguggaaggacgcauccaagaccuggagaaguaugucgaggauaccaagauugaccuuugguccuacaacgcggaacugcucguggcccuggagaaucagcacacgaucgaucugacagacagcgaaaugaacaaacucuucgagaagaccaaaaagcagcugcgggaaaaugcugaggauaugggcaacgggugcuuuaaaaucuaucauaagugugacaaugccugcauuggaucuaucagaaacggcaccuacgaucacgacguuuaucgcgacgaggcccuuaauaaccgguuccagauuaaggggguggaacugaaauccggcuacaaggauuggauccucuggauuagcuuugcuaucucuugcuuccugcuuugugucgcccugcucggauuuaucaugugggcgugccaaaaaggcaauauuagauguaacaucugcauuuga

SEQ ID NO: 204138 - RNA, 1701 nt, Artificial Sequence
  derived and/or modified CDS sequence (opt5) from hemagglutinin__InfluenzaA__AHZ35608
augaagaccaucauugcccugagcuacauccucugccugauuuucgcucaggagauccccggcaacgacaauuccacagccacgcuuugucuggggcaccaugcggugccuaacggaaccauugucaaaacaaucaccaaugaucaaaucgaaguuacaaacgcuaccgagcucgugcagucuagcuccacaggcgaaauuugcaauucuccgcaccagauccuggacggggagaacuguacccuuauugaugcccugcucggagacccccagugcgaugacuuucaaaauaaggaaugggaucuguucguggagagaagcaaagcccauuccaacuguuauccuuacgacguccccgauuaugcuucucugcggagccucguggccuccagcggcacgcuggaguuuaauaacgaaucuuucaauuggaccgggguuacacagaacggaaccuccagcgcuugcauccgcagaucuaauaacuccuuuuucagccggcuuaauuggcugacacaccucaacuuuaaguacccugcccugaacgugaccaugcccaauaacgagcaguucgacaaacuuuauauuuggggcguccaucacccuggcacggauaaggaccagaucuuucuguacgcgcaagccucugggcgcauuacaguguccaccaagagaagccagcaggcuguuaucccgaauaucggaucccggccccgcgugagaaacauuccuucucgggucagcaucuauuggacaauugugaaacccggcgauauccuccugauuaauuccaccgggaaccugaucgccccucgcggauacuucaagaucagaagcggcaaaucuuccauuaugcggagcgacgcucccaucgggaaguguaauucugccugcauuaccccgaacggaagcaucccuaaugacaaacccuuucagaacgugaaucgcauuacauacggcacguguccuagauaugucaagcaaaacacccucaagcuggcgacaggcaugcggaauguucccgaaaaacagacccgcgggaucuucggagccaucgcuggcuuuauugagaacgggugggagggaaugguggauggcugguacggguucagacaccaaaauuccgaaggacggggccaggccgcugaccuuaagucuacacaggccgccaucgaucagauuaacggcaaacugaacagacucaucgggaagaccaaugagaaauuccaucagauugaaaaggaguuuagcgaaguggagggacgcauccaagaccuggagaaauaugucgaagauacgaagauugaccuuugguccuacaacgcugagcugcucguggcgcuggaaaaucagcacacaaucgaucugaccgacagcgagaugaacaaacucuucgaaaagaccaagaaacagcugcgggagaaugccgaggauaugggcaacgggugcuuuaagaucuaucauaaaugugacaaugcuugcauuggaucuaucagaaacggcacauacgaucacgacguuuaucgcgacgaagcccuuaauaaccgguuccagauuaaggggguggagcugaaguccggcuacaaagauuggauccucuggauuagcuuugccaucucuugcuuccugcuuugugucgcucugcucggauuuaucaugugggccugccaaaagggcaauauuagauguaacaucugcauuuga

SEQ ID NO: 204139 - RNA, 1701 nt, Artificial Sequence; identical to SEQ ID NO: 204137
  derived and/or modified CDS sequence (opt5) from hemagglutinin__InfluenzaA__AHZ35620

SEQ ID NO: 204140 - RNA, 1701 nt, Artificial Sequence; identical to SEQ ID NO: 204137
  derived and/or modified CDS sequence (opt5) from hemagglutinin__InfluenzaA__AHZ35632

SEQ ID NO: 204141 - RNA, 1701 nt, Artificial Sequence; identical to SEQ ID NO: 204137
  derived and/or modified CDS sequence (opt5) from hemagglutinin__InfluenzaA__AHZ35644

SEQ ID NO: 204142 - RNA, 1701 nt, Artificial Sequence; identical to SEQ ID NO: 204137
  derived and/or modified CDS sequence (opt5) from hemagglutinin__InfluenzaA__AHZ35656

SEQ ID NO: 204143 - RNA, 1701 nt, Artificial Sequence; identical to SEQ ID NO: 204137
  derived and/or modified CDS sequence (opt5) from hemagglutinin__InfluenzaA__AHZ35668

SEQ ID NO: 204144 - RNA, 1701 nt, Artificial Sequence; identical to SEQ ID NO: 204138
  derived and/or modified CDS sequence (opt5) from hemagglutinin__InfluenzaA__AHZ35680

SEQ ID NO: 204145 - RNA, 1701 nt, Artificial Sequence; identical to SEQ ID NO: 204137
  derived and/or modified CDS sequence (opt5) from hemagglutinin__InfluenzaA__AHZ35692

SEQ ID NO: 204146 - RNA, 1701 nt, Artificial Sequence; identical to SEQ ID NO: 204137
  derived and/or modified CDS sequence (opt5) from hemagglutinin__InfluenzaA__AHZ35716

SEQ ID NO: 204147 - RNA, 1701 nt, Artificial Sequence; identical to SEQ ID NO: 204138
  derived and/or modified CDS sequence (opt5) from hemagglutinin__InfluenzaA__AHZ35728

SEQ ID NO: 204148 - RNA, 1701 nt, Artificial Sequence; identical to SEQ ID NO: 204137
  derived and/or modified CDS sequence (opt5) from hemagglutinin__InfluenzaA__AHZ35740

SEQ ID NO: 204149 - RNA, 1701 nt, Artificial Sequence; identical to SEQ ID NO: 204137
  derived and/or modified CDS sequence (opt5) from hemagglutinin__InfluenzaA__AHZ35752

SEQ ID NO: 204150 - RNA, 1701 nt, Artificial Sequence; identical to SEQ ID NO: 204137
  derived and/or modified CDS sequence (opt5) from hemagglutinin__InfluenzaA__AHZ35764

SEQ ID NO: 204151 - RNA, 1701 nt, Artificial Sequence; identical to SEQ ID NO: 204137
  derived and/or modified CDS sequence (opt5) from hemagglutinin__InfluenzaA__AHZ35776

SEQ ID NO: 204152 - RNA, 1701 nt, Artificial Sequence
  derived and/or modified CDS sequence (opt5) from hemagglutinin__InfluenzaA__AHZ35823
augaaggccauccuggugguccuccuguacaccuucgcuauugccaacgcggacacacuuugcaucggcuaucacgcuaauaacagcacggauaccguugacacagugcuggagaaaaaugugaccgucacacauuccgugaaccuccuggaagauaagcacaaugggaaacuuuguaagcugagaggaguugcuccccuccaucugggcaaaugcaacauugccggguggauccugggaaauccugagugugaaucucucagcaccgccuccucuuggagcuacauuguggagacauccucuagcgacaacgggaccugcuauccgggcgauuuuaucaauuacgaagaacugcgggagcagcuuuccagcgucucuuccuucgaacgcuuugagauguuccccaagacgagcucuuggccuaaccacgacuccaauaagggagugaccgccgcuuguccccaugccggcgcgaaaucuuuuuauaagaaccugaucuggcucguuaaaaagggcaauagcuacccuaaacuguccaagagcuauauuaacgauaaggggaaagaagugcuuguccuguggggaauccaccaccccuccacaaccgccgaccaacagucucucuaccagaaugcugaugccuacguguucgugggcacaagcagauauuccaagaaauuuaagccugagauugcuauccggccgaaaguccgcgaccaggaggggagaaugaacuacuauuggacccugguugaacccggagauaagauuacguucgaggccacaggcaaccugguggugccucgguacgcguuugccauggaacgcaaugcugggagcggaaucauuaucucugacacccccguccaugauugcaacacaaccugucaaaccccuaaaggcgccaucaauacaucccuccccuuccagaacauucacccgaucacgauuggcaagugcccuaaguaugugaaaagcaccaagcugagacuugcuacagggcugcggaauguucccucuauccagagccgcggacucuuuggcgccauugccggguucaucgagggaggcuggaccgggaugguggacggaugguacggcuaucaucaccagaacgaacaaggcuccggguacgcugcggaccugaaaucuacacagaaugccaucgauaagauuaccaacaaagucaauagcgugaucgagaagaugaacacgcaguuuacagcuguuggaaaggaguucaaucaccuugagaaaagaauugagaaccugaauaagaaaguggacgauggcuuccucgacaucuggaccuacaacgccgaacugcugguccuccuggagaaugaacggacccuugauuaucaugacuccaacgugaagaaccuguacgagaaaguccgcaaucagcucaagaacaaugccaaggagauugggaacggauguuuugaguucuaucacaaaugcgauaauacauguauggaaagcgugaagaacggcaccuacgacuauccuaaauacucugaagaggcuaagcugaauagagaagagaucgaugggguuaaacuugaguccacacggaucuaucaaauucuggccaucuacagcacgguggcgucuucccucguccuggugguuagccugggcgcuauuuccuuuuggaugugcucuaacggaagccuccagugccgcaucuguauuuga

SEQ ID NO: 204153 - RNA, 1701 nt, Artificial Sequence; identical to SEQ ID NO: 204152
  derived and/or modified CDS sequence (opt5) from hemagglutinin__InfluenzaA__AHZ35834

SEQ ID NO: 204154 - RNA, 1701 nt, Artificial Sequence; identical to SEQ ID NO: 204152
  derived and/or modified CDS sequence (opt5) from hemagglutinin__InfluenzaA__AHZ35845

SEQ ID NO: 204155 - RNA, 1701 nt, Artificial Sequence; identical to SEQ ID NO: 204152
  derived and/or modified CDS sequence (opt5) from hemagglutinin__InfluenzaA__AHZ35856

SEQ ID NO: 204156 - RNA, 1701 nt, Artificial Sequence
  derived and/or modified CDS sequence (opt5) from hemagglutinin__InfluenzaA__AHZ35867
augaagaccaacaucgcccugagcuacauucucugccugguguccgcucagaaacuucccggcaaugacaacucuacagccacgcugugucucgggcaccaugcggucccuaauggaaccaucguuaagacaauuaccaacgaucaaaucgaggugacaaaugcuaccgaacuggugcagagcuccucuacaggcgagauuugcaacagcccgcaccagauccuugacggggaaaauuguacccugaucgaugcccuccugggagacccccagugcgauggcuuccaaaacaaaaagugggaccuguuugucgagagauccaaagcccauucuaauuguuauccuuacgaugugcccgacuaugcuagccuccggucccugguugccagcucugggacgcuugaguucaacaaugaauccuuuaacuggaccggagugacacagaauggcaccagcucugcuugcauucgcagauccaacaauagcuucuuuucucggcugaacuggcucacacaccugaacuucaaguacccugcccuuaaugucaccaugcccaacaaugagcaguuugauaagcuguauaucuggggcgugcaucacccugggacggacaaagaucagauuuuccucuacgcgcaagccgcuggacgcaucacaguuuccaccaagagaagccagcaggccgugauuccgaacaucggcucccggccccgcgucagaaauauuccuucucgggugagcaucuauuggacaaucgugaaacccggggacauucugcugaucaacuccaccggaaaucucauugcuccucgcggcuacuuuaagaucagaagcgggaaaucuuccauuaugcggagcgaugcccccaucggaaaguguaacucugcgugcaucaccccgaauggcagcauuccuaacgacaagcccuuccagaaugucaaccgcaucacauacggcgccuguccuagauauguuaaacaaaauacgcugaaacuugcuaccgggaugcggaacgugcccgaaaaacagacacgcggaauuuuuggcgccaucgcuggguucauugagaauggaugggaaggcaugguggacgggugguacggauuuagacaccagaacuccgagggccggggccaagccgccgaucugaagucuacccaggcugcgaucgaccagaucaacgggaaacucaauagacugauuggaaagacaaacgagaaauuccaucagaucgaaaaggaguucagcgaagucgagggccgcauucaagaucuugaaaaguauguggaggacaccaaaaucgaucugugguccuacaaugccgagcuccugguugugcuggaaaaccagcacacgauugaccucacagauagcgagaugaauaagcuguuugaaaagaccaagaaacagcuucgggagaacgcugaagacauggggaauggaugcuucaagaucuaucauaagugugauaacgccugcauuggcucuaucagaaaugggaccuacgaccacgaugucuaucgcgacgaggcccugaacaaucgguuucagaucaaaggcguggagcucaaguccggauacaaagacuggauucuguggaucagcuucgcuauuucuugcuuucuucuguguguugcccuccugggcuucaucaugugggcgugccaaaaggggaacauuagauguaauaucugcaucuga

SEQ ID NO: 204157 - RNA, 1701 nt, Artificial Sequence
  derived and/or modified CDS sequence (opt5) from hemagglutinin__InfluenzaA__AHZ35879
augaagaccaacaucgcccugagcuacauucucugccugguguccgcucagaaacuucccggcaaugacaacucuacagccacgcugugucucgggcaccaugcggucccuaauggaaccaucguuaagacaauuaccaacgaucaaaucgaggugacaaaugcuaccgaacuggugcagagcuccucuacaggcgagauuugcaacagcccgcaccagauccuugacggggaaaauuguacccugaucgaugcccuccugggagacccccagugcgauggcuuccaaaacaaaaagugggaccuguuugucgagagauccaaagcccauucuaauuguuauccuuacgaugugcccgacuaugcuagccuccggucccugguugccagcucugggacgcuugaguucaacaaugaauccuuuaacuggaccggagugacacagaauggcaccagcucugcuugcauucgcagauccaacaauagcuucuuuucucggcugaacuggcucacacaccugaacuucaaguacccugcccuuaaugucaccaugcccaacaaugagcaguuugauaagcuguauaucuggggcgugcaucacccugggacggacaaagaucagauuuuccucuacgcgcaagccgcuggacgcaucacaguuuccaccaagagaagccagcaggccgugauuccgaacaucggcucccggccccgcgucagaaauauuccuucucgggugagcaucuauuggacaaucgugaaacccggggacauucugcugaucaacuccaccggaaaucucauugcuccucgcggcuacuuuaagaucagaagcgggaaaucuuccauuaugcggagcgaugcccccaucggaaaguguaacucugcgugcaucaccccgaauggcagcauuccuaacgacaagcccuuccagaaugucaaccgcaucacauacggcgccuguccuagauauguuaaacaaaauacgcugaaacuugcuaccgggaugcggaacgugcccgaaaaacagacacgcggaauuuuuggcgccaucgcuggguucauugagaauggaugggaaggcaugguggacgggugguacggauuuagacaccagaacuccgagggccggggccaagccgccgaucugaagucuacccaggcugcgaucgaccagaucaacgggaaacucaauagacugauuggaaagacaaacgagaaauuccaucagaucgaaaaggaguucagcgaagucgagggccgcauucaagaucuugaaaaguauguggaggacaccaaaaucgaucugugguccuacaaugccgagcuccugguugcucuggaaaaccagcacacgauugaccucacagauagcgagaugaauaagcuguuugaaaagaccaagaaacagcuucgggagaacgccgaagacauggggaauggaugcuucaagaucuaucauaagugugauaacgccugcauuggcucuaucagaaaugggaccuacgaccacgauguguaucgcgacgaggcucugaacaaucgguuucagaucaaaggcgucgagcucaaguccggauacaaagacuggauucuguggaucagcuucgccauuucuugcuuucuucuguguguggcgcuccugggcuucaucaugugggcuugccaaaaggggaacauuagauguaauaucugcaucuga

SEQ ID NO: 204158 - RNA, 1701 nt, Artificial Sequence; identical to SEQ ID NO: 204152
  derived and/or modified CDS sequence (opt5) from hemagglutinin__InfluenzaA__AHZ35891

SEQ ID NO: 204159 - RNA, 1701 nt, Artificial Sequence; identical to SEQ ID NO: 204152
  derived and/or modified CDS sequence (opt5) from hemagglutinin__InfluenzaA__AHZ35902

SEQ ID NO: 204160 - RNA, 1710 nt, Artificial Sequence
  derived and/or modified CDS sequence (opt5) from hemagglutinin__InfluenzaA__AHZ35913
augaaggccauccuggugguccuccuguacaccuucgcuauugccaacgcggacacacuuugcaucggcuaucacgcuaauaacagcacggauaccguugacacagugcuggagaaaaaugugaccgucacacauuccgugaaccuccuggaagauaagcacaaugggaaacuuuguaagcugagaggaguugcuccccuccaucugggcaaaugcaacauugccggguggauccugggaaauccugagugugaaucucucagcaccgccuccucuuggagcuacauuguggagacauccucuagcgacaacgggaccugcuauccgggcgauuuuaucaauuacgaagaacugcgggagcagcuuuccagcgucucuuccuucgaacgcuuugagauguuccccaagacgagcucuuggccuaaccacgacuccaauaagggagugaccgccgcuuguccccaugccggcgcgaaaucuuuuuauaagaaccugaucuggcucguuaaaaagggcaauagcuacccuaaacuguccaagagcuauauuaacgauaaggggaaagaagugcuuguccuguggggaauccaccaccccuccacaaccgccgaccaacagucucucuaccagaaugcugaugccuacguguucgugggcacaagcagauauuccaagaaauuuaagccugagauugcuauccggccgaaaguccgcgaccaggaggggagaaugaacuacuauuggacccugguugaacccggagauaagauuacguucgaggccacaggcaaccugguggugccucgguacgcguuugccauggaacgcaaugcugggagcggaaucauuaucucugacacccccguccaugauugcaacacaaccugucaaaccccuaaaggcgccaucaauacaucccucacgagccugcccuuccagaacauucacccgaucaccauuggcaagugcccuaaguaugugaaaucuacaaaacuuagacuggcuaccgggcuccggaauguucccagcauccagucccgcggacuguuuggcgccauugccggguucaucgagggaggcuggacagggaugguggacggaugguacggcuaucaucaccagaacgaacaaggcucuggguacgcugcggaccuuaaaagcacccagaaugccaucgauaagauuacgaacaaagucaauuccgugaucgagaagaugaacacacaguuuaccgcuguuggaaaggaguucaaucaccuggaaaagagaauugagaaccucaauaagaaaguggacgauggcuuccuggacaucuggaccuacaacgccgaacugcucguccugcuugagaaugaacggacacuggauuaucaugacagcaacgugaagaaccucuacgagcgcgucagaaaucagcugaaaaacaaugccaaggagauugggaacggauguuuugaguucuaucacaagugcgauaauaccuguauggagucugugaaaaacggcacauacgacuauccuaaguacuccgaagaggcuaaacuuaaucgggaagagaucgaugggguuaagcuggagagcacgcgcaucuaucaaauucucgccaucuacucuaccguggcguccagccugguccuggugguuucccucggcgcuauuucuuuuuggaugugcagcaacggaucccugcagugcagaaucuguauuuga

SEQ ID NO: 204161 - RNA, 1701 nt, Artificial Sequence
  derived and/or modified CDS sequence (opt5) from hemagglutinin__InfluenzaA__AHZ35924
augaaggccauccuggugguccuccuguacaccuucgcuacagccaacgcggacacgcuuugcauuggcuaucacgcuaauaacagcaccgauacaguugacaccgugcuggagaaaaaugugacagucacccauuccgugaaccuccuggaagauaagcacaaugggaaacuuuguaagcugagaggaguugcuccccuccaucugggcaaaugcaacaucgccggguggauucugggaaauccugagugugaaucucucagcacagccuccucuuggagcuacaucguggagaccuccucuagcgacaacggcacgugcuauccgggggauuuuauuaauuacgaggaacugcgggagcagcuuuccagcgucucuuccuucgaacgcuuugagaucuuccccaagaccagcucuuggccuaaccacgacuccaauaagggagugacagccgcuuguccccaagccggcgcgaaaucuuuuuauaagaaccugaucuggcucguuaaaaagggcaauagcuacccuaaacuguccaagagcuauauuaacgauaaggggaaagaagugcuuguccuguggggaauccaucaccccuccaccucugccgaccagcagagccucuaccagaaugcugaugccuacguguucgugggcacauccaaguauagcaaaaaguuuaaaccugagauugcugucagaccgaagguucgggaccaagaggggcgcaugaacuacuauuggacccugguggaacccggagauaaaaucacguucgaggccacaggcaaccugcucgugccuagauacgcguuugccauggaacggaaugcugggucuggaauuaucauuuccgacacccccguccacgauugcaacacaaccugucagaccccuaagggcgccaucaauacaagccugcccuuccagaacauccauccgauuacgaucggcaagugcccuaaauaugugaagucuaccaaacuucgccuggcuacagggcucagaaauguucccagcacccagucccggggacuguuuggcgccauugccggguucaucgagggaggcuggacagggaugguggacggaugguacggcuaucaccaucaaaacgcucagggcucuggguacgcggccgaccuuaagagcacccagaaugcuauugauaaaaucacgaacaaggucaauuccgugaucgaaaagaugaacacacaguuuaccgccguuggaaaagaguucaaucaccuggagaagcgcauugaaaaccucaauaaaaagguggacgauggcuuccuggacaucuggaccuacaacgccgagcugcucguccugcuugaaaaugagagaacacuggauuaucacgacagcaacgugaaaaaccucuacgaaaagguccggucucaacugaagaauaacgcuaaagagauugggaauggauguuuugaguucuaucauaagugcgauaacaccuguauggaauccgugaaaaauggcacauacgacuauccuaaguacagcgaggaagccaaacuuaaccgcgaggaaaucgaugggguuaagcuggagucuacgagaauuuaucagauccucgcgaucuacuccaccguggcuagcucccugguccuggugguuucucucggcgccauuagcuuuuggaugugcuccaauggaucucugcagugccggaucuguauuuga

SEQ ID NO: 204162 - RNA, 1701 nt, Artificial Sequence
  derived and/or modified CDS sequence (opt5) from hemagglutinin__InfluenzaA__AHZ35935
augaaggccauccuggugguccuccuguacaccuucgcuauugccaacgcggacacacuuugcaucggcuaucacgcuaauaacagcacggauaccguugacacagugcuggagaaaaaugugaccgucacacauuccgugaaccuccuggaagauaagcacaaugggaaacuuuguaagcugagaggaguugcuccccuccaucugggcaaaugcaacauugccggguggauccugggaaauccugagugugaaucucucagcaccgccuccucuuggagcuacauuguggagacauccucuagcgacaacgggaccugcuauccgggcgauuuuaucaauuacgaagaacugcgggagcagcuuuccagcgucucuuccuucgaacgcuuugagauguuccccaagacgagcucuuggccuaaccacgacuccaauaagggagugaccgccgcuuguccccaugccggcgcgaaaucuuuuuauaagaaccugaucuggcucguuaaaaagggcaauagcuacccuaaacuguccaagagcuauauuaacgauaaggggaaagaagugcuuguccuguggggaauccaccaccccuccacaaccgccgaccaacagucucucuaccagaaugcugaugccuacguguucgugggcacaagcagauauuccaagaaauuuaagccugagauugcuauccggccgaaaguccgcgaccaggaggggagaaugaacuacuauuggacccugguugaacccggagauaagauuacguucgaggccacaggcaaccugguggugccucgguacgcguuugccauggaacgcaaugcugggagcggaaucauuaucucugacacccccguccaugauugcaacacaaccugucaaaccccuaaaggcgccaucaauacaucccuccccuuccagaacauucacccgaucacgauuggcaagugcccuaaguaugugaaaagcaccaagcugagacuugcuacagggcugcggaauauccccucuauucagagccgcggacucuuuggcgccaucgccggguucaucgagggaggcuggaccgggaugguugacggaugguacggcuaucaucaccagaacgaacaaggcuccggguacgcugcggaccugaaaucuacacagaaugccauugauaagaucaccaacaaagugaauagcgucauugagaagaugaacacgcaguuuacagcugugggaaaggaguucaaucaccuugagaaaagaaucgagaaccugaauaagaaaguugacgauggcuuccucgacauuuggaccuacaacgccgaacugcuggugcuccuggagaaugaacggacccuugauuaucaugacuccaacgucaagaaccuguacgagaaagugcgcaaucagcucaagaacaaugccaaggagaucgggaacggauguuuugaguucuaucacaaaugcgauaauacauguauggaaagcgucaagaacggcaccuacgacuauccuaaauacucugaagaggcuaagcugaauagagaagagaucgauggggugaaacuugaguccacacggauuuaucaaauccuggccauuuacagcacgguugcgucuucccucgugcuggucgugagccugggcgcuaucuccuuuuggaugugcucuaacggaagccuccagugccgcauuuguaucuga

SEQ ID NO: 204163 - RNA, 1701 nt, Artificial Sequence; identical to SEQ ID NO: 204157
  derived and/or modified CDS sequence (opt5) from hemagglutinin__InfluenzaA__AHZ35946

SEQ ID NO: 204164 - RNA, 1701 nt, Artificial Sequence; identical to SEQ ID NO: 204152
  derived and/or modified CDS sequence (opt5) from hemagglutinin__InfluenzaA__AHZ35958

SEQ ID NO: 204165 - RNA, 1701 nt, Artificial Sequence; identical to SEQ ID NO: 204152
  derived and/or modified CDS sequence (opt5) from hemagglutinin__InfluenzaA__AHZ35980

SEQ ID NO: 204166 - RNA, 1701 nt, Artificial Sequence; identical to SEQ ID NO: 204152
  derived and/or modified CDS sequence (opt5) from hemagglutinin__InfluenzaA__AHZ35991

SEQ ID NO: 204167 - RNA, 1701 nt, Artificial Sequence; identical to SEQ ID NO: 204152
  derived and/or modified CDS sequence (opt5) from hemagglutinin__InfluenzaA__AHZ36002

SEQ ID NO: 204168 - RNA, 1701 nt, Artificial Sequence
  derived and/or modified CDS sequence (opt5) from hemagglutinin__InfluenzaA__AHZ36013
augaaggccauccuggugguccuccuguacaccuucgcuauugccaacgcggacacacuuugcaucggcuaucacgcuaauaacagcacggauaccguugacacagugcuggagaaaaaugugaccgucacacauuccgugaaccuccuggaagauaagcacaauagaaaacuuuguaagcugcgcgggguugcuccccuccaucugggaaaaugcaacauugccggcuggauccuggggaauccugagugugaaucucucagcaccgccuccucuuggagcuacauuguggagacauccucuagcgacaacggaaccugcuauccgggcgauuuuaucaauuacgaggagcugcgggagcagcuuuccagcgucucuuccuucgaaagauuugagauguuccccaagacgagcucuuggccuaaccacgacuccaauaagggggugaccgccgcuuguccccaugccggagcgaaaucuuuuuauaagaaccugaucuggcucguuaaaaagggcaauagcuacccuaaacuguccaagagcuauauuaacgauaagggcaaagaagugcuuguccugugggggauccaccaccccuccacaaccgccgaccaacagucucucuaccagaaugcugaugccuacguguucgugggaacaagccgguauuccaagaaauuuaagccugagauugcuauccgcccgaaagucagagaccaggagggccggaugaacuacuauuggacccugguugaacccggggauaagauuacguucgaggccacaggaaaccugguggugccucgcuacgcguuugccauggaaagaaaugcuggcagcgggaucauuaucucugacacccccguccaugauugcaacacaaccugucaaaccccuaaaggagccaucaauacaucccuccccuuccagaacauucacccgaucacgauuggcaagugcccuaaguaugugaaaagcaccaagcugcggcuugcuacaggccugcgcaauguucccucuauccagagcagagggcucuuuggagccauugccggcuucaucgaagggggauggaccggcaugguggacgggugguacggauaucaucaccagaacgaacaaggcuccggcuacgcugcggaccugaaaucuacacagaaugccaucgauaagauuaccaacaaagucaauagcgugaucgagaagaugaacacgcaguuuacagcuguugggaaggaguucaaucaccuugaaaaacggauugagaaccugaauaagaaaguggacgauggauuccucgacaucuggaccuacaacgccgaacugcugguccuccuggagaaugaacgcacccuugauuaucaugacuccaacgugaagaaccuguacgagaaagucagaaaucagcucaagaacaaugccaaggagauuggcaacggguguuuugaguucuaucacaaaugcgauaauacauguauggaaagcgugaagaacggaaccuacgacuauccuaaauacucugaagaggcuaagcugaaucgggaagagaucgauggcguuaaacuugaguccacacgcaucuaucaaauucuggccaucuacagcacgguggcgucuucccucguccuggugguuagccugggggcuauuuccuuuuggaugugcucuaacggcagccuccagugcagaaucuguauuuga

SEQ ID NO: 204169 - RNA, 1701 nt, Artificial Sequence
  derived and/or modified CDS sequence (opt5) from hemagglutinin__InfluenzaA__AHZ36024
augaaggccauccuggugguccuccuguacaccuucgcuacagccaacgcggacacgcuuugcauuggcuaucacgcuaauaacagcaccgauacaguugacaccgugcuggagaaaaaugugacagucacccauuccgugaaccuccuggaagauaagcacaaugggaaacuuuguaagcugagaggaguugcuccccuccaucugggcaaaugcaacaucgccggguggauucugggaaauccugagugugaaucucucagcacagccuccucuuggagcuacaucguggagaccuccucuagcgacaacggcacgugcuauccgggggauuuuauuaauuacgaagaacugcgggagcagcuuuccagcgucucuuccuucgaacgcuuugagaucuuccccaagaccagcucuuggccuaaccacgacuccaauaagggagugacagccgcuuguccccaugccggcgcgaaaucuuuuuauaagaaccugaucuggcucguuaaaaagggcaauagcuacccuaaacuguccaagagcuauauuaacgauaaggggaaagaagugcuuguccuguggggaauccaccaccccuccaccacagccgaccaacagucucucuaccagaaugcugaugccuacguguucgugggcaccagcagauauuccaagaaauuuaagccugagauugcuauccggccgaaaguccgcgaccaggaggggagaaugaacuacuauuggacgcugguugaacccggagauaagauuacauucgaggccaccggcaaccugguggugccucgguacgcguuugccauggaacgcaaugcugggagcggaaucauuaucucugacacacccguccaugauugcaacaccaccugucaaacaccuaaaggcgccaucaauacgucccuccccuuccagaacauucacccgaucaccauuggcaagugcccuaaguaugugaaaagcacaaagcugagacuugcuaccgggcugcggaauguucccucuauccagagccgcggacucuuuggcgccauugccggguucaucgagggaggcuggacagggaugguggacggaugguacggcuaucaucaccagaacgaacaaggcuccggguacgcugcggaccugaaaucuacccagaaugccaucgauaagauuacgaacaaagucaauagcgugaucgagaagaugaacacacaguuuaccgcuguuggaaaggaguucaaucaccuugagaaaagaauugagaaccugaauaagaaaguggacgauggcuuccucgacaucuggaccuacaacgccgaacugcugguccuccuggagaaugaacggacacuugauuaucaugacuccaacgugaagaaccuguacgagaaaguccgcaaucagcucaagaacaaugccaaggagauugggaacggauguuuugaguucuaucacaaaugcgauaauaccuguauggaaagcgugaagaacggcacauacgacuauccuaaauacucugaagaggcuaagcugaauagagaagagaucgaugggguuaaacuugaguccacgcggaccuaucaaauccuggccauuuacagcacaguggcgucuucccucguccuggugguuagccugggcgcuaucuccuuuuggaugugcucuaacggaagccuccagugccgcauuuguaucuga

SEQ ID NO: 204170 - RNA, 1701 nt, Artificial Sequence
  derived and/or modified CDS sequence (opt5) from hemagglutinin__InfluenzaA__AHZ36035
augaagaccaucauugcccugagcuacauccucugccugguguucgcucagaaacuucccggcaacgacaauuccacagccacgcugugucucgggcaccaugcggucccuaacggaaccauuguuaagacaaucaccaaugaucaaauugaggugacaaacgcuaccgaacugauccagucuagcuccacaggcgagaucugcaauucuccgcaccagauucuugacggggaaaacuguacccugaucgaugcccuccugggagacccccagugcgauggcuuucaaaauaaaaagugggaccuguucguggagagaagcaaagcccauuccaacuguuauccuuacgauguccccgacuaugcuucucuccggagccugguggccuccagcgggacgcuugaauuuaauaacgagucuuucaauuggaccggaguuacacagaacggcaccuccagcgcuugcauucgcagaucuaauaacuccuuuuucagccggcugaauuggcucacacaccugaacuuuaaguacccugcccuuaacgugaccaugcccaauaacgagcaguucgauaagcuguauaucuggggcguccaucacccugggacggacaaagaucagauuuuucucuacgcgcaagccgcuggacgcaucacagugucuaccaagagaucccagcaggccguuauuccgaauaucggcagccggccccgcgugagaaacaucccuucccgggucucuauuuauuggacaaucgugaaacccggggacauucugcugaucaauagcaccggaaaccucauugcuccucgcggcuacuucaagaucagauccgggaaaagcucuaucaugcgguccgaugcccccauuggaaaguguaauagcgcgugcaucaccccgaacggcucuauuccuaaugacaagcccuuucagaacgugaaucgcaucacauacggcgccuguccuagauaugucaaacaaaacacgcugaaacuugcuaccgggaugcggaauguucccgaaaaacagacacgcggaauuuucggcgccaucgcuggguuuaucgagaacggaugggaaggcaugguggacgggugguacggauucagacaccagaauagcgagggccggggccaagccgccgaucugaaguccacccaggcugcgauugaccagaucaacgggaaacucaacagacugauuggaaagacaaaugagaaauuccaucagaucgaaaaggaguuuucugaaguggagggccgcauucaagaucuugaaaaguaugucgaggacaccaaaaucgaucuguggagcuacaacgccgagcuccugguggcucuggaaaaucagcacacgauugaccucacagauuccgagaugaacaagcuguucgaaaagaccaagaaacagcuucgggagaaugccgaagacauggggaacggaugcuuuaagaucuaucauaagugugauaaugccugcaucggcagcauuagaaacgggaccuacgaccacgauguuuaucgcgacgaggcucugaauaaccgguuccagaucaaaggcguggagcucaagucuggauacaaagacuggauucuguggaucuccuuugccauuagcugcuuccuucugugugucgcgcuccugggcuuuaucaugugggcuugccaaaaggggaauaucagauguaacauuugcaucuga

SEQ ID NO: 204171 - RNA, 1701 nt, Artificial Sequence; identical to SEQ ID NO: 198927
  derived and/or modified CDS sequence (opt5) from hemagglutinin__InfluenzaA__AHZ36047

SEQ ID NO: 204172 - RNA, 1701 nt, Artificial Sequence; identical to SEQ ID NO: 204152
  derived and/or modified CDS sequence (opt5) from hemagglutinin__InfluenzaA__AHZ36059

SEQ ID NO: 204173 - RNA, 1701 nt, Artificial Sequence; identical to SEQ ID NO: 204169
  derived and/or modified CDS sequence (opt5) from hemagglutinin__InfluenzaA__AHZ36070

SEQ ID NO: 204174 - RNA, 1701 nt, Artificial Sequence; identical to SEQ ID NO: 204168
  derived and/or modified CDS sequence (opt5) from hemagglutinin__InfluenzaA__AHZ36081

SEQ ID NO: 204175 - RNA, 1701 nt, Artificial Sequence; identical to SEQ ID NO: 204169
  derived and/or modified CDS sequence (opt5) from hemagglutinin__InfluenzaA__AHZ36092

SEQ ID NO: 204176 - RNA, 1701 nt, Artificial Sequence; identical to SEQ ID NO: 204152
  derived and/or modified CDS sequence (opt5) from hemagglutinin__InfluenzaA__AHZ36103

SEQ ID NO: 204177 - RNA, 1701 nt, Artificial Sequence; identical to SEQ ID NO: 204169
  derived and/or modified CDS sequence (opt5) from hemagglutinin__InfluenzaA__AHZ36114

SEQ ID NO: 204178 - RNA, 1701 nt, Artificial Sequence; identical to SEQ ID NO: 204152
  derived and/or modified CDS sequence (opt5) from hemagglutinin__InfluenzaA__AHZ36125

SEQ ID NO: 204179 - RNA, 1701 nt, Artificial Sequence; identical to SEQ ID NO: 204152
  derived and/or modified CDS sequence (opt5) from hemagglutinin__InfluenzaA__AHZ36136

SEQ ID NO: 204180 - RNA, 1701 nt, Artificial Sequence; identical to SEQ ID NO: 198927
  derived and/or modified CDS sequence (opt5) from hemagglutinin__InfluenzaA__AHZ36147

SEQ ID NO: 204181 - RNA, 1701 nt, Artificial Sequence
  derived and/or modified CDS sequence (opt5) from hemagglutinin__InfluenzaA__AHZ36158
augaaggccauccuggugguccuccuguacaccuucgcuauugccaacgcggacacacuuugcaucggcuaucacgcuaauaacagcacggauaccguugacacagugcuggagaaaaaugugaccgucacacauuccgugaaccuccuggaagauaagcacaaugggaaacuuuguaagcugagaggaguugcuccccuccaucugggcaaaugcaacauugccggguggauccugggaaauccugagugugaaucucucagcaccgccuccucuuggagcuacauuguggagacauccucuagcgacaacgggaccugcuauccgggcgauuuuaucaauuacgaagaacugcgggagcagcuuuccagcgucucuuccuucgaacgcuuugagauguuccccaagacgagcucuuggccuaaccacgacuccaauaagggagugaccgccgcuuguccccaugccggcgcgaaaucuuuuuauaagaaccugaucuggcucguuaaaaagggcaauagcuacccuaaacuguccaagagcuauauuaacgauaaggggaaagaagugcuuguccuguggggaauccaccaccccuccacaaccgccgaccaacagucucucuaccagaaugcugaugccuacguguucgugggcacaagcagauauuccaagaaauuuaagccugagauugcuacccggccgaaaguccgcgaccaggaggggagaaugaacuacuauuggacgcugguugaacccggagauaagaucacauucgaggccaccggcaaccugguggugccucgguacgcguuugccauggaacgcaaugcugggagcggaauuaucauuucugacacacccguccaugauugcaacaccaccugucaaacaccuaaaggcgccaucaauacgucccuccccuuccagaacauccacccgauuaccaucggcaagugcccuaaguaugugaaaagcacaaagcugagacuugcuaccgggcugcggaauguucccucuauucagagccgcggacucuuuggcgccaucgccggguucauugagggaggcuggacagggaugguggacggaugguacggcuaucaucaccagaacgaacaaggcuccggguacgcugcggaccugaaaucuacccagaaugccaucgauaagaucacgaacaaagucaauagcgugauugagaagaugaacacacaguuuaccgcuguuggaaaggaguucaaucaccuugagaaaagaaucgagaaccugaauaagaaaguggacgauggcuuccucgacauuuggaccuacaacgccgaacugcugguccuccuggagaaugaacggacacuugauuaucaugacuccaacgugaagaaccuguacgagaaaguccgcaaucagcucaagaacaaugccaaggagaucgggaacggauguuuugaguucuaucacaaaugcgauaauaccuguauggaaagcgugaagaacggcacauacgacuauccuaaauacucugaagaggcuaagcugaauagagaagagauugaugggguuaaacuugaguccacgcggaucuaucaaauccuggccauuuacagcaccguggcgucuucccucguccuggugguuagccugggcgcuaucuccuuuuggaugugcucuaacggaagccuccagugccgcauuuguaucuga

SEQ ID NO: 204182 - RNA, 1701 nt, Artificial Sequence; identical to SEQ ID NO: 204152
  derived and/or modified CDS sequence (opt5) from hemagglutinin__InfluenzaA__AHZ36169

SEQ ID NO: 204183 - RNA, 1701 nt, Artificial Sequence
  derived and/or modified CDS sequence (opt5) from hemagglutinin__InfluenzaA__AHZ36180
augaaggccauccuggugguccuccuguacaccuucgcuauugccaacgcggacacacuuugcaucggcuaucacgcuaauaacagcacggauaccguugacacagugcuggagaaaaaugugaccgucacacauuccgugaaccuccuggaagauaagcacaaugggaaacuuuguaagcugagaggaguugcuccccuccaucugggcaaaugcaacauugccggguggauccugggaaauccugagugugaaucucucagcaccgccuccucuuggagcuacauuguggagacauccucuagcgacaacgggaccugcuauccgggcgauuuuaucaauuacgaagaacugcgggagcagcuuuccagcgucucuuccuucgaacgcuuugagauguuccccaagacgagcucuuggccuaaccacgacuccaauaagggagugaccgccgcuuguccccaugccggcgcgaaaucuuuuuauaagaaccugaucuggcucguuaaaaagggcaauagcuacccuaaacuguccaagagcuauauuaacgauaaggggaaagaagugcuuguccuguggggaauccaccaccccuccacaaccgccgaccaacagucucucuaccagaaugcugaugccuacguguucgugggcacaagcagauauuccaagaaauuuaagccugagauugcuauccggccgaaaguccgcgaccaggaggggagaaugaacuacuauuggacccugguugaacccggagauaagauuacguucgaggccacaggcaaccugguggugccucgguacgcguuugccauggaacgcaaugcugggagcggaaucauuaucucugacacccccauccaugauugcaacacaaccugucaaaccccuaaaggcgccauuaauacaucccuccccuuccagaacauccacccgauuacgaucggcaagugcccuaaguaugucaaaagcaccaagcugagacuugcuacagggcugcggaaugugcccucuauucagagccgcggacucuuuggcgccaucgccggguucaucgagggaggcuggaccgggaugguugacggaugguacggcuaucaucaccagaacgaacaaggcuccggguacgcugcggaccugaaaucuacacagaaugccauugauaagaucaccaacaaagugaauagcgucauugagaagaugaacacgcaguuuacagcugugggaaaggaguucaaucaccuugagaaaagaaucgagaaccugaauaagaaaguugacgauggcuuccucgacauuuggaccuacaacgccgaacugcuggugcuccuggagaaugaacggacccuugauuaucaugacuccaacgucaagaaccuguacgagaaagugcgcaaucagcucaagaacaaugccaaggagaucgggaacggauguuuugaguucuaucacaaaugcgauaauacauguauggaaagcgucaagaacggcaccuacgacuauccuaaauacucugaagaggcuaagcugaauagagaagagaucgauggggugaaacuugaguccacacggauuuaucaaauccuggccauuuacagcacgguugcgucuucccucgugcuggucgugagccugggcgcuaucuccuuuuggaugugcucuaacggaagccuccagugccgcauuuguaucuga

SEQ ID NO: 204184 - RNA, 1701 nt, Artificial Sequence; identical to SEQ ID NO: 204157
  derived and/or modified CDS sequence (opt5) from hemagglutinin__InfluenzaA__AHZ36191

SEQ ID NO: 204185 - RNA, 1701 nt, Artificial Sequence; identical to SEQ ID NO: 198927
  derived and/or modified CDS sequence (opt5) from hemagglutinin__InfluenzaA__AHZ36203

SEQ ID NO: 204186 - RNA, 1701 nt, Artificial Sequence; identical to SEQ ID NO: 204152
  derived and/or modified CDS sequence (opt5) from hemagglutinin__InfluenzaA__AHZ36215

SEQ ID NO: 204187 - RNA, 1701 nt, Artificial Sequence; identical to SEQ ID NO: 198927
  derived and/or modified CDS sequence (opt5) from hemagglutinin__InfluenzaA__AHZ36226

SEQ ID NO: 204188 - RNA, 1701 nt, Artificial Sequence; identical to SEQ ID NO: 204152
  derived and/or modified CDS sequence (opt5) from hemagglutinin__InfluenzaA__AHZ36238

SEQ ID NO: 204189 - RNA, 1701 nt, Artificial Sequence; identical to SEQ ID NO: 204152
  derived and/or modified CDS sequence (opt5) from hemagglutinin__InfluenzaA__AHZ36249

SEQ ID NO: 204190 - RNA, 1701 nt, Artificial Sequence
  derived and/or modified CDS sequence (opt5) from hemagglutinin__InfluenzaA__AHZ36260
augaaggccauccuggugguccuccuguacaccuucgcuauugccaacgcggacacacuuugcaucggcuaucacgcuaauaacagcacggauaccguugacacagugcuggagaaaaaugugaccgucacacauuccgugaaccuccuggaagauaagcacaaugggaaacuuuguaagcugagaggaguugcuccccuccaucugggcaaaugcaacauugccggguggauccugggaaauccugagugugaaucucucagcaccgccuccucuuggagcuacauuguggagacauuuuccucugacaacgggaccugcuauccgggcgauuucaucaauuacgaagaacugcgggagcagcuuagcuccgucagcucuuuugaacgcuucgagauguuucccaagacguccagcuggccuaaccacgacucuaauaagggagugaccgccgcuuguccccaugccggcgcgaaauccuucuauaagaaccugaucuggcucguuaaaaagggcaauagcuacccuaaacugucuaaguccuauauuaacgauaaggggaaagaagugcuuguccuguggggaauccaccaccccagcacaaccgccgaccaacagucccucuaccagaaugcugaugccuacguguuugugggcacaucuagauauagcaagaaauucaagccugagauugcuauccggccgaaaguccgcgaccaggaggggagaaugaacuacuauuggacccugguugaacccggagauaagauuacguuugaggccacaggcaaccugguggugccucgguacgcguucgccauggaacgcaaugcuggguccggaaucauuaucagcgacacccccguccaugauugcaacacaaccugucaaaccccuaaaggcgccaucaauacaucucuccccuuucagaacauucacccgaucacgauuggcaagugcccuaaguaugugaaauccaccaagcugagacuugcuacagggcugcggaauguucccagcauccagucucgcggacucuucggcgccauugccggguuuaucgagggaggcuggaccgggaugguggacggaugguacggcuaucaucaccagaacgaacaaggcagcggguacgcugcggaccugaaauccacacagaaugccaucgauaagauuaccaacaaagucaauucugugaucgagaagaugaacacgcaguucacagcuguuggaaaggaguucaaucaccuugagaaaagaauugagaaccugaauaagaaaguggacgauggcuuucucgacaucuggaccuacaacgccgaacugcugguccuccuggagaaugaacggacccuugauuaucaugacagcaacgugaagaaccuguacgagaaaguccgcaaucagcucaagaacaaugccaaggagauugggaacggauguuucgaauuuuaucacaaaugcgauaauacauguauggaguccgugaagaacggcaccuacgacuauccuaaauacagcgaagaggcuaagcugaauagagaagagaucgaugggguuaaacuugagucuacacggaucuaucaaauucuggccaucuacuccacgguggcgagcucucucguccuggugguuucccugggcgcuauuagcuucuggaugugcuccaacggaucucuccagugccgcaucuguauuuga

SEQ ID NO: 204191 - RNA, 1701 nt, Artificial Sequence; identical to SEQ ID NO: 204137
  derived and/or modified CDS sequence (opt5) from hemagglutinin__InfluenzaA__AHZ36271

SEQ ID NO: 204192 - RNA, 1701 nt, Artificial Sequence; identical to SEQ ID NO: 204152
  derived and/or modified CDS sequence (opt5) from hemagglutinin__InfluenzaA__AHZ36283

SEQ ID NO: 204193 - RNA, 1701 nt, Artificial Sequence; identical to SEQ ID NO: 204137
  derived and/or modified CDS sequence (opt5) from hemagglutinin__InfluenzaA__AHZ36294

SEQ ID NO: 204194 - RNA, 1701 nt, Artificial Sequence
  derived and/or modified CDS sequence (opt5) from hemagglutinin__InfluenzaA__AHZ36306
augaaggccauccuggugguccuccuguacaccuucgcuauugccaacgcggacacacuuugcaucggcuaucacgcuaauaacagcacggauaccguugacacagugcuggagaagaaugugaccgucacacauuccgugaaccuccuggaagauaagcacaaugggaaacuuuguaagcugagaggaguugcuccccuccaucugggcaaaugcaacauugccggguggauccugggaaauccugagugugaaucucucagcaccgccuccucuuggagcuacauuguggagacauccucuagcgacaacgggaccugcuauccgggcgauuuuaucaauuacgaagaacugcgggagcagcuuuccagcgucucuuccuucgaacgcuuugagauguuccccaagacgagcucuuggccuaaccacgacuccaauaagggagugaccgccgcuuguccccaugccggcgcgaaaucuuuuuauaagaaccugaucuggcucguuaaaaagggcaauagcuacccuaaacuguccaagagcuauauuaacgauaaggggaaagaagugcuuguccuguggggaauccaccaccccuccacaaccgccgaccaacagucucucuaccagaaugcugaugccuacguguucgugggcacaagcagauauuccaagaaauuuaagccugagauugcuauccggccgaaaguccgcgaccaggaggggagaaugaacuacuauuggacccugguugaacccggagauaagauuacguucgaggccacaggcaaccugguggugccucgguacgcguuugccauggaacgcaaugcugggagcggaaucauuaucucugacacccccguccaugauugcaacacaaccugucaaaccccuaaaggcgccaucaauacaucccuccccuuccagaacauucacccgaucacgauuggcaagugcccuaaguaugugaaaagcaagaaacugagacuugcuaccgggcugcggaauguucccucuauccagagccgcggacucuuuggcgccauugccggguucaucgagggaggcuggacagggaugguggacggaugguacggcuaucaucaccagaacgaacaaggcuccggguacgcugcggaccugaagucuacccagaaugccaucgauaaaauuacaaacaaggucaauagcgugaucgagaagaugaacacccaguuuacggcuguuggaaaagaguucaaucaccuugaaaagagaauugagaaccugaauaaaaagguggacgauggcuuccucgacaucuggacauacaacgccgaacugcugguccuccuggagaaugaacggacccuugauuaucaugacuccaacgugaaaaaccuguacgagaagguccgcaaucagcucaagaacaaugccaaagagauugggaacggauguuuugaguucuaucacaagugcgauaauaccuguauggagagcgugaaaaacggcacauacgacuauccuaaguacucugaagaggcuaaacugaauagagaagagaucgaugggguuaaacuugaguccacccggaucuaucaaauucuggccaucuacagcacaguggcgucuucccucguccuggugguuagccugggcgcuauuuccuuuuggaugugcucuaacggaagccuccagugccgcaucuguauuuga

SEQ ID NO: 204195 - RNA, 1701 nt, Artificial Sequence; identical to SEQ ID NO: 204152
  derived and/or modified CDS sequence (opt5) from hemagglutinin__InfluenzaA__AHZ36317

SEQ ID NO: 204196 - RNA, 1701 nt, Artificial Sequence; identical to SEQ ID NO: 204152
  derived and/or modified CDS sequence (opt5) from hemagglutinin__InfluenzaA__AHZ36328

SEQ ID NO: 204197 - RNA, 1701 nt, Artificial Sequence
  derived and/or modified CDS sequence (opt5) from hemagglutinin__InfluenzaA__AHZ36339
augaaggccauccuggugguccuccuguacaccuucgcuauugccaacgcggacacacuuugcaucggcuaucacgcuaauaacagcacggauaccguugacacagugcuggagaagaaugugaccgucacacauuccgugaaccuccuggaagauaagcacaaugggaaacuuuguaagcugagaggaguugcuccccuccaucugggcaaaugcaacauugccggguggauccugggaaauccugagugugaaucucucagcaccgccuccucuuggagcuacauuguggagacauccucuagcgacaacgggaccugcuauccgggcgauuuuaucaauuacgaagaacugcgggagcagcuuuccagcgucucuuccuucgaacgcuuugagauguuccccaagacgagcucuuggccuaaccacgacuccaauaagggagugaccgccgcuuguccccaugccggcgcgaaaucuuuuuauaagaaccugaucuggcucguuaaaaagggcaauagcuacccuaaacuguccaagagcuauauuaacgauaaggggaaagaagugcuuguccuguggggaauccaccaccccuccacaaccgccgaccaacagucucucuaccagaaugcugaugccuacguguucgugggcacaagcagauauuccaagaaauuuaagccugagauugcuauccggccgaaaguccgcgaccaggaggggagaaugaacuacuauuggacccugguugaacccggagauaagauuacguucgaggccacaggcaaccugguggugccucgguacgcguuugccauggaacgcaaugcugggagcggaaucauuaucucugacacccccguccaugauugcaacacaaccugucaaaccccuaaaggcgccgugaauacaucccuccccuuccagaacauccacccgauuacgaucggcaagugcccuaaguauguuaaaagcaccaagcugagacuugcuacagggcugcggaaugugcccucuauucagagccgcggacucuuuggcgccaucgccggguucauugagggaggcuggaccgggauggucgacggaugguacggcuaucaucaccagaacgaacaaggcuccggguacgcugcggaccugaaaucuacacagaaugccaucgauaagaucaccaacaaagugaauagcguuauugagaagaugaacacgcaguuuacagcugugggaaaggaguucaaucaccuugaaagacggaucgagaaccugaauaaaaaggucgacgauggcuuccucgacauuuggaccuacaacgccgaacugcuggugcuccuggagaaugaacgcacccuugauuaucaugacuccaacgucaaaaaccuguacgagaaggugagaaaucagcucaaaaacaaugccaaggagaucgggaacggauguuuugaguucuaucacaagugcgauaauacauguauggagagcguuaaaaacggcaccuacgacuauccuaaguacucugaagaggcuaaacugaaucgggaagagauugauggggugaaacuugaguccacacgcaucuaucaaauccuggccauuuacagcacggucgcgucuucccucgugcugguugugagccugggcgcuaucuccuuuuggaugugcucuaacggaagccuccagugcagaauuuguaucuga

SEQ ID NO: 204198 - RNA, 1701 nt, Artificial Sequence
  derived and/or modified CDS sequence (opt5) from hemagglutinin__InfluenzaA__AHZ36362
augaaggccauccuggugguccuccuguacaccuucgcuauugccaacgcggacacacuuugcaucggcuaucacgcuaauaacagcacggauaccguugacacagugcuggagaagaaugugaccgucacacauuccauuaaccuccuggaagauaagcacaaugggaaacuuuguaagcugagaggaguggcuccccuccaucugggcaaaugcaacaucgccggguggauucugggaaauccugagugugaaucucucagcaccgccuccucuuggagcuacaucguugagacauccucuagcgacaacggaaccugcuauccgggggauuuuaucaauuacgaagaacugcgggagcagcuuuccagcgugucuuccuucgaacgcuuugagauguuccccaagacgagcucuuggccuaaccacgacuccaauaagggagucaccgccgcuuguccccaugccggcgcgaaaucuuuuuauaagaaccugauuuggcucgugaaaaagggcaauagcuacccuaaacuguccaagagcuauaucaacgauaaggggaaagaaguucuugugcuguggggcauucaccaccccuccacaaccgccgaccaacagucucucuaccagaaugcugaugccuacgucuucgugggcacaagcagauauuccaagaaauuuaagccugagaucgcuauucggccgaaagugcgcgaccaggaggggagaaugaacuacuauuggacccuggucgaacccggagauaagaucacguucgaggccacaggcaaccugguugugccucgguacgcguuugccauggaacgcaaugcugggagcggaauuaucaucucugacacccccgugcaugauugcaacacaaccugucaaaccccuaaaggcgccgucaauacaucccuccccuuccagaacauucacccgaucacgauuggcaagugcccuaaguaugugaaaagcaccaagcugagacuugcuacagggcugcggaauguucccucuauccagagccgcggacucuuuggcgccauugccggguucaucgagggaggcuggaccgggaugguggacggaugguacggcuaucaucaccagaacgaacaaggcuccggguacgcugcggaccugaaaucuacacagaaugccaucgauaagauuaccaacaaagucaauagcgugaucgagaagaugaacacgcaguuuacagcuguuggaaaggaguucaaucaccuugaaagacggauugagaaccugaauaaaaagguggacgauggcuuccucgacaucuggaccuacaacgccgaacugcugguccuccuggagaaugaacgcacccuugauuaucaugacuccaacgugaaaaaccuguacgagaaggucagaaaucagcucaaaaacaaugccaaggagauugggaacggauguuuugaguucuaucacaagugcgauaauacauguauggagagcgugaaaaacggcaccuacgacuauccuaaguacucugaagaggcuaaacugaaucgggaagagaucgaugggguuaaacuugaguccacacgcaucuaucaaauucuggccaucuacagcacgguggcgucuucccucguccuggugguuagccugggcgcuauuuccuuuuggaugugcucuaacggaagccuccagugcagaaucuguauuuga

SEQ ID NO: 204199 - RNA, 1701 nt, Artificial Sequence
  derived and/or modified CDS sequence (opt5) from hemagglutinin__InfluenzaA__AHZ36385
augaagaccaucauugcccugagcuacauccucugccugauuuucgcucaggagauccccggcaacgacaauuccacagccacgcuuugucuggggcaccaugcggugccuaacggaaccauugucaaaacaaucaccaaugaucaaaucgaaguuacaaacgcuaccgagcucgugcagucuagcuccacaggcgaaauuugcaauucuccgcaccagauccuggacggggagaacuguacccuuauugaugcccugcucggagacccccagugcgaugacuuucaaaauaagaaaugggaucuguucguggaaagaagcaaggcccauuccaacuguuauccuuacgacguccccgauuaugcuucucugcggagccucguggccuccagcggcacgcuggaguuuaauaacgagucuuucaauuggaccgggguuacacagaacggaaccuccagcgcuugcauccgcagaucuaauaacuccuuuuucagccggcuuaauuggcugacacaccucaacuuuaaauacccugcccugaacgugaccaugcccaauaacgaacaguucgacaaacuuuauauuuggggcguccaucacccuggcacggauaaggaccagaucuuucuguacgcgcaagccucugggcgcauuacaguguccaccaagagaagccagcaggcuguuaucccgaauaucggaucccggccccgcgugagaaacauuccuucucgggucagcaucuauuggacaauugugaagcccggcgauauccuccugauuaauuccaccgggaaccugaucgccccucgcggauacuucaaaaucagaagcggcaagucuuccauuaugcggagcgacgcucccaucgggaaauguaauucugccugcauuaccccgaacggaagcaucccuaaugacaagcccuuucagaacgugaaucgcauuacauacggcgcguguccuagauaugucaagcaaaacacgcucaaacuggccaccggcaugcggaauguucccgagaagcagacacgcgggaucuucggagcuaucgccggcuuuauugaaaacgggugggagggaaugguggauggcugguacggguucagacaccaaaauuccgagggacggggccaggcugccgaccuuaaaucuacccaggccgcuaucgaucagauuaacggcaagcugaacagacucaucgggaaaacaaaugaaaaguuccaucagauugagaaagaauuuagcgagguggaaggacgcauccaagaccuggagaaguaugucgaggauaccaagauugaccuuugguccuacaacgcggaacugcucguggcccuggagaaucagcacacgaucgaucugacagacagcgaaaugaacaaacucuucgagaagaccaaaaagcagcugcgggaaaaugcugaggauaugggcaacgggugcuuuaaaaucuaucauaagugugacaaugccugcauuggaucuaucagaaacggcaccuacgaucacgacguuuaucgcgacgaggcccuuaauaaccgguucaagauuaaagggguggaacugaaguccggcuacaaagauuggauccucuggauuagcuuugcuaucucuugcuuccugcuuugugucgcccugcucggauuuaucaugugggcgugccagaagggcaauauuagauguaacaucugcauuuga

SEQ ID NO: 204200 - RNA, 1701 nt, Artificial Sequence
  derived and/or modified CDS sequence (opt5) from hemagglutinin__InfluenzaA__AHZ36397
augaagaccaucauugcccugagcuacauccucugccugauuuucgcucaggagauccccggcaacgacaauuccacagccacgcuuugucuggggcaccaugcggugccuaacggaaccauugucaaaacaaucaccaaugaucaaaucgaaguuacaaacgcuaccgagcucgugcagucuagcuccacaggcgaaauuugcaauucuccgcaccagauccuggacggggagaacuguacccuuauugaugcccugcucggagacccccagugcgaugacuuucaaaauaagaaaugggaucuguucguggaaagaagcaaggcccauuccaacuguuauccuuacgacguccccgauuaugcuucucugcggagccucguggccuccagcggcacgcuggaguuuaauaacgagucuuucaauuggaccgggguuacacagaacggaaccuccagcgcuugcauccgcagaucuaauaacuccuuuuucagccggcuuaauuggcugacacaccucaacuuuaaauacccugcccugaacgugaccaugcccaauaacgaacaguucgacaaacuuuauauuuggggcguccaucacccuggcacggauaaggaccagaucuuucuguacgcgcaagccucugggcgcauuacaguguccaccaagagaagccagcaggcuguuaucccgaauaucggaucccggccccgcgugagaaacauuccuucucgggucagcaucuauuggacaauugugaagcccggcgauauccuccugauuaauuccaccgggaaccugaucgccccucgcggauacuucaaaaucagaagcggcaagucuuccauuaugcggagcgacgcucccaucgggaaauguaauucugccugcauuaccccgaacggaagcaucccuaaugacaagcccuuucagaacgugaaucgcauuacauacggcgcguguccuagauaugucaagcaaaacacgcucaaacuggccaccggcaugcggaauguucccgagaagcagacacgcgggaucuucggagcuaucgccggcuuuauugaaaacgggugggagggaaugguggauggcugguacggguucagacaccaaaauuccgagggacggggccaggcugccgaccuuaaaucuacccaggccgcuaucgaucagauuaacggcaagcugaacagacucaucgggaaaacaaaugaaaaguuccaucagauugagaaagaauuuagcgagguggaaggacgcauccaagaccuggagaaguaugucgaggauaccaagauugaccuuugguccuacaacgcggaacugcucguggcccuggagaaucagcacacgaucgaucugacagacagcgaaaugaacaaacucuucgagaagaccaaaaagcagcugcgggaaaaugcugaggauaugggcaacgggugcuuuaaaaucuaucauaagugugacaaugccugcauuggaucuaucagaaacggcaccuacgaucacaauguuuaucgcgacgaggcccuuaacaaucgguucaagauuaaagggguggaacugaaguccggcuacaaagacuggauccucuggauuagcuuugcuaucucuugcuuccugcuuugugucgcccugcucggauuuaucaugugggcgugccagaagggcaacauuagauguaauaucugcauuuga

SEQ ID NO: 204201 - RNA, 1701 nt, Artificial Sequence; identical to SEQ ID NO: 204137
  derived and/or modified CDS sequence (opt5) from hemagglutinin__InfluenzaA__AHZ36409

SEQ ID NO: 204202 - RNA, 1701 nt, Artificial Sequence; identical to SEQ ID NO: 204138
  derived and/or modified CDS sequence (opt5) from hemagglutinin__InfluenzaA__AHZ36433

SEQ ID NO: 204203 - RNA, 1701 nt, Artificial Sequence
  derived and/or modified CDS sequence (opt5) from hemagglutinin__InfluenzaA__AHZ36445
augaagaccaucauugcccugagcuacauccucugccugauuuucgcucaggagauccccggcaacgacaauuccacagccacgcuuugucuggggcaccaugcggugccuaacggaaccauugucaaaacaaucaccaaugaucaaaucgaaguuacaaacgcuaccgagcucgugcagucuagcuccacaggcgaaauuugcaauucuccgcaccagauccuggacggggagaacuguacccuuauugaugcccugcucggagacccccagugcgaugacuuucaaaauaagaaaugggaucuguucguggaaagaagcaaggcccauuccaacuguuauccuuacgacguccccgauuaugcuucucugcggagccucguggccuccagcggcacgcuggaguuuaauaacgagucuuucaauuggaccgggguuacacagaacggaaccuccagcgcuugcauccgcagaucuaauaacuccuuuuucagccggcuuaauuggcugacacaccucaacuuuaaauacccugcccugaacgugaccaugcccaauaacgaacaguucgacaaacuuuauauuuggggcguccaucacccuggcacggauaaggaccagaucuuucuguacgcgcaagccucugggcgcauuacaguguccaccaagagaagccagcaggcuguuaucccgaauaucggaucccggccccgcgugagaaacauuccuucucgggucagcaucuauuggacaauugugaagcccggcgauauccuccugauuaauuccaccgggaaccugaucgccccucgcggauacuucaaaaucagaagcggcaagucuuccauuaugcggagcgacgcucccaucgggaaauguaauucugccugcauuaccccgaacggaagcaucccuaaugacaagcccuuucagaacgugaaucgcauuacauacggcgcguguccuagauaugucaagcaaaacacgcucaaacuggccaccggcaugcggaauguucccgagaagcagacacgcgggaucuucggagcuaucgccggcuuuauugaaaacgggugggagggaaugguggauggcugguacggguucagacaccaaaauuccgagggacggggccaggcugccgaccuuaaaucuacccaggccgcuaucgaucagauuaacggcaagcugaacagacucaucgggaaaacaaaugaaaaguuccaucagauugagaaagaauuuagcgagguggaaggacgcauccaagaccuggagaaguaugucgaggauaccaagauugaccuuugguccuacaacgcggaacugcucguggcccuggagaaucagcacacgaucgaucugacagacagcgaaaugaacaaacucuucgagaagaccaaaaagcagcugcgggaaaaugcugaggauaugggcaacgggugcuuuaaaaucuaucauaagugugacgaugccugcauuggaucuaucagaaauggcaccuacgaccacgacguuuaucgcgaugaggcccuuaacaaucgguuccagauuaaggggguggaacugaaauccggcuacaaggacuggauccucuggauuagcuuugcuaucucuugcuuccugcuuugugucgcccugcucggauuuaucaugugggcgugccaaaaaggcaacauuagauguaauaucugcauuuga

SEQ ID NO: 204204 - RNA, 1701 nt, Artificial Sequence; identical to SEQ ID NO: 204137
  derived and/or modified CDS sequence (opt5) from hemagglutinin__InfluenzaA__AHZ36457

SEQ ID NO: 204205 - RNA, 1701 nt, Artificial Sequence; identical to SEQ ID NO: 204137
  derived and/or modified CDS sequence (opt5) from hemagglutinin__InfluenzaA__AHZ36469

SEQ ID NO: 204206 - RNA, 1701 nt, Artificial Sequence
  derived and/or modified CDS sequence (opt5) from hemagglutinin__InfluenzaA__AHZ36481
augaagaccaucauugcccugagcuacauccucugccugauuuucgcucaggagauccccggcaacgacaauuccacagccacgcuuugucuggggcaccaugcggugccuaacggaaccauugucaaaacaaucaccaaugaucaaaucgaaguuacaaacgcuaccgagcucgugcagucuagcuccacaggcgaaauuugcaauucuccgcaccagauccuggacggggagaacuguacccuuauugaugcccugcucggagacccccagugcgaugacuuucaaaauaagaaaugggaucuguucguggaaagaagcaaggcccauuccaacuguuauccuuacgacguccccgauuaugcuucucugcggagccucguggccuccagcggcacgcuggaguuuaauaacgagucuuucaauuggaccgggguuacacagaacggaaccuccagcgcuugcauccgcagaucuaauaacuccuuuuucagccggcuuaauuggcugacacaccucaacuuuaaauacccugcccugaacgugaccaugcccaauaacgaacaguucgacaaacuuuauauuuggggcguccaucacccuggcacggauaaggaccagaucuuucuguacgcgcaagccucugggcgcauuacaguguccaccaagagaagccagcaggcuguuaucccgaauaucggaucccggccccgcgugagaaacauuccuucucgggucagcaucuauuggacaauugugaagcccggcgauauccuccugauuaauuccaccgggaaccugaucgccccucgcggauacuucaaaaucagaaauggcaagagcucuauuaugcgguccgacgcucccaucgggaaauguaacagcgccugcauuaccccgaauggaucuaucccuaacgacaagcccuuucagaaugugaaccgcauuacauacggcgcguguccuagauaugucaagcaaaauacgcucaaacuggccaccggcaugcggaacguucccgagaagcagacacgcgggaucuucggagcuaucgccggcuuuauugaaaaugggugggagggaaugguggauggcugguacggguucagacaccagaacagcgagggacggggccaagcugccgaccuuaaauccacccaggccgcuaucgaucagauuaacggcaagcugaauagacucaucgggaaaacaaacgaaaaguuccaucagauugagaaagaauuuucugagguggaaggacgcauccaagaccuggagaaguaugucgaggauaccaagauugaccuuuggagcuacaaugcggaacugcucguggcccuggagaaccagcacacgaucgaucugacagacuccgaaaugaauaaacucuucgagaagaccaaaaagcagcugcgggaaaacgcugaggauaugggcaaugggugcuuuaaaaucuaucauaagugugacaacgccugcauuggaagcaucagaaauggcaccuacgaucacgacguuuaucgcgacgaggcccuuaacaaucgguuccagauuaaggggguggaacugaaaucuggcuacaaggauuggauccucuggauuuccuuugcuaucagcugcuuccugcuuugugucgcccugcucggauuuaucaugugggcgugccaaaaaggcaacauuagauguaauaucugcauuuga

SEQ ID NO: 204207 - RNA, 1701 nt, Artificial Sequence; identical to SEQ ID NO: 204138
  derived and/or modified CDS sequence (opt5) from hemagglutinin__InfluenzaA__AHZ36493

SEQ ID NO: 204208 - RNA, 1701 nt, Artificial Sequence; identical to SEQ ID NO: 204138
  derived and/or modified CDS sequence (opt5) from hemagglutinin__InfluenzaA__AHZ36505

SEQ ID NO: 204209 - RNA, 1701 nt, Artificial Sequence; identical to SEQ ID NO: 204138
  derived and/or modified CDS sequence (opt5) from hemagglutinin__InfluenzaA__AHZ36517

SEQ ID NO: 204210 - RNA, 1701 nt, Artificial Sequence
  derived and/or modified CDS sequence (opt5) from hemagglutinin__InfluenzaA__AHZ36529
augaagaccaucauugcccugagcuacauccucugccugauuuucgcucaggagauccccggcaacgacaauuccacagccacgcuuugucuggggcaccaugcggugccuaacggaaccauugucaaaacaaucaccaaugaucaaaucgaaguuacaaacgcuaccgagcucgugcagucuagcuccacaggcgaaauuugcaauucuccgcaccagauccuggacggggagaacuguacccuuauugaugcccugcucggagacccccagugcgaugacuuucaaaauaagaaaugggaucuguucguggaaagaagcaaggcccauuccaacuguuauccuuacgacguccccgauuaugcuucucugcggagccucguggccuccagcggcacgcuggaguuuaauaacgagucuuucaauuggaccgggguuacacagaacggaaccuccagcgcuugcauccgcagaucuaauaacuccuuuuucagccggcuuaauuggcugacacaccucaacuuuaaauacccugcccugaacgugaccaugcccaauaacgaacaguucgacaaacuuuauauuuggggcguccaucacccuggcacggauaaggaccagaucuuucuguacgcgcaagccucugggcgcauuacaguguccaccaagagaagccagcaggcuguuaucccgaauaucggaucccggccccgcgugagaaacauuccuucucgggucagcaucuauuggacaauugugaagcccggcgauauccuccugauuaauuccaccgggaaccugaucgccccucgcggauacuucaaaaucagaagcggcaagucuuccauuaugcggagcgacgcucccaucgggaaauguaauucuagcugcauuaccccgaacggauccaucccuaaugacaagcccuuucagaacgugaaucgcauuacauacggcgccuguccuagauaugucaagcaaaacacgcucaaacuggcgaccggcaugcggaauguucccgagaagcagacacgcgggaucuucggagccaucgcuggcuuuauugaaaacgggugggagggaaugguggauggcugguacggguucagacaccaaaauucugagggacggggccaggccgcugaccuuaaaagcacccaggccgccaucgaucagauuaacggcaagcugaacagacucaucgggaaaacaaaugaaaaguuccaucagauugagaaagaauuuuccgagguggaaggacgcauccaagaccuggagaaguaugucgaggauaccaagauugaccuuuggagcuacaacgcugaacugcucguggcgcuggagaaucagcacacgaucgaucugacagacucugaaaugaacaaacucuucgagaagaccaaaaagcagcugcgggaaaaugccgaggauaugggcaacgggugcuuuaaaaucuaucauaagugugacaaugcuugcauuggauccaucagaaacggcaccuacgaucacgacguuuaucgcgacgaggcccuuaauaaccgguuccagauuaaggggguggaacugaaaagcggcuacaaggauuggauccucuggauuucuuuugccaucuccugcuuccugcuuugugucgcucugcucggauuuaucaugugggccugccaaaaaggcaauauuagauguaacaucugcauuuga

SEQ ID NO: 204211 - RNA, 1701 nt, Artificial Sequence; identical to SEQ ID NO: 204137
  derived and/or modified CDS sequence (opt5) from hemagglutinin__InfluenzaA__AHZ36541

SEQ ID NO: 204212 - RNA, 1701 nt, Artificial Sequence
  derived and/or modified CDS sequence (opt5) from hemagglutinin__InfluenzaA__AHZ36553
augaagaccaucauugcccugagcuacauccucugccugauuuucgcucaggagauccccggcaacgacaauuccacagccacgcuuugucuggggcaccaugcggugccuaacggaaccauugucaaaacaaucaccaaugaucaaaucgaaguuacaaacgcuaccgagcucgugcagucuagcuccacaggcgaaauuugcaauucuccgcaccagauccuggacggggagaacuguacccuuauugaugcccugcucggagacccccagugcgaugacuuucaaaauaaggaaugggaucuguucguggagagaagcaaagcccauuccaacuguuauccuuacgacguccccgauuaugcuucucugcggagccucguggccuccagcggcacgcuggaguuuaagaaugaaucuuucaacuggaccgggguuacacagaauggaaccuccagcgcuugcauccgcagaucuaacaauuccuuuuucagccggcuuaacuggcugacacaccucaauuuuaaauacccugcccugaacgugaccaugcccaacaaugagcaguucgacaaacuuuauauuuggggcguccaucacccuggcacggauaaggaccagaucuuucuguacgcgcaagccucugggcgcauuacaguguccaccaagagaagccagcaggcuguuaucccgaacaucggaucccggccccgcgugagaaauauuccuucucgggucagcaucuauuggacaauugugaagcccggcgauauccuccugauuaacuccaccgggaaucugaucgccccucgcggauacuucaaaaucagaagcggcaagucuuccauuaugcggagcgacgcucccaucgggaaauguaacucugccugcauuaccccgaauggaagcaucccuaacgacaagcccuuucagaaugugaaccgcauuacauacggcacguguccuagauaugucaagcaaaauacccucaaacuggcgacaggcaugcggaacguucccgaaaagcagacccgcgggaucuucggagccaucgcuggcuuuauugagaaugggugggagggaaugguggauggcugguacggguucagacaccagaacuccgaaggacggggccaagccgcugaccuuaaaucuacacaggccgccaucgaucagauuaauggcaagcugaacagacucaucgggaaaaccaacgagaaguuccaucagauugaaaaagaguuuagcgaaguggagggacgcauccaagaccuggagaaguaugucgaagauacgaagauugaccuuugguccuacaaugcugagcugcucguggcgcuggaaaaccagcacacaaucgaucugaccgacagcgagaugaauaaacucuucgaaaagaccaaaaagcagcugcgggagaacgccgaggauaugggcaaugggugcuuuaaaaucuaucauaagugugacaacgcuugcauuggaucuaucagaaauggcacauacgaucacgacguuuaucgcgacgaagcccuuaacaaucgguuccagauuaaggggguggagcugaaauccggcuacaaggauuggauccucuggauuagcuuugccaucucuugcuuccugcuuugugucgcucugcucggauuuaucaugugggccugccaaaaaggcaacauuagauguaauaucugcauuuga

SEQ ID NO: 204213 - RNA, 1701 nt, Artificial Sequence; identical to SEQ ID NO: 204137
  derived and/or modified CDS sequence (opt5) from hemagglutinin__InfluenzaA__AHZ36565

SEQ ID NO: 204214 - RNA, 1701 nt, Artificial Sequence; identical to SEQ ID NO: 204137
  derived and/or modified CDS sequence (opt5) from hemagglutinin__InfluenzaA__AHZ36577

SEQ ID NO: 204215 - RNA, 1701 nt, Artificial Sequence; identical to SEQ ID NO: 204137
  derived and/or modified CDS sequence (opt5) from hemagglutinin__InfluenzaA__AHZ36589

SEQ ID NO: 204216 - RNA, 1701 nt, Artificial Sequence; identical to SEQ ID NO: 204212
  derived and/or modified CDS sequence (opt5) from hemagglutinin__InfluenzaA__AHZ36601

SEQ ID NO: 204217 - RNA, 1701 nt, Artificial Sequence
  derived and/or modified CDS sequence (opt5) from hemagglutinin__InfluenzaA__AHZ36613
augaagaccaucauugcccugagcuacauccucugccugauuuucgcucaggagauccccggcaacgacaauuccacagccacgcuuugucuggggcaccaugcggugccuaacggaaccauugucaaaacaaucaccaaugaucaaaucgaaguuacaaacgcuaccgagcucgugcagucuagcuccacaggcgaaauuugcaauucuccgcaccagauccuggacggggagaacuguacccuuauugaugcccugcucggagacccccagugcgaugacuuucaaaauaaggaaugggaucuguucguggagagaagcaaagcccauuccaacuguuauccuuacgacguccccgauuaugcuucucugcggagccucguggccuccagcggcacgcuggaguuuaauaacgaaucuuucaauuggaccgggguuacacagaacggaaccuccagcgcuugcauccgcagaucuaauaacuccuuuuucagccggcuuaauuggcugacacaccucaacuuuaaguacccugcccugaacgugaccaugcccaauaacgagcaguucgacaaacuuuauauuuggggcguccaucacccuggcacggauaaggaccagaucuuucuguacgcgcaagccucugggcgcauuacaguguccaccaagagaagccagcaggcuguuaucccgaauaucggaucccggccccgcgugagaaacauuccuucucgggucagcaucuauuggacaauugugaaacccggcgauauccuccugauuaauuccaccgggaaccugaucgccccucgcggauacuucaagaucagaagcggcaaaucuuccauuaugcggagcgacgcucccaucgggaaguguaauucugccugcauuaccccgaacggaagcaucccuaaugacaaacccuuucagaacgugaaucgcauuacauacggcacguguccuagauaugucaagcaaaacacccucaagcuggcgacaggcaugcggaauguucccgaaaaacagacccgcgggaucuucggagccaucgcuggcuuuauugagaacgggugggagggaaugguggauggcugguacggguucagacaccaaaauuccgaaggacggggccaggccgcugaccuuaagucuacacaggccgccaucgaucagauuaacggcaaacugaacagacucaucgggaagaccaaugagaaauuccaucagauugaaaaggaguuuagcgaaguggagggacgcauccaagaccuggagaaauaugucgaagauacgaagauugaccuuugguccuacaacgcugagcugcucguggcgcuggaaaaucagcacacaaucgaucugaccgacagcgagaugaacaaacucuucgaaaagaccaagaaacagcugcgggagaaugccgaggauaugggcaacgggugcuuuaagaucuaucauaaaugugacaaugcuugcauuggaucuaucagaaacggcacauacgaucacgacguuuaucgcgacgaagcccuuaauaaccgguuccagauuaaggggguggagcugaaguccggcuacaaagauuggauccucuggauuagcuuugccaccucuugcuuccugcuuugugucgcucugcucggauuuaucaugugggccugccaaaagggcaauaucagauguaacauuugcaucuga

SEQ ID NO: 204218 - RNA, 1701 nt, Artificial Sequence; identical to SEQ ID NO: 204137
  derived and/or modified CDS sequence (opt5) from hemagglutinin__InfluenzaA__AHZ36625

SEQ ID NO: 204219 - RNA, 1701 nt, Artificial Sequence; identical to SEQ ID NO: 204138
  derived and/or modified CDS sequence (opt5) from hemagglutinin__InfluenzaA__AHZ36637

SEQ ID NO: 204220 - RNA, 1701 nt, Artificial Sequence; identical to SEQ ID NO: 204138
  derived and/or modified CDS sequence (opt5) from hemagglutinin__InfluenzaA__AHZ36649

SEQ ID NO: 204221 - RNA, 1701 nt, Artificial Sequence; identical to SEQ ID NO: 202066
  derived and/or modified CDS sequence (opt5) from hemagglutinin__InfluenzaA__AHZ36661

SEQ ID NO: 204222 - RNA, 1701 nt, Artificial Sequence; identical to SEQ ID NO: 202066
  derived and/or modified CDS sequence (opt5) from hemagglutinin__InfluenzaA__AHZ36673

SEQ ID NO: 204223 - RNA, 1701 nt, Artificial Sequence
  derived and/or modified CDS sequence (opt5) from hemagglutinin__InfluenzaA__AHZ36685
augaagaccaucauugcccugagcuacauccucugccugguguucgcucagaaacuucccggcaacgacaauuccacagccacgcugugucucgggcaccaugcggucccuaacggaaccauuguuaagacaaucaccaaugauagaauugaggugacaaacgcuaccgaacuggugcaaaauucuagcaucggcgagaucugcgacuccccgcaccagauucuugauggggaaaacuguacacugaucgacgcccuccugggagauccccagugcgacggcuuucagaauaaaaagugggaucuguucgucgagcggucuaaagccuauagcaacuguuacccuuaugacgugcccgauuacgcuucccuccgcucucugguugccagcuccgggacccuugaauuuaauaacgagagcuucaauugggcuggagugacgcaaaacggcaccucuuccgccugcauuagaggcagcaauucuuccuuuuucagccggcugaacuggcucacacaucugaauuuuaaguauccugcgcuuaacgucaccaugcccaacaaugagcaguucgacaagcuguacaucuggggagugcaccauccugggacagauaaagaccagauuuuucucuaugcccagucuuccggccgcaucaccguuagcacgaagagaucccaacaggcugugauuccgaacaucgggucucggccccgcaucagaaauauuccuagccggaucuccauuuacuggacaaucgucaaacccggagauauucugcugaucaacagcaccggcaaucucaucgccccucgcggguacuucaagauuagaucuggaaaauccagcaucaugcggucugacgcucccauuggcaaguguaagagcgaaugcaucacaccgaacggcuccauuccuaaugacaaacccuuucagaacgugaaucgcaucaccuauggggccuguccuagauacgugaagcagucuacccugaaacuugcgacaggaaugcggaacguccccgagaagcaaacgcgcggcaucuucggggccauugcuggauuuaucgaaaauggcugggaggggaugguugauggaugguauggcuucagacaccagaacagcgagggccgggggcaggccgcugaccugaaauccacccaagccgccauugaucagaucaauggaaagcucaacagacugauuggcaaaacaaaugaaaaguuccaccagaucgagaaggaauuuagcgagguggaagggcgcauucaggaccuugagaaauacguggaggauaccaagaucgaccuguggucuuauaacgcugaacuccuggucgcgcuggagaaccaacauacaaucgaucucaccgacuccgaaaugaauaaacuguucgagaagacgaaaaagcagcuucgggaaaacgccgaggauaugggaaauggcugcuuuaagauuuaccacaaaugugacaacgcuugcaucgggagcauuagaaauggcacauaugaucaugacguguaccgcgacgaggcccugaacaaucgguuccagaucaagagaguugaacucaaaucuggauacaaggauuggauucuguggaucuccuuugccaucagcugcuuccuucuguguguggcucuccugggcuuuauuaugugggccugccagaaagggaacauccgcuguaauauuugcaucuga

SEQ ID NO: 204224 - RNA, 1683 nt, Artificial Sequence; identical to SEQ ID NO: 202060
  derived and/or modified CDS sequence (opt5) from hemagglutinin__InfluenzaA__AHZ39698

SEQ ID NO: 204225 - RNA, 1683 nt, Artificial Sequence
  derived and/or modified CDS sequence (opt5) from hemagglutinin__InfluenzaA__AHZ39722
augaacacccagauccugguguucgcccucauugcuaucauucccacaaaugccgacaagaucugccugggccaccaugcggucagcaacgggacgaaaguuaauacccuuacagagagaggaguggaaguggucaacgcuaccgagacaguggaacggaccaauauuccucgcaucuguuccaagggcaaaagaacaguugaucuggggcaaugcggacuccugggcaccaucacggggccgccccagugugaccaguuucuugaguucucugccgaucugauuaucgaacggcgcgagggaagcgacgugugcuacccuggcaaguuugucaacgaggaagcccucagacagauucugcgggaguccggcgggaucgauaaagaagcuaugggauucaccuauucuggcauucgcacagacggggccaccagcgcuuguagacgguccggaucuagcuuuuacgccgagaugaaguggcugcucuccaauacagaugacgcggccuucccccaaaugaccaagagcuauaaaaacacgcgcaagucuccugcucugaucguguggggcauucaccauuccguuagcacagccgagcagaccaaacuuuacgggucuggaaauaagcuggugacagucggcuccagcaacuaucagcagucuuuugugcccuccccuggcgcuagaccgcaagugaaugggcucagcggacggaucgauuuccacuggcugaugcuuaaccccaaugacaccgucaccuuuuccuucaacggcgccuuuaucgcgccugaucgcgccucuuuccugagagggaaaagcaugggcauucaguccggaguucagguggacgcuaauugcgaaggggauuguuaccauagcggaggcacaaucauuucuaaccuccccuuucagaacaucgacucccgggccgugggcaagugcccucgcuaugucaagcaaagaagccugcugcucgcuacggggaugaaaaaugugcccgagauuccgaagggacggggccuguucggggccaucgccggauucaucgaaaacggcugggaggggcuuauugacggcugguacggauuuagacaccagaaugcucagggcgaagggaccgcggccgauuacaaaucuacacaaagcgcuaucgaccagauuaccggaaagcugaaccgccucaucgagaaaacaaaucagcaguucgagcugauugauaacgaauuuaaugagguugaaaagcaaaucggcaacgugaucaauuggacccgggacuccauuacggaggucuggucuuauaacgccgaacuucugguggccauggagaaucagcacacaaucgaucucgcugacagcgagauggauaaacuguacgaaagaguuaagcgccagcugcgggagaacgccgaagaggacgggaccggauguuucgaaauuuuucauaagugcgaugacgauuguauggcguccaucagaaauaacaccuaugaccacagcaaauaccgcgaggaggcuaugcagaaucggauucaaaucgacccugugaagcucucuuccggcuauaaagaugucauucugugguucagcuuuggggccucuugcuucauccuucuggccaucgugaugggccucgucuuuauuugcgugaagaacggaaacaugagauguacaaucugcauuuga

SEQ ID NO: 204226 - RNA, 1683 nt, Artificial Sequence; identical to SEQ ID NO: 204225
  derived and/or modified CDS sequence (opt5) from hemagglutinin__InfluenzaA__AHZ39734

SEQ ID NO: 204227 - RNA, 1683 nt, Artificial Sequence
  derived and/or modified CDS sequence (opt5) from hemagglutinin__InfluenzaA__AHZ39746
augaacacccagauccugguguucgcccucauugcuaucauucccacaaaugccgacaagaucugccugggccaccaugcggucagcaacgggacgaaaguuaauacccuuacagagagaggaguggaaguggucaacgcuaccgagacaguggaacggaccaauauuccucgcaucuguuccaagggcaaaagaacaguugaucuggggcaaugcggacuccugggcaccaucacggggccgccccagugugaccaguuucuugaguucucugccgaucugauuaucgaacggcgcgagggaagcgacgugugcuacccuggcaaguuugucaacgaggaagcccucagacagauucugcgggaguccggcgggaucgauaaagaagcuaugggauucaccuauucuggcauucgcacaaauggggccaccagcgcuuguagacgguccggaucuagcuuuuacgccgagaugaaguggcugcucuccaacacagacaaugcggccuucccccaaaugaccaagagcuauaaaaacacgcgcaagucuccugcucugaucguguggggcauucaccauuccguuagcacagccgagcagaccaaacuuuacgggucuggaaauaagcuggugacagucggcuccagcaacuaucagcagucuuuugugcccuccccuggcgaaagaccgcaagugaaugggcucagcggacggaucgauuuccacuggcugaugcuuaaccccaaugacaccgucaccuuuuccuucaacggcgcuuuuaucgccccugaucgcgcgucuuuccugagagggaaaagcaugggcauucaguccggaguucagguggacgccaacugcgagggggauuguuaccauagcggaggcacaaucauuucuaaucuccccuuucagaacaucgacucccgggcugugggcaagugcccucgcuaugucaagcaaagaagccugcugcucgccacggggaugaaaaaugugcccgaaauuccgaagggacggggccuguucggggcuaucgccggauucaucgagaacggcugggaagggcuuauugauggcugguacggauuuagacaccagaaugcccagggcgaggggaccgcugcggacuacaaaucuacacaaagcgccaucgaccagauuaccggaaagcugaaccgccucaucgagaaaacaaaucagcaguucgaacugauugauaacgaguuuaaugaaguugagaagcaaaucggcaacgugaucaauuggacccgggacuccauuacggaagucuggucuuauaacgcugagcuucugguggccauggagaaucagcacacaaucgaucucgccgacagcgaaauggauaaacuguacgagagaguuaagcgccagcugcgggaaaacgcugaggaagacgggaccggauguuucgagauuuuucauaagugcgaugacgauuguauggccuccaucagaaauaacaccuaugaccacagcaaauaccgcgaggaagcgaugcagaaccggauucaaaucgauccugugaagcucucuuccggcuauaaagacgucauucugugguucagcuuuggggcuucuugcuucauccuucuggccaucgugaugggccucgucuuuauuugcgugaagaauggaaacaugagauguacaaucugcauuuga

SEQ ID NO: 204228 - RNA, 1683 nt, Artificial Sequence; identical to SEQ ID NO: 204225
  derived and/or modified CDS sequence (opt5) from hemagglutinin__InfluenzaA__AHZ39758

SEQ ID NO: 204229 - RNA, 1683 nt, Artificial Sequence; identical to SEQ ID NO: 204225
  derived and/or modified CDS sequence (opt5) from hemagglutinin__InfluenzaA__AHZ39770

SEQ ID NO: 204230 - RNA, 1683 nt, Artificial Sequence; identical to SEQ ID NO: 204225
  derived and/or modified CDS sequence (opt5) from hemagglutinin__InfluenzaA__AHZ39782

SEQ ID NO: 204231 - RNA, 1701 nt, Artificial Sequence; identical to SEQ ID NO: 201955
  derived and/or modified CDS sequence (opt5) from hemagglutinin__InfluenzaA__AHZ39794

SEQ ID NO: 204232 - RNA, 1701 nt, Artificial Sequence; identical to SEQ ID NO: 202069
  derived and/or modified CDS sequence (opt5) from hemagglutinin__InfluenzaA__AHZ39806

SEQ ID NO: 204233 - RNA, 1701 nt, Artificial Sequence
  derived and/or modified CDS sequence (opt5) from hemagglutinin__InfluenzaA__AHZ39818
augaagaccaucauugcccugagcuacauccucugccugguguucgcucagaaacuucccggcaacgacaauuccacagccacgcugugucucgggcaccaugcggucccuaacggaaccauuguuaagacaaucaccaaugaucaaauugaggugacaaacgcuaccgaacuggugcagucuagcuccacaggcgagaucugcaauucuccgcaccagauccuugacggggaaaacuguacccugauugaugcccuccugggagacccccagugcgauggcuuucaaaauaaaaagugggaccuguucgucgagagaagcaaagcccauuccaacuguuauccuuacgaugugcccgacuaugcuucucuccggagccugguugccuccagcgggacgcuugaauuuaauaacgagucuuucaauuggaccggagugacacagaacggcaccuccagcgcuugcauccgcagaucuaauaacuccuuuuucagccggcugaauuggcucacacaccugaacuuuaaguacccugcccuuaacgucaccaugcccaauaacgagcaguucgauaagcuguauauuuggggcgugcaucacccugggacggacaaagaucagacauuucucuacgcgcaagccgcuggacgcaucaccguuucuacaaagagaucccagcaggccgugauuccgaauaucggcagccggccccgcgucagaaacauuccuucccgggugucuaucuauuggaccaucgugaaacccggggacauucugcugaucaauagcaccggaaaccucauugcuccucgcggcuacuucaagaucagauccgggaaaagcucuauuaugcgguccgaugcccccaucggaaaguguaauagcgcgugcaucacaccgaacggcucuauuccuaaugacaagcccuuucagaacgucaaucgcaucacguacggcgccuguccuagauauguuaaacaaaacacccugaaacuugcuacagggaugcggaaugugcccgaaaaacagacccgcggaauuuucggcgccaucgcuggguuuauugagaacggaugggaaggcaugguggacgggugguacggauucagacaccagaauagcgagggccggggccaagccgccgaucugaaguccacacaggcugcgaucgaccagaucaacgggaaacucaacagacugauuggaaagaccaaugagaaauuccaucagaucgaaaaggaguuuucugaagucgagggccgcauucaagaucuugaaaaguauguggaggacacgaaaaucgaucuguggagcuacaacgccgagcucauuguugcucuggaaaaucagcacacaaucgaccugaccgauuccgagaugaacaaacucuucgaaaagaccaagaagcagcugcgggagaaugccgaagacauggggaacggaugcuuuaagauuuaucauaagugugauaaugccugcaucggcagcaucagaaacgggacauacgaccacgauguguaucgcgacgaggcucuuaauaaccgguuccagauuaaaggcgucgagcugaagucuggauacaaagacuggauccucuggauuuccuuugccaucagcugcuuccugcuuugugugguucugcucggcuuuauuaugugggcgugccaaaaggggaauaucagauguaacaucugcauuuga

SEQ ID NO: 204234 - RNA, 1701 nt, Artificial Sequence; identical to SEQ ID NO: 201955
  derived and/or modified CDS sequence (opt5) from hemagglutinin__InfluenzaA__AHZ39841

SEQ ID NO: 204235 - RNA, 1701 nt, Artificial Sequence; identical to SEQ ID NO: 201975
  derived and/or modified CDS sequence (opt5) from hemagglutinin__InfluenzaA__AHZ39853

SEQ ID NO: 204236 - RNA, 1701 nt, Artificial Sequence; identical to SEQ ID NO: 201955
  derived and/or modified CDS sequence (opt5) from hemagglutinin__InfluenzaA__AHZ39865

SEQ ID NO: 204237 - RNA, 1701 nt, Artificial Sequence
  derived and/or modified CDS sequence (opt5) from hemagglutinin__InfluenzaA__AHZ39877
augaagaccaucauugcccugagcuacauccucugccugguguucgcucagaaacuucccggcaacgacaauuccacagccacgcugugucucgggcaccaugcggucccuaacggaaccauuguuaagacaaucaccaaugauagaauugaggugacaaacgcuaccgaacuggugcaaaauucuagcaucggcgagaucugcgacuccccgcaccagauucuugauggggaaaacuguacacugaucgacgcccuccugggagauccccagugcgacggcuuucagaauaaaaagugggaucuguucgucgagcggucuaaagccuauagcaacuguuacccuuaugacgugcccgauuacgcuucccuccgcucucugguugccagcuccgggacccuugaauuuaauaacgagagcuucaauuggacgggagugacccaaaacggcacaucuuccgcuugcauuagacggagcaauucuuccuuuuucagccgccugaacuggcucacccaucugaauuuuaaguauccugcccuuaacgucacaaugcccaacaaugagcaguucgacaagcuguacaucuggggcgugcaccauccugggaccgauaaagaccagauuuuucucuaugcgcagucuuccggaagaaucacgguuagcacaaagcggucccaacaggccgugauuccgaacaucggcucucgccccagaauccggaauauuccuagccgcaucuccauuuacuggaccaucgucaaacccggggauauucugcugaucaacagcacaggaaaucucaucgcuccuagaggcuacuucaagauucggucugggaaauccagcaucaugcgcucugacgcccccauuggaaaguguaagagcgaaugcaucaccccgaacggcuccauuccuaaugacaaacccuuucagaacgugaauagaaucaccuauggcgcuuguccucgguacgugaagcagucuacacugaaacuugccacggggaugcgcaacguccccgagaagcaaaccagaggaaucuucggcgcgauugccggguuuaucgaaaauggaugggagggcaugguugaugggugguauggauuccggcaccagaacagcgagggcagaggccaggcugccgaccugaaauccacacaagcugccauugaucagaucaaugggaagcucaaccgccugauuggaaaaaccaaugaaaaguuccaccagaucgagaaggaauuuagcgagguggaaggccggauucaggaccuugagaaauacguggaggauacaaagaucgaccuguggucuuauaacgccgaacuccuggucgcucuggagaaccaacauaccaucgaucucacggacuccgaaaugaauaaacuguucgagaagaccaaaaagcagcuuagagaaaacgcggaggauauggggaauggaugcuuuaagauuuaccacaaaugugacaacgccugcaucggcagcauucgcaaugggacauaugaucauaacguguaccgggacgaggcucugaauaacagauuccagaucaagggcguugaacucaaaucuggauacaaggacuggauucuguggaucuccuuugccaccagcugcuuccuucuguguguggcccuccugggcuuuaucaugugggcuugccagaaagggaauauucgcuguaacaucugcauuuga

SEQ ID NO: 204238 - RNA, 1701 nt, Artificial Sequence; identical to SEQ ID NO: 201975
  derived and/or modified CDS sequence (opt5) from hemagglutinin__InfluenzaA__AHZ39889

SEQ ID NO: 204239 - RNA, 1701 nt, Artificial Sequence; identical to SEQ ID NO: 201956
  derived and/or modified CDS sequence (opt5) from hemagglutinin__InfluenzaA__AHZ39913

SEQ ID NO: 204240 - RNA, 1701 nt, Artificial Sequence
  derived and/or modified CDS sequence (opt5) from hemagglutinin__InfluenzaA__AHZ39925
augaagaccaucauugcccugagcuacauccucugccugguguucgcucagaaacuucccggcaacgacaauuccacagccacgcugugucucgggcaccaugcggucccuaacggaaccauuguuaagacaaucaccaaugauagaauugaggugacaaacgcuaccgaacuggugcaaaauucuagcaucggcgagaucugcgacuccccgcaccagauucuugauggggaaaacuguacacugaucgacgcccuccugggagauccccagugcgacggcuuucagaauaaaaagugggaucuguucgucgagcggucuaaagccuauagcaacuguuacccuuaugacgugcccgauuacgcuucccuccgcucucugguugccagcuccgggacccuugaauuuaauaacgagagcuucaauuggacgggagugacccaaaacggcacaucuuccgcuugcauuagacggagcaauucuuccuuuuucagccgccugaacuggcucacccaucugaauuuuaaguauccugcccuuaacgucacaaugcccaacaaugagcaguucgacaagcuguacaucuggggcgugcaccauccugggaccgauaaagaccagauuuuucucuaugcgcagucuuccggaagaaucacgguuagcacaaagcggucccaacaggccgugauuccgaacaucggcucucgccccagaauccgggauauuccuagccgcaucuccauuuacuggaccaucgucaaacccggggacauucugcugaucaauagcacaggaaaccucaucgcuccuagaggcuacuucaagauucggucugggaaauccagcaucaugcgcucugacgcccccauuggaaaguguaagagcgaaugcaucaccccgaauggcuccauuccuaacgauaaacccuuucagaaugugaacagaaucaccuauggcgcuuguccucgguacgugaagcagucuacacugaaacuugccacggggaugcgcaauguccccgagaagcaaaccagaggaaucuucggcgcgauugccggguuuaucgaaaacggaugggagggcaugguugacgggugguauggauuccggcaccagaauagcgagggcagaggccaggcugccgaucugaaauccacacaagcugccauugaccagaucaacgggaagcucaaucgccugauuggaaaaaccaacgaaaaguuccaccagaucgagaaggaauuuagcgagguggaaggccggauucaggaucuugagaaauacguggaggacacaaagaucgaucuguggucuuauaaugccgaacuccuggucgcucuggagaaccaacauaccaucgaccucacggauuccgaaaugaacaaacuguucgagaagaccaaaaagcagcuuagagaaaaugcggaggacauggggaacggaugcuuuaagauuuaccacaaaugugauaaugccugcaucggcagcauucgcaacgggacauaugaccaugacguguaccgggaugaggcucugaauaacagauuccagaucaagggcguugaacucaaaucuggauacaaggacuggauucuguggaucuccuuugccaucagcugcuuccuucuguguguggcccuccugggcuuuauuaugugggcuugccagaaagggaauauccgcuguaacauuugcaucuga

SEQ ID NO: 204241 - RNA, 1701 nt, Artificial Sequence; identical to SEQ ID NO: 201955
  derived and/or modified CDS sequence (opt5) from hemagglutinin__InfluenzaA__AHZ39937

SEQ ID NO: 204242 - RNA, 1701 nt, Artificial Sequence; identical to SEQ ID NO: 201955
  derived and/or modified CDS sequence (opt5) from hemagglutinin__InfluenzaA__AHZ39949

SEQ ID NO: 204243 - RNA, 1701 nt, Artificial Sequence; identical to SEQ ID NO: 201955
  derived and/or modified CDS sequence (opt5) from hemagglutinin__InfluenzaA__AHZ39961

SEQ ID NO: 204244 - RNA, 1701 nt, Artificial Sequence; identical to SEQ ID NO: 201955
  derived and/or modified CDS sequence (opt5) from hemagglutinin__InfluenzaA__AHZ39973

SEQ ID NO: 204245 - RNA, 1701 nt, Artificial Sequence
  derived and/or modified CDS sequence (opt5) from hemagglutinin__InfluenzaA__AHZ39985
augaagaccaucauugcccugagcuacauccucugccugguguucgcucagaaacuucccggcaacgacaauuccacagccacgcugugucucgggcaccaugcggucccuaacggaaccauuguuaagacaaucaccaaugauagaauugaggugacaaacgcuaccgaacuggugcaaaauucuagcaucggcgagaucugcgacuccccgcaccagauucuugauggggaaaacuguacacugaucgacgcccuccugggagauccccagugcgacggcuuucagaauaaaaagugggaucuguucgucgagcggucuaaagccuauagcaacuguuacccuuaugacgugcccgauuacgcuucccuccgcucucugguugccagcuccgggacccuugaauuuaauaacgagagcuucaauuggacgggagugacccaaaacggcacaucuuccgcuugcauuagacggagcaauucuuccuuuuucagccgccugaacuggcucacccaucugaauuuuaaguauccugcccuuaacgucacaaugcccaacaaugagcaguucgacaagcuguacaucuggggcgugcaccauccugggaccgauaaagaccagauuuuucucuaugcgcagucuuccggaagaaucacgguuagcacaaagcggucccaacaggccgugauuccgaacaucggcucucgccccagaauccggaauauuccuagccgcaucuccauuuacuggaccaucgucaaacccggggauauucugcugaucaacagcacaggaaaucucaucgcuccuagaggcuacuucaagauucggucugggaaauccagcaucaugcgcucugacgccagcauuggaaaguguaaguccgaaugcaucacccccaacggcucuauuccgaaugacaaaccuuuucagaacgugaauagaaucaccuauggcgcuuguccccgguacgugaagcagagcacacugaaacuugccacggggaugcgcaacgucccugagaagcaaaccagaggaaucuucggcgcgauugccggguuuaucgaaaauggaugggagggcaugguugaugggugguauggauuccggcaccagaacuccgagggcagaggccaggcugccgaccugaaaagcacacaagcugccauugaucagaucaaugggaagcucaaccgccugauuggaaaaaccaaugaaaaguuccaccagaucgagaaggaauuuucugagguggaaggccggauucaggaccuugagaaauacguggaggauacaaagaucgaccugugguccuauaacgccgaacuccuggucgcucuggagaaccaacauaccaucgaucucacggacagcgaaaugaauaaacuguucgagaagaccaaaaagcagcuuagagaaaacgcggaggauauggggaauggaugcuuuaagauuuaccacaaaugugacaacgccugcaucggcucuauucgcaaugggacauaugaucauaacguguaccgggacgaggcucugaauaacagauuccagaucaagggcguugaacucaaauccggauacaaggacuggauucuguggaucagcuuugccaccuccugcuuccuucuguguguggcccuccugggcuuuaucaugugggcuugccagaaagggaauauucgcuguaacaucugcauuuga

SEQ ID NO: 204246 - RNA, 1701 nt, Artificial Sequence; identical to SEQ ID NO: 201955
  derived and/or modified CDS sequence (opt5) from hemagglutinin__InfluenzaA__AHZ39997

SEQ ID NO: 204247 - RNA, 1701 nt, Artificial Sequence
  derived and/or modified CDS sequence (opt5) from hemagglutinin__InfluenzaA__AHZ40009
augaagaccaucauugcccugagcuacauccucugccugguguucgcucagaaacuucccggcaacgacaauuccacagccacgcugugucucgggcaccaugcggucccuaacggaaccauuguuaagacaaucaccaaugauagaauugaggugacaaacgcuaccgaacuggugcaaaucucuagcaucggcgagauuugcgacuccccgcaccagauccuugauggggaaaauuguacacugauugacgcccuccugggagauccccagugcgacggcuuucagaacaaaaagugggaucuguucgucgagcggucuaaagccuauagcaauuguuacccuuaugacgugcccgauuacgcuucccuccgcucucugguugccagcuccgggacccuugaauuuaacaaugagagcuucaacuggacgggagugacccaaaauggcacaucuuccgcuugcaucagaaagagcaacucuuccuuuuucagccggcugaauuggcucacccaucugaacuuuaaguauccugcccuuaaugucacaaugcccaacaacgagcaguucgacaaacuguacauuuggggcgugcaccauccugggaccgauaaggaccagaucuuucucuaugcgcagucuuccggacgcauuacgguuagcacaaaaagaucccaacaggccgugaucccgaauaucggcucucggccccgcauuagaaacaucccuagccggauuuccaucuacuggaccauugucaagcccggggauauccugcugaucaauagcacaggaaaccucauugcuccucgcggcuacuucaaaaucagaucugggaaguccagcauuaugcggucugacgcccccaucggaaaguguaaaagcgaaugcauuaccccgaauggcuccaucccuaacgacaagcccuuucagaaugugaaccgcaucaccuauggcgcuuguccuagauacgugaaacagucuacacugaaacuugccacggggaugcggaauguccccgagaagcaaacccgcggaauuuucggcgcgaucgccggguuuauugaaaacggaugggagggcaugguugaugggugguauggauucagacaccagaauagcgagggccggggccaggcugccgaccugaaguccacacaagcugccaucgaucagauuaacgggaaacucaauagacugaucggaaagaccaacgaaaaguuccaccagauugagaaagaauuuagcgagguggaaggccgcauccaggaccuugagaaguacguggaggauacaaaaaucgaccuguggucuuauaaugccgaacuccuggucgcucuggagaaccaacauaccauugaucucacggacuccgaaaugaacaagcuguucgagaaaacaaagaagcagcuucgggaaaaugcggaggauauggggaacggaugcuuuaaaaucuaccacaagugugacaaugccugcauuggcagcaucagaaacgggaccuaugaucaugacguguaccgcgacgaggcucugaauaaccgguuccagauuaaaggcguugaacucaagucuggauacaaagauuggauccuguggaucuccuuugccauuagcugcuuccuucuguguguggcccuccugggcuuuaucaugugggcuugccagaaggggaauauuagauguaacaucugcauuuga

SEQ ID NO: 204248 - RNA, 1701 nt, Artificial Sequence; identical to SEQ ID NO: 201955
  derived and/or modified CDS sequence (opt5) from hemagglutinin__InfluenzaA__AHZ40021

SEQ ID NO: 204249 - RNA, 1701 nt, Artificial Sequence; identical to SEQ ID NO: 201930
  derived and/or modified CDS sequence (opt5) from hemagglutinin__InfluenzaA__AHZ40033

SEQ ID NO: 204250 - RNA, 1701 nt, Artificial Sequence; identical to SEQ ID NO: 201955
  derived and/or modified CDS sequence (opt5) from hemagglutinin__InfluenzaA__AHZ40045

SEQ ID NO: 204251 - RNA, 1701 nt, Artificial Sequence; identical to SEQ ID NO: 201955
  derived and/or modified CDS sequence (opt5) from hemagglutinin__InfluenzaA__AHZ40060

SEQ ID NO: 204252 - RNA, 1701 nt, Artificial Sequence; identical to SEQ ID NO: 201955
  derived and/or modified CDS sequence (opt5) from hemagglutinin__InfluenzaA__AHZ40072

SEQ ID NO: 204253 - RNA, 1701 nt, Artificial Sequence; identical to SEQ ID NO: 201955
  derived and/or modified CDS sequence (opt5) from hemagglutinin__InfluenzaA__AHZ40084

SEQ ID NO: 204254 - RNA, 1701 nt, Artificial Sequence; identical to SEQ ID NO: 201955
  derived and/or modified CDS sequence (opt5) from hemagglutinin__InfluenzaA__AHZ40096

SEQ ID NO: 204255 - RNA, 1701 nt, Artificial Sequence; identical to SEQ ID NO: 201956
  derived and/or modified CDS sequence (opt5) from hemagglutinin__InfluenzaA__AHZ40108

SEQ ID NO: 204256 - RNA, 1701 nt, Artificial Sequence; identical to SEQ ID NO: 202069
  derived and/or modified CDS sequence (opt5) from hemagglutinin__InfluenzaA__AHZ40120

SEQ ID NO: 204257 - RNA, 1701 nt, Artificial Sequence
  derived and/or modified CDS sequence (opt5) from hemagglutinin__InfluenzaA__AHZ40130
augaagaccaucauugcccugagcuacauccucugccugguguucgcucagaaacuucccggcaacgacaauuccacagccacgcugugucucgggcaccaugcggucccuaacggaaccauuguuaagacaaucaccaaugauagaauugaggugacaaacgcuaccgaacuggugcaaaauucuagcaucggcgagaucugcgacuccccgcaccagauucuugauggggaaaacuguacacugaucgacgcccuccugggagauccccagugcgacggcuuucagaauaaaaagugggaucuguucgucgagcggucuaaagccuauagcaacuguuacccuuaugacgugcccgauuacgcuucccuccgcucucugguugccagcuccgggacccuugaauuuaauaacgagagcuucaauuggacgggagugacccaaaacggcacaucuuccgcuugcauuagacggagcaauucuuccuuuuucagccgccugaacuggcucacccaucugaauuuuaaguauccugcccuuaacgucacaaugcccaacaaugagcaguucgacaagcuguacaucuggggcgugcaccauccugggaccgauaaagaccagauuuuucucuaugcgcagucuuccggaagaaucacgguuagcacaaagcggucccaacaggccgugauuccgaacaucggcucucgccccagaauccggaauauuccuagccgcaucuccauuuacuggaccaucgucaaacccggggauauucugcugaucaacagcacaggaaaucucaucgcuccuagaggcuacuucaagauucggucugggaaauccagcaucaugcgcucugacgcccccauuggaaaguguaagagcgaaugcaucaccccgaacggcuccauuccuaaugacaaacccuuucagaacgugaauagaaucaccuauggcgcuuguccucgguacgugaagcagucuacacugaaacuugccacggggaugcgcaacguccccgagaagcaaaccagaggaaucuucggcgcgauugccggguuuaucgaaaauggaugggagggcaugguugaugggugguauggauuccggcaccagaacagcgagggcagaggccaggcugccgaccugaaauccacacaagcugccauugaucagaucaaugggaagcucaaccgccugauuggaaaaaccaaugaaaaguuccaccagaucgagaaggaauuuagcgagguggaaggccggauucaggaccuugagaaauacguggaggauacaaagaucgaccuguggucuuauaacgccgaacuccuggucgcucuggagaaccaacauaccaucgaucucacggacuccgaaaugaauaaacuguucgagaagaccaaaaagcagcuuagagaaaacgcggaggauauggggaauggaugcuuuaagauuuaccacaaaugugacaacgccugcaucggcagcauucgcaaugggacauaugaucauaacguguaccgggacgaggcucugaauaacagauuccagaucaagggcguugaacucaaaucuggauacaagaauuggauucuguggaucuccuuugccaucagcugcuuccuucuguguguggcccuccugggcuuuauuaugugggcuugccagaaagggaacauccgcuguaauauuugcaucuga

SEQ ID NO: 204258 - RNA, 1701 nt, Artificial Sequence
  derived and/or modified CDS sequence (opt5) from hemagglutinin__InfluenzaA__AHZ40142
augaagaccaucauugcccugagcuacauccucugccugguguucgcucagaaacuucccggcaacgacaauuccacagccacgcugugucucgggcaccaugcggucccuaacggaaccauuguuaagacaaucaccaaugauagaauugaggugacaaacgcuaccgaacuggugcaaaauucuagcaucggcgagaucugcgacuccccgcaccagauucuugauggggaaaacuguacacugaucgacgcccuccugggagauccccagugcgacggcuuucaggauaaaaagugggaccuguucgucgagcggucuaaagccuauagcaauuguuacccuuaugaugugcccgacuacgcuucccuccgcucucugguugccagcuccgggacccuugaauuuaacaaugagaacuucaauuggacgggagugacccaaaacggcacaagcucugcuugcauuagacgguccaauagcuccuuuuucucucgccugaacuggcucacccaucugaauuuuaaguauccugcccuuaacgucacaaugcccaacaaugagcaguucgauaagcuguacaucuggggcgugcaccauccugggaccgacaaagaucagauuuuucucuaugcgcagagcucuggaagaaucacgguuuccacaaagcggagccaacaggccgugauuccgaacaucggcucccgccccagaauccggaauauuccuucucgcaucagcauuuacuggaccaucgucaaacccggggacauucugcugaucaacuccacaggaaaucucaucgcuccuagaggcuacuucaagauucggagcgggaaaucuuccaucaugcgcagcgacgcccccauuggaaaguguaagucugaaugcaucaccccgaacggcagcauuccuaaugauagacccuuucagaacgugaaucggaucaccuauggcgcuuguccucgcuacgugaaacaguccacacugaagcuggccacggggaugagaaacguccccgagaaacaaacccggggaaucuucggcgcgauugccggguuuaucgaaaauggaugggagggcaugguugacgggugguauggauucagacaccagaacucugagggccgcggccaggcugccgaucuuaagagcacacaagcugccauugaccagaucaaugggaaacucaaccggcugauuggaaagaccaaugaaaaauuccaccagaucgagaaggaauuuuccgagguggaaggccgcauucaggaucuugagaaguacguggaggacacaaaaaucgaucuguggagcuauaacgccgaacuccuggucgcucuggagaaccaacauaccaucgaccucacggauucugaaaugaauaagcuguucgagaaaacaaagaaacagcuuagagaaaacgcggaggacauggggaauggaugcuuuaagauuuaccacaagugugauaacgccugcaucggcuccauucggaaugggaccuaugaccaugacguguacagagaugaggcucugaacaaucgcuuccagaucaaaggcguugaacucaagagcggauacaaagacuggauucuguggaucucuuuugccaucuccugcuuccuucuguguguggcccuccugggcuuuauuaugugggcuugccagaaggggaacauccgguguaauauuugcaucuga

SEQ ID NO: 204259 - RNA, 1701 nt, Artificial Sequence
  derived and/or modified CDS sequence (opt5) from hemagglutinin__InfluenzaA__AHZ40154
augaagaccaucauugcccugagcuacauccucugccugggcuucgcucaggagcuucccgggaacgacaauuccacagccacgcugugucucggacaccaugcggugccuaacggcaccauugucaaaacaaucaccaaugaucaaauugaaguuacaaacgcuaccgagcuggugcagucuagcuccacaggggaaaucugcaauucuccgcaccagauccuugacggagagaacuguacccugauugaugcccuccugggcgacccccagugcgauggguuucaaaauaagaaaugggaccuguucguggaaagaagcaaggcccauuccaacuguuauccuuacgauguccccgacuaugcuucucuccggagccugguggccuccagcggaacgcuugaguuuaauaacgagucuuucaauuggaccggcguuacacagaacggcaccuccagcgcuugcauccgcgggucuaauaacuccuuuuucagcagacugaauuggcucacacaccugaacuuuaaauacccugcccuuaacgugaccaugcccaauaacgaacaguucgauaagcuguauauuuggggaguccaucacccuggcacggacaaggaucagaucuuucucuacgcgcaagccucugggcggauuacaguguccaccaaacgcagccagcaggcuguuaucccgaauauuggauccagaccccgggugcgcaacaucccuucuagagucagcaucuauuggacaauugugaagcccggcgacaugcugcugaucaauuccaccgggaaccucauugccccucggggauacuucaaaauccgcagcggcaagucuuccauuaugagaagcgaugcucccaucggcaaauguaauucugccugcaucaccccgaacgggagcauuccuaaugacaagcccuuucagaacgugaaucggaucacauacggagcguguccucgcuaugucaagcaaaacacgcugaaacuugccaccggcaugagaaauguucccgagaagcagacacgggggauuuucggagcuaucgccggcuuuauugaaaacgggugggagggaaugguggacggcugguacggcuuccgccaccaaaauuccgaggggagaggacaggcugccgaucugaaaucuacccaggccgcuaucgaccagaucaacggcaagcucaaccggcugauugggaaaacaaaugaaaaguuccaucagaucgagaaagaauuuagcgagguggaaggacgcauucaagaucuugagaaguaugucgaggacaccaagaucgaucugugguccuacaacgcggaacuccugguggcccuggagaaucagcacacgauugaccucacagauagcgaaaugaacaaacuguucgagaagaccaaaaagcagcuuagagaaaaugcugaggacaugggcaacgggugcuuuaaaaucuaucauaaguguaauaacgccugcauuggcucuauccggaauggaaccuacgaucacgacguuuauagagaugaggcccugaacaaucgcuuccagaucaagggcguggaacucaaauccggguacaaggacuggauucuguggaucagcuuugcuauuucuugcuuccuucugugugucgcccuccugggauuuaucaugugggcgugccaaaaaggcaacauucgguguaauaucugcaucuga

SEQ ID NO: 204260 - RNA, 1701 nt, Artificial Sequence
  derived and/or modified CDS sequence (opt5) from hemagglutinin__InfluenzaA__AHZ40166
augaaggccauccuggugguccuccuguacaccuucgcuacagccaacgcggacacgcuuugcauuggcuaucacgcuaauaacagcaccgauacaguugacaccgugcuggagaagaaugugacagucacccauuccgugaaccuccuggaagauaagcacaaugggaaacuuuguaagcugagaggaguugcuccccuccaucugggcaaaugcaacaucgccggguggauucugggaaauccugagugugaaucucucagcacagccuccucuuggagcuacaucguggagaccuccucuagcgacaacggcacgugcuauccgggggauuuuauuaauuacgaagaacugcgggagcagcuuuccagcgucucuuccuucgaacgcuuugagaucuuccccaagaccagcucuuggccuaaccacgacuccaauaagggagugacagccgcuuguccccaugccggcgcgaaaucuuuuuauaagaaccugaucuggcucguuaaaaagggcaauagcuacccuaaacuguccaagagcuauauuaacgauaaggggaaagaagugcuuguccuguggggaauccaccaccccuccaccacagccgaccaacagucucucuaccagaaugcugaugccuacguguucgugggcaccagcagauauuccaagaaauuuaagccugagauugcuauccggccgaaaguccgcgaccaggaggggagaaugaacuacuauuggacgcugauugaacccggagauaagaucacauucgaggccaccggcaaccugguugugccucgguacgcguuugccauggaacgcaaugcugggagcggaauuaucaucucugacacacccgugcaugauugcaacaccaccugucaaacaccugagggcgccauuaauacgucccuccccuuccagaacauccacccgauuaccaucggcagaugcccuaaauaugucaagagcacaaagcugcggcuugcuaccgggcugcgcaaugugcccucuauucagagcagaggacucuuuggcgccaucgccggguucaucgaaggaggcuggacagggaugguugacggaugguacggcuaucaucaccagaacgagcaaggcuccggguacgcugcggaccugaaaucuacccagaaugccauugauaagaucacgaacaaagugaauagcgucauugagaagaugaacacacaguuuaccgcugugggaaaagaguucaaucaccuugagaagcggaucgaaaaccugaauaagaaaguugacgauggcuuccucgacauuuggaccuacaacgccgagcugcuggugcuccuggaaaaugagcgcacacuugauuaucaugacuccaacgucaagaaccuguacgagaaagugagaaaucagcucaagaacaaugccaaagaaaucgggaacggauguuuugaguucuaucacaagugcgauaauaccuguauggaaagcgucaagaacggcacauacgacuauccuaaauacucugaggaagcuaagcugaaucgggagaaaaucgauggggugaaacuugaguccacgcgcauuuaucaaauccuggccauuuacagcaccguugcgucuucccucgugcuggucgugagccugggcgcuaucuccuuuuggaugugcucuaacggaagccuccagugcagaauuuguaucuga

SEQ ID NO: 204261 - RNA, 1701 nt, Artificial Sequence; identical to SEQ ID NO: 201955
  derived and/or modified CDS sequence (opt5) from hemagglutinin__InfluenzaA__AHZ40177

SEQ ID NO: 204262 - RNA, 1701 nt, Artificial Sequence; identical to SEQ ID NO: 201955
  derived and/or modified CDS sequence (opt5) from hemagglutinin__InfluenzaA__AHZ40189

SEQ ID NO: 204263 - RNA, 1701 nt, Artificial Sequence; identical to SEQ ID NO: 201955
  derived and/or modified CDS sequence (opt5) from hemagglutinin__InfluenzaA__AHZ40201

SEQ ID NO: 204264 - RNA, 1701 nt, Artificial Sequence; identical to SEQ ID NO: 201940
  derived and/or modified CDS sequence (opt5) from hemagglutinin__InfluenzaA__AHZ40213

SEQ ID NO: 204265 - RNA, 1701 nt, Artificial Sequence; identical to SEQ ID NO: 201907
  derived and/or modified CDS sequence (opt5) from hemagglutinin__InfluenzaA__AHZ40225

SEQ ID NO: 204266 - RNA, 1701 nt, Artificial Sequence
  derived and/or modified CDS sequence (opt5) from hemagglutinin__InfluenzaA__AHZ40237
augaagaccaucauugcccugagcuacauccucugccugguguucgcucagaaacuucccggcaacgacaauuccacagccacgcugugucucgggcaccaugcggucccuaacggaaccauuguuaagacaaucaccaaugaucaaauugaggugacaaacgcuaccgaacuggugcaaaauucuagcaucggcgagaucugcgacuccccgcaccagauucuugauggggaaaacuguacacugaucgacgcccuccugggagauccccagugcgacggcuuucagaauaaaaagugggaucuguucgucgagagaucuaaagccuauagcaacuguuacccuuaugacgugcccgauuacgcuucccuccggucucugguugccagcuccgggacccuugaauuuaauaacgagagcuucaauugggcuggagugacgcagaacggcaccucuuccgccugcauucgcggcagcaauucuuccuuuuucagcagacugaacuggcucacacaucugaauuuuaaguauccugcgcuuaacgucaccaugcccaacaaugagcaguucgacaagcuguacaucuggggagugcaccauccugggacagauaaagaccagauuuuucucuaugcccaaucuuccggccggaucaccguuagcacgaagcgcucccagcaggcugugauuccgaacaucgggucuagaccccggauccgcaauauuccuagcagaaucuccauuuacuggacaaucgucaaacccggagauauucugcugaucaacagcaccggcaaucucaucgccccucggggguacuucaagauucgcucuggaaaauccagcaucaugagaucugacgcucccauuggcaaguguaagagcgaaugcaucacaccgaacggcuccauuccuaccgacaaacccuuucagaaugugaaccggaucaccuauggggccuguccucgcuacgugaagcaaucuacacugaaacuugcgacgggaaugagaaauguccccgagaagcagacccggggcaucuucggggccauugcuggauuuaucgaaaacggcugggaggggaugguugauggaugguauggcuuccgccaccagaauagcgagggcagagggcaagccgcugaccugaaauccacacaggccgccauugaucagaucaacggaaagcucaaucggcugauuggcaaaaccaacgaaaaguuccaccagaucgagaaggaauuuagcgagguggaagggcgcauucaagaccuugagaaauacguggaggauacaaagaucgaccuguggucuuauaaugcugaacuccuggucgcgcuggagaaccagcauaccaucgaucucacggacuccgaaaugaacaaacuguucgagaagaccaaaaagcagcuuagagaaaaugccgaggauaugggaaacggcugcuuuaagauuuaccacaaaugugacaaugcuugcaucgggagcauucggaacggcacauaugaucaugacguguacagagacgaggcccugaauaaccgcuuccagaucaagggaguugaacucaaaucuggcuacaaggauuggauucuguggaucuccuuugccaucagcugcuuccuucuguguguggcucuccugggguuuauuaugugggccugccaaaaaggaaauauccgguguaacauuugcaucuga

SEQ ID NO: 204267 - RNA, 1701 nt, Artificial Sequence; identical to SEQ ID NO: 201963
  derived and/or modified CDS sequence (opt5) from hemagglutinin__InfluenzaA__AHZ40249

SEQ ID NO: 204268 - RNA, 1701 nt, Artificial Sequence; identical to SEQ ID NO: 201930
  derived and/or modified CDS sequence (opt5) from hemagglutinin__InfluenzaA__AHZ40261

SEQ ID NO: 204269 - RNA, 1701 nt, Artificial Sequence; identical to SEQ ID NO: 202069
  derived and/or modified CDS sequence (opt5) from hemagglutinin__InfluenzaA__AHZ40273

SEQ ID NO: 204270 - RNA, 1701 nt, Artificial Sequence
  derived and/or modified CDS sequence (opt5) from hemagglutinin__InfluenzaA__AHZ40285
augaagaccaucauugcccugagcuacauccucugccugguguucgcucagaaacuucccggcaacgacaauuccacagccacgcugugucucgggcaccaugcggucccuaacggaaccauuguuaagacaaucaccaaugaucaaauugaggugacaaacgcuaccgaacuggugcagucuagcuccacaggcgagaucugcgacucuccgcaccagauccuugauggggaaaauuguacccugauugacgcccuccugggagauccccagugcgacggcuuucaaaacaaaaagugggaucuguucgucgagagaagcaaagccuauuccaauuguuacccuuaugacgugcccgauuacgcuucucuccggagccugguugccuccagcgggacgcuugaauuuaacaaugagucuuucaacuggaccggagugacacagaauggcaccuccagcgcuugcauccgcagaucugacuccagcuuuuucucucggcugaacuggcucacacaucugaauuuuaaguauccugcccuuaacgucaccaugcccaauaacgagcaguucgauaagcuguacauuuggggcgugcaccauccugggacggacaaagaucagaucuuucucuaugcgcaagccuccggacgcauuacaguuagcaccaagagaucccagcagucugugaucccgaacauuggcagccggccccgcaucagaaauaucccuucccggauuagcaucuacuggacaauugucaaacccggggacauccugcugauuaacucuaccggaaaucucaucgcuccucgcggcuacuucaagauccaguccgggaaaagcucuauuaugagaagcgacacccccaucggaaaguguaacuccgaaugcauuacaccgaauggcucuaucccuaacgauaagcccuuucaaaaugugaaccggauuacguauggcgccuguccucgcuacgugaaacagaauacccugaaacuugcuacagggaugagaaacguccccgagaagcagacccggggaaucuucggcgccaucgcgggguuuauugaaaauggaugggagggcaugguugacgggugguauggauuccgccaccaaaacagcgagggcagaggccaggccgcugaucugaaguccacacaggccgcuaucgaccagauuaaugggaaacucaaccggcugaucggaaagaccaaugaaaaauuccaccaaauugagaaggaauuuagcgagguggaaggcagaauccaggaucuugagaaguacguggaggacacgaaaauugaucuguggucuuauaacgccgaacuccuggucgcccuggagaaccagcauacaaucgaccucaccgauuccgaaaugaauaagcuguucgagaaaaccaagaaacagcuucgcgaaaacgcugaggacauggggaauggaugcuuuaagaucuaccacaagugugauaacgcgugcauuggcagcauccggaaugggacauauaaccaugacguguacagagacgaggcccugaauaaccgcuuccaaauuaaaggcguugaacucaagucuggauacaaagauuggauccuguggauuuccuuugcuaucagcugcuuccuucuguguguggcccuccugggcuuuaucaugugggccugccagaaggggaauauucgguguaacaucugcauuuga

SEQ ID NO: 204271 - RNA, 1701 nt, Artificial Sequence; identical to SEQ ID NO: 202066
  derived and/or modified CDS sequence (opt5) from hemagglutinin__InfluenzaA__AHZ40297

SEQ ID NO: 204272 - RNA, 1701 nt, Artificial Sequence
  derived and/or modified CDS sequence (opt5) from hemagglutinin__InfluenzaA__AHZ40309
augaagaccaucauugcccugagcuacauccucugccugguguucgcucagaaacuucccggcaacgacaauuccacagccacgcugugucucgggcaccaugcggucccuaacggaaccauuguuaagacaaucaccaaugauagaauugaggugacaaacgcuaccgaacuggugcaaaauucuagcaucggcgagaucugcgacuccccgcaccagauucuugauggggaaaacuguacacugaucgacgcccuccugggagauccccagugcgacggcuuucagaauaaaaagugggaucuguucgucgagcggucuaaagccuauagcaacuguuacccuuaugacgugcccgauuacgcuucccuccgcucucugguugccagcuccgggacccuugaauuuaauaacgagagcuucaauuggacgggagugacccaaaacggcacaucuuccgcuugcauuagacggagcaauaacuccuuuuucucucgccugaauuggcucacccaucugaacuuuaaguauccugcccuuaacgucacaaugcccaauaacgagcaguucgacaagcuguacaucuggggcgugcaccauccugggaccgauaaagaccagauuuuucucuaugcgcagagcucuggaagaaucacgguuuccacaaagcggagccaacaggccgugauuccgaauaucggcucccgccccagaauccggaacauuccuucucgcaucagcauuuacuggaccaucgucaaacccggggauauucugcugaucaauuccacaggaaaccucaucgcuccuagaggcuacuucaagauucggaaugggaaaagcucuaucaugcgcuccgacgcccccauuggaaaguguaagagcgaaugcaucaccccgaacggcucuauuccuaaugacaaacccuuucagaacgugaauagaaucaccuauggcgcuuguccucgguacgugaagcagagcacacugaaacuugccacggggaugcgcaacguccccgagaagcaaaccagaggaaucuucggcgcgauugccggguuuaucgaaaauggaugggagggcaugguugaugggugguauggauuccggcaccagaacuccgagggcagaggccaggcugccgaccugaaaucuacacaagcugccauugaucagaucaaugggaagcucaaccgccugauuggaaaaaccaacgaaaaguuccaccagaucgagaaggaauuuagcgagguggaaggccggauucaggaccuugagaaauacguggaggauacaaagaucgaccugugguccuauaaugccgaacuccuggucgcucuggagaaccaacauaccaucgaucucacggacagcgaaaugaauaaacuguucgagaagaccaaaaagcagcuuagagaaaacgcggaggauauggggaauggaugcuuuaagauuuaccacaaaugugacaacgccugcaucggcucuauucgcaaugggacauaugaucaugacguguaccgggacgaggcucugaacaauagauuccagaucaagggcguugaacucaaauccggauacaaggauuggauucuguggaucagcuuugccaucucuugcuuccuucugugugugguccuccugggcuuuauuaugugggccugccagaaagggaacauccgcuguaauauuugcaucuga

SEQ ID NO: 204273 - RNA, 1701 nt, Artificial Sequence; identical to SEQ ID NO: 201955
  derived and/or modified CDS sequence (opt5) from hemagglutinin__InfluenzaA__AHZ40321

SEQ ID NO: 204274 - RNA, 1701 nt, Artificial Sequence; identical to SEQ ID NO: 201955
  derived and/or modified CDS sequence (opt5) from hemagglutinin__InfluenzaA__AHZ40333

SEQ ID NO: 204275 - RNA, 1701 nt, Artificial Sequence
  derived and/or modified CDS sequence (opt5) from hemagglutinin__InfluenzaA__AHZ40345
augaagaccaucauugcccugagcuacauccucugccugguguucgcucagaaacuucccggcaacgacaauuccacagccacgcugugucucgggcaccaugcggucccuaacggaaccauuguuaagacaaucaccaaugauagaauugaggugacaaacgcuaccgaacuggugcaaaauucuagcaucggcgagaucugcgacuccccgcaccagauucuugauggggaaaacuguacacugaucgacgcccuccugggagauccccagugcgacggcuuucagaauaaaaagugggaucuguucgucgagcggucuaaagccuauagcaacuguuacccuuaugacgugcccgauuacgcuucccuccgcucucugguugccagcuccgggacccuugaauuuaauaacgagagcuucaauuggacgggagugacccaaaacggcacaucuuccgcuugcauuagacggagcaauucuuccuuuuucagccgccugaacuggcucacccaucugaauuuuaaguauccugcccuuaacgucacaaugcccaacaaugagcaguucgacaagcuguacaucuggggcgugcaccauccugggaccgauaaagaccagauuuuucucuaugcgcagucuuccggaagaaucacgguuagcacaaagcggucccaacaggccgugauuccgaacaucggcucucgccccagaauccggaauauuccuagccgcaucuccauuuacuggaccaucgucaaacccggggauauucugcugaucaacagcacaggaaaucucaucgcuccuagaggcuacuucaagauucggucugggaaauccagcaucaugcgcucugacgcccccauuggaaaguguaagagcgaaugcaucaccccgaacggcuccauuccuucugacaaacccuuucagaaugugaacagaaucaccuauggcgcuuguccucgguacgugaagcagagcacacugaaacuugccacggggaugcgcaauguccccgagaagcaaaccagaggaaucuucggcgcgauugccggguuuaucgaaaacggaugggagggcaugguugaugggugguauggauuccggcaccaaaauuccgagggcagaggccaggcugccgaccugaaaagcacacaggcugccauugaucagaucaacgggaagcucaaucgccugauuggaaaaaccaacgaaaaguuccaccagaucgagaaggaauuuucugagguggaaggccggauucaggaccuugagaaauacguggaggauacaaagaucgaccugugguccuauaaugccgaacuccuggucgcucuggagaaccaacauaccaucgaucucacggacagcgaaaugaacaaacuguucgagaagaccaaaaagcagcuuagagaaaaugcggaggauauggggaacggaugcuuuaagauuuaccacaaaugugacaaugccugcaucggcucuauucgcaacgggacauaugaucaugacguguaccgggacgaggcucugaauaacagauuccagaucaagggcguugaacucaaauccggauacaaggauuggauucuguggaucagcuuugccaucuccugcuuccuucuguguguggcccuccugggcuuuauuaugugggcuugccagaaagggaauauccgcuguaacauuugcaucuga

SEQ ID NO: 204276 - RNA, 1701 nt, Artificial Sequence; identical to SEQ ID NO: 201956
  derived and/or modified CDS sequence (opt5) from hemagglutinin__InfluenzaA__AHZ40357

SEQ ID NO: 204277 - RNA, 1701 nt, Artificial Sequence
  derived and/or modified CDS sequence (opt5) from hemagglutinin__InfluenzaA__AHZ40369
augaagaccaucauugcccugagcuacauccucugccugguguucgcucagaaacuucccggcaacgacaauuccacagccacgcugugucucgggcaccaugcggucccuaacggaaccauuguuaagacaaucaccaaugauagaauugaggugacaaacgcuaccgaacuggugcaaaauucuagcaucggcgagaucugcgacuccccgcaccagauucuugauggggaaaacuguacacugaucgacgcccuccugggagauccccagugcgacggcuuucagaauaaaaagugggaucuguucgucgagcggucuaaagccuauagcaacuguuacccuuaugacgugcccgauuacgcuucccuccgcucucugguugccagcuccgggacccuugaauuuaauaacgagagcuucaauuggacgggagugacccaaaacggcacaucuuccgcuugcauuagacggagcaauucuuccuuuuucagccgccugaacuggcucacccaucugaauuuuaaguauccugcccuuaacgucacaaugcccaacaaugagcaguucgacaagcuguacaucuggggcgugcaccauccugggaccgauaaagaccagauuuuucucuaugcgcagucuuccggaagaaucacgguuagcacaaagcggucccaacaggccgugauuccgaacaucggcucucgccccagaauccggaauauuccuagccgcaucuccauuuacuggaccaucgucaaacccggggauauucugcugaucaacagcacaggaaaucucaucgcuccuagaggcuacuucaagauucggucugggcgcuccagcaucaugagaucugacgcccccauuggaaaauguaagagcgaaugcaucaccccgaacggcuccauuccuaaugacaagcccuuucagaacgugaaucggaucaccuauggcgcuuguccucgcuacgugaaacagucuacacugaaacuugccacggggaugagaaacguccccgagaagcaaacccggggaaucuucggcgcgauugccggguuuaucgaaaauggaugggagggcaugguugaugggugguauggauucagacaccagaacagcgagggccgcggccaggcugccgaccugaaguccacacaagcugccauugaucagaucaaugggaaacucaaccggcugauuggaaagaccaaugaaaaauuccaccagaucgagaaggaauuuagcgagguggaaggccgcauucaggaccuugagaaguacguggaggauacaaaaaucgaccuguggucuuauaacgccgaacuccuggucgcucuggagaaccaacauaccaucgaucucacggacuccgaaaugaauaagcuguucgagaaaacaaagaaacagcuuagagaaaacgcggaggauauggggaauggaugcuuuaagauuuaccacaagugugacaacgccugcaucggcagcauucggaaugggaccuaugaucaugacguguacagagacgaggcucugaacaaucgcuuccagaucaaaggcguugaacucaagucuggauacaaagauuggauucuguggaucuccuuugccaucagcugcuuccuucuguguguggcccuccugggcuuuauuaugugggcuugccagaaggggaacauccgguguaauauuugcaucuga

SEQ ID NO: 204278 - RNA, 1701 nt, Artificial Sequence; identical to SEQ ID NO: 202066
  derived and/or modified CDS sequence (opt5) from hemagglutinin__InfluenzaA__AHZ40381

SEQ ID NO: 204279 - RNA, 1701 nt, Artificial Sequence; identical to SEQ ID NO: 201955
  derived and/or modified CDS sequence (opt5) from hemagglutinin__InfluenzaA__AHZ40393

SEQ ID NO: 204280 - RNA, 1701 nt, Artificial Sequence; identical to SEQ ID NO: 201955
  derived and/or modified CDS sequence (opt5) from hemagglutinin__InfluenzaA__AHZ40405

SEQ ID NO: 204281 - RNA, 1701 nt, Artificial Sequence; identical to SEQ ID NO: 201955
  derived and/or modified CDS sequence (opt5) from hemagglutinin__InfluenzaA__AHZ40417

SEQ ID NO: 204282 - RNA, 1701 nt, Artificial Sequence
  derived and/or modified CDS sequence (opt5) from hemagglutinin__InfluenzaA__AHZ40429
augaagaccaucauugcccugagcuacauccucugccugguguucgcucaggagcuucccggcaacgacgauuccacagccacgcugugucucgggcaccaugcggucccuaauggaaccauuguuaaaacaaucaccaacgaccaaauugaagugacaaaugcuaccgagcuggugcagucuagcuccacaggcgaaaucugcaacucuccgcaccagauccuugauggggagaauuguacccugauugacgcccuccugggagauccccagugcgacggcuuucaaaacaagaaaugggaucuguucgucgaaagaagcaaggcccauuccaauuguuauccuuacgacgugcccgauuaugcuucucuccggagccugguugccuccagcgggacgcuugaguuuaaaaacgagucuuucaauuggaccggagugacacagaacggcaccuccagcgcuugcauccgcagaucuaauaacuccuuuuucagccggcugaauuggcucacacaccugaacuuuaaguacccugcccuuaaugucaccaugcccaacaacgaacaguucgacaagcuguauauuuggggcgugcaucacccugggacggauaaagaccagaucuuucucuacgcgcaagccucuggacgcauuacaguuuccaccaagagaagccagcaggcugugaucccgaauauuggcucccggccccgcgucagaaacaucccuucucgggugagcaucuauuggacaauugugaaacccggggauauccugcugauuaauuccaccggaaaccucaucgccccucgcggcuacuucaagauuagaagcgggaaaucuuccaucaugcggagcgacgcucccaucggaaaguguaauucugccugcauuaccccgaacggcagcaucccuaaugacaagcccuuucagaacgucaaucgcauuacauacggcgcguguccuagauauguuaaacaaaacacgcugaaacuugccaccgggaugcggaaugugcccgagaagcagacacgcggaaucuucggcgcuauugccggguuuaucgaaaacggaugggagggcaugguggaugggugguacggauucagacaccaaaauuccgagggccggggccaggcugccgaccugaagucuacccaggccgcuaucgaucagauuaacgggaaacucaauagacugaucggaaagacaaacgaaaaauuccaucagauugagaaggaauuuagcgaggucgaaggccgcauccaagaccuugagaaguauguggaggauaccaaaauugaccugugguccuacaacgcggaacuccugguugcccuggagaaucagcacacgaucgaucucacagacagcgaaaugaacaagcuguucgagaaaaccaagaaacagcuucgggaaaaugcugaggauauggggaacggaugcuuuaagauuuaucauaagugugacaaugccugcaucggcucuaucagaaacgggaccuacgaucacgacguguaucgcgacgaggcccugaauaaccgguuccagauuaaaggcgucgaacucaaguccggauacaaagauuggauccuguggauuagcuuugcuaucucuugcuuccuucuguguguggcccuccugggcuuuauuaugugggcgugccaaaaggggaauaucagauguaacaucugcauuuga

SEQ ID NO: 204283 - RNA, 1701 nt, Artificial Sequence; identical to SEQ ID NO: 201955
  derived and/or modified CDS sequence (opt5) from hemagglutinin__InfluenzaA__AHZ40441

SEQ ID NO: 204284 - RNA, 1701 nt, Artificial Sequence; identical to SEQ ID NO: 202098
  derived and/or modified CDS sequence (opt5) from hemagglutinin__InfluenzaA__AHZ40453

SEQ ID NO: 204285 - RNA, 1701 nt, Artificial Sequence
  derived and/or modified CDS sequence (opt5) from hemagglutinin__InfluenzaA__AHZ40465
augaagaccaucauugcccugagcuacauccucugccugguguucgcucagaaacuucccggcaacgacaauuccacagccacgcugugucucgggcaccaugcggucccuaacggaaccauuguuaagacaaucaccaaugauagaauugaggugacaaacgcuaccgaacuggugcaaaauucuagcaucggcgagaucugcgacuccccgcaccagauucuugauggggaaaacuguacacugaucgacgcccuccugggagauccccagugcgacggcuuucagaauaaaaagugggaucuguucgucgagcggucuaaagccuauagcaacuguuacccuuaugacaugcccgauuacgcuucccuccgcucucugguggccagcuccgggacccuugaauuuaauaacgagagcuucaauuggacgggaguuacccaaaacggcacaucuuccgcuugcauuagacggagcaauucuuccuuuuucagccgccugaacuggcucacccaucugaauuuuaaguauccugcccuuaacgugacaaugcccaacaaugagagauucgacaagcuguacaucuggggcguccaccauccugggaccgauaaagaccagauuuuucucuaugcgcagucuuccggacggaucacggugagcacaaagcgcucccagcaagccguuauuccgaacaucggcucuagaccccggauccgcaauauuccuagcagaaucuccauuuacuggaccaucgugaaacccggggauauucugcugaucaacagcacaggaaaucucaucgcuccucggggcuacuucaagauucgcucugggaaauccagcaucaugagaucugacgcccccauuggaaaguguaagagcgaaugcaucaccccgaacggcuccauuccuaaugacaaacccuuucagaacgucaaucggaucaccuauggcgcuuguccucgcuacgugaagcagucuacacugaaacuugccacggggaugagaaacgugcccgagaagcagacccggggaaucuucggcgcgauugccggguuuaucgaaaauggaugggagggcauggucgaugggugguauggauucagacaccaaaacagcgagggccgcggccaggcugccgaccugaaauccacacaggcugccauugaucaaaucaaugggaagcucaaccggcugauuggaaaaaccaaugaaaaguuccaccagaucgagaaggaauuuagcgagguugaaggccgcauucaggaccuugagaaauacguggaggauacaaagaucgaccuguggucuuauaacgccgaacuccugguggcucuggagaaccagcauaccaucgaucucacggacuccgaaaugaauaaacuguucgagaagaccaaaaagcaacuuagagaaaacgcggaggauauggggaauggaugcuuuaagauuuaccacaaaugugacaacgccugcaucggcagcauucggaaugggacauaugaucauaacgucuacagagacgaggcucugaauaaccgcuuccagaucaagggcguggaacucaaaucuggauacaaggacuggauucuguggaucuccuuugccaucagcugcuuccuucuguguguugcccuccugggcuuuauuaugugggcuugccagaaagggaauauccgguguaacauuugcaucuga

SEQ ID NO: 204286 - RNA, 1701 nt, Artificial Sequence; identical to SEQ ID NO: 201956
  derived and/or modified CDS sequence (opt5) from hemagglutinin__InfluenzaA__AHZ40477

SEQ ID NO: 204287 - RNA, 1701 nt, Artificial Sequence; identical to SEQ ID NO: 202132
  derived and/or modified CDS sequence (opt5) from hemagglutinin__InfluenzaA__AHZ40489

SEQ ID NO: 204288 - RNA, 1701 nt, Artificial Sequence; identical to SEQ ID NO: 201955
  derived and/or modified CDS sequence (opt5) from hemagglutinin__InfluenzaA__AHZ40500

SEQ ID NO: 204289 - RNA, 1701 nt, Artificial Sequence; identical to SEQ ID NO: 201955
  derived and/or modified CDS sequence (opt5) from hemagglutinin__InfluenzaA__AHZ40512

SEQ ID NO: 204290 - RNA, 1701 nt, Artificial Sequence
  derived and/or modified CDS sequence (opt5) from hemagglutinin__InfluenzaA__AHZ40524
augaagaccaucauugcccugagcuacauccucugccugguguucgcucagaaacuucccggcaacgacaauuccacagccacgcugugucucgggcaccaugcggucccuaacggaaccauuguuaagacaaucaccaaugauagaauugaggugacaaacgcuaccgaacuggugcaaaauucuagcaucggcgagaucugcgacuccccgcaccagauucuugauggggaaaacuguacacugaucgacgcccuccugggagauccccagugcgacggcuuucagaauaaaaagugggaucuguucgucgagcggucuaaagccuauagcaacuguuacccuuaugacgugcccgauuacgcuucccuccgcucucugguugccagcuccgggacccuugaauuuaauaacgagagcuucaauugggcuggagugacgcaaaacggcaccucuuccgccugcauuagaggcagcaauucuuccuuuuucagccggcugaacuggcucacacaucugaauuuuaaguauccugcgcuuaacgucaccaugcccaacaaugagcaguucgacaagcuguacaucuggggagugcaccauccugggacagauaaagaccagauuuuucucuaugcccagucuuccggccgcaucaccguuagcacgaagagaucccaacaggcugugauuccgaacaucgggucucggccccgcaucagaaauauuccuagccggaucuccauuuacuggacaaucgucaaacccggagauauucugcugaucaacagcaccggcaaucucaucgccccucgcggguacuucaagauuagaucuggaaaauccagcaucaugcggucugacgcucccauuggcaaguguaagagcgaaugcaucacaccgaacggcuccauuccuaaugacaaacccuuucagaacgugaaucgcaucaccuauggggccuguccuagauacgugaagcagucuacccugaaacuugcgacaggaaugcggaacguccccgagcgccaaacgagaggcaucuucggggccauugcuggauuuaucgaaaauggcugggaggggaugguugauggaugguauggcuuccggcaccagaacagcgagggcagagggcaggccgcugaccugaaguccacccaagccgccauugaucagaucaauggaaaacucaaccgccugauuggcaagacaaaugaaaaauuccaccagaucgagaaggaauuuagcgagguggaagggcggauucaggaccuugagaaguacguggaggauaccaaaaucgaccuguggucuuauaacgcugaacuccuggucgcgcuggagaaccaacauacaaucgaucucaccgacuccgaaaugaauaagcuguucgagaaaacgaagaaacagcuuagagaaaacgccgaggauaugggaaauggcugcuuuaagauuuaccacaagugugacaacgcuugcaucgggagcauucgcaauggcacauaugaucaugacguguaccgggacgaggcccugaacaauagauuccagaucaaaggaguugaacucaagucuggcuacaaagauuggauucuguggaucuccuuugccaucagcugcuuccuucuguguguggcucuccugggguuuauuaugugggccugccagaagggaaacauccgcuguaauauuugcaucuga

SEQ ID NO: 204291 - RNA, 1701 nt, Artificial Sequence; identical to SEQ ID NO: 203842
  derived and/or modified CDS sequence (opt5) from hemagglutinin__InfluenzaA__AHZ40536

SEQ ID NO: 204292 - RNA, 1701 nt, Artificial Sequence; identical to SEQ ID NO: 201955
  derived and/or modified CDS sequence (opt5) from hemagglutinin__InfluenzaA__AHZ40548

SEQ ID NO: 204293 - RNA, 1701 nt, Artificial Sequence; identical to SEQ ID NO: 201930
  derived and/or modified CDS sequence (opt5) from hemagglutinin__InfluenzaA__AHZ40572

SEQ ID NO: 204294 - RNA, 1701 nt, Artificial Sequence; identical to SEQ ID NO: 201930
  derived and/or modified CDS sequence (opt5) from hemagglutinin__InfluenzaA__AHZ40583

SEQ ID NO: 204295 - RNA, 1701 nt, Artificial Sequence
  derived and/or modified CDS sequence (opt5) from hemagglutinin__InfluenzaA__AHZ40595
augaaggccauccugguggucaugcucuacaccuucgcuacagccaacgcggacacgcugugcauuggcuaucacgcuaauaacagcaccgauacaguugacaccgugcuugagaaaaaugugacagucacccauuccgugaaccugcucgaagauaagcacgacgggaaacuguguaaacuuagaggaguugcuccccugcaucucggcaagugcaauaucgccggguggauucugggaaacccugagugugaaucucugagcacagccuccucuuggagcuacaucguggagaccuccggcucugauaaugggacgugcuauccgggagacuuuauugauuacgaggaacuccgggagcagcugagcuccgucagcucuuucgaacgcuuugagaucuuccccaagaccuccagcuggccuaaccacgacucuaauaagggcgugacagccgcuuguccccaugccggcgcgaaaggguuuuauaagaaccuuaucuggcugguuaaaaagggaaauuccuacccuaaacucagcauuucuuauaucaacgauaagggcaaggaagugcugguccuuugggggauucaccaccccuccaccacagccgaccaacagagccuguaccagaaugcugauaccuacguguucgugggaacguccagauauucuaaaaaguuuaaaccugagaucgccauucggccgaagguccgcgaccaggagggcagaaugaacuacuauuggacacucguugaacccggggauaaaaucaccuucgaggcuacaggaaaucugguggugccucgguacgccuuugcgaugaagcgcaacgccggcagcggcauuaucaucuccgacacccccguccaugacugcaacaccacaugucaaacgccuaaaggggcuauuaauaccagccugcccuuccagaacauccacccgauuacaaucggaaagugcccuaaguaugugaaaucuaccaagcucagacuggccacaggccuucggaauguucccuccauucagagccgcgggcuguuuggagcuaucgccggcuucaucgaagggggauggaccggcaugguggauggcugguacggguaucaucaccagaacgagcaaggaucuggcuacgccgcugaccucaaaagcacgcagaaugcgauugauaagaucacaaacaaagucaauuccgugauugaaaagaugaacacccaguuuaccgccguugggaaggaguucaaucaccuggagaaaagaaucgaaaaccuuaauaagaaaguggacgauggauuccuggacauuuggacauacaacgcugagcuccugguccugcucgaaaaugagcggacccuggauuaucaugacucuaacgugaagaaucuuuacgaaaaaguccgcaaccagcugaagaacaaugccaaggagaucggcaacggguguuuugaguucuaucacaaaugcgauaauacauguauggaaagcgugaagaacggcacguacgacuauccuaaauacuccgaggaagccaagcucaauagagagaaaaucgauggaguuaagcuggaaagcacccggauuuaucaaauccuugcuauuuacucuacagccgcguccagccuggugcucgucgugucucugggcgcuaucuccuuuuggaugugcagcaacgggucccugcagugccgcauuuguaucuga

SEQ ID NO: 204296 - RNA, 1701 nt, Artificial Sequence
  derived and/or modified CDS sequence (opt5) from hemagglutinin__InfluenzaA__AHZ40606
augaagaccaucauugcccugagcuacauccucugccugguguucgcucagaaacuucccggcaacgacaauuccacagccacgcugugucucgggcaccaugcggucccuaacggaaccauuguuaagacaaucaccaaugauagaauugaggugacaaacgcuaccgaacuggugcaaaauucuagcaucggcgagaucugcgacuccccgcaccagauucuugauggggaaaacuguacacugaucgacgcccuccugggagauccccagugcgacggcuuucagaauaaaaagugggaucuguucgucgagcggucuaaagccuauagcaacuguuacccuuaugacgugcccgauuacgcuucccuccgcucucugguugccagcuccgggacccuugaauuuaauaacgagagcuucaauuggacgggagugacccaaaacggcacaucuuccgcuugcauuagacggagcaauucuuccuuuuucagccgccugaacuggcucacccaucugaauuuuaaguauccugcccuuaacgucacaaugcccaacaaugagcaguucgacaagcuguacaucuggggcgugcaccauccugggaccgauaaagaccagauuuuucucuaugcgcagucuuccggaagaaucacgguuagcacaaagcggucccaacaggccgugauuccgaacaucggcucucgccccagaauccggaauauuccuagccgcaucuccauuuacuggaccaucgucaaacccggggauauucugcugaucaacagcacaggaaaucucaucgcuccuagaggcuacuucaagauucggucugggaaauccagcaucaugcgcucugacgcccccauuggaaaguguaagagcgaaugcaucaccccgaacggcuccauuccuaaugacaaacccuuucagaacgugaauagaaucaccuauggcgcuuguccucgguacgugaagcagucuacacugaaacuugccacggggaugcgcaacguccccgagaagcaaaccagaggaaucuucggcgcgauugccggguuuaucgaaaauggaugggagggcaugauggaugggugguauggauuccggcaccagaacagcgagggcagaggccaggcugccgaccugaaauccacacaagcugccauugaucagaucaaugggaagcucaaccgccugauuggaaaaaccaaugaaaaguuccaccagaucgagaaggaauuuagcgagguugaaggccggauucaggaccuugagaaauacguggaggauacaaagaucgaccuguggucuuauaacgccgaacuccugguggcucuggagaaccaacauaccaucgaucucacggacuccgaaaugaauaaacuguucgagaagaccaaaaagcagcuuagagaaaacgcggaggauauggggaauggaugcuuuaagauuuaccacaaaugugacaacgccugcaucggcagcauucgcaaugggacauaugaucaugacgucuaccgggacgaggcucugaacaauagauuccagaucaagggcguggaacucaaaucuggauacaaggauuggauucuguggaucuccuuugccaucagcugcuuccuucuguguguugcccuccugggcuuuauuaugugggcuugccagaaagggaacauccgcuguaauauuugcaucuga

SEQ ID NO: 204297 - RNA, 1701 nt, Artificial Sequence; identical to SEQ ID NO: 201955
  derived and/or modified CDS sequence (opt5) from hemagglutinin__InfluenzaA__AHZ40618

SEQ ID NO: 204298 - RNA, 1701 nt, Artificial Sequence; identical to SEQ ID NO: 201994
  derived and/or modified CDS sequence (opt5) from hemagglutinin__InfluenzaA__AHZ40626

SEQ ID NO: 204299 - RNA, 1701 nt, Artificial Sequence; identical to SEQ ID NO: 201955
  derived and/or modified CDS sequence (opt5) from hemagglutinin__InfluenzaA__AHZ40638

SEQ ID NO: 204300 - RNA, 1701 nt, Artificial Sequence; identical to SEQ ID NO: 201930
  derived and/or modified CDS sequence (opt5) from hemagglutinin__InfluenzaA__AHZ40650

SEQ ID NO: 204301 - RNA, 1701 nt, Artificial Sequence
  derived and/or modified CDS sequence (opt5) from hemagglutinin__InfluenzaA__AHZ40662
augaagaccaucauugcccugagcuacauccucugccugguguucgcucaggagcuucccggcaacgacgauuccacagccacgcugugucucgggcaccaugcggucccuaauggaaccauuguuaaaacaaucaccaacgacagaauugaagugacaaaugcuaccgagcuggugcaaucuagcuccacaggcgaaaucugcaacucuccgcaccagauccuugauggggagaauuguacccugauugacgcccuccugggagauccccagugcgacggcuuucagaacaagaaaugggaucuguucgucgaacggagcaaggcccauuccaauuguuauccuuacgacgugcccgauuaugcuucucuccgcagccugguugccuccagcgggacgcuugaguuuaacaaugagucuuucaacuggaccggagugacacaaaauggcaccuccagcgcuugcaucagacggucuaacaauuccuuuuucagccgccugaacuggcucacacaccugaauuuuaaauacccugcccuuaacgucaccauucccaacaaugaacaguucgacaagcuguauaucuggggcgugcaucacccugggacggauaaggaccagauuuuucucuacgcgcaggccucuggaagaaucacaguuuccaccaaacggagccaacagacagugauuccgaacaucggcucccgccccagaguccggaauaucccuucucgcgugagcauuuauuggaccaucgugaagcccggggauauucugcugaucaacuccaccggaaaucucauugcuccuagaggcuacuucaaaauccggagcgggaagucuuccaucaugcgcagcgacgcccccauuggaaaauguaacucugcuugcaucacaccgaauggcagcauuccuaacgacaagcccuuucagaaugucaacagaaucacguacggcgccuguccucgguauguuaagcagaauacccugaaacuugcgacagggaugcgcaacgugcccgagaagcaaaccagaggaauuuucggcgccaucgcuggguuuaucgaaaauggaugggagggcaugguggaugggugguacggauuccggcaccagaacuccgagggcagaggccaggccgcugaccugaaaucuacacaagccgccauugaucagaucaaugggaagcucaaccgccugauuggaaaaaccaacgaaaaguuccaucagaucgagaaagaauuuagcgaggucgaaggccggauucaggaccuugagaaguauguggaggauacgaagaucgaccugugguccuacaaugcugaacuccugguugcgcuggagaaccaacacacaauugaucucaccgacagcgaaaugaauaaacuguucgagaagaccaaaaagcagcuuagagaaaacgccgaggauauggggaauggaugcuuuaaaaucuaucauaagugugacaacgcuugcaucggcucuauucgcaaugggacauacgaucacgacguguaucgggacgaggcccugaacaauagauuccagaucaagggcgucgaacucaaauccggauacaaggauuggauucuguggaucagcuuugccauuucuugcuuccuucuguguguggcucuccugggcuuuaucaugugggccugccagaaagggaacauccgcuguaauauuugcaucuga

SEQ ID NO: 204302 - RNA, 1701 nt, Artificial Sequence; identical to SEQ ID NO: 201975
  derived and/or modified CDS sequence (opt5) from hemagglutinin__InfluenzaA__AHZ40674

SEQ ID NO: 204303 - RNA, 1701 nt, Artificial Sequence; identical to SEQ ID NO: 201955
  derived and/or modified CDS sequence (opt5) from hemagglutinin__InfluenzaA__AHZ40686

SEQ ID NO: 204304 - RNA, 1701 nt, Artificial Sequence; identical to SEQ ID NO: 201940
  derived and/or modified CDS sequence (opt5) from hemagglutinin__InfluenzaA__AHZ40698

SEQ ID NO: 204305 - RNA, 1701 nt, Artificial Sequence; identical to SEQ ID NO: 201940
  derived and/or modified CDS sequence (opt5) from hemagglutinin__InfluenzaA__AHZ40710

SEQ ID NO: 204306 - RNA, 1701 nt, Artificial Sequence; identical to SEQ ID NO: 202066
  derived and/or modified CDS sequence (opt5) from hemagglutinin__InfluenzaA__AHZ40722

SEQ ID NO: 204307 - RNA, 1701 nt, Artificial Sequence; identical to SEQ ID NO: 201963
  derived and/or modified CDS sequence (opt5) from hemagglutinin__InfluenzaA__AHZ40734

SEQ ID NO: 204308 - RNA, 1701 nt, Artificial Sequence; identical to SEQ ID NO: 202066
  derived and/or modified CDS sequence (opt5) from hemagglutinin__InfluenzaA__AHZ40746

SEQ ID NO: 204309 - RNA, 1701 nt, Artificial Sequence; identical to SEQ ID NO: 204259
  derived and/or modified CDS sequence (opt5) from hemagglutinin__InfluenzaA__AHZ40758

SEQ ID NO: 204310 - RNA, 1701 nt, Artificial Sequence; identical to SEQ ID NO: 194739
  derived and/or modified CDS sequence (opt5) from hemagglutinin__InfluenzaA__AHZ40782

SEQ ID NO: 204311 - RNA, 1701 nt, Artificial Sequence; identical to SEQ ID NO: 194739
  derived and/or modified CDS sequence (opt5) from hemagglutinin__InfluenzaA__AHZ40793

SEQ ID NO: 204312 - RNA, 1701 nt, Artificial Sequence; identical to SEQ ID NO: 194739
  derived and/or modified CDS sequence (opt5) from hemagglutinin__InfluenzaA__AHZ40804

SEQ ID NO: 204313 - RNA, 1701 nt, Artificial Sequence
  derived and/or modified CDS sequence (opt5) from hemagglutinin__InfluenzaA__AHZ40815
augaaggccauccuggugguccuccuguacaccuucgcuacagccaacgcggacacgcuuugcauuggcuaucacgcuaauaacagcaccgauacaguugacaccgugcuggagaagaaugugacagucacccauuccgugaaccuccuggaagauaagcacaaugggaaacuuuguaagcugagaggaguugcuccccuccaucugggcaaaugcaacaucgccggguggauucugggaaauccugagugugaaucucucagcacagccuccucuuggagcuacaucguggagaccccguccucugacaacggcacgugcuaucccggggauuuuauugacuacgaagaacugcgggagcagcuuagcuccgucagcucuuucgaacgcuuugagaucuucccuaagaccuccagcuggcccaaucacgauucuaacaagggagugacagccgcuuguccucaugccggcgcgaaauccuuuuauaagaaucugaucuggcucguuaaaaagggcaacagcuaccccaaacugucuaaguccuauauuaaugacaaggggaaagaagugcuuguccuguggggaauccaccacccuagcaccuccgccgaucaacagucucucuaccagaacgcugacgccuacguguucgugggcagcuccagauauagcaagaaauuuaagccggagauugcuauccggcccaaaguccgcgauagagaggggcggaugaauuacuauuggacacugguugaaccuggagacaagauuaccuucgaggccacgggcaaccugguggugccccgcuacgcguuugccauggaaagaaacgcugggucuggaaucauuaucuccgauacaccuguccaugacugcaauaccacaugucagacccccaaaggcgccaucaacaccagccucccguuccaaaauauucacccuaucacaauuggcaagugccccaaguaugugaaaucuacgaagcugcggcuugcuaccgggcugcgcaacaucccuagcauucaguccagaggacucuuuggcgccaucgccggguucaucgagggaggcuggacagggaugguugacggaugguacggcuaucaucaccagaaugaacagggcucuggguacgcugcggaucugaaaagcacccaaaacgccauugacgagaucacaaauaaggugaacuccgucauugagaaaaugaauacccaguuuacggcugugggaaaggaguucaaccaccuugagaagcggaucgaaaaucugaacaaaaagguugaugacggcuuccucgauauuuggacauacaaugccgagcugcuggugcuccuggaaaacgagcgcacccuugacuaucaugauagcaaugucaaaaaccuguacgagaaggugagaucucagcucaaaaacaaugccaaggaaaucgggaacggauguuuugaguucuaucacaagugcgacaauaccuguauggaauccgucaaaaacggcacauacgauuaucccaaguacagcgaggaagcuaaacugaaucgggaggagaucgacggggugaaacuugaaucuacccgcauuuaucagauccuggccauuuacuccacaguugcgagcucccucgugcuggucgugucucugggcgcuaucagcuuuuggaugugcuccaacggaucucuccaaugcagaauuuguaucuga

SEQ ID NO: 204314 - RNA, 1701 nt, Artificial Sequence
  derived and/or modified CDS sequence (opt5) from hemagglutinin__InfluenzaA__AHZ40826
augaaggccauccuggugguccuccuguacaccuucgcuacagccaacgcggacacgcuuugcauuggcuaucacgcuaauaacagcaccgauacaguugacaccgugcuggagaaaaaugugacagucacccauuccgugaaccuccuggaagauaagcacaaugggaaacuuuguaagcugagaggaguugcuccccuccaucugggcaaaugcaacaucgccggguggauucugggaaauccugagugugaaucucucagcacagccuccucuuggagcuacaucguggagaccccguccucugacaacggcacgugcuaucccggggauuuuauugacuacgaagaacugcgggagcagcuuagcuccgucagcucuuucgaacgcuuugagaucuucccuaagaccuccagcuggcccaaucacgauucuaacaagggagugacagccgcuuguccucaugccggcgcgaaauccuuuuauaagaaucugaucuggcucguuaaaaagggcaacagcuaccccaaacugucuaaguccuauauuaaugacaaggggaaagaagugcuuguccuguggggaauccaccacccuagcaccuccgccgaucaacagucuauuuaccagaacgcugacgccuacguguucgugggcagcuccagauauagcaagaaauuuaagccggagaucgcuauucggcccaaaguccgcgaucaggaggggagaaugaauuacuauuggacacucguugaaccuggagacaagaucaccuucgaggccacgggcaaccugguggugccccgguacgcguuugccauggaacgcaacgcugggucuggaauuaucaucuccgauacaccuguccaugacugcaauaccacaugucaaacccccaaaggcgccauuaacaccagccugccguuccagaauauccacccuauuacaaucggcaagugccccaaguaugugaaaucuacgaagcucagacuggcuaccgggcuucggaacauuccuagcauccagucccgcggacuguuuggcgccaucgccggguucauugagggaggcuggacagggaugguugacggaugguacggcuaucaucaccagaaugaacaaggcucuggguacgcugcggaucucaaaagcacccagaacgccaucgacgagauuacaaauaaggugaacuccgucaucgagaaaaugaauacccaguuuacggcugugggaaaggaguucaaccaccuggagaagagaauugaaaaucuuaacaaaaagguugaugacggcuuccuggauaucuggacauacaaugccgagcuccuggugcugcucgaaaacgagcggacccuggacuaucaugauagcaaugucaaaaaccuuuacgagaaggugcgcucucagcugaaaaacaaugccaaggaaaucgggaacggauguuuugaguucuaucacaagugcgacaauaccuguauggaauccgucaaaaacggcacauacgauuaucccaaguacagcgaggaagcuaaacucaauagagaggagauugacggggugaagcuggaaucuacccggaucuaucaaauucuugccaucuacuccacaguugcgagcucccuggugcucgucgugucucugggcgcuauuagcuuuuggaugugcuccaacggaucucugcagugccgcaucuguauuuga

SEQ ID NO: 204315 - RNA, 1701 nt, Artificial Sequence
  derived and/or modified CDS sequence (opt5) from hemagglutinin__InfluenzaA__AHZ40848
augaaggccauccuggugguccuccuguacaccuucgcuacagccaacgcggacacgcuuugcauuggcuaucacgcuaauaacagcaccgauacaguugacaccgugcuggagaaaaaugugacagucacccauuccgugaaccuccuggaagauaagcacaaugggaaacuuuguaagcugagaggaguugcuccccuccaucugggcaaaugcaacaucgccggguggauucugggaaauccugagugugaaucucucagcacagccuccucuuggagcuacaucguggagaccccguccucugacaacggcacgugcuaucccggggauuuuauugacuacgaagaacugcgggagcagcuuagcuccgucagcucuuucgaacgcuuugagaucuucccuaagaccuccagcuggcccaaucacgauucuaacaagggagugacagccgcuuguccucaugccggcgcgaaauccuuuuauaagaaucugaucuggcucguuaaagaaggcaacagcuaccccaagcugucuaaauccuauauuaaugacaaggggaaggaggugcuuguccuguggggaauccaccacccuagcaccuccgccgagcaacagucucucuaccagaacgcugaugccuacguguucgugggcagcuccagauauagcaaaaaguuuaaaccggaaauugcugcccggcccaagguccgcgggcaggcgggaagaaugaauuacuauuggacacugguugagccuggcgacaaaaucaccuucgaagccacggggaaccugguggugccccgguacgcuuuugccauggagcgcaacgcuggaucuggcauuaucauuuccgauacaccuguccaugacugcaauaccacaugucaaacccccaagggcgccaucaacaccagccucccguuccagaauauccacccuauuacaaucgggaaaugccccaaguaugugaagucuacgaaacugagacuugccaccggacugcggaacauuccuagcauccagucccgcggccucuuuggggcuauugcgggauucaucgaaggcggguggacaggaaugguugauggcugguacggcuaucaucaccagaaugagcaagggucuggauacgccgcugaccuuaagagcacccagaacgccaucgacgagauuacaaauaaagugaacuccgucaucgaaaagaugaauacccaguuuacggccgugggcaaagaguucaaccaccuggaaaagagaauugagaaucugaacaagaaaguugaugacggguuccucgauaucuggacauacaaugcugaacugcuggugcuccuggagaacgagcggacccuugacuaucaugauagcaaugucaagaaccuguacgaaaaagugcgcucucagcucaagaacaaugccaaagagauuggaaacggcuguuuugaguucuaucacaagugcgacaauaccuguauggaguccgucaagaacgggacauacgauuaucccaaauacagcgaagaggcgaagcugaauagagaggaaaucgacggcgugaaacuugagucuacccggaucuaucaaauucuggcuaucuacuccacaguugccagcucccucgugcuggucgugucucugggagccauuagcuuuuggaugugcuccaacggcucucuccagugccgcaucuguauuuga

SEQ ID NO: 204316 - RNA, 1701 nt, Artificial Sequence
  derived and/or modified CDS sequence (opt5) from hemagglutinin__InfluenzaA__AHZ40881
augaaggccauccuggugguccuccuguacaccuucgcuacagccaacgcggacacgcuuugcauuggcuaucacgcuaauaacagcaccgauacaguugacaccgugcuggagaagaaugugacagucacccauuccgugaaccuccuggaagauaagcacaaugggaaacuuuguaagcugagaggaguugcuccccuccaucugggcaaaugcaacaucgccggguggauucugggaaauccugagugugaaucucucagcacagccuccucuuggagcuacaucguggagaccccguccucugacaacggcacgugcuaucccggggauuuuauugacuacgaagaacugcgggagcagcuuagcuccgucagcucuuucgaacgcuuugagaucuucccuaagaccuccagcuggcccaaucacgauucuaacaagggagugacagccgcuuguccucaugccggcgcgaaauccuuuuauaagaaucugaucuggcucguuaaaaagggcaacagcuaccccaaacugucuaaguccuauauuaaugacaaggggaaagaagugcuuguccuguggggaauccaccacccuagcaccuccgccgagcaacagucucucuaccagaacgcugaugccuacguguucgugggcagcuccagauauagcaagaaauuuaagccggagauugcugcccggcccaaaguccgcgggcaggcgggaagaaugaauuacuauuggacacugguugaaccuggcgacaagaucaccuucgaggccacggggaaccugguggugccccgguacgcuuuugccauggaacgcaacgcuggaucuggcauuaucauuuccgauacaccuguccaugacugcaauaccacaugucaaacccccaaaggcgccaucaacaccagccucccguuccagaauauccacccuauuacaaucgggaagugccccaaguaugugaaaucuacgaagcugagacuugccaccggacugcggaacauuccuagcauccagucccgcggccucuuuggggcuauugcgggauucaucgagggcggguggacaggaaugguugauggcugguacggcuaucaucaccagaaugaacaagggucuggauacgccgcugaccugaaaagcacccagaacgccaucgacgagauuacaaauaaggugaacuccgucaucgagaaaaugaauacccaguuuacggccgugggcaaggaguucaaccaccuugagaagagaauugaaaaucugaacaaaaagguugaugacggguuccucgauaucuggacauacaaugcugagcugcuggugcuccuggaaaacgagcggacccuugacuaucaugauagcaaugucaaaaaccuguacgagaaggugcgcucucagcucaaaaacaaugccaaggaaauuggaaacggcuguuuugaguucuaucacaagugcgacaauaccuguauggaauccgucaaaaacgggacauacgauuaucccaaguacagcgaggaagcgaaacugaauagagaggagaucgacggcgugaaacuugaaucuacccggaucuaucaaauucuggcuaucuacuccacaguugccagcucccucgugcuggucgugucucugggagccauuagcuuuuggaugugcuccaacggcucucuccagugccgcaucuguauuuga

SEQ ID NO: 204317 - RNA, 1701 nt, Artificial Sequence; identical to SEQ ID NO: 204316
  derived and/or modified CDS sequence (opt5) from hemagglutinin__InfluenzaA__AHZ40892

SEQ ID NO: 204318 - RNA, 1701 nt, Artificial Sequence; identical to SEQ ID NO: 204315
  derived and/or modified CDS sequence (opt5) from hemagglutinin__InfluenzaA__AHZ40914

SEQ ID NO: 204319 - RNA, 1701 nt, Artificial Sequence; identical to SEQ ID NO: 204316
  derived and/or modified CDS sequence (opt5) from hemagglutinin__InfluenzaA__AHZ40925

SEQ ID NO: 204320 - RNA, 1701 nt, Artificial Sequence
  derived and/or modified CDS sequence (opt5) from hemagglutinin__InfluenzaA__AHZ40936
augaaggccauccuggugguccuccuguacaccuucgcuacagccaacgcggacacgcuuugcauuggcuaucacgcuaauaacagcaccgauacaguugacaccgugcuggagaagaaugugacagucacccauuccgugaaccuccuggaagauaagcacaaugggaaacuuuguaagcugagaggaguugcuccccuccaucugggcaaaugcaacaucgccggguggauucugggaaauccugagugugaaucucucagcacagccuccucuuggagcuacaucguggagaccccguccucugacaacggcacgugcuaucccggggauuuuauugacuacgaagaacugcgggagcagcuuagcuccgucagcucuuucgaacgcuuugagaucuucccuaagaccuccagcuggcccaaucacgauucuaacaagggagugacagccgcuuguccucaugccggcgcgaaauccuuuuauaagaaucugaucuggcucguuaaaaagggcaacagcuaccccaaacugucuaaguccuauauuaaugacaaggggaaagaagugcuuguccuguggggaauccaccacccuagcaccuccgccgagcaacagucucucuaccagaacgcugaugccuacguguucgugggcagcuccagauauagcaagaaauuuaagccggagauugcugcccggcccaaaguccgcgaccaggcggggagaaugaauuacuauuggacacugguugaaccuggagauaagaucaccuucgaggccacgggcaaccugguggugccccgguacgcuuuugccauggaacgcaacgcugggucuggaauuaucauuuccgacacaccuguccaugauugcaauaccacaugucaaacccccaaaggcgccaucaacaccagccucccguuccagaauauccacccuauuacaaucggcaagugccccaaguaugugaaaucuacgaagcugagacuugccaccgggcugcggaacauuccuagcauccagucccgcggacucuuuggcgcuauugcgggguucaucgagggaggcuggacagggaugguugacggaugguacggcuaucaucaccagaaugaacaaggcucuggguacgccgcugaccugaaaagcacccagaacgccaucgaugagauuacaaauaaggugaacuccgucaucgagaaaaugaauacccaguuuacggccgugggaaaggaguucaaccaccuugagaagagaauugaaaaucugaacaaaaagguugacgauggcuuccucgacaucuggacauacaaugcugagcugcuggugcuccuggaaaacgagcggacccuugauuaucaugacagcaaugucaaaaaccuguacgagaaggugcgcucucagcucaaaaacaaugccaaggaaauugggaacggauguuuugaguucuaucacaagugcgauaauaccuguauggaauccgucaaaaacggcacauacgacuaucccaaguacagcgaggaagcgaaacugaauagagaggagaucgauggggugaaacuugaaucuacccggaucuaucaaauucuggcuaucuacuccacaguugccagcucccucgugcuggucgugucucugggcgccauuagcuuuuggaugugcuccaacggaucucuccagugccgcaucuguauuuga

SEQ ID NO: 204321 - RNA, 1701 nt, Artificial Sequence; identical to SEQ ID NO: 204315
  derived and/or modified CDS sequence (opt5) from hemagglutinin__InfluenzaA__AHZ40947

SEQ ID NO: 204322 - RNA, 1701 nt, Artificial Sequence; identical to SEQ ID NO: 204316
  derived and/or modified CDS sequence (opt5) from hemagglutinin__InfluenzaA__AHZ40958

SEQ ID NO: 204323 - RNA, 1701 nt, Artificial Sequence; identical to SEQ ID NO: 204320
  derived and/or modified CDS sequence (opt5) from hemagglutinin__InfluenzaA__AHZ40969

SEQ ID NO: 204324 - RNA, 1701 nt, Artificial Sequence; identical to SEQ ID NO: 204320
  derived and/or modified CDS sequence (opt5) from hemagglutinin__InfluenzaA__AHZ40980

SEQ ID NO: 204325 - RNA, 1701 nt, Artificial Sequence; identical to SEQ ID NO: 204320
  derived and/or modified CDS sequence (opt5) from hemagglutinin__InfluenzaA__AHZ40991

SEQ ID NO: 204326 - RNA, 1701 nt, Artificial Sequence; identical to SEQ ID NO: 204320
  derived and/or modified CDS sequence (opt5) from hemagglutinin__InfluenzaA__AHZ41002

SEQ ID NO: 204327 - RNA, 1701 nt, Artificial Sequence; identical to SEQ ID NO: 204320
  derived and/or modified CDS sequence (opt5) from hemagglutinin__InfluenzaA__AHZ41013

SEQ ID NO: 204328 - RNA, 1701 nt, Artificial Sequence; identical to SEQ ID NO: 204316
  derived and/or modified CDS sequence (opt5) from hemagglutinin__InfluenzaA__AHZ41024

SEQ ID NO: 204329 - RNA, 1701 nt, Artificial Sequence; identical to SEQ ID NO: 204316
  derived and/or modified CDS sequence (opt5) from hemagglutinin__InfluenzaA__AHZ41035

SEQ ID NO: 204330 - RNA, 1701 nt, Artificial Sequence; identical to SEQ ID NO: 204316
  derived and/or modified CDS sequence (opt5) from hemagglutinin__InfluenzaA__AHZ41046

SEQ ID NO: 204331 - RNA, 1701 nt, Artificial Sequence; identical to SEQ ID NO: 204316
  derived and/or modified CDS sequence (opt5) from hemagglutinin__InfluenzaA__AHZ41057

SEQ ID NO: 204332 - RNA, 1701 nt, Artificial Sequence; identical to SEQ ID NO: 204316
  derived and/or modified CDS sequence (opt5) from hemagglutinin__InfluenzaA__AHZ41068

SEQ ID NO: 204333 - RNA, 1701 nt, Artificial Sequence; identical to SEQ ID NO: 204320
  derived and/or modified CDS sequence (opt5) from hemagglutinin__InfluenzaA__AHZ41079

SEQ ID NO: 204334 - RNA, 1701 nt, Artificial Sequence; identical to SEQ ID NO: 204316
  derived and/or modified CDS sequence (opt5) from hemagglutinin__InfluenzaA__AHZ41090

SEQ ID NO: 204335 - RNA, 1701 nt, Artificial Sequence; identical to SEQ ID NO: 204320
  derived and/or modified CDS sequence (opt5) from hemagglutinin__InfluenzaA__AHZ41101

SEQ ID NO: 204336 - RNA, 1701 nt, Artificial Sequence; identical to SEQ ID NO: 204316
  derived and/or modified CDS sequence (opt5) from hemagglutinin__InfluenzaA__AHZ41112

SEQ ID NO: 204337 - RNA, 1701 nt, Artificial Sequence; identical to SEQ ID NO: 204316
  derived and/or modified CDS sequence (opt5) from hemagglutinin__InfluenzaA__AHZ41123

SEQ ID NO: 204338 - RNA, 1701 nt, Artificial Sequence; identical to SEQ ID NO: 204316
  derived and/or modified CDS sequence (opt5) from hemagglutinin__InfluenzaA__AHZ41134

SEQ ID NO: 204339 - RNA, 1701 nt, Artificial Sequence; identical to SEQ ID NO: 204316
  derived and/or modified CDS sequence (opt5) from hemagglutinin__InfluenzaA__AHZ41145

SEQ ID NO: 204340 - RNA, 1701 nt, Artificial Sequence; identical to SEQ ID NO: 204316
  derived and/or modified CDS sequence (opt5) from hemagglutinin__InfluenzaA__AHZ41156

SEQ ID NO: 204341 - RNA, 1701 nt, Artificial Sequence; identical to SEQ ID NO: 204316
  derived and/or modified CDS sequence (opt5) from hemagglutinin__InfluenzaA__AHZ41167

SEQ ID NO: 204342 - RNA, 1701 nt, Artificial Sequence; identical to SEQ ID NO: 204316
  derived and/or modified CDS sequence (opt5) from hemagglutinin__InfluenzaA__AHZ41178

SEQ ID NO: 204343 - RNA, 1701 nt, Artificial Sequence; identical to SEQ ID NO: 204316
  derived and/or modified CDS sequence (opt5) from hemagglutinin__InfluenzaA__AHZ41189

SEQ ID NO: 204344 - RNA, 1701 nt, Artificial Sequence; identical to SEQ ID NO: 204315
  derived and/or modified CDS sequence (opt5) from hemagglutinin__InfluenzaA__AHZ41246

SEQ ID NO: 204345 - RNA, 1701 nt, Artificial Sequence; identical to SEQ ID NO: 204320
  derived and/or modified CDS sequence (opt5) from hemagglutinin__InfluenzaA__AHZ41263

SEQ ID NO: 204346 - RNA, 1701 nt, Artificial Sequence; identical to SEQ ID NO: 204316
  derived and/or modified CDS sequence (opt5) from hemagglutinin__InfluenzaA__AHZ41281

SEQ ID NO: 204347 - RNA, 1701 nt, Artificial Sequence; identical to SEQ ID NO: 204316
  derived and/or modified CDS sequence (opt5) from hemagglutinin__InfluenzaA__AHZ41292

SEQ ID NO: 204348 - RNA, 1701 nt, Artificial Sequence; identical to SEQ ID NO: 204315
  derived and/or modified CDS sequence (opt5) from hemagglutinin__InfluenzaA__AHZ41303

SEQ ID NO: 204349 - RNA, 1701 nt, Artificial Sequence; identical to SEQ ID NO: 204315
  derived and/or modified CDS sequence (opt5) from hemagglutinin__InfluenzaA__AHZ41314

SEQ ID NO: 204350 - RNA, 1701 nt, Artificial Sequence; identical to SEQ ID NO: 204315
  derived and/or modified CDS sequence (opt5) from hemagglutinin__InfluenzaA__AHZ41325

SEQ ID NO: 204351 - RNA, 1701 nt, Artificial Sequence; identical to SEQ ID NO: 204315
  derived and/or modified CDS sequence (opt5) from hemagglutinin__InfluenzaA__AHZ41336

SEQ ID NO: 204352 - RNA, 1701 nt, Artificial Sequence; identical to SEQ ID NO: 204315
  derived and/or modified CDS sequence (opt5) from hemagglutinin__InfluenzaA__AHZ41347

SEQ ID NO: 204353 - RNA, 1701 nt, Artificial Sequence; identical to SEQ ID NO: 204316
  derived and/or modified CDS sequence (opt5) from hemagglutinin__InfluenzaA__AHZ41358

SEQ ID NO: 204354 - RNA, 1701 nt, Artificial Sequence; identical to SEQ ID NO: 204316
  derived and/or modified CDS sequence (opt5) from hemagglutinin__InfluenzaA__AHZ41366

SEQ ID NO: 204355 - RNA, 1701 nt, Artificial Sequence; identical to SEQ ID NO: 204320
  derived and/or modified CDS sequence (opt5) from hemagglutinin__InfluenzaA__AHZ41377

SEQ ID NO: 204356 - RNA, 1701 nt, Artificial Sequence; identical to SEQ ID NO: 204316
  derived and/or modified CDS sequence (opt5) from hemagglutinin__InfluenzaA__AHZ41388

SEQ ID NO: 204357 - RNA, 1701 nt, Artificial Sequence; identical to SEQ ID NO: 204320
  derived and/or modified CDS sequence (opt5) from hemagglutinin__InfluenzaA__AHZ41410

SEQ ID NO: 204358 - RNA, 1701 nt, Artificial Sequence; identical to SEQ ID NO: 204316
  derived and/or modified CDS sequence (opt5) from hemagglutinin__InfluenzaA__AHZ41432

SEQ ID NO: 204359 - RNA, 1701 nt, Artificial Sequence
  derived and/or modified CDS sequence (opt5) from hemagglutinin__InfluenzaA__AHZ41441
augaaggccauccuggugguccuccuguacaccuucgcuacagccaacgcggacacgcuuugcauuggcuaucacgcuaauaacagcaccgauacaguugacaccgugcuggagaaaaaugugacagucacccauuccgugaaccuccuggaagauaagcacaaugggaaacuuuguaagcugagaggaguugcuccccuccaucugggcaaaugcaacaucgccggguggauucugggaaauccugagugugaaucucucagcacagccuccucuuggagcuacaucguggagaccccguccucugacaacggcacgugcuaucccggggauuuuauugacuacgaagaacugcgggagcagcuuagcuccgucagcucuuucgaacgcuuugagaucuucccuaagaccuccagcuggcccaaucacgauucuaacaagggagugacagccgcuuguccucaugccggcgcgaaauccuuuuauaagaaucugaucuggcucguuaaagaaggcaacagcuaccccaagcugucuaaauccuauauuaaugacaaggggaaggaggugcuuguccuguggggaauccaccacccuagcaccuccgccgagcaacagucucucuaccagaacgcugaugccuacguguucgugggcagcuccagauauagcaaaaaguuuaaaccggaaauugcugcccggcccaagguccgcgaccaggcggggagaaugaauuacuauuggacacugguugagccuggagauaaaaucaccuucgaagccacgggcaaccugguggugccccgguacgcuuuugccauggagcgcaacgcugggucuggaauuaucauuuccgacacaccuguccaugauugcaauaccacaugucaaacccccaagggcgccaucaacaccagccucccguuccagaauauccacccuauuacaaucggcaaaugccccaaguaugugaagucuacgaaacugagacuugccaccgggcugcggaacauuccuagcauccagucccgcggacucuuuggcgcuauugcgggguucaucgaaggaggcuggacagggaugguugacggaugguacggcuaucaucaccagaaugagcaaggcucuggguacgccgcugaccuuaagagcacccagaacgccaucgaugagauuacaaauaaagugaacuccgucaucgaaaagaugaauacccaguuuacggccgugggaaaagaguucaaccaccuggaaaagagaauugagaaucugaacaagaaaguugacgauggcuuccucgacaucuggacauacaaugcugaacugcuggugcuccuggagaacgagcggacccuugauuaucaugacagcaaugucaagaaccuguacgaaaaagugcgcucucagcucaagaacaaugccaaagagauugggaacggauguuuugaguucuaucacaagugcgauaauaccuguauggaguccgucaagaacggcacauacgacuaucccaaauacagcgaagaggcgaagcugaauagagaggaaaucgauggggugaaacuugagucuacccggaucuaucaaauucuggcuaucuacuccacaguugccagcucccucgugcuggucgugucucugggcgccauuagcuuuuggaugugcuccaacggaucucuccagugccgcaucuguauuuga

SEQ ID NO: 204360 - RNA, 1701 nt, Artificial Sequence; identical to SEQ ID NO: 204315
  derived and/or modified CDS sequence (opt5) from hemagglutinin__InfluenzaA__AHZ41452

SEQ ID NO: 204361 - RNA, 1701 nt, Artificial Sequence
  derived and/or modified CDS sequence (opt5) from hemagglutinin__InfluenzaA__AHZ41463
augaaggccauccuggugguccuccuguacaccuucgcuacagccaacgcggacacgcuuugcauuggcuaucacgcuaauaacagcaccgauacaguuuacaccgugcuggagaagaaugugacagucacccauuccgugaaccuccuggaagacaagcacaaugggaaacuuuguaagcugagaggaguugcuccccuccaucugggcaaaugcaacaucgccggguggauucugggaaauccugagugugaaucucucagcacagccuccucuuggagcuauaucguggagaccccguccucugauaacggcacgugcuaccccggggacuuuauugauuaugaagaacugcgggagcagcuuagcuccgucagcucuuucgaacgcuuugagaucuucccuaagaccuccagcuggcccaaucacgacucuaacaagggagugacagccgcuuguccucaugccggcgcgaaauccuuuuacaagaaucugaucuggcucguuaaaaagggcaacagcuaucccaaacugucuaaguccuacauuaaugauaaggggaaagaagugcuuguccuguggggaauccaccacccuagcaccuccgccgagcaacagucucucuaccagaacgcugacgccuauguguucgugggcagcuccagauacagcaagaaauuuaagccggagauugcugcccggcccaaaguccgcgggcaggcgggaagaaugaauuauuacuggacacugguugaaccuggcgauaagaucaccuucgaggccacggggaaccugguggugccccgguaugcuuuugccauggaacgcaacgcuggaucuggcauuaucauuuccgacacaccuguccaugauugcaauaccacaugucaaacccccaaaggcgccaucaacaccagccucccguuccagaauauccacccuauuacaaucgggaagugccccaaguacgugaaaucuacgaagcugagacuugccaccggacugcggaacauuccuagcauccagucccgcggccucuuuggggcuauugcgggauucaucgagggcggguggacaggaaugguugacggcugguauggcuaccaucaccagaaugaacaagggucuggauacgccgcugaucugaaaagcacccagaacgccaucgacgagauuacaaauaaggugaacuccgucaucgagaaaaugaauacccaguuuacggccgugggcaaggaguucaaccaccuugagaagagaauugaaaaucugaacaaaaagguugacgauggguuccucgacaucuggacauauaaugcugagcugcuggugcuccuggaaaacgagcggacccuugauuaccaugacagcaaugucaaaaaccuguaugagaaggugcgcucucagcucaaaaacaaugccaaggaaauuggaaacggcuguuuugaguucuaccacaagugcgauaauaccuguauggaauccgucaaaaacgggacauaugacuaccccaaguauagcgaggaagcgaaacugaauagagaggagaucgauggcgugaaacuugaaucuacccggaucuaccaaauucuggcuaucuacuccacaguugccagcucccucgugcuggucgugucucugggagccauuagcuuuuggaugugcuccaacggcucucuccagugccgcaucuguauuuga

SEQ ID NO: 204362 - RNA, 1701 nt, Artificial Sequence; identical to SEQ ID NO: 204315
  derived and/or modified CDS sequence (opt5) from hemagglutinin__InfluenzaA__AHZ41473

SEQ ID NO: 204363 - RNA, 1701 nt, Artificial Sequence; identical to SEQ ID NO: 204315
  derived and/or modified CDS sequence (opt5) from hemagglutinin__InfluenzaA__AHZ41484

SEQ ID NO: 204364 - RNA, 1701 nt, Artificial Sequence; identical to SEQ ID NO: 204320
  derived and/or modified CDS sequence (opt5) from hemagglutinin__InfluenzaA__AHZ41495

SEQ ID NO: 204365 - RNA, 1701 nt, Artificial Sequence; identical to SEQ ID NO: 204315
  derived and/or modified CDS sequence (opt5) from hemagglutinin__InfluenzaA__AHZ41506

SEQ ID NO: 204366 - RNA, 1701 nt, Artificial Sequence
  derived and/or modified CDS sequence (opt5) from hemagglutinin__InfluenzaA__AHZ41517
augaaggccauccuggugguccuccuguacaccuucgcuacagccaacgcggacacgcuuugcauuggcuaucacgcuaauaacagcaccgauacaguugacaccgugcuggagaaaaaugugacagucacccauuccgugaaccuccuggaagauaagcacaaugggaaacuuuguaagcugagaggaguugcuccccuccaucugggcaaaugcaacaucgccggguggauucugggaaauccugagugugaaucucucagcacagccuccucuuggagcuacaucguggagaccccguccucugacaacggcacgugcuaucccggggauuuuauugacuacgaagaacugcgggagcagcuuagcuccgucagcucuuucgaacgcuuugagaucuucccuaagaccuccagcuggcccaaucacgauucuaacaagggagugacagccgcuuguccucaugccggcgcgaaauccuuuuauaagaaucugaucuggcucguuaaaaagggcaacagcuaccccaaacugucugaauccuauauuaaugacaaggggaaggaggugcuuguccuguggggaauccaccacccuagcaccuccgccgagcaacagucucucuaccagaacgcugaugccuacguguucgugggcagcuccagauauagcaaaaaguuuaaaccggaaauugcugcccggcccaagguccgcgggcaggcgggaagaaugaauuacuauuggacacugguugagccuggcgacaaaaucaccuucgaagccacggggaaccugguggugccccgguacgcuuuugccauggagcgcaacgcuggaucuggcauuaucauuuccgauacaccuguccaugacugcaauaccacaugucaaacccccaagggcgccaucaacaccagccucccguuccagaauauccacccuauuacaaucgggaaaugccccaaguaugugaagucuacgaaacugagacuugccaccggacugcggaacauuccuagcauccagucccgcggccucuuuggggcuauugcgggauucaucgaaggcggguggacaggaaugguugauggcugguacggcuaucaucaccagaaugagcaagggucuggauacgccgcugaccuuaagagcacccagaacgccaucgacgagauuacaaauaaagugaacuccgucaucgaaaagaugaauacccaguuuacggccgugggcaaagaguucaaccaccuggaaaagagaauugagaaucugaacaagaaaguugaugacggguuccucgauaucuggacauacaaugcugaacugcuggugcuccuggagaacgagcggacccuugacuaucaugauagcaaugucaagaaccuguacgaaaaagugcgcucucagcucaagaacaaugccaaagagauuggaaacggcuguuuugaguucuaucacaagugcgacaauaccuguauggaguccgucaagaacgggacauacgauuaucccaaauacagcgaagaggcgaagcugaauagagaggaaaucgacggcgugaaacuugagucuacccggaucuaucaaauucuggcuaucuacuccacaguugccagcucccucgugcuggucgugucucugggagccauuagcuuuuggaugugcuccaacggcucucuccagugccgcaucuguauuuga

SEQ ID NO: 204367 - RNA, 1701 nt, Artificial Sequence
  derived and/or modified CDS sequence (opt5) from hemagglutinin__InfluenzaA__AHZ41528
augaaggccauccuggugguccuccuguacaccuucgcuacagccaacgcggacacgcuuugcauuggcuaucacgcuaauaacagcaccgauacaguugacaccgugcuggagaaaaaugugacagucacccauuccgugaaccuccuggaagauaagcacaaugggaaacuuuguaagcugagaggaguugcuccccuccaucugggcaaaugcaacaucgccggguggauucugggaaauccugagugugaaucucucagcacagccuccucuuggagcuacaucguggagaccccguccucugacaacggcacgugcuaucccggggauuuuauugacuacgaagaacugcgggagcagcuuagcuccgucagcucuuucgaacgcuuugagaucuucccuaagaccuccagcuggcccaaucacgauucuaacaagggagugacagccgcuuguccucaugccggcgcgaaauccuuuuauaagaaucugaucuggcucguuaaaaagggcaacagcuaccccaaacugucugaauccuauauuaaugacaaggggaaggaggugcuuguccuguggggaauccaccacccuagcaccuccgccgaucaacagucucucuaccagaacgcugacgccuacguguucgugggcagcuccagauauagcaaaaaguuuaaaccggagauugcugcccggcccaagguccgcgggcaggcgggaagaaugaauuacuauuggacacugguugaaccuggcgauaaaaucaccuucgaggccacggggaaccugguggugccccgguacgcuuuugccauggaacgcaacgcuggaucuggcauuaucauuuccgacacaccuguccaugauugcaauaccacaugucaaacccccaagggcgccaucaacaccagccucccguuccagaauauccacccuauuacaaucgggaaaugccccaaguaugugaagucuacgaaacugagacuugccaccggacugcggaacauuccuagcauccagucccgcggccucuuuggggcuauugcgggauucaucgagggcggguggacaggaaugguugacggcugguacggcuaucaucaccagaaugaacaagggucuggauacgccgcugaccuuaagagcacccagaacgccaucgaugagauuacaaauaaagugaacuccgucaucgagaagaugaauacccaguuuacggccgugggcaaagaguucaaccaccuggagaagagaauugaaaaucugaacaagaaaguugacgauggguuccucgacaucuggacauacaaugcugagcugcuggugcuccuggaaaacgagcggacccuugauuaucaugacagcaaugucaagaaccuguacgagaaagugcgcucucagcucaagaacaaugccaaagaaauuggaaacggcuguuuugaguucuaucacaagugcgauaauaccuguauggaauccgucaagaacgggacauacgacuaucccaaauacagcgaggaagcgaagcugaauagagaggagaucgauggcgugaaacuugaaucuacccggaucuaucaaauucuggcuaucuacuccacaguugccagcucccucgugcuggucgugucucugggagccauuagcuuuuggaugugcuccaacggcucucuccagugccgcaucuguauuuga

SEQ ID NO: 204368 - RNA, 1701 nt, Artificial Sequence; identical to SEQ ID NO: 204320
  derived and/or modified CDS sequence (opt5) from hemagglutinin__InfluenzaA__AHZ41539

SEQ ID NO: 204369 - RNA, 1701 nt, Artificial Sequence; identical to SEQ ID NO: 204315
  derived and/or modified CDS sequence (opt5) from hemagglutinin__InfluenzaA__AHZ41550

SEQ ID NO: 204370 - RNA, 1701 nt, Artificial Sequence; identical to SEQ ID NO: 204316
  derived and/or modified CDS sequence (opt5) from hemagglutinin__InfluenzaA__AHZ41561

SEQ ID NO: 204371 - RNA, 1701 nt, Artificial Sequence
  derived and/or modified CDS sequence (opt5) from hemagglutinin__InfluenzaA__AHZ41572
augaaggccauccuggugguccuccuguacaccuucgcuacagccaacgcggacacgcuuugcauuggcuaucacgcuaauaacagcaccgauacaguugacaccgugcuggagaaaaaugugacagucacccauuccgugaaccuccuggaagauaagcacaaugggaaacuuuguaagcugagaggaguugcuccccuccaucugggcaaaugcaacaucgccggguggauucugggaaauccugagugugaaucucucagcacagccuccucuuggagcuacaucguggagaccccguccucugacaacggcacgugcuaucccggggauuuuauugacuacgaagaacugcgggagcagcuuagcuccgucagcucuuucgaacgcuuugagaucuucccuaagaccuccagcuggcccaaucacgauucuaacaagggagugacagccgcuuguccucaugccggcgcgaaauccuuuuauaagaaucugaucuggcucguuaaaaagggcaacagcuaccccaaacugucuaaguccuauauuaaugacaaggggaaagaagugcuuguccuguggggaauccaccacccuagcaccuccgccgagcaacagucucucuaccagaacgcugaugccuacguguucgugggcagcuccagauauagcaagaaauuuaagccggagauugcugcccggcccaaaguccgcgggcaggcgggaagaaugaauuacuauuggacacugguugaaccuggcgacgagaucaccuucgaagccacggggaaccugguggugccccgguacgcuuuugccauggagcgcaacgcuggaucuggcauuaucauuuccgauacaccuguccaugacugcaauaccacaugucaaacccccaagggcgccaucaacaccagccucccguuccagaauauccacccuauuacaaucgggaaaugccccaaguaugugaagucuacgaaacugagacuugccaccggacugcggaacauuccuagcauccagucccgcggccucuuuggggcuauugcgggauucaucgaaggcggguggacaggaaugguugauggcugguacggcuaucaucaccagaaugagcaagggucuggauacgccgcugaccuuaagagcacccagaacgccaucgacgagauuacaaauaaagugaacuccgucaucgaaaagaugaauacccaguuuacggccgugggcaaagaguucaaccaccuggaaaagagaauugagaaucugaacaagaaaguugaugacggguuccucgauaucuggacauacaaugcugaacugcuggugcuccuggagaacgagcggacccuugacuaucaugauagcaaugucaagaaccuguacgaaaaagugcgcucucagcucaagaacaaugccaaagagauuggaaacggcuguuuugaguucuaucacaagugcgacaauaccuguauggaguccgucaagaacgggacauacgauuaucccaaauacagcgaagaggcgaagcugaauagagaggaaaucgacggcgugaaacuugagucuacccggaucuaucaaauucuggcuaucuacuccacaguugccagcucccucgugcuggucgugucucugggagccauuagcuuuuggaugugcuccaacggcucucuccagugccgcaucuguauuuga

SEQ ID NO: 204372 - RNA, 1701 nt, Artificial Sequence; identical to SEQ ID NO: 204320
  derived and/or modified CDS sequence (opt5) from hemagglutinin__InfluenzaA__AHZ41583

SEQ ID NO: 204373 - RNA, 1701 nt, Artificial Sequence; identical to SEQ ID NO: 204315
  derived and/or modified CDS sequence (opt5) from hemagglutinin__InfluenzaA__AHZ41594

SEQ ID NO: 204374 - RNA, 1701 nt, Artificial Sequence
  derived and/or modified CDS sequence (opt5) from hemagglutinin__InfluenzaA__AHZ41605
augaaggccauccuggugguccuccuguacaccuucgcuacagccaacgcggacacgcuuugcauuggcuaucacgcuaauaacagcaccgauacaguugacaccgugcuggagaaaaaugugacagucacccauuccgugaaccuccuggaagauaagcacaaugggaaacuuuguaagcugagaggaguugcuccccuccaucugggcaaaugcaacaucgccggguggauucugggaaauccugagugugaaucucucagcacagccuccucuuggagcuacaucguggagaccccguccucugacaacggcacgugcuaucccggggauuuuauugacuacgaagaacugcgggagcagcuuagcuccgucagcucuuucgaacgcuuugagaucuucccuaauaccuccagcuggcccaaccacgauucuaauaagggagugacagccgcuuguccucaugccggcgcgaaguccuuuuauaaaaaccugaucuggcucguuaagaaaggcaauagcuaccccaagcugucuaaauccuauauuaacgacaaggggaaggaagugcuuguccuguggggaauccaccacccuagcaccuccgccgagcaacagucucucuaccagaaugcugaugccuacguguucgugggcagcuccagauauagcaaaaaguuuaaaccggagauugcugcccggcccaaggucauggggcaggcgggacgcaugaacuacuauuggacacugguugaaccuggcgacaaaaucaccuucgaggccacggggaaccugguggugcccagauacgcuuuugccauggaacggaaugcuggaucuggcauuaucauuuccgauacaccuguccaugacugcaacaccacaugucaaacccccaagggcgccaucaauaccagccucccguuccagaacauccacccuauuacaaucgggaaaugccccaaguaugugaagucuacgaaacugcgccuugccaccggacugagaaauauuccuagcauccagucccggggccucuuuggggcuauugcgggauucaucgagggcggguggacaggaaugguugauggcugguacggcuaucaucaccagaacgaacaagggucuggauacgccgcugaccugaaguccacccagaaugccaucgacgagauuacaaacaaagugaauagcgucaucgagaagaugaacacccaguuuacggccgugggcaaagaguucaaucaccuugagaagcgcauugaaaaccugaauaagaaaguugaugacggguuccucgauaucuggacauacaacgcugagcugcuggugcuccuggaaaaugagagaacccuugacuaucaugauagcaacgucaagaaccuguacgagaaagugcggucucagcucaagaauaacgccaaagaaauuggaaauggcuguuuugaguucuaucacaagugcgacaacaccuguauggaauccgucaagaaugggacauacgauuaucccaaauacagcgaggaagcgaagcugaaccgcgaggagaucgacggcgugaaacuugaaucuaccagaaucuaucaaauucuggcuaucuacuccacaguugccagcucccucgugcuggucgugucucugggagccauuagcuuuuggaugugcuccaauggcucucuccagugccggaucuguauuuga

SEQ ID NO: 204375 - RNA, 1701 nt, Artificial Sequence; identical to SEQ ID NO: 204315
  derived and/or modified CDS sequence (opt5) from hemagglutinin__InfluenzaA__AHZ41616

SEQ ID NO: 204376 - RNA, 1701 nt, Artificial Sequence; identical to SEQ ID NO: 204320
  derived and/or modified CDS sequence (opt5) from hemagglutinin__InfluenzaA__AHZ41627

SEQ ID NO: 204377 - RNA, 1701 nt, Artificial Sequence; identical to SEQ ID NO: 204320
  derived and/or modified CDS sequence (opt5) from hemagglutinin__InfluenzaA__AHZ41638

SEQ ID NO: 204378 - RNA, 1701 nt, Artificial Sequence; identical to SEQ ID NO: 204316
  derived and/or modified CDS sequence (opt5) from hemagglutinin__InfluenzaA__AHZ41649

SEQ ID NO: 204379 - RNA, 1701 nt, Artificial Sequence; identical to SEQ ID NO: 204316
  derived and/or modified CDS sequence (opt5) from hemagglutinin__InfluenzaA__AHZ41660

SEQ ID NO: 204380 - RNA, 1701 nt, Artificial Sequence; identical to SEQ ID NO: 204320
  derived and/or modified CDS sequence (opt5) from hemagglutinin__InfluenzaA__AHZ41671

SEQ ID NO: 204381 - RNA, 1701 nt, Artificial Sequence; identical to SEQ ID NO: 204320
  derived and/or modified CDS sequence (opt5) from hemagglutinin__InfluenzaA__AHZ41682

SEQ ID NO: 204382 - RNA, 1701 nt, Artificial Sequence; identical to SEQ ID NO: 204320
  derived and/or modified CDS sequence (opt5) from hemagglutinin__InfluenzaA__AHZ41693

SEQ ID NO: 204383 - RNA, 1701 nt, Artificial Sequence; identical to SEQ ID NO: 204320
  derived and/or modified CDS sequence (opt5) from hemagglutinin__InfluenzaA__AHZ41704

SEQ ID NO: 204384 - RNA, 1701 nt, Artificial Sequence; identical to SEQ ID NO: 204320
  derived and/or modified CDS sequence (opt5) from hemagglutinin__InfluenzaA__AHZ41715

SEQ ID NO: 204385 - RNA, 1701 nt, Artificial Sequence; identical to SEQ ID NO: 204320
  derived and/or modified CDS sequence (opt5) from hemagglutinin__InfluenzaA__AHZ41726

SEQ ID NO: 204386 - RNA, 1701 nt, Artificial Sequence; identical to SEQ ID NO: 204320
  derived and/or modified CDS sequence (opt5) from hemagglutinin__InfluenzaA__AHZ41737

SEQ ID NO: 204387 - RNA, 1701 nt, Artificial Sequence; identical to SEQ ID NO: 204320
  derived and/or modified CDS sequence (opt5) from hemagglutinin__InfluenzaA__AHZ41748

SEQ ID NO: 204388 - RNA, 1701 nt, Artificial Sequence; identical to SEQ ID NO: 204320
  derived and/or modified CDS sequence (opt5) from hemagglutinin__InfluenzaA__AHZ41759

SEQ ID NO: 204389 - RNA, 1701 nt, Artificial Sequence; identical to SEQ ID NO: 202147
  derived and/or modified CDS sequence (opt5) from hemagglutinin__InfluenzaA__AHZ42561

SEQ ID NO: 204390 - RNA, 1701 nt, Artificial Sequence
  derived and/or modified CDS sequence (opt5) from hemagglutinin__InfluenzaA__AHZ42572
augaagaccaucauugcccugagcuacauccucugccugguguucgcucagaaacuucccggcaacgacaauuccacagccacgcugugucucgggcaccaugcggucccuaacggaaccauuguuaagacaaucaccaaugauagaauugaggugacaaacgcuaccgaacuggugcaaaauucuagcaucggcgagaucugcgacuccccgcaccagauucuugauggggaaaacuguacacugaucgacgcccuccugggagauccccagugcgacggcuuucagaauaaaaagugggaucuguucgucgagcggucuaaagccuauagcaacuguuacccuuaugacgugcccgauuacgcuucccuccgcucucugguugccagcuccgggacccuugaauuuaauaacgagagcuucaauuggacgggagugacccaaaacggcacaucuuccgcuugcauuagacggagcaauucuuccuuuuucagccgccugaacuggcucacccaucugaauuuuaaguauccugcccuuaacgucacaaugcccaacaaugagcaguucgacaagcuguacaucuggggcgugcaccauccugggaccgauaaagaccagauuuuucucuaugcgcagucuuccggaagaaucacgguuagcacaaagcggucccaacaggccgugauuccgaacaucggcucucgccccagaauccggaauauuccuagccgcaucuccauuuacuggaccaucgucaaacccggggauauucugcugaucaacagcacaggaaaucucaucgcuccuagaggcuacuucaagauucggucugggaaauccagcaucaugcgcucugacgcccccauuggaaaguguaagagcgaaugcaucaccccgaacggcuccauuccuaaugacaaacccuuucagaacgugaauagaaucaccuauggcgcuuguccucgguacgugaagcagucuacacugaaacuugccacggggaugcgcaacguccccgagaagcaaaccagaggaaucuucggcgcgauugccggguuuaucgaaaauggaugggagggcaugguugaugggugguauggauuccggcaccagaacagcgagggcagaggccaggcugccgaccugaaauccacacaagcugccauugaucagaucaaugggaagcucaaccgccugauuggaaaaaccaaugaaaaguuccaccagaucgagaaggaauuuagcgagguggaaggccggauucaggaccuugagaaauacguggaggauacaaagaucgaccuguggucuuauaacgccgaacuccuggucgcucuggagaaccaacauaccaucgaucucacggacuccgaaauggauaaacuguucgagaagaccaaaaagcagcuuagagaaaaugcggaggacauggggaacggaugcuuuaagauuuaccacaaaugugauaaugccugcaucggcagcauucgcaacgggacauaugaccaugacguguaccgggaugaggcucugaauaacagauuccagaucaagggcguugaacucaaaucuggauacaaggacuggauucuguggaucuccuuugccaucagcugcuuccuucuguguguggcccuccugggcuuuauuaugugggcuugccagaaagggaauauccgcuguaacauuugcaucuga

SEQ ID NO: 204391 - RNA, 1701 nt, Artificial Sequence; identical to SEQ ID NO: 203858
  derived and/or modified CDS sequence (opt5) from hemagglutinin__InfluenzaA__AHZ42584

SEQ ID NO: 204392 - RNA, 1701 nt, Artificial Sequence; identical to SEQ ID NO: 201955
  derived and/or modified CDS sequence (opt5) from hemagglutinin__InfluenzaA__AHZ42596

SEQ ID NO: 204393 - RNA, 1701 nt, Artificial Sequence; identical to SEQ ID NO: 202132
  derived and/or modified CDS sequence (opt5) from hemagglutinin__InfluenzaA__AHZ42608

SEQ ID NO: 204394 - RNA, 1701 nt, Artificial Sequence; identical to SEQ ID NO: 201955
  derived and/or modified CDS sequence (opt5) from hemagglutinin__InfluenzaA__AHZ42619

SEQ ID NO: 204395 - RNA, 1701 nt, Artificial Sequence
  derived and/or modified CDS sequence (opt5) from hemagglutinin__InfluenzaA__AHZ42631
augaagaccaucauugcccugagcuacauccucugccugguguucgcucagaaacuucccggcaacuauaauuccacagccacgcugugucucgggcaccaugcggucccuaacggaaccauuguuaagacaaucaccaaugacagaauugaggugacaaacgcuaccgaacuggugcaaaauucuagcaucggcgagaucugcgauuccccgcaccagauucuugacggggaaaacuguacacugaucgaugcccuccugggagacccccagugcgauggcuuucagaauaaaaagugggaccuguucgucgagcggucuaaagccuacagcaacuguuauccuuacgaugugcccgacuaugcuucccuccgcucucugguugccagcuccgggacccuugaauuuaauaacgagagcuucaauuggacgggagugacccaaaacggcacaucuuccgcuugcauuagacggagcaauucuuccuuuuucagccgccugaacuggcucacccaucugaauuuuaaguacccugcccuuaacgucacaaugcccaacaaugagcaguucgauaagcuguauaucuggggcgugcaccauccugggaccgacaaagaucagauuuuucucuacgcgcagucuuccggaagaaucacgguuagcacaaagcggucccaacaggccgugauuccgaacaucggcucucgccccagaauccggaauauuccuagccgcaucuccauuuacuggaccaucgucaaacccggggacauucugcugaucaacagcacaggaaaucucaucgcuccuagaggcuauuucaagauucggucugggaaauccagcaucaugcgcucugaugcccccauuggaaaguguaagagcgaaugcaucaccccgaacggcuccauuccuaaugacaaacccuuucagaacgugaauagaaucaccuacggcgcuuguccucgguaugugaagcagucuacacugaaacuugccacggggaugcgcaacguccccgagaagcaaaccagaggaaucuucggcgcgauugccggguuuaucgaaaauggaugggagggcaugguugacgggugguacggauuccggcaccagaacagcgagggcagaggccaggcugccgaucugaaauccacacaagcugccauugaccagaucaaugggaagcucaaccgccugauuggaaaaaccaaugaaaaguuccaccagaucgagaaggaauuuagcgagguggaaggccggauucaggaucuugagaaauauguggaggacacaaagaucgaucuguggucuuacaacgccgaacuccuggucgcucuggagaaccaacauaccaucgaccucacggauuccgaaaugaauaaacuguucgagaagaccaaaaagcagcuuagagaaaacgcggaggacauggggaauggaugcuuuaagauuuaucacaaaugugauaacgccugcaucggcagcauucgcaaugggacauacgaccaugauguguaccgggacgaggcucugaacaauagauuccagaucaagggcguugaacucaaaucuggauauaaggacuggauucuguggaucuccuuugccaucagcugcuuccuucuguguguggcccuccugggcuuuauuaugugggcuugccagaaagggaacauccgcuguaauauuugcaucuga

SEQ ID NO: 204396 - RNA, 1701 nt, Artificial Sequence
  derived and/or modified CDS sequence (opt5) from hemagglutinin__InfluenzaA__AHZ42643
augaaggccauccugguggucaugcucuacaccuucgcuacagccaacgcggacacgcugugcauuggcuaucacgcuaauaacagcaccgauacaguugacaccgugcuugagaaaaaugugacagucacccauuccgugaaccugcucgaagauaagcacaaugggaaacuguguaaacuuagaggaguugcuccccugcaucucggcaagugcaacaucgccggguggauucugggaaauccugagugugaaucucugagcacagccuccucuuggagcuacaucguggagaccuccggcucugacaacgggacgugcuauccgggagauuuuauugacuacgaggagcuccgggagcagcugagcuccgucagcucuuucgaacgcuuugagaucuuccccaaggccuccagcuggccuaaucacgauucuaacaagggcgugaccgcugccuguccccaugcgggcgccaaaggguuuuauaagaaucuuaucuggcugguuaaaaagggaaacuccuacccuaaacucagcauuucuuauaucaaugacaagggcaaggaagugcugguccuuugggggauucaccaccccuccacaaccgcugaucaacagagccuguaccagaacgccgacacauacguguucgugggaaccuccagauauucuaaaaaguuuaaaccugagaucgcuauucggccgaagguccgcgaucaggagggcagaaugaauuacuauuggacgcucguugaacccggggacaaaaucacauucgaggccaccggaaaccugguggugccucgguacgcguuugccauggaacgcaacgcuggcagcggcauuaucaucuccgauacacccguccaugacugcaauaccaccugucaaacaccuaagggggccauuaacacgagccugcccuuccagaauauccacccgauuaccaucggaaaaugcccuaaguaugugaagucuacaaaacucagacuggcuaccggccuucggaacguucccuccauucagagccgcgggcuguuuggagccaucgccggcuucaucgaagggggauggacaggcaugguggacggcugguacggguaucaucaccagaaugaacaaggaucuggcuacgcugcggaucucaagagcacccagaacgccauugacaaaaucacgaauaaggucaacuccgugauugagaaaaugaauacacaguuuaccgcuguugggaaggaguucaaccaccuggaaaagagaaucgagaaucuuaacaaaaagguggaugacggauuccuggauauuuggaccuacaaugccgaacuccugguccugcucgagaacgaacggacacuggacuaucaugauucuaaugugaaaaaccuuuacgagaagguccgcaaccagcugaaaaauaacgccaaggagaucggcaauggguguuuugaguucuaucacaagugcgacaacaccuguauggaaagcgugaaaaauggcacauacgauuauccuaaguacuccgaagaggcuaaacucaacagagaaaagaucgacggaguuaaacuggagagcacgcggauuuaucaaauccuugccauuuacucuaccgcggcuuccagccuggugcucgucgugucucugggcgccaucuccuuuuggaugugcagcaaugggucccugcagugccgcauuuguaucuga

SEQ ID NO: 204397 - RNA, 1701 nt, Artificial Sequence; identical to SEQ ID NO: 201955
  derived and/or modified CDS sequence (opt5) from hemagglutinin__InfluenzaA__AHZ42654

SEQ ID NO: 204398 - RNA, 1701 nt, Artificial Sequence; identical to SEQ ID NO: 201930
  derived and/or modified CDS sequence (opt5) from hemagglutinin__InfluenzaA__AHZ42666

SEQ ID NO: 204399 - RNA, 1701 nt, Artificial Sequence; identical to SEQ ID NO: 201930
  derived and/or modified CDS sequence (opt5) from hemagglutinin__InfluenzaA__AHZ42678

SEQ ID NO: 204400 - RNA, 1701 nt, Artificial Sequence
  derived and/or modified CDS sequence (opt5) from hemagglutinin__InfluenzaA__AHZ42690
augaaggccauccuggugguccuccuguacaccuaugcuacagccaacgcggacacgcuuugcauuggcuaccacgcuaauaacagcaccgauacaguugacaccgugcuggagaaaaaugugacagucacccauuccgugaaccuccuggaagauaagcacaaugggaaacuuuguaagcugagaggaguugcuccccuccaucugggcaaaugcaacaucgccggguggauucugggaaauccugagugugaaucucucagcacagccuccucuuggagcuauaucguggagaccuccucuagcgacaacggcacgugcuacccgggggauuucauuaauuaugaggaacugcgggagcagcuuuccagcgucucuuccuuugaacgcuucgagaucuuucccaagaccagcucuuggccuaaccacgacuccaauaagggagugacagccgcuuguccccaugccggcgcgaaaucuuucuacaagaaccugaucuggcucguuaaaaagggcaauagcuauccuaaacuguccaagagcuacauuaacgauaaggggaaagaagugcuuguccuguggggaauccaccaccccuccaccacaaccgaccaacagucucucuaccagaaugccgaugcuuauguguuugugggcacgagcagauacuccaagaaauucaagccugagauugccauccggccgaaaguccgcgaccaggaggggagaaugaacuauuacuggacacugauugaacccggagauaagaucaccuuugaggcuacaggcaaccugguugugccucgguaugccuucgcgauggaacgcaaugccgggagcggaauuaucaucucugacacccccgugcaugauugcaacaccacaugucaaacgccugagggcgcuauuaauaccucccuccccuuucagaacauccacccgauuacaaucggcaaaugcccuaaguacgucaagagcaccaaacugagacuugccacagggcugcggaaugugcccucuauucagagccgcggacucuucggcgcuaucgccggguuuaucgaaggaggcuggaccgggaugguugacggaugguauggcuaccaucaccagaacgagcaaggcuccggguacgccgcugaccugaagucuacgcagaaugcgauugauaaaaucacaaacaaggugaauagcgucauugagaaaaugaacacccaguucaccgccgugggaaaggaauuuaaucaccuugagaagagaaucgaaaaccugaauaaaaagguugacgauggcuuccucgacauuuggacauauaacgcugagcugcuggugcuccuggaaaaugagcggacccuugauuaccaugacuccaacgucaaaaaccuguaugagaaggugcgcaaucagcucaaaaacaaugccaaggaaaucgggaacggauguuucgaguuuuaccacaagugcgauaauacauguauggaaagcgucaaaaacggcacguaugacuacccuaaguauucugaggaagccaaacugaauagagagaagaucgauggggugaaacuugaguccacccggauuuaccaaauccuggcuauuuacagcacaguugccucuucccucgugcuggucgugagccugggcgcgaucuccuucuggaugugcucuaacggaagccuccagugccgcauuuguaucuga

SEQ ID NO: 204401 - RNA, 1701 nt, Artificial Sequence; identical to SEQ ID NO: 201955
  derived and/or modified CDS sequence (opt5) from hemagglutinin__InfluenzaA__AHZ42701

SEQ ID NO: 204402 - RNA, 1701 nt, Artificial Sequence; identical to SEQ ID NO: 201930
  derived and/or modified CDS sequence (opt5) from hemagglutinin__InfluenzaA__AHZ42713

SEQ ID NO: 204403 - RNA, 1701 nt, Artificial Sequence
  derived and/or modified CDS sequence (opt5) from hemagglutinin__InfluenzaA__AHZ42725
augaagaccaucauugcccugagcuacauccucugccugguguucgcucagaaacuucccggcaacgacaauuccacagccacgcugugucucgggcaccaugcggucccuaacggaaccauuguuaagacaaucaccaaugauagaauugaggugacaaacgcuaccgaacuggugcaaaauucuagcaucggcgagaucugcgacuccccgcaccagauucuugauggggaaaacuguacacugaucgacgcccuccugggagauccccagugcgacggcuuucagaauaaaaagugggaucuguucgucgagcggucuaaagccuauagcaacuguuacccuuaugacgugcccgauuacgcuucccuccgcucucugguugccagcuccgggacccuugaauuuaauaacgagagcuucaauuggacgggagugacccaaaacggcacaucuuccgcuugcauuagacggagcaauucuuccuuuuucagccgccugaacuggcucacccaucugaauuuuaaguauccugcccuuaacgucacaaugcccaacaaugagcaguucgacaagcuguacaucuggggcgugcaccauccugggaccgauaaagaccagauuuuucucuaugcgcagucuuccggaagaaucacgguuagcacaaagcggucccaacaggccgugauuccgaacaucggcucucgccccagaauccggaauauuccuagccgcaucuccauuuacuggaccaucgucaaacccggggauauucugcugaucaacagcacaggaaaucucaucgcuccuagaggcuacuucaagauucggaacgggaaaucuuccaucaugcgcagcgacgcccccauuggaaaguguaagucugaaugcaucaccccgaauggcagcauuccuaacgacaaacccuuucagaaugugaacagaaucaccuauggcgcuuguccucgguacgugaagcaguccacacugaaacuugccacggggaugcgcaauguccccgagaagcaaaccagaggaaucuucggcgcgauugccggguuuaucgaaaacggaugggagggcaugguugaugggugguauggauuccggcaccaaaauucugagggcagaggccaggcugccgaccugaaaagcacacaggcugccauugaucagaucaacgggaagcucaaucgccugauuggaaaaaccaacgaaaaguuccaccagaucgagaaggaauuuuccgagguggaaggccggauucaggaccuugagaaauacguggaggauacaaagaucgaccuguggagcuauaacgccgaacuccuggucgcucuggagaaucaacauaccaucgaucucacggacucugaaaugaacaaacuguucgagaagaccaaaaagcagcuuagagaaaaugcggaggauauggggaacggaugcuuuaagauuuaccacaaaugugacaaugccugcaucggcuccauucgcaacgggacauaugaucaugacguguaccgggacgaggcucugaauaacagauuccagaucaagggcguugaacucaaaagcggauacaaggauuggauucuguggaucucuuuugccaucuccugcuuccuucuguguguggcccuccugggcuuuauuaugugggcuugccagaaagggaauauccgcuguaacauuugcaucuga

SEQ ID NO: 204404 - RNA, 1701 nt, Artificial Sequence
  derived and/or modified CDS sequence (opt5) from hemagglutinin__InfluenzaA__AHZ42737
augaaggccauccuggugguccuccuguacaccuucgcuacagccaacgcggacacgcuuugcauuggcuaucacgcuaauaacagcaccgauacaguugacaccgugcuggagaaaaaugugacagucacccauuccgugaaccuccuggaagauaagcacaaugggaaacuuuguaagcugagaggaguugcuccccuccaucugggcaaaugcaacaucgccggguggauucugggaaauccugagugugaaucucucagcacagccuccucuuggagcuacaucguggagaccuccucuagcgacaacggcacgugcuauccgggggauuuuauuaauuacgaagaacugcgggagcagcuuuccagcgucucuuccuucgaacgcuuugagaucuuccccaagaccagcucuuggccuaaccacgacuccaauaagggagugacagccgcuuguccccaugccggcgcgaaaucuuuuuauaagaaccugaucuggcucguuaaaaagggcaauagcuacccuaaacuguccaagagcuauauuaacgauaaggggaaagaagugcuuguccuguggggaauccaccaccccuccaccacagccgaccaacagucucucuaccagaaugcugaugccuacguguucgugggcaccagcagauauuccaagaaauuuaagccugagauugcuauccggccgaaaguccgcgaccaggaggggagaaugaacuacuauuggacgcugauugaacccggagauaagaucacauucgaggccaccggcaaccugguugugccucgguacgcguuugccauggaacgcaaugcugagagcgggauuaucaucucugacacacccgugcaugauugcaacaccaccugucaaacaccugaaggagccauuaauacgucccuccccuuccagaacauccacccgauuaccaucggcaaaugcccuaaguaugucaagagcacaaaacugagacuugcuaccggccugcggaaugugcccucuauucagagccgcgggcucuuuggagccaucgccggcuucaucgaagggggauggacaggcaugguugacgggugguacggauaucaucaccagaacgagcaaggcuccggcuacgcugcggaccugaagucuacccagaaugccauugauaaaaucacgaacaaggugaauagcgucauugagaaaaugaacacacaguuuaccgcuguggggaaggaguucaaucaccuugaaaagagaaucgagaaccugaauaaaaagguugacgauggauuccucgacauuuggaccuacaacgccgaacugcuggugcuccuggagaaugagcggacacuugauuaucaugacuccaacgucaaaaaccuguacgaaaaggugcgcaaucagcucaaaaacaaugccaaggagaucggcaacggguguuuugaguucuaucacaagugcgauaauaccuguauggagagcgucaaaaacggaacauacgacuauccuaaguacucugaagaggcuaaacugaauagagagaagaucgauggcgugaaacuugaauccacgcggauuuaucaaauccuggccauuuacagcaccguugcgucuucccucgugcuggucgugagccugggggcuaucuccuuuuggaugugcucuaacggcagccuccagugccgcauuuguaucuga

SEQ ID NO: 204405 - RNA, 1701 nt, Artificial Sequence; identical to SEQ ID NO: 201955
  derived and/or modified CDS sequence (opt5) from hemagglutinin__InfluenzaA__AHZ42748

SEQ ID NO: 204406 - RNA, 1701 nt, Artificial Sequence; identical to SEQ ID NO: 201975
  derived and/or modified CDS sequence (opt5) from hemagglutinin__InfluenzaA__AHZ42760

SEQ ID NO: 204407 - RNA, 1701 nt, Artificial Sequence
  derived and/or modified CDS sequence (opt5) from hemagglutinin__InfluenzaA__AHZ42772
augaagaccaucauugcccugagcuacauccucugccugguguucgcucaggagcuucccggcaacgacgauuccacagccacgcugugucucgggcaccaugcggucccuaauggaaccauuguuaaaacaaucaccaacgacagaauugaagugacaaaugcuaccgagcuggugcaaucuagcuccacaggcgaaaucugcaacucuccgcaccagauccuugauggggagaauuguacccugauugacgcccuccugggagauccccagugcgacggcuuucagaacaagaaaugggaucuguucgucgaacggagcaaggcccauuccaauuguuauccuuacgacgugcccgauuaugcuucucuccgcagccugguugccuccagcgggacgcuugaguuuaacaaugagucuuucaacuggaccggagugacacaaaauggcaccuccagcgcuugcaucagacggucuaacaauuccuuuuucagccgccugaacuggcucacacaccugaauuuuaaauacccugcccuuaacgucaccaugcccaacaaugaacaguucgacaagcuguauauuuggggcgugcaucacccugggacggauaaggaccagaucuuucucuacgcgcaggccucuggaagaauuacaguuuccaccaaacggagccaacagacagugaucccgaacauuggcucccgccccagaguccggaauaucccuucucgcgugagcaucuauuggaccauugugaagcccggggauauccugcugauuaacuccaccggaaaucucaucgcuccuagaggcuacuucaaaauucggagcgggaagucuuccaucaugcgcagcgacgcccccaucggaaaauguaacucugcuugcauuacaccgaauggcagcaucccuaacgacaagcccuuucagaaugucaacagaauuacguacggcgccuguccucgguauguuaagcagaauacccugaaacuugcgacagggaugcgcaacgugcccgagaagcaaaccagaggaaucuucggcgccauugcuggguuuaucgaaaauggaugggagggcaugguggaugggugguacggauuccggcaccagaacuccgagggcagaggccaggccgcugaccugaaaucuacacaagccgccaucgaucagauuaaugggaagcucaaccgccugaucggaaaaaccaacgaaaaguuccaucagauugagaaagaauuuagcgaggucgaaggccggauccaggaccuugagaaguauguggaggauacgaagauugaccugugguccuacaaugcugaacuccugguugcgcuggagaaccaacacacaaucgaucucaccgacagcgaaaugaauaaacuguucgagaagaccaaaaagcagcuuagagaaaacgccgaggauauggggaauggaugcuuuaaaauuuaucauaagugugacaacgcuugcaucggcucuauccgcaaugggacauacgaucacgacguguaucgggacgaggcccugaacaauagauuccagauuaaggaagucgagcucaaauccggcuacaaggauuggauccuguggauuagcuuugccaucucuugcuuccuucuguguguggcucuccugggauuuauuaugugggccugccagaaaggcaacauccgcuguaauaucugcauuuga

SEQ ID NO: 204408 - RNA, 1701 nt, Artificial Sequence; identical to SEQ ID NO: 201955
  derived and/or modified CDS sequence (opt5) from hemagglutinin__InfluenzaA__AHZ42784

SEQ ID NO: 204409 - RNA, 1701 nt, Artificial Sequence; identical to SEQ ID NO: 201930
  derived and/or modified CDS sequence (opt5) from hemagglutinin__InfluenzaA__AHZ42796

SEQ ID NO: 204410 - RNA, 1701 nt, Artificial Sequence; identical to SEQ ID NO: 201930
  derived and/or modified CDS sequence (opt5) from hemagglutinin__InfluenzaA__AHZ42808

SEQ ID NO: 204411 - RNA, 1701 nt, Artificial Sequence; identical to SEQ ID NO: 204404
  derived and/or modified CDS sequence (opt5) from hemagglutinin__InfluenzaA__AHZ42820

SEQ ID NO: 204412 - RNA, 1701 nt, Artificial Sequence; identical to SEQ ID NO: 202539
  derived and/or modified CDS sequence (opt5) from hemagglutinin__InfluenzaA__AHZ42831

SEQ ID NO: 204413 - RNA, 1701 nt, Artificial Sequence
  derived and/or modified CDS sequence (opt5) from hemagglutinin__InfluenzaA__AHZ42843
augaagaccaucauugcccugagcuacauccucugccugguguucgcucagaaacuucccggcaacgacaauuccacagccacgcugugucucgggcaccaugcggucccuaacggaaccaugguuaagacaauuaccaaugauagaaucgaggugacaaacgcuaccgaacuggugcaaaauucuagcauuggcgagaucugcgacuccccgcaccagauccuugauggggaaaacuguacacugauugacgcccuccugggagauccccagugcgacggcuuucagaauaaaaagugggaucuguucgucgagcggucuaaagccuauagcaacuguuacccuuaugacgugcccgauuacgcuucccuccgcucucugguugccagcuccgggacccuugaauuuaauaacgagagcuucaauuggacgggagugacccaaaacggcacaucuuccgcuugcaucagacggagcaauucuuccuuuuucagccgccugaacuggcucacccaucugaauuuuaaguauccugcccuuaacgucacaaugcccaacaaugagcaguucgacaagcuguacauuuggggcgugcaccauccugggaccgauaaagaccagaucuuucucuaugcgcagucuuccggaagaauuacgguuagcacaaagcggucccaacaggccgugaucccgaacauuggcucucgccccagaauccggaauaucccuagccgcauuuccaucuacuggaccauugucaaacccggggauauccugcugauuaacagcacaggaaaucucaucgcuccuagaggcuacuucaagauccggucugggaaauccagcauuaugcgcucugacgcccccaucggaaaguguaagagcgaaugcauuaccccgaacggcuccaucccuaaugacaaacccuuucagaacgugaauagaauuaccuauggcgcuuguccucgguacgugaagcagucuacacugaaacuugccacggggaugcgcaacguccccgagaagcaaaccagaggaaucuucggcgcgaucgccggguuuauugaaaauggaugggagggcaugguugaugggugguauggauuccggcaccagaacagcgagggcagaggccaggcugccgaccugaaauccacacaagcugccaucgaucagauuaaugggaagcucaaccgccugaucggaaaaaccaaugaaaaguuccaccagauugagaaggaauuuagcgagguggaaggccggauccaggaccuugagaaauacguggaggauacaaagauugaccuguggucuuauaacgccgaacuccuggucgcucuggagaaccaacauaccaucgaucucacggacuccgaaaugaauaaacuguucgagaagaccaaaaagcagcuuagagaaaacgcggaggauauggggaauggaugcuuuaagaucuaccacaaaugugacaacgccugcauuggcagcauccgcaaugggacauaugaucauaacguguaccgggacgaggcucugaauaacagauuccagauuaagggcguugaacucaaaucuggauacaaggacuggauccuguggauuuccuuugccaucagcugcuuccuucuguguguggcccuccugggcuuuaucaugugggcuugccagaaagggaauauucgcuguaacaucugcauuuga

SEQ ID NO: 204414 - RNA, 1701 nt, Artificial Sequence
  derived and/or modified CDS sequence (opt5) from hemagglutinin__InfluenzaA__AHZ42855
augaagaccaucauugcccugagcuacauccucugccugguguucgcucagaaacuucccggcaacgacaauuccacagccacgcugugucucgggcaccaugcggucccuaacggaaccauuguuaagacaaucaccaaugauagaauugaggugacaaacgcuaccgaacuggugcaaaauucuagcaucggcgagaucugcgacuccccgcaccagauucuugauggggaaaacuguacacugaucgacgcccuccugggagauccccagugcgacggcuuucagaauaaaaagugggaucuguucgucgagcggucuaaagccuauagcaacuguuacccuuaugacgugcccgauuacgcuucccuccgcucucugguugccagcuccgggacccuugaauuuaauaacgagagcuucaauuggacgggagugacccaaaacggcacaucuuccgcuugcauuagacggagcaauucuuccuuuuucagccgccugaacuggcucacccaucugaauuuuaaguauccugcccuuaacaugacaaugcccaacaaugagcaguucgacaagcuguacaucuggggcguccaccauccugggaccgauaaagaccagauuuuucucuaugcgcagucuuccggaagaaucacggugagcacaaagcggucccaacaggccguuauuccgaacaucggcucucgccccagaauccggaauauuccuagccgcaucuccauuuacuggaccaucgugaaacccggggauauucugcugaucaacagcacaggaaaucucaucgcuccuagaggcuacuucaagauucggucugggaaauccagcaucaugcgcucugacgcccccauuggaaaguguaagagcgaaugcaucaccccgaacggcuccauuccuaaugacaaacccuuucagaacgucaauagaaucaccuauggcgcuuguccucgguacgugaagcagucuacacugaaacuugccacggggaugcgcaacgugcccgagaagcaaaccagaggaaucuucggcgcgauugccggguuuaucgaaaauggaugggagggcauggucgaugggugguauggauuccggcaccagaacagcgagggcagaggccaggcugccgaccugaaauccacacaagcugccauugaucagaucaaugggaagcucaaccgccugauuggaaaaaccaaugaaaaguuccaccagaucgagaaggaauuuagcgagguugaaggccggauucaggaccuugagaaauacguggaggauacaaagaucgaccuguggucuuauaacgccgaacuccugguggcucuggagaaccaacauaccaucgaucucacggacuccgaaaugaauaaacuguucgagaagaccaaaaagcagcuuagagaaaacgcggaggauauggggaauggaugcuuuaagauuuaccacaaaugugacaacgccugcaucggcagcauucgcaaugggacauaugaucauaacgucuaccgggacgaggcucugaauaacagauuccagaucaagggcguggaacucaaaucuggauacaaggacuggauucuguggaucuccuuugccaucagcugcuuccuucuguguguugcccuccugggcuuuauuaugugggcuugccagaaagggaauauccgcuguaacauuugcaucuga

SEQ ID NO: 204415 - RNA, 1701 nt, Artificial Sequence
  derived and/or modified CDS sequence (opt5) from hemagglutinin__InfluenzaA__AHZ42867
augaagaccaucauugcccugagcuacauccucugccugguguucgcucagaaacuucccggcaacgacaauuccacagccacgcugugucucgggcaccaugcggucccuaacggaaccauuguuaagacaaucaccaaugaucaaauugaggugacaaacgcuaccgaacuggugcaaaauucuagcaucggcgagaucugcgacuccccgcaccagauucuugauggggaaaacuguacacugaucgacgcccuccugggagauccccagugcgacggcuuucagaauaaaaagugggaucuguucgucgagagaucuaaagccuauagcaacuguuacccuuaugacgugcccgauuacgcuucccuccggucucugguugccagcuccgggacccuugaauuuaauaacgagagcuucaauugggcuggagugacgcagaacggcaccucuuccgccugcauucgcggcagcaauucuuccuuuuucagcagacugaacuggcucacacaucugaauuuuaaguauccugcgcuuaacgucaccaugcccaacaaugagcaguucgacaagcuguacaucuggggagugcaccauccugggacagauaaagaccagauuuuucucuaugcccaaucuuccggccggaucaccguuagcacgaagcgcucccagcaggcugugauuccgaacaucgggucuagaccccggauccgcaauauuccuagcagaaucuccauuuacuggacaaucgucaaacccggagauauucugcugaucaacagcaccggcaaucucaucgccccucggggguacuucaagauucgcucuggaaaauccagcaucaugagaucugacgcucccauuggcaaguguaagagcgaaugcaucacaccgaacggcuccauuccuaaugacaaacccuuucagaacgugaaucggaucaccuauggggccuguccucgcuacgugaagcaaucuacccugaaacuugcgacaggaaugagaaacguccccgagaagcagacgcggggcaucuucggggccauugcuggauuuaucgaaaauggcugggaggggaugguugauggaugguauggcuuccgccaccagaacagcgagggcagagggcaagccgcugaccugaaauccacccaggccgccauugaucagaucaauggaaagcucaaccggcugauuggcaaaacaaaugaaaaguuccaccagaucgagaaggaauuuagcgagguggaagggcgcauucaagaccuugagaaauacguggaggauaccaagaucgaccuguggucuuauaacgcugaacuccuggucgcgcuggagaaccagcauacaaucgaucucaccgacuccgaaaugaauaaacuguucgagaagacgaaaaagcagcuuagagaaaacgccgaggauaugggaaauggcugcuuuaagauuuaccacaaaugugacaacgcuugcaucgggagcauucggaauggcacauaugaucaugacguguacagagacgaggcccugaacaaucgcuuccagaucaagggaguugaacucaaaucugaguacaaggauuggauucuguggaucuccuuugccaucagcugcuuccuucuguguguggcucuccugggcuuuauuaugugggccugccaaaaagggaacauccgguguaauauuugcaucuga

SEQ ID NO: 204416 - RNA, 1701 nt, Artificial Sequence; identical to SEQ ID NO: 201930
  derived and/or modified CDS sequence (opt5) from hemagglutinin__InfluenzaA__AHZ42879

SEQ ID NO: 204417 - RNA, 1701 nt, Artificial Sequence
  derived and/or modified CDS sequence (opt5) from hemagglutinin__InfluenzaA__AHZ42891
augaagaccaucauugcccugagcuacauccucugccugguguucgcucagaaacuucccggcaacgacaauuccacagccacgcugugucucgggcaccaugcggucccuaacggaaccauuguuaagacaaucaccaaugauagaauugaggugacaaacgcuaccgaacuggugcaaaauucuagcaucggcgagaucugcgacuccccgcaccagauucuugauggggaaaacuguacacugaucgacgcccuccugggagauccccagugcgacggcuuucagaauaaaaagugggaucuguucgucgagcggucuaaagccuauagcuccuguuacccuuaugacgugcccgauuacgcuucucuccgcagccugguugccuccagcgggacccuugaauuuaacaaugagucuuucaacugggcuggagugacgcaaaauggcaccuccagcgccugcauuagacggucuaacuccagcuuuuucucucgccugaauuggcucacacaucugaacuuuaaguauccugcgcuuaaugucaccaugcccaacaacgagcaguucgacaagcuguacaucuggggcgugcaccauccugggacagauaaagaccagauuuuucucuaugcccaguccagcggaagaaucaccguuuccacgaagcggucucaacaggcugugauuccgaauaucggcagccgccccagaauccggaacauuccuucccgcaucagcauuuacuggacaaucgucaaacccggggauauucugcugaucaauucuaccggaaaccucaucgccccuagaggcuacuucaagauucgguccgggaaaagcucuaucaugcgcagcgacgcucccauuggaaaguguaaguccgaaugcaucacaccgaauggcucuauuccuaacgacaaacccuuucagaaugugaacagaaucaccuauggcgccuguccucgguacgugaagcagagcacccugaaacuugcgacagggaugcgcaauguccccgagaagcaaacgagaggaaucuucggcgccauugcuggguuuaucgaaaacggaugggagggcaugguugaugggugguauggauuccggcaccaaaauuccgagggcagaggccaggccgcugaccugaaaagcacccaggccgccauugaucagaucaacgggaagcucaaucgccugauuggaaaaacaaacgaaaaguuccaccagaucgagaaggaauuuucugagguggaaggccggauucaggaccuugagaaauacguggaggauaccaagaucgaccugugguccuauaaugcugaacuccuggucgcgcuggagaaccaacauacaaucgaucucaccgacagcgaaaugaacaaacuguucgagaagacgaaaaagcagcuuagagaaaaugccgaggauauggggaacggaugcuuuaagauuuaccacaaaugugacaaugcuugcaucggcucuauucgcaacgggacauaugaucaugacguguaccgggacgaggcccugaauaacagauuccagaucaagggcguugaacucaaauccggauacaaggauuggauucuguggaucagcuuugccaucuccugcuuccuucuguguguggcucuccugggcuuuauuaugugggccugccagaaagggaauauccgcuguaacauuugcaucuga

SEQ ID NO: 204418 - RNA, 1701 nt, Artificial Sequence
  derived and/or modified CDS sequence (opt5) from hemagglutinin__InfluenzaA__AHZ42903
augaagaccaucauugcccugagcuacauccucugccugguguucgcucagaaaauucccggcaacgacaauuccacagccacgcuuugucuggggcaccaugcggucccuaacggaaccaucguuaagacaauuaccaaugauagaaucgaggugacaaacgcuaccgaacucgugcaaaauucuagcaucggcgagauuugcgacuccccgcaccagauccuggauggggaaaacuguacacuuauugacgcccugcucggagauccccagugcgacggcuuucagaauaaaaagugggaucuguucgucgagcggucuaaagccuauagcaacuguuacccuuaugacgugcccgauuacgcuucccugcgcucucucguugccagcuccgggacccuggaauuuaauaacgagagcuucaauuggacgggagugacccaaaacggcacaucuuccgcuugcaucagacggagcaauucuuccuuuuucagccgccuuaacuggcugacccaucucaauuuuaaguauccugcccugaacgucacaaugcccaacaaugagcaguucgacaaacuuuacauuuggggcgugcaccauccugggaccgauaaagaccagaucuuucuguaugcgcagucuuccggaagaauuacgguuagcacaaagcggucccaacaggccgugaucccgaacaucggcucucgcccccggauuagaaauaucccuagccgcauuuccaucuacuggaccauugucaaacccggggauauccuccugaucaacagcacaggaaaucugauugcuccuagaggcuacuucaagauccggucugggaaauccagcauuaugcgcucugacgcccccaucggaaaguguaagagcgaaugcauuaccccgaacggcuccaucccuaaugacaaacccuuucagaacgugaauagaaucaccuauggcgcuuguccucgguacgugaagcagucuacacucaaacuggccacggggaugcgcaacguccccgagaagcaaaccagaggaauuuucggcgcgaucgccggguuuauugaaaauggaugggagggcaugguugaugggugguauggauuccggcaccagaacagcgagggcagaggccaggcugccgaccuuaaauccacacaagcugccaucgaucagauuaaugggaagcugaaccgccucaucggaaaaaccaaugaaaaguuccaccagauugagaaggaauuuagcgagguggaaggccggauccaggaccuggagaaauacguggaggauacaaagaucgaccuuuggucuuauaacgccgaacugcucgucgcucuggagaaccaacauaccauugaucugacggacuccgaaaugaauaaacucuucgagaagacaaagaagcagcugagagaaaacgcggaggauauggggaauggaugcuuuaagaucuaccacaaaugugacaacgccugcauuggcagcauccgcaaugggaccuaugaucauaacguguaccgggacgaggcucuuaauaacagauuccagauuaagggcguugaacugaaaucuggauacaaggacuggauccucuggaucuccuuugccauuagcugcuuccugcuuuguguggcccugcucggcuuuaucaugugggcuugccagaaagggaauauucgcuguaacaucugcauuuga

SEQ ID NO: 204419 - RNA, 1701 nt, Artificial Sequence; identical to SEQ ID NO: 201907
  derived and/or modified CDS sequence (opt5) from hemagglutinin__InfluenzaA__AHZ42915

SEQ ID NO: 204420 - RNA, 1683 nt, Artificial Sequence; identical to SEQ ID NO: 202060
  derived and/or modified CDS sequence (opt5) from hemagglutinin__InfluenzaA__AHZ59747

SEQ ID NO: 204421 - RNA, 1683 nt, Artificial Sequence
  derived and/or modified CDS sequence (opt5) from hemagglutinin__InfluenzaA__AHZ59759
augaacacccagauccugguguucgcccucauugcuaucauucccacaaaugccgacaagaucugccugggccaccaugcggucagcaacgggacgaaaguuaauacccuuacagagagaggaguggaaguggucaacgcuaccgagacaguggaacggaccaauauuccucgcaucuguuccaagggcaaaagaacaguugaucuggggcaaugcggacuccugggcaccaucacggggccgccccagugugaccaguuucuugaguucucugccgaucugauuaucgaacggcgcgagggaagcgacgugugcuacccuggcaaguuugucaacgaggaagcccucagacagauucugcgggaguccggcgggaucgauaaagaagcuaugggauucaccuauucuggcauucgcacaaauggggccaccagcgcuuguagacgguccggaucuagcuuuuacgccgagaugaaguggcugcucuccaacacagacaaugcggccuucccccaaaugaccaagagcuauaaaaacacgcgcaagucuccugcucugaucguguggggcauucaccauuccguuagcacagccgagcagaccaaacuuuacgggucuggaaauaagcuggugacagucggcuccagcaacuaucagcagucuuuugugcccuccccuggcgcuagaccgcaagugaaugggcucagcggacggaucgauuuccacuggcugaugcuuaaccccaaugacaccgucaccuuuuccuucaacggcgccuuuaucgcgccugaucgcgccucuuuccugagagggaaaagcaugggcauucaguccggaguucagguggacgcuaacugcgaaggggauuguuaccauagcggaggcacaaucauuucuaaucuccccuuucagaacaucgacucccgggccgugggcaagugcccucgcuaugucaagcaaagaagccugcugcucgcuacggggaugaaaaaugugcccgagauuccgaagggacggggccuguucggggccaucgccggauucaucgaaaacggcugggaggggcuuauugauggcugguacggauuuagacaccagaaugcucagggcgaagggaccgcggccgacuacaaaucuacacaaagcgcuaucgaccagauuaccggaaagcugaaccgccucaucgagaaaacaaaucagcaguucgagcugauugauaacgaauuuaaugagguugaaaagcaaaucggcaacgugaucaauuggacccgggacuccauuacggaggucuggucuuauaacgccgaacuucugguggccauggagaaucagcacacaaucgaucucgcugacagcgagauggauaaacuguacgaaagaguuaagcgccagcugcgggagaacgccgaagaggacgggaccggauguuucgaaauuuuucauaagugcgaugacgauuguauggcguccaucagaaauaacaccuaugaccacagcaaaucucgcgaggaggcuaugcagaaccggauucaaaucgauccugugaagcucuccagcggcuacaaagacgucauucugugguucucuuuuggggccuccugcuucauccuucuggccaucgugaugggccucgucuuuauuugcgugaagaauggaaacaugagauguacaaucugcauuuga

SEQ ID NO: 204422 - RNA, 1683 nt, Artificial Sequence
  derived and/or modified CDS sequence (opt5) from hemagglutinin__InfluenzaA__AHZ59771
augaacacccagauccugguguucgcccucauugcuaucauucccacaaaugccgacaagaucugccugggccaccaugcggucagcaacgggacgaaaguuaauacccuuacagagagaggaguggaaguggucaacgcuaccgagacaguggaacggaccaauauuccucgcaucuguuccaagggcaaaagaacaguugaucuggggcaaugcggacuccugggcaccaucacggggccgccccagugugaccaguuucuugaguucucugccgaucugauuaucgaacggcgcgagggaagcgacgugugcuacccuggcaaguuugucaacgaggaagcccucagacagauucugcgggaguccggcgggaucgauaaagaagcuaugggauucaccuauucuggcauucgcacaaauggggccaccagcgcuuguagacgguccggaucuagcuuuuacgccgagaugaaguggcugcucuccaacacagacaaugcggccuucccccaaaugaccaagagcuauaaaaacacgcgcaagucuccugcucugaucguguggggcauucaccauuccguuagcacagccgagcagaccaaacuuuacgggucuggaaauaagcuggugacagucggcuccagcaacuaucagcagucuuuugugcccuccccuggcgcuagaccgcaagugaaugggcagagcggacggaucgauuuccacuggcucaugcugaaccccaaugacaccgucaccuuuuccuucaacggcgccuuuaucgcgccugaucgcgccucuuuccuuagagggaaaagcaugggcauucaguccggaguucagguggacgcuaacugcgaaggggauuguuaccauagcggaggcacaaucauuucuaaucugcccuuucaaaacaucgacucccgggccgugggcaagugcccucgcuaugucaagcagagaagccuccugcuggcuacggggaugaaaaaugugcccgagauuccgaagggacggggccucuucggggccaucgccggauucaucgaaaacggcugggaggggcugauugauggcugguacggauuuagacaccagaaugcucaaggcgaagggaccgcggccgacuacaaaucuacacagagcgcuaucgaccagauuaccggaaaacuuaaccgccugaucgagaagacaaaucagcaauucgagcucauugauaacgaauuuaaugagguugaaaagcagaucggcaacgugaucaauuggacccgggacuccauuacggaggucuggucuuauaacgccgaacugcuuguggccauggagaaucagcacacaaucgaucuggcugacagcgagauggauaaacucuacgaaagaguuaagcgccagcugcgggagaacgccgaagaggacgggaccggauguuucgaaauuuuucauaagugcgaugacgauuguauggcguccaucagaaauaacaccuaugaccacagcaaauaccgcgaggaggcuaugcaaaaccggauucagaucgauccugugaagcugucuuccggcuauaaagacgucauucucugguucagcuuuggggccucuugcuucauccugcuugccaucgugaugggccuggucuuuauuugcgugaagaauggaaacaugagauguacaaucugcauuuga

SEQ ID NO: 204423 - RNA, 1683 nt, Artificial Sequence
  derived and/or modified CDS sequence (opt5) from hemagglutinin__InfluenzaA__AHZ59795
augaacacccagauccugguguucgcccucauugcuaucauucccacaaaugccgacaagaucugccugggccaccaugcggucagcaacgggacgaaaguuaauacccuuacagagagaggaguggaaguggucaacgcuaccgagacaguggaacggaccaauauuccucgcaucuguuccaagggcaaaagaacaguugaucuggggcaaugcggacuccugggcaccaucacggggccgccccagugugaccaguuucuugaguucucugccgaucugauuaucgaacggcgcgagggaagcgacgugugcuacccuggcaaguuugucaacgaggaagcccucagacagauucugcgggaguccggcgggaucgauaaagaagcuaugggauucaccuauucuggcauucgcacaaaugggaccacaagcgccuguagacgguccggaucuagcuuuuacgcugagaugaaguggcugcucuccaacaccgacaaugccgcguucccccaaaugacaaagagcuauaaaaacacgcgcaagucuccugcccugaucguguggggcauucaccauuccguuagcaccgcugagcagacaaaacuuuacgggucuggaaauaagcuggugaccgucggcuccagcaacuaucagcagucuuuugugcccuccccuggcgccagaccgcaagugaaugggcucagcggacggaucgauuuccacuggcugaugcuuaaccccaaugacaccgucacauuuuccuucaacggcgcuuuuaucgccccugaucgcgcgucuuuccugagagggaaaagcaugggcauucaguccggaguucagguggacgccaacugcgaaggggauuguuaccauagcggaggcacgaucauuucuaaucuccccuuucagaacaucgacucccgggcugugggcaagugcccucgcuaugucaagcaaagaagccugcugcucgccaccgggaugaaaaaugugcccgagauuccgaagggacggggccuguucggggcuaucgccggauucaucgaaaacggcugggaggggcuuauugauggcugguacggauuuagacaccagaaugcccagggcgaagggacagcugcggacuacaaaucuacccaaagcgccaucgaccagauuacaggaaagcugaaccgccucaucgagaaaaccaaucagcaguucgagcugauugauaacgaauuuaaugagguugaaaagcaaaucggcaacgugaucaauuggacgcgggacuccauuacagaggucuggucuuauaacgcugaacuucugguggccauggagaaucagcacaccaucgaucucgccgacagcgagauggauaaacuguacgaaagaguuaagcgccagcugcgggagaacgcugaagaggacgggaccggauguuucgaaauuuuucauaagugcgaugacgauuguauggccuccaucagaaauaacacauaugaccacagcaaauaccgcgaggaggcgaugcagaaccggauucaaaucgauccugugaagcucucuuccggcuauaaagacgucauucugugguucagcuuuggggcuucuugcuucauccuucuggccaucgugaugggccucgucuuuauuugcgugaagaauggaaacaugagauguaccaucugcauuuga

SEQ ID NO: 204424 - RNA, 1683 nt, Artificial Sequence; identical to SEQ ID NO: 204423
  derived and/or modified CDS sequence (opt5) from hemagglutinin__InfluenzaA__AHZ59807

SEQ ID NO: 204425 - RNA, 1683 nt, Artificial Sequence; identical to SEQ ID NO: 204423
  derived and/or modified CDS sequence (opt5) from hemagglutinin__InfluenzaA__AHZ59819

SEQ ID NO: 204426 - RNA, 1683 nt, Artificial Sequence; identical to SEQ ID NO: 202060
  derived and/or modified CDS sequence (opt5) from hemagglutinin__InfluenzaA__AHZ59831

SEQ ID NO: 204427 - RNA, 1683 nt, Artificial Sequence; identical to SEQ ID NO: 202060
  derived and/or modified CDS sequence (opt5) from hemagglutinin__InfluenzaA__AHZ59843

SEQ ID NO: 204428 - RNA, 1683 nt, Artificial Sequence; identical to SEQ ID NO: 202060
  derived and/or modified CDS sequence (opt5) from hemagglutinin__InfluenzaA__AHZ59855

SEQ ID NO: 204429 - RNA, 1683 nt, Artificial Sequence; identical to SEQ ID NO: 204422
  derived and/or modified CDS sequence (opt5) from hemagglutinin__InfluenzaA__AHZ59867

SEQ ID NO: 204430 - RNA, 1683 nt, Artificial Sequence; identical to SEQ ID NO: 202060
  derived and/or modified CDS sequence (opt5) from hemagglutinin__InfluenzaA__AHZ59879

SEQ ID NO: 204431 - RNA, 1683 nt, Artificial Sequence; identical to SEQ ID NO: 204422
  derived and/or modified CDS sequence (opt5) from hemagglutinin__InfluenzaA__AHZ59915

SEQ ID NO: 204432 - RNA, 1683 nt, Artificial Sequence; identical to SEQ ID NO: 202060
  derived and/or modified CDS sequence (opt5) from hemagglutinin__InfluenzaA__AHZ59927

SEQ ID NO: 204433 - RNA, 1683 nt, Artificial Sequence; identical to SEQ ID NO: 204422
  derived and/or modified CDS sequence (opt5) from hemagglutinin__InfluenzaA__AHZ59939

SEQ ID NO: 204434 - RNA, 1683 nt, Artificial Sequence; identical to SEQ ID NO: 202060
  derived and/or modified CDS sequence (opt5) from hemagglutinin__InfluenzaA__AHZ59951

SEQ ID NO: 204435 - RNA, 1683 nt, Artificial Sequence; identical to SEQ ID NO: 202060
  derived and/or modified CDS sequence (opt5) from hemagglutinin__InfluenzaA__AHZ59963

SEQ ID NO: 204436 - RNA, 1683 nt, Artificial Sequence; identical to SEQ ID NO: 202060
  derived and/or modified CDS sequence (opt5) from hemagglutinin__InfluenzaA__AHZ59988

SEQ ID NO: 204437 - RNA, 1683 nt, Artificial Sequence; identical to SEQ ID NO: 202060
  derived and/or modified CDS sequence (opt5) from hemagglutinin__InfluenzaA__AHZ60000

SEQ ID NO: 204438 - RNA, 1683 nt, Artificial Sequence; identical to SEQ ID NO: 202060
  derived and/or modified CDS sequence (opt5) from hemagglutinin__InfluenzaA__AHZ60012

SEQ ID NO: 204439 - RNA, 1683 nt, Artificial Sequence; identical to SEQ ID NO: 202060
  derived and/or modified CDS sequence (opt5) from hemagglutinin__InfluenzaA__AHZ60024

SEQ ID NO: 204440 - RNA, 1683 nt, Artificial Sequence; identical to SEQ ID NO: 204423
  derived and/or modified CDS sequence (opt5) from hemagglutinin__InfluenzaA__AHZ60036

SEQ ID NO: 204441 - RNA, 1683 nt, Artificial Sequence; identical to SEQ ID NO: 204423
  derived and/or modified CDS sequence (opt5) from hemagglutinin__InfluenzaA__AHZ60048

SEQ ID NO: 204442 - RNA, 1683 nt, Artificial Sequence; identical to SEQ ID NO: 204423
  derived and/or modified CDS sequence (opt5) from hemagglutinin__InfluenzaA__AHZ60060

SEQ ID NO: 204443 - RNA, 1683 nt, Artificial Sequence; identical to SEQ ID NO: 204423
  derived and/or modified CDS sequence (opt5) from hemagglutinin__InfluenzaA__AHZ60072

SEQ ID NO: 204444 - RNA, 1683 nt, Artificial Sequence; identical to SEQ ID NO: 204423
  derived and/or modified CDS sequence (opt5) from hemagglutinin__InfluenzaA__AHZ60084

SEQ ID NO: 204445 - RNA, 1683 nt, Artificial Sequence
  derived and/or modified CDS sequence (opt5) from hemagglutinin__InfluenzaA__AHZ60096
augaacacccagauccugguguucgcccucauugcuaucauucccacaaaugccgacaagaucugccugggccaccaugcggucagcaacgggacgaaaguuaauacccuuacagagagaggaguggaaguggucaacgcuaccgagacaguggaacggaccaauauuccucgcaucuguuccaagggcaaaagaacaguugaucuggggcaaugcggacuccugggcaccaucacggggccgccccagugugaccaguuucuugaguucucugccgaucugauuaucgaacggcgcgagggaagcgacgugugcuacccuggcaaguuugucaacgaggaagcccucagacagauucugcgggaguccggcgggaucgauaaagaagcuaugggauucaccuauucuggcauucgcacaaauggggccaccagcgcuuguagacgguccggaucuagcuuuuacgccgagaugaaguggcugcucuccaacacagacgaugcggccuucccccaaaugaccaagagcuauaaaaauacgcgcaagucuccugcucugaucguguggggcauucaccauuccguuagcacagccgagcagaccaaacuuuacgggucuggaaacaagcuggugacagucggcuccagcaauuaucagcagucuuuugugcccuccccuggcgcuagaccgcaagugaacgggcucagcggacggaucgacuuccacuggcugaugcuuaaucccaacgauaccgucaccuuuuccuucaauggcgccuuuaucgcgccugaccgcgccucuuuccugagagggaaaagcaugggcauucaguccggaguucagguggaugcuaacugcgaaggggacuguuaccauagcggaggcacaaucauuucuaaccuccccuuucagaauaucgauucccgggccgugggcaagugcccucgcuaugucaagcaaagaagccugcugcucgcuacggggaugaaaaacgugcccgagauuccgaagggacggggccuguucggggccaucgccggauucaucgaaaauggcugggaggggcuuauugacggcugguacggauuuagacaccagaacgcucagggcgaagggaccgcggccgacuacaaaucuacacaaagcgcuaucgaucagauuaccggaaagcugaaucgccucaucgagaaaacaaaccagcaguucgagcugauugacaaugaauuuaacgagguugaaaagcaaaucggcaaugugaucaacuggacccgggauuccauuacggaggucuggucuuauaaugccgaacuucugguggccauggagaaccagcacacaaucgaccucgcugauagcgagauggacaaacuguacgaaagaguuaagcgccagcugcgggagaaugccgaagaggaugggaccggauguuucgaaauuuuucauaagugcgacgaugacuguauggcguccaucagaaacaauaccuaugaucacagcaaauaccgcgaggaggcuaugcagaaccggauucaaaucgacccugugaagcucucuuccggcuauaaagacgucauucugugguucagcuuuggggccucuugcuucauccuucuggccaucgugaugggccucgucuuuauuugcgugaagaacggaaauaugagauguacaaucugcauuuga

SEQ ID NO: 204446 - RNA, 1701 nt, Artificial Sequence
  derived and/or modified CDS sequence (opt5) from hemagglutinin__InfluenzaA__AIC64889
augaaggccauccuggugguccuccuguacaccuucgcuacagccaacgcggacacgcuuugcauuggcuaucacgcuaauaacagcaccgauacaguugacaccgugcuggagaaaaaugugacagucacccauuccgugaacauccucgaagauaagcacaaugggaaacuguguaaacuuagaggaguugcuccccugcaucucggcaaaugcaacauugccggguggauccugggaaauccugagugugaaucucugagcacagccuccucuuggagcuacauuguggagaccuccucuagcgacaacggcacgugcuauccgggggauuuuaucgacuacgaagaacuccgggagcagcuguccagcgucucuuccuucgaacgcuuugagaucuuccccaagaccagcucuuggccuaaucacgauuccaacaagggagugacagccgcuuguccccaugccggcgcgaaaucuuuuuauaagaaucuuauuuggcugguuaaaaaggaaaacagcuacccuaaacucuccaagagcuauaucaaugacaagggcaaagaggugcugguccuuugggggauucaccaccccuccaccucugccgaucaacagagccuguaccagaacgcugacgccuacguguucgugggauccagcagauauucuaagaaauuuaagccugagaucgcuauucggccgaaaguccgcggccaggaagggagaaugaauuacuauuggacacucguugagcccggagauaagaucaccuucgaagccacgggcaaccugguggugccucgguacgcguuugccauggagcgcaacgcuggguccggaauuaucaucagcgacacacccguccaugauugcaauaccacaugucaaaccccuaaaggcgccauuaacaccucucugcccuuccagaauauccacccgauuacaaucggcaagugcccuaaguaugugaaaagcacgaagcucagacuggcuaccgggcuucggaacguucccuccauucagucucgcggacuguuuggcgccaucgccggguucaucgaaggaggcuggacagggaugguggacggaugguacggcuaucaucaccagaaugagcaaggcagcggguacgcugcggaccucaaauccacccagaacgccauugaugagaucacaaauaaggucaacagcgugauugaaaagaugaauacccaguuuacggcuguuggaaaggaguucaaccaccuggaaaagagaaucgagaaucuuaacaaaaagguggacgauggcuuccuggacauuuggacauacaaugccgaacuccugguccugcucgagaacgagcggacccuggauuaucaugacucuaaugugaaaaaccuuuacgaaaagguccgcucccagcugaaaaacaaugccaaggagaucgggaacggauguuuugaguucuaucacaagugcgauaauaccuguauggagagcgugaaaaacggcacauacgacuauccuaaguacucugaagaggcuaaacucaauagagaggaaaucgaugggguuaagcuggaguccacccggauuuaucaaauccuugccauuuacagcacaguggcguccucucugguccucgugguuagccugggcgcuaucuccuuuuggaugugcucuaacggaagccugcagugccgcauuuguaucuga

SEQ ID NO: 204447 - RNA, 1701 nt, Artificial Sequence; identical to SEQ ID NO: 202112
  derived and/or modified CDS sequence (opt5) from hemagglutinin__InfluenzaA__AIC73738

SEQ ID NO: 204448 - RNA, 1701 nt, Artificial Sequence
  derived and/or modified CDS sequence (opt5) from hemagglutinin__InfluenzaA__AIC73739
augaaggccauccuggugguccuccuguacaccuucgcuacagccaacgcggacacgcuuugcauuggcuaucacgcuaauaacagcaccgauacaguugacaccgugcuggagaagaaugugacagucacccauuccgugaaccuccuggaagauaagcacaaugggaaacuuuguaagcugagaggaguugcuccccuccaucugggcaaaugcaacaucgccggguggauucugggaaauccugagugugaaucucucagcacagccuccucuuggagcuacaucguggagaccuccucuagcgacaacggcacgugcuauccgggggauuuuauuaauuacgaagaacugcgggagcagcuuuccagcgucucuuccuucgaacgcuuugagaucuuccccaagaccagcucuuggccuaaccacgacuccaauaagggagugacagccgcuuguccccaugccggcgcgaaaucuuuuuauaagaaccugaucuggcucguuaaaaagggcaauagcuacccuaaacugucccaaagcuauauuaacgauaaggggaaggaagugcuuguccuguggggaauccaccaccccuccaccacagccgaccagcagucucucuaccagaaugcugaugccuacguguucgugggcaccagcagauauuccaaaaaguuuaaaccugagauugcuauccggccgaagguccgcgaccaagaggggagaaugaacuacuauuggacgcugguugaacccggagauaaaauuacauucgaggccaccggcaaccugguggugccucgguacgcguuuacaauggaacgccaugccgggagcggaaucauuaucucugacacccccguccacgauugcaauaccacaugucagacgccugagggcgcuaucaacaccucccuccccuuccagaauauucauccgaucacaauuggcaagugcccuaaauauguuaagagcaccaagcugagacuugccacagggcugcggaacgugcccucuauccagagccgcggacucuuuggcgcuauugccggguucaucgaaggaggcuggaccgggaugguggacggaugguacggcuaucaccaccaaaaugagcagggcuccggguacgccgcugaccugaaaucuacgcagaacgcgaucgauaagauuacaaauaaagucaacagcgugaucgagaagaugaauacccaguuuaccgccguuggaaaagaguucaaccaucuugagaagagaauugaaaaucugaacaagaaaguggacgauggcuuccucgacaucuggacauacaaugcugagcugcugguccuccuggaaaacgagcggacccuugauuaucacgacuccaaugugaagaaccuguacgagaaaguccgcaaccaacucaagaauaacgccaaagaaauugggaauggauguuuugaguucuaucauaagugcgauaacacauguauggaaagcgugaagaauggcacguacgacuauccuaaauacucugaggaagccaagcugaacagagagaaaaucgaugggguuaaacuugaguccacccggaucuaucagauucuggcuaucuacagcacaguggccucuucccucguccuggugguuagccugggcgcgauuuccuuuuggaugugcucuaauggaagccuccagugccgcaucuguauuuga

SEQ ID NO: 204449 - RNA, 1701 nt, Artificial Sequence
  derived and/or modified CDS sequence (opt5) from hemagglutinin__InfluenzaA__AIC73740
augaaggccauccuggugguccuccuguacaccuucacaacggcuaacgccgacacccuuugcauuggcuaucacgcgaauaacagcacagauaccguugacacagugcuggagaaaaaugugaccgucacacauuccgugaaccuccuggaagauaagcacaaugggaaacuuuguaagcugagaggaguugcuccccuccaucugggcaaaugcaacaucgccggguggauucugggaaauccugagugugaaucucucagcaccgccuccucuuggagcuacaucguggagacguccucuagcgacaacgggaccugcuauccgggcgauuuuauuaauuacgaagaacugcgggagcagcuuuccagcgucucuuccuucgaacgcuuugagaucuuccccaagacaagcucuuggccuaaccacgacuccaauaagggagugaccgcugccuguccccaugcuggcgccaagagcuuuuauaaaaaccugaucuggcucguuaaaaagggcaauucuuacccuaaacugucccaaagcuauauuaacgauaaggggaaggaagugcuuguccuguggggaauccaccaucccccuacaaccgcggaccagcagucccucuaccagaaugccgaugcuuacguguucgugggcacgucuagauauagcaaaaaguuuaaaccggagauugccauccggcccaagguccgcgaccaagaggggagaaugaacuacuauuggacacugguugaaccuggagauaaaauuaccuucgaggcuacaggcaaccugguggugccccgguacgccuuuaccauggaacgcaaugcgggguccggaaucauuaucagcgacaccccuguccacgauugcaacacaacgugucagacccccgagggcgccaucaauacaucucucccguuccagaacauucacccuaucaccauuggcaagugccccaaauaugugaaguccacaaagcugagacuugcuaccgggcugcggaauguuccuagcauccagucucgcggacucuuuggcgccauugcuggguucaucgaaggaggcuggacggggaugguggacggaugguacggcuaucaucaccaaaacgagcagggcagcggguacgccgccgaccugaaauccacacagaaugcuaucgauaagauuaccaacaaagucaauucugugaucgagaagaugaacacccaguuuacagcgguuggaaaagaguucaaucaccuugagaagagaauugaaaaccugaauaagaaaguggacgauggcuuccucgacaucuggaccuacaacgccgagcugcugguccuccuggaaaaugagcggacacuugauuaucaugacagcaacgugaagaaccuguacgagaaaguccgcaaucaacucaagaacaaugcuaaagaaauugggaacggauguuuugaguucuaucacaagugcgauaauacguguauggaauccgugaagaacggcaccuacgacuaucccaaauacagcgaggaagccaagcuggauagagagaaaaucgacgggguucggcuugagucuacacgcaucuaucagauucuggccaucuacuccaccguggcuagcucucucguccuggugguuucccugggcgccauuagcuuuuggaugugcuccaauggaucucuccagugcagaaucuguauuuga

SEQ ID NO: 204450 - RNA, 1701 nt, Artificial Sequence
  derived and/or modified CDS sequence (opt5) from hemagglutinin__InfluenzaA__AIC73741
augaagaccaucauugcccugagcuacauccucugccugguguucgcucagaaacuucccggcaacgacaauuccacagccacgcugugucucgggcaccaugcggucccuaacggaaccauuguuaagacaaucaccaaugauagaauugaggugacaaacgcuaccgaacuggugcaaaauucuagcaucggcgagaucugcgacuccccgcaccagauucuugauggggaaaacuguacacugaucgacgcccuccugggagauccccauugcgacggcuuucagaauaaaaagugggaucuguucgucgagcggucuaaagccuauagcaacuguuacccuuaugacgugcccgauuacgcuucccuccgcucucugguugccagcuccgggacccuugaauuuaauaacgagagcuucaauugggcuggagugacgcagaacggcaccucuuccgccugcauuagaggcagcaauucuuccuuuuucagccggcugaacuggcucacacaccugaauuuuaaguauccugcgcuuaacgucaccaugcccaacaaugagcaauucgacaagcuguacaucuggggagugcaucacccugggacagauaaagaccagauuuuucucuaugcccagucuuccggccgcaucaccguuagcacgaagagaucccagcaagcugugauuccgaacaucgggucucggccccgcaucagaaauauuccuagccggaucuccauuuacuggacaaucgucaaacccggagauauucugcugaucaacagcaccggcaaucucaucgccccucgcggguacuucaagauuagaucuggaaaauccagcaucaugcggucugacgcucccauuggcaaguguaagagcgaaugcaucacaccgaacggcuccauuccuaaugacaaacccuuucagaacgugaaucgcaucaccuauggggccuguccuagauacgugaagcagucuacccugaaacuugcgacaggaaugcggaacguccccgagaagcagacgcgcggcaucuucggggccauugcuggauuuaucgaaaauggcugggaggggaugauggauggaugguauggcuucagacaccaaaacagcgagggccgggggcaggccgcugaccugaaauccacccaggccgccauugaucaaaucaauggaaagcucaacagacugauuggcaaaacaaaugaaaaguuccaucagaucgagaaggaauuuagcgagguugaagggcgcauucaggaccuugagaaauacguggaggauaccaagaucgaccuguggucuuauaacgcugaacuccugguggcgcuggagaaccagcacacaaucgaucucaccgacuccgaaaugaauaaacuguucgagaagacgaaaaagcaacuucgggaaaacgccgaggauaugggaaauggcugcuuuaagauuuaccauagaugugacaacgcuugcaucgggagcauucgcaauggcacauaugaucacaacgucuaccgggacgaggcccugaauaacagauuccagauccgcggaguggaacucaaaucuggcuacaaggacuggauucuguggaucuccuuugccaucagcugcuuccuucuguguguugcucuccugggguuuauuaugugggccugccagaaaggaaauauccgguguaacauuugcaucuga

SEQ ID NO: 204451 - RNA, 1701 nt, Artificial Sequence
  derived and/or modified CDS sequence (opt5) from hemagglutinin__InfluenzaA__AIC73742
augaaggccauccuggugguccuccuguacaccuucgcuacagccaacgcggacacgcuuugcauuggcuaucacgcuaauaacagcaccgauacaguugacaccgugcuggagaaaaaugugacagucacccauuccgugaaccuccuggaagauaagcacaaugggaaacuuuguaagcugagaggaguugcuccccuccaucugggcaaaugcaacaucgccggguggauucugggaaauccugagugugaaucucucagcacagccuccucuuggagcuacaucguggagaccuccucuagcgacaacggcacgugcuauccgggggauuuuauuaauuacgaagaacugcgggagcagcuuuccagcgucucuuccuucgaacgcuuugagaucuuccccaagaccagcucuuggccuaaccacgacuccaauaagggagugacagccgcuuguccccaugccggcgcgaaaucuuuuuauaagaaccugaucuggcucguuaaaaagggcaauagcuacccuaaacugagacaauccuauauuaacgauaaggggaaggaagugcuuguccuguggggaauccaccaccccagcaccacaaccgaccagcagucccucuaccagaaugccgaugcuuacguguucgugggcacgucucgguauagcaaaaaguuuaaaccugagauugccauccgcccgaaggucagagaccaagaggggcggaugaacuacuauuggacacugguugaacccggagauaaaauuaccuucgaggcuacaggcaaccugguggugccucgcuacgccuuuaccauggaaagaaaugcgggguccggaaucauuaucagcgacacccccguccaugauugcaacacaacgugucagaccccugagggcgccaucaauacaucucuccccuuccagaacauucacccgaucaccauuggcaagugcccuaaauaugugaaguccacaaagcugcggcuugcuaccgggcugcgcaauguucccagcauccagucuagaggacucuuuggcgccauugcuggguucaucgaaggaggcuggacggggaugguggacggaugguacggcuaucaucaccaaaacgagcagggcagcggguacgccgccgaccugaaauccacacagaaugcuaucgauaagauuaccaacaaagucaauucugugaucgagaagaugaacacccaguuuacagcgguuggaaaagaguucaaucaccuugagaagcggauugaaaaccugaaucgcaagguggacgauggcuuccucgacaucuggaccuacaacgccgagcugcugguccuccuggaaaaugagagaacacuugauuaucaugacagcaacgugaaaaaccuguacgagaagguccggaaucaacucaaaaacaaugcuaaggaaauugggaacggauguuuugaguucuaucacaaaugcgauaauacguguauggaauccgugaagaacggcaccuacgacuauccuaaguacagcgaggaagccaaacugaaucgcgagaagaucgaugggguuaaacuugagucuacaagaaucuaucagauucuggccaucuacuccaccguggcuagcucucucguccuggugguuucccugggcgccauuagcuuuuggaugugcuccaacggaucucuccagugccggaucuguauuuga

SEQ ID NO: 204452 - RNA, 1701 nt, Artificial Sequence; identical to SEQ ID NO: 204451
  derived and/or modified CDS sequence (opt5) from hemagglutinin__InfluenzaA__AIC73743

SEQ ID NO: 204453 - RNA, 1701 nt, Artificial Sequence
  derived and/or modified CDS sequence (opt5) from hemagglutinin__InfluenzaA__AIC73744
augaaggccauccuggugguccuccuguacaccuucgcuacagccaacgcggacacgcuuugcauuggcuaucacgcuaauaacagcaccgauacaguugacaccgugcuggagaagaaugugacagucacccauuccgugaaccuccuggaagauaagcacaaugggaaacuuuguaagcugagaggaguugcuccccuccaucugggcaaaugcaacaucgccggguggauucugggaaauccugagugugaaucucucagcacagccuccucuuggagcuacaucguggagaccuccucuagcgacaacggcacgugcuauccgggggauuuuauuaauuacgaagaacugcgggagcagcuuuccagcgucucuuccuucgaacgcuuugagaucuuccccaagaccagcucuuggccuaaccacgacuccaauaagggagugacagccgcuuguccccaugccggcgcgaaaucuuuuuauaagaaccugaucuggcucguuaaaaagggcaauagcuacccuaaacugaaccaauccuauauuaaugauaaggggaaggaagugcuuguccuguggggaauccaccaccccagcaccacagccgaccagcagucccucuaccagaacgcugaugccuacguguucgugggcaccucuagauauagcaaaaaguuuaaaccugagauugcuauccggccgaagguccgcgaccaagaggggagaaugaacuacuauuggacgcugguugaacccggagauaaaauuacauucgaggccaccggcaaucugguggugccucgguacgcguuuacaauggaacgcaacgccggguccggaaucauuaucagcgacacccccgcucaugauugcaauaccacaugucagacgccugagggcgccaucaacaccucucuccccuuccagaauauucacccgaucacaauuggcaagugcccuaaauaugucaaguccaccaagcugagacuugcuacagggcugcggaacgugcccagcauccagucucgcggacucuuuggcgccauugccggguucaucgaaggaggcuggaccgggaugguugacggaugguacggcuaucaucaccaaaaugagcagggcagcggguacgcugcggaccugaaauccacgcagaacgccaucgauaagauuacaaauaaagugaacucugucaucgagaagaugaauacccaguuuaccgcugugggaaaagaguucaaccaccuugagaagagaauugaaaaucugaacaagaaaguugacgauggcuuccucgacaucuggacauacaaugccgagcugcuggugcuccuggaaaacgagcggacccuugauuaucaugacagcaacgucaagaaucuguacgagaaagugcgcaaccaacucaagaauaacgccaaagaaauugggaauggauguuuugaguucuaucacaagugcgauaacacauguauggaauccgucaagaauggcacguacgacuauccuaaauacagcgaggaagcuaagcugaacagagagaaaaucgauggggugaaacuugagucuacccggaucuaucagauucuggccaucuacuccacaguugcgagcucucucgugcuggucgugucccugggcgcuauuagcuuuuggaugugcuccaauggaucucuccagugccgcaucuguauuuga

SEQ ID NO: 204454 - RNA, 1701 nt, Artificial Sequence
  derived and/or modified CDS sequence (opt5) from hemagglutinin__InfluenzaA__AIC73745
augaaggccauccuggugguccuccuguacaccuucgcuacagccaacgcggacacgcuuugcauuggcuaucacgcuaauaacagcaccgauacaguugacaccgugcuggagaagaaugugacagucacccauuccgugaaccuccuggaagauaagcacaaugggaaacuuuguaagcugagaggaguugcuccccuccaucugggcaaaugcaacaucgccggguggauucugggaaauccugagugugaaucucucagcacagccuccucuuggagcuacaucguggagaccuccucuagcgacaacggcacgugcuauccgggggauuuuauuaauuacgaagaacugcgggagcagcuuuccagcgucucuuccuucgaacgcuuugagaucuuccccaagaccagcucuuggccuaaccacgacuccaauaagggagugacagccgcuuguccccaugccggcgcgaaaucuuuuuauaagaaccugaucuggcucguuaaaaagggcaauagcuacccuaaacugucccaaagcuauauuaacgauaaggggaaggaagugcuuguccuguggggaauccaccaccccuccaccacagccgaccagcagucucucuaccagaaugcugaugccuacguguucgugggcaccagcagauauuccaaaaaguuuaaaccugagauugcuauccggccgaagguccgcgaccaagaggggagaaugaacuacuauugggcccugguugaacccggagauaaaauuacguucgaggcgacaggcaaccugguggugccucgguacgccuuuaccauggaacgcaaugcugggagcggaaucauuaucucugacacacccguccaugauugcaacaccaccugucagacaccugagggcgccaucaauacgucccuccccuuccagaacauucacccgaucaccauuggcaagugcccuaaauauguuaagagcacaaagcugagacuugcuaccgggcugcggaauauccccucuauucagagccgcggacucuuuggcgccaucgccggguucaucgaaggaggcuggacagggaugguggacggaugguacggcuaucaucaccaaaacgagcagggcuccggguacgcugcggaccugaaaucuacccagaaugccauugauaagaucacgaacaaagugaauagcgucauugagaagaugaacacacaguuuaccgcugugggaaaagaguucaaucaccuugagaagagaaucgaaaaccugaauaagaaaguugacgauggcuuccucgacauuuggaccuacaacgccgagcugcuggugcuccuggaaaaugagcggacacuugauuaucaugacuccaacgucaagaaccuguacgagaaagugcgcaaucaacucaagaacaaugccaaagaaaucgggaacggauguuuugaguucuaucacaagugcgauaauaccuguauggaaagcgucaagaacggcacauacgacuauccuaaauacucugaggaagcuaagcugaauagagagaaaaucgauggggugaaacuugaguccacgcggauuuaucagauccuggccauuuacagcaccguugcgucuucccucgugcuggucgugagccugggcgcuaucuccuuuuggaugugcucuaacggaagccuccagugccgcauuuguaucuga

SEQ ID NO: 204455 - RNA, 1701 nt, Artificial Sequence
  derived and/or modified CDS sequence (opt5) from hemagglutinin__InfluenzaA__AIC73746
augaaggccauccuggugguccuccuguacaccuucgcuacagccaacgcggacacgcuuugcauuggcuaucacgcuaauaacagcaccgauacaguugacaccgugcuggagaaaaaugugacagucacccauuccgugaaccuccuggaagauaagcacaaugggaaacuuuguaagcugagaggaguuacaccccuccaucugggcaaaugcaacaucgccggguggauucugggaaauccugagugugaaucucucagcaccgccuccucuuggagcuacaucguggagacguccucuagcgacaacgggaccugcuauccgggcgauuuuauuaauuacgaagaacugcgggagcagcuuuccagcgucucuuccuucgaacgcuuugagaucuuccccaagacaagcucuuggccuaaccacgacuccaauaagggagugaccgcugccuguccccaugcuggcgccaagagcuuuuauaagaaccugaucuggcucguuaaaaagggcaauucuuacccuaaacugucccaaagcuauauuaacgauaaggggaaggaagugcuuguccuguggggaauccaccaccccuccacaaccacggaccagcagucucucuaccagaaugcggaugccuacguguucgugggcacaagcagauauuccaaaaaguuuaaaccugagauugcuauccggccgaagguccgcgaccaagaggggagaaugaacuacuauuggacccugguugaacccggagauaaaauuacauucgaggccaccggcaaccugguggugccucgguacgcuuuuaccauggaacgcaaugccgggagcggaaucauuaucucugacacacccguccaugauugcaacacgaccugucagacaccugagggcgcgaucaauaccucccuccccuuccagaacauucacccgaucacaauuggcaagugcccuaaauauguuaagagcaccaagcugagacuugccacggggcugcggaaugugcccucuauccagagccgcggacucuuuggcgcuauugccggguucaucgaaggaggcuggacagggaugguggacggaugguacggcuaucaucaccaaaacgagcagggcuccggguacgcugccgaccugaaaucuacccagaaugccaucgauaagauuaccaacaaagucaauagcgugaucgagaagaugaacacacaguuuaccgcuguuggaaaagaguucaaucaccuugagaagagaauugaaaaccugaauaagaaaguggacgauggcuuccucgacaucuggacauacaacgcggagcugcugguccuccuggaaaaugagcggacgcuugauuaucaugacuccaacgugaagaaccuguacgagaaaguccgcaaucaacucaagaacaaugccaaagaaauugggaacggauguuuugaguucuaucacaagugcgauaauaccuguauggaaagcgugaagaacggcacauacgacuauccuaaauacucugaggaagcuaagcugaauagagagaaaaucgaugggguuaaacuugaguccacccggaucuaucagauucuggccaucuacagcacaguggccucuucccucguccuggugguuagccugggcgcuauuuccuuuuggaugugcucuaacggaagccuccagugccgcaucuguauuuga

SEQ ID NO: 204456 - RNA, 1701 nt, Artificial Sequence
  derived and/or modified CDS sequence (opt5) from hemagglutinin__InfluenzaA__AIC73747
augaaggccauccuggugguccuccuguacacccuugcuacagccaacgcggacacgcugugcauuggcuaucacgcuaauaacagcaccgauacaguugacaccgugcucgagaaaaaugugacagucacccauuccgugaaccugcuugaagauaagcacaaugggaaacuguguaagcucagaggaguugcuccccugcaucugggcaaaugcaacaucgccggguggauucucggaaauccugagugugaaucucugagcacagccuccucuuggagcuacaucguggagaccuccucuagcgacaacggcacgugcuauccgggggauuucauuaauuacgaggaacuucgggagcagcuguccagcgucucuuccuuugaacgcuucgagaucuuucccaagaccagcucuuggccuaaccacgacuccaauaagggagugacagccgcuuguccccaugccggcgcgaaaucuuucuauaagaaccucaucuggcugguuaaaaagggcaauagcuacccuaaacuuucccaaagcuauauuaacgauaaggggaaggaagugcugguccucuggggaauccaccaccccuccaccacagccgaccagcagucucuguaccagaaugcugaugccuacguguuugugggcaccagcagauauuccaaaaaguucaaaccugagauugcuauccggccgaagguccgcgaccaagaggggagaaugaacuacuauuggacgcugguugaacccggagauaaaauuacauuugaggccaccggcaaccucguggugccucgguacgcguucacaauggaacgcaauaccgggagcggaaucauuaucucugacacccccguccaugauugcaacacaacgugucagaccccugagggcgccaucaauacaucccugcccuuucagaacauucacccgaucaccauuggcaagugcccuaaauauguuaagagcacaaaacuuagacuggcuaccgggcuccggaaugugcccucuauccagagccgcggacuguucggcgccauugcuggguuuaucgaaggaggcuggacggggaugguggacggaugguacggcuaucaucaccaaaacgagcagggcuccggguacgccgccgaccuuaagucuacacagaaugcuaucgauaagauuaccaacaaagucaauagcgugaucgagaagaugaacacccaguucacagcgguuggaaaagaauuuaaucaccuggagaagagaauugaaaaccucaauaagaaaguggacgauggcuuccuggacaucuggaccuacaacgccgagcugcucguccugcuugaaaaugagcggacacuggauuaucaugacuccaacgugaagaaccucuacgagaaaguccgcaaucaacugaagaacaaugcuaaagaaauugggaacggauguuucgaguuuuaucacaagugcgauaauacguguauggaaagcgugaagaacggcaccuacgacuauccuaaauacucugaggaagccaaacuuaauagagagaagaucgaugggguuaagcuggaguccacacggaucuaucagauucucgccaucuacagcaccguggcuucuucccugguccuggugguuagccucggcgccauuuccuucuggaugugcucuaacggaagccugcagugccgcaucuguauuuga

SEQ ID NO: 204457 - RNA, 1701 nt, Artificial Sequence; identical to SEQ ID NO: 202112
  derived and/or modified CDS sequence (opt5) from hemagglutinin__InfluenzaA__AIC73748

SEQ ID NO: 204458 - RNA, 1701 nt, Artificial Sequence
  derived and/or modified CDS sequence (opt5) from hemagglutinin__InfluenzaA__AIC73749
augaagaccaucauugcccugagcuacauccucugccugguguucgcucagaaacuucccggcaacgacaauuccacagccacgcugugucucgggcaccaugcggucccuaacggaaccauuguuaagacaaucaccaaugauagaauugaggugacaaacgcuaccgaacuggugcaaaauucuagcaucggcgagaucugcgacuccccgcaccagauucuugaugggaaaaacuguacacugaucgacgcccuccugggagauccccagugcgacggcuuucagaauaagcggugggaucuguucgucgaacgcucuaaagccuauagcaacuguuacccuuaugacgugcccgauuacgcuucccucagaucucugguugccagcuccgggacccuugaguuuaaugacgaauccuucaacugggcuggagugacgcaaaauggcaccucuuccgccugcauucggggcagcaacucuuccuuuuucagccgccugaauuggcucacacauucuaacuuuaaguauccugcgcugaaugucaccaugcccaacaacgagcaguucgauaaacuuuacaucuggggagugcaccauccugggacagacaaagaucagauuuuucuguaugcccacuccagcggcagaaucaccguuuccacgaagcggucucagcaagcugugauuccgaauaucgggagccgccccagaauccggaacauuccuucccgcaucagcauuuacuggacaaucgucaaacccggagacauucuccugaucaauucuaccggcaaccugaucgccccuagaggguacuucaagauucaguccggaaaaagcucuaucaugcggagcgacgcucccauuggcaaguguaaguccgagugcaucacaccgaauggcucuauuaccaacgauaaaccuuuucagaaugugaaccgcaucaccuauggggccugucccagauacgugaagcagagcacacucaaacuggcgacgggaaugcggaaugucccugaaaagcaaacccgcggcaucuucggggccauugcuggauuuaucgagaacggcugggaagggaugaaagacggaugguauggcuucagacaccagaauagcgagggccgggggcaggccgcugaucuuaagagcacacaagccgccauugaccagaucaacggaaaacugaauagacucauuggcaagaccaacgagaaguuccaucagaucgaaaaagaguuuucugaaguugaggggcgcauucaggaucuggaaaaguacguggaggacacaaaaaucgaucuuugguccuauaaugcugagcugcucguggcgcuggaaaaccaacacaccaucgaccugacggauagcgagaugaacaaacucuucgaaaagacaaagaagcagcugcgggagaaugccgaagacaugggaaacggcugcuuuaagauuuaccauaagugugauaaugcuugcaucgggucuauuagaaacggcaccuaugaccacgacgucuaccgcgaugaggcccuuaauaaccgguuccagaucaaaggaguggagcugaaguccggcuacaaagacuggauucucuggaucagcuuugccaucuccugcuuccugcuuuguguugcucugcucggguuuauuaugugggccugccagaagggaaauaucagauguaacauuugcaucuga

SEQ ID NO: 204459 - RNA, 1701 nt, Artificial Sequence; identical to SEQ ID NO: 202112
  derived and/or modified CDS sequence (opt5) from hemagglutinin__InfluenzaA__AIC73750

SEQ ID NO: 204460 - RNA, 1701 nt, Artificial Sequence
  derived and/or modified CDS sequence (opt5) from hemagglutinin__InfluenzaA__AIC73754
augaaggccauccuggugguccuccuguacaccuucgcuacagccaacgcggacacgcuuugcauuggcuaucacgcuaauaacagcaccgauacaguugacaccgugcuggagaaaaaugugacagucacccauuccgugaaccuccuggaagauaagcacaaugggaaacuuuguaagcugagaggaguugcuccccuccaucugggcaaaugcaacaucgccggguggauucugggaaauccugagugugaaucucucagcacagccuccucuuggagcuacaucguggagaccuccucuagcgacaacggcacgugcuauccgggggauuuuauuaauuacgaagaacugcgggagcagcuuuccagcgucucuuccuucgaacgcuuugagaucuuccccaagaccagcucuuggccuaaccacgacuccaauaagggagugacagccgcuuguccccaugccggcgcgaaaucuuuuuauaagaaccugaucuggcucguuaaaaagggcaauagcuacccuaaacugucccaaagcuauauuaacgauaaggggaaggaagugcuuguccuguggggaauccaccaccccuccaccacagccgaccagcagucucucuaccagaaugcugaugccuacguguucgugggcaccagcagauauucccggaaauuuaagccugagauugcuauccgcccgaaagucagagaccaagaggggcggaugaacuacuauuggacgcugguugaacccggagauaagauuacauucgaggccaccggcaaccugguggugccucgcuacgcguuuacaauggaaagaaaugccgggagcggaaucauuaucucugacacccccguccaugauugcaacaccacaugucagacgccugagggcgcuaucaauaccucccuccccuuccagaacauucacccgaucacaauuggcaaaugcccuaaguaugugaaaagcaccaagcugcggcuugccacagggcugcgcaauguucccucuauccagagcagaggacucuuuggcgcuauugccggguucaucgaaggaggcuggaccgggaugguggacggaugguacggcuaucaucaccaaaacgagcagggcuccggguacgccgcugaccugaagucuacgcagaaugcgaucgauaaaauuacaaacaaggucaauagcgugaucgagaaaaugaacacccaguuuaccgccguuggaaaggaguucaaucaccuugagaaacggauugaaaaccugaauaagaagguggacgauggcuuccucgacaucuggacauacaacgcugagcugcugguccuccuggaaaaugagcgcacccuugauuaucaugacuccaacgugaaaaaccuguacgagaaggucagaaaucaacucaaaaacaaugccaaggaaauugggaacggauguuuugaguucuaucacaaaugcgauaauacauguauggaaagcgugaagaacggcacguacgacuauccuaaguacucugaggaagccaaacugaaucgggagaagaucgaugggguuaaacuugaguccacccgcaucuaucagauucuggcuaucuacagcacaguggccucuucccucguccuggugguuagccugggcgcgauuuccuuuuggaugugcucuaacggaagccuccagugcagaaucuguauuuga

SEQ ID NO: 204461 - RNA, 1701 nt, Artificial Sequence; identical to SEQ ID NO: 202112
  derived and/or modified CDS sequence (opt5) from hemagglutinin__InfluenzaA__AIC73755

SEQ ID NO: 204462 - RNA, 1701 nt, Artificial Sequence; identical to SEQ ID NO: 202112
  derived and/or modified CDS sequence (opt5) from hemagglutinin__InfluenzaA__AIC73756

SEQ ID NO: 204463 - RNA, 1701 nt, Artificial Sequence; identical to SEQ ID NO: 202112
  derived and/or modified CDS sequence (opt5) from hemagglutinin__InfluenzaA__AIC73757

SEQ ID NO: 204464 - RNA, 1701 nt, Artificial Sequence
  derived and/or modified CDS sequence (opt5) from hemagglutinin__InfluenzaA__AIC73758
augaaggccauccuggugguccuccuguacaccuucgcuacagccaacgcggacacgcuuugcauuggcuaucacgcuaauaacagcaccgauacaguugacaccgugcuggagaagaaugugacagucacccauuccgugaaccuccuggaagauaagcacaaugggaaacuuuguaagcugagaggaaucgcuccccuccaucugggcaaaugcaacauugccggguggauccugggaaauccugagugugaaucucucagcacagccuccucuuggagcuacauuguugagaccuccucuagcgacaacggcacgugcuauccgggggauuuuaucaauuacgaagaacugcgggagcagcuuuccagcgugucuuccuucgaacgcuuugagaucuuccccaagaccagcucuuggccuaaccacgacuccaauaagggagucacagccgcuuguccccaugccggcgcgaaaucuuuuuauaagaaccugauuuggcucgugaaaaagggcaauagcuacccuaaacugucccaaagcuauaucaacgauaaggggaaggaaguucuugugcuguggggcauucaccaccccuccaccacagccgaccagcagucucucuaccagaaugcugaugccuacgucuucgugggaaccagcagauauuccaaaaaguuuaaaccugagaucgcuauucggccgaaggugcgcgaccaagaggggagaaugaacuacuauuggacgcuggucgaacccggagauaaaaucacauucgaggccaccggcaaccugguugugccucgguacgcguuuacaauggaacgcaaugccgggagcggaauuaucaucucugacacccccgugcaugauugcaacaccacaugucagacgccugagggcgcuauuaauaccucccuccccuuccagaacauccacccgauuacaaucggcaagugcccuaaauaugucaagagcaccaagcugagacuugccacagggcugcggaaugugcccucuauucagagccgcggacucuuuggcgcuaucgccggguucaucgaaggaggcuggaccgggaugguugacggaugguacggcuaucaucaccaaaacgagcagggcuccggguacgccgcugaccugaaaucuacgcagaaugcgauugauaagaucacaaacaaagugaauagcgucauugagaagaugaacacccaguuuaccgccgugggaaaagaguucaaucaccuugagaagagaaucgaaaaccugaauaagaaaguugacgauggcuuccucgacauuuggacauacaacgcugagcugcuggugcuccuggaaaaugagcggacccuugauuaucaugacuccaacgucaagaaccuguacgagaaagugcgcaaucaacucaagaacaaugccaaagaaaucgggaacggauguuuugaguucuaucacaagugcgauaauacauguauggaaagcgucaagaacggcacguacgacuauccuaaauacucugaggaagccaagcugaauagagagaaaaucgauggggugaaacuugaguccacccggauuuaucagauccuggcuauuuacagcacaguugccucuucccucgugcuggucgugagccugggcgcgaucuccuuuuggaugugcucuaacggaagccuccagugccgcauuuguaucuga

SEQ ID NO: 204465 - RNA, 1701 nt, Artificial Sequence
  derived and/or modified CDS sequence (opt5) from hemagglutinin__InfluenzaA__AIC73760
augaaggccauccugauugugcuccuguacaccuucgcuacagccaacgcggacacgcuuugcaucggcuaucacgcuaauaacagcaccgauacagucgacaccguucuggagaagaaugugacagugacccauuccgucaaccuccuggaagauaagcacaaugggaaacuuuguaagcugagaggaguggcuccccuccaucugggcaaaugcaacauugccggguggauccugggaaauccugagugugaaucucucagcacagccuccucuuggagcuacauuguugagaccuccucuagcgacaacggcacgugcuauccgggggauuuuaucaauuacgaagaacugcgggagcagcuuuccagcgugucuuccuucgaacgcuuugagaucuuccccaagaccagcucuuggccuaaccacgacuccaauaagggagucacagccgcuuguccccaugccggcgcgaaaucuuuuuauaagaaccugauuuggcucgugaaaaagggcaauagcuacccuaaacugucccaaagcuauaucaacgauaaggggaaggaaguucuugugcuguggggcauucaccaccccuccaccacagccgaccagcagucucucuaccagaaugcugaugccuacgucuucgugggaaccagcagauauuccaaaaaguuuaaaccugagaucgcuauucggccgaaggugcgcgaccaagaggggagaaugaacuacuauuggacgcuggucgaacccggagauaaaaucacauucgaggccaccggcaaccugguugugccucgguacgcguuuacaauggaacgcaaugccgggagcggaauuaucaucucugacacccccgugcaugauugcaacaccacaugucagacgccugagggcgcuauuaauaccucccuccccuuccagaacauccacccgauuacaaucggcaagugcccuaaauaugucaagagcaccaagcugagacuugccacagggcugcggaaugugcccucuauucagagccgcggacucuuuggcgcuaucgccggguucaucgaaggaggcuggaccgggaugguugacggaugguacggcuaucaucaccaaaacgagcagggcuccggguacgccgcugaccugaaaucuacgcagaaugcgauugauaagaucacaaacaaagugaauagcgucauugagaagaugaacacccaguuuaccgccgugggaaaagaguucaaucaccuugagaagagaaucgaaaaccugaauaagaaaguugacgauggcuuccucgacauuuggacauacaacgcugagcugcuggugcuccuggaaaaugagcggacccuugauuaucaugacuccaacgucaagaaccuguacgagaaagugcgcaaucaacucaagaacaaugccaaagaaaucgggaacggauguuuugaguucuaucacaagugcgauaauacauguauggaaagcgucaagaacggcacguacgacuauccuaaauacucugaggaagccaagcugaauagagagaaaaucgauggggugaaacuugaguccacccggauuuaucagauccuggcuauuuacagcacaguugccucuucccucgugcuggucgugagccugggcgcgaucuccuuuuggaugugcucuaacggaagccuccagugccgcauuuguaucuga

SEQ ID NO: 204466 - RNA, 1701 nt, Artificial Sequence; identical to SEQ ID NO: 204465
  derived and/or modified CDS sequence (opt5) from hemagglutinin__InfluenzaA__AIC73761

SEQ ID NO: 204467 - RNA, 1701 nt, Artificial Sequence; identical to SEQ ID NO: 203992
  derived and/or modified CDS sequence (opt5) from hemagglutinin__InfluenzaA__AIC73762

SEQ ID NO: 204468 - RNA, 1701 nt, Artificial Sequence
  derived and/or modified CDS sequence (opt5) from hemagglutinin__InfluenzaA__AIC73763
augaaggccauccuggugguccuccuguacaccuucgcuacagccaacgcggacacgcuuugcauuggcuaucacgcuaauaacagcaccgauacaguugacaccgugcuggagaaaaaugugacagucacccauuccgugaaccuccuggaagauaagcacaaugggaaacuuuguaagcugagaggaguugcuccccuccaucugggcaaaugcaacaucgccggguggauucugggaaauccugagugugaaucucucagcacagccuccucuuggagcuacaucguggagaccuccucuagcgacaacggcacgugcuauccgggggauuuuauuaauuacgaagaacugcgggagcagcuuuccagcgucucuuccuucgaacgcuuugagaucuuccccaagaccagcucuuggccuaaccacgacuccaauaagggagugacagccgcuuguccccaugccggcgcgaaaucuuuuuauaagaaccugaucuggcucguuaaaaagggcaauagcuacccuaaaauuucccaaagcuauaucaacgauaaggggaaggaagugcugguccuuuggggcauucaccaccccuccaccacagccgaccagcagucucuguaccagaaugcugaugccuacguguucgugggaaccagcagauauuccaaaaaguuuaaaccugagaucgcuauucggccgaagguccgcgaccaagaggggagaaugaacuacuauuggacgcucguugaacccggagauaaaaucacauucgaggccaccggcaaccugguggugccucgguacgcguuuacaauggaacgcaaugccgggagcggaauuaucaucucugacacccccguccaugauugcaacaccacaugucagacgccugagggcgcuauuaauaccucccugcccuuccagaacauccacccgauuacaaucggcaagugcccuaaauauguuaagagcaccaagcucagacuggccacagggcuucggaaugugcccucuauucagagccgcggacuguuuggcgcuaucgccggguucaucgaaggaggcuggaccgggaugguggacggaugguacggcuaucaucaccaaaacgagcagggcuccggguacgccgcugaccucaaaucuacgcagaaugcgauugauaagaucacaaacaaagucaauagcgugauugagaagaugaacacccaguuuaccgccguuggaaaagaguucaaucaccuggagaagagaaucgaaaaccuuaauaagaaaguggacgauggcuuccuggacauuuggacauacaacgcugagcuccugguccugcucgaaaaugagcggacccuggauuaucaugacuccaacgugaagaaccuuuacgagaaaguccgcaaucaacugaagaacaaugccaaagaaaucgggaacggauguuuugaguucuaucacaagugcgauaauacauguauggaaagcgugaagaacggcacguacgacuauccuaaauacucugaggaagccaagcucaauagagagaaaaucgaugggguuaagcuggaguccacccggauuuaucagauccuugcuauuuacagcacaguggccucuucccugguccucgugguuagccugggcgcgaucuccuuuuggaugugcucuaacggaagccugcagugccgcauuuguaucuga

SEQ ID NO: 204469 - RNA, 1701 nt, Artificial Sequence; identical to SEQ ID NO: 202112
  derived and/or modified CDS sequence (opt5) from hemagglutinin__InfluenzaA__AIC73765

SEQ ID NO: 204470 - RNA, 1701 nt, Artificial Sequence; identical to SEQ ID NO: 202112
  derived and/or modified CDS sequence (opt5) from hemagglutinin__InfluenzaA__AIC73766

SEQ ID NO: 204471 - RNA, 1701 nt, Artificial Sequence
  derived and/or modified CDS sequence (opt5) from hemagglutinin__InfluenzaA__AIC73767
augaaggccauccuggugguccuccuguacaccuucgcuacagccaacgcggacacgcuuugcauuggcuaucacgcuaauaacagcaccgauacaguugacaccgugcuggagaagaaugugacagucacccauuccgugaaccuccuggaagauaagcacaaugggaaacuuuguaagcugagaggaguugcuccccuccaucugggcaaaugcaacaucgccggguggauucugggaaauccugagugugaaucucucagcacagccuccucuuggagcuacaucguggagaccuccucuagcgacaacggcacgugcuauccgggggauuuuauuaauuacgaagaacugcgggagcagcuuuccagcgucucuuccuucgaacgcuuugagaucuuccccaagaccagcucuuggccuaaccacgacuccaauaagggagugacagccgcuuguccccaugccggcgcgaaaucuuuuuauaagaaccugaucuggcucauuaaaaagggcaauagcuacccuaaacugucccaaagcuauaucaacgauaaggggaaggaaguucuugugcuguggggcauucaccaccccuccaccacagccgaccagcagucucucuaccagaaugcugaugccuacgucuucgugggaaccagcagauauuccaaaaaguuuaaaccugagaucgcuauucggccgaaggugcgcgaccaagaggggagaaugaacuacuauuggacgcuggucgaacccggagauaaaaucacauucgaggccaccggcaaccugguugugccucgguacgcguuuacaauggaacgcaaugccgggagcggaauuaucaucucugacacccccgugcaugauugcaacaccacaugucagacgccugagggcgcuauuaauaccucccuccccuuccagaacauccacccgauuacaaucggcaagugcccuaaauaugucaagagcaccaagcugagacuugccacagggcugcggaauauucccucuauccagagccgcggacucuuuggcgcuaucgccggguucauugaaggaggcuggaccgggaugguggacggaugguacggcuaucaucaccaaaacgagcagggcuccggguacgccgcugaccugaaaucuacgcagaaugcgaucgauaagauuacaaacaaaguuaauagcgugaucgagaagaugaacacccaguuuaccgccgucggaaaagaguucaaucaccuugagaagagaauugaaaaccugaauaagaaaguggacgauggcuuccucgacaucuggacauacaacgcugagcugcugguucuccuggaaaaugagcggacccuugauuaucaugacuccaacgugaagaaccuguacgagaaaauccgcaaucaacucaagaacaaugccaaagaaauugggaacggauguuuugaguucuaucacaagugcgauaauauguguauggaaagcgucaagaacggcacauacgacuauccuaaauacucugaggaagccaagcugaauagagagaaaaucgauggggugaaacuugaguccacgcggauuuaucagauccuggcuauuuacagcaccgucgccucuucccucgugcugguugugagccugggcgcgaucuccuuuuggaugugcucuaacggaagccuccagugccgcauuuguaucuga

SEQ ID NO: 204472 - RNA, 1701 nt, Artificial Sequence; identical to SEQ ID NO: 202112
  derived and/or modified CDS sequence (opt5) from hemagglutinin__InfluenzaA__AIC73768

SEQ ID NO: 204473 - RNA, 1701 nt, Artificial Sequence; identical to SEQ ID NO: 202112
  derived and/or modified CDS sequence (opt5) from hemagglutinin__InfluenzaA__AIC73769

SEQ ID NO: 204474 - RNA, 1701 nt, Artificial Sequence; identical to SEQ ID NO: 202112
  derived and/or modified CDS sequence (opt5) from hemagglutinin__InfluenzaA__AIC73770

SEQ ID NO: 204475 - RNA, 1701 nt, Artificial Sequence; identical to SEQ ID NO: 202112
  derived and/or modified CDS sequence (opt5) from hemagglutinin__InfluenzaA__AIC73771

SEQ ID NO: 204476 - RNA, 1701 nt, Artificial Sequence
  derived and/or modified CDS sequence (opt5) from hemagglutinin__InfluenzaA__AIC73772
augaaggccauccuggugguccuccuguacaccuucgcuacagccaacgcggacacgcuuugcauuggcuaucacgcuaauaacagcaccgauacaguugacaccgugcuggagaagaaugugacagucacccauuccgugaaccuccuggaagauaagcacaaugggaaacuuuguaagcugagaggaguugcuccccuccaucugggcaaaugcaacaucgccggguggauucugggaaauccugagugugaaucucucagcacagccuccucuuggagcuacaucguggagaccuccucuagcgacaacggcacgugcuauccgggggauuuuauuaauuacgaagaacugcgggagcagcuuuccagcgucucuuccuucgaacgcuuugagaucuuccccaagaccagcucuuggccuaaccacgacuccaauaagggagugacagccgcuuguccccaugccggcgcgaaaucuuuuuauaagaaccugaucuggcucguuaaaaagggcaauagcuacccuaaacugucccaaagcuauauuaacgauaaggggaaggaagugcuuguccuguggggaauccaccaccccuccaccacagccgaccagcagucucucuaccagaaugcugaugccuacguguucgugggcaccagcagauauuccaaaaaguuuaaaccugagauugcuauccggccgaagguccgcgaccaagaggggagaaugaacuacuauuggacgcugguugaacccggagauaaaauuacauucgaggccaccggcaaccugguggugccucgguacgcguuuacaauggaacgcaaugccgggagcggaaucauuaucucugacacccccguccaugauugcaacaccacaugucagacgccugagggcgcuaucaauaccucccuccccuuccagaacauucacccgaucacaauuggcaagugcccuaaauauguuaagagcaccaagcugagacuugccacagggcugcggaaugugcccucuauccagagccgcggacucuuuggcgcuauugccggguucaucgaaggaggcuggaccgggaugguggacggaugguacggcuaucaucaccaaaacgagcagggcuccggguacgccgcugaccugaaaucuacgcagaaugcgaucgauaagauuacaaacaaagucaauagcgugaucgagaagaugaacacccaguuuaccgccguuggaaaagaguucaaucaccuugagaagagaauugaaaaccugaauaagaaaguggacgauggcuuccucgacaucuggacauacaacgcugagcugcugguccuccuggaaaaugagcggacccuugauuaucaugacuccaacgugaagaaccuguacgagaaaguccgcaaucaacucaagaacaaugccaaagaaauugggaacggauguuuugaguucuaucacaagugcgauaauacauguauggaaagcgugaagaacggcacguacgacuauccuaaauacucugaggaagccaagcugaauagagagaaaaucgaugggguuaaacuugaguccacccggguguaucagauccuggcuauuuacagcacagucgccucuucccucgugcugguugugagccugggcgcgaucuccuuuuggaugugcucuaacggaagccuccagugccgcauuuguaucuga

SEQ ID NO: 204477 - RNA, 1701 nt, Artificial Sequence; identical to SEQ ID NO: 202112
  derived and/or modified CDS sequence (opt5) from hemagglutinin__InfluenzaA__AIC73773

SEQ ID NO: 204478 - RNA, 1701 nt, Artificial Sequence; identical to SEQ ID NO: 202112
  derived and/or modified CDS sequence (opt5) from hemagglutinin__InfluenzaA__AIC73775

SEQ ID NO: 204479 - RNA, 1701 nt, Artificial Sequence; identical to SEQ ID NO: 202112
  derived and/or modified CDS sequence (opt5) from hemagglutinin__InfluenzaA__AIC73776

SEQ ID NO: 204480 - RNA, 1701 nt, Artificial Sequence; identical to SEQ ID NO: 204476
  derived and/or modified CDS sequence (opt5) from hemagglutinin__InfluenzaA__AIC73777

SEQ ID NO: 204481 - RNA, 1701 nt, Artificial Sequence
  derived and/or modified CDS sequence (opt5) from hemagglutinin__InfluenzaA__AIC73778
augaagaccaucauugcccugagcuacauccucugccugguguucgcucagaaacuucccggcaacgacaauuccacagccacgcugugucucgggcaccaugcggucccuaacggaaccauuguuaagacaaucaccaaugauagaauugaggugacaaacgcuaccgaacuggugcaaaauucuagcaucggcgagaucugcgacuccccgcaccagauucuugauggggaaaacuguacacugaucgacgcccuccugggagauccccagugcgacggcuuucagaauaaaaagugggaucuguucgucgagcggucuaaagcccauagcaacuguuauccuuacgacgugcccgauuaugcuucccuccgcucucugguugccagcuccgggacccuugaauuuaauaacgagagcuucaauuggacgggagugacccaaaacggcacaucuuccgcuugcauuagacggagcaauucuuccuuuuucagccgccugaacuggcucacccaccugaauuuuaaguacccugcccuuaacgucacaaugcccaacaaugagcaguucgacaagcuguauaucuggggcgugcaucacccugggaccgauaaagaccagauuuuucucuacgcgcagucuuccggaagaaucacgguuagcacaaagcggucccaacaggccgugauuccgaacaucggcucucgccccagaauccggaauauuccuagccgcaucuccauuuauuggaccaucgucaaacccggggauauucugcugaucaacagcacaggaaaucucaucgcuccuagaggcuacuucaagauucggucugggaaauccagcaucaugcgcucugacgcccccauuggaaaguguaagagcgaaugcaucaccccgaacggcuccauuccuaaugacaaacccuuucagaacgugaauagaaucaccuacggcgcuuguccucgguaugugaagcagucuacacugaaacuugccacggggaugcgcaacguccccgagaagcaaaccagaggaaucuucggcgcgauugccggguuuaucgaaaauggaugggagggcaugguugaugggugguacggauuccggcaccagaacagcgagggcagaggccaggcugccgaccugaaauccacacaagcugccauugaucagaucaaugggaagcucaaccgccugauuggaaaaaccaaugaaaaguuccaucagaucgagaaggaauuuagcgagguggaaggccggauucaggaccuugagaaauauguggaggauacaaagaucgaccuguggucuuacaacgccgaacuccuggucgcucuggagaaccaacacaccaucgaucucacggacuccgaaaugaauaaacuguucgagaagaccaaaaagcagcuuagagaaaacgcggaggauauggggaauggaugcuuuaagauuuaucauaaaugugacaacgccugcaucggcagcauucgcaaugggacauacgaucacaacguguaucgggacgaggcucugaauaacagauuccagaucaagggcguugaacucaaaucuggauacaaggacuggauucuguggaucuccuuugccaucagcugcuuccuucuguguguggcccuccugggcuuuauuaugugggcuugccagaaagggaauauccgcuguaacauuugcaucuga

SEQ ID NO: 204482 - RNA, 1701 nt, Artificial Sequence; identical to SEQ ID NO: 204481
  derived and/or modified CDS sequence (opt5) from hemagglutinin__InfluenzaA__AIC73779

SEQ ID NO: 204483 - RNA, 1701 nt, Artificial Sequence; identical to SEQ ID NO: 204481
  derived and/or modified CDS sequence (opt5) from hemagglutinin__InfluenzaA__AIC73780

SEQ ID NO: 204484 - RNA, 1701 nt, Artificial Sequence; identical to SEQ ID NO: 203070
  derived and/or modified CDS sequence (opt5) from hemagglutinin__InfluenzaA__AIC73781

SEQ ID NO: 204485 - RNA, 1701 nt, Artificial Sequence; identical to SEQ ID NO: 204481
  derived and/or modified CDS sequence (opt5) from hemagglutinin__InfluenzaA__AIC73782

SEQ ID NO: 204486 - RNA, 1701 nt, Artificial Sequence; identical to SEQ ID NO: 204481
  derived and/or modified CDS sequence (opt5) from hemagglutinin__InfluenzaA__AIC73783

SEQ ID NO: 204487 - RNA, 1701 nt, Artificial Sequence; identical to SEQ ID NO: 204481
  derived and/or modified CDS sequence (opt5) from hemagglutinin__InfluenzaA__AIC73784

SEQ ID NO: 204488 - RNA, 1701 nt, Artificial Sequence; identical to SEQ ID NO: 202112
  derived and/or modified CDS sequence (opt5) from hemagglutinin__InfluenzaA__AIC73785

SEQ ID NO: 204489 - RNA, 1701 nt, Artificial Sequence; identical to SEQ ID NO: 204481
  derived and/or modified CDS sequence (opt5) from hemagglutinin__InfluenzaA__AIC73786

SEQ ID NO: 204490 - RNA, 1701 nt, Artificial Sequence; identical to SEQ ID NO: 202112
  derived and/or modified CDS sequence (opt5) from hemagglutinin__InfluenzaA__AIC73787

SEQ ID NO: 204491 - RNA, 1701 nt, Artificial Sequence; identical to SEQ ID NO: 202112
  derived and/or modified CDS sequence (opt5) from hemagglutinin__InfluenzaA__AIC73788

SEQ ID NO: 204492 - RNA, 1701 nt, Artificial Sequence
  derived and/or modified CDS sequence (opt5) from hemagglutinin__InfluenzaA__AIC73789
augaagaccaucauugcccugagcuacauccucugccugguguucgcucagaaacccccuggcaacgacaauuccacagccacgcuuugucuggggcaccaugcggucccgaacggaaccauuguuaagacaaucaccaaugauagaauugaggugacaaacgcuaccgaacucgugcaaaauucuagcaucggcgagaucugcgacucuccccaccagauucuggauggggaaaacuguacacuuaucgacgcccugcucggagauccucagugcgacggcuuucagaauaaaaagugggaucuguucgucgagcgguccaaagccuauagcaacuguuaccccuaugacgugccugauuacgcuucccugcgcucucucguugccagcuccgggacccuggaauuuaauaacgagagcuucaauugggcuggagugacgcaaaacggcaccucuuccgccugcauuagaggcagcaauucuuccuuuuucagccggcuuaacuggcugacacaucucaauuuuaaguaucccgcgcugaacgucaccaugccuaacaaugagcaguucgacaaacuuuacaucuggggagugcaccauccggggacagauaaggaccagauuuuucuguaugcccagucuuccggccgcaucaccguuagcacgaagagaucccaacaggcugugauucccaacaucgggucucggccucgcaucagaaauauucccagccggaucuccauuuacuggacaaucgucaaaccuggagauauucuccugaucaacagcaccggcaaucugaucgcuccccgcggguacuucaagauuagaucuggaaaauccagcaucaugcggucugacgccccgauuggcaaguguaagagcgaaugcaucacaccuaacggcuccauucccaaugacaaaccuuuucagaacgugaaucgcaucaccuauggggccugucccagauacgugaagcagucuacccucaaacuggcgacaggaaugcggaacguccccgagaagcaaacgcgcggcaucuucggggccauugcuggauuuaucgaaaauggcugggaggggaugguugauggaugguauggcuucagacaccagaacagcgagggccgggggcaggccgcugaccuuaaauccacccaagccgccauugaucagaucaauggaaagcugaacagacucauuggcaaaacaaaugaaaaguuccaccagaucgagaaggaauuuagcgagguggaagggcgcauucaggaccuggagaaauacguggaggauaccaagaucgaccuuuggucuuauaacgcugaacugcucgucgcgcuggagaaccaacauacaaucgaucugaccgacuccgaaaugaauaaacucuucgagaagacgaaaaagcagcugcgggaaaacgccgaggauaugggaaauggcugcuuuaagauuuaccacaaaugugacaacgcuugcaucgggagcauuagaaauggcacauaugaucaugacguguaccgcgacgaggcccuuaacaaucgguuccagaucaagggaguugaacugaaaucuggcuacaaggauuggauucucuggaucuccuuugccaucagcugcuuccugcuuugugugguccugcucggguuuauuaugugggcuugccagaaaggaaacaucagauguaauauuugcaucuga

SEQ ID NO: 204493 - RNA, 1701 nt, Artificial Sequence
  derived and/or modified CDS sequence (opt5) from hemagglutinin__InfluenzaA__AIC73790
augaaggccauccuggugguccuccuguacaccuucgcuacaacgaacgccgacacccuuugcauuggcuaucacgcgaauaacagcacagauaccguugacacagugcuggagaaaaaugugaccgucacacauuccgugaaccuccuggaagauaagcacaaugggaaacuuuguaagcugagaggaguugcuccccuccaucugggcaaaugcaacaucgccggguggauucugggaaauccugagugugaaucucucagcaccgccuccucuuggagcuacaucguggagacguccucuagcgacaacgggaccugcuauccgggcgauuuuauuaauuacgaagaacugcgggagcagcuuuccagcgucucuuccuucgaacgcuuugagaucuuccccaagacaagcucuuggccuaaccacgacuccaauaagggagugaccgcugccuguccccaugcuggcgccaagagcuuuuauaagaaccugaucuggcucguuaaaaagggcaauucuuacccuaaacugagacaauccuauauuaacgauaaggggaaggaagugcuuguccuguggggaauccaccaccccagcacaaccacggaccagcagucccucuaccagaaugcggaugccuacguguucgugggcacaucucgguauagcaaaaaguuuaaaccugagauugcuauccgcccgaaggucagagaccaagaggggcggaugaacuacuauuggacccugguugaacccggagauaaaauuacauucgaggccaccggcaaccugguggugccucgcuacgcuuuuaccauggaaagaaaugccggguccggaaucauuaucagcgacacacccguccaugauugcaacacgaccugucagacaccugagggcgcgaucaauaccucucuccccuuccagaacauucacccgaucacaauuggcaagugcccuaaauaugugaaguccaccaagcugcggcuugccacggggcugcgcaauguucccagcauccagucuagaggacucuuuggcgcuauugccggguucaucgaaggaggcuggacagggaugguggacggaugguacggcuaucaucaccaaaacgagcagggcagcggguacgcugccgaccugaaauccacccagaaugccaucgauaagauuaccaacaaagucaauucugugaucgagaagaugaacacacaguuuaccgcuguuggaaaagaguucaaucaccuugagaagcggauugaaaaccugaauaagaaaguggacgauggcuuccucgacaucuggacauacaacgcggagcugcugguccuccuggaaaaugagcgcacgcuugauuaucaugacagcaacgugaagaaccuguacgagaaagucagaaaucaacucaagaacaaugccaaagaaauugggaacggauguuuugaguucuaucacaagugcgauaauaccuguauggaauccgugaagaacggcacauacgacuauccuaaauacagcgaggaagcuaagcugaaucgggagaaaaucgaugggguuaaacuugagucuacccgcaucuaucagauucuggccaucuacuccacaguggccagcucucucguccuggugguuucccugggcgcuauuagcuuuuggaugugcuccaacggaucucuccagugcagaaucuguauuuga

SEQ ID NO: 204494 - RNA, 1701 nt, Artificial Sequence
  derived and/or modified CDS sequence (opt5) from hemagglutinin__InfluenzaA__AIC73791
augaaggccauccuggugguccuccuguacaccuucgcuacagccaacgcggacacgcuuugcauuggcuaucacgcuaauaacagcaccgauacaaucgacaccguucuggagaagaaugugacagugacccauuccgucaaccuccuggaagauaagcacaaugggaaacuuuguaagcugagaggaguggcuccccuccaucugggcaaaugcaacauugccggguggauccugggaaauccugagugugaaucucucagcacagccuccucuuggagcuacauuguugagaccuccucuagcgacaacggcacgugcuauccgggggauuuuaucaauuacgaagaacugcgggagcagcuuuccagcgugucuuccuucgaacgcuuugagaucuuccccaagaccagcucuuggccuaaccacgacuccaauaagggagucacagccgcuuguccccaugccggcgcgaaaucuuuuuauaagaaccugauuuggcucgugaaaaagggcaauagcuacccuaaacugucccaaagcuauaucaacgauaaggggaaggaaguucuugugcuguggggcauucaccaccccuccaccacagccgaccagcagucucucuaccagaaugcugaugccuacgucuucgugggaaccagcagauauuccaaaaaguuuaaaccugagaucgcuauucggccgaaggugcgcgaccaagaggggagaaugaacuacuauuggacgcuggucgaacccggagauaaaaucacauucgaggccaccggcaaccugguugugccucgguacgcguuuacaauggaacgcaaugccgggagcggaauuaucaucucugacacccccgugcaugauugcaacaccacaugucagacgccugagggcgcuauuaauaccucccuccccuuccagaacauccacccgauuacaaucggcaagugcccuaaauaugucaagagcaccaagcugagacuugccacagggcugcggaaugugcccucuauucagagccgcggacucuuuggcgcuaucgccggguucaucgaaggaggcuggaccgggaugguugacggaugguacggcuaucaucaccaaaacgagcagggcuccggguacgccgcugaccugaaaucuacgcagaaugcgauugauaagaucacaaacaaagugaauagcgucauugagaagaugaacacccaguuuaccgccgugggaaaagaguucaaucaccuugagaagagaaucgaaaaccugaauaagaaaguugacgauggcuuccucgacauuuggacauacaacgcugagcugcuggugcuccuggaaaaugagcggacccuugauuaucaugacuccaacgucaagaaccuguacgagaaagugcgcaaucaacucaagaacaaugccaaagaaaucgggaacggauguuuugaguucuaucacaagugcgauaauacauguauggaaagcgucaagaacggcacguacgacuauccuaaauacucugaggaagccaagcugaauagagagaaaaucgauggggugaaacuugaguccacccggauuuaucagauccuggcuauuuacagcacaguugccucuucccucgugcuggucgugagccugggcgcgaucuccuuuuggaugugcucuaacggaagccuccagugccgcauuuguaucuga

SEQ ID NO: 204495 - RNA, 1701 nt, Artificial Sequence; identical to SEQ ID NO: 202112
  derived and/or modified CDS sequence (opt5) from hemagglutinin__InfluenzaA__AIC73792

SEQ ID NO: 204496 - RNA, 1701 nt, Artificial Sequence; identical to SEQ ID NO: 204476
  derived and/or modified CDS sequence (opt5) from hemagglutinin__InfluenzaA__AIC73793

SEQ ID NO: 204497 - RNA, 1701 nt, Artificial Sequence
  derived and/or modified CDS sequence (opt5) from hemagglutinin__InfluenzaA__AIC73794
augaagaccaucauuggcgugagcuacauccugugccucgucuucgcccagaaacugcccgggaacgacaauuccacagcuacgcuuugucugggacaccaugccguuccuaacggcaccauugugaagacaaucaccaaugauagaauugaggugacaaacgcgaccgaacucguccaaaauucuagcaucggggagaucugcgacuccccgcaccagauucuggauggagaaaacuguacacuuaucgacgcucugcucggcgauccccagugcgacggguuucagaauaaaaagugggaucuguucguggagcggucuaaagccuauagcaacuguuacccuuaugacguucccgauuacgccucccugcgcucucucguggcuagcuccggaacccuggaauuuaauaacgagagcuucaauugggccggcgucacgcaaaacggcaccucuuccagcugcauuagagggucuaauuccagcuuuuucucucggcuuaacuggcugacacaucucaauuccaaguauccugcucugaacgugaccaugcccaacaaugagcaguuugacaagcuguacaucuggggaguucaccauccuggcacagauaaagaccagauuuuccuguaugcccagagcuccgggcgcaucaccgugucuacgaagagaagccaacaggcggucauuccgaacaucggaucccggccccgcaucagagauauuccuagccggaucucuauuuacuggacaaucgugaaacccggcgacauucuccugaucaauuccaccgggaaccugaucgccccucgcggauacuuuaagauuagaagcggcaaaucuagcaucaugcgguccgacgcucccauuggcaaguguaagucugaaugcaucacaccgaaugggagcauuccuaacgauaaacccuuccagaaugugaaccgcaucaccuauggagccuguccuagauacgucaagcaguccacccucaaacuggcuacaggcaugcggaauguucccgagcgccaaacgagagggaucuuuggagccauugcgggcuucaucgaaaacgggugggagggaaugguggacggcugguauggcuuucggcaccagaauagcgaggggagaggacaggccgcugaucuuaagucuacccaagccgcuauugaccagaucaacggcaaacugaaucgccucauugggaagacaaacgaaaaauuccaccagaucgagaaggaguucuccgaaguggaaggacggauucaggaucuggagaaguacgucgaggacaccaaaaucgaucuuuggagcuauaaugccgaacugcucguggcccuggagaaccaacauacaaucgaccugaccgauucugaaaugaacaagcucuuugagaaaacgaagaaacagcugagagaaaaugcugaggacaugggcaacgggugcuucaagauuuaccacaagugugauaaugcgugcaucggcuccauucgcaacggaacauaugaccaugacguuuaccgggaugaggcccuuaauaacagauuucagaucaaaggcguggaacuuaagagcggguacaaagacuggauucucuggaucuccuucgcuaucucuugcuuucugcuuugugucgcccugcucggauucauuaugugggccugccagaagggcaauauccgcuguaacauuugcaucuga

SEQ ID NO: 204498 - RNA, 1701 nt, Artificial Sequence; identical to SEQ ID NO: 202112
  derived and/or modified CDS sequence (opt5) from hemagglutinin__InfluenzaA__AIC73796

SEQ ID NO: 204499 - RNA, 1701 nt, Artificial Sequence
  derived and/or modified CDS sequence (opt5) from hemagglutinin__InfluenzaA__AIC73797
augaagaccaucauugcccugagcuacauccucugccugguguucgcucagaaacuucccggcaacgacaauuccacagccacgcugugucucgggcaccaugcggucccuaacggaaccauuguuaagacaaucaccaaugauagaauugaggugacaaacgcuaccgaacuggugcaaaauucuagcaucggcgagaucugcgacuccccgcaccagauucuugauggggaaaacuguacacugaucgacgcccuccugggagauccccagugcgacggcuuucagaauaaaaagugggaucuguucgucgagcggucuaaagccuauagcaacuguuacccuuaugacgugcccgauuacgcuucccuccgcucucugguugccagcuccgggacccuugaauuuaauaacgagagcuucaauugggcuggagugacgcaaaacggcaccucuuccagcugcauuagaggcucuaauuccagcuuuuucucucggcugaacuggcucacacaucuuaauuccaaguauccugcccugaacgucaccaugcccaacaaugagcaguuugacaagcuguacaucuggggagugcaccauccugggacagauaaagaccagauuuuccucuaugcgcagagcuccggccgcaucaccguuucuacgaagagaagccaacaggccgugauuccgaacaucgggucccggccccgcaucagagauauuccuagccggaucucuauuuacuggacaaucgucaaacccggagacauucugcugaucaauuccaccggcaaccucaucgcuccucgcggguacuuuaagauuagaagcggaaaaucuagcaucaugcgguccgacgcccccauuggcaaguguaagucugaaugcaucacaccgaauggcagcauuccuaacgauaaacccuuccagaaugugaaccgcaucaccuauggggcuuguccuagauacgugaagcaguccacccugaaacuugccacaggaaugcggaauguccccgagcgccaaacgagaggcaucuuuggggcgauugccggauucaucgaaaacggcugggaggggaugguugacggaugguauggcuuucggcaccagaauagcgagggcagagggcaggcugccgaucugaagucuacccaagcugccauugaccagaucaacggaaaacucaaucgccugauuggcaagacaaacgaaaaauuccaccagaucgagaaggaguucuccgaaguggaagggcggauucaggaucuugagaaguacguggaggacaccaaaaucgaucuguggagcuauaaugccgaacuccuggucgcucuggagaaccaacauacaaucgaccucaccgauucugaaaugaacaagcuguuugagaaaacgaagaaacagcuuagagaaaaugcggaggacaugggaaacggcugcuucaagauuuaccacaagugugauaaugccugcaucggguccauucgcaacggcacauaugaccaugacguguaccgggaugaggcucugaauaacagauuucagaucaaaggaguugaacucaagagcggcuacaaagacuggauucuguggaucuccuucgccaucucuugcuuucuucuguguguggcccuccugggguucauuaugugggcuugccagaagggaaauauccgcuguaacauuugcaucuga

SEQ ID NO: 204500 - RNA, 1701 nt, Artificial Sequence; identical to SEQ ID NO: 204499
  derived and/or modified CDS sequence (opt5) from hemagglutinin__InfluenzaA__AIC73798

SEQ ID NO: 204501 - RNA, 1701 nt, Artificial Sequence; identical to SEQ ID NO: 204499
  derived and/or modified CDS sequence (opt5) from hemagglutinin__InfluenzaA__AIC73800

SEQ ID NO: 204502 - RNA, 1701 nt, Artificial Sequence; identical to SEQ ID NO: 204499
  derived and/or modified CDS sequence (opt5) from hemagglutinin__InfluenzaA__AIC73801

SEQ ID NO: 204503 - RNA, 1701 nt, Artificial Sequence; identical to SEQ ID NO: 204499
  derived and/or modified CDS sequence (opt5) from hemagglutinin__InfluenzaA__AIC73802

SEQ ID NO: 204504 - RNA, 1701 nt, Artificial Sequence; identical to SEQ ID NO: 204499
  derived and/or modified CDS sequence (opt5) from hemagglutinin__InfluenzaA__AIC73803

SEQ ID NO: 204505 - RNA, 1701 nt, Artificial Sequence; identical to SEQ ID NO: 204499
  derived and/or modified CDS sequence (opt5) from hemagglutinin__InfluenzaA__AIC73804

SEQ ID NO: 204506 - RNA, 1701 nt, Artificial Sequence; identical to SEQ ID NO: 204499
  derived and/or modified CDS sequence (opt5) from hemagglutinin__InfluenzaA__AIC73805

SEQ ID NO: 204507 - RNA, 1701 nt, Artificial Sequence; identical to SEQ ID NO: 204499
  derived and/or modified CDS sequence (opt5) from hemagglutinin__InfluenzaA__AIC73806

SEQ ID NO: 204508 - RNA, 1701 nt, Artificial Sequence
  derived and/or modified CDS sequence (opt5) from hemagglutinin__InfluenzaA__AIC73807
augaaggccauccuggugguccuccuguacaccuucgcuacagccaacgcggacacgcuuugcauuggcuaucacgcuaauaacagcaccgauacaguugacaccgugcuggagaagaaugugacagucacccauuccgugaaccuccuggaagauaagcacaaugggaaacuuuguaagcugagaggaguugcuccccuccaucugggcaaaugcaacaucgccggguggauucugggaaauccugagugugaaucucucagcacagccuccucuuggagcuacaucguggagaccuccucuagcgacaacggcacgugcuauccgggggauuuuauuaauuacgaagaacugcgggagcagcuuuccagcgucucuuccuucgaacgcuuugagaucuuccccaagaccagcucuuggccuaaccacgacuccaauaagggagugacagccgcuuguccccaugccggcgcgaaaucuuuuuauaagaaccugaucuggcucguuaaaaagggcaauagcuacccuaaacugucccaaagcuauauuaacaauaaggggaaggaagugcuuguccuguggggaauccaccaccccuccaccacagccgaucagcagucucucuaccagaacgcugacgccuacguguucgugggcaccagcagauauuccaaaaaguuuaaaccugagauugcuauccggccgaagguccgcgaucaagaggggagaaugaacuacuauuggacgcugguugaacccggagacaaaauuacauucgaggccaccggcaaucugguggugccucgguacgcguuuacaauggaacgcaacgccgggagcggaaucauuaucucugauacccccguccaugacugcaauaccacaugucagacgccugagggcgcuaucaacaccucccuccccuuccagaauauucacccgaucacaauuggcaagugcccuaaauauguuaagagcaccaagcugagacuugccacagggcugcggaacgugcccucuauccagagccgcggacucuuuggcgcuauugccggguucaucgaaggaggcuggaccgggaugguggauggaugguacggcuaucaucaccaaaaugagcagggcuccggguacgccgcugaccugaaaucuacgcagaacgcgaucgacaagauuacaaauaaagucaacagcgugaucgagaagaugaauacccaguuuaccgccguuggaaaagaguucaaccaccuugagaagagaauugaaaaucugaacaagaaaguggaugacggcuuccucgauaucuggacauacaaugcugagcugcugguccuccuggaaaacgagcggacccuugacuaucaugauuccaacgugaagaaucuguacgagaaaguccgcaaccaacucaagaauaacgccaaagaaauugggaauggauguuuugaguucuaucacaagugcgacaacacauguauggaaagcgugaagaauggcacguacgauuauccuaaauacucugaggaagccaagcugaacagagagaaaaucgacgggguuaaacuugaguccacccggaucuaucagauucuggcuaucuacagcacaguggccucuucccucguccuggugguuagccugggcgcgauuuccuuuuggaugugcucuaauggaagccuccagugccgcaucuguauuuga

SEQ ID NO: 204509 - RNA, 1701 nt, Artificial Sequence; identical to SEQ ID NO: 204499
  derived and/or modified CDS sequence (opt5) from hemagglutinin__InfluenzaA__AIC73808

SEQ ID NO: 204510 - RNA, 1701 nt, Artificial Sequence
  derived and/or modified CDS sequence (opt5) from hemagglutinin__InfluenzaA__AIC73809
augaaggccauccuggugguccuccuguacaccuucgcuacagccaacgcggacacgcuuugcauuggcuaucacgcuaauaacagcaccgauacaguugacaccgugcuggagaagaaugugacagucacccauuccgugaaccuccuggaagauaagcacaaugggaaacuuuguaagcugagaggaguugcuccccuccaucugggcaaaugcaacaucgccggguggauucugggaaauccugagugugaaucucucagcacagccuccucuuggagcuacaucguggagaccuccucuagcgacaacggcacgugcuauccgggggauuuuauuaauuacgaagaacugcgggagcagcuuuccagcgucucuuccuucgaacgcuuugagaucuuccccaagaccagcucuuggccuaaccacgacuccaauaagggagugacagccgcuuguccccaugccggcgcgaaaucuuuuuauaagaaccugaucuggcucguuaaaaagggcaauagcuacccuaaacugagacaauccuauauuaacgauaaggggaaggaagugcuuguccuguggggaauccaccaccccagcaccacaaccgaccagcagucccucuaccagaaugccgaugcuuacguguucgugggcacgucucgguauagcaaaaaguuuaaaccugagauugccauccgcccgaaggucagagaccaagaggggcggaugaacuacuauuggacacugguugaacccggagauaaaauuaccuucgaggcuacaggcaaccugguggugccucgcuacgccuuuaccauggaaagaaaugcgggguccggaaucauuaucagcgacacccccguccaugauugcaacacaacgugucagaccccugagggcgccaucaauacaucucuccccuuccagaacauucacccgaucaccauuggcaagugcccuaaauaugugaaguccacaaagcugcggcuugcuaccgggcugcgcaauguucccagcauccagucuagaggacucuuuggcgccauugcuggguucaucgaaggaggcuggacggggaugguggacggaugguacggcuaucaucaccaaaacgagcagggcagcggguacgccgccgaccugaaauccacacagaaugcuaucgauaagauuaccaacaaagucaauucugugaucgagaagaugaacacccaguuuacagcgguuggaaaagaguucaaucaccuugagaagcggauugaaaaccugaauaagaaaguggacgauggcuuccucgacaucuggaccuacaacgccgagcugcugguccuccuggaaaaugagcgcacacuugauuaucaugacagcaacgugaagaaccuguacgagaaagucagaaaucaacucaagaacaaugcuaaagaaauugggaacggauguuuugaguucuaucacaagugcgauaauacguguauggaauccgugaagaacggcaccuacgacuauccuaaauacagcgaggaagccaagcugaaucgggagaaaaucgaugagguuaaacuugaaucuacacgcaucuaucagauucuggccaucuacuccaccguggcuagcucucucguccuggugguuucccugggggccauuagcuuuuggaugugcuccaacggcucucuccagugcagaaucuguauuuga

SEQ ID NO: 204511 - RNA, 1701 nt, Artificial Sequence
  derived and/or modified CDS sequence (opt5) from hemagglutinin__InfluenzaA__AIC73810
augaaggccauccuggugguccuccuguacaccuucgcuacagccaacgcggacacgcuuugcauuggcuaucacgcuaauaacagcaccgauacaguugacaccgugcuggagaaaaaugugacagucacccauuccgugaaccuccuggaagauaagcacaaugggaaacuuuguaagcugagaggaguugcuccccuccaucugggcaaaugcaacaucgccggguggauucugggaaauccugagugugaaucucucagcacagccuccucuuggagcuacaucguggagaccuccucuagcgacaacggcacgugcuauccgggggauuuuauuaauuacgaagaacugcgggagcagcuuuccagcgucucuuccuucgaacgcuuugagaucuuccccaagaccagcucuuggccuaaccacgacuccaauaagggagugacagccgcuuguccccaugccggcgcgaaaucuuuuuauaagaaccugaucuggcucguuaaaaagggcaauagcuacccuaaacugucccaaagcuauauuaacgauaaggggaaggaagugcuuguccuguggggaauccaccaccccuccaccacagccgaccagcagucucucuaccagaaugcugaugccuacguguucgugggcaccagcagauauuccaaaaaguuuaaaccugagauugcuauccggccgaagguccgcgaccaagaggggagaaugaacuacuauuggacgcugguugaacccggagauaaaauuacauucgaggccaccggcaaccugguggugccucgguacgcguuuacaauggaacgcaaugccgggagcggaaucauuaucucugacacccccguccaugauugcaacaccacaugucagacgccugagggcgcuaucaauaccucccuccccuuccagaacauucacccgaucacaauuggcaagugcccuaaauauguuaagagcaccaagcugagacuugccacagggcugcggaaugugcccucuauccagagccgcggacucuuuggcgcuauugccggguucaucgaaggaggcuggaccgggaugguggacggaugguacggcuaucaucaccaaaacgagcagggcuccggguacgccgcugaccugaaaucuacgcagaaugcgaucgauaagauuacaaacaaagucaauagcgugaucgagaagaugaacacccaguuuaccgccguuggaaaagaguucaaucaccuugagaagagaauugaaaaccugaauaagaaaguggacgauggcuuccucgacaucuggacauacaacgcugagcugcugguccuccuggaaaaugagcggacccuugauuaucaugacuccaacgugaagaaccuguacgagaaaguccgcaaucaacucaagaacaaugccaaagaaauugggaacggauguuuugaguucuaucacagaugcgauaauacauguauggaaagcgugaagaacggcacguacgacuauccuaaguacucugaggaagccaaacugaaucgggagaagaucgaugggguuaaacuugaguccacccgcaucuaucagauucuggcuaucuacagcacaguggccucuucccucguccuggugguuagccugggcgcgauuuccuuuuggaugugcucuaacggaagccuccagugcagaaucuguauuuga

SEQ ID NO: 204512 - RNA, 1701 nt, Artificial Sequence
  derived and/or modified CDS sequence (opt5) from hemagglutinin__InfluenzaA__AIC73813
augaaggccauccuggugguccuccuguacaccuucgcuacagccaacgcggacacgcuuugcauuggcuaucacgcuaauaacagcaccgauacaguugacaccgugcuggagaagaaugugacagucacccauuccgugaaccuccuggaagauaagcacaaugggaaacuuuguaagcugagaggaguugcuccccuccaucugggcaaaugcaacaucgccggguggauucugggaaauccugagugugaaucucucagcacagccuccucuuggagcuacaucguggagaccuccucuagcgacaacggcacgugcuauccgggggauuuuauuaauuacgaagaacugcgggagcagcuuuccagcgucucuuccuucgaacgcuuugagaucuuccccaagaccagcucuuggccuaaccacgacuccaauaagggagugacagccgcuuguccccaugccggcgcgaaaucuuuuuauaagaaccugaucuggcucguuaaaaagggcaauagcuacccuaaacugucccaaagcuauauuaacgauaaggggaaggaagugcuuguccuguggggaauccaccaccccuccaccacagccgaccagcagucucucuaccagaaugcugaugccuacguguucgugggcaccagcagauauuccaaaaaguuuaaaccugagauugcuauccggccgaagguccgcgaccaagaggggagaaugaacuacuauuggacgcugguugaacccggagauaaaauuacauucgaggccaccggcaaccugguggugccucgguacgcguuuacaauggaacgcaaugccgggagcggaaucauuaucucugacacccccguccaugauugcaacaccacaugucagacgccugagggcgcuaucaauaccucccuccccuuccagaacauucacccgaucacaauuggcaagugcccuaaauauguuaagagcaccaagcugagacuugccacagggcugcggaaugugcccucuauccagagccgcggacucuuuggcgcuauugccggguucaucgaaggaggcuggaccgggaugguggacggaugguacggcuaucaucaccaaaacgagcagggcuccggguacgccgcugaccugaaaucuacgcagaaugcgaucgauaagauuacaaacaaagucaauagcgugaucgagaagaugaacacccaguuuaccgccguuggaaaagaguucaaucaccuugagaagagaauugaaaaccugaauaagaaaguggacgauggcuuccucgacaucuggacauacaacgcugagcugcugguccuccuggaaaaugagcggacccuugauuaucaugacuccaacgugaagaaccuguacgagaaaguccgcaaucaacucaagaacaaugccaaagaaauugggaacggauguuuugaguucuaucacaagugcgauaauacauguauggaaagcgugaagaacggcacguacgacuauccuaaauacucugaggaagccaagcugaauagagagaaaaucgaugggguuaaacuugaguccacccggaucuaucagauucuggcuaucuacagcacagccgcgucuucccucgugcuggucauuagccugggcgcuaucuccuuuuggaugugcucuaacggaagccuccagugccgcauuuguaucuga

SEQ ID NO: 204513 - RNA, 1701 nt, Artificial Sequence
  derived and/or modified CDS sequence (opt5) from hemagglutinin__InfluenzaA__AIC73815
augaagaccaucauugcccugagcuacauccucugccugguguucgcucagaaaauucccggcaacgacaauuccacagccacgcuuugucuggggcaccaugcggucccuaacggaaccaucguuaagacaauuaccaaugauagaaucgaggugacaaacgcuaccgaacucgugcaaaauucuagcaucggcgagauuugcgacuccccgcaccagauccuggauggggaaaacuguacacuuauugacgcccugcucggagauccccagugcgacggcuuucagaauaaaaagugggaucuguucgucgagcggucuaaagccuauagcaacuguuacccuuaugacgugcccgauuacgcuucccugcgcucucucguugccagcuccgggacccuggaauuuaauaacgagagcuucaauuggacgggagugacccaaaacggcacaucuuccgcuugcaucagacggagcagcuccagcuuuuucucucgccuuaauuggcugacccaucucaacuauacauacccugcccugaaugucaccaugcccaacaacgagcaguuugacaaacuuuauauuuggggcgugcaccauccugggacggauaaggaccagaucuuccuguacgcgcaguccagcggaagaauuacaguuuccaccaagcggucucaacaggccgugaucccgaauaucggcagccgcccccggauuagagauaucccuucccgcauuagcaucuacuggacaauugucaagcccggggacauccuccugaucaacucuaccggaaaucugauugcuccuagaggcuauuuuaaaauccgguccgggaagucuucuauuaugcgcagcgacgcccccaucggaaaauguaaguccgaaugcauuaccccgaacggcucuaucccuaaugauaagcccuuccagaacgugaauagaaucacauacggcgcuuguccucgguaugugaaacacagcacgcucaagcuggccaccgggaugcgcaacguccccgagaaacagacaagaggaauuuuuggcgcgaucgccggguucauugaaaauggaugggagggcaugguugacgggugguacggauuucggcaccaaaacuccgagggcagaggccaggcugccgaucuuaagagcacccaggcugccaucgaccaaauuaaugggaaacugaaccgccucaucggaaagacaaaugaaaaauuccaucagauugagaaggaguucucugaaguggaaggccggauccaggaucuggagaaguauguggaggacaccaaaaucgaucuuugguccuacaacgccgaacugcucgucgcucuggagaaucagcacacgauugaccugacagauagcgaaaugaacaagcucuuugagaaaaccaagaaacaacugagagaaaacgcggaggacauggggaauggaugcuucaagaucuaucauaagugugauaacgccugcauuggcucuauccgcaaugggaccuacgaccacaacguguaccgggacgaggcucuuaauaacagauuucagauuaaaggcguugaacugaaguccggauauaaagauuggauccucuggaucagcuucgccauuuccugcuuucugcuuuguguggcccugcucggcuucaucaugugggcuugccagaaggggaauauucgcuguaacaucugcauuuga

SEQ ID NO: 204514 - RNA, 1701 nt, Artificial Sequence; identical to SEQ ID NO: 203992
  derived and/or modified CDS sequence (opt5) from hemagglutinin__InfluenzaA__AIC73817

SEQ ID NO: 204515 - RNA, 1701 nt, Artificial Sequence; identical to SEQ ID NO: 202112
  derived and/or modified CDS sequence (opt5) from hemagglutinin__InfluenzaA__AIC73819

SEQ ID NO: 204516 - RNA, 1701 nt, Artificial Sequence
  derived and/or modified CDS sequence (opt5) from hemagglutinin__InfluenzaA__AIC73820
augaagaccaucauugcccugagcuacauccucugccugguguucgcucagaaaauucccggcaacgacaauuccacagccacgcuuugucuggggcaccaugcggucccuaacggaaccaucguuaagacaauuaccaaugauagaaucgaggugacaaacgcuaccgaacucgugcaaaauucuagcaucggcgagauuugcgacuccccgcaccagauccuggauggggaaaacuguacacuuauugacgcccugcucggagauccccagugcgacggcuuucagaauaaaaagugggaucuguucgucgagcggucuaaagccuauagcaacuguuacccuuaugacgugcccgauuacgcuucccugcgcucucucguugccagcuccgggacccuggaauuuaauaacgagagcuucaauuggacgggagugacccaaaacggcacaucuuccgcuugcaucagacggagcagcuccagcuuuuucucucgccuuaauuggcugacccaucucaacuauacauacccugcccugaaugucaccaugcccaacaacgagcaguuugacaaacuuuauauuuggggcgugcaccauccugggacggauaaggaccagaucuuccuguacgcgcaguccagcggaagaauuacaguuuccaccaagcggucucaacaggccgugaucccgaauaucggcagccgcccccggauuagagauaucccuucccgcauuagcaucuacuggacaauugucaagcccggggacauccuccugaucaacucuaccggaaaucugauugcuccuagaggcuauuuuaaaauccgguccgggaagucuucuauuaugcgcagcgacgcccccaucggaaaauguaaguccgaaugcauuaccccgaacggcucuaucccuaaugauaagcccuuccagaacgugaauagaaucacauacggcgcuuguccucgguaugugaaacacagcacgcucaagcuggccaccgggaugcgcaacguccccgagaaacagacaagaggaauuuuuggcgcgaucgccggguucauugaaaauggaugggagggcaugguugacgggugguacggauuucggcaccaaaacuccgagggcagaggccaggcugccgaucuuaagagcacccaggcugccaucgaccaaauuaaugggaaacugaaccgccucaucggaaagacaaaugaaaaauuccaucagauugagaaggaguucucugaaguggaaggccggauccaggaucuggagaaguauaucgaggacaccaaaauugaucuuugguccuacaacgccgaacugcucguggcucuggagaaucagcacacgaucgaccugacagauagcgaaaugaacaagcucuuugagaaaaccaagaaacaacugagagaaaacgcggaggacauggggaauggaugcuucaagauuuaucauaagugugauaacgccugcaucggcucuauucgcaaugggaccuacgaccacaacgucuaccgggacgaggcucuuaauaacagauuucagaucaaaggcguggaacugaaguccggauauaaagauuggauccucuggauuagcuucgccaucuccugcuuucugcuuuguguugcccugcucggcuucauuaugugggcuugccagaaggggaauauccgcuguaacauuugcaucuga

SEQ ID NO: 204517 - RNA, 1701 nt, Artificial Sequence; identical to SEQ ID NO: 202112
  derived and/or modified CDS sequence (opt5) from hemagglutinin__InfluenzaA__AIC73821

SEQ ID NO: 204518 - RNA, 1701 nt, Artificial Sequence; identical to SEQ ID NO: 204476
  derived and/or modified CDS sequence (opt5) from hemagglutinin__InfluenzaA__AIC73824

SEQ ID NO: 204519 - RNA, 1701 nt, Artificial Sequence; identical to SEQ ID NO: 202112
  derived and/or modified CDS sequence (opt5) from hemagglutinin__InfluenzaA__AIC73825

SEQ ID NO: 204520 - RNA, 1701 nt, Artificial Sequence
  derived and/or modified CDS sequence (opt5) from hemagglutinin__InfluenzaA__AIC73827
augaaggccauccuggugguccuccuguacaccuucgcuacagccaacgcggacacgcuuugcauuggcuaucacgcuaauaacagcaccgauacaguugacaccgugcuggagaagaaugugacagucacccauuccgugaaccuccuggaagauaagcacaaugggaaacuuuguaagcugagaggaguugcuccccuccaucugggcaaaugcaacaucgccggguggauucugggaaauccugagugugaaccgcucucuacagccagcuccuggucuuacaucguggagaccagcuccucugacaacggcacgugcuaucccggggauuuuauuaauuacgaagaacugcgggagcagcuuagcuccgucagcucuuucgaacgcuuugagaucuucccuaagaccuccagcuggcccaaccacgacucuaauaagggagugacagccgcuuguccucaugccggcgcgaaauccuuuuauaagaaccugaucuggcucguuaaaaagggcaauagcuaccccaaacugucucaauccuauauuaacgauaaggggaaggaagugcuuguccuguggggaauccaccacccuagcaccacagccgaccagcagucccucuaccagaaugcugaugccuacguguucgugggcaccucuagauauagcaaaaaguuuaaaccggagauugcuauccggcccaagguccgcgaccaagaggggagaaugaacuacuauuggacgcugguugaaccuggagauaaaauuacauucgaggccaccggcaaccugguggugccccgguacgcguuuacaauggaacgcaaugccggguccggaaucauuaucagcgacaccccuguccaugauugcaacaccacaugucagacgcccgagggcgcuaucaauaccucucucccguuccagaacauucacccuaucacaauuggcaagugccccaaauaugugaaguccaccaagcugagacuugccacagggcugcggaauguuccuagcauccagucucgcggacucuuuggcgcuauugccggguucaucgaaggaggcuggaccgggaugguggacggaugguacggcuaucaucaccaaaacgagcagggcagcggguacgccgcugaccugaaauccacgcagaaugcgaucgauaagauuacaaacaaagucaauucugugaucgagaagaugaacacccaguuuaccgccguuggaaaagaguucaaucaccuugagaagagaauugaaaaccugaauaagaaaguggacgauggcuuccucgacaucuggacauacaacgcugagcugcugguccuccuggaaaaugagcggacccuugauuaucaugacagcaacgugaagaaccuguacgagaaaguccgcaaucaacucaagaacaaugccaaagaaauugggaacggauguuuugaguucuaucacaagugcgauaauacauguauggaauccgugaagaacggcacguacgacuaucccaaauacagcgaggaagccaagcugaauagagagaaaaucgaugggguuaaacuugagucuacccggaucuaucagauucuggcuaucuacuccacaguggccagcucucucauucuggucgugucccugggcgcgaucagcuuuuggaugugcuccaacggaucucuccagugccgcauuuguaucuga

SEQ ID NO: 204521 - RNA, 1701 nt, Artificial Sequence
  derived and/or modified CDS sequence (opt5) from hemagglutinin__InfluenzaA__AIC73828
augaaggccauccuggugguccuccuguacaccuucgcuacagccaacgcggacacgcuuugcauuggcuaucacgcuaauaacagcaccgauacaguugacaccgugcuggagaagaaugugacagucacccauuccgugaaccuccuggaagauaagcacaaugggaaacuuuguaagcugagaggaguugcuccccuccaucugggcaaaugcaacaucgccggguggauucugggaaauccugagugugaaucucucagcacagccuccucuuggagcuacaucguggagaccuccucuagcgacaacggcacgugcuauccgggggauuuuauuaauuacgaagaacugcgggagcagcuuuccagcgucucuuccuucgaacgcuuugagaucuuccccaagaccagcucuuggccuaaccacgacuccaauaagggagugacagccgcuuguccccaugccggcgcgaaaucuuuuuauaagaaccugaucuggcucguuaaaaagggcaauagcuacccuaaacugucccaaagcuauauuaacgauaaggggaaggaagugcuuguccuguggggaauccaccaccccuccaccacagccgaccagcagucucucuaccagaaugcugaugccuacguguucgugggcaccagcagauauuccaaaaaguuuaaaccugagauugcuauccggccgaagguccgcgaccaagaggggagaaugaacuacuauuggacgcugguugaacccggagauaaaauuacauucgaggccaccggcaaccugguggugccucgguacgcguuuacaauggaacgcaaugccgggagcggaaucauuaucucugacacccccguccaugauugcaacaccacaugucagacgccugagggcgcuaucaauaccucccuccccuuccagaacauucacccgaucacaauuggcaagugcccuaaauauguuaagagcaccaagcugagacuugccacagggcugcggaaugugcccucuauccagagccgcggacucuuuggcgcuauugccggguucaucgaaggaggcuggaccgggaugguggacggaugguacggcuaucaucaccaaaacgagcagggcuccggguacgccgcugaccugaaaucuacgcagaaugcgaucgauaagauuacaaacaaagucaauagcgugaucgagaagaugaacacccaguuuaccgccguuggaaaagaguucaaucaccuugagaagagaauugaaaaccugaauaagaaaguggacgauggcuuccucgacaucuggacauacaacgcugagcugcugguccuccuggaaaaugagcggacccuugauuaucaugacuccaacgugaagaaccuguacgagaaaguccgcaaucaacucaagacaaacgccaaagaaauugggaauggauguuuugaguucuaucacaagugcgauaacacguguauggaaagcgugaagaauggcaccuacgacuauccuaaauacucugaggaagccaagcugaacagagagaaaaucgaugggguuaaacuugaguccacacggaucuaucagauucuggcuaucuacagcaccgccgcgucuucccucgugcuggucgugagccugggcgcuauuuccuuuuggaugugcucuaauggaagccuccagugccgcaucuguauuuga

SEQ ID NO: 204522 - RNA, 1701 nt, Artificial Sequence
  derived and/or modified CDS sequence (opt5) from hemagglutinin__InfluenzaA__AIC73830
augaaggccauccuggugguccuccuguacaccuucgcuacagccaacgcggacacgcuuugcauuggcuaucacgcuaauaacagcaccgauacaguugacaccgugcuggagaaaaaugugacagucacccauuccgugaaccuccuggaagauaagcacaaugggaaacuuuguaagcugaaaggaguugcgccccuccaucugggcaagugcaacaucgccggguggauucugggaaauccugagugugaaucucucagcacagcuuccucuuggagcuacaucguggagaccuccucuagcgacaacggcacgugcuauccgggggauuuuauuaauuacgaagaacugagagagcagcuuuccagcgucucuuccuucgaacgguuugagaucuuccccaagaccagcucuuggccuaaccacgacuccaauaaaggagugacagccgcuuguccccaugccggcgccaagagcuuuuauaaaaaccugaucuggcucguuaagaaaggcaauucuuacccuaagcugucccaaagcuauauuaacgauaaggggaaagaagugcuuguccuguggggaauccaccaccccuccaccacagccgaccagcagucucucuaccagaaugcugaugccuacguguucgugggcaccagccgcuauuccaagaaauuuaagccugagauugcuaucagaccgaaaguccgggaccaagaggggcgcaugaacuacuauuggacgcugguugaacccggagauaagauuacauucgaggccaccggcaaccugguggugccuagauacgcguuuacaauggaacggaaugccgggagcggaaucauuaucucugacacccccguccaugauugcaacaccacaugucagacgccugagggcgcuaucaauaccucccuccccuuccagaacauucacccgaucacaauuggcaaaugcccuaaguauguuaagagcaccaaacugcgccuugccacagggcugagaaaugugcccucuauccagagccggggacucuuuggcgcuauugccggguucaucgaaggaggcuggaccgggaugguggacggaugguacggcuaucaucaccaaaacgagcagggcuccggguacgccgcugaccugaagucuacgcagaaugcgaucgauaaaauuacaaacaaggucaauagcgugaucgagaaaaugaacacccaguuuaccgccguuggaaaggaguucaaucaccuugagaagcgcauugaaaaccugaauaaaaagguggacgauggcuuccucgacaucuggacauacaacgcugagcugcugguccuccuggaaaaugagagaacccuugauuaucaugacuccaacgugaaaaaccuguacgagaagguccggaaucaacucaaaaacaaugccaaggaaauugggaacggauguuuugaguucuaucacaagugcgauaauacauguauggaaagcgugaaaaacggcacguacgacuauccuaaguacucugaggaagccaaacugaaucgcgagaagaucgaugggguuaaacuugaguccaccagaaucuaucagauucuggcuaucuacagcacaguggccucuucccucguccuggugguuagccugggcgcgauuuccuuuuggaugugcucuaacggaagccuccagugccggaucuguauuuga

SEQ ID NO: 204523 - RNA, 1701 nt, Artificial Sequence
  derived and/or modified CDS sequence (opt5) from hemagglutinin__InfluenzaA__AIC73833
augaaggccauccuggugguccuccuguacaccuucgcuacagccaacgcggacacgcuuugcauuggcuaucacgcuaauaacagcaccgauacaguugacaccgugcuggagaagaaugugacagucacccauuccgugaaccuccuggaagauaagcacaaugggaaacuuuguaagcugagaggaguugcuccccuccaucugggcaaaugcaacaucgccggguggauucugggaaauccugagugugaaucucucagcacagccuccucuuggagcuacaucguggagaccuccucuagcgacaacggcacgugcuauccgggggauuuuauuaauuacgaagaacugcgggagcagcuuuccagcgucucuuccuucgaacgcuuugagaucuuccccaagaccagcucuuggccuaaccacgacuccaauaagggagugacagccgcuuguccccaugccggcgcgaaaucuuuuuauaagaaccugaucuggcucguuaaaaagggcaauagcuacccuaaacugucccaaagcuauauuaacgauaaggggaaggaagugcuuguccuguggggaauccaccaccccuccaccacagccgaccagcagucucucuaccagaaugcugaugccuacguguucgugggcaccagcagauauuccaaaaaguuuaaaccugagauugcuauccggccgaagguccgcgaccaagaggggagaaugaacuacuauuggacgcugguugaacccggagauaaaauuacauucgaggccaccggcaaccugguggugccucgguacgcguuuacaauggaacgcaaugccgggagcggaaucauuaucucugacacccccguccaugauugcaacaccacaugucagacgccugagggcgcuaucaauaccucccuccccuuccagaacauucacccgaucacaauuggcaagugcccuaaauauguuaagagcaccaagcugagacuugccacagggcugcggaaugugcccucuauccagagccgcggacucuuuggcgcuauugccggguucaucgaaggaggcuggaccgggaugguggacggaugguacggcuaucaucaccaaaacgagcagggcuccggguacgccgcugaccugaaaucuacgcagaaugcgaucgauaagauuacaaacaaagucaauagcgugaucgagaagaugaacacccaguuuaccgccguuggaaaagaguucaaucaccuugagaagagaauugaaaaccugaauaagaaaguggacgauggcuuccucgacaucuggacauacaacgcugagcugcugguccuccuggaaaaugagcggacccuugauuaucaugacuccaacgugaagaaccuguacgagaaaguccgcaaucaacucaagaacaaugccaaagaaauugggaacggauguuuugaguucuaucacaagugcgauaauacauguauggaaagcgugaagaacggcacguacgacuauccuaaauacucugaggaagccaagcugaauagagagaaaaucgaugggguuaaacuugaguccacccggaucuaucagauucuggcuaucuacagcacagccgcgucuucccucgugcuggucgugagccugggcgcuauuuccuuuuggaugugcucuaacggaagccuccagugccgcaucuguauuuga

SEQ ID NO: 204524 - RNA, 1701 nt, Artificial Sequence
  derived and/or modified CDS sequence (opt5) from hemagglutinin__InfluenzaA__AIC73834
augaaggccauccuggugguccuccuguacaccuucgcuacagccaacgcggacacgcuuugcauuggcuaucacgcuaauaacagcaccgauacaguugacaccgugcuggagaaaaaugugacagucacccauuccgugaaccuccuggaagauaagcacaaugggaaacuuuguaagcugagaggaguugcuccccuccaucugggcaaaugcaacaucgccggguggauucugggaaauccugagugugaaucucucagcacagccuccucuuggagcuacaucguggagaccuccucuagcgacaacggcacgugcuauccgggggauuuuauuaauuacgaagaacugcgggagcagcuuuccagcgucucuuccuucgaacgcuuugagaucuuccccaagaccagcucuuggccuaaccacgacuccaauaagggagugacagccgcuuguccccaugauggcgccaagagcuuuuauaagaaccugaucuggcucguuaaaaagggcaauucuuacccuaaacugucccaaagcuauauuaacgacaaggggaaggaagugcuuguccuguggggaauccaccaccccuccaccacagcgggccagcagucucucuaccagaaugccgaugcuuacguguucguggggaccagcagauauuccaaaaaguuuaaaccugagauugccauccggccgaagguccgcgaccaagagggaagaaugaacuacuauuggacgcugguugaacccggcgauaaaauuacauucgaggcuaccgggaaccugguggugccucgguacgccuuuacaauggaacgcaaugcgggaagcggcaucauuaucucugacacccccguccaugauugcaacaccacaugucagacgccugagggcgccaucaauaccucccuccccuuccagaacauucacccgaucacaauugggaagugcccuaaauauguuaagagcaccaagcugagacuugcuacaggacugcggaaugugcccucuauccagagccgcggccucuuuggggccauugcuggauucaucgaaggcggguggaccggaaugguggacggcugguacggcuaucaucaccaaaacgagcagggguccggauacgccgccgaccugaaaucuacgcagaaugcuaucgauaagauuacaaacaaagucaauagcgugaucgagaagaugaacacccaguuuaccgcgguuggcaaagaguucaaucaccuugagaagagaauugaaaaccugaauaagaaaguggacgauggguuccucgacaucuggacauacaacgccgagcugcugguccuccuggaaaaugagcggacccuugauuaucaugacuccaacgugaagaaccuguacgagaaaguccgcaaucaacucaagaacaaugcuaaagaaauuggaaacggcuguuuugaguucuaucacaagugcgauaauacauguauggaaagcgugaagaacgggacguacgacuauccuaaauacucugaggaagccaagcugaauagagagaaaaucgauggcguuaaacuugaguccacccggaucuaucagauucuggccaucuacagcacaguggcuucuucccucguccuggugguuagccugggagccauuuccuuuuggaugugcucuaacggcagccuccagugccgcaucuguauuuga

SEQ ID NO: 204525 - RNA, 1701 nt, Artificial Sequence
  derived and/or modified CDS sequence (opt5) from hemagglutinin__InfluenzaA__AIC73835
augaaggccauccuggugguccuccuguacaccuucgcuacagccaacgcggacacgcuuugcauuggcuaucacgcuaauaacagcaccgauacaguugacaccgugcuggagaagaaugugacagucacccauuccgugaaccuccuggaagauaagcacaaugggaaacuuuguaagcugagaggaguugcuccccuccaucugggcaaaugcaacaucgccggguggauucugggaaauccugagugugaaucucucagcacagccuccucuuggagcuacaucguggagaccuccucuagcgacaacggcacgugcuauccgggggauuuuauuaauuacgaagaacugcgggagcagcuuuccagcgucucuuccuucgaacgcuuugagaucuuccccaagaccagcucuuggccuaaccacgacuccaauaagggagugacagccgcuuguccccaugccggcgcgaaaucuuuuuauaagaaccugaucuggcucguuaaaaagggcaauagcuacccuaaacugucccaaagcuauauuaacgauaaggggaaggaagugcuuguccuguggggaauccaccaccccuccaccacagccgaccagcagucucucuaccagaaugcugaugccuacguguucgugggcaccagcagauauuccaaaaaguuuaaaccugagauugcuauccggccgaagguccgcgaccaagaggggagaaugaacuacuauuggacgcugauugaacccggagauaaaaucacauucgaggccaccggcaaccugguugugccucgguacgcguuuacaauggaacgcaaugccgggagcggaauuaucaucucugacacccccgugcaugauugcaacaccacaugucagacgccugagggcgcuauuaauaccucccuccccuuccagaacauccacccgauuacaaucggcaagugcccuaaauaugucaagagcaccaagcugagacuugccacagggcugcggaaugugcccucuauucagagccgcggacucuuuggcgcuaucgccggguucaucgaaggaggcuggaccgggaugguugacggaugguacggcuaucaucaccaaaacgagcagggcuccggguacgccgcugaccugaaaucuacgcagaaugcgauugauaagaucacaaacaaagugaauagcgucauugagaagaugaacacccaguuuaccgccgugggaaaagaguucaaucaccuugagaagagaaucgaaaaccugaauaagaaaguugacgauggcuuccucgacauuuggacauacaacgcugagcugcuggugcuccuggaaaaugagcggacccuugauuaucaugacuccaacgucaagaaccuguacgagaaagugcgcaaucaacucaagaacaaugccaaagaaaucgggaacggauguuuugaguucuaucacaagugcgauaauacauguauggaaagcgucaagaacggcacguacgacuauccuaaauacucugaggaagccaagcugaauagagagaaaaucgauggggugaaacuugaguccacccggauuuaucagauccuggcuauuuacagcacaguugccucuucccucgugcuggucgugagccugggcgcgaucucccucuggaugugcucuaacggaagccugcagugccgcauuuguaucuga

SEQ ID NO: 204526 - RNA, 1701 nt, Artificial Sequence; identical to SEQ ID NO: 204468
  derived and/or modified CDS sequence (opt5) from hemagglutinin__InfluenzaA__AIC73836

SEQ ID NO: 204527 - RNA, 1701 nt, Artificial Sequence
  derived and/or modified CDS sequence (opt5) from hemagglutinin__InfluenzaA__AIC73837
augaagaccaucauugcccugagcuacauccucugccugguguucgcucagaaacuucccggcaacgacaauuccacagccacgcugugucucgggcaccaugcggucccuaacggaaccauuguuaagacaaucaccaaugauagaauugaggugacaaacgcuaccgaacuggugcaaaauucuagcaucggcgagaucugcgacuccccgcaccagauucuugauggggaaaacuguacacugaucgacgcccuccugggagauccccagugcgacggcuuucagaauaaaaagugggaucuguucgucgagcggucuaaagccuauagcaacuguuacccuuaugacgugcccgauuacgcuucccuccgcucucugguugccagcuccgggacccuugaauuuaauaacgagagcuucaauugggcuggagugacgcaaaacggcaccucuuccgccugcauuagaggcagcaauucuuccuuuuucagccggcugaacuggcucacacaucugaauuuuaaguauccugcgcuuaacgucaccaugcccaacaaugagcaguucgacaagcuguacaucuggggagugcaccauccugggacagauaaagaccagauuuuucucuaugcccagucuuccggccgcaucaccguuagcacgaagagaucccaacaggcugugauuccgaacaucgggucucggccccgcaucagaaauauuccuagccggaucuccauuuacuggacaaucgucaaacccggagauauucugcugaucaacagcaccggcaaucucaucgccccucgcggguacuucaagauuagaucuggaaaauccagcaucaugcggucugacgcucccauuggcaaguguaagagcgaaugcaucacaccgaacggcuccauuccuaaugacaaacccuuucagaacgugaaucgcaucaccuauggggccuguccuagauacgugaagcagucuacccugaaacuugcgacaggaaugcggaacguccccgagaagcaaacgcgcggcaucuucggggccauugcuggauuuaucgaaaauggcugggaggggaugaaagauggaugguauggcuucagacaccagaacagcgagggccgggggcaggccgcugaccugaaguccacccaagccgccauugaucagaucaauggaaaacucaacagacugauuggcaagacaaaugaaaaguuccaccagaucgagaaagaauuuagcgagguugaagggcgcauucaggaccuugagaaguacguggaggauaccaaaaucgaccuguggucuuauaacgcugaacuccugguggcgcuggagaaccaacauacaaucgaucucaccgacuccgaaaugaauaagcuguucgagaaaacgaagaagcagcuucgggaaaacgccgaggauaugggaaauggcugcuuuaaaauuuaccacaagugugacaacgcuugcaucgggagcauuagaaauggcacauaugaucaugacgucuaccgcgacgaggcccugaacaaucgguuccagaucaaaggaguggaacucaagucuggcuacaaagauuggauucuguggaucuccuuugccaucagcugcuuccuucuguguguugcucuccugggguuuauuaugugggccugccagaagggaaacaucagauguaauauuugcaucuga

SEQ ID NO: 204528 - RNA, 1701 nt, Artificial Sequence
  derived and/or modified CDS sequence (opt5) from hemagglutinin__InfluenzaA__AIC73838
augaagaccaucauugcccugagcuacauccucugccugguguucgcucagaaacuucccggcaacgacaauuccacagccacgcugugucucgggcaccaugcggucccuaacggaaccauuguuaagacaaucaccaaugauagaauugaggugacaaacgcuaccgaacuggugcaaaauucuagcaucggcgagaucugcaacuccccgcaccagauucuugacggggaaaauuguacacugaucgaugcccuccugggagacccccagugcgauggcuuucagaacaaaaagugggaccuguucgucgagcggucuaaagccuauagcaauuguuacccuuaugaugugcccgacuacgcuucccuccgcucucugguugccagcuccgggacccuugaauuuaacaaugagagcuucaacugggcuggagugacgcaaaauggcaccucuuccgccugcauuagaggcagcaacucuuccuuuuucagccggcugaauuggcucacacauucuaacuuuaaguauccugcgcugaacgucaccaugcccaauaacgagcaguucgauaaacuuuacaucuggggagugcaccauccugggacagacaaggaucagauuuuucuguaugcccaguccagcggccgcaucaccguuuccacgaagagaucucaacaggcugugauuccgaauaucgggagccggccccgcaucagaaacauuccuucccggaucagcauuuacuggacaaucgucaaacccggagacauucuccugaucaauucuaccggcaaccugaucgccccucgcggguacuucaagauuagauccggaaaaagcucuaucaugcggagcgaugcucccauuggcaaguguaaguccgaaugcaucacaccgaauggcucuauuccuaacgacaaacccuuucagaaugugaaccgcaucaccuauggggccuguccuagauacgugaagcagagcacccucaaacuggcgacaggaaugcggaauguccccgagaagcaaacgcgcggcaucuucggggccauugcuggauuuaucgaaaacggcugggaggggaugauggacggaugguauggcuucagacaccaaaauuccgagggccgggggcaggccgcugaucuuaaaagcacccaggccgccauugaccagaucaacggaaagcugaauagacucauuggcaaaacaaacgaaaaguuccaccagaucgagaaggaauuuucugagguugaagggcgcauucaggaucuggagaaauacguggaggacaccaagaucgaucuuugguccuauaacgcugaacugcucguggcgcuggagaaucaacauacaaucgaccugaccgauagcgaaaugaacaaacucuucgagaagacgaaaaagcagcugcgggaaaaugccgaggaccuuggaaacggcugcuuuaagauuuaccacaaaugugauaaugcuugcaucgggucuauuagaaacggcacauaugaccaugaugucuaccgcgacgaggcccugaauaaccgguuccagaucaagggaguggaacucaaauccggcuacaaggacuggauucuguggaucagcuuugccaucuccugcuuccuucuguguguugcucuccugggguuuauuaugugggccugccagaaaggaaauaucagauguaacauuugcaucuga

SEQ ID NO: 204529 - RNA, 1701 nt, Artificial Sequence
  derived and/or modified CDS sequence (opt5) from hemagglutinin__InfluenzaA__AIC73839
augaaggccauccuggugguccuccuguacaccuucgcuacagccaacgcggacacgcuuugcauuggcuaucacgcuaauaacagcaccgauacaguugacaccgugcuggagaagaaugugacagucacccauuccgugaaccuccuggaagauaagcacaaugggaaacuuuguaagcugagaggaguugcuccccuccaucugggcaaaugcaacaucgccggguggauucugggaaauccugagugugaaucucucagcacagccuccucuuggagcuacaucguggagaccuccucuagcgacaacggcacgugcuauccgggggauuuuauuaauuacgaagaacugcgggagcagcuuuccagcgucucuuccuucgaacgcuuugagaucuuccccaagaccagcucuuggccugaccacgauuccaacaagggagugacagccgcuuguccccaugccggcgcgaaaucuuuuuauaagaaucugaucuggcucguuaaaaagggcaacagcuacccuaaacugucccaaagcuauauuaaugacaaggggaaggaagugcuuguccuguggggaauccaccaccccuccaccacagccgaucagcagucucucuaccagaacgcugacgccuacguguucgugggcaccagcagauauuccaaaaaguuuaaaccugagauugcuauccggccgaagguccgcgaucaagaggggagaaugaauuacuauuggacgcugguugaacccggagacaaaauuacauucgaggccaccggcaaccugguggugccucgguacgcguuuacaauggaacgcaacgccgggagcggaaucauuaucucugauacccccguccaugacugcaauaccacaugucagacgccugagggcgcuaucaacaccucccuccccuuccagaauauucacccgaucacaauuggcaagugcccuaaauauguuaagagcaccaagcugagacuugccacagggcugcggaacgugcccucuauccagagccgcggacucuuuggcgcuauugccggguucaucgaaggaggcuggaccgggaugguggacggaugguacggcuaucaucaccaaaaugagcagggcuccggguacgccgcugaucugaaaucuacgcagaacgcgaucgacaagauuacaaauaaagucaacagcgugaucgagaagaugaauacccaguuuaccgccguuggaaaagaguucaaccaccuugagaagagaauugaaaaucugaacaagaaaguggaugacggcuuccucgauaucuggacauacaaugcugagcugcugguccuccuggaaaacgagcggacccuugacuaucaugauuccaaugugaagaaccuguacgagaaaguccgcaaccaacucaagaauaacgccaaagaaacagggaauggauguuuugaguucuaucacaagugcgacaacacguguauggaaagcgugaagaauggcaccuacgauuauccuaaauacucugaggaagccaagcugaacagagagaaaauugacgggguuaaacuugaguccacacggaucuaucagauccuggcuauuuacagcaccguggccucuucccucguccuggugguuagccugggcgcgaucuccuuuuggaugugcucuaauggaagccuccagugccgcauuuguaucuga

SEQ ID NO: 204530 - RNA, 1701 nt, Artificial Sequence; identical to SEQ ID NO: 202112
  derived and/or modified CDS sequence (opt5) from hemagglutinin__InfluenzaA__AIC73840

SEQ ID NO: 204531 - RNA, 1701 nt, Artificial Sequence
  derived and/or modified CDS sequence (opt5) from hemagglutinin__InfluenzaA__AIC73841
augaaggccauccuggugguccuccuguacaccuucgcuacagccaacgcggacacgcuuugcauuggcuaucacgcuaauaacagcaccgauacaguugacaccgugcuggagaagaaugugacagucacccauuccgugaaccuccuggaagauaagcacaaugggaaacuuuguaagcugagaggaguugcuccccuccaucugggcaaaugcaacaucgccggguggauucugggaaauccugagugugaaucucucagcacagccuccucuuggagcuacaucguggagaccuccucuagcgacaacggcacgugcuauccgggggauuuuauuaauuacgaagaacugcgggagcagcuuuccagcgucucuuccuucgaacgcuuugagaucuuccccaagaccagcucuuggccuaaccacgacuccaauaagggagugacagccgcuuguccccaugccggcgcgaaaucuuuuuauaagaaccugaucuggcucguuaaaaagggcaauagcuacccuaaacugucccaaagcuauauuaacgauaaggggaaggaagugcuuguccuguggggaauccaccaccccuccaccauugccgaccagcagucucucuaccagaaugcugaugccuacguguucgugggcacaagcagauauuccaaaaaguuuaaaccugagaucgcuauucggccgaagguccgcgaccaagaggggagaaugaacuacuauuggacccugguugaacccggagauaaaaucacguucgaggccacaggcaaccugguggugccucgguacgcguuuaccauggaacgcaaugccgggagcggaauuaucaucucugacacacccguccaugauugcaacaccaccugucagacaccugagggcgcuauuaauacgucccuccccuuccagaacauccacccgauuaccaucggcaagugcccuaaauauguuaagagcacaaagcugagacuugccaccgggcugcggaauauucccucuauccagagccgcggacucuuuggcgcuaucgccggguucauugaaggaggcuggacagggaugguggacggaugguacggcuaucaucaccaaaacgagcagggcuccggguacgccgcugaccugaaaucuacccagaaugcgaucgauaagauuacgaacaaagugaauagcgucaucgagaagaugaacacacaguuuaccgccgugggaaaagaguucaaucaccuugagaagagaauugaaaaccugaauaagaaaguugacgauggcuuccucgacaucuggaccuacaacgcugagcugcuggugcuccuggaaaaugagcggacacuugauuaucaugacuccaacgucaagaaccuguacgagaaagugcgcaaucaacucaagaacaaugccaaagaaaucgggaacggauguuuugaguucuaucacaagugcgauaauaccuguauggaaagcgucaagaacggcacauacgacuauccuaaauacucugaggaagccaagcugaauagagagaaaauugauggggugaaacuugaguccacgcggaucuaucagauucuggcuaucuacagcaccguugccucuucccucgugcuggucgugagccugggcgcgauuuccuuuuggaugugcucuaacggaagccuccagugccgcaucuguauuuga

SEQ ID NO: 204532 - RNA, 1701 nt, Artificial Sequence; identical to SEQ ID NO: 204527
  derived and/or modified CDS sequence (opt5) from hemagglutinin__InfluenzaA__AIC73842

SEQ ID NO: 204533 - RNA, 1707 nt, Artificial Sequence
  derived and/or modified CDS sequence (opt5) from hemagglutinin__InfluenzaA__AID48082
auggagaagaucgugcuccuguucgccauugucagccugguuaaauccgaccagaucugcauuggcuaccacgcuaacaauucuaccgaacaaguggauacaaucauggagaagaacgugacggucacccaugcccaggacauucuugaaaagacacacaaugggaagcugugugaucucgacggagugaaaccccugauccuuagagauugcagcguugcgggcuggcugcucgggaacccuaugugugacgaguuuaucaaugugccggaaugguccuauauugucgagaaggcuaaccccgugaaugaucugugcuacccuggagacuucaacgauuaugaggaacugaagcaucuccugucucggaucaaucacuuugagaaaauucagaucauucccaagagcuccuggucuagccaugaagccucccuuggcguuagcucugccuguccuuaccaggggaaauccagcuucuuucgcaacguggucuggcugaucaagaaaaauucuaccuaucccacaauuaagagauccuacaacaauaccaaccaagaggaccuccuggugcuuuggggaauccaccacccuaaugaugcugccgagcagacaaagcuguaucagaacccgaccacguacaucagcgugggcaccucuacacucaaccagcggcuggucccccgcauugcuaccagauccaaaguuaauggccaaagcgggcggauggaguucuuuuggacaauccugaagccuaacgacgccauuaauuucgaauccaacggaaauuuuaucgcgcccgaauacgccuauaaaauugugaagaaaggcgauucuaccaucaugaaaagcgagcucgaauacgggaacugcaauacgaaaugucagacaccuaugggagcuaucaacuccagcaugcccuuccauaauauucacccgcugaccaucggcgagugcccuaaguaugugaagucuaaccgccuuguccuggccacagggcucagaaauagcccccagcgggagcgcagacggaaaaagcgcggacuguuuggcgcuauugccggcuucaucgaagggggauggcagggcaugguggacgggugguacggauaucaucacuccaacgagcaaggcucuggguacgcggccgacaaagaaagcacccagaaggcuauugauggaguuaccaauaaagugaacuccaucaucgacaagaugaauacacaguuugaggccgucggcagagaguucaaccaccuugaacggcgcauugagaaccugaauaagaaaauggaagauggcuuccucgacguguggacguauaacgcugagcugcugguucucauggaaaaugagagaacccuggauuuucaugacucuaacgugaagaaucuuuacgauaaaguccggcugcaacucagagacaacgccaaggaacuggggaauggauguuucgaguuuuaccacaaaugcgaugacgaguguauggaaagcgugcgcaacggcacauaugauuacccucaguauuccgaggaagcccggcuuaagagagaggagaucagcggggucaagcuggaaucuauuggaaucuaccagauucucuccaucuauagcaccguggcuucuucccuggcgcuggccauuaugguugcuggccucagccuguggaugugcuccaaugggucucuucagugccgcaucuguaucuga

SEQ ID NO: 204534 - RNA, 1701 nt, Artificial Sequence
  derived and/or modified CDS sequence (opt5) from hemagglutinin__InfluenzaA__AID70444
augaaggccgugcuggucguucuccuguacaccuucgcuacagccaacgcggacacgcuuugcaucggcuaucacgcuaauaacagcaccgauacaguggacaccgugcuggagaaaaaugucacagugacccauuccguuaaccuccuggaagauaagcacaaugggaaacuuuguaagcugagaggaguggcuccccuccaucugggcaaaugcaacauugccggguggauccugggaaauccugagugugaaucucucgccacagccagcuccuggucuuacauugucgagaccagcaacuccgacaauggcacgugcuauccgggggauuuuaucgacuacgaagaacugcgggagcagcuuucuagcguguccagcuucgaacgcuuugagauuuuccccaagaccucuuccuggccuaaccacgauagcaauaagggaguuacagcugccuguccccaugcgggcgccaaaucuuuuuauaagaaccugaucuggcucgugaaaaagggcaauuccuacccuaaacugagcaagucuuauaucaacgacaaggggagagaaguccuugugcuguggggcauucaccaccccuccaccagcgcugaucaacagucccucuaccagaaugccgacacauacguguucgucggaaccucucgguauagcaaaaaguuuaaaccugagaucgcuauucgcccgaagguuagagaucaggaggggcggaugaacuacuauuggacgcugguggaacccggagacaaaaucacauucgaggccaccggcaaccugguggucccucgcuacgcguuugccauggaaagaaaugcuggguccggaauuaucauuagcgauacacccgugcaugacugcaacaccaccugucaaacaccuaagggcgccaucaauacgucucuccccuuccagaacauccacccgauuaccaucggcaaaugcccuaaguauguuaaguccacaaaacugcggcuugcuaccgggcugcgcaaugugcccagcauucagucuagaggacucuuuggcgccaucgccggguucauugagggaggcuggacagggauggucgacggaugguacggcuaucaucaccagaacgaacaaggcagcggguacgcugcggaucugaaguccacccagaaugccaucgacgagaucacgaacaaaguuaauucugugauugagaagaugaacacacaguuuaccgcugugggaaaagaguucaaucaccuugagaagcggaucgaaaaccugaauaagaaagucgaugacggcuuccucgauauuuggaccuacaacgccgagcugcuggugguccucgaaaaugagcgcacacuggaguaucaugacagcaacgugaagaaccuuuacgaaaaaguuagaucccaggugaagaauaacgccaaagagaucgggaauggauguuuugaguucuaucacaagugcgauaacaccuguauggaaagcgucaagaauggcacauacgacuauccuaaauacucugaagaggcuaagcugaaccgggaggaaauugauggggugaaacucgaguccacgcgcaucuaucaaauccuggccauuuacagcaccguugcgucuucccuugugcuggucgugagccucggcgcuaucuccuuuuggaugugcuucaauggaucucugcagugcagaauuuacaucuga

SEQ ID NO: 204535 - RNA, 1701 nt, Artificial Sequence
  derived and/or modified CDS sequence (opt5) from hemagglutinin__InfluenzaA__AID70445
augaaggccauccuggugguccuccuguacaccuucgcuacagccaacgcggacacgcuuugcauuggcuaucacgcuaauaacagcaccgauacaguugacaccgugcuggagaaaaaugugacagucacccauuccgugaaccuccuggaagauaagcacaaugggaaacuuuguaagcugagaggaguugcuccccuccaucugggcaaaugcaacaucgccggguggauucugggaaauccugagugugaaucucucagcacagccuccucuuggagcuacaucguggagaccuccucuagcgacaacggcacgugcuauccgggggauuuuauugacuacgaagaacugcgggagcagcuuuccagcgucucuuccuucgaacgcuuugagaucuuccccaagaccagcucuuggccuaaucacgauuccaacaagggagugacagccgcuuguccccaugccggcgcgaaaucuuuuuauaagaaucugaucuggcucguuaaaaagggcaacagcuacccuaaacuguccaagagcuauauuaaugacaaggggaaagaagugcuuguccuguggggaauccaccaccccuccaccacagccgaucaacagucucucuaccagaacgcugacaccuacguguucgugggcacgagcagauauuccaagaaauuuaagccugagauugccauccggccgaaaguccgcgaucaggaggggagaaugaauuacuauuggacacugguugaacccggagacaagauuaccuucgaggcuacaggcaaccugguggugccucgguacgccuuugcgauggaacgcaacgccgggagcggaaucauuaucucugauacccccguccaugacugcaauaccacaugucaaacgccuaaaggcgcuaucaacaccucccuccccuuccagaauauucacccgaucacaauuggcaagugcccuaaguaugugaaaagcaccaagcugagacuugccacagggcugcggaacguucccucuauccagagccgcggacucuuuggcgcuauugccggguucaucgagggaggcuggaccgggaugguggacggaugguacggcuaucaucaccagaaugaacaaggcuccggguacgccgcugaucugaaaucuacgcagaacgcgaucgacaagauuacaaauaaagucaacagcgugaucgagaagaugaauacccaguuuaccgccguuggaaaggaguucaaccaccuugagaaaagaauugagaaucugaacaagaaaguggaugacggcuuccucgauaucuggacauacaaugcugaacugcuggucgugcucgagaacgaacggacccuggaguaucaugacuccaaugucaagaaccuuuacgagaaagugcgcaaccagcugaagaauaacgccaaggaaauugggaauggauguuuugaguucuaucacaaaugcgauaacacauguauggaaagcguuaagaauggcaucuacgacuauccuaaauacucugaggaagccaagcucaacagagaggagaucgauggggugaaacuggaauccacgcggauuuaucaaauccuugcuauuuacagcaccgucgccucuucccuggugcagguugugagccucggcgcgaucuccuuuuggaugugcuucaauggaucucugcagugccgcauuuguaucuga

SEQ ID NO: 204536 - RNA, 1701 nt, Artificial Sequence
  derived and/or modified CDS sequence (opt5) from hemagglutinin__InfluenzaA__AID70446
augaaggccgugcuggucguucuccuguacaccuucgcuacagccaacgcggacacgcuuugcaucggcuaucacgcuaauaacagcaccgauacaguggacaccgugcuggagaaaaaugucacagugacccauuccguuaaccuccuggaagauaagcacaaugggaaacuuuguaagcugagaggaguggcuccccuccaucugggcaaaugcaacauugccggguggauccugggaaauccugagugugaaucucucagcacagccuccucuuggagcuacauugucgagaccuccucuagcgacaacggcacgugcuauccgggggauuuuaucgacuacgaagaacugcgggagcagcuuuccagcgugucuuccuucgaacgcuuugagauuuuccccaagaccagcucuuggccuaaucacgauuccaacaagggaguuacagccgcuuguccccaugccggcgcgaaaucuuuuuauaagaaucugaucuggcucgugaaaaagggcaacagcuacccuaaacuguccaagagcuauaucaaugacaaggggaaagaaauucuuguccuguggggaauccaccaccccuccaccacagccgaucaacagucucucuaccagaacgcugacaccuacguguucgugggcacgagcagauauuccaagaaauuuaagccugagauugccauccggccgaaaguccgcgaucaggaggggagaaugaauuacuauuggacacugguugaacccggagacaagauuaccuucgaggcuacaggcaaccugguggugccucgguacgccuuugcgauggaacgcaacgccgggagcggaaucauuaucucuggcacccccguccaugauugcaauaccacaugucaaacgccuaaaggcgcuaucaacaccucccuccccuuccagaauauucacccgaucacaauugggaagugcccuaaguaugugaaaagcaccaagcugagacuugccacaggacugcggaacguucccucuauccagagccgcggccucuuuggggcuauugccggauucaucgagggcggguggaccggaaugguggacggcugguacggcuaucaucaccagaaugaacaaggguccggauacgccgcugaccugaaaucuacgcagaacgcgaucgauaagauuacaaauaaagucaacagcgugaucgagaagaugaauacccaguuuaccgccguuggcaaggaguucaaccaccuugagaaaagaauugagaaucugaacaagaaaguggacgauggguuccucgacaucuggacauacaaugcugaacugcuggucgugcucgagaacgaacggacccuggaguaucaugauuccaaugucaagaaccuuuacgagaaagugcgcaaccagcugaagaauaacgccaaggaaauuggaaauggcuguuuugaguucuaucacaaaugcgacaacacauguauggaaagcguuaagaaugggaucuacgauuauccuaaauacucugaggaagccaagcucaacagagaggagaucgacggcgugaaacuggaauccacgcggauuuaucaaauccuugcuauuuacagcaccgucgccucuucccuggugcagguugugagccucggagcgaucuccuuuuggaugugcuucaauggcucucugcagugccgcauuuguaucuga

SEQ ID NO: 204537 - RNA, 1701 nt, Artificial Sequence
  derived and/or modified CDS sequence (opt5) from hemagglutinin__InfluenzaA__AID70447
augaaggccauccuggugguccuccuguacaccuucgcuacagccaacgcggacacgcuuugcauuggcuaucacgcuaauaacagcaccgauacaguugacaccgugcuggagaaaaaugugacagucacccauuccgugaaccuccuggaagauaagcacaaugggaaacuuuguaagcugagaggaguugcuccccuccaucugggcaaaugcaacaucgccggguggauucugggaaauccugagugugaaucucucagcacagccuccucuuggagcuacaucguggagaccuccucuagcgacaacggcacgugcuauccgggggauuuuauugacuacgaggaacugcgggagcagcuuuccagcgucucuuccuucgaacgcuuugagaucuuccccaagaccagcucuuggccuaaucacgauuccaacaagggagugacagccgcuuguccccaagccggcgcgaaaggcuuuuauaagaaucugcucuggcugguuaaaaaggggaacagcuacccuaaacuuucuaaguccuauaucaaugacaagggaaaagaagugcugguccucuggggcauucaucaccccagcaccacagccgaucagcagucccuguaccagaacgcugacaccuacguguucguggggacgucuagauauagcaagaaauuuaagccugagaucgccauucggccgaaaguccgcgaucaagagggaagaaugaauuacuauuggacacugguugaacccggcgacaagaucaccuucgaggcuacagggaaccucguggugccucgguacgccuuugcgauggaacgcaacgccggauccggcauuaucauuagcgauacccccguccacgacugcaauaccacaugucagacgccuaaaggcgcuaucaacaccucucugcccuuccagaauauccauccgauuacaaucgggaagugcccuaaguaugugaaauccaccaaacuuagacuggccacaggacuccggaacguucccagcauucagucucgcggccuguuuggggcuaucgccggauucauugagggcggguggaccggaaugguggacggcugguacggcuaucaccaucaaaaugaacaggggagcggauacgccgcugaucuuaaauccacgcagaacgcgaucgacaagaucacaaauaaagucaacucugugauugagaagaugaauacccaguuuaccagcguuggcaaggaguucaaccaccuggaaaagagaauggagaaucucaacaagaaaguggaugacggguuccuggauaucuggacauacaaugccgaacugcucgucgugcuggagaacgaacggacccuugaguaucacgacuccaaugucaagaaccuguacgagaaagugcgcaaccaacucaagaauaacgcuaaggaaauuggaaauggcuguuuugaguucuaucauaaaugcgauaacacauguauggaaagcguuaagaaugggaucuacgacuauccuaaauacucugaggaagccaagcugaacagagaggagauugauggcgugaaacuugaauccacgcggaucuaucagauccuggccauuuacagcaccgucgcuucuucccucgugcugguugugagccugggagccaucuccuuuuggaugugcuucaauggcucucuccagugccgcauuuguaucuga

SEQ ID NO: 204538 - RNA, 1701 nt, Artificial Sequence
  derived and/or modified CDS sequence (opt5) from hemagglutinin__InfluenzaA__AID70448
augaaggccauccuggugguccuccuguacaccuucgcuacagccaacgcggacacgcuuugcauuggcuaucacgcuaauaacagcaccgauacaguugacaccgugcuggagaaaaaugugacagucacccauuccgugaaccuccuggaagauaagcacaaugggaaacuuuguaagcugagaggaguugcuccccuccaucugggcaaaugcaacaucgccggguggauucugggaaauccugagugugaaucucucagcacagccuccucuuggagcuacaucguggagaccuccucuagcgacaacggcacgugcuauccgggggauuuuauugacuacgaggaacugcgggagcagcuuuccagcgucucuuccuucgaacgcuuugagaucuuccccaagaccagcucuuggccuaaucacgauuccaacaagggagugacagccgcuuguccccaugccggcgcgaaaggcuuuuauaagaaucugaucuggcucguuaaaaaggggaacagcuacccuaaacugucuaaguccuauauuaaugacaagggaaaagaagugcuuguccuguggggcauccaccaccccagcaccacagccgaucaacagucccucuaccagaacgcugacaccuacguguucguggggacgucuagauauagcaagaaauuuaagccugagauugccauccggccgaaaguccgcgaucaggagggaagaaugaauuacuauuggacacugguugaacccggcgacaagauuaccuucgaggcuacagggaaccugguggugccucgguacgccuuuaccauggaacgcgaugcgggauccggcaucauuaucagcgacacccccguccaugacugcaacacaacgugucaaaccccuaaaggcgccaucaauacaucucuccccuuccagaacauucacccgaucaccauugggaagugcccuaaguaugugaaauccacaaagcugagacuugcuaccggacugcggaauguucccagcauccagucucgcggccucuuuggggccauugcuggauucaucgagggcggguggacgggaaugguggauggcugguacggcuaucaucaccagaacgaacaagggagcggauacgccgccgaccugaaauccacacagaaugcuaucgauaagauuaccaacaaagucaauucugugaucgagaagaugaacacccaguuuacagcgguuggcaaggaguucaaucaccuugaaaagagaauugagaaccugaauaagaaaguggacgauggguuccucgacaucuggaccuacaacgccgaacugcuggucgugcucgagaaugaacggacacuggaguaucaggauagcaacgucaagaaucuuuacgagaaagugcgcaaccaacugaagaacaaugcuaaggaaauuggaaacggcugucucgaguuuuaucauaaauucgacaauacgugcauggaauccguuaagaacgggaccuacgauuauccuaaauacagcgaggaagccaagcugaauagagagaaaaucgacggcgugaaacuugagucuacacggaucuaucagauucuggccaucuacuccaccgucgcuagcucucucgugcugguugugucccugggaacaauuagcuuuuggauguguuucaacggcucccuccagugccgcaucugcauuuga

SEQ ID NO: 204539 - RNA, 1701 nt, Artificial Sequence
  derived and/or modified CDS sequence (opt5) from hemagglutinin__InfluenzaA__AID70449
augaaggccauccuggugguccuccuguacaccuucgcuacagccaacgcggacacgcuuugcauuggcuaucacgcuaauaacagcaccgauacaguugacaccgugcuggagaaaaaugugacagucacccauuccgugaaccuccuggaagauaagcacaaugggaaacuuuguaagcugagaggaguugcuccccuccaucugggcaaaugcaacaucgccggguggauucugggaaauccugagugugaaucucucagcacagccuccucuuggagcuacaucguggagaccuccucuagcgacaacggcacgugcuauccgggggauuuuauugacuacgaagaacugcgggagcagcuuuccagcgucucuuccuucgaacgcuuugagaucuuccccaagaccagcucuuggccuaaucacgauuccaacaagggagugacagccgcuuguccccaugccggcgcgaaaucuuuuuauaagaaucugaucuggcucguuaaaaagggcaacagcuacccuaaacuguccaagagcuauauuaaugacaaggggaaagaagugcuuguccuguggggaauccaccaccccuccaccacagccgaucaacagucucucuaccagaacgcugacaccuacguguucgugggcacgagcagauauuccaagaaauuuaagccugagauugccauccggccgaaaguccgcgaucaggaggggagaaugaauuacuauuggacacugguugaacccggagacaagauuaccuucgaggcuacaggcaaccugguggugccucgguacgccuuugcgauggaacgcaacgccgggagcggaaucauuaucucugauacccccguccaugacugcaauaccacaugucaaacgccuaaaggcgcuaucaacaccucccuccccuuccagaauauucacccgaucacaauuggcaagugcccuaaguaugugaaaagcaccaagcugagacuugccacagggcugcggaacguucccucuauccagagccgcggacucuuuggcgcuauugccggguucaucgagggaggcuggaccgggaugguggacggaugguacggcuaucaucaccagaaugaacaaggcuccggguacgccgcugaucugaaaucuacgcagaacgcgaucgacaagauuacaaauaaagucaacagcgugaucgagaagaugaauacccaguuuaccgccguuggaaaggaguucaaccaccuugagaaaagaauugagaaucugaacaagaaaguggaugacggcuuccucgauaucuggacauacaaugcugaacugcuggucgugcucgagaacgaacggacccuggaguaucaugacuccaaugucaagaaccuuuacgagaaagugcgcaaccagcugaagaauaacgccaaggaaauugggaauggauguuuugaguucuaucacaaaugcgauaacacauguauggaaagcguuaagaauggcacguacgacuauccuaaauacucugaggaagccaagcucaacagagaggagaucgauggggugaaacuggaauccacccggaucuaucaaauucuugcuaucuacagcacagucgccucuucccuggugcucguugugagccugggcgcgauuuccuuuuggaugugcuucaauggaucucugcagugccgcaucugugucuga

SEQ ID NO: 204540 - RNA, 1701 nt, Artificial Sequence
  derived and/or modified CDS sequence (opt5) from hemagglutinin__InfluenzaA__AID70450
augaaggccauccuggugguccuccuguacaccuucgcuacagccaacgcggacacgcuuugcauuggcuaucacgcuaauaacagcaccgauacaguugacaccgugcuggagaaaaaugugacagucacccauuccgugaaccuccuggaagauaagcacaaugggaaacuuuguaagcugagaggaguugcuccccuccaucugggcaaaugcaacaucgccggguggauucugggaaauccugagugugaaucucucagcacagccuccucuuggagcuacaucguggagaccuccucuagcgacaacggcacgugcuauccgggggauuuuauugacuacgaagaacugcgggagcagcuuuccagcgucucuuccuucgaacgcuuugagaucuuccccaagaccagcucuuggccuaaucacgauuccaacaagggagugacagccgcuuguccccaugccggcgcgaaaggcuuuuauaagaaucugaucuggcucguuaaaaaggggaacagcuacccuaaacugucuaaguccuauauuaaugacaagggaaaagaagugcuuguccuguggggcauccaccaccccagcaccacagccgaucaacagucccucuaccagaacgcugacaccuacguguucguggggacgucuagauauagcaagaaauuuaagccugagauugccauccggccgaaaguccgcgaucaggagggaagaaugaauuacuauuggacacugguugaacccggcgacaagauuaccuucgaggcuacagggaaccugguggugccucgguacgccuuugcgauggaacgcgaugccggauccggcaucauuaucagcgacacccccguccaugacugcaacaccacaugucaaacgucuaaaggcgcuaucaauaccucccucccuuuccagaacauucaccccaucacaauugggaagugcccgaaguaugugaaaagcaccaagcugagacuugccacaggacugcggaauguuccuucuauccagagccgcggccucuuuggggcuauugccggauucaucgagggcggguggaccggaaugguggauggcugguacggcuaucaucaccagaacgaacaaggguccggauacgccgcugaccugaaaucuacgcagaaugcgaucgauaagauuacaaacaaagucaauagcgugaucgagaagaugaacacccaguuuaccgccguuggcaaggaguucaaucaccuugagaaaagaauugagaaccugaauaagaaaguggacgauggguuccucgacaucuggacauacaacgcugaacugcuggucgugcucgagaaugaacggacccuggaguaucaugauuccaacgucaagaaucuuuacgagaaagugcgcaaccagcugaagaacaaugccaaggaaauuggaaacggcuguuuugaguucuaucacaaauuugacaauacaugcauggaaagcguuaagaacgggacguacgauuaucccaaauacucugaggaagccaagcucaauagagagaaaaucgacggcgugaagcuggaguccacccggaucuaucaaauucuugcuaucuacagcacagucgccucuucccuggugcagguugugagccucggagcgauuuccuucuggauguguuuuaacggcucucugcagugccgcaucugcauuuga

SEQ ID NO: 204541 - RNA, 1701 nt, Artificial Sequence
  derived and/or modified CDS sequence (opt5) from hemagglutinin__InfluenzaA__AID70451
augaaggccauccugguggucaugcucuacaccuucgcuacagccaacgcggacacgcugugcauuggcuaucacgcuaauaacagcaccgauacaguugacaccgugcuugagaaaaaugugacagucacccauuccgugaaccugcucgaagauaagcacaaugggaaacuguguaaacuuagaggaguugcuccccugcaucucggcaaaugcaacaucgccggguggauucugggaaauccugagugugaaucucugagcacagccuccucuuggagcuacaucguggagaccuccucuagcgacaacggcacgugcuauccgggggauuuuauugacuacgaggaacuccgggagcagcuguccagcgucucuuccuucgaacgcuuugagaucuuccccaagaccagcucuuggccuaaucacgauuccaacaagggagugacagccgcuuguccccaugccggcgcgaaaggcuuuuauaagaaucuuaucuggcugguuaaaaaggggaacagcuacccuaaacucucuaaguccuauauuaaugacaagggaaaagaagugcugguccuuuggggcauccaccaccccagcaccacagccgaucaacagucccuguaccagaacgcugacaccuacguguucguggggacgucuagauauagcaagaaauuuaagccugagauugccauccggccgaaaguccgcgaucaggagggaagaaugaauuacuauuggacacucguugaacccggcgacaagauuaccuucgaggcuacagggaaccugguggugccucgguacgccuuugcgauggaacgcaacgccggauccggcaucauuaucagcgauacccccguccaugacugcaauaccacaugucaaacgccuaaaggcgcuaucaacaccucucugcccuuccagaauauucacccgaucacaauugggaagugcccuaaguaugugaaauccaccaagcucagacuggccacaggacuucggaacguucccagcauccagucucgcggccuguuuggggcuauugccggauucaucgagggcggguggaccggaaugguggacggcugguacggcuaucaucaccagaaugaacaagggagcggauacgccgcugaucucaaauccacgcagaacgcgaucgacaagauuacaaauaaagucaacucugugaucgagaagaugaauacccaguuuaccgccguuggcaaggaguucaaccaccuggaaaagagaauugagaaucuuaacaagaaaguggaugacggguuccuggauaucuggacauacaaugcugaacuccuggucgugcuggagaacgaacggacccucgaguaucaugacagcaaugucaagaaccuguacgagaaagugcgcaaccagcuuaagaauaacgccaaggaaauuggaaauggcuguuuugaguucuaucacaaauuugauaacacaugcauggaauccguuaagaaugggacguacgacuauccuaaauacagcgaggaagccaagcugaacagagaggagaucgauggcgugaaacucgaaucuacccggaucuaucaaauucuggcuaucuacuccacagucgccagcucucuugugcugguugugucccucggagcgauuagcuucuggauguguuuuaauggcucccugcagugccgcaucugcauuuga

SEQ ID NO: 204542 - RNA, 1701 nt, Artificial Sequence
  derived and/or modified CDS sequence (opt5) from hemagglutinin__InfluenzaA__AID70452
augaaggccauccuggugguccuccuguacaccuucgcuacagccaacgcggacacgcuuugcauuggcuaucacgcuaauaacagcaccgauacaguugacaccgugcuggagaaaaaugugacagucacccauuccgugaaccuccuggaagauaagcacaaugggaaacuuuguaagcugagaggaguugcuccccuccaucugggcaaaugcaacaucgccggguggauucugggaaauccugagugugaaucucucagcacagccuccucuuggagcuacaucguggagaccuccucuagcgacaacggcacgugcuauccgggggauuuuauugacuacgaagaacugcgggagcagcuuggauccgucagcucuuucaagcgcuuugaaaucuuccccaagaccuccagcuggccuaaucacgauucuaacaaaggcgugacagccgcuuguccccaugccggcgcgaagggguuuuauaaaaaucugaucuggcucguuaagaaaggaaacuccuacccuaagcugagcaagucuuauauuaaugacaaaggcaaggaggugcuuguccugugggggauccaccaccccuccaccacagccgaucaacagagccucuaccagaacgcugacaccuacguguucgugggaacguccagauauucuaaaaaguuuaaaccugaaauugccauccggccgaagguccgcgaucaggagggcagaaugaauuacuauuggacacugguugagcccggggacaaaauuaccuucgaagcuacaggaaaccugguggugccucgguacgccuuugcgauggagcgcgaugccggcagcggcaucauuaucuccgacacccccguccaugacugcaacaccacaugucaaacgccuaagggggcuaucaauaccagccuccccuuccagaacauucacccgaucacaauuggaaagugcccuaaauaugugaagucuaccaaacugagacuugccacaggccugcggaauguucccuccauccagagccgcgggcucuuuggagcuauugccggcuucaucgaagggggauggaccggcaugguggauggcugguacggguaucaucaccagaacgagcaaggaucuggcuacgccgcugaccuuaagagcacgcagaaugcgaucgauaaaauuacaaacaaggucaauuccgugaucgaaaagaugaacacccaguuuaccgccguugggaaagaguucaaucaccuggagaagagaauugaaaaccugaauaaaaagguggacgauggauuccucgacaucuggacauacaacgcugagcugcuggucgugcucgaaaaugagcggacccuggaauaucaugauucuaacgucaaaaaucuuuacgagaaggugcgcaaccagcugaagaacaaugccaaagagauuggcaacggguguuuugaguucuaucacaagugcgacaauacauguauggagagcguuaaaaacggcaucuacgauuauccuaaguacuccgaagaggccaaacucaauagagaaaagaucgacggagugaagcuggagagcacgcggauuuaucaaauccuugcuauuuacucuaccgucgccuccagccuggugcucguugugucucugggcgcgaucuccuuuuggaugcgcuucaacgggagccugcagugcuccauuugcaucuga

SEQ ID NO: 204543 - RNA, 1701 nt, Artificial Sequence
  derived and/or modified CDS sequence (opt5) from hemagglutinin__InfluenzaA__AID70453
augaaggccauccuggugguccuccuguacaccuucgcuacagccaacgcggacacgcuuugcauuggcuaucacgcuaauaacagcaccgauacaguugacaccgugcuggagaaaaaugugacagucacccauuccgugaaccuccuggaagauaagcacaaugggaaacuuuguaagcugagaggaguugcuccccuccaucugggcaaaugcaacaucgccggguggauucugggaaauccugagugugaaucucucagcacagccuccucuuggagcuacaucguggagaccuccucuagcgacaacggcacgugcuauccgggggauuuuauugacuacgaagaacugcgggagcagcuuuccagcgucucuuccuucgaacgcuuugagaucuuccccaagaccagcucuuggccuaaucacgauuccaacaagggagugacagccgcuuguccccaugccggcgcgaaaggcuuuuauaagaaucugaucuggcucguuaaaaaggggaacagcuacccuaaacugucuaaguccuauauuaaugacaagggaaaagaagugcuuguccuguggggcauccaccaccccagcaccacagccgaucaacagucccucuaccagaacgcugacaccuacguguucguggggacgucuagauauagcaagaaauuuaagccugagauugccauccggccgaaaguccgcgaucaggagggaagaaugaauuacuauuggacacugguugaacccggcgacaagauuaccuucgaggcuacagggaaccugguggugccucgguacgccuuugcgauggaacgcgaugccggauccggcaucauuaucagcgacacccccguccaagacugcaacaccacaugucagacgccuaaaggcgcuaucaauaccucucuccccuuccagaacauucauccgaucacaauugggaagugcccuaaguaugugaaauccaccaagcugagacuuguuacaggacugcggaaugugcccagcauccagucucgcggccucuuuggggccauugcuggauucaucgagggcggguggaccggaauggucgauggcugguacggcuaucaccaucaaaacgaacaggggagcggauacgccgccgaccugaaauccacgcagaaugcuaucgauaagauuacaaacaaaguuaauucugugaucgagaagaugaacacccaguuuaccgcggugggcaaggaguucaaucaccuugagaaaagaauugagaaccugaauaagaaagucgacgauggguuccucgacaucuggacauacaacgccgaacugcuggugguccucgagaaugaacggacccuggaguaucacgauagcaaccuuaagaaucuguacgagaaagugcgcaaccaacucaagaacaaugcuaaggaaauuggaaacggcuguuuugaguucuaucauaaauuugacaauacaugcauggaauccguuaagaacgggacguacgauuauccuaaauacagcgaggaagccaagcugaauagagaggagaucgacggcgugaaacuugaaucuacccggaucuaucagauucuggccaucuacuccacagucgcuagcucucucgugcagguugugucccugggagccauuagcuucuggaugcgcuuuaacggcucccugcacuguagaaucugcauuuga

SEQ ID NO: 204544 - RNA, 1701 nt, Artificial Sequence
  derived and/or modified CDS sequence (opt5) from hemagglutinin__InfluenzaA__AID70454
augaaggccauccuggugguccuccuguacaccuucgcuacagccaacgcggacacgcuuugcauuggcuaucacgcuaauaacagcaccgauacaguugacaccgugcuggagaaaaaugugacagucacccauuccgugaaccuccuggaagauaagcacaaugggaaacuuuguaagcugagaggaguugcuccccuccaucugggcaaaugcaacaucgccggguggauucugggaaauccugagugugaaucucucagcacagccuccucuuggagcuacaucguggagaccuccucuagcgacaacggcacgugcuauccgggggauuuuauuaauuacgaagaacugcgggagcagcuuuccagcgucucuuccuucgaacgcuuugagaucuuccccaagaccagcucuuggccuaaccacgacuccaauaagggagugacagccgcuuguccccaugccggcgcgaaaucuuuuuauaagaaccugaucuggcucguuaaaaagggcaauagcuacccuaaacuguccaagagcuauauuaacgauaaggggaaagaagugcuuguccuguggggaauccaccaccccuccaccacagccgaccaacagucucucuaccagaaugcugaugccuacguguucgugggcaccagcagauauuccaagaaauuuaagccugagauugcuauccggccgaaaguccgcgaccaggaggggagaaugaacuacuauuggacgcugguugaacccggagauaagauuacauucgaggccaccggcaaccugguggugccucgguacgcguuugccauggaacgcaaugcugggagcggaaucauuaucucugacacacccguccaugauugcaacaccaccugucaaacaccuaaaggcgccaucaauacgucccuccccuuccagaacauucacccgaucaccauuggcaagugcccuaaguaugugaaaagcacaaagaugagacuggcuaccgggcuucggaauguucccuguauccagucucgcggacuguuuggcgccauugccggguucaucgagggaggcuggacagggaugguggacggaugguacggcuaucaucaccagaacgaacaaggcagcggguacgcugcggaccucaaauccacccagaaugccaucgauaagauuacgaacaaagucaauucugugaucgagaagaugaacacacaguuuaccgcuguuggaaaggaguucaaucaccuggagaaaagaauugagaaccuuaauaagaaaguggacgauggcuuccuggacaucuggaccuacaacgccgaacuccuggucgugcuggagaaugaacggacacucgauuaucaugacagcaacgucaagaaccuguacgagaaagugcgcaaucagcuuaagaacaaugccaaggagauugggaacggaugcuuugaguucuaucacaaaugugauaauaccugcauggaauccguuaagaacggcacauacgacuauccuaaauacagcgaagaggcuaagcugaauagagaagagaucgauggggugaaacucgagucuacgcggaucuaucaaauucuggccaucuacuccaccgucgcgagcucucuugugcugguugugucccucggcgcuauuagcuuuuggaugugcuccaacggaucucugcagugucgcaucugcauuuga

SEQ ID NO: 204545 - RNA, 1701 nt, Artificial Sequence
  derived and/or modified CDS sequence (opt5) from hemagglutinin__InfluenzaA__AID70455
augaaggccauccuggugguccuccuguacaccuucgcuacagccaacgcggacacgcuuugcauuggcuaucacgcuaauaacagcaccgauacaguugacaccgugcuggagaaaaaugugacagucacccauuccgugaaccuccuggaagauaagcacaaugggaaacuuuguaagcugggaggcguugcuccccuccaucuggggaaaugcaacaucgccggauggauucugggcaauccugagugugaaucucucagcacagccuccucuuggagcuacaucguggagaccuccucuagcgacaacgggacgugcuauccgggagauuuuauugacuacgaggagcugagagagcagcuuuccagcgucucuuccuucgaacgguuugagaucuuccccaagaccagcucuuggccuaaucacgauuccaacaagggcgugacagccgcuuguccccaugccggcgcgaaaggguuuuauaagaaucugaucuggcucguuaaaaagggaaacagcuacccuaaaauuucuaaguccuauaucaaugacaagggcaaagaagugcugguccuuugggggauucaccaccccagcaccacagccgaucaacagucccuguaccagaacgcugacaccuacaucuucgugggaacgucucgcuauagcaagaaauuuaagccugagauugccaucagaccgaaagugcgggaucaggagggccgcaugaauuacuauuggacacucgucgaacccggggacaagauuaccuucgaggcuacaggaaaccugguugugccuagauacgccuuugcgauggaacgggaugccggcuccggcaucaucauuagcgacacccccgugcaugacugcaacaccacaugucaaacgccuaaaggggcuaucaauaccucucugcccuuccagaacauucacccgaucacaauuggaaagugcccuaaguaugucaaauccaccaagcuccgccuggccacaggccuuagaaaugugcccagcauccagucucgggggcuguuuggagcuaucgccggcuucauugaagggggauggaccggcaugguugauggcugguacggguaucaucaccagaacgaacaaggaagcggcuacgccgcugaccucaaauccacgcagaaugcgaucgauaagauuacaaacaaagucaauucugugaucaagaagaugaacacccaguuuaccgccguggggaaagaguucaaucaccuggagaagcgcauugaaaaccuuaauaaaaagguugacgauggauuccuggacaucuggacauacaacgcugagcuccuggugguccuggaaaaugagagaacccucgaauaucaugauagcaacgugaaaaaucuguacgagaagguccggaaccagcuuaagaacaaugccaaagagaucggcaacggguguuuugaguucuaucacaaguuugacaauacaugcauggaauccgugaaaaacggcacguacgauuauccuaaguacagcgaagaggccaaacugaaucgcgaagagauugacggaguuaagcucgagucuaccagaaucuaucaaauucuggcuaucuacuccacaguggccagcucucuuguccuggugguuucccucggcgcgauuagcuucuggauguguuuuaacgggucccugcagugccggaucugcauuuga

SEQ ID NO: 204546 - RNA, 1701 nt, Artificial Sequence
  derived and/or modified CDS sequence (opt5) from hemagglutinin__InfluenzaA__AID70456
augaaggccauccuggugguccuccuguacaccuucgcuacagccaacgcggacacgcuuugcauuggcuaucacgcuaauaacagcaccgauacaguugacaccgugcuggagaaaaaugugacagucacccauuccgugaaccuccuggaagauaagcacaaugggaaacuuuguaagcugagaggaguugcuccccuccaucugggcaaaugcaacaucgccggguggauucugggaaauccugagugugaaucucucagcacagccuccucuuggagcuacaucguggagaccuccucuagcgacaacggcacgugcuauccgggggauuuuauugacuacgaagaacugcgggagcagcuuuccagcgucucuuccuucgaacgcuuugagaucuuccccaagaccagcucuuggccuaaucacgauuccaacaagggagugacagccgcuuguccccaugccggcgcgaaaucuuuuuauaagaaucugaucuggcucguuaaaaagggcaacagcuacccuaaacuguccaagagcuauauuaaugacaaggggaaagaagugcuuguccuguggggaauccaccaccccuccaccacagccgaucaacagucucucuaccagaacgcugacaccuacguguucgugggcacgagcagauauuccaagaaauuuaagccugagauugccauccggccgaaaguccgcgaucaggaggggagaaugaauuacuauuggacacugguugaacccggagacaagauuaccuucgaggcuacaggcaaccugguggugccucgguacgccuuugcgauggaacgcaacgccgggagcggaaucauuaucucugauacccccguccaugacugcaauaccacaugucaaacgccuaaaggcgcuaucaacaccucccuccccuuccagaauauucacccgaucacaauuggcaagugcccuaaguaugugaaaagcaccaagcugagacuugccacagggcugcggaacguucccucuauccagagccgcggacucuuuggcgcuauugccggguucaucgagggaggcuggaccgggaugguggacggaugguacggcuaucaucaccagaaugaacaaggcuccggguacgccgcugaucugaaaucuacgcagaacgcgaucgacaagauuacaaauaaagucaacagcgugaucgagaagaugaauacccaguuuaccgccguugugaaggaguucaaccaccuugagaaaagaauugagaaucugaacaagaaagucgaugacggauuccucgauaucuggacauacaaugcugaacugcuggugguccucgagaacgaacggacccuggaguaucaugacuccaaucuuaagaaccuguacgagaaagugcgcaaccagcucaagaauaacgccaaggaaauuggcaauggguguuuugaguucuaucacaaauuugauaacacaugcauggaaagcguuaagaauggaacguacgacuauccuaaauacucugaggaagccaagcugaacagagaggagaucgauggcgugaaacuugaauccacccggaucuaucaaauucuggcuaucuacagcacagucgccucuucccucgugcagguugugagccugggggcgauuuccuucuggauguguuuuaauggcucucugcagugccgcaucugcauuuga

SEQ ID NO: 204547 - RNA, 1701 nt, Artificial Sequence
  derived and/or modified CDS sequence (opt5) from hemagglutinin__InfluenzaA__AID70457
augaaggccauccuggugguccuccuguacaccuucgcuacagccaacgcggacacgcuuugcauuggcuaucacgcuaauaacagcaccgauacaguugacaccgugcuggagaaaaaugugacagucacccauuccgugaaccuccuggaagauaagcacaaugggaaacuuuguaagcugagaggaguugcuccccuccaucugggcaaaugcaacaucgccggguggauucugggaaauccugagugugaaucucucagcacagccuccucuuggagcuacaucguggagaccuccucuagcgacaacggcacgugcuauccgggggauuuuauugacuacgaagaacugcgggagcagcuuuccagcgucucuuccuucgaacgcuuugagaucuuccccaagaccagcucuuggccuaaucacgauuccaacaagggagugacagccgcuuguccccaugccggcgcgaaaggcuuuuauaagaaucugaucuggcucguuaaaaaggggaacagcuacccuaaacugucuaaguccuauauuaaugacaagggaaaagaagugcuuguccuguggggcauccaccaccccagcaccacagccgaucaacagucccucuaccagaacgcugacaccuacguguucguggggacgucuagauauagcaagaaauuuaagccugagauugccauccggccgaaaguccgcgaucaggagggaagaaugaauuacuauuggacacugguugaacccggcgacaagauuaccuucgaggcuacagggaaccugguggugccucgguacgccuuugcgauggaacgcgaugccggauccggcaucauuaucagcgacacccccguccaugacugcaacaccacaugucaaacgccuaaaggcgcuaucaauaccucucuccccuuccagaacauucacccgaucacaauugggaagugcccuaaguaugugaaauccaccaagcugagacuugccacaggacugcggaauguucccagcauccagucucgcggccucuuuggggcuauugccggauucaucgagggcggguggaccggaaugguggauggcugguacggcuaucaucaccagaacgaacaagggagcggauacgccgcugaccugaaauccacgcagaaugcgaucgauaagauuacaaacaaagucaauucugugaucgagaagaugaacacccaguuuaccgccguuggcaaggaguucaaucaccuugagaaaagaauugagaaccugaauaagaaaguggacgauggguuccucgacaucuggacauacaacgcugaacugcuggucgugcucgagaaugaacggacccuggaguaucaugauagcaacgucaagaaucuuuacgagaaagugcgcaaccagcugaagaacaaugccaaggaaauuggaaacggcuguuuugaguucuaucacaaauuugacaauacaugcauggaauccguuaagaacgggacguacgauuauccuaaauacagcgaggaagccaagcucaauagagagaaaaucgacggcgugaagcuggagucuacccggaucuaucaaauucuugcuaucuacuccacagucgccagcucucuggugcagguugugucccucggagcgauuagcuucuggaaguguuuuaacggcucccugcagugccgcaucugcucuuga

SEQ ID NO: 204548 - RNA, 1701 nt, Artificial Sequence
  derived and/or modified CDS sequence (opt5) from hemagglutinin__InfluenzaA__AID70458
augaagaccaucauugcccugagcuacauccucugccugguguucgcucagaaauuucccggcaacgacaauuccauggccacacuuugucuggggcaccaugcggucccuaacggaacgaugguuaagaccauuacaaaugaucaaaucgaggugaccaacgcuacagaacucgugcagucuagcuccaccggcgggauuugcaauucuccgcaccagauccuggacggaggcaacuguacacuuaucgaugcccugcucggggacccccagugcgauggauuccaaaauaaaaagugggaccuguuugucgagagaagcaaagccuauuccaacuguuacccuuaugaugugcccgacuacgcuucucugcggagcauuguugccuccagcggcacccucgaguucaauaacgaaucuuuuaauuggacgggcgugacccagaacgggaaguccgcuagcugcaagcgcggaucugauaauuccuucuuuagcagacugaacuggcuuacacaucugaauuauaaauacccugcccucaaggucaccaugcccaacaacgaaaaauucgacaagcuguauaucuggggcgugcaccauccugggacauacaaugaucagauuucucuuuacgcgcaggccuccggaaucauuaccguuagcacgaaacggaaccaacagacagugaucccgaauauuggcucccgccccagaguccgggacaucccuucucgcaucagcauuuauuggaccaucgugaagcccggggauauucugcucaucaacuccacaggaaaucugauugcuccuagaggcuacuuuaagauccagagcggcaaaucuuccaucaugcggagcgacgcccccauugggaaguguaacucugagugcaucaccccgaauggaagcauuccuaacgacaaacccuuccagaaugugaaccgcaucaccuauggcgcuuguccuagauacgucaagcaaaauacacugaaacucgccacggggaugcggaacguucccgagaagcagacccgcggaauuuuuggcgcgaucgccggguucaucgaaaauggaugggagggcaugguggauggcugguauggguuuagacaccagaacuccgaaggaaugggccaagcugccgaccugaaaucuacacaggcugccauuaaucagaucaacgggaaacuuaaccggcugauuggaaagaccaucgagaaguuccaccagauugagaaggaguucagcgaaguggaaggccgcauccaagaucucgagaaauacgucgaagacacaaagauugaucugugguccuauaaugccgagcuucugguggcucucgagaaccagcauaccaucgaccugacggauagcgaaauggacaaacuguuugagagaacaaagaagcagaugcgggaaaaugcggaggauauggggaacggcugcuucaaaaucuaccacaagugugacaaugccugcauuggaucuaucagaaacggcauuuacgaucgcgacaucuaucgggacgaagcucucuccaauagauuucagauuaaagggguugagcugaaggccggauacaaagauuggauccuuuggaucagcuucgccauuucuugcuuucugcucugugugguccugcuuggcuucaucaugugggcuugccaaaaggggaaccugcgcuguaauauuugcaucuga

SEQ ID NO: 204549 - RNA, 1701 nt, Artificial Sequence
  derived and/or modified CDS sequence (opt5) from hemagglutinin__InfluenzaA__AID70459
augaagaccaucauugcccugagcuacauccucugccugguguucgcucagaaaguccccggcaacgacaauuccacagccacgcuuugucuggggcaccaugcgguuccuaacggaaccauugugaagacaaucaccaaugaucaaauugaggugacaaacgcuaccgaacucguccagucuagcuccacaggcgagaucugcaauucuccgcaccagauccuggacggggaaaacuguacccuuauugaugcccugcucggagacccccagugcgauggcuuucaaaauaaaaagugggaccuguucguggagagaagcaaagcccauuccaacuguuauccuuacgauguucccgacuaugcuucucugcggagccucguggccuccagcgggacgcuggaauuuaauaacgagucuuucaauuggaccggagucacacagaacggcaccuccagcgcuugcauccgcagaucuaauaacuccuuuuucagccggcuuaauuggcugacacaccucaacuuuaaguacccugcccugaacgugaccaugcccaauaacgagcaguucgauaaacuuuauauuuggggcguucaucacccugggacggacaaagaucagaucuuucuguacgcgcaagccucuggacgcauuacaguguccaccaagaaaagccagcaggcugucaucccgaauauuggcuccagaccccgggugcgcaacaucccuucuagagugagcaucuauuggacaauugucaagcccggggacauccuccugauuaauuccaccggaaaccugaucgccccucggggcuacuucaaaauucgcagcgggaagucuuccaucaugagaagcgaugcucccaucggaaaguguaauucugccugcauuaccccgaacggcagcaucccuaaugacaaacccuuucagaacguuaaucggauuacauacggcgcguguccucgcuaugugaagcaaaacacgcucaaacuggcccccgggaugagaaaugugcccgaaaagcagacccggggaaucuucggcgcuauugccggguuuaucgagaacggaugggaaggcauggucgacgggugguacggauuccgccaccaaaauuccgagggcagaggccaggcugccgaucuuaaaucuacacaggccgcuaucgaccagauuaacgggaagcugaaccggcucaucggaaaaaccauugagaaguuccaucagaucgaaaaugaguuuagcgaaguggagggccgcauucaagaucuggaaaaguauguugaggacacaaaaaucgaucuuugguccuacauugcggagcugcucguggcccuggaaaaccagcacaccaucgaccugacggauagcgagaugaauaaacucuucgaaaagacaaagaagcagcugagagagaacgcugaagacauggggaauggaugcuuuaagaucuaucauaagugugauaacgccugcauuggcucuauccggaaugggauuuacgaccacgaugucuauagagacgaggcccuuaacaaucgcuuccagaucaaaggcguggagcugaaguccggauacaaagacuggauucucuggaucagcuuugcuaucucuugcuuccugcuuuguguugcccugcucggcuuuauuaugugggcgugccaaaaggggaacauccgguguaauauuugcaucuga

SEQ ID NO: 204550 - RNA, 1701 nt, Artificial Sequence
  derived and/or modified CDS sequence (opt5) from hemagglutinin__InfluenzaA__AID70460
augaagaccaucauugcccugagcuacauccucugccugguguucgcucagaaacuucccggcaacgacaauuccacagccacgcugugucucgggcaccaugcggucccuaacggaaccauuguuaagacaaucaccaaugaucaaauugaggugacaaacgcuaccgaacuggugcagucuagcuccacaggcgagaucugcaauucuccgcaccagauccuugacggggaaaacuguacccugauugaugcccuccugggagacccccagugcgauggcuuucaaaauaaaaagugggaccuguucgucgagagaagcaaagcccauuccaacuguuauccuuacgaugugcccgacuaugcuucucuccggagccugguugccuccagcgggacgcuugaauuuaauaacgagucuuucaauuggaccggagugacacagaacggcaccuccagcgcuugcauccgcagaucuaauaacuccuuuuucagccggcugaauuggcucacacaccugaacuuuaaguacccugcccuuaacgucaccaugcccaauaacgagcaguucgauaagcuguauauuuggggcgugcaucacccugggacggacaaagaucagaucuuucucuacgcgcaagccucuggacgcauuacaguuuccaccaagaaaagccagcaggcugugaucccgaauauuggcuccagaccccggguccgcaacaucccuucuagagugagcaucuauuggacaauugugaagcccggggacauccugcugauuaauuccaccggaaaccucaucgccccucggggcuacuucaaaauucgcagcgggaagucuuccaucaugagaagcgaugcucccaucggaaaguguaauucugccugcauuaccccgaacggcagcaucccuaaugacaaacccuuucagaacgucaaucggauuacauacggcgcguguccucgcuauguuaagcaaaacacgcugaaacuugccaccgggaugagaaaugugcccgaaaagcagacacggggaaucuucggcgcuauugccggguuuaucgagaacggaugggaaggcaugguggacgggugguacggauuccgccaccaaaauuccgagggcagaggccaggcugccgaucugaaaucuacccaggccgcuaucgaccagauuaacgggaagcucaaccggcugaucggaaaaacaauugagaaguuccaucagaucgaaaaggaguuuagcgaagucgagggccgcauucaagaucuugaaaaauauguggaggacaccaagaucgaucugugguccuacaaugcggagcuccugguugcccuggaaaaccagcacacgauugaccucacagauagcgagaugaauaaacuguucgaaaagaccaaaaagcagcuuagagagaacgcugaagacauggggaauggaugcuuuaagaucuaucauaaaugugauaacgccugcaucggcucuauucggaaugggaucuacgaccacgauguguauagagacgaggcccugaacaaucgcuuccagauuaagggcgucgagcucaaauccggauacaaggacuggauccuguggauuagcuuugcuaucucuugcuuccuucuguguguggcccuccugggcuuuaucaugugggcgugccaaaaagggaacauucgguguaauaucugcauuuga

SEQ ID NO: 204551 - RNA, 1701 nt, Artificial Sequence
  derived and/or modified CDS sequence (opt5) from hemagglutinin__InfluenzaA__AID70461
augaagaccaucauugcccugagcuacauccucugccugguguucgcucagaaacuucccggcaacgacaauuccacagccacgcugugucucgggcaccaugcggucccuaacggaaccauuguuaagacaaucaccaaugaucaaauugaggugacaaacgcuaccgaacuggugcagucuagcuccacaggcgagaucugcaauucuccgcaccagauccuugacggggaaaacuguacccugauugaugcccuccugggagacccccagugcgauggcuuucaaaauaaaaagugggaccuguucgucgagagaagcaaagcccauuccaacuguuauccuuacgaugugcccgacuaugcuucucuccggagccugguugccuccagcgggacgcuugaauuuaauaacgagucuuucaauuggaccggagugacacagaacggcaccuccagcgcuugcauccgcagaucuaauaacuccuuuuucagccggcugaauuggcucacacaccugaacuuuaaguacccugcccuuaacgucaccaugcccaauaacgagcaguucgauaagcuguauauuuggggcgugcaucacccugggacggacaaagaucagaucuuucucuacgcgcaagccucuggacgcauuacaguuuccaccaagaaaagccagcaggcugugaucccgaauauuggcuccagaccccggguccgcaacaucccuucuagagugagcaucuauuggacaauugugaagcccggggacauccugcugauuaauuccaccggaaaccucaucgccccucggggcuacuucaaaauucgcagcgggaagucuuccaucaugagaagcgaugcucccaucggaaaguguaauucugaaugcauuaccccgaacggcagcaucccuaaugacaaacccuuucagaacgucaaucggauuacauacggcgccuguccucgcuauguuaagcaaaacacgcugaaacuugcgaccgggaugagaaaugugcccgagaagcagacacggggaaucuucggcgccauugcuggguuuaucgaaaacggaugggagggcaugguggacgggugguacggauuccgccaccaaaauuccgagggcagaggccaggccgcugaucugaaaucuacccaggccgccaucgaccagauuaacgggaagcucaaccggcugaucggaaaaacaauugaaaaguuccaucagaucgagaaggaauuuagcgaggucgaaggccgcauucaagaucuugagaaauauaucgaggacaccaagauugaucugugguccuacaaugcugaacuccugguggcgcuggagaaccagcacacgaucgaccucacagauagcgaaaugaauaaacuguucgagaagaccaaaaagcagcuuagagaaaacgccgaggacauggggaauggaugcuuuaagaucuaucauaaaugugauaacgcuugcauuggcucuauccggaaugggauuuacgaccacgauguuuauagagacgaggcccugaacaaucgcuuccagaucaagggcguggaacucaaauccggauacaaggacuggauucuguggaucagcuuugccaucucuugcuuccuucugugugucgcucuccugggcuuuauuaugugggccugccaaaaagggaacauccgguguauuaccugcaucuga

SEQ ID NO: 204552 - RNA, 1701 nt, Artificial Sequence
  derived and/or modified CDS sequence (opt5) from hemagglutinin__InfluenzaA__AID70463
augaagaccaucauugcccugagcuacauccucugccugguguucgcucagaaaauucccggcaacgacaauuccacagccacgcuuugucuggggcaccaugcggucccuaacggaaccaucguuaagacaauuaccaaugaucaaaucgaggugacaaacgcuaccgaacucgugcagucuagcuccacaggcgagaucugcaauucuccgcaccagauucuggacggggaaaacuguacccuuaucgaugcccugcucggagacccccagugcgauggcuuucaaaauaaaaagugggaccuguucgucgagagaagcaaagcccauuccaacuguuauccuuacgaugugcccgacuaugcuucucugcggagccucguugccuccagcgggacgcuggaauuuaauaacgagucuuucaauuggaccggagugacacagaacggcaccuccagcgcuugcauucgcagaucuaauaacuccuuuuucagccggcuuaauuggcugacacaccucaacuuuaaguacccugcccugaacgucaccaugcccaauaacgagcaguucgauaaacuuuauaucuggggcgugcaucacccugggacggacaaggaucagauuuuucuguacgcgcaagccucuggacgcaucacaguuuccaccaagaaaagccagcaggcugugauuccgaauaucggcuccagaccccggguccgcaacaucccuucuagagugagcauuuauuggacaaucgugaagcccggggacauucuccugaucaauuccaccggaaaccugauugccccucggggcuacuucaaaauccgcagcgggaagucuuccaucaugagaagcgaugcucccauuggaaaguguaauucugccugcaucaccccgaacggcagcauuccuaaugacaaacccuuucagaacgucaaucggaucacauacggcgcguguccucgcuauguuaagcaaaacacgcucaaacuggccaccgggaugagaaaugugcccgaaaagcagacacggggaauuuucggcgcuaucgccggguuuaucgagaacggaugggaaggcaugguggacgggugguacggauuccgccaccaaaauuccgagggcagaggccaggcugccgaucuuaaaucuacccaggccgcuauugaccagaucaacgggaagcugaaccggcucauuggaaaaacaaucgagaaguuccaucagauugaaaaggaguuuagcgaagucgagggcagaauccaagaucuggaaaaauauguggaggacaccaagauugaucuuugguccuacaaugcggagcugcucguugcccuggaaaaccagcacacgaucgaccugacagauagcgagaugaauaaacucuucgaaaagaccaaaaagcagcugcgcgagaacgcugaagacauggggaauggaugcuuuaagaucuaucauaaaugugauaacgccugcauuggcucuauccggaaugggauuuacgaccacgauguguauagagacgaggcccuuaacaaucgcuuccagaucaagggcgucgagcugaaauccggauacaaggacuggauucucuggaucagcuuugcuaucucuugcuuccugcuuuguguggcccugcucggcuuuauuaugugggcgugccaaaaagggaacauccgguguaauauuugcaucuga

SEQ ID NO: 204553 - RNA, 1701 nt, Artificial Sequence
  derived and/or modified CDS sequence (opt5) from hemagglutinin__InfluenzaA__AID70464
augaagaccaucauugcccugagcuacauccucugccugguguucgcucagaaacuucccggcgacgauaacuccacagccacgcugugucucgggcaccaugcggucccuaauggaaccauuguuaagacaaucaccaacgaccaaauugaggugacaaaugcuaccgaacuggugcagucuagcuccacaggcgagaucugcaacucuccgcaccagauccuugauggggaaaauuguacccugauugacgcccuccugggagauccccagugcgacggcuuucaaaacaaaaagugggaucuguucgucgagagaagcaaagcccauuccaauuguuauccuuacgacgugcccgauuaugcuucucuccggagccugguugccuccagcgggacgcuugaauuuaacaaugagucuuucaacuggaccggagugacacagaauggcaccuccagcgcuugcauccgcagaucuaacaauuccuuuuucagccggcugaacuggcucacacaccugaauuuuaaguacccugcccuuaacgucaccaugcccaacaaugagcaguucgacaagcuguauauuuggggcgugcaucacccugggacggauaaagaccagaucuuucucuacgcgcaagccucuggacgcauuacaguuuccaccaagaaaagccagcaggcugugaucccgaacauuggcuccagaccccggguccgcaauaucccuucuagagugagcaucuauuggacaauugugaagcccggggauauccugcugauuaacuccaccggaaaucucaucgccccucggggcuacuucaaaauucgcagcgggaagucuuccaucaugagaagcgacgcucccaucggaaaguguaacucugccugcauuaccccgaauggcagcaucccuaacgacaaacccuuucagaaugucaaccggauuacauacggcgcguguccucgcuauguuaagcaaaauacgcugaaacuugccaccgggaugagaaacgugcccgaaaagcagacacggggaaucuucggcgcuauugccggguuuaucgagaauggaugggaaggcaugguggaugggugguacggauuccgccaccagaacuccgagggcagaggccaagcugccgaccugaaaucuacccaggccgcuaucgaucagauuaaugggaagcucaaccggcugaucggaaaaacaauugagaaguuccaucagaucgaaaaggaguuuagcgaagucgagggccgcauucaagaccuugaaaaauauguggaggauaccaagaucgaccugugguccuacaacgcggagcuccugguugcccuggaaaaucagcacacgauugaucucacagacagcgagaugaacaaacuguucgaaaagaccaaaaagcagcuuagagagaaugcugaagauauggggaacggaugcuuuaagaucuaucauaaaugugacaaugccugcaucggcucuauucggaacgggaccuacgaucacgacguguauagagacgaggcccugaauaaccgcuuccagaucaagggcgucgagcucaaauccggauacaaggauuggauucuguggaucagcuuugcuauuucuugcuuccuucuguguguggcccuccugggcuuuaucaugugggcgugccaaaaagggaauauccgguguaacauuugcaucuga

SEQ ID NO: 204554 - RNA, 1701 nt, Artificial Sequence
  derived and/or modified CDS sequence (opt5) from hemagglutinin__InfluenzaA__AID70465
augaagaccaucauugcccugagcuacauccucugccugguguucgcucagaaacuucccggcgacgauaacuccacagccacgcugugucucgggcaccaugcggucccuaauggaaccauuguuaagacaaucaccaacgaccaaauugaggugacaaaugcuaccgaacuggugcagucuagcuccacaggcgagaucugcaacucuccgcaccagauccuugauggggaaaauuguacccugauugacgcccuccugggagauccccagugcgacggcuuucaaaacaaaaagugggaucuguucgucgagagaagcaaagcccauuccaauuguuauccuuacgacgugcccgauuaugcuucucuccggagccugguugccuccagcgggacgcuugaauuuaacaaugagucuuucaacuggaccggagugacacagaauggcaccuccagcgcuugcauccgcagaucuaacaauuccuuuuucagccggcugaacuggcucacacaccugaauuuuaaguacccugcccuuaacgucaccaugcccaacaaugagcaguucgacaagcuguauauuuggggcgugcaucacccugggacggauaaagaccagaucuuucucuacgcgcaagccucuggacgcauuacaguuuccaccaagaaaagccagcaggcugugaucccgaacauuggcuccagaccccggguccgcaauaucccuucuagagugagcaucuauuggacaauugugaagcccggggauauccugcugauuaacuccaccggaaaucucaucgccccucggggcuacuucaaaauucgcagcgggaagucuuccaucaugagaagcgacgcucccaucggaaaguguaacucugccugcauuaccccgaauggcagcaucccuaacgacaaacccuuucagaaugucaaccggauuacauacggcgcguguccucgcuauguuaagcaaaauacgcugaaacuugccaccgggaugagaaacgugcccgaaaagcagacacggggaaucuucggcgcuauugccggguuuaucgagaauggaugggaaggcaugguggaugggugguacggauuccgccaccagaacuccgagggcagaggccaagcugccgaccugaaaucuacccaggccgcuaucgaucagauuaaugggaagcucaaccggcugaucggaaaaacaauugagaaguuccaucagaucgaaaaggaguuuagcgaagucgagggccgcauucaagaccuugaaaaauauguggaggauaccaagaucgaccugugguccuacaacgcggagcuccugguugcccuggaaaaucaccaugcuauugaucucacggacagcgagaugaacaaacuguucgaaaagaccaaaaagcagaugagagagaaugccgaagauauggggaacggaugcuuuaagaucuaucuuaaaugugacaaugccugcaucggcucuauucggaacgggaucuacgaucacgacguguauagagacgaggcucugaauaaccgcuuccagauuaagggcgucgagcucaaauccggauacaaggauuggauccuguggauuagcuuuacagaaucuugcuuccuucuguguguggcccuccugggcuuuaucaugugggcgugccagaaagggaauauccgguguaacauuugcaucuga

SEQ ID NO: 204555 - RNA, 1701 nt, Artificial Sequence
  derived and/or modified CDS sequence (opt5) from hemagglutinin__InfluenzaA__AID70466
augaagaccaucauugcccugagcuacauccucugccugguguucgcucagaaacuucccggcaacgacaauuccacagccacgcugugucucgggcaccaugcggucccuaacggaaccauuguuaagacaaucaccaaugaucaaauugaggugacaaacgcuaccgaacuggugcagucuagcuccacaggcgagaucugcaauucuccgcaccagauccuugacggggaaaacuguacccugauugaugcccuccugggagacccccagugcgauggcuuucaaaauaaaaagugggaccuguucgucgagagaagcaaagcccauuccaacuguuauccuuacgaugugcccgacuaugcuucucuccggagccugguugccuccagcgggacgcuugaauuuaauaacgagucuuucaauuggaccggagugacacagaacggcaccuccagcgcuugcauccgcagaucuaauaacuccuuuuucagccggcugaauuggcucacacaccugaacuuuaaguacccugcccuuaacgucaccaugcccaauaacgagcaguucgauaagcuguauauuuggggcgugcaucacccugggacggacaaagaucagaucuuucucuacgcgcaagccucuggacgcauuacaguuuccaccaagaaaagccagcaggcugugaucccgaauauuggcuccagaccccggguccgcaacaucccuucuagagugagcaucuauuggacaauugugaagcccggggacauccugcugauuaauuccaccggaaaccucaucgccccucggggcuacuucaaaauucgcagcgggaagucuuccaucaugagaagcgaugcucccaucggaaaguguaauucugccugcauuaccccgaacggcagcaucccuaaugacaaacccuuucagaacgucaaucggauuacauacggcgcguguccucgcuauguuaagcaaaacacgcugaaacuugccaccgggaugagaaaugugcccgaaaagcagacacggggaaucuucggcgcuauugccggguuuaucgagaacggaugggaaggcaugguggacgggugguacggauuccgccaccaaaauuccgagggcagaggccaggcugccgaucugaaaucuacccaggccgcuaucgaccagauuaacgggaagcucaaccggcugaucggaaaaacaauugagaaguuccaucagaucgaaaaugaguuuagcgaagucgagggccgcauucaagaucuugaaaaguauguggaggacaccaaaaucgaucugugguccuacauuggggagcuccugguugcgcuggaaaaccagcacacgaucgaccucacagauagcgagaugaauaagcuguucgagaaaaccaagaaacagcuuagagaaaacgccgaagacaugggaaauggcugcuuuaagaucuaucauaagugugauaacgcuugcauugggucuauccggaauggcauuuacgaccacgauguguauagagacgaggcccugaacaaucgcuuccagaucaaaggagucgagcucaaguccggcuacaaagacuggauucuguggaucagcuuugccaucucuugcuuccuucuguguguggcucuccugggguuuauuaugugggccugccaaaagggaaacauccgguguaauauuugcaucuga

SEQ ID NO: 204556 - RNA, 1701 nt, Artificial Sequence
  derived and/or modified CDS sequence (opt5) from hemagglutinin__InfluenzaA__AID70467
augaagaccaucauugcccugagcuacauccucugccugguguucgcucagaaacuucccggcaacgacaauuccacagccacgcugugucucgggcaccaugcggucccuaacggaaccauuguuaagacaaucaccaaugaucaaauugaggugacaaacgcuaccgaacuggugcagucuagcuccacaggcgagaucugcaauucuccgcaccagauccuugacggggaaaacuguacccugauugaugcccuccugggagacccccagugcgauggcuuucaaaauaaaaagugggaccuguucgucgagagaagcaaagcccauuccaacuguuauccuuacgaugugcccgacuaugcuucucuccggagccugguugccuccagcgggacgcuugaauuuaauaacgagucuuucaauuggaccggagugacacagaacggcaccuccagcgcuugcauccgcagaucuaauaacuccuuuuucagccggcugaauuggcucacacaccugaacuuuaaguacccugcccuuaacgucaccaugcccaauaacgagcaguucgauaagcuguauauuuggggcgugcaucacccugggacggacaaagaucagaucuuucucuacgcgcaagccucuggacgcauuacaguuuccaccaagaaaagccagcaggcugugaucccgaauauuggcuccagaccccggguccgcaacaucccuucuagagugagcaucuauuggacaauugugaagcccggggacauccugcugauuaauuccaccggaaaccucaucgccccucggggcuacuucaaaauucgcagcgggaagucuuccaucaugagaagcgaugcucccaucggaaaguguaauucugccugcauuaccccgaacggcagcaucccuaaugacaaacccuuucagaacgucaaucggauuacauacggcgcguguccucgcuauguuaagcaaaacacgcugaaacuugccaccgggaugagaaaugugcccgaaaagcagacacggggaaucuucggcgcuauugccggguuuaucgagaacggaugggaaggcaugguggacgggugguacggauuccgccaccagaauugcgagggcagaggccaagcugccgaucugaaauccacccaggccgcuaucgaccagauuaacgggaagcucaaccggcugaucggaaaaacaauugagaaguuccaucagaucgaaaaugaguuuucugaagucgagggccgcauucaagggcuugaaaaguauguggaggauaccaaaaucgaccuguggagcuacauugcggagcucaucguugcccuggaaaaccagcacacgaucgaucugacagacuccgagaugaauaaacucuucgaaaagaccaagaaacagaugagagagaacgcugaagauaugggaaauggcuguuuuaagauuuaucauaagugcgacaacgccugcaucgggagcauucggaauggcaucuacgaucacgacguguauagagaugaggcccugaacaaucgcuuccagauuaaaggagucgagcuuaagucuggcuacaaagacuggauccuguggaucuccuuugcuauuagcuguuuccuccugugcguggcccuucugggguuuaucaugugggcgugucaaaagggaaacauucggugcaauaucuguauuuga

SEQ ID NO: 204557 - RNA, 1701 nt, Artificial Sequence
  derived and/or modified CDS sequence (opt5) from hemagglutinin__InfluenzaA__AID70468
augaagaccaucauugcccugagcuacauccucugccugguguucgcucagaaacuucccggcaacgacaauuccacagccacgcugugucucgggcaccaugcggucccuaacggaaccauuguuaagacaaucaccaaugaucaaauugaggugacaaacgcuaccgaacuggugcagucuagcuccacaggcgagaucugcaauucuccgcaccagauccuugacggggaaaacuguacccugauugaugcccuccugggagacccccagugcgauggcuuucaaaauaaaaagugggaccuguucgucgagagaagcaaagcccauuccaacuguuauccuuacgaugugcccgacuaugcuucucuccggagccugguugccuccagcgggacgcuugaauuuaauaacgagucuuucaauuggaccggagugacacagaacggcaccuccagcgcuugcauccgcagaucuaauaacuccuuuuucagccggcugaauuggcucacacaccugaacuuuaaguacccugcccuuaacgucaccaugcccaauaacgagcaguucgauaagcuguauauuuggggcgugcaucacccugggacggacaaagaucagaucuuucucuacgcgcaagccucuggacgcauuacaguuuccaccaagagaagccagcaggcugugaucccgaauauuggcucccggccccgcgucagaaacaucccuucucgggugagcaucuauuggacaauugugaaacccggggacauccugcugauuaauuccaccggaaaccucaucgccccucgcggcuacuucaagauuagaagcgggaaaucuuccaucaugcggagcgaugcucccaucggaaaguguaauucugccugcauuaccccgaacggcagcaucccuaaugacaagcccuuucagaacgucaaucgcauuacauacggcgcguguccuagauauguuaaacaaaacacgcugaaacuugccaccgggaugcggaaugugcccgaaaagcagacacgcggaaucuucggcgcuauugccggguuuaucgagaacggaugggaaggcaugguggacgggugguacggauucagacaccagaauugcgagggccggggccaagcugccgaucugaaguccacccaggccgcuaucgaccagauuaacgggaaacucaacagacugaugggaaagucuaucgagaaauuccaucagauugaaaaugaguuuagcgaagucgagggccgcauccaagggcuugaaaaguauguggaggauacaaagauugaccugugguccuacaacggagagcucaucguugcgcuggaaaaucagcacgccauugaucugaccgacagcgagaugaacaaacucuucgaaaagacgaaaaagcagaugcgggagaaugcugaagauaugggcaacggguguuuuaaaaucuaucugaagugcgacaaugccugcaucggcucuauuagaaacggaaucuacgaucaugacguguaucgcgaugaggcccuuaauaaccgguuccagauuaagggcgucgagcugaaauccggguacaaggacuggauccucuggauuagcuuuacaaucucuuguuuccugcuuugcguggcucugcucggauuuaucaugugggccagacaaaaaggcaauauucgcuguaacaucugcauuuga

SEQ ID NO: 204558 - RNA, 1701 nt, Artificial Sequence
  derived and/or modified CDS sequence (opt5) from hemagglutinin__InfluenzaA__AID70469
augaagaccaucauugcccugagcuacauccucugccugguguucgcucagaaaguccccggcaacgaaaauuccacagccacgcuuugucuggggcaccaugcgguuccuaacggaaccauugugaagacaaucaccaaugaccaaauugaggugacaaacgcuaccgagcucguccagucuagcuccacaggcgaaaucugcaauucuccgcaccagauccuggauggggagaacuguacccuuauugacgcccugcucggagauccccagugcgacggcuuucaaaauaaaaagugggaucuguucguggaaagaagcaaagcccauuccaacuguuauccuuacgacguucccgauuaugcuucucugcggagccucguggccuccagcgggacgcuggaguuuaauaacgagucuuucaauuggaccggagucacacagaacggcaccuccagcgcuugcauccgcagaucuaauaacuccuuuuucagccggcuuaauuggcugacacaccucaacuuuaaguacccugcccugaacgugaccaugcccaauaacgaacaguucgacaaacuuuauauuuggggcguucaucacccugggacggauaaggaccagaucuuucuguacgcgcaagccucuggacgcauuacaguguccaccaagagaagccagcaggcugucaucccgaauauuggcucccggccccgcgugagaaacaucccuucucgggugagcaucuauuggacaauugucaaacccggggauauccuccugauuaauuccaccggaaaccugaucgccccucgcggcuacuucaagauuagaagcgggaaaucuuccaucaugcggagcgacgcucccaucggaaaguguaauucugccugcauuaccccgaacggcagcaucccuaaugauaagcccuuucagaacguuaaucgcauuacauacggcgcguguccuagauaugugaaacaaaacacgcucaagcuggccaccgggaugcggaaugugcccgagaaacagacacgcggaaucuucggcgcuauugccggguuuaucgaaaacggaugggagggcauggucgacgggugguacggauucagacaccagaauugcgagggccggggccaagcugccgaccuuaaguccacccaggccgcuaucgaucagauuaacgggaaacugaacagacucaucggaaagacaauugaaaaauuccaucagaucgagaaggaauuuucugagguggaaggccgcauucaagggcuggagaaguauguugaggacaccaaaaucgaucuuuggagcuacaaugcggaacugcucguggcccuggagaaccagcacacgauugaccugacagauuccgaaaugaauaaacucuucgagaagaccaagaaacagaugcgggaaaacgcugaggacaugggaaauggcuguuuuaagaucuaucauaagugcgauaacgccugcaucgggagcauuagaaauggcaucuacgaccacgaugucuaucgcgacgaggcccugaacaaucgguuccagauuaaaggaguggaacuuaagucuggcuacaaagauuggauccuguggauuuccuuuaccaucagcuguuuccuccugugcguugcccuucugggguuuaucaugugggcuugucaaaagggaaacauuagaugcaauaucuguauuuga

SEQ ID NO: 204559 - RNA, 1701 nt, Artificial Sequence
  derived and/or modified CDS sequence (opt5) from hemagglutinin__InfluenzaA__AID70470
augaagaccaucauugcccugagcuacauccucugccugguguucgcucagaaaguccccggcaacgaaaauuccacagccacgcuuugucuggggcaccaugcgguuccuaacggaaccauugugaagacaaucaccaaugaccaaauugaggugacaaacgcuaccgagcucguccagucuagcuccacaggcgaaaucugcaauucuccgcaccagauccuggauggggagaacuguacccuuauugacgcccugcucggagauccccagugcgacggcuuucaaaauaaaaagugggaucuguucguggaaagaagcaaagcccauuccaacuguuauccuuacgacguucccgauuaugcuucucugcggagccucguggccuccagcgggacgcuggaguuuaauaacgagucuuucaauuggaccggagucacacagaacggcaccuccagcgcuugcauccgcagaucuaauaacuccuuuuucagccggcuuaauuggcugacacaccucaacuuuaaguacccugcccugaacgugaccaugcccaauaacgaacaguucgacaaacuuuauauuuggggcguucaucacccugggacggauaaggaccagaucuuucuguacgcgcaagccucuggacgcauuacaguguccaccaagagaagccagcaggcugucaucccgaauauuggcucccggccccgcgugagaaacaucccuucucgggugagcaucuauuggacaauugucaaacccggggauauccuccugauuaauuccaccggaaaccugaucgccccucgcggcuacuucaagauuagaagcgggaaaucuuccaucaugcggagcgacgcucccaucggaaaguguaauucugccugcauuaccccgaacggcagcaucccuaaugauaagcccuuucagaacguuaaucgcauuacauacggcgcguguccuagauaugugaaacaaaacacgcucaagcuggccaccgggaugcggaaugugcccgagaaacagacacgcggaaucuucggcgcuauugccggguuuaucgaaaacggaugggagggcauggucgacgggugguacggauucagacaccagaauugcgagggccggggccaagcugccgaccuuaaguccacccaggccgcuaucgaucagauuaacgggaaacugaacagacucaucggaaagacaauugaaaaauuccaucagaucgagaaggaauuuucugagguggaaggccgcauucaagggcuggagaaguauguugaggacaccaaaaucgaucuuuggagcuacaauggagaacugcucguggcgcuggagaaccaccauacgauugaccugacagauuccgaaaugaauaaacucuucgagaagaccaagaaacagaugcgggaaaacgccgaggacaugggcaauggguguuuuaagaucuaucacaagugcgauaacgcuugcaucggcagcauuagaaauggaaucuacgaccacgaugucuaucgcgacgaggcccugaacaaucgguuccagauuaaaggcguggaacuuaagucuggguacaaagauuggauccuguggauuuccuuuaccaucagcuguuuccuccugugcguugcccuucugggauuuaucaugugggcuugucagaagggcaacauuagaugcaauaucuguauuuga

SEQ ID NO: 204560 - RNA, 1701 nt, Artificial Sequence
  derived and/or modified CDS sequence (opt5) from hemagglutinin__InfluenzaA__AID70471
augaagaccaucauugcccugagcuacauccucugccugguguucacacagaaacuucccggcaacgacaauuccacggcuacccugugucucgggcaccaugccgucccuaacggaacaauuguuaagaccaucacaaaugaucaaauugaggugaccaacgcgacagaacuggugcagucuagcuccaccggcgagaucugcaauucuccgcaccagauccuugacggggaaaacuguacgcugauugaugcucuccugggagacccccagugcgauggcuuucaaaauaaaaagugggaccuguucgucgagagaagcaaagcccauuccaacuguuauccuuacgaugugcccgacuaugccucucuccggagccugguugcuuccagcgggacccuugaauuuaauaacgagucuuucaauuggacaggagugacccagaacggcacauccagcgccugcauccgcagaucuaauaacuccuuuuucagccggcugaauuggcucacccaccugaacuuuaaguacccugcucuuaacgucacgaugcccaauaacgagcaguucgauaagcuguauauuuggggcgugcaucacccugggacagacaaagaucagaucuuucucuacgcccaagcgucuggacgcauuaccguuuccacaaagaaaagccagcaggccgugaucccgaauauuggcuccagaccccggguccgcaacaucccuucuagagugagcaucuauuggaccauugugaagcccggggacauccugcugauuaauuccaccggaaaccucaucgcuccucggggcuacuucaaaauucgcagcgggaagucuuccaucaugagaagcgaugcccccaucggaaaguguaauucugcuugcauuacaccgaacggcagcaucccuaaugacaaacccuuucagaacgucaaucggauuacguacggcgccuguccucgcuauguuaagcaaaacacccugaaacuugcgacagggaugagaaaugugcccgaaaagcagacccggggaaucuucggcgccauugcuggguuuaucgagaacggaugggaaggcaugguggacgggugguacggauuccgccaccaaaauuccgagggcagaggccaggccgcugaucugaaaucuacacaggccgccaucgaccagauuaacgggaagcucaaccggcugaucggaaaaaccauugagaaguuccaucagaucgaaaaugaguuuagcgaagucgagggccgcauucaagaucuugaaaaguauguggaggacacgaaaaucgaucugugguccuacaacgcugagcucauuguugcgcuggaaaaucaccauacaaucgaccugaccgauagcgagaugaacaaacucuucgaaaagaccaagaaacagaugagagagaaugccgaagacauggggaacggaugcuuuaagaucuaucacaagugugauaaugcuugcauuggcucuauccggaacgggauuuacgaccacgauguguauagagacgaggcccugaauaaccgcuuccagaucaaaggcgucgagcuuaaguccggauacaaagacuggauucuguggaucagcuuugccaucucuugcuuccucauuuguguggcucugcuuggcuuuaucaugugggccugccagaaggggaaucugcgguguaacauuugcaucuga

SEQ ID NO: 204561 - RNA, 1701 nt, Artificial Sequence
  derived and/or modified CDS sequence (opt5) from hemagglutinin__InfluenzaA__AID70472
augaagaccaucauugcccugagcuacauccucugccugguguucgcucagaaacuucccggcaacgacaauuccacagccacgcugugucucgggcaccaugcggucccuaacggaaccauuguuaagacaaucaccaaugaucaaauugaggugacaaacgcuaccgaacuggugcagucuagcuccacaggcgagaucugcaauucuccgcaccagauccuugacggggaaaacuguacccugauugaugcccuccugggagacccccagugcgauggcuuucaaaauaaaaagugggaccuguucgucgagagaagcaaagcccauuccaacuguuauccuuacgaugugcccgacuaugcuucucuccggagccugguugccuccagcgggacgcuugaauuuaauaacgagucuuucaauuggaccggagugacacagaacggcaccuccagcgcuugcauccgcagaucuaauaacuccuuuuucagccggcugaauuggcucacacaccugaacuuuaaguacccugcccuuaacgucaccaugcccaauaacgagcaguucgauaagcuguauauuuggggcgugcaucacccugggacggacaaagaucagaucuuucucuacgcgcaagccucuggacgcauuacaguuuccaccaagaaaagccagcaggcugugaucccgaauauuggcuccagaccccggguccgcaacaucccuucuagagugagcaucuauuggacaauugugaagcccggggacauccugcugauuaauuccaccggaaaccucaucgccccucggggcuacuucaaaauucgcagcgggaagucuuccaucaugagaagcgaugcucccaucggaaaguguaauucugccugcauuaccccgaacggcagcaucccuaaugacaaacccuuucagaacgucaaucggauuacauacggcgcguguccucgcuauguuaagcaaaacacgcugaaacuugccaccgggaugagaaaugugcccgaaaagcagacacggggaaucuucggcgcuauugccggguuuaucgagaacggaugggaaggcaugguggacgggugguacggauuccgccaccaaaauuccgagggcagaggccaggcugccgaucugaaaucuacccaggccgcuaucgaccagauuaacgggaagcucaaccggcugaucggaaaaacaauugagaaguuccaucagaucgaaaaggaguuuagcgaagucgagggccgcauucaagaucuugaaaaauauguggaggacaccaagaucgaucugugguccuacaaugcggagcuccugguugcccuggaaaaccaccauacgauugaccucacagauagcgagaugaauaaacuguucgaaaagaccaaaaagcagaugagagagaacgcugaagacauggggaauggaugcuuuaagaucuaucacaaaugugauaacgccugcaucggcucuauucggaaugggaucuacgaccacgauguguauagagacgaggcccuuaacaaucgcuuccagauuaagggcgucgagcugaaauccggauacaaggacuggauccucuggauuagcuuugcuaucucuugcuuccugcuuuguguggcccugcucggcuuuaucaugugggcgugccagaaagggaacauucgguguaauaucugcauuuga

SEQ ID NO: 204562 - RNA, 1701 nt, Artificial Sequence
  derived and/or modified CDS sequence (opt5) from hemagglutinin__InfluenzaA__AID70473
augaagaccaucauugcccugagcuacauccucugccugguguucgcucagaaacuucccggcaacgacaauuccacagccacgcugugucucgggcaccaugcggucccuaacggaaccauuguuaagacaaucaccaaugaucaaauugaggugacaaacgcuaccgaacuggugcagucuagcuccacaggcgagaucugcaauucuccgcaccagauccuugacggggaaaacuguacccugauugaugcccuccugggagacccccagugcgauggcuuucaaaauaaaaagugggaccuguucgucgagagaagcaaagcccauuccaacuguuauccuuacgaugugcccgacuaugcuucucuccggagccugguugccuccagcgggacgcuugaauuuaauaacgagucuuucaauuggaccggagugacacagaacggcaccuccagcgcuugcauccgcagaucuaauaacuccuuuuucagccggcugaauuggcucacacaccugaacuuuaaguacccugcccuuaacgucaccaugcccaauaacgagcaguucgauaagcuguauauuuggggcgugcaucacccugggacggacaaagaucagaucuuucucuacgcgcaagccucuggacgcauuacaguuuccaccaagaaaagccagcaggcugugaucccgaauauuggcuccagaccccggguccgcaacaucccuucuagagugagcaucuauuggacaauugugaagcccggggacauccugcugauuaauuccaccggaaaccucaucgccccucggggcuacuucaaaauucgcagcgggaagucuuccaucaugagaagcgaugcucccaucggaaaguguaauucugccugcauuaccccgaacggcagcaucccuaaugacaaacccuuucagaacgucaaucggauuacauacggcgcguguccucgcuauguuaagcaaaacacgcugaaacuugccaccgggaugagaaaugugcccgaaaagcagacacggggaaucuucggcgcuauugccggguuuaucgagaacggaugggaaggcaugguggacgggugguacggauuccgccaccagaauugcgagggcagaggccaagcugccgaucugaaauccacccaggccgcuaucgaccagauuaacgggaagcucaaccggcugaucggaaaaacaauugagaaguuccaucagaucgaaaaggaguuuucugaagucgagggccgcauucaagggcuugaaaaauauguggaggauaccaagaucgaccuguggagcuacaaugcggagcuccugguugcccuggaaaaccagcacacgauugaucucacagacuccgagaugaauaaacuguucgaaaagaccaaaaagcagaugagagagaacgcugaagauaugggaaauggcuguuuuaagaucuaucauaaaugcgacaacgccugcaucgggagcauucggaauggcaucuacgaucacgacguguauagagaugaggcccuuaacaaucgcuuccagauuaagggagucgagcugaaaucuggcuacaaggacuggauccucuggauuuccuuugcuaucagcuguuuccugcuuugcguggcccugcucggguuuaucaugugggcgugucaaaaaggaaacauucggugcaauaucuguauuuga

SEQ ID NO: 204563 - RNA, 1701 nt, Artificial Sequence
  derived and/or modified CDS sequence (opt5) from hemagglutinin__InfluenzaA__AID70474
augaagaccaucauugcccugagcuacauccucugccugguguucgcucagaaacuucccggcaacgacaauuccacagccacgcugugucucgggcaccaugcggucccuaacggaaccauuguuaagacaaucaccaaugaucaaauugaggugacaaacgcuaccgaacuggugcagucuagcuccacaggcgagaucugcaauucuccgcaccagauccuugacggggaaaacuguacccugauugaugcccuccugggagacccccagugcgauggcuuucaaaauaaaaagugggaccuguucgucgagagaagcaaagcccauuccaacuguuauccuuacgaugugcccgacuaugcuucucuccggagccugguugccuccagcgggacgcuugaauuuaauaacgagucuuucaauuggaccggagugacacagaacggcaccuccagcgcuugcauccgcagaucuaauaacuccuuuuucagccggcugaauuggcucacacaccugaacuuuaaguacccugcccuuaacgucaccaugcccaauaacgagcaguucgauaagcuguauauuuggggcgugcaucacccugggacggacaaagaucagaucuuucucuacgcgcaagccucuggacgcauuacaguuuccaccaagaaaagccagcaggcugugaucccgaauauuggcuccagaccccggguccgcaacaucccuucuagagugagcaucuauuggacaauugugaagcccggggacauccugcugauuaauuccaccggaaaccucaucgccccucggggcuacuucaaaauucgcagcgggaagucuuccaucaugagaagcgaugcucccaucggaaaguguaauucugccugcauuaccccgaacggcagcaucccuaaugacaaacccuuucagaacgucaaucggauuacauacggcgcguguccucgcuauguuaagcaaaacacgcugaaacuugccaccgggaugagaaaugugcccgaaaagcagacacggggaaucuucggcgcuauugccggguuuaucgagaacgugugggaaggaauggucgacggcugguucggguuccgccaccagaucugcgagggaagaggccaagcugccggccuggaguccacccaggccgcuauugaucagaucaaugggaaaaugaaccggcucaugggaaagacaauuggcaaauuucaucagaucgugaacgaguucucugaaguugaagggcgcauucaagaccuggagaaguacguggaagauaccaagaucgaccuuuggagcuauauuggagagcugcucgucgcgcuggagaaucaccaugccaucgaucugacggacuccgaaaugaacaaacucuuugagaagaccaaaaagcagaugagagaaaaugcugaggauaugggcaacggguguuucaaaaucuaccacaagugcgacaaugccugcauuggcagcauccggaacggaauuuaugauagagacguguaccgcgaugaagcccugaauaaccgguuucacaucaagggcguugagcuuaaaucuggguauaaggacuggauuaucuggaucuccagcacagagucuuguuuccugcucugcguggcucugcuuggauuuauuaugugggccugucagaaaggcaauaucagauccaacauuugcaucuga

SEQ ID NO: 204564 - RNA, 1701 nt, Artificial Sequence
  derived and/or modified CDS sequence (opt5) from hemagglutinin__InfluenzaA__AID70475
augaagaccaucauugcccugagcuacaugcucugccugguguucgcucagaaacuucccggcaacgacaauuccacagccacgcugugucucgggcaccaugcggucccuaacggaaccaucguuaagacaauuaccaaugaucaaaucgaggugacaaacgcuaccgaacuggugcagucuagcuccacaggcgagauuugcaauucuccgcaccagauccuugacggggaaaacuguacccugaucgaugcccuccugggagacccccagugcgauggcuuucaaaauaaaaagugggaccuguucgucgagagaagcaaagcccauuccaacuguuauccuuacgaugugcccgacuaugcuucucuccggagccugguugccuccagcgggacgcuugaauuuaauaacgagucuuucaauuggaccggagugacacagaacggcaccuccagcgcuugcauucgcagaucuaauaacuccuuuuucagccggcugaauuggcucacacaccugaacuuuaaguacccugcccuuaacgucaccaugcccaauaacgagcaguucgauaagcuguauaucuggggcgugcaucacccugggacggacaaagaucagauuuuucucuacgcgcaagccucuggacgcaucacaguuuccaccaagaaaagccagcaggcugugauuccgaauaucggcuccagaccccggguccgcaacauuccuucuagagugagcaucuauuggacaaucgugaagcccggggacauucugcugaucaauuccaccggaaaccucauugccccucggggcuacuucaaaauccgcagcgggaagucuuccauuaugagaagcgaugcucccaucggaaaguguaauucugccugcaucaccccgaacggcagcauuccuaaugacaaacccuuucagaacgucaaucggaucacauacggcgcguguccucgcuauguuaagcaaaacacgcugaaacuugccaccgggaugagaaaugugcccgaaaagcagacacggggaauuuucggcgcuaucgccggguuuauugagaacgugugggaaggaauggucgacggcugguacggguuccgccaccagaauugcgagggaagaggccaagcugccgaucugaaauccgcccaggcugcgaucgaccccaucaacggcaagcucaaccggcugauggggaaaaccauuggaaaguuccaucagaucgagaaggaauuuucugagguggaaggccgcauucaggaucuugagaaauauguugaagacacaaagaucgaucuguggagcuacaauggggagcuccugguggcccuggagaaccaacacgcuauugaccucaccgauuccgaaaugaauaaagucuucgagaagacgaaaaagcagcugagagaaaacgccgaggacaugggaaauggcuguuuuaagaucuaucauaaaugcgauaacgccugcauugggagcauccggaauggcaucuacgaccacgauguguauagaaacgaagcucuuaauaaccgcuuccagauuaagggaguugagcugaaaucuggcuacaaggacuggauccucuggauuuccuuugccaucagcuguuuccugcuuucuguggcgucccugggguuuauuaugugggcuuaccagaaaggaaauauccggugcaacaucuguauuuga

SEQ ID NO: 204565 - RNA, 1701 nt, Artificial Sequence
  derived and/or modified CDS sequence (opt5) from hemagglutinin__InfluenzaA__AID70476
augaagacaaucauugcccugagcuacauccucugccugguguucgcucagaaacuucccggcaacgaaaauuccacagccacgcuggggcucggacaccaugcggucccuaacggcaccauuguuaagacaaucaccaaugaccaaauugaagugacaaacgcuaccgagcuggugcagucuagcuccacaggggaaaucuguaauucuccgcaccagauccuugauggagagaacugcacccugauugacgcccuccugggcgauccccagugugacgauuuucaaaauaaaaagugggaccuguucgucgaaagaagcaaagcccauuccaacugcuauccuuacgaugugcccgacuaugcuucucuccggagccugguugccuccagcgggacgcuugaguuuaauaacgagucuuucaauuggaccggagugacacagaacggcaccuccagcgcuuguauccgcagaucuaauaacuccuuuuucagccggcugaauuggcucacacaccugaacuuuaaguacccugcccuuaacgucaccaugcccaauaacgaacaguucgauaagcuguauauuuggggcgugcaucacccugggacggacaaagaucagaucuuucucuacgcgcaagccucuggacgcauuacaguuuccaccaagaaaagccagcaggcugugaucccgaauauuggcuccagaccccggguccgcaacaucccuucuagagugagcaucuauuggacaauugugaagcccggggacauccugcugauuaauuccaccggaaaccucaucgccccucggggcuacuucaaaauucgcagcgggaagucuuccaucaugagaagcgaugcucccaucggaaagugcaauucugccuguauuaccccgaacggcagcaucccuaaugacaaacccuuucagaacgucaaucggauuacauacggcgcgugcccucgcuauguuaagcaaaacaaucugaaacuugccacggggaugagaaacgugcccgagaagcagacccggggaaucuucggcgcuauugccggguuuaucgaaaauggaugggagggcaugguggacgggugguacggauuccgccaccagaacuccgagggcagaggccaagcugccgaucugaaaucuacacaggccgcuaucgaccagauuaacgggaagcucaaucggcugaucggaaaaaccauugaaaaguuccaucagaucgagaaggaauuuagcgaggucgaaggccgcauucaagggagagagaaauauguggaggauacaaagaucgaccuuugguccuacauuggagaguucaucguugcgcuggagaaccagcacaccaucgaucucacggacagcgaaaugaauaaacuguuugagaagaccaaaaagcagaugcgggaaaacgccgaggauaugggcaauggguguuucaagauuuaucauaaaugcgacaacgcuuguaucggcucuauuagaaauggaaucuacgaucacgacguguaucgcgaugaggcccugaacaaucgguuucagauuaagggcgucgaacucaaauccggguacaaggacuggauccuguggaucagcuucgccauuucuugcuuucuucugugcguggcucuccugggauucaucaugugggccugucaaaaaggcaacauuagaugcaauaucuguauuuga

SEQ ID NO: 204566 - RNA, 1701 nt, Artificial Sequence
  derived and/or modified CDS sequence (opt5) from hemagglutinin__InfluenzaA__AID70477
augaagaccaucauugcccugagcuacauccucugccugguguucgcucagaaacuucccggcaacgacuccucuacagggacgcugugucucggacaccaugccgucccuaauggcaccauuguuaagacaaucaccaacgaucaaauugaggugacaaaugcgaccgaacuggugcagagcuccucuacaggggagaucugcaacagaccgcaccagauccuugacggagaaaauuguacccugauugaugcucuccugggcgacccccagugcgauggguuucaaaacaaaaagugggaccuguucgucgagcggagcaaagcccauuccaauuguuauccuuacgaugugcccgacuaugccucucuccgcagccugguugcuuccagcggaacgcuugaauuuaacaaugagucuuucaacuggaccggcgugacacagaauggcaccuccagcgccugcaucagacggucuaacaauuccuuuuucagcauucugaacuggcucacacaccugaauuuuaaguacccugcucuuaacgucaccaugcccaacaaugagcaguucgauaagcuguauaucuggggagugcaucacccugggacggacaaagaucagauuuuucucuacgcccaagcgucuggccgcaucacaguuuccaccaagaaaagccagcaggccgugauuccgaacaucggguccagaccccggguccgcaauaucccuucuagagugagcauuuauuggacaaucgugaagcccggagaaauucugcugaucaacuccaccggcaaucucauugcuccucggggguacuucaaaauccgcagcggaaagucuuccaucaugagaagcgacgcccccauuggcaaguguuacucugcuugcaucaccccgaacggcagcauuccuaaugauaaacccuuucagaacgucaaucggaucacauauggggccuguccucgcuacguuaagcaacacccccugaaacuugcgacgggaaugagaaacgugcccgagaagcagacccggggcauuuucggggccaucgcuggauuuaucgaaaauggcugggaggggaugguggacggaugguauggcuuccgccaucagauuugcgagggcagagggcaagccgcugaccugaaauccacacaggccgccaucgaucagauuaacggaaagcucaaucggcugaucggcaaaaccauugaaaaguuccaccagaucgagaaggaauuuucugaggucgaauggcgcauucaagggcuugagaaauacguggaggacacaaagguugaucuguggagcuauaacggagaacucaucguggcucuggagaaucaucacaccaucgaccugacggauuccgaaaugaacaaacucuucgagaagaccaaaaagcagaugagagaaaacgcggaggacaugggcaauggguguuuuaagauuuaccugaaaugcgauaacgccugcaucggcagcauucggaauggaaucuaugaccacgaugucuacagagacgaggcucuuaacaaucgcuuccagauuaagggcguggaacugaaaucuggguacaaggauuggauccucuggaucuccuuuacagagagcuguuuccugcuuucuguugcccugcucggauuuauuaugugggccugccagaaaggcaacauccgguguaauauuugcaucuga

SEQ ID NO: 204567 - RNA, 1701 nt, Artificial Sequence
  derived and/or modified CDS sequence (opt5) from hemagglutinin__InfluenzaA__AID70478
augaagaccaucauugcccugagcuacauccucugccugguguucgcucagaaacuucccggcaacgacaauuccacagccacgcugugucucgggcaccaugcggucccuaacggaaccauuguuaagacaaucaccaaugaucaaauugaggugacaaacgcuaccgaacuggugcagucuagcuccacaggcgagaucugcaauucuccgcaccagauccuugacggggaaaacuguacccugauugaugcccuccugggagacccccagugcgauggcuuucaaaauaaaaagugggaccuguucgucgagagaagcaaagcccauuccaacuguuauccuuacgaugugcccgacuaugcuucucuccggagccugguugccuccagcgggacgcuugaauuuaauaacgagucuuucaauuggaccggagugacacagaacggcaccuccagcgcuugcauccgcagaucuaauaacuccuuuuucagccggcugaauuggcucacacaccugaacuuuaaguacccugcccuuaacgucaccaugcccaauaacgagcaguucgauaagcuguauauuuggggcgugcaucacccugggacggacaaagaucagaucuuucucuacgcgcaagccucuggacgcauuacaguuuccaccaagaaaagccagcaggcugugaucccgaauauuggcuccagaccccggguccgcaacaucccuucuagagugagcaucuauuggacaauugugaagcccggggacauccugcugauuaauuccaccggaaaccucaucgccccucggggcuacuucaaaauucgcagcgggaagucuuccaucaugagaagcgaugcucccaucggaaaguguaauucugccugcauuaccccgaacggcagcaucccuaaugacaaacccuuucagaacgucaaucggauuacauacggcgcguguccucgcuauguuaagcaaaacacgcugaaacuugccaccgggaugagaaaugugcccgaaaagcagacacggggaaucuucggcgcuauugccggguuuaucgagaacggaugggaaggcaugguggacgggugguacggauuccgccaccagaauugcgagggcagaggccaagcugccgaucuggaguccacccaggccgcuaucgaccagauuaacgggaaaaugaaccggcucaugggaaagacaaucgaaaaauuccaucagauugagaaggaauuuucugaggucgaaggcagaauccaagggcgcgagaaguauguggaggauaccaaaauugaccuguggagcuacaauggagaacuucugguugaucucgagaaccagcacacgaucgaccugacagauuccgaaaugaauaagguguucgagaaaaccaagaaacagaugcgggaaaacgcggaggacaugggcaauggguguuuuaagauuuaucauaagugcgauaacgccugcaucggcagcaucagaaauggaauuuacgaccacgaugucuaucgcgacgaggcucugaacaaucgguuccagaucaaaggcguggaacucaagucuggguacaaagacuggauucaauggaucuccuuuaccauuagcuguuuccugcuuugcguuucucugcucggauuuaucaugugggccugucagaagggcaacaucagaugcaauauuuguaucuga

SEQ ID NO: 204568 - RNA, 1701 nt, Artificial Sequence; identical to SEQ ID NO: 202112
  derived and/or modified CDS sequence (opt5) from hemagglutinin__InfluenzaA__AID70632

SEQ ID NO: 204569 - RNA, 1683 nt, Artificial Sequence
  derived and/or modified CDS sequence (opt5) from hemagglutinin__InfluenzaA__AID70634
augaacacccagauccugguguucgcccucauugcuaucauucccacaaaugccgacaagaucugccugggccaccaugcggucagcaacgggacgaaaguuaauacccuuacagagagaggaguggaaguggucaacgcuaccgagacaguggaacggaccaauauuccucgcaucuguuccaagggcaaaagaacaguugaucuggggcaaugcggacuccugggcaccaucacggggccgccccagugugaccaguuucuugaguucucugccgaucugauuaucgaacggcgcgagggaagcgacgugugcuacccuggcaaguuugucaacgaggaagcccucagacagauucugcgggaguccggcgggaucgauaaagaagcuaugggauucaccuauucuggcauucgcacaaauggggccaccagcgcuuguagacgguccggaucuagcuuuuacgccgagaugaaguggcugcucuccaacacagacaaugcggccuucccccaaaugaccaagagcuauaaaaacacgcgcaagucuccugcucugaucguguggggcauucaccauuccguuagcacagccgagcagaccaaacuuuacgggucuggaaauaagcuggugacagucggcuccagcaacuaucagcagucuuuugugcccuccccuggcgcuagaccgcaagugaaugggcucagcggacggaucgauuuccacuggcugaugcuuaaccccaaugacaccgucaccuuuuccuucaacggcgccuuuaucgcgccugaucgcgccucuuuccugagagggaaaagcaugggcauucaguccggaguucagguggacgcuaacugcgaaggggauuguuaccauagcggaggcacaaucauuucuaaucuccccuuucagaacaucgacucccgggccgugggcaagugcccucgcuaugucaagcaaagaagccugcugcucgcuacggggaugaaaaaugugcccgagauuccgaagggacggggccuguucggggccaucgccggauucaucgaaaacggcugggaggggcuuauugauggcugguacggauuuagacaccagaaugcucagggcgaagggaccgcggccgacuacaaaucuacacaaagcgcuaucgaccagauuaccggaaagcugaaccgcaucauugagaaaacaaaucagcaguucgagcucaucgauaacgaauuuaaugagguugaaaagcaaaucuccaacgugauuaauuggacccgggacucuaucacggaggucuggagcuauaacgccgaacugcuuguggccauggagaaucagcacacaauugaucuggcugacuccgagauggauaaacucuacgaaagaguuaagcgccagcugcgggagaacgccgaagaggacggcaccggguguuucgaaaucuuucauaagugcgaugacgauuguauggcgagcauuagaaauaacaccuaugaccacucuaaauaccgcgaggaggcuaugcagaaccggauccaaauugauccugugaagcuguccagcggauauaaagacgucauccucugguucucuuuuggcgccuccugcuucauccugcuugccauugugauggggcuggucuuuaucugcgugaagaauggcaacaugagauguacaauuugcaucuga

SEQ ID NO: 204570 - RNA, 1701 nt, Artificial Sequence
  derived and/or modified CDS sequence (opt5) from hemagglutinin__InfluenzaA__AIF72902
augaagaccaucauugcccugagcuacauccucugccugguguucgcucagaaacuucccggcaacgacaauuccacagccacgcugugucucgggcaccaugcggucccuaacggaaccauuguuaagacaaucaccaaugaucaaauugaggugacaaacgcuaccgaacuggugcagucuagcuccgccggcgagaucugcgacucuccgcaccagauccuugauggggaaaauuguacacugauugacgcccuccugggagauccccagugcgacggcuuucaaaacaaaaagugggaucuguucgucgagagaagccgggcuuauuccaauuguuacccuuaugacgugcccgauuacgccucucuccgcagccugguugcuuccagcgggacccuugaauuuaacaaugagucuuucaacuggacgggagugacccagaauggcacauccagcgccugcaucagacggucuaacaauuccuuuuucagccgccugaacuggcucacccaucugaauuuuaaauauccugcgcuuaacgucacaaugcccaacaaugagcaguucgacaagcuguacauuuggggcgugcaccauccugggaccgauaaggaccagaucuuucucuaugcccaggcuucuggaagaauuacgguuuccacaaaacggagccagcaggccgugaucccgaacauuggcucccgccccagaguccggaauaucccuucucgcaucagcauuuacuggaccaucgugaagcccggggauauucugcugaucaacuccacaggaaaucucauugcuccuagaggcuacuucaaaauccggagcgggaagucuuccaucaugcgcagcgacgcccccauuggaaaauguaacucugaaugcaucaccccgaauggcagcauuccuaacgacaagcccuuucagaaugugaacagaaucaccuauggcgcguguccucgguacgucaagcaauccacacugaaacuugccacggggaugcgcaauguucccgagaagcagaccagaggaauuuucggcgcuaucgccggguuuaucgaaaacggaugggagggcaugguggaugggugguauggauuccggcaccaaaauucugagggcagaggccaagcugccgaccugaaaagcacacaggccgcuauugaucagaucaacgggaagcucaaucgccugauuggaaaaaccaacgaaaaguuccaccagaucgagaaagaauuuuccgagguggaaggccggauucaagaccuugagaaguacgucgaggauacaaagaucgaccuguggagcuauaacgcggaacuccugguggcccuggagaaucagcauaccauugaucucacggacucugaaaugaacaaacuguucgagaagaccaaaaagcagcuuagagaaaaugcugaggauauggggaacggaugcuuuaaaaucuaccacaagugugacaaugccugcaucggcuccauucgcaacgggacauaugaucaugacguuuaccgggacgaggcccugaauaacagauuccagaucaagggcguggaacucaaaagcggauacaaggauuggauucuguggaucucuuuugcuauuuccugcuuccuucugugugucgcccuccugggcuuuaucaugugggcgugccaaaaagggaauauccgcuguaacauuugcaucuga

SEQ ID NO: 204571 - RNA, 1701 nt, Artificial Sequence
  derived and/or modified CDS sequence (opt5) from hemagglutinin__InfluenzaA__AIF72903
augaagaccaucauugcccugagcuacauccucugccugguguucgcucaggagcuucccggcaacgacaauuccacagccacgcugugucucgggcaccaugcggucccuaacggaaccauuguuaaaacaaucaccaaugaucaaauugaagugacaaacgcuaccgagcuggugcagucuagcuccgccggcgaaaucugcgacucuccgcaccagauccuugauggggagaauuguacacugauugacgcccuccugggagauccccagugcgacggcuuucaaaacaagaaaugggaucuguucgucgaaagaagccgggcuuauuccaauuguuacccuuaugacgugcccgauuacgccucucuccgcagccugguugcuuccagcgggacccuugaguuuaacaaugagucuuucaacuggacgggagugacccagaauggcacauccagcgccugcaucagacggucuaacaauuccuuuuucagccgccugaacuggcucacccaucugaauuuuaaguauccugcgcuuaacgucacaaugcccaacaaugaacaguucgacaaacuguacauuuggggcgugcaccauccugggaccgauaaggaccagaucuuucucuaugcccaggcuucuggaagaauuacgguuuccacaaagcggagccagcaggccgugaucccgaacauuggcucccgccccagaguccggaauaucccuucucgcaucagcauuuacuggaccaucgugaaacccggggauauucugcugaucaacuccacaggaaaucucauugcuccuagaggcuacuucaagauccggagcgggaaaucuuccaucaugcgcagcgacgcccccauuggaaaguguaacucugagugcaucaccccgaauggcagcauuccuaacgacaaacccuuucagaaugugaacagaaucaccuauggcgcguguccucgguacgucaagcaauccacacugaaacuugccacggggaugcgcaauguucccgaaaaacagaccagaggaauuuucggcgcuaucgccggguuuaucgagaacggaugggagggcaugguggaugggugguauggauuccggcaccaaaauucugaaggcagaggccaagcugccgaccucaagagcacacaggccgcuauugaucagaucaacgggaaacugaaucgccugauuggaaagaccaacgagaaauuccaccagaucgaaaaggaguuuuccgaaguggagggccggauucaagaccuugagaaauacgucgaagauacaaagaucgaccuguggagcuauaacgcggagcuccugguggcccuggaaaaucagcauaccauugaucucacggacucugagaugaacaagcuguucgaaaagacaaagaaacagcuuagagagaaugcugaggauauggggaacggaugcuuuaagaucuaccacaaaugugacaaugccugcaucggcuccauucgcaacgggaccuaugaucaugacguuuaccgggacgaagcccugaauaacagauuccagaucaagggcguggagcucaagagcggauacaaagauuggguccuguggauuucuuuugcuaucuccugcuuccuucuguguguggcccuccugggcuuuauuaugugggcgugccaaaaggggaauauccgcuguaacaucugcauuuga

SEQ ID NO: 204572 - RNA, 1701 nt, Artificial Sequence
  derived and/or modified CDS sequence (opt5) from hemagglutinin__InfluenzaA__AIF72904
augaagaccaucauugcccugagcuacauccucugccugguguucgcucaggagcuucccggcaacgacaauuccacagccacgcugugucucgggcaccaugcggucccuaacggaaccauuguuaaaacaaucaccaaugaucaaauugaagugacaaacgcuaccgagcuggugcagucuagcuccgccggcgaaaucugcgacucuccgcaccagauccuugauggggagaauuguacacugauugacgcccuccugggagauccccagugcgacggcuuucaaaacaagaaaugggaucuguucgucgaaagaagccgggcuuauuccaauuguuacccuuaugacgugcccgauuacgccucucuccgcagccugguugcuuccagcgggacccuugaguuuaacaaugagucuuucaacuggacgggagugacccagaauggcacauccagcgccugcaucagacggucuaacaauuccuuuuucagccgccugaacuggcucacccaucugaauuuuaaguauccugcgcuuaacgucacaaugcccaacaaugaacaguucgacaaacuguacauuuggggcgugcaccauccugggaccgauaaggaccagaucuuucucuaugcccaggcuucuggaagaauuacgguuuccacaaagcggagccagcaggccgugaucccgaacauuggcucccgccccagaguccggaauaucccuucucgcaucagcauuuacuggaccaucgugaaacccggggauauucugcugaucaacuccacaggaaaucucauugcuccuagaggcuacuucaagauccggagcgggaaaucuuccaucaugcgcagcgacgcccccauuggaaaguguaacucugagugcaucaccccgaauggcagcauuccuaacgacaaacccuuucagaaugugaacagaaucaccuauggcgcguguccucgguacgucaagcaauccacacugaaacuugccacggggaugcgcaauguucccgaaaaacagaccagaggaauuuucggcgcuaucgccggguuuaucgagaacggaugggagggcaugauggaugggugguauggauuccggcaccaaaauucugaaggcagaggccaagcugccgaccucaagagcacacaggccgcuauugaucagaucaacgggaaacugaaucgccugauuggaaagaccaacgagaaauuccaccagaucgaaaaggaguuuuccgaaguggagggccggauucaagaccuugagaaauacguggaagauacaaagaucgaccuguggagcuauaacgcggagcuccuggucgcccuggaaaaucagcauaccauugaucucacggacucugagaugaacaagcuguucgaaaagacaaagaaacagcuuagagagaaugcugaggauauggggaacggaugcuuuaagaucuaccacaaaugugacaaugccugcaucggcuccauucgcaacgggaccuaugaucaugacguguaccgggacgaagcccugaauaacagauuccagaucaagggcguugagcucaagagcggauacaaagauugggugcuguggauuucuuuugcuaucuccugcuuccuucugugugucgcccuccugggcuuuauuaugugggcgugccaaaaggggaauauccgcuguaacaucugcauuuga

SEQ ID NO: 204573 - RNA, 1701 nt, Artificial Sequence
  derived and/or modified CDS sequence (opt5) from hemagglutinin__InfluenzaA__AIF72905
augaagaccaucauugcccugagcuacauccucugccugguguucgcucagaaacuucccggcaacgacaauuccacagccacgcugugucucgggcaccaugcggucccuaacggaaccauuguuaagacaaucaccaaugaucaaauugaggugacaaacgcuaccgaacuggugcagucuagcuccgccggcgagaucugcgacucuccgcaccagauccuugauggggaaaauuguacacugauugacgcccuccugggagauccccagugcgacggcuuucaaaacaaaaagugggaucuguucgucgagagaagccgggcuuauuccaauuguuacccuuaugacgugcccgauuacgccucucuccgcagccugguugcuuccagcgggacccuugaauuuaaaaacgagucuuucaauuggacgggagugacccagaacggcacauccagcgccugcaucagacggucuaauaacuccuuuuucagccgccugaauuggcucacccauucuaacuuuaaguauccugcgcugaaugucacaaugcccaacaacgagcaguucgacaaacuuuacauuuggggcgugcaccauccugggaccgauaaggaccagaucuuucuguaugcccaggcuuccggaagaauuacgguuagcacaaagcggucccaacaggccgugaucccgaauauuggcucucgccccagaguccggaacaucccuagccgcaucuccauuuacuggaccaucgugaaacccggggauauucuccugaucaauagcacaggaaaccugauugcuccuagaggcuacuucaagauccggucugggaaauccagcaucaugcgcucugacgcccccauuggaaaguguaauagcgaaugcaucaccccgaacggcuccauuccuaaugacaagcccuuucagaacgugaauagaaucaccuauggcgcguguccucgguacgucaaacaaucuacacucaagcuggccacggggaugcgcaacguucccgagaaacagaccagaggaauuuucggcgcuaucgccggguuuaucgaaaauggaugggagggcaugauggaugggugguauggauuccggcaccagaacagcgagggcagaggccaagcugccgaccuuaaguccacacaggccgcuauugaucagaucaaugggaaacugaaccgccucauuggaaagaccaaugaaaaauuccaccagaucgagaaggaauuuagcgagguggaaggccggauucaagaccuggagaaguacguggaggauacaaaaaucgaccuuuggucuuauaacgcggaacugcucgucgcccuggagaaccagcauaccauugaucugacggacuccgaaaugaauaaacucuucgagaagacaaagaaacagcugagagaaaacgcugaggauauggggaauggaugcuuuaagaucuaccacaagugugacaacgccugcaucggcagcauucgcaaugggaccuaugaucaugacguguaccgggacgaggcccuuaacaauagauuccagaucaaaggcguugaacugaagucuggauacaaagauuggauucucuggaucuccuuugcuauuagcugcuuccugcuuuguguggcccugcucggcuuuaucaugugggcgugccaaaaggggaacauccgcuguaauauuugcaucuga

SEQ ID NO: 204574 - RNA, 1701 nt, Artificial Sequence; identical to SEQ ID NO: 195483
  derived and/or modified CDS sequence (opt5) from hemagglutinin__InfluenzaA__AIF72906

SEQ ID NO: 204575 - RNA, 1701 nt, Artificial Sequence; identical to SEQ ID NO: 195483
  derived and/or modified CDS sequence (opt5) from hemagglutinin__InfluenzaA__AIF72907

SEQ ID NO: 204576 - RNA, 1701 nt, Artificial Sequence; identical to SEQ ID NO: 195483
  derived and/or modified CDS sequence (opt5) from hemagglutinin__InfluenzaA__AIF72908

SEQ ID NO: 204577 - RNA, 1701 nt, Artificial Sequence
  derived and/or modified CDS sequence (opt5) from hemagglutinin__InfluenzaA__AIF72909
augaagaccaucauugcccugagcuacauccucugccugguguucgcucagaaacuucccggcaacgacaauuccacagccacgcugugucucgggcaccaugcggucccuaacggaaccauuguuaagacaaucaccaaugaucaaauugaggugacaaacgcuaccgaacuggugcagucuagcuccgccggcgagaucugcgacgggccgcaccagauccuugauggagaaaauuguacacugauugacgcccuccugggcgauccccagugcgacggguuucaaaacaaaaagugggaucuguucgucgagagaucucgggcuuauagcaauuguuacccuuaugacgugcccgauuacgccucccuccgcucucugguugcuagcuccggaacccuugaauuuaacaaugagagcuucaacuggacgggcaccacacagaauggcaccucuuccgccugcaucagacggagcaacaauuccuuuuucucucgccugaacuggcucacacaucugaauuuuaaauauccugcgcuuaacgugaccaugcccaacaaugagcaguucgacaagcuguacauuuggggaguccaccauccugggacggauaaggaccagaucuuucucuaugcccaagcuagcggcagaauuacagugucuaccaaacggucccagcaggccguuaucccgaacauugggagccgccccagagugcggaauaucccuucccgcaucucuauuuacuggacaaucgucaagcccggagauauucugcugaucaacagcaccggcaaucucauugcuccuagaggguacuucaaaauccgguccggaaagagcucuaucaugcgcuccgacgcccccauuggcaaauguaacagcgaaugcaucaccccgaauggcucuauuccuaacgacaagcccuuucagaaugugaacagaaucacauauggggcguguccucgguacgugaagcaaagcacgcugaaacuugccaccggaaugcgcaauguccccgagaagcagacaagaggcauuuucggggcuaucgccggauuuaucgaaaacggcugggaggggaugguugauggaugguauggcuuccggcaccaaaauuccgagggcagagggcaggcugccgaccugaaaucuacccaggccgcuauugaucagaucaacggaaagcucaaucgccugauuggcaaaacaaacgaaaaguuccaccagaucgagaaagaauuuagcgagguggaagggcggauucaagaccuugagaaguacguggaggauaccaagaucgaccugugguccuauaacgcggaacuccuggucgcccuggagaaucagcauacgauugaucucacagacagcgaaaugaacaaacuguucgagaagaccaaaaagcagcuuagagaaaaugcugaggauaugggaaacggcugcuuuaaaaucuaccacaagugugacaaugccugcaucgggucuauucgcaacggcaccuaugaucaugacguguaccgggacgaggcccugaauaacagauuccagaucaagggaguugaacucaaauccggcuacaaggauuggauucuguggaucagcuuugcuauuucuugcuuccuucuguguguggcccuccugggguuuaucaugugggcgugccaaaaaggaaauauccgcuguaacauuugcaucuga

SEQ ID NO: 204578 - RNA, 1701 nt, Artificial Sequence; identical to SEQ ID NO: 195483
  derived and/or modified CDS sequence (opt5) from hemagglutinin__InfluenzaA__AIF72910

SEQ ID NO: 204579 - RNA, 1701 nt, Artificial Sequence; identical to SEQ ID NO: 195483
  derived and/or modified CDS sequence (opt5) from hemagglutinin__InfluenzaA__AIF72911

SEQ ID NO: 204580 - RNA, 1701 nt, Artificial Sequence; identical to SEQ ID NO: 204570
  derived and/or modified CDS sequence (opt5) from hemagglutinin__InfluenzaA__AIF72912

SEQ ID NO: 204581 - RNA, 1701 nt, Artificial Sequence; identical to SEQ ID NO: 195483
  derived and/or modified CDS sequence (opt5) from hemagglutinin__InfluenzaA__AIF72913

SEQ ID NO: 204582 - RNA, 1701 nt, Artificial Sequence
  derived and/or modified CDS sequence (opt5) from hemagglutinin__InfluenzaA__AIF72914
augaagaccaucauugcccugagcuacauccucugccugguguucgcucagaaacuucccggcaacgacaauuccacagccacgcugugucucgggcaccaugcggucccuaacggaaccauuguuaagacaaucaccaaugaucaaauugaggugacaaacgcuaccgaacuggugcagucuagcuccacaggcgagaucugcgacucuccgcaccagauccuugauggggaaaauuguacccugauugacgcccuccugggagauccccagugcgacggcuuucaaaacaaaaagugggaucuguucgucgagagaagcaaagccuauuccaauuguuacccuuaugacgugcccgauuacgcuucucuccggagccugguugccuccagcgggacgcuugaauuuaacaaugagucuuucaacuggaccggagugacacagaauggcaccuccagcgcuugcauccgcagaucuaacaauuccuuuuucagccggcugaacuggcucacacaucugaauuuuaaguauccugcccuuaacgucaccaugcccaacaaugagcaguucgacaagcuguacauuuggggcgugcaccauccugggacggauaaagaccagaucuuucucuaugcgcaagccucuggacgcauuacaguuuccaccaagagaagccagcaggcugugaucccgaacauuggcucccggccccgcgucagaaauaucccuucucggaucagcauuuacuggacaaucgugaaacccggggauauucugcugaucaacuccaccggaaaucucauugccccucgcggcuacuucaagaucagagggggaaaaagcucuaucaugcgguccgacgcucccauuggcaaguguaacagcgaaugcaucaccccgaauggcucuauuccuaacgacaagcccuuucagaaugugaaccgcaucacauauggggccuguccuagauacgucaaacaaaauacgcugaaacuugcgaccggaaugcggaacguucccgagaaacagacacgcggcauuuucggggccaucgcuggauuuaucgaaaauggcugggaggggaugguggauggaugguauggcuucagacaccagaacagcgagggccgggggcaagccgcugaccugaaguccacccaggccgccauugaucagaucaauggaaaacucaacagacugauuggcaagacaaacgaaaaauuccaccagaucgagaaggaauuuucugagguggaagggcgcauucaugaccuugagaaguacgucgaggauacccuguucgaccucuggguguauaauagcgaacugcugguugcucuccaaaaccagcacacgaucgaucugcccgacuccgagaugaauaaacuuuuugaaaagacaaagaagcagcugcgggagaacgcggaagauaugggaaauggcugcuucaaaauuuaccauaagugugacaacgccugcaucgggagcaucagaaauggcaccuaugaucacgacguguaccgcgacgaggcucucaacaaucgguuucagauuaagggagucgagcugaaaucuggcuacaaggauuggauccuuuggauuuccuucgccaucagcugcuuucugcucuguguggcccugcugggguucauuaugugggcuugccaaaaaggaaacaucagauguaauaucugcauuuga

SEQ ID NO: 204583 - RNA, 1701 nt, Artificial Sequence
  derived and/or modified CDS sequence (opt5) from hemagglutinin__InfluenzaA__AIF72915
augaagaccaucauugcccugagcuacauccucugccugguguucgcucagaaacuucccggcaacgacaauuccacagccacgcugugucucgggcaccaugcggucccuaacggaaccauuguuaagacaaucaccaaugaucaaauugaggugacaaacgcuaccgaacuggugcagucuagcuccacaggcgagaucugcgacucuccgcuucagauccuggauggggaaaauuguacccucauugacgcccugcugggagauccccagugcgacggcuuucaaaacaaaaagugggaucucuucgucgagagaagcaaagccuauuccaauuguuacccuuaugacgugcccgauuacgcuucucugcggagccuuguugccuccagcgggacgcuggaauuuaacaaugagucuuucaacuggaccggagugacacagaauggcaccuccagcgcuugcauccgcagaucuaacaauuccuuuuucagccggcucaacuggcugacacaccuuaauuuuaaguauccugcccugaacgucaccaugcccaacaaugagcaguucgacaagcucuacauuuggggcgugcaucacccugggacggauaaagaccagaucuuucuguaugcgcaagccucuggacgcauuacaguuuccaccaagagaagccagcaggcugugaucccgaacauuggcucccggccccgcgucagaaauaucccuucucggaucagcauuuacuggacaaucgugaaacccggggauauucugcucaucaacuccaccggaaaucugauugccccucgcggcuacuucaagaucagaagcgggaaaucuuccaucaugcggagcaacgcucccauuggaaaguguaauucugaaugcaucaccccgaacggcagcauuccuaaugacaagcccuuucagaacgugaaucgcaucacauauggcgccuguccuagauacgucaaacaaaacacgcuuaagcuggcgaccgggaugcggaauguucccgagaaacagacacgcggaauuuucggcgccaucgcuggguuuaucgaaaacggaugggagggcaugguggacgggugguauggauucagacaucaaaauuccgagggccggggccaggccgcugaucucaagucuacccaggccgccauugaccagaucaacgggaaacugaacagacuuauuggaaagacaaaugaaaaauuccaccagaucgagaaggaauuuagcgagguggaaggccgcauucaagaucuggagaaguacgucgaggacaccaaaaucgaucucugguccuauaacgcugaacugcugguggcgcucgagaaucagcacacgauugaccugacagauagcgaaaugaacaaacuuuucgagaagaccaagaaacagcugcgggaaaaugccgaggacauggggaacggaugcuuuaagaucuaccauaagugugauaaugcuugcaucggcucuauuagaaacgggaccuaugaccacgauguuuaccgcgacgaggcccucaauaaccgguuccagaucaaaggcguggaacugaaguccggauacaaagacuggauucuuuggaucagcuuugccauuucuugcuuccugcucugugucgcucugcugggcuuuaucaugugggccugccaaaaggggaauaucagauguaacauuugcaucuga

SEQ ID NO: 204584 - RNA, 1701 nt, Artificial Sequence; identical to SEQ ID NO: 195483
  derived and/or modified CDS sequence (opt5) from hemagglutinin__InfluenzaA__AIF72916

SEQ ID NO: 204585 - RNA, 1701 nt, Artificial Sequence
  derived and/or modified CDS sequence (opt5) from hemagglutinin__InfluenzaA__AIF72917
augaagaccaucauugcccugagcuacauccucugccugguguucgcucagaaacuucccagaaacgacaauuccacagccacgcugugucucggccaccaugcggucccuaacgggaccauuguuaagacaaucaccaaugaucaaauugaggugacaaacgcuaccgaacuggugcagucuagcuccacaggagagaucugcgacucuccgcaccagauccuugauggcgaaaauuguacccugauugacgcccuccugggggauccccagugcgacggauuucaaaacaaaaagugggaucuguucgucgagcggagcaaagccuauuccaauuguuacccuuaugacgugcccgauuacgcuucucuccgcagccugguugccuccagcggcacgcuugaauuuaagaacgagucuuucaauuggaccggggugacacagaacggaaccuccagcgcuugcaucagacggucuaauaacuccuuuuucagccgccugaauuggcucacacaucugaacuuuaaguauccugcccuuaaugucaccaugcccaacaacgagcaguucgacaaacuguacauuuggggcgugcaccauccuggcacggauaaggaccagaucuuucucuaugcgcaagccucugggagaauuacaguuuccaccaaacggagccagcaggcugugaucccgaauauuggaucccgccccagaguccggaacaucccuucucgcaucagcauuuacuggacaaucgugaagcccggcgauauucugcugaucaauuccaccgggaaccucauugccccuagaggauacuucaaaauccggagcggcaagucuuccaucaugcgcagcgacgcucccauugggaaguguaauucugaaugcaucaccccgaacggaagcauuccuaaugacaaacccuuucagaacgugaauagaaucacauauggcgccuguccucgguacgucaagcaaaacacgcugaaacuugcgaccggcaugcgcaauguucccgagaagcagacaagagggauuuucggagccaucgcuggcuuuaucgaaaacgggugggagggaaugguggauggcugguauggguuccggcaccaaaauuccgagggaagaggccaggccgcugaccugaaaucuacccaggccgccauugaucagaucaacggcaagcucaaucgccugauugggaaaacaaacgaaaaguuccaccagaucgagaaggaauuuagcgagguggaaggacggauucaagaccuugagaaauacgucgaggauaccaagaucgaccugugguccuauaacgcugaacuccugguggcgcuggagaaucagcauacgauugaucucacagacagcgaaaugaacaaacuguucgagaagaccaaaaagcagcuuagagaaaaugccgaggauaugggcaacgggugcuuuaagaucuaccacaaaugugacaaugcuugcaucggaucuauucgcaacggcaccuaugaucaugacguuuaccgggacgaggcccugaauaacagauuccagaucaaggggguggaacucaaauccggcuacaaggauuggauucuguggaucagcuuugccauuucuugcuuccuucugugugucgcucuccugggauuuaucaugugggccugccaaaaaggcaauauccgcugugacauuugcaucuga

SEQ ID NO: 204586 - RNA, 1683 nt, Artificial Sequence
  derived and/or modified CDS sequence (opt5) from hemagglutinin__InfluenzaA__AIG44693
auggagaccgccagccugaucacaauucuccugguggucacgguuuccaacgcugacaagaucugcauuggcuaccagucuaccaauagcacagaaaccguggauacacuuaccgagaacaaugugcccgucacacacgccaaagaacugcuccauaccgagcacaacgggaugcugugugcgacgucccuuggacaaccucugauccucgauaccugcacaauugaaggccugaucuaugggaauccgucuugugaccugcuccugggaggcagagaguggagcuacaucguggagcggcccuccgcuguuaacgggcuuugcuauccuggaaauguggaaaaccuggaggaacuccgcucucuguucagcuccgccagaagcuaccagcggauucagaucuuucccgacaccauuuggaaugucucuuauuccggcacaagcaaggccuguucugauuccuucuaccgcagcaugagauggcuuacccagaaagacaacgcuuauccuauccaagaugcccaguacacgaauaaccaggagaagaauauucuguuuauguggggcaucaaccaucccccuacagacaccgcucagacaaaucucuacacccggaccgauacaacgaccucuguggccacagaggaaauuaaccgcaccuucaaaccgcugaucgggcccagaccucugguucacggacucaugggccggaucaacuauuacugguccgugcugaagcccgggcaaacacuucgcauuaagagcaauggaaaccugaucgcgccuugguauggccauauucucuccgggaaaucucacggaagaauccugaagaccgaccuuaaacggggcaauugcacgguccagugucagacagagaagggcgggcugaacaccacccuccccuuucagaaugugagcaaauacgccuucggaaacugcuccaaguauauuggcaucaagagccugaaacuggcuguggggcuccgcaaugucccgucuagauccagccggggacuguuuggcgccaucgcuggguucauugaaggaggcuggucuggccuuguugccgggugguacggauuucaacacagcaacgaucagggcguggggauggcggccgaccgcgauuccacacagaaggcuaucgacaaaauuaccucuaaggugaauaacaucgucgacaaaaugaauaagcaauaugagauuaucgaucaugaguucagcgaaguggagacaagacugaacaugaucaauaacaaaauugacgaucagauccaggacauuugggccuacaaugcugaacuccugguucuucuggagaaccagaagacgcucgaugaacacgacgccaacgugaauaaccuguacaauaaggucaaacgggcccugggauccaacgcuguggaggauggcaagggguguuuugaacucuaucauaaaugcgacgaucaauguauggagaccaucagaaauggcacauacaaccgccggaaguaucaggaggaaagcaaacuggagaagcagaagauugaaggaguuaaacuugagucugaaggcaccuacaagauccugacaauuuauuccaccguggcgagcucucucgucaucgccaugggguucgcugccuuucuguucugggccauguccaauggaagcugcagaugcaacaucuguauuuga

SEQ ID NO: 204587 - RNA, 1701 nt, Artificial Sequence; identical to SEQ ID NO: 199054
  derived and/or modified CDS sequence (opt5) from hemagglutinin__InfluenzaA__AIJ10728

SEQ ID NO: 204588 - RNA, 1701 nt, Artificial Sequence
  derived and/or modified CDS sequence (opt5) from hemagglutinin__InfluenzaA__AIJ10729
augaagaccaucauugcccugagcuacauccucugccugguguucgcucagaaacuucccggccacgacaacuccacagccacgcugugucucgggcaucacgcggucccuaauggaaccauuguuaagacaaucaccaacgaucaaauugaggugacaaaugcuaccgaacuggugcagucuagcuccacaggcgagaucugcaacucuccgcaucagauccuugacggggaaaauuguacccugauugaugcccuccugggagacccccagugcgauggcuuucaaaacaaaaagugggaccuguucgucgagagaagcaaagcccacuccaauuguuauccuuacgaugugcccgacuaugcuucucuccggagccugguugccuccagcgggacgcuugaauuuaacaaugagucuuucaacuggaccggagugacacagaauggcaccuccagcgcuugcauccgcagaucuaacaauuccuuuuucagccggcugaacuggcucacacaucugaauuuuaaguacccugcccuuaacgucaccaugcccaacaaugagcaguucgauaagcuguauauuuggggcgugcaccacccugggacggacaaagaucagaucuuucucuacgcgcaagccucuggacgcauuacaguuuccaccaagagaagccagcaggcugugaucccgaacauuggcucccggccccgcgucagaaauaucccuucucgggugagcaucuauuggacaauugugaaacccggggacauccugcugauuaacuccaccggaaaucucaucgccccucgcggcuacuucaagauuagaagcgggaaaucuuccaucaugcggagcgaugcucccaucggaaaguguaacucugccugcauuaccccgaauggcagcaucccuaacgacaagcccuuucagaaugucaaccgcauuacauacggcgcguguccuagauauguuaaacaaaauacgcugaaacuugccaccgggaugcggaacgugcccgaaaagcagacaaagggaaucuucggcgcuauugccggguuuaucgagaauggaugggaaggcaugguggacgggugguacggauuccgccaucagaacuccgagggcagaggccaagcugccgaucugaaaucuacccaggccgcuaucgaccagauuaaugggaagcucaaccggcugaucggaaaaacaaacgagaaguuccaccagauugaaaaggaguuuagcgaagucgagggcagaauccaagaucuugaaaaauauguggaggacaccaagauugaucugugguccuacaaugcggagcuccugguugcccuggaaaaccagcauacgaucgaccucacagauagcgagaugaauaaacuguucgaaaagaccaaaaagcagcuucgcgagaacgcugaagacauggggaauggaugcuuuaagauuuaucacaaaugugauaacgccugcaucggcucuauccggaaugggaccuacgaccacgauguguauagagacgaggcccugaacaaucgcuuccagauuaagggcgucgagcucaaauccggauacaaggacuggauccuguggauuagcuuugcuaucucuugcuuccuucuguguguggcccuccugggcuuuauuaugugggcgugccaaaaagggaacauccgguguaauaucugcauuuga

SEQ ID NO: 204589 - RNA, 1701 nt, Artificial Sequence; identical to SEQ ID NO: 199054
  derived and/or modified CDS sequence (opt5) from hemagglutinin__InfluenzaA__AIJ10730

SEQ ID NO: 204590 - RNA, 1701 nt, Artificial Sequence; identical to SEQ ID NO: 199054
  derived and/or modified CDS sequence (opt5) from hemagglutinin__InfluenzaA__AIJ10731

SEQ ID NO: 204591 - RNA, 1701 nt, Artificial Sequence
  derived and/or modified CDS sequence (opt5) from hemagglutinin__InfluenzaA__AIJ10732
augaagaccaucauugcccugagcuacauccucugccugguguucgcucaggagcuucccggcaacgacaauuccacagccacgcugugucucgggcaccaugcggucccuaacggaaccauuguuaaaacaaucaccaaugaucaaauugaagugacaaacgcuaccgagcuggugcagucuagcuccacaggcgaaaucugcaauucuccgcaccagauccuugacggggagaacuguacccugauugaugcccuccugggagacccccagugcgauggcuuucaaaauaagaaaugggaccuguucgucgaaagaagcaaggcccauuccaacuguuauccuuacgaugugcccgacuaugcuucucuccggagccugguugccuccagcgggacgcuugaguuuaauaacgagucuuucaauuggaccggagugacacagaacggcaccuccagcgcuugcauccgcagaucuaauaacuccuuuuucagccggcugaauuggcucacacaccugaacuuucgcuacccugcccuuaacgucaccaugcccaauaacgaacaguucgauaaacuguauauuuggggcgugcaucacccugggacggacaaggaucagaucuuucucuacgcgcaagccucuggaagaauuacaguuuccaccaagcggagccagcaggcugugaucccgaauauuggcucccgccccagaguccggaacaucccuucucgcgugagcaucuauuggacaauugugaaacccggggacauccugcugauuaauuccaccggaaaccucaucgccccuagaggcuacuucaagauucggagcgggaaaucuuccaucaugcgcagcgaugcucccaucggaaaguguaauucugccugcauuaccccgaacggcagcaucccuaaugacaaacccuuucagaacgucaauagaauuacauacggcgcguguccucgguauguuaagcaaaacacgcugaaacuugccaccgggaugcgcaaugugcccgagaagcagacaagaggaaucuucggcgcuauugccggguuuaucgaaaacggaugggagggcaugguggacgggugguacggauuccggcaccaaaauuccgagggcagaggccaggcugccgaucugaagucuacccaggccgcuaucgaccagauuaacgggaaacucaaccgccugaucggaaagacaaaugaaaaauuccaucagauugagaaggaauuuagcgaggucgaaggccggauccaagaucuugagaaauauguggaggacaccaagauugaucugugguccuacaacgcggaacuccugguugcccuggagaaucagcacacgaucgaccucacagauagcgaaaugaacaagcuguucgagaaaaccaagaaacagcuuagagaaaaugcugaggacauggggaacggaugcuuuaagauuuaucauaaaugugauaaugccugcaucggcucuauccgcaacgggaccuacgaccacgauguguaucgggacgaggcccugaauaacagauuccagauuaagggcgucgaacucaaguccggauacaaagacuggauccuguggauuagcuuugcuaucucuugcuuccuucuguguguggcccuccugggcuuuauuaugugggcgugccaaaaggggaauauccgcuguaacaucugcauuuga

SEQ ID NO: 204592 - RNA, 1701 nt, Artificial Sequence
  derived and/or modified CDS sequence (opt5) from hemagglutinin__InfluenzaA__AIJ10733
augaagaccaucauugcccugagcuacauccucugccugguguucgcucaggagcuucccggcaacgacaauuccacagccacgcugugucucgggcaccaugcggucccuaacggaaccauuguuaaaacaaucaccaaugaucaaauugaagugacaaacgcuaccgagcuggugcagucuagcuccacaggcgaaaucugcaauucuccgcaccagauccuugacggggagaacuguacccugauugaugcccuccugggagacccccagugcgauggcuuucaaaauaagaaaugggaccuguucgucgaaagaagcaaggcccauuccaacuguuauccuuacgaugugcccgacuaugcuucucuccggagccugguugccuccagcgggacgcuugaguuuaauaacgagucuuucaauuggaccggagugacacagaacggcaccuccagcgcuugcauccgcagaucuaauaacuccuuuuucagccggcugaauuggcucacacaccugaacuuucgcuacccugcccuuaacgucaccaugcccaauaacgaacaguucgauaaacuguauauuuggggcgugcaucacccugggacggacaaggaucagaucuuucucuacgcgcaagccucuggaagaauuacaguuuccaccaagcggagccagcaggcugugaucccgaauauuggcucccgccccagaguccggaacaucccuucucgcgugagcaucuauuggacaauugugaaacccggggacauccugcugauuaauuccaccggaaaccucaucgccccuagaggcuacuucaagauucggagcgggaaaucuuccaucaugcgcagcgaugcucccaucggaaaguguaaaucugccugcauuaccccgaauggcagcaucccuaacgacaagcccuuucagaaugucaacagaauuacauacggcgcguguccucgguauguuaagcaaaauacgcugaaacuugccaccgggaugcgcaacgugcccgagaagcagacaagaggaaucuucggcgcuauugccggguuuaucgaaaauggaugggagggcaugguggacgggugguacggauuccggcaccagaacuccgagggcagaggccaagcugccgaucugaaaucuacccaggccgcuaucgaccagauuaaugggaagcucaaccgccugaucggaaaaacaaacgaaaaguuccaucagauugagaaagaauuuagcgaggucgaaggccggauccaagaucuugagaaguauguggaggacaccaagauugaucugugguccuacaaugcggaacuccugguugcccuggagaaccagcacacgaucgaccucacagauagcgaaaugaauaaacuguucgagaagaccaaaaagcagcuuagagaaaacgcugaggacauggggaauggaugcuuuaaaauuuaucauaagugugauaacgccugcaucggcucuauccgcaaugggaccuacgaccacgauguguaucgggacgaggcccugaacaauagauuccagauuaagggcgucgaacucaaauccggauacaaggacuggauccuguggauuagcuuugcuaucucuugcuuccuucuguguguggcccuccugggcuuuauuaugugggcgugccaaaaagggaacauccgcuguaauaucugcauuuga

SEQ ID NO: 204593 - RNA, 1701 nt, Artificial Sequence
  derived and/or modified CDS sequence (opt5) from hemagglutinin__InfluenzaA__AIJ10734
augaagaccaucauugcccugagcuacauccucugccugguguucgcucagaaacuucccgagaacgacaauuccacagccacgcugugucucggccaccaugcggucccuaacgggaccauuguuaagacaaucaccaaugaucaaauugaagugacaaacgcuaccgagcuggugcagucuagcuccacaggagaaaucugcaauucuccgcaccagauccuugacggcgagaacuguacccugauugaugcccuccugggggacccccagugcgauggauuucaaaauaaaaagugggaccuguucgucgaaagaagcaaagcccauuccaacuguuauccuuacgaugugcccgacuaugcuucucuccggagccugguugccuccagcggcacgcuugaguuuaauaacgagucuuucaauuggaccggggugacacagaacggaaccuccagcgcuugcauccgcagaucuaauaacuccuuuuucagccggcugaauuggcucacacaccugaacuuuaaguacccugcccuuaacgucaccaugcccaauaacgaacaguucgauaagcuguauauuuggggcgugcaucacccuggcacggacaaagaucagaucuuucucuacgcgcaagccucugggcgcauuacaguuuccaccaagagaagccagcaggcugugaucccgaauauuggaucccggccccgcgucagaaacaucccuucucggaucagcauuuauuggacaaucgugaaacccggcgacauucugcugaucaauuccaccgggaaccucauugccccucgcggauacuucaagaucagaagcggcaaaucuuccaucaugcggagcgaugcucccauugggaaguguaauucuaccugcaucacaccgaacggaagcauuccuaaugacaagcccuuucagaacgugaaucgcaucacguacggcgccuguccuagauaugucaaacaaaacacccugaaacuugcgacaggcaugcggaauguucccgagaagcagacccgcgggauuuucggagccaucgcuggcuuuaucgaaaacgggugggagggaaugguggacggcugguacggguucagacaccaaaauuccgagggacggggccaggccgcugaucugaagucuacacaggccgccauugaccagaucaacggcaaacucaacagacugauugggaagaccaaugaaaaauuccaucagaucgagaaggaauuuagcgagguggaaggacgcauucaagaucuugagaaguaugucgaggacacgaaaaucgaucugugguccuacaacgcugaacuccugguggcgcuggagaaucagcacacaauugaccucaccgauagcgaaaugaacaagcuguucgagaaaaccaagaaacagcuucgggaaaaugccgaggacaugggcaacgggugcuuuaagaucuaucauaagugugauaaugcuugcaucggaucuauuagaaacggcacauacgaccacgauguuuaucgcgacgaggcccugaauaaccgguuccagaucaaagggguggaacucaaguccggcuacaaagacuggauucuguggaucagcuuugccauuucuugcuuccuucugugugucgcucuccugggauuuaucaugugggccugccaaaagggcaauaucagauguaacauuugcaucuga

SEQ ID NO: 204594 - RNA, 1701 nt, Artificial Sequence
  derived and/or modified CDS sequence (opt5) from hemagglutinin__InfluenzaA__AIJ10735
augaagaccaucauugcccugagcuacauccucugccugauuuucgcucagaaacuucccgagaacgacaauuccacagccacgcugugucucggccaccaugcggugccuaacgggaccaucgucaagacaauuaccaaugaucaaaucgaaguuacaaacgcuaccgagcuggugcagucuagcuccacaggagaaaucugcaauucuccgcaccagauucuugacggcgagaacuguacccugaucgaugcccuccugggggacccccagugcgauggauuucaaaauaaaaagugggaccuguucguggaaagaagcaaagcccauuccaacuguuauccuuacgauguccccgacuaugcuucucuccggagccugguggccuccagcggcacgcuugaguuuaauaacgagucuuucaauuggaccgggguuacacagaacggaaccuccagcgcuugcauucgcagaucuaauaacuccuuuuucagccggcugaauuggcucacacaccugaacuuuaaguacccugcccuuaacgugaccaugcccaauaacgaacaguucgauaagcuguauaucuggggcguccaucacccuggcacggacaaagaucagauuuuucucuacgcgcaagccucugggcgcaucacaguguccaccaagagaagccagcaggcuguuauuccgaauaucggaucccggccccgcgugagaaacaucccuucucgggucagcauuuauuggacaaucgugaaacccggcgacauucugcugaucaauuccaccgggaaccucauugccccucgcggauacuucaagaucagaagcggcaaaucuuccaucaugcggagcgaugcucccauugggaaguguaauucuaccugcaucacaccgaacggaagcauuccuaaugacaagcccuuucagaacgugaaucgcaucacguacggcgccuguccuagauaugucaaacaaaacacccugaaacuugcgacaggcaugcggaauguucccgagaagcagacccgcgggauuuucggagccaucgcuggcuuuaucgaaaacgggugggagggaaugguggacggcugguacggguucagacaccaaaauuccgagggaaagggccaggccgcugaucugaaaucuacacaggccgccauugaccagaucaacggcaagcucaaccggcugauugggaaaaccaaugaaaaguuccaucagaucgagaaggaauuuagcgagguggaaggacgcauucaagaucuugagaaauaugucgaggacacgaagaucgaucugugguccuacaacgcugaacuccugguggcgcuggagaaucagcacacaauugaccucaccgauagcgaaaugaacaaacuguucgagaagaccaaaaagcagcuuagagaaaaugccgaggacaugggcaacgggugcuuuaagaucuaucauaaaugugauaaugcuugcaucggaucuauucggaacggcacauacgaccacgauguuuauagagacgaggcccugaauaaccgcuuccagaucaaggggguggaacucaaauccggcuacaaggacuggauucuguggaucagcuuugccauuucuugcuuccuucugugugucgcucuccugggauuuaucaugugggccugccaaaaaggcaauauccgguguaacauuugcaucuga

SEQ ID NO: 204595 - RNA, 1701 nt, Artificial Sequence
  derived and/or modified CDS sequence (opt5) from hemagglutinin__InfluenzaA__AIJ10736
augaagaccaucauugcccugagcuacauccucugccugguguucgcucagaaacuucccggcaacgacaauuccacagccacgcugugucucgggcaccaugcggucccuaacggaaccauuguuaagacaaucaccaaugauagaauugaggugacaaacgcuaccgaacuggugcaaaauucuacaaucggcgagaucugcgacagcccgcaccagauucuugauggggaaaacuguacccugaucgacgcccuccugggagauccccagugcgacggcuuucagaauaaaaagugggaucuguucgucgagcgguccaaagccuauucuaacuguuacccuuaugacgugcccgauuacgcuagccuccgcucccugguugccucuagcgggacgcuugaauuuaauaacgaguccuucaauuggaccggagugacacaaaacggcaccagcucugcuugcauuagacgguccaauaacagcuuuuucucucgccugaauuggcucacacaucugaacuuuaaguauccugcccuuaacgucaccaugcccaauaacgagcaguucgacaagcuguacaucuggggcgugcaccauccugggacggauaaagaccagauuuuucucuaugcgcaguccagcggaagaaucacaguuucuaccaagcggucccaacaggccgugauuccgaauaucggcagccgccccagaauccggaacauuccuucccgcaucucuauuuacuggacaaucgucaaacccggggauauucugcugaucaauagcaccggaaaccucaucgcuccuagaggcuacuucaagauucgguccgggaaaagcucuaucaugcgcuccgacgcccccauuggaaaguguaagagcgaaugcaucaccccgaauggcucuauuccuaacgacaaacccuuucagaaugugaacagaaucacauauggcgcuuguccucgguacgugaagcagagcacgcugaaacuugccaccgggaugcgcaauguccccgagaagcaaacaagaggaaucuucggcgcgauugccggguuuaucgaaaacggaugggagggcaugguugaugggugguauggauuccggcaccaaaauuccgagggcagaggccaggcugccgaccugaaaucuacccaggcugccauugaucagaucaacgggaagcucaaucgccugauuggaaaaacaaacgaaaaguuccaccagaucgagaaggaauuuagcgagguggaaggccggauucaggaccuugagaaauacguggaggauaccaagaucgaccugugguccuauaacgccgaacuccuggucgcucuggagaaucaacauacgaucgaucucacagacagcgaaaugaacaaacuguucgagaagaccaaaaagcagcuuagagaaaaugcggaggauauggggaacggaugcuuuaagauuuaccacaaaugugacaaugccugcaucggcucuauucgcaacgggaccuaugaucaugacguguaccgggacgaggcucugaauaacagauuccagaucaagggcguugaacucaaauccggauacaaggauuggauucuguggaucagcuuugccaucucuugcuuccuucuguguguggcccuccugggcuuuauuaugugggcuugccagaaagggaauauccgcuguaacauuugcaucuga

SEQ ID NO: 204596 - RNA, 1701 nt, Artificial Sequence
  derived and/or modified CDS sequence (opt5) from hemagglutinin__InfluenzaA__AIJ10737
augaagaccaucauugcccugagcuacauccucugccugguggucgcucagaaacuucccggcaacgacaauuccacagccacgcugugucucgggcaccaugcgguuccuaacggaaccauugugaagacaaucaccaaugauagaauugaggugacaaacgcuaccgaacugguccaaaauucuagcaucggcgagaucugcgacuccccgcaccagauucuugauggggaaaacuguacacugaucgacgcccuccugggagauccccagugcgacggcuuccagaauaaaaagugggaucuguuuguggagcggucuaaagccuauagcaacuguuacccuuaugacguucccgauuacgcuucccuccgcucucugguggccagcuccgggacccuugaauuuaauaacgagagcuucaauuggacgggagucacccaaaacggcacaucuuccgcuugcauuagacggagcaauaacucuuucuuuucccgccugaauuggcucacccaucugaacuucaaguauccugcccuuaacgugacaaugcccaauaacgagcaguuugacaagcuguacaucuggggcguucaccauccugggaccgauaaagaccagauuuuccucuaugcgcagagcucuggaagaaucacgguguccacaaagcggagccaacaggccgucauuccgaauaucggcucccgccccagaauccggaacauuccuucucgcaucagcauuuacuggaccaucgugaaacccggggauauucugcugaucaauuccacaggaaaccucaucgcuccuagaggcuacuuuaagauucggagcgggaaaucuuccaucaugcgcagcgacgcccccauuggaaaguguaagucugaaugcaucaccccgaauggcagcauuccuaacgacaaacccuuccagaaugugaacagaaucaccuauggcgcuuguccucgguacgucaagcaguccacacugaaacuugccacggggaugcgcaauguucccgagaagcaaaccagaggaaucuuuggcgcgauugccggguucaucgaaaacggaugggagggcaugguggaugggugguauggauuucggcaccaaaauucugagggcagaggccaggcugccgaccugaaaagcacacaggcugccauugaucagaucaacgggaagcucaaucgccugauuggaaaaaccaacgaaaaguuccaccagaucgagaaggaguucuccgaaguggaaggccggauucaggaccuugagaaauacgucgaggauacaaagaucgaccuguggagcuauaacgccgaacuccugguggcucuggagaaucaacauaccaucgaucucacggacucugaaaugaacaaacuguuugagaagaccaaaaagcagcuuagagaaaaugcggaggauauggggaacggaugcuucaagauuuaccacaaaugugacaaugccugcaucggcuccauucgcaacgggacauaugaucaugacguuuaccgggacgaggcucugaauaacagauuucagaucaagggcguggaacucaaaagcggauacaaggauuggauucuguggaucucuuucgccaucuccugcuuucuucugugugucgcccuccugggcuucauuaugugggcuugccagaaagggaauauccgcuguaacauuugcaucuga

SEQ ID NO: 204597 - RNA, 1701 nt, Artificial Sequence
  derived and/or modified CDS sequence (opt5) from hemagglutinin__InfluenzaA__AIJ10738
augaagaccaucauugcccugagcuacauccucugccugguguucgcucagaaacuucccggcaacgacaauuccacagccacgcugugucucgggcaccaugcggucccuaacggaaccauuguuaagacaaucaccaaugauagaauugaggugacaaacgcuaccgaacuggugcaaaauucuagcaucggcgagaucugcgacuccccgcaccagauucuugauggggaaaacuguacacugaucgacgcccuccugggagauccccagugcgacggcuuucagaauaaaaagugggaucuguucgucgagcggucuaaagccuauagcaacuguuacccuuaugacgugcccgauuacgcuucccuccgcucucugguugccagcuccgggacccuugaauuuaauaacgagagcuucaauuggacgggagugacccaaaacggcacaucuuccgcuugcauuagacggagcaauaacuccuuuuucucucgccugaauuggcucacccaucugaacuuuaaguauccugcccuuaacgucacaaugcccaauaacgagcacuucgacaagcuguacaucuggggcgugcaucacccugggaccgauaaagaccagauuuuucucuaugcgcagagcucuggaagaaucacgguuuccacaaagcggagccagcaagccgugauuccgaauaucggcucccgccccagaauccggaacauuccuucucgcaucagcauuuacuggaccaucgucaaacccggggauauucugcugaucaauuccacaggaaaccucaucgcuccuagaggcuacuucaagauucggagcgggaaaucuuccaucaugcgcagcgacgcccccauuggaaaguguaagucugaaugcaucaccccgaauggcagcauuccuaacgacaaacccuuucagaaugugaacagaaucaccuauggcgcuuguccucgguacgugaagcaguccacacugaaacuugccacggggaugcgcaauguccccgagaagcagaccagaggaaucuucggcgcgauugccggguuuaucgaaaacggaugggagggcaugguugaugggugguauggauuccggcaccaaaauucugagggcagaggccaggcugccgaccugaaaagcacacaggcugccauugaucaaaucaacgggaagcucaaucgccugauuggaaaaaccaacgaaaaguuccaucagaucgagaaggaauuuuccgagguggaaggccggauucaggaccuugagaaauacguggaggauacaaagaucgaccuguggagcuauaacgccgaacuccuggucgcucuggagaaucagcacaccaucgaucucacggacucugaaaugaacaaacuguucgagaagaccaaaaagcaacuuagagaaaaugcggaggauauggggaacggaugcuuuaagauuuaccauaaaugugacaaugccugcaucggcuccauucgcaacgggacauaugaucacgacguguaccgggacgaggcucugaauaacagauuccagaucaagggcguugaacucaaaagcggauacaaggauuggauucuguggaucucuuuugccaucuccugcuuccuucuguguguggcccuccugggcuuuauuaugugggcuugccagaaagggaauauccgcuguaacauuugcaucuga

SEQ ID NO: 204598 - RNA, 1701 nt, Artificial Sequence; identical to SEQ ID NO: 201525
  derived and/or modified CDS sequence (opt5) from hemagglutinin__InfluenzaA__AIJ10740

SEQ ID NO: 204599 - RNA, 1701 nt, Artificial Sequence; identical to SEQ ID NO: 201525
  derived and/or modified CDS sequence (opt5) from hemagglutinin__InfluenzaA__AIJ10741

SEQ ID NO: 204600 - RNA, 1701 nt, Artificial Sequence
  derived and/or modified CDS sequence (opt5) from hemagglutinin__InfluenzaA__AIJ10742
augaagaccaucauugcccugagcuacauccucugccugguguucgcucagaaacuucccggcaacgacaauuccacagccacgcugugucucgggcaccaugcggucccuaacggaaccauuguuaagacaaucaccaaugauagaauugaggugacaaacgcuaccgaacuggugcaaaauucuagcaucggcgagaucugcgacuccccgcaccagauucuugauggggaaaacuguacacugaucgacgcccuccugggagauccccagugcgacggcuuucagaauaaaaagugggaucuguucgucgagcggucuaaagccuauagcaacuguuacccuuaugacgugcccgauuacgcuucccuccgcucucugguugccagcuccgggacccuugaauuuaauaacgagagcuucaauuggacgggagugacccaaaacggcacaucuuccgcuugcauuagacggagcaauaacuccuuuuucucucgccugaauuggcucacccaucugaacuuuaaguauccugcccuuaacgucacaaugcccaauaacgagcaguucgacaagcuguacaucuggggcgugcaccauccugggaccgauaaagaccagauuuuucucuaugcgcagagcucuggaagaaucacgguugccacaaagcggucccaacaggcugugauuccgaauaucggcagccgccccagaauccggaacauuccuucccgcaucucuauuuacuggaccaucgucaaacccggggauauucugcugaucaauagcacaggaaaccucaucgccccuagaggcuacuucaagauucgguccgggaaaagcucuaucaugcgcuccgacgcucccauuggaaaguguaagagcgaaugcaucaccccgaauggcucuauuccuaacgacaaacccuuucagaaugugaacagaaucaccuauggcgccuguccucgguacgugaagcagagcacacugaaacuugcgacggggaugcgcaauguccccgagaagcaaaccagaggaaucuucggcgccauugcuggguuuaucgaaaacggaugggagggcaugguugaugggugguauggauuccggcaccaaaauuccgagggcagaggccaggccgcugaccugaaaucuacacaggccgccauugaucagaucaacgggaagcucaaucgccugauuggaaaaaccaacgaaaaguuccaccagaucgagaaggaauuuagcgagguggaaggccggauucaggaccuugagaaauacguggaggauacaaagaucgaccugugguccuauaacgcugaacuccuggucgcgcuggagaaucaacauaccaucgaucucacggacagcgaaaugaacaaacuguucgagaagaccaaaaagcagcuuagagaaaaugccgaggauauggggaacggaugcuuuaagauuuaccacaaaugugacaaugcuugcaucggcucuauucgcaacgggacauaugaucaugacguguaccgggacgaggcccugaauaacagauuccagaucaagggcguugaacucaaauccggauacaaggauuggauucuguggaucagcuuugccaucucuugcuuccuucuguguguggcucuccugggcuuuauuaugugggccugccagaaagggaauauccgcuguaacauuugcaucuga

SEQ ID NO: 204601 - RNA, 1701 nt, Artificial Sequence
  derived and/or modified CDS sequence (opt5) from hemagglutinin__InfluenzaA__AIJ10743
augaagaccaucauugcccugagcuacauccucugccugguguucgcucagaaacuucccggcaacgacaauuccacagccacgcugugucucgggcaccaugcggucccuaacggaaccauuguuaagacaaucaccaaugauagaauugaggugacaaacgcuaccgaacuggugcaaaauucuagcaucggcgagaucugcgacuccccgcaccagauucuugauggggaaaacuguacacugaucgacgcccuccugggagauccccagugcgacggcuuucagaauaaaaagugggaucuguucgucgagcggucuaaagccuauagcaacuguuacccuuaugacgugcccgauuacgcuucccuccgcucucugguugccagcuccgggacccuugaauuuaauaacgagagcuucaauuggacgggagugacccaaaacggcacaucuuccgcuugcauuagacggagcaauaacuccuuuuucucucgccugaauuggcucacccaucugaacuuuaaguauccugcccuuaacgucacaaugcccaauaacgagcaguucgacaagcuguacaucuggggcgugcaccauccugggaccgauaaagaccagauuuuucucuaugcgcagagcucuggaagaaucacgguuuccacaaagcggagccaacaggccgugauuccgaauaucggcucccgccccagaauccggaacauuccuucucgcaucagcauuuacuggaccaucgucaaacccggggauauucugcugaucaauuccacaggaaaccucaucgcuccuagaggcuacuucaagauucggagcgggaaaucuuccaucaugcgcagcgacgcccccauuggaaaguguaagucugaaugcaucaccccgaauggcagcauuccuaacgacaaacccuuucagaaugugaacagaaucaccuauggcgcuuguccucgguacgugaagcaguccacacugaaacuugccacggggaugcgcaauguccccgagaagcaaaccagaggaaucuucggcgcgauugccggguuuaucgaaaacggaugggagggcaugguugaugggugguauggauuccggcaccaaaauucugagggcagaggccaggcugccgaccugaaaagcacacaggcugccauugaucagaucaacgggaagcucaaucgccugauuggaaaaaccaacgaaaaguuccaccagaucgagaaggaauuuuccgagguggaaggccggauucaggaccuugagaaauacguggaggauaucaagaucgaccuguggagcuauaacgccgaacuccuggucgcucuggagaaucaacauacaauugaucucaccgacucugaaaugaacaaacuguucgagaagacgaaaaagcagcuuagagaaaaugcggaggauauggggaacggaugcuuuaagaucuaccacaaaugugacaaugccugcauuggcuccauccgcaacgggacauaugaucaugacguguaccgggacgaggcucugaauaacagauuccagauuaagggcguugaacucaaaagcggauacaaggauuggauccuguggaucucuuuugccauuuccugcuuccuucuguguguggcccuccugggcuuuaucaugugggcuugccagaaagggaauauucgcuguaacaucugcauuuga

SEQ ID NO: 204602 - RNA, 1701 nt, Artificial Sequence
  derived and/or modified CDS sequence (opt5) from hemagglutinin__InfluenzaA__AIJ10744
augaagaccaucauugcccugagcuacauccucugccugguguucgcucagaaacuucccggcaacgacaauuccacagccacgcugugucucgggcaccaugcggucccuaacggaaccauuguuaagacaaucaccaaugauagaauugaggugacaaacgcuaccgaacuggugcaaaauucuagcaucggcgagaucugcgacuccccgcaccagauucuugauggggaaaacuguacacugaucgacgcccuccugggagauccccagugcgacggcuuucagaauaaaaagugggaucuguucgucgagcggucuaaagccuauagcaacuguuacccuuaugacgugcccgauuacgcuucccuccgcucucugguugccagcuccgggacccuugaauuuaauaacgagagcuucaauuggacgggagugacccaaaacggcacaucuuccgcuugcauuagacggagcaauaacuccuuuuucucucgccugaauuggcucacccaucugaacuuuaaguauccugcccuuaacgucacaaugcccaauaacgagcaguucgacaagcuguacaucuggggcgugcaccauccugggaccgauaaagaccagauuuuucucuaugcgcagagcucuggaagaaucacgguuuccacaaagcggagccaacaggccgugauuccgaauaucggcucccgccccagaauccggaacauuccuucucgcaucagcauuuacuggaccaucgucaaacccggggauauucugcugaucaauuccacaggaaaccucaucgcuccuagaggcuacuucaagauucggagcgggaaaucuuccaucaugcgcagcgacgcccccauuggaaaguguaagucugaaugcaucaccccgaauggcagcauuccuaacgacaaacccuuucagaaugugaacagaaucaccuauggcgcuuguccucgguacgugaagcagcgcacacugaaacuugccacggggaugagaaauguccccgagaagcaaacccggggaaucuucggcgcgauugccggguuuaucgaaaacggaugggagggcaugguugaugggugguauggauucagacaccaaaauuccgagggccgcggccaggcugccgaccugaaaucuacacaggcugccauugaucagaucaacgggaagcucaaucggcugauuggaaaaaccaacgaaaaguuccaccagaucgagaaggaauuuagcgagguggaaggccgcauucaggaccuugagaaauacguggaggauacaaagaucgaccugugguccuauaacgccgaacuccuggucgcucuggagaaucaacauaccaucgaucucacggacagcgaaaugaacaaacuguucgagaagaccaaaaagcagcuuagagaaaaugcggaggauauggggaacggaugcuuuaagauuuaccacaaaugugacaaugccugcaucggcucuauucggaacgggacauaugaucaugacguguacagagacgaggcucugaauaaccgcuuccagaucaagggcguugaacucaaauccggauacaaggauuggauucuguggaucagcuuugccaucucuugcuuccuucuguguguggcccuccugggcuuuauuaugugggcuugccagaaagggaauauccgguguaacauuugcaucuga

SEQ ID NO: 204603 - RNA, 1701 nt, Artificial Sequence; identical to SEQ ID NO: 202066
  derived and/or modified CDS sequence (opt5) from hemagglutinin__InfluenzaA__AIJ10745

SEQ ID NO: 204604 - RNA, 1701 nt, Artificial Sequence
  derived and/or modified CDS sequence (opt5) from hemagglutinin__InfluenzaA__AIJ10747
augaagaccaucauugcccugagcuacauccucugccugguguucgcucagaaacuucccggcaacgacaauuccacagccacgcugugucucgggcaccaugcggucccuaacggaaccauuguuaagacaaucaccaaugauagaauugaggugacaaacgcuaccgaacuggugcaaaauucuagcaucggcgagaucugcgacuccccgcaccagauucuugauggggaaaacuguacacugaucgacgcccuccugggagauccccagugcgacgauuuucagaauaaaaagugggaccuguucgucgagcggucuaaagccuauagcaacuguuacccuuaugaugugcccgacuacgcuucccuccgcucucugguugccagcuccggcacccuugaauuuaauaacgagaauuucaacuggacgggggugacccaaaauggaacaagcucugcuugcauuagacgguccaacaauagcuuuuucucucgccugaacuggcucacccaucugaacuuuaaguauccugcccuuaaugucacaaugcccaacaaugagcaguucgauaagcuguacaucuggggcgugcaccauccuggcaccgacaaagaucagauuuuucucuaugcgcaguccagcgggagaaucacgguuucuacaaagcggucccaacaggccgugauuccgaacaucggaagccgccccagaauccggaauauuccuucccgcaucucuauuuacuggaccaucgucaaacccggcgacauucugcugaucaacagcacagggaaucucaucgcuccuagaggauacuucaagauucgguccggcaaaagcucuaucaugcgcuccgacgcccccauugggaaguguaagagcgaaugcaucaccccgaacggaucuauuccuaaugauaaacccuuucagaacgugaauagaaucaccuauggcgcuuguccucgguacgugaagcagagcacacugaaacuugccacgggcaugcgcaacguccccgagaagcaaaccagagggaucuucggagcgauugccggcuuuaucgaaaaugggugggagggaaugguugacggcugguauggguuccggcaccagaacuccgagggaagaggccaggcugccgaucugaaaucuacacaagcugccauugaccagaucaauggcaagcucaaccgccugauugggaaaaccaacgaaaaguuccaccagaucgagaaggaauuuagcgagguggaaggacggauucaggaucuugagaaauacguggaggacacaaagaucgaucugugguccuauaaugccgaacuccuggucgcucuggagaaccaacauaccaucgaccucacggauagcgaaaugaauaaacuguucgagaagaccaaaaagcagcuuagagaaaacgcggaggacaugggcaaugggugcuuuaagauuuaccacaaaugugauaacgccugcaucggaucuauucgcaauggcacauaugaccaugacguguaccgggaugaggcucugaacaauagauuccagaucaaggggguugaacucaaauccggcuacaaggacuggauucuguggaucagcuuugccaucucuugcuuccuucuguguguggcccuccugggauuuauuaugugggcuugccagaaaggcaacauccgcuguaauauuugcaucuga

SEQ ID NO: 204605 - RNA, 1701 nt, Artificial Sequence; identical to SEQ ID NO: 204604
  derived and/or modified CDS sequence (opt5) from hemagglutinin__InfluenzaA__AIJ10748

SEQ ID NO: 204606 - RNA, 1701 nt, Artificial Sequence
  derived and/or modified CDS sequence (opt5) from hemagglutinin__InfluenzaA__AIJ10750
augaagaccaucauugcccugagcuacauccucugccugguguucgcucagaaacuucccggcaacgacaauuccacagccacgcugugucucgggcaccaugcggucccuaacggaaccauuguuaagacaaucaccaaugauagaauugaggugacaaacgcuaccgaacuggugcaaaauucuagcaucggcgagaucugcgacuccccgcaccagauucuugauggggaaaacuguacacugaucgacgcccuccugggagauccccagugcgacggcuuucagaauaaaaagugggaucuguucgucgagcggucuaaagccuauagcaacuguuacccuuaugacgugcccgauuacgcuucccuccgcucucugguugccagcuccgggacccuugaauuuaauaacgagagcuucaauuggacgggagugacccaaaacggcacaucuuccgcuugcauuagacggagcaauucuuccuuuuucagccgccugaacuggcucacccaucugaauuuuaaguauccugcccuuaacgucacaaugcccaacaaugagcaguucgacaagcuguacaucuggggcgugcaccauccugggaccgauaaagaccagauuuuucucuaugcgcagucuuccggaagaaucacgguuagcacaaagcggucccaacaggccgugauuccgaacaucggcucucgccccagaauccggaauauuccuagccgcaucuccauuuacuggaccaucgucaaacccggggauauucugcugaucaacagcacaggaaaucucaucgcuccuagaggcuacuucaagauucggucugggaaauccagcaucauucgcucugacgcccccaucggaaaguguaagagcgaaugcauuaccccgaacggcuccaucccuaaugacaaacccuuucagaacgugaauagaaucaccuauggcgcuuguccucgguacgugaagcagucuacacugaaacuugccacggggaugcgcaacguccccgagaagcaaaccagaggaauuuucggcgcgaucgccggguuuauugaaaauggaugggagggcaugguugaugggugguauggauuccggcaccagaacagcgagggcagaggccaggcugccgaccugaaauccacacaagcugccaucgaucagauuaaugggaagcucaaccgccugaucggaaaaaccaaugaaaaguuccaccagauugagaaggaauuuagcgagguggaaggccggauccaggaccuugagaaauacguggaggauacaaagaucgaccuguggucuuauaacgccgaacuccuggucgcucuggagaaccaacauaccauugaucucacggacuccgaaaugaauaaacuguucgagaagaccaaaaagcagcuuagagaaaacgcggaggauauggggaauggaugcuuuaagaucuaccacaaaugugacaacgccugcauuggcagcauccgcaaugggacauaugaucauaacguguaccgggacgaggcucugaauaacagauuccagauuaagggcguugaacucaaaucuggauacaaggacuggauccuguggaucuccuuugccauuagcugcuuccuucuguguguggcccuccugggcuuuaucaugugggcuugccagaaagggaauauucgcuguaacaucugcauuuga

SEQ ID NO: 204607 - RNA, 1701 nt, Artificial Sequence
  derived and/or modified CDS sequence (opt5) from hemagglutinin__InfluenzaA__AIJ10752
augaagaccaucauugcccugagcuacauccucugccugguguucgcucagaaacuucccggcaacgacaauuccacagccacgcugugucucgggcaccaugcggucccuaacggaaccauuguuaagacaaucaccaaugauagaauugaggugacaaacgcuaccgaacuggugcaaaauucuagcaucggcgagaucugcgacuccccgcaccagauucuugauggggaaaacuguacacugaucgacgcccuccugggagauccccagugcgacggcuuucagaauaaaaagugggaucuguucgucgagcggucuaaagccuauagcaacuguuacccuuaugacgugcccgauuacgcuucccuccgcucucugguugccagcuccgggacccuugaauuuaauaacgagagcuucaauuggacgggagugacccaaaacggcacaucuuccgcuugcauuagacggagcaauucuuccuuuuucagccgccugaacuggcucacccaucugaauuuuaaguauccugcccuuaacgucacaaugcccaacaaugagcaguucgacaagcuguacaucuggggcgugcaccauccugggaccgauaaagaccagauuuuucucuaugcgcagucuuccggaagaaucacgguuagcacaaagcggucccaacaggccgugauuccgaacaucggcucucgccccagaauccggaauauuccuagccgcaucuccauuuacuggaccaucgucaaacccggggauauucugcugaucaacagcacaggaaaucucaucgcuccuagaggcuacuucaagauucggucugggaaauccagcaucaugcgcucugacgcccccauuggaaaguguaagagcgaaugcaucaccccgaacggcuccauuccuaaugacaaacccuuucagaacgugaauagaaucaccuauggcgcuuguccucgguacgugaagcagucuacacugaaacuugccacggggaugcgcaacguccccgagaagcaaaccagaggaaucuucggcgcgauugccggguuuaucgaaaauggaugggagggcaugguugaugggugguauggauuccggcaccagaacagcgagggcagaggccaggcugccgaccugaaauccacacaagcugccauugaucagaucaaugggaagcucaaccgccugauuggaaaaaccaaugaaaaguuccaccagaucgagaaggaauuuagcgagguggaaggccggauucaggaccuugagaaauacguggaggauacaaagaucgaccuguggucuuauaacgccgaacuccuggucgcucuggagaaccaacauaccaucgaucucacggacuccgaaaugaauaaacuguucgagaagaccaaaaagcagcuuagagaaaacgcggaggauauggggaauggaugcuuuaagauuuaccacaaaugugacaacgccugcaucggcagcauucgcaaugggacauaugaucaugacguguaccgggacgaggcucugaacaauagauuccagaucaagggcguugaacucaaaucuggauacaaggauuggauucuguggaucuccuuugccaugagcugcuuccuucuguguguggcccuccugggcuuuaucaugugggcuugccagaaagggaacauucgcuguaauaucugcauuuga

SEQ ID NO: 204608 - RNA, 1701 nt, Artificial Sequence
  derived and/or modified CDS sequence (opt5) from hemagglutinin__InfluenzaA__AIJ10753
augaagaccaucauugcccugagcuacauccucugccugguguucgcucagaaacuucccggcaacgacaauuccacagccacgcugugucucgggcaccaugcggucccuaacggaaccauuguuaagacaaucaccaaugauagaauugaggugacaaacgcuaccgaacuggugcaaaauucuagcaucggcgagaucugcgacuccccgcaccagauucuugauggggaaaacuguacacugaucgacgcccuccugggagauccccagugcgacggcuuucagaauaaaaagugggaucuguucgucgagcggucuaaagccuauagcaacuguuacccuuaugacgugcccgauuacgcuucccuccgcucucugguugccagcuccgggacccuugaauuuaauaacgagagcuucaauugggcuggagugacgcaaaacggcaccucuuccagcugcauuagaggcucuaauaacuccuuuuucagccggcugaauuggcucacacaucugaacuuuaaguauccugcccuuaacgucaccaugcccaauaacgagcaguucgacaagcuguacaucuggggagugcaccauccugggacagauaaagaccagauuuuucucuaugcgcagucuuccggccgcaucaccguuagcacgaagagaucccaacaggccgugauuccgaauaucgggucucggccccgcaucagaaacauuccuagccggaucuccauuuacuggacaaucgucaaacccggagauauucugcugaucaauagcaccggcaaccucaucgcuccucgcggguacuucaagauuagaucuggaaaauccagcaucaugcggucugacgcccccauuggcaaguguaagagcgaaugcaucacaccgaauggcuccauuccuaacgacaaacccuuucagaaugugaaccgcaucaccuauggggcuuguccuagauacgugaagcagucuacccugaaacuugccacaggaaugcggaauguccccgagaagcaaacgcgcggcaucuucggggcgauugccggauuuaucgaaaacggcugggaggggaugauggauggaugguauggcuucagacaccagaauagcgagggccgggggcaggcugccgaccugaaauccacccaagcugccauugaucagaucaacggaaagcucaauagacugauuggcaaaacaaacgaaaaguuccaccagaucgagaaggaauuuagcgagguugaagggcgcauucaggaccuugagaaauacguggaggauaccaagaucgaccuguggucuuauaacgccgaacuccugguggcucuggagaaucaacauacaaucgaucucaccgacuccgaaaugaacaaacuguucgagaagacgaaaaagcagcuucgggaaaaugcggaggauaugggaaacggcugcuuuaagauuuaccacaaaugugacaaugccugcaucgggagcauuagaaacggcacauaugaucaugacgucuaccgcgacgaggcucugaauaaccgguuccagaucaagggaguggaacucaaaucuggcuacaaggauuggauucuguggaucuccuuugccaucagcugcuuccuucuguguguugcccuccugggguuuauuaugugggcuugccagaaaggaaauaucagauguaacauuugcaucuga

SEQ ID NO: 204609 - RNA, 1701 nt, Artificial Sequence; identical to SEQ ID NO: 202066
  derived and/or modified CDS sequence (opt5) from hemagglutinin__InfluenzaA__AIJ10754

SEQ ID NO: 204610 - RNA, 1701 nt, Artificial Sequence
  derived and/or modified CDS sequence (opt5) from hemagglutinin__InfluenzaA__AIJ10755
augaagaccaucauugcccugagcuacauccucugccugguguucgcucagaaacuucccggcaacgacaauuccacagccacgcugugucucgggcaccaugcggucccuaacggaaccauuguuaagacaaucaccaaugauagaauugaggugacaaacgcuaccgaacuggugcaaaauucuagcaucggcgagaucugcgacuccccgcaccagauucuugauggggaaaacuguacacugaucgacgcccuccugggagauccccagugcgacggcuuucagaauaaaaagugggaucuguucgucgagcggucuaaagccuauagcaacuguuacccuuaugacgugcccgauuacgcuucccuccgcucucugguugccagcuccgggacccuugaauuuaauaacgagagcuucaauugggcuggagugacgcaaaacggcaccucuuccgccugcauuagaggcagcaauucuuccuuuuucagccggcugaacuggcucacacaucugaauuuuaaguauccugcgcuuaacgucaccaugcccaacaaugagcaguucgacaagcuguacaucuggggagugcaccauccugggacagauaaagaccagauuuuucucuaugcccagucuuccggccgcaucaccguuagcacgaagagaucccaacaggcugugauuccgaacaucgggucucggccccgcaucagaaauauuccuagccggaucuccauuuacuggacaaucgucaaacccggagauauucugcugaucaacagcaccggcaaucucaucgccccucgcggguacuucaagauuagaucuggaaaauccagcaucaugcggucugacgcucccauuggcaaguguaagagcgaaugcaucacaccgaacggcuccauuccuaaugacaaacccuuucagaacgugaaucgcaucaccuauggggccuguccuagauacgugaagcagucuacccugaaacuugcgacaggaaugcggaacguccccgagaagcaaacgcgcggcaucuucggggccauugcuggauuuaucgaaaauggcugggaggggaugguugauggaugguauggcuucagacaccagaacagcgagggccgggggcaggccgcugaccugaaauccacccaaagcgccauugaucagaucaauggaaagcucaacagacugauuggcaaaacaaaugaaaaguuccaccagaucgagaaggaauuuucugagguggaagggcgcauucaggaccuugagaaauacguggaggauaccaagaucgaccugugguccuauaacgccgaacuccuggucgcucuggagaaccaacauacaaucgaucucaccgacagcgaaaugaauaaacuguucgagaagacgaaaaagcagcuucgggaaaacgcggaggauaugggaaauggcugcuuuaagauuuaccacaaaugugacaacgccugcaucgggucuauuagaaauggcacauaugaucaugacguguaccgcgacgaggcucugaacaaucgguuccagaucaagggaguugaacucaaauccggcuacaaggauuggauucuguggaucagcuuugccaucuccugcuuccuucuguguguggcccuccugggguuuauuaugugggcuugccagaaaggaaacaucagauguaauauuugcaucuga

SEQ ID NO: 204611 - RNA, 1701 nt, Artificial Sequence; identical to SEQ ID NO: 202066
  derived and/or modified CDS sequence (opt5) from hemagglutinin__InfluenzaA__AIJ10756

SEQ ID NO: 204612 - RNA, 1701 nt, Artificial Sequence
  derived and/or modified CDS sequence (opt5) from hemagglutinin__InfluenzaA__AIJ10757
augaagaccaucauugcccugagcuacauccucugccuggugauugcucagaaacuucccggcaacgacaauuccacagccacgcugugucucgggcaccaugcggucccuaacggaaccaucguuaagacaauuaccaaugauagaaucgaggugacaaacgcuaccgaacuggugcaaaauucuagcaucggcgagauuugcgacuccccgcaccagauccuugauggggaaaacuguacacugauugacgcccuccugggagauccccagugcgacggcuuccagaauaaaaagugggaucuguuugucgagcggucuaaagccuauagcaacuguuacccuuaugacgugcccgauuacgcuucccuccgcucucugguugccagcuccgggacccuugaauuuaauaacgagagcuucaauugggcuggagugacgcaaaacggcaccucuuccgccugcaucagaggcagcaauucuuccuucuuuagccggcugaacuggcucacacaucugaauuucaaguauccugcgcuuaacgucaccaugcccaacaaugagcaguuugacaagcuguacauuuggggagugcaccauccugggacagauaaagaccagaucuuccucuaugcccagucuuccggccgcauuaccguuagcacgaagagaucccaacaggcugugaucccgaacaucgggucucggccccgcauuagaaauaucccuagccggauuuccaucuacuggacaauugucaaacccggagauauccugcugaucaacagcaccggcaaucucauugccccucgcggguacuuuaagaucagaucuggaaaauccagcauuaugcggucugacgcucccaucggcaaguguaagagcgaaugcauuacaccgaacggcuccaucccuaaugacaaacccuuccagaacgugaaucgcaucaccuauggggccuguccuagauacgugaagcagucuacccugaaacuugcgacaggaaugcggaacguccccgagaagcaaacgcgcggcauuuuuggggccaucgcuggauucauugaaaauggcugggaggggaugguugauggaugguauggcuuuagacaccagaacagcgagggccgggggcaggccgcugaccugaaauccacccaagccgccaucgaucagauuaauggaaagcucaacagacugaucggcaaaacaaaugaaaaguuccaccagauugagaaggaguucagcgaaguggaagggcgcauccaggaccuugagaaauacguggaggauaccaagaucgaccuguggucuuauaacgcugaacuccuggucgcgcuggagaaccaacauacaauugaucucaccgacuccgaaaugaauaaacuguuugagaagacgaaaaagcagcuucgggaaaacgccgaggauaugggaaauggcugcuucaagaucuaccacaaaugugacaacgcuugcauugggagcaucagaaauggcacauaugaucaugacguguaccgcgacgaggcccugaacaaucgguuucagauuaagggaguugaacucaaaucuggcuacaaggauuggauccuguggaucuccuucgccauuagcugcuuucuucugugugugguccuccugggguucaucaugugggcuugccagaaaggaaacauuagauguaauaucugcauuuga

SEQ ID NO: 204613 - RNA, 1701 nt, Artificial Sequence
  derived and/or modified CDS sequence (opt5) from hemagglutinin__InfluenzaA__AIJ10758
augaagaccaucauugcccugagcuacauccucugccugguguucgcucagaaacuucccggcaacgacaauuccacagccacgcugugucucgggcaccaugcggucccuaacggaaccauuguuaagacaaucaccaaugauagaauugaggugacaaacgcuaccgaacuggugcaaaauucuagcaucggcgagaucugcgacuccccgcaccagauucuugauggggaaaacuguacacugaucgacgcccuccugggagauccccagugcgacggcuuucagaauaaaaagugggaucuguucgucgagcggucuaaagccuauagcaacuguuacccuuaugacgugcccgauuacgcuucccuccgcucucugguugccagcuccgggacccuugaauuuaauaacgagagcuucaauugggcuggagugacgcaaaacggcaccucuuccgccugcauuagaggcagcaauucuuccuuuuucagccggcugaacuggcucacacauucuaauuuuaaguauccugcgcugaacgucaccaugcccaacaaugagcaguucgacaaacuuuacaucuggggagugcaccauccugggacagauaaggaccagauuuuucuguaugcccaguccagcggccgcaucaccguuuccacgaagagaucucaacaggcugugauuccgaacaucgggagccggccccgcaucagaaauauuccuucccggaucagcauuuacuggacaaucgucaaacccggagauauucuccugaucaacucuaccggcaaucugaucgccccucgcggguacuucaagauuagauccggaaaaagcucuaucaugcggagcgacgcucccauuggcaaguguaaguccgaaugcaucacaccgaacggcucuauuccuaaugacaaacccuuucagaacgugaaucgcaucaccuauggggccuguccuagauacgugaagcagagcacccucaaacuggcgacaggaaugcggaacguccccgagaagcaaacgcgcggcaucuucggggccauugcuggauuuaucgaaaauggcugggaggggaugauggauggaugguauggcuucagacaccagaacuccgagggccgggggcaggccgcugaccuuaaaagcacccaagccgccauugaucagaucaauggaaagcugaacagacucauuggcaaaacaaaugaaaaguuccaccagaucgagaaggaauuuucugagguugaagggcgcauucaggaccuggagaaauacguggaggauaccaagaucgaccuuugguccuauaacgcugaacugcucguggcgcuggagaaccaacauacaaucgaucugaccgacagcgaaaugaauaaacucuucgagaagacgaaaaagcagcugcgggaaaacgccgaggauaugggaaauggcugcuuuaagauuuaccacaaaugugacaacgcuugcaucgggucuauuagaaauggcacauaugaucaugacgucuaccgcgacgaggcccuuaacaaucgguuccagaucaagggaguggaacugaaauccggcuacaaggauuggauucucuggaucagcuuugccaucuccugcuuccugcuuuguguugcucugcucggguuuauuaugugggccugccagaaaggaaacaucagauguaauauuugcaucuga

SEQ ID NO: 204614 - RNA, 1701 nt, Artificial Sequence; identical to SEQ ID NO: 202066
  derived and/or modified CDS sequence (opt5) from hemagglutinin__InfluenzaA__AIJ10759

SEQ ID NO: 204615 - RNA, 1701 nt, Artificial Sequence
  derived and/or modified CDS sequence (opt5) from hemagglutinin__InfluenzaA__AIJ10760
augaagaccaucauugcccugagcuacauccucugccuggugauugcucagaaacuucccggcaacgacaauuccacagccacgcugugucucgggcaccaugcggucccuaacggaaccaucguuaagacaauuaccaaugauagaaucgaggugacaaacgcuaccgaacuggugcaaaauucuagcaucggcgagauuugcgacuccccgcaccagauccuugauggggaaaacuguacacugauugacgcccuccugggagauccccagugcgacggcuuccagaauaaaaagugggaucuguuugucgagcggucuaaagccuauagcaacuguuacccuuaugacgugcccgauuacgcuucccuccgcucucugguugccagcuccgggacccuugaauuuaauaacgagagcuucaauugggcuggagugacgcaaaacggcaccucuuccgccugcaucagaggcagcaauucuuccuucuuuagccggcugaacuggcucacacaucugaauuucaaguauccugcgcuuaacgucaccaugcccaacaaugagcaguuugacaagcuguacauuuggggagugcaccauccugggacagauaaagaccagaucuuccucuaugcccagucuuccggccgcauuaccguuagcacgaagagaucccaacaggcugugaucccgaacaucgggucucggccccgcauuagaaauaucccuagccggauuuccaucuacuggacaauugucaaacccggagauauccugcugaucaacagcaccggcaaucucauugccccucgcggguacuuuaagaucagaucuggaaaauccagcauuaugcggucugacgcucccaucggcaaguguaagagcgaaugcauuacaccgaacggcuccaucccuaaugacaaacccuuccagaacgugaaucgcaucaccuauggggccuguccuagauacgugaagcagucuacccugaaacuugcgacaggaaugcggaacguccccgagaagcaaacgcgcggcauuuuuggggccaucgcuggauucauugaaaauggcugggaggggaugguugauggaugguauggcuuuagacaccagaacagcgagggccgggggcaggccgcugaccugaaauccacccaagccgccaucgaucagauuaauggaaagcucaacagacugaucggcaaaacaaaugaaaaguuccaccagauugagaaggaguucagcgaaguggaagggcgcauccaggaccuugagaaauacguggaggauaccaagaucgaccuguggucuuauaacgcugaacuccuggucgcgcuggagaaccaacauacaauugaucucaccgacuccgaaaugaauaaacuguuugagaagacgaaaaagcagcuucgggaaaacgccgaggauaugggaaauggcugcuucaagaucuaccacaaaugugacaacgcuugcauugggagcaucagaaauggcacauaugaucaugacguguaccgcgacgaggcccugaacaaucgguuucagauuaagggaguugaacucaaaucuggcuacaaggauuggauccuguggaucuccuucgccauuagcugcuuucuucuguguguggcucuccugggguucaucaugugggccugccagaaaggaaacauuagauguaauaucugcauuuga

SEQ ID NO: 204616 - RNA, 1701 nt, Artificial Sequence
  derived and/or modified CDS sequence (opt5) from hemagglutinin__InfluenzaA__AIJ10761
augaagaccaucauugcccugagcuacauccucugccugguguucgcucagaaacuucccggcaacgacaauuccacagccacgcugugucucgggcaccaugcggucccuaacggaaccauuguuaagacaaucaccaaugauagaauugaggugacaaacgcuaccgaacuggugcaaaauucuagcaucggcgagaucugcgacuccccgcaccagauucuugauggggaaaacuguacacugaucgacgcccuccugggagauccccagugcgacggcuuucagaauaaaaagugggaucuguucgucgagcggucuaaagccuauagcaacuguuacccuuaugacgugcccgauuacgcuucccuccgcucucugguugccagcuccgggacccuugaauuuaauaacgagagcuucaauugggcuggagugacgcaaaacggcaccucuuccgccugcauuagaggcagcaauucuuccuuuuucagccggcugaacuggcucacacaucugaauuuuaaguauccugcgcuuaacgucaccaugcccaacaaugagcaguucgacaagcuguacaucuggggagugcaccauccugggacagauaaagaccagauuuuucucuaugcccagucuuccggccgcaucaccguuagcacgaagagaucccaacaggcugugauuccgaacaucgggucucggccccgcaucagaaauauuccuagccggaucuccauuuacuggacaaucgucaaacccggagauauucugcugaucaacagcaccggcaaucucaucgccccucgcggguacuucaagauuagaucuggaaaauccagcaucaugcggucugacgcucccauuggcaaguguaagagcgaaugcaucacaccgaacggcuccauuccuaaugacaaacccuuucagaacgugaaucgcaucaccuauggggccuguccuagauacgugaagcagucuacccugaaacuugcgacaggaaugcggaacguccccgagaagcaaacgcgcggcaucuucggggccauugcuggauuuaucgaaaauggcugggaggggaugguugauggaugguauggcuucagacaccagaacagcgagggccgggggcaggccgcugaccugaaauccacccaagccgccauugaucagaucaauggaaagcucaacagacugauuggcaaaacaaaugaaaaguuccaccagaucgagaaggaauuuagcgagguggaagggcgcauucaggaccuugagaaauacguggaggauaccaagaucgaccuguggucuuauaacgcugaacuccuggucgcgcuggagaaccaacauacaaucgaucucaccgacuccgaaaugaauaaacuguucgagaagacgaaaaagcagcuucgggaaaacgccgaggauaugggaaauggcugcuuuaagauuuaccacaaaugugacaacgcuugcaucgggagcauuagaaauggcacauaugaucaugacguguaccgcaacgaggcccugaauaagcgguuccagaucaaaggaguugaacucaagucuggcuacaaagacuggauucuguggaucuccuuugccaucagcugcuuccuucugugugugguccuccugggguuuauuaugugggcuugccagaagggaaacaucagauguaauauuugcaucuga

SEQ ID NO: 204617 - RNA, 1701 nt, Artificial Sequence; identical to SEQ ID NO: 203964
  derived and/or modified CDS sequence (opt5) from hemagglutinin__InfluenzaA__AIJ10762

SEQ ID NO: 204618 - RNA, 1701 nt, Artificial Sequence; identical to SEQ ID NO: 203964
  derived and/or modified CDS sequence (opt5) from hemagglutinin__InfluenzaA__AIJ10763

SEQ ID NO: 204619 - RNA, 1701 nt, Artificial Sequence; identical to SEQ ID NO: 203964
  derived and/or modified CDS sequence (opt5) from hemagglutinin__InfluenzaA__AIJ10764

SEQ ID NO: 204620 - RNA, 1701 nt, Artificial Sequence; identical to SEQ ID NO: 203964
  derived and/or modified CDS sequence (opt5) from hemagglutinin__InfluenzaA__AIJ10765

SEQ ID NO: 204621 - RNA, 1701 nt, Artificial Sequence; identical to SEQ ID NO: 203964
  derived and/or modified CDS sequence (opt5) from hemagglutinin__InfluenzaA__AIJ10766

SEQ ID NO: 204622 - RNA, 1701 nt, Artificial Sequence; identical to SEQ ID NO: 203964
  derived and/or modified CDS sequence (opt5) from hemagglutinin__InfluenzaA__AIJ10767

SEQ ID NO: 204623 - RNA, 1701 nt, Artificial Sequence
  derived and/or modified CDS sequence (opt5) from hemagglutinin__InfluenzaA__AIJ10768
augaagaccaucauugcccugagcuacauccucugccugguguucgcucagaaacuucccggcaacgacaauuccacagccacgcugugucucgggcaccaugcggucccuaacggaaccauuguuaagacaaucaccaaugauagaauugaggugacaaacgcuaccgaacuggugcaaaauucuagcaucggcgagaucugcgacuccccgcaccagauucuugauggggaaaacuguacacugaucgacgcccuccugggagauccccagugcgacggcuuucagaauaaaaagugggaucuguucgucgagcggucuaaagccuauagcaacuguuacccuuaugacgugcccgauuacgcuucccuccgcucucugguugccagcuccgggacccuugaauuuaauaacgagagcuucaauugggcuggagugacgcaaaacggcaccucuuccgccugcauuagaggcagcaauucuuccuuuuucagccggcugaacuggcucacacaucugaauuuuaaguauccugcgcuuaacgucaccaugcccaacaaugagcaguucgacaagcuguacaucuggggagugcaccauccugggacagauaaagaccagauuuuucucuaugcccagucuuccggccgcaucaccguuagcacgaagagaucccaacaggcugugauuccgaacaucgggucucggccccgcaucagaaauauuccuagccggaucuccauuuacuggacaaucgucaaacccggagauauucugcugaucaacagcaccggcaaucucaucgccccucgcggguacuucaagauuagaucuggaaaauccagcaucaugcggucugacgcucccauuggcaaguguaagagcgaaugcaucacaccgaacggcuccauuccuaaugacaaacccuuucagaacgugaaucgcaucaccuauggggccuguccuagauacgugaagcagucuacccugaaacuugcgacaggaaugcggaacauccccgagaagcaaacgcgcggcauuuucggggccaucgcuggauuuauugaaaauggcugggaggggauggucgauggaugguauggcuucagacaccagaacagcgagggccgggggcaggccgcugaccugaaauccacccaagccgccaucgaucagauuaauggaaagcucaacagacugaucggcaaaacaaaugaaaaguuccaccagauugagaaggaauuuagcgagguugaagggcgcauccaggaccuugagaaauacguggaggauaccaagaucgaccuguggucuuauaacgcugaacuccugguggcgcuggagaaccaacauacaauugaucucaccgacuccgaaaugaauaaacuguucgagaagacgaaaaagcagcuucgggaaaacgccgaggauaugggaaauggcugcuuuaagaucuaccacaaaugugacaacgcuugcauugggagcaucagaaauggcacauaugaucaugacgucuaccgcgacgaggcccugaacaaucgguuccagauuaagggaguggaacucaaaucuggcuacaaggauuggauccuguggaucuccuuugccauuagcugcuuccuucuguguguugugcuccugggguuuaucaugugggcuugccagaaaggaaacauuagauguaauaucugcauuuga

SEQ ID NO: 204624 - RNA, 1701 nt, Artificial Sequence
  derived and/or modified CDS sequence (opt5) from hemagglutinin__InfluenzaA__AIJ10769
augaagaccaucauugcccugagcuacauccucugccugguguucgcucagaaacuucccggcaacgacaauuccacagccacgcugugucucgggcaccaugcggucccuaacggaaccauuguuaagacaaucaccaaugauagaauugaggugacaaacgcuaccgaacuggugcaaaauucuagcaucggcgagaucugcgacuccccgcaccagauucuugauggggaaaacuguacacugaucgacgcccuccugggagauccccagugcgacggcuuucagaauaaaaagugggaucuguucgucgagcggucuaaagccuauagcaacuguuacccuuaugacgugcccgauuacgcuucccuccgcucucugguugccagcuccgggacccuugaauuuaauaacgagagcuucaauugggcuggagugacgcaaaacggcaccucuuccgccugcauuagaggcagcaauucuuccuuuuucagccggcugaacuggcucacacaucugaauuuuaaguauccugcgcuuaacgucaccaugcccaacaaugagcaguucgacaagcuguacaucuggggagugcaccauccugggacagauaaagaccagauuuuucucuaugcccagucuuccggccgcaucaccguuagcacgaagagaucccaacaggcugugauuccgaacaucgggucucggccccgcaucagaaauauuccuagccggaucuccauuuacuggacaaucgucaaacccggagauauucugcugaucaacagcaccggcaaucucaucgccccucgcggguacuucaagauucagucuggaaaauccagcaucaugagaucugacgcucccauuggcaaguguaagagcgaaugcaucacaccgaacggcuccauuccuaaugacaaacccuuucagaacgugaaucggaucaccuauggggccuguccucgcuacgugaagcaaucuacccugaaacuugcgacaggaaugagaaacguccccgagaagcagacgcggggcaucuucggggccauugcuggauuuaucgaaaauggcugggaggggaugguugauggaugguauggcuuccgccaccagaacagcgagggcagagggcaagccgcugaccugaaauccacccaggccgccauugaucagaucaauggaaagcucaaccggcugauuggcaaaacaaaugaaaaguuccaccagaucgagaaggaauuuagcgagguggaagggcgcauucaagaccuugagaaauacguggaggauaccaagaucgaccuguggucuuauaacgcugaacuccuggucgcgcuggagaaccagcauacaaucgaucucaccgacuccgaaaugaauaaacuguucgagaagacgaaaaagcagcuuagagaaaacgccgaggauaugggaaauggcugcuuuaagauuuaccacaaaugugacaacgcuugcaucgggagcauucggaauggcacauaugaucaugacguguacagagacgaggcccugaacaaucgcuuccagaucaagggaguugaacucaaaucuggcuacaaggauuggauucuguggaucuccuuugccaucagcugcuuccuucugugugugguccuccugggguuuauuaugugggcuugccaaaaaggaaacauccgguguaauauuugcaucuga

SEQ ID NO: 204625 - RNA, 1701 nt, Artificial Sequence; identical to SEQ ID NO: 203964
  derived and/or modified CDS sequence (opt5) from hemagglutinin__InfluenzaA__AIJ10770

SEQ ID NO: 204626 - RNA, 1701 nt, Artificial Sequence; identical to SEQ ID NO: 203964
  derived and/or modified CDS sequence (opt5) from hemagglutinin__InfluenzaA__AIJ10771

SEQ ID NO: 204627 - RNA, 1701 nt, Artificial Sequence; identical to SEQ ID NO: 203964
  derived and/or modified CDS sequence (opt5) from hemagglutinin__InfluenzaA__AIJ10772

SEQ ID NO: 204628 - RNA, 1701 nt, Artificial Sequence; identical to SEQ ID NO: 203964
  derived and/or modified CDS sequence (opt5) from hemagglutinin__InfluenzaA__AIJ10773

SEQ ID NO: 204629 - RNA, 1701 nt, Artificial Sequence
  derived and/or modified CDS sequence (opt5) from hemagglutinin__InfluenzaA__AIJ10774
augaagaccaucauugcccugagcuacauccucugccugguguucgcucagaaacuucccggcaacgacaauuccacagccacgcugugucucgggcaccaugcggucccuaacggaaccauuguuaagacaaucaccaaugauagaauugaggugacaaacgcuaccgaacuggugcaaaauucuagcaucggcgagaucugcaacuccccgcaccagauucuugacggggaaaauuguacacugaucgaugcccuccugggagacccccagugcgauggcuuucagaacaaaaagugggaccuguucgucgagcggucuaaagccuauagcaauuguuacccuuaugaugugcccgacuacgcuucccuccgcucucugguugccagcuccgggacccuugaauuuaacaaugagagcuucaacugggcuggagugacgcaaaauggcaccucuuccgccugcauuagaggcagcaacucuuccuuuuucagccggcugaauuggcucacacaucugaacuuuaaguauccugcgcuuaacgucaccaugcccaauaacgagcaguucgauaagcuguacaucuggggagugcaccauccugggacagacaaagaucagauuuuucucuaugcccagucuuccggccgcaucaccguuagcacgaagagaucccaacaggcugugauuccgaauaucgggucucggccccgcaucagaaacauuccuagccggaucuccauuuacuggacaaucgucaaacccggagacauucugcugaucaauagcaccggcaaccucaucgccccucgcggguacuucaagauuagaucuggaaaauccagcaucaugcggucugaugcucccauuggcaaguguaagagcgaaugcaucacaccgaauggcuccauuccuaacgacaaacccuuucagaaugugaaccgcaucaccuauggggccuguccuagauacgugaagcagucuacccugaaacuugcgacaggaaugcggaauguccccgagaagcaaacgcgcggcaucuucggggccauugcuggauuuaucgaaaacggcugggaggggaugauggacggaugguauggcuucagacaccagaauagcgagggccgggggcaggccgcugaucugaaauccacccaaagcgccauugaccagaucaacggaaagcucaauagacugauuggcaaaacaaacgaaaaguuccaccagaucgagaaggaauuuucugagguugaagggcgcauucaggaucuugagaaauacguggaggacaccaagaucgaucugugguccuauaacgccgaacuccugguggcucuggagaaucaacauacaaucgaccucaccgauagcgaaaugaacaaacuguucgagaagacgaaaaagcagcuucgggaaaaugcggaggacaugggaaacggcugcuuuaagauuuaccacaaaugugauaaugccugcaucgggucuauuagaaacggcacauaugaccaugaugucuaccgcgacgaggcucugaauaaccgguuccagaucaagggaguggaacucaaauccggcuacaaggacuggauucuguggaucagcuuugccaucuccugcuuccuucuguguguugugcuccugggguuuauuaugugggccugccagaaaggaaauaucagauguaacauuugcaucuga

SEQ ID NO: 204630 - RNA, 1701 nt, Artificial Sequence
  derived and/or modified CDS sequence (opt5) from hemagglutinin__InfluenzaA__AIJ10776
augaagaccaucauugcccugagcugcauccucugucugguguucgcucagaaacuucccggcaacgacaauuccacagccacgcugugccucgggcaccaugcggucccuaacggaaccauuguuaagacaaucaccaaugauagaauugaggugacaaacgcuaccgaacuggugcaaaauucuagcaucggcgagaucugugacuccccgcaccagauucuugauggggaaaacugcacacugaucgacgcccuccugggagauccccagugugacggcuuucagaauaaaaagugggaucuguucgucgagcggucuaaagccuacagcaacugcuauccuuacgacgugcccgauuaugcuucccuccgcucucugguugccagcuccgggacccuugaauuuaauaacgagagcuucaauugggcuggagugacgcaaaacggcaccucuuccgccuguauuagaggcagcaauucuuccuuuuucagccggcugaacuggcucacacaucugaauuuuaaguacccugcgcuuaacgucaccaugcccaacaaugagcaguucgacaagcuguauaucuggggagugcaccauccugggacagauaaagaccagauuuuucucuacgcccagucuuccggccgcaucaccguuagcacgaagagaucccaacaggcugugauuccgaacaucgggucucggccccgcaucagaaauauuccuagccggaucuccauuuauuggacaaucgucaaacccggagauauucugcugaucaacagcaccggcaaucucaucgccccucgcggguacuucaagauuagaucuggaaaauccagcaucaugcggucugacgcucccauuggcaagugcaagagcgaauguaucacaccgaacggcuccauuccuaaugacaaacccuuucagaacgugaaucgcaucaccuacggggccugcccuagauaugugaagcagucuacccugaaacuugcgacaggaaugcggaacguccccgagaagcaaacgcgcggcaucuucggggccauugcuggauuuaucgaaaauggcugggaggggaugguugauggaugguacggcuucagacaccagaacagcgagggccgggggcaggccgcugaccugaaauccacccaagccgccauugaucagaucaauggaaagcucaacagacugauuggcaaaacaaaugaaaaguuccaccagaucgagaaggaauuuagcgagguggaagggcgcauucaggaccuugagaaauauguggaggauaccaagaucgaccuguggucuuacaacgcugaacuccuggucgcgcuggagaaccaacauacaaucgaucucaccgacuccgaaaugagcaaacuguucgagaagacgaaaaagcagcuucgggaaaaugccgaggauaugggaaacggcuguuuuaagauuuaucacaaaugcgacaaugcuugcaucgggucuauuagaaacggcacauacgaucaugacguguaucgcgacgaggcccugaauaaccgguuccagaucaagggaguugaacucaaauccggcuacaaggauuggauucuguggaucagcuuugccaucuccuguuuccuucugugcgugguccuccugggguuuauuaugugggcuugucagaaaggaaauaucagaugcaacauuuguaucuga

SEQ ID NO: 204631 - RNA, 1701 nt, Artificial Sequence; identical to SEQ ID NO: 203964
  derived and/or modified CDS sequence (opt5) from hemagglutinin__InfluenzaA__AIJ10777

SEQ ID NO: 204632 - RNA, 1701 nt, Artificial Sequence; identical to SEQ ID NO: 203964
  derived and/or modified CDS sequence (opt5) from hemagglutinin__InfluenzaA__AIJ10778

SEQ ID NO: 204633 - RNA, 1701 nt, Artificial Sequence
  derived and/or modified CDS sequence (opt5) from hemagglutinin__InfluenzaA__AIJ10780
augaagaccaucauugcccugagcuacauccucugccugguguucgcucagaaacuucccggcaacgacaauuccacagccacgcugugucucgggcaccaugcggucccuaacggaaccauuguuaagacaaucaccaaugauagaauugaggugacaaacgcuaccgaacuggugcaaaauucuagcaucggcgagaucugcgacuccccgcaccagauucuugauggggaaaacuguacacugaucgacgcccuccugggagauccccagugcgacucuuuucagaauaaaaagugggaucuguucgucgagcggagcaaagccuauuccaacuguuacccuuaugacgugcccgauuacgcuucucuccgcagccugguugccuccagcggcacccuugaauuuaauaacgagucuuucaauugggcuggggugacgcaaaacggaaccuccagcgccugcauuagaggcucuaauuccagcuuuuucucucggcugaacuggcucacacauuccaauuuuaaguauccugcgcugaacgucaccaugcccaacaaugagcaguucgacaaacuuuacaucuggggcgugcaccauccugggacagauaaggaccagauuuuucuguaugcccagagcuccggacgcaucaccguuucuacgaagagaagccaacaggcugugauuccgaacaucggcucccggccccgcaucagaaauauuccuagccggaucucuauuuacuggacaaucgucaaacccggggauauucuccugaucaacuccaccggaaaucugaucgccccucgcggcuacuucaagauuagaagcgggaaaucuagcaucaugcgguccgacgcucccauuggaaaguguaagucugaaugcaucacaccgaacggcagcauuccuaaugacaaacccuuucagaacgugaaucgcaucaccuauggcgccuguccuagauacgugaagcaguccacccucaaacuggcgacagggaugcggaacguccccgagaagcaaacgcgcggaaucuucggcgccauugcuggguuuaucgaaaauggaugggagggcaugauggaugggugguauggauucagacaccagaacagcgagggccggggccaggccgcugaccuuaaaucuacccaagccgccauugaucagaucaaugggaagcugaacagacucauuggaaaaacaaaugaaaaguuccaccagaucgagaaggaauuuuccgagguugaaggccgcauucaggacaucgagaaauacguggaggauaccaagaucgaccuguggagcuauaacgcugaacuucugguggcgcucgagaaccaacauacaauugaucugaccgacucugaaaugaauaaacuguucgagaagacgaaaaagcagcuccgggaaaacgccgaggauauggggaauggaugcuuuaagaucuaccacaaaugugacaacgcuugcauuggcuccaucagaaaugggacauaugaucaugacgucuaccgcgacgaggcccugaacaaucgguuccagauuaagggcguggaacuuaaaagcggauacaaggauuggauccuguggaucuccuuugccauuucuugcuuccuccuguguguugcccuucugggcuuuaucaugugggcuugccagaaagggaacauuagauguaauaucugcauuuga

SEQ ID NO: 204634 - RNA, 1701 nt, Artificial Sequence; identical to SEQ ID NO: 203964
  derived and/or modified CDS sequence (opt5) from hemagglutinin__InfluenzaA__AIJ10781

SEQ ID NO: 204635 - RNA, 1701 nt, Artificial Sequence; identical to SEQ ID NO: 203964
  derived and/or modified CDS sequence (opt5) from hemagglutinin__InfluenzaA__AIJ10782

SEQ ID NO: 204636 - RNA, 1701 nt, Artificial Sequence
  derived and/or modified CDS sequence (opt5) from hemagglutinin__InfluenzaA__AIJ10783
augaagaccaucauugcccugagcuacauccucugccugguguucgcucagaaacuucccggcaacgacaauuccacagccacgcugugucucgggcaccaugcggucccuaacggaaccauuguuaagacaaucaccaaugauagaauugaggugacaaacgcuaccgaacuggugcaaaauucuagcaucggcgagaucugcgacuccccgcaccagauucuugauggggaaaacuguacacugaucgacgcccuccugggagauccccagugcgacggcuuucagaauaaaaagugggaucuguucgucgagcggucuaaagccuauagcaacuguuacccuuaugacgugcccgauuacgcuucccuccgcucucugguugccagcuccgggacccuugaauuuaauaacgagagcuucaauugggugggagucacgcaaaacggcaccucuuccgcuugcauuagaggcagcaauucuuccuuuuucagccggcugaacuggcucacacaucugaauuuuaaguauccugcccuuaacgugaccaugcccaacaaugagcaguucgacaagcuguacaucuggggaguucaccauccugggacagauaaagaccagauuuuucucuaugcgcagucuuccggccgcaucaccgugagcacgaagagaucccaacaggccgucauuccgaacaucgggucucggccccgcaucagaaauauuccuagccggaucuccauuuacuggacaaucgugaaacccggagauauucugcugaucaacagcaccggcaaucucaucgcuccucgcggguacuucaagauuagaucuggaaaauccagcaucaugcggucugacgcccccauuggcaaguguaagagcgaaugcaucacaccgaacggcuccauuccuaaugacaaacccuuucagaacgugaaucgcaucaccuauggggcuuguccuagauacgucaagcagucuacccugaaacuugccacaggaaugcggaacguucccgagaagcaaacgcgcggcaucuucggggcgauugccggauuuaucgaaaauggcugggaggggaugaaagauggaugguauggcuucagacaccagaacagcgagggccgggggcaggcugccgaccugaaguccacccaagcugccauugaucagaucaauggaaaacucaacagacugauuggcaagacaaaugaaaaguuccaccagaucgagaaagaauuuagcgagguggaagggcgcauucaggaccuugagaaguacguggaggauaccaaaaucgaccuguggucuuauaacgccgaacuccuggucgcucuggagaaccaacauacaaucgaucucaccgacuccgaaaugaauaagcuguucgagaaaacgaagaagcagcuucgggaaaacgcggaggauaugggaaauggcugcuuuaaaauuuaccacaagugugacaacgccugcaucgggagcauuagaaauggcacauaugaucaugacguguaccgcgacgaggcucugaacaaucgguuccagaucaaaggaguugaacucaagucuggcuacaaagauuggauucuguggaucuccuuugccaucagcugcuuccuucuguguguggcccuccugggguuuauuaugugggcuugccagaagggaaacaucagauguaauauuugcaucuga

SEQ ID NO: 204637 - RNA, 1701 nt, Artificial Sequence; identical to SEQ ID NO: 204636
  derived and/or modified CDS sequence (opt5) from hemagglutinin__InfluenzaA__AIJ10784

SEQ ID NO: 204638 - RNA, 1701 nt, Artificial Sequence
  derived and/or modified CDS sequence (opt5) from hemagglutinin__InfluenzaA__AIJ10785
augaagaccaucauugcccugagcuacauccucugccugguguucgcucagaaacuucccggcaacgacaauuccacagccacgcugugucucgggcaccaugcggucccuaacggaaccauuguuaagacaaucaccaaugauagaauugaggugacaaacgcuaccgaacuggugcaaaauucuagcaucggcgagaucugcaacuccccgcaccagauucuugacggggaaaauuguacacugaucgaugcccuccugggagacccccagugcgauggcuuucagaacaaaaagugggaccuguucgucgagcggucuaaagccuauagcaauuguuacccuuaugaugugcccgacuacgcuucccuccgcucucugguugccagcuccgggacccuugaauuuaacaaugagagcuucaacugggcuggagugacgcaaaauggcaccucuuccgccugcauuagaggcagcaacucuuccuuuuucagccggcugaauuggcucacacaucugaacuuuaaguauccugcgcuuaacgucaccaugcccaauaacgagcaguucgauaagcuguacaucuggggagugcaccauccugggacagacaaagaucagauuuuucucuaugcccagucuuccggccgcaucaccguuagcacgaagagaucccaacaggcugugauuccgaauaucgggucucggccccgcaucagaaacauuccuagccggaucuccauuuacuggacaaucgucaaacccggagacauucugcugaucaauagcaccggcaaccucaucgccccucgcggguacuucaagauuagaucuggaaaauccagcaucaugcggucugaugcucccauuggcaaguguaagagcgaaugcaucacaccgaauggcuccauuccuaacgacaaacccuuucagaaugugaaccgcaucaccuauggggccuguccuagauacgugaagcagucuacccugaaacuugcgacaggaaugcggaauguccccgagaagcaaacgcgcggcaucuucggggccauugcuggauuuaucgaaaacggcugggaggggaugauggacggaugguauggcuucagacaccagaauagcgagggccgggggcaggccgcugaucugaaauccacccaaagcgccauugaccagaucaacggaaagcucaauagacugauuggcaaaacaaacgaaaaguuccaccagaucgagaaggaauuuucugagguugaagggcgcauucaggaucuugagaaauacguggaggacaccaagaucgaucugugguccuauaacgccgaacuccugguggcucuggagaaucaacauacaaucgaccucaccgauagcgaaaugaacaaacuguucgagaagacgaaaaagcagcuucgggaaaaugcggaggacaugggaaacggcugcuuuaagauuuaccacaaaugugauaaugccugcaucgggucuauuagaaacggcacauaugaccaugaugucuaccgcgacgaggcucugaauaaccgguuccagaucaagggaguggaacucaaauccggcuacaaggacuggauucuguggaucagcuuugccaucuccugcuuccuucuguguguugcccuccugggguuuauuaugugggcuugccagaaaggaaauaucagauguaacauuugcaucuga

SEQ ID NO: 204639 - RNA, 1701 nt, Artificial Sequence; identical to SEQ ID NO: 204636
  derived and/or modified CDS sequence (opt5) from hemagglutinin__InfluenzaA__AIJ10786

SEQ ID NO: 204640 - RNA, 1701 nt, Artificial Sequence
  derived and/or modified CDS sequence (opt5) from hemagglutinin__InfluenzaA__AIJ10787
augaagaccaucauugcccugagcuacauccucugccugguguucgcucagaaacuucccggcaacgacaauuccacagccacgcugugucucgggcaccaugcggucccuaacggaaccauuguuaagacaaucaccaaugauagaauugaggugacaaacgcuaccgaacuggugcaaaauucuagcaucggcgagaucugcgacuccccgcaccagauucuugauggggaaaacuguacacugaucgacgcccuccugggagauccccagugcgacggcuuucagaauaaaaagugggaucuguucgucgagcggucuaaagccuauagcaacuguuacccuuaugacgugcccgauuacgcuucccuccgcucucugguugccagcuccgggacccuugaauuuaauaacgagagcuucaauugggugggagucacgcaaaacggcaccucuuccgcuugcauuagaggcagcaauucuuccuuuuucagccggcugaacuggcucacacaucugaauuuuaaguauccugcccuuaacgugaccaugcccaacaaugagcaguucgacaagcuguacaucuggggaguucaccauccugggacagauaaagaccagauuuuucucuaugcgcagucuuccggccgcaucaccgugagcacgaagagaucccaacaggccgucauuccgaacaucgggucucggccccgcaucagaaauauuccuagccggaucuccauuuacuggacaaucgugaaacccggagauauucugcugaucaacagcaccggcaaucucaucgcuccucgcggguacuucaagauuagaucuggaaaauccagcaucaugcggucugacgcccccauuggcaaguguaagagcgaaugcaucacaccgaacggcuccauuccuaaugacaaacccuuucagaacgugaaucgcaucaccuauggggcuuguccuagauacgucaagcagucuacccugaaacuugccacaggaaugcggaacguucccgagaagcaaacgcgcggcaucuucggggcgauugccggauuuaucgaaaauggcugggaggggaugaaagauggaugguauggcuucagacaccagaacagcgagggccgggggcaggcugccgaccugaaguccacccaagcugccauugaucagaucaauggaaaacucaacagacugauuggcaagacaaaugaaaaguuccaccagaucgagaaagaauuuagcgagguggaagggcgcauucaggaccuugagaaguacguggaggauaccaaaaucgaccuguggucuuauaacgccgaacuccuggucgcucuggagaaccaacauacaaucgaucucaccgacuccgaaaugaauaagcuguucgagaaaacgaagaagcagcuucgggaaaacgcggaggauaugggaaauggcugcuuuaaaauuuaccacaagugugacaacgccugcaucgggagcauuagaaauggcacauaugaucaugacguguaccgcgacgaggcucugaacaaucgguucagaaucaaaggaguugaacucaagucuggcuacaaagauuggauucuguggaucuccuuugccaucagcugcuuccuucuguguguggcccuccugggguuuauuaugugggcuugccagaagggaaacauccgcuguaauauuugcaucuga

SEQ ID NO: 204641 - RNA, 1701 nt, Artificial Sequence; identical to SEQ ID NO: 204638
  derived and/or modified CDS sequence (opt5) from hemagglutinin__InfluenzaA__AIJ10788

SEQ ID NO: 204642 - RNA, 1701 nt, Artificial Sequence; identical to SEQ ID NO: 204638
  derived and/or modified CDS sequence (opt5) from hemagglutinin__InfluenzaA__AIJ10789

SEQ ID NO: 204643 - RNA, 1701 nt, Artificial Sequence; identical to SEQ ID NO: 204636
  derived and/or modified CDS sequence (opt5) from hemagglutinin__InfluenzaA__AIJ10790

SEQ ID NO: 204644 - RNA, 1701 nt, Artificial Sequence; identical to SEQ ID NO: 203964
  derived and/or modified CDS sequence (opt5) from hemagglutinin__InfluenzaA__AIJ10791

SEQ ID NO: 204645 - RNA, 1701 nt, Artificial Sequence
  derived and/or modified CDS sequence (opt5) from hemagglutinin__InfluenzaA__AIJ10792
augaagaccaucauugcccugagcuacauccucugccugguguucgcucagaaacuucccggcgacgauaacuccacagccacgcugugucucgggcaccaugcggucccuaauggaaccauuguuaagacaaucaccaacgacagaauugaggugacaaaugcuaccgaacuggugcaaaacucuagcaucggcgagaucugcgauuccccgcaccagauucuugacggggaaaauuguacacugaucgaugcccuccugggagacccccagugcgauggcuuucagaacaaaaagugggaccuguucgucgagcggucuaaagccuauagcaauuguuacccuuaugaugugcccgacuacgcuucccuccgcucucugguugccagcuccgggacccuugaauuuaacaaugagagcuucaacugggcuggagugacgcaaaauggcaccucuuccgccugcauuagaggcagcaacucuuccuuuuucagccggcugaauuggcucacacaucugaacuuuaaguauccugcgcuuaaugucaccaugcccaacaacgagcaguucgauaagcuguacaucuggggagugcaccauccugggacagacaaagaucagauuuuucucuaugcccagucuuccggccgcaucaccguuagcacgaagagaucccaacaggcugugauuccgaauaucgggucucggccccgcaucagaaacauuccuagccggaucuccauuuacuggacaaucgucaaacccggagacauucugcugaucaauagcaccggcaaccucaucgccccucgcggguacuucaagauuagaucuggaaaauccagcaucaugcggucugacgcucccauuggcaaguguaagagcgaaugcaucacaccgaauggcuccauuccuaacgauaaacccuuucagaaugugaaccgcaucaccuauggggccuguccuagauacgugaagcagucuacccugaaacuugcgacaggaaugcggaauguccccgagaagcaaacgcgcggcaucuucggggccauugcuggauuuaucgaaaacggcugggaggggaugguugacggaugguauggcuucagacaccagaauagcgagggccgggggcaggccgcugaucugaaauccacccaagccgccauugaccagaucaacggaaagcucaauagacugauuggcaaaacaaacgaaaaguuccaccagaucgagaaggaauuuagcgagguggaagggcgcauucaggaucuugagaaauacguggaggacaccaagaucgaucuguggucuuauaaugcugaacuccuggucgcgcuggagaaccaacauacaaucgaccucaccgauuccgaaaugaacaaacuguucgagaagacgaaaaagcagcuucgggaaaaugccgaggacaugggaaacggcugcuuuaagauuuaccacaaaugugauaaugcuugcaucgggagcauuagaaacggcacauaugaccaugacguguaccgcgaugaggcccugaauaaccgguuccagaucaagggaguugaacucaaaucuggcuacaaggacuggauucuguggaucuccuuugccaucagcugcuuccuucugugugugguccuccugggguuuauuaugugggcuugccagaaaggaaauaucagauguaacauuugcaucuga

SEQ ID NO: 204646 - RNA, 1701 nt, Artificial Sequence; identical to SEQ ID NO: 201955
  derived and/or modified CDS sequence (opt5) from hemagglutinin__InfluenzaA__AIJ29347

SEQ ID NO: 204647 - RNA, 1701 nt, Artificial Sequence
  derived and/or modified CDS sequence (opt5) from hemagglutinin__InfluenzaA__AIJ29349
augaagaccaucauugcccugagcuacauccucugccugguguucgcucagaaauuucccggcaacgacaauuccacagccacgcuuugucuggggcaccaugcggucccuaacggaaccauuguuaagacaaucaccaaugauagaauugaggugacaaacgcuaccgaacucgugcaaaauucuagcaucggcgagaucugcgacuccccgcaccagauucuggauggggaaaacuguacacuuaucgacgcccugcucggagauccccagugcgacggcuuccagaauaaaaagugggaucuguuugucgagcggucuaaagccuauagcaacuguuacccuuaugacgugcccgauuacgcuucccugcgcucucucguugccagcuccgggacccuggaauuuaauaacgagagcuucaauuggacgggagugacccaaaacggcacaucuuccgcuugcauuagacggagcaauucuuccuucuuuagccgccuuaacuggcugacccaucucaauuucaaguauccugcccugaacgucacaaugcccaacaaugagcaguuugacaaacuuuacaucuggggcgugcaccauccugggaccgauaaagaccagauuuuccuguaugcgcagucuuccggaagaaucacgguuagcacaaagcggucccaacaggccgugauuccgaacaucggcucucgccccagaauccggaauauuccuagccgcaucuccauuuacuggaccaucgucaaacccggggauauucuccugaucaacagcacaggaaaucugaucgcuccuagaggcuacuuuaagauucggucugggaaauccagcaucaugcgcucugacgcccccauuggaaaguguaagagcgaaugcaucaccccgaacggcuccauuccuaaugacaaacccuuccagaacgugaauagaaucaccuauggcgcuuguccucgguacgugaagcagucuacacucaaacuggccacggggaugcgcaacguccccgagaagcaaaccagaggaaucuuuggcgcgauugccggguucaucgaaaauggaugggagggcaugguugaugggugguauggauuccggcaccagaacagcgagggcagaggccaggcugccgaccuuaaauccacacaagcugccauugaucagaucaaugggaagcugaaccgccucauuggaaaaaccaaugaaaaguuucaccagaucgagaaggaguucagcgaaguggaaggccggauucaggaccuggagaaauacguggaggauacaaagaucgaccuuuggucuuauaacgccgaacugcucgucgcucuggagaaccaacauaccaucgaucugacggacuccgaaaugaauaaacucuuugagaagacaaagaagcagcugagagaaaacgcggaggauauggggaauggaugcuucaagauuuaccacaaaugugacaacgccugcaucggcagcauucgcaaugggaccuaugaucaugacguguaccgggacgaggcucuuaacaauagauuucagaucaagggcguugaacugaaaucuggauacaaggauuggauucucuggaucuccuucgccaucagcugcuuucugcuuuguguggcccugcucggcuucauuaugugggcuugccagaaagggaacauccgcuguaauauuugcaucuga

SEQ ID NO: 204648 - RNA, 1701 nt, Artificial Sequence
  derived and/or modified CDS sequence (opt5) from hemagglutinin__InfluenzaA__AIJ29351
augaagaccaucauugcccugagcuacauccucugccugguguucgcucagaaacuucccggcaacgacaauuccacagccacgcugugucucgggcaccaugcggucccuaacggaaccauuguuaagacaaucaccaaugauagaauugaggugacaaacgcuaccgaacuggugcaaaauucuagcaucggcgagaucugcgacuccccgcaccagauucuugauggggaaaacuguacacugaucgacgcccuccugggagauccccagugcgacggcuuucagaauaaaaagugggaucuguucgucgagcggucuaaagccuauagcaacuguuacccuuaugacgugcccgauuacgcuucccuccgcucucugguugccagcuccgggacccuugaauuuaauaacgagagcuucaauuggacgggagugacccaaaacggcacaucuuccgcuugcauuagacggagcaauucuuccuuuuucagccgccugaacuggcucacccaucugaauuuuaaguauccugcccuuaacgucacaaugcccaacaaugagcaguucgacaagcuguacaucuggggcgugcaccauccugggaccgauaaagaccagauuuuucucuaugcgcagucuuccggaagaaucacgguuagcacaaagcggucccaacaggccgugauuccgaacaucggcucucgccccagaauccggaauauuccuagccgcaucuccauuuacuggaccaucgucaaacccggggauauucugcugaucaacagcacaggaaaucucaucgcuccuagaggcuacuucaagauucggucugggaaauccagcaucaugcgcucugacgcccccauuggaaaguguaagagcgaaugcaucaccccgaacggcuccauuccuaaugacaaacccuuucagaacgugaauagaaucaccuauggcgcuuguccucgguacgugaagcagucuacacugaaacuugccacggggaugcgcaacguccccgagaagcaaaccagaggaaucuucggcgcgauugccggguuuaucgaaaauggaugggagggcaugguugaugggugguauggauuccggcaccagaacagcgagggcagaggccaggcugccgaccugaaauccacacaagcugccauugaucagaucaaugggaagcucaaccgccugauuggaaaaaccaaugaaaaguuccaccagaucgagaaggaauuuagcgagguggaaggccggauucaggaccuugagaaauacguggaggauacaaagaucgaccuguggucuuauaacgccgaacuccuggucgcucuggagaaccaacauaccaucgaucucacggacuccgaaaugaauaaacuguucgagaagaccaaaaagcagcuuagagaaaacgcggaggauauggggaauggaugcuuuaagauuuaccacaaaugugacaacgccugcaucggcagcauucgcaaugggacauaugaucaugacguguaccgggacgaggcucugaacaauagauuccagaucaagggcguugaacucaaaucuggauacaaggauuggauucuguggaucuccuuugccaucagcugccuucugcucuguguggcccugcugggcuucauuaugugggcuugccagaaagggaacauccgcuguaauauuugcaucuga

SEQ ID NO: 204649 - RNA, 1701 nt, Artificial Sequence; identical to SEQ ID NO: 201552
  derived and/or modified CDS sequence (opt5) from hemagglutinin__InfluenzaA__AIJ29353

SEQ ID NO: 204650 - RNA, 1701 nt, Artificial Sequence
  derived and/or modified CDS sequence (opt5) from hemagglutinin__InfluenzaA__AIJ29355
augaagaccaucauugcccugagcuacauccucugccugguguucgcucagaaacuucccggcaacgacaauuccacagccacgcugugucucgggcaccaugcggucccuaacggaaccauuguuaagacaaucaccaaugaucaaauugaggugacaaacgcuaccgaacuggugcagucuagcuccacaggcgagaucugcgacucuccgcaccagauccuugauggggaaaauuguacccugauugacgcccuccugggagauccccagugcgacggcuuucaaaacaaaaagugggaucuguucgucgagagaagcaaagccuauuccaauuguuacccuuaugacgugcccgauuacgcuucucuccggagccugguugccuccagcgggacgcuugaauuuaacaaugagucuuucaacuggaccggagugacacagaauggcaccuccagcgcuugcauccgcagaucuaacuccagcuuuuucucucggcugaauuggcucacacaucugaacuuuaaguauccugcccuuaaugucaccaugcccaacaacgagcaguucgacaagcuguacauuuggggcgugcaccauccugggacggauaaagaccagaucuuucucuaugcgcaauccagcggacgcauuacaguuuccaccaagagaucucagcaggccgugaucccgaauauuggcagccggucccgcaucagaaacauccccagccggauuucuaucuacuggacaauugucaaaccuggggauauccugcugauuaauuccaccggaaaccucaucgcuccccgcggcuacuucaagaucagaagcgggaaaucuagcauuaugcgguccgacgccccuaucggaaaguguaauucugaaugcauuacccccaacggcagcaucccgaaugacaagccuuuucagaacgugaaucgcauuacauauggcgcuugucccagauacgugaaacaauccacgcugaaacuugccaccgggaugcggaacgucccugagaagcagacacgcggaaucuucggcgcgaucgccggguuuauugaaaauggaugggagggcaugguugaugggugguauggauucagacaccagaacagcgagggccggggccaagcugccgaccugaagucuacccaggcugccaucgaucagauuaaugggaaacucaacagacugaucggaaagacaaaugaaaaauuccaccagauugagaaggaauuuuccgagguggaaggccgcauccaagaccuugagaaguacguggaggauaccaaaauugaccuguggagcuauaacgccgaacuccuggucgcucuggagaaccagcauacgaucgaucucacagacucugaaaugaauaagcuguucgagaaaaccaagaaacagcuucgggaaaacgcggaggauauggggaauggaugcuuuaagaucuaccacaagugugacaacgccugcauuggcuccaucagaaaugggaccuauaaccaugauguguaccgcgacgaggcucugaauaaccgguuccagauuaaaggcguugaacucaagagcggauacaaagacuggauccuguggauuuccuuugccaucucuugcuuccuucuguguguggcccuccugggcuuuaucaugugggcuugccaaaaggggaauauuagauguaacaucugcauuuga

SEQ ID NO: 204651 - RNA, 1701 nt, Artificial Sequence; identical to SEQ ID NO: 201146
  derived and/or modified CDS sequence (opt5) from hemagglutinin__InfluenzaA__AIJ29357

SEQ ID NO: 204652 - RNA, 1701 nt, Artificial Sequence
  derived and/or modified CDS sequence (opt5) from hemagglutinin__InfluenzaA__AIJ29359
augaagaccaucauugcccugagcuacauccucugccugguguucgcucagaaacuucccggcaacgacaauuccacagccacgcugugucucgggcaccaugcggucccuaacggaaccauuguuaagacaaucaccaaugauagaauugaggugacaaacgcuaccgaacuggugcaaaauucuagcaucggcgagaucugcgacuccccgcaccagauucuugauggggaaaacuguacacugaucgacgcccuccugggagauccccagugcgacggcuuucagaauaaaaagugggaucuguucgucgagcggucuaaagccuauagcaacuguuacccuuaugacgugcccgauuacgcuucccuccgcucucugguugccagcuccgggacccuugaauuuaauaacgagagcuucaauuggacgggagugacccaaaacggcacaucuuccgcuugcauuagacggagcaauaacuccuuuuucucucgccugaauuggcucacccaucugaacuuuaaguauccugcccuuaacgucacaaugcccaauaacgagcaguucgacaagcuguacaucuggggcgugcaccauccugggaccgauaaagaccagauuuuucucuaugcgcagagcucuggaagaaucacgguuuccacaaagcggagccaacaggccgugauuccgaauaucggcucccgccccagaauccggaacauuccuucucgcaucagcauuuacuggaccaucgucaaacccggggauauucugcugaucaauuccacaggaaaccucaucgcuccuagaggcuacuucaagauucggagcgggaaaucuuccaucaugcgcagcgacgcccccauuggaaaguguaagucugaaugcaucaccccgaauggcagcauuccuaacgacaaacccuuucagaaugugaacagaaucaccuauggcgcuuguccucgguacgugaagcaguccacacugaaacuugccacggggaugcgcaauguccccgagaagcaaaccagaggaaucuucggcgcgauugccggguuuaucgaaaacggaugggagggcaugguugaugggugguauggauuccggcaccaaaauucugagggcagaggccaggcugccgaccugaaaagcacacaggcugccauugaucagaucaacgggaagcucaaucgccugauuggaaaaaccaacgaaaaguuccaccagaucgagaaggaauuuuccgagguggaaggccggauucaggaccuugagaaauacguggaggauacaaagaucgaccuguggagcuauaacgccgaacuccuggucgcucuggagaaucaacauaccaucgaucucacggacucugaaaugaacaaacuguucgagaagaccaaaaagcagcuuagagaaaaugcggaggauauggggaacggaugcuuuaagauuuaccacaaaugugacaaugccugcaucggcuccauucgcaacgggacauaugaucaugacguguaccgggacgaggcuaucaauaacagauuccagauuaagggcguugaacugaaaagcggauacaaggauuggauccucuggaucucuuuugccauuuccugcuuccugcuuuguguggcccugcucggcuuuaucaugugggcuugccagaaagggaauauucgcuguaacaucugcauuuga

SEQ ID NO: 204653 - RNA, 1701 nt, Artificial Sequence
  derived and/or modified CDS sequence (opt5) from hemagglutinin__InfluenzaA__AIJ29361
augaagaccaucauugcccugagcuacauccucugccugguguucgcucagaaacuucccggcaacgacaauuccacagccacgcugugucucgggcaccaugcggucccuaacggaaccauuguuaagacaaucaccaaugauagaauugaggugacaaacgcuaccgaacuggugcaaaauucuagcaucggcgagaucugcgacuccccgcaccagauucuugauggggaaaacuguacacugaucgacgcccuccugggagauccccagugcgacggcuuucagaauaaaaagugggaucuguucgucgagcggucuaaagccuauagcaacuguuacccuuaugacgugcccgauuacguuucccuccgcucucugguggcuagcuccgggacccuugaauuuaauaacgagagcuucaauuggacgggagucacccaaaacggcacaucuuccgccugcauuagacggagcaauaacuccuuuuucucucgccugaauuggcucacccaucugaacuuuaaguauccugcucuuaacgugacaaugcccaauaacgagcaguucgacaagcuguacaucuggggcguucaccauccugggaccgauaaagaccagauuuuucucuaugcccagagcucuggaagaaucacgguguccacaaagcggagccaacaggcggucauuccgaauaucggcucccgccccagaauccggaacauuccuucucgcaucagcauuuacuggaccaucgugaaacccggggauauucugcugaucaauuccacaggaaaccucaucgccccuagaggcuacuucaagauucggagcgggaaaucuuccaucaugcgcagcgacgcucccauuggaaaguguaagucugaaugcaucaccccgaauggcagcauuccuaacgacaaacccuuucagaaugugaacagaaucaccuauggcgccuguccucgguacgucaagcaguccacacugaaacuugcuacggggaugcgcaauguucccgagaagcaaaccagaggaaucuucggcgccauugcgggguuuaucgaaaacggaugggagggcaugguggaugggugguauggauuccggcaccaaaauucugagggcagaggccaggccgcugaccugaaaagcacacaggccgcuauugaucagaucaacgggaagcucaaucgccugauuggaaaaaccaacgaaaaguuccaccagaucgagaaggaauuuuccgagguggaaggccggauucaggaccuugagaaauacgucgaggauacaaagaucgaccuguggagcuauaacgccgaacuccugguggcccuggagaaucaacauaccaucgaucucacggacucugaaaugaacaaacuguucgagaagaccaaaaagcagcuuagagaaaaugcugaggauauggggaacggaugcuuuaagauuuaccacaaaugugacaaugcgugcaucggcuccauucgcaacgggacauaugaucaugacguuuaccgggacgaggcccugaauaacagauuccagaucaagggcguggaacucaaaagcggauacaaggauuggauucuguggaucucuuuugcuaucuccugcuuccuucugugugucgcccuccugggcuuuauuaugugggccugccagaaagggaauauccgcuguaacauuugcaucuga

SEQ ID NO: 204654 - RNA, 1701 nt, Artificial Sequence; identical to SEQ ID NO: 202112
  derived and/or modified CDS sequence (opt5) from hemagglutinin__InfluenzaA__AIL93623

SEQ ID NO: 204655 - RNA, 1701 nt, Artificial Sequence
  derived and/or modified CDS sequence (opt5) from hemagglutinin__InfluenzaA__AIL93634
augaaggccauccuggugguccuccuguacaccuucgcuacagccaacgcggacacgcuuugcauuggcuaucacgcuaauaacagcaccgauacaguugacaccgugcuggagaagaaugugacagucacccauuccgugaaccuccuggaagauaagcacaaugggaaacuuuguaagcugagaggaguugcuccccuccaucugggcaaaugcaacaucgccggguggauucugggaaauccugagugugaaucucucagcacagccuccucuuggagcuacaucguggagaccuccucuagcgacaacggcacgugcuauccgggggauuuuauuaauuacgaagaacugcgggagcagcuuuccagcgucucuuccuucgaacgcuuugagaucuuccccaagaccagcucuuggccuaaccacgacuccaauaagggagugacagccgcuuguccccaugccggcgcgaaaucuuuuuauaagaaccugaucuggcucguuaaaaagggcaauagcuacccuaaacugucccaaagcuauauuaacgauaaggggaaggaagugcuuguccuguggggaauccaccaccccuccaccacagccgaccagcagucucucuaccagaaugcugaugccuacguguucgugggcaccagcagauauuccaaaaaguuuaaaccugagauugcuauccggccgaagguccgcgaccaagaggggagaaugaacuacuauuggacgcugguugaacccggagauaaaauuacauucgaggccaccggcaaccugguggugccucgguacgcguuuacaauggaacgcaaugccgggagcggaaucauuaucucugacacccccguccaugauugcaacaccacaugucagacgccugagggcgcuaucaauaccucccuccccuuccagaacauucacccgaucacaauuggcaagugcccuaaauauguuaagagcaccaagcugagacuugccacagggcugcggaaugugcccucuauccagagccgcggacucuuuggcgcuauugccggguucaucgaaggaggcuggaccgggaugguggacggaugguacggcuaucaucaccaaaacgagcagggcuccggguacgccgcugaccugaaaucuacgcagaaugcgaucgauaagauuacaaacaaagucaauagcgugaucgagaagaugaacacccaguuuaccgccguuggaaaagaguucaaucaccuugagaagagaauugaaaaccugaauaagaaaguggacgauggcuuccucgacaucuggacauacaacgcugagcugcugguccuccuggaaaaugagcggacccuugauuaucaugacuccaacgugaagaaccuguacgagaaaguccgcaaucaacucaagaacaaugccaaagaaauugggaacggauguuuugaguucuaucacaagugcaauaacacauguauggaaagcgugaagaauggcacguacgauuauccuaaauacucugaggaagccaagcugaacagagagaaaaucgacgggguuaaacuugaguccacccggaucuaucagauucuggcuaucuacagcacaguggccucuucccucguccuggugguuagccugggcgcgauuuccuuuuggaugugcucuaauggaagccuccagugccgcaucuguauuuga

SEQ ID NO: 204656 - RNA, 1701 nt, Artificial Sequence
  derived and/or modified CDS sequence (opt5) from hemagglutinin__InfluenzaA__AIL93645
augaagaccaucauugcccugagcuacauccucugccugguguucgcucagaaacuucccggcaacgacaauuccacagccacgcugugucucgggcaccaugcggucccuaacggaaccauuguuaagacaaucaccaaugauagaauugaggugacaaacgcuaccgaacuggugcaaaauucuagcaucggcgagaucugcgacuccccgcaccagauucuugauggggaaaacuguacacugaucgacgcccuccugggagauccccagugcgacggcuuucagaauaaaaagugggaucuguucgucgagcggucuaaagccuauagcaacuguuacccuuaugacgugcccgauuacgcuucccuccgcucucugguugccagcuccgggacccuugaauuuaauaacgagagcuucaauugggcuggagugacgcaaaacggcaccucuuccgccugcauuagaggcagcaauucuuccuuuuucagccggcugaacuggcucacacaucugaauuuucgcuauccugcgcuuaacgucaccaugcccaacaaugagcaguucgacaagcuguacaucuggggagugcaccauccugggacagauaaggaccagauuuuucucuaugcccagucuuccggcagaaucaccguuagcacgaaacggucccaacaggcugugauuccgaacaucgggucucgccccagaauccggaauauuccuagccgcaucuccauuuacuggacaaucgucaagcccggagauauucugcugaucaacagcaccggcaaucucaucgccccuagaggguacuucaaaauucggucuggaaaguccagcaucaugcgcucugacgcucccauuggcaaauguaagagcgaaugcaucacaccgaacggcuccauuccuaaugacaagcccuuucagaacgugaauagaaucaccuauggggccuguccucgguacgugaaacagucuacccugaaacuugcgacaggaaugcgcaacguccccgagaagcaaacgagaggcaucuucggggccauugcuggauuuaucgaaaauggcugggaggggaugguugauggaugguauggcuuccggcaccagaacagcgagggcagagggcaggccgcugaccugaaguccacccaagccgccauugaucagaucaauggaaaacucaaccgccugauuggcaagacaaaugaaaaauuccaccagaucgagaaggaauuuagcgagguggaagggcggauucaggaccuugagaaguacguggaggauaccaaaaucgaccuguggucuuauaacgcugaacuccuggucgcgcuggagaaccaacauacaaucgaucucaccgacuccgaaaugaauaagcuguucgagaaaacgaagaaacagcuuagagaaaacgccgaggauaugggaaauggcugcuuuaagauuuaccacaagugugacaacgcuugcaucgggagcauucgcaauggcacauaugaucaugacguguaccgggacgaggcccugaacaauagauuccagaucaaaggaguugaacucaagucuggcuacaaagauuggauucuguggaucuccuuugccaucagcugcuuccuucuguguguggcucuccugggguuuauuaugugggccugccagaagggaaacauccgcuguaauauuugcaucuga

SEQ ID NO: 204657 - RNA, 1701 nt, Artificial Sequence; identical to SEQ ID NO: 202066
  derived and/or modified CDS sequence (opt5) from hemagglutinin__InfluenzaA__AIL93657

SEQ ID NO: 204658 - RNA, 1701 nt, Artificial Sequence; identical to SEQ ID NO: 202066
  derived and/or modified CDS sequence (opt5) from hemagglutinin__InfluenzaA__AIL93669

SEQ ID NO: 204659 - RNA, 1701 nt, Artificial Sequence
  derived and/or modified CDS sequence (opt5) from hemagglutinin__InfluenzaA__AIL93681
augaaggccauccuggugguccuccuguacaccuucgcuacagccaacgcggacacgcuuugcauuggcuaucacgcuaauaacagcaccgauacaguugacaccgugcuggagaagaaugugacagucacccauuccgugaaccuccuggaagauaagcacaaugggaaacuuuguaagcugagaggaguugcuccccuccaucugggcaaaugcaacaucgccggguggauucugggaaauccugagugugaaucucucagcacagccuccucuuggagcuacaucguggagaccuccucuagcgacaacggcacgugcuauccgggggauuuuauuaauuacgaagaacugcgggagcagcuuuccagcgucucuuccuucgaacgcuuugagaucuuccccaagaccagcucuuggccuaaccacgacuccaauaagggagugacagccgcuuguccccaugccggcgcgaaaucuuuuuauaagaaccugaucuggcucguuaaaaagggcaauagcuacccuaaacugucccaaagcuauauuaacgauaaggggaaggaagugcuuguccuguggggaauccaccaccccuccaccacagccgaccagcagucucucuaccagaaugcugaugccuacguguucgugggcaccagcagauauuccaaaaaguuuaaaccugagauugcuauccggccgaagguccgcgaccaagaggggagaaugaacuacuauuggacgcugguugaacccggagauaaaauuacauucgaggccaccggcaaccugguggugccucgguacgcguuuacaauggaacgcagcgccgggucuggaaucauuaucuccgacacccccguccaugauugcaauaccacaugucagacgccugagggcgcuaucaacaccagccuccccuuccagaauauucacccgaucacaauuggcaagugcccuaaauaugugaagucuaccaagcugagacuugccacagggcugcggaacguucccagcauccagucccgcggacucuuuggcgcuauugccggguucaucgaaggaggcuggaccgggaugguggacggaugguacggcuaucaucaccaaaaugagcagggcucuggguacgccgcugaccugaaaagcacgcagaacgcgaucgauaagauuacaaauaaagucaacuccgugaucgagaagaugaauacccaguuuaccgccguuggaaaagaguucaaccaccuugagaagagaauugaaaaucugaacaagaaaguggacgauggcuuccucgacaucuggacauacaaugcugagcugcugguccuccuggaaaacgagcggacccuugauuaucaugacagcaaugugaagaaccuguacgagaaaguccgcaaccaacucaagaauaacgccaaagaaauugggaauggauguuuugaguucuaucacaagugcgauaacacauguauggaaucugugaagaauggcacguacgacuauccuaaauacuccgaggaagccaagcugaacagagagaaaaucgaugggguuaaacuugagagcacccggaucuaucagauucuggcuaucuacucuacaguggccuccagccucguccuggugguuucccugggcgcgauuucuuuuuggaugugcagcaauggaucccuccagugccgcaucuguauuuga

SEQ ID NO: 204660 - RNA, 1701 nt, Artificial Sequence; identical to SEQ ID NO: 204656
  derived and/or modified CDS sequence (opt5) from hemagglutinin__InfluenzaA__AIL93692

SEQ ID NO: 204661 - RNA, 1701 nt, Artificial Sequence; identical to SEQ ID NO: 204656
  derived and/or modified CDS sequence (opt5) from hemagglutinin__InfluenzaA__AIL93716

SEQ ID NO: 204662 - RNA, 1701 nt, Artificial Sequence; identical to SEQ ID NO: 202066
  derived and/or modified CDS sequence (opt5) from hemagglutinin__InfluenzaA__AIL93728

SEQ ID NO: 204663 - RNA, 1701 nt, Artificial Sequence; identical to SEQ ID NO: 202066
  derived and/or modified CDS sequence (opt5) from hemagglutinin__InfluenzaA__AIL93740

SEQ ID NO: 204664 - RNA, 1701 nt, Artificial Sequence
  derived and/or modified CDS sequence (opt5) from hemagglutinin__InfluenzaA__AIL93752
augaagaccaucauugcccugagcuacauccucugccugguguucgcucagaaacuucccggcaacgacaauuccacagccacgcugugucucgggcaccaugcggucccuaacggaaccauuguuaagacaaucaccaaugauagaauugaggugacaaacgcuaccgaacuggugcaaaauucuagcaucggcgagaucugcgaccggccgcaccagauucuugauggggaaaacuguacacugaucgacgcccuccugggagauccccagugcgacggcuuucagaauaaaaagugggaucuguucgucgagcgcuccaaagccuauucuaacuguuacccuuaugacgugcccgauuacgcuagccucagaucccugguugccucuagcgggacccuugaauuuaauaacgaguccuucaauugggcuggagugacgcaaaacggcaccagcucugccugcauucggggcuccaauagcuccuuuuucucucgccugaacuggcucacacaucugaauuuuaaguauccugcgcuuaacgucaccaugcccaacaaugagcaguucgacaagcuguacaucuggggagugcaccauccugggacagauaaagaccagauuuuucucuaugcccagagcucuggcagaaucaccguuuccacgaagaaaagccaacaggcugugauuccgaacaucgggucccggccccgcaucagaaauauuccuucucggaucagcauuuacuggacaaucgucaagcccggagauauucugcugaucaacuccaccggcaaucucaucgccccucgcggguacuucaaaauuagaagcggaaagucuuccaucaugcggagcgacgcucccauuggcaaguguaaaucugaaugcaucacaccgaacggcagcauuccuaaugacaagcccuuucagaacgugaaucgcaucaccuauggggccuguccuagauacgugaaacaguccacccugaagcuggcgacaggaaugcggaacguccccgagaaacaaacgcgcggcaucuucggggccauugcuggauuuaucgaaaauggcugggaggggaugguugauggaugguauggcuucagacaccagaacucugagggccgggggcaggccgcugaccuuaagagcacccaagccgccauugaucagaucaauggaaaacucaacagacugauuggcaagacaaaugaaaaguuccaccagaucgagaaagaauuuuccgagguggaagggcgcauucaggaccuugagaaguacguggaggauaccaaaaucgaccuguggagcuauaacgcugaacuccuggucgcgcuggagaaccaacauacaaucgaucucaccgacucugaaaugaauaagcuguucgagaaaacgaagaagcagcuucgggaaaacgccgaggauaugggaaauggcugcuuuaaaauuuaccacaagugugacaacgcuugcaucggguccauuagaaauggcacauaugaucaugacguguaccgcgacgaggcccugaacaaucgguuccagaucaaaggaguugaacucaagagcggcuacaaagauuggauucuguggaucucuuuugccaucuccugcuuccuucuguguguggcucuccugggguuuauuaugugggccugccagaagggaaacaucagauguaauauuugcaucuga

SEQ ID NO: 204665 - RNA, 1701 nt, Artificial Sequence
  derived and/or modified CDS sequence (opt5) from hemagglutinin__InfluenzaA__AIL93764
augaagaccaucauugcccugagcuacauccucugccugguguucacacagaaacuucccggcaacgacaauuccacggcuacccugugucucgggcaccaugccgucccuaacggaacaauuguuaagaccaucacaaaugauagaauugaggugaccaacgcgacagaacuggugcaaaauucuagcaucggcgagaucugcgacuccccgcaccagauucuugauggggaaaacuguacccugaucgacgcucuccugggagauccccagugcgacggcuuucagaauaaaaagugggaucuguucgucgagcggucuaaagccuauagcaacuguuacccuuaugacgugcccgauuacgccucccuccgcucucugguugcuagcuccgggacgcuugaauuuaauaacgagagcuucaauugggccggagugacccaaaacggcacaucuuccgcuugcauuagaggcagcaauucuuccuuuuucagccggcugaacuggcucacccaucugaauuuuaaguauccugcccuuaacgucacaaugcccaacaaugagcaguucgacaagcuguacaucuggggagugcaccauccugggaccgauaaagaccagauuuuucucuaugcgcagucuuccggccgcaucacgguuagcacaaagagaucccaacaggccgugauuccgaacaucgggucucggccccgcaucagaaauauuccuagccggaucuccauuuacuggaccaucgucaaacccggagauauucugcugaucaacagcacaggcaaucucaucgcuccucgcggguacuucaagauuagaucuggaaaauccagcaucaugcggucugacgcccccauuggcaaguguaagagcgaaugcaucaccccgaacggcuccauuccuaaugacaaacccuuucagaacgugaaucgcaucaccuauggggcuuguccuagauacgugaagcagucuacacugaaacuugccacgggaaugcggaacguccccgagaagcaaacccgcggcaucuucggggcgauugccggauuuaucgaaaauggcugggaggggaugguugauggaugguauggcuucagacaccagaacagcgagggccgggggcaggcugccgaccugaaauccacacaagcugccauugaucagaucaauggaaagcucaacagacugauuggcaaaaccaaugaaaaguuccaccagaucgagaaggaauuuagcgagguggaagggcgcauucaggaccuugagaaauacguggaggauacaaagaucgaccuguggucuuauaacgccgaacuccuggucgcucuggagaaccaacauaccaucgaucucacggacuccgaaaugaauaaacuguucgagaagaccaaaaagcagcuucgggaaaacgcggaggauaugggaaauggcugcuuuaagauuuaccacaaaugugacaacgccugcaucgggagcauuagaaaugagacauaugaucaugacguguaccgcgacgaagcucugaacaaucgguuccagaucaagggcguugagcucaaaucuggauacaaggauuggauucuguggaucuccuuugccaucagcugcuuccuucuguguguggcccuccugggcuuuauuaugugggcuugccagaaagggaacaucagauguaauauuugcaucuga

SEQ ID NO: 204666 - RNA, 1701 nt, Artificial Sequence; identical to SEQ ID NO: 202066
  derived and/or modified CDS sequence (opt5) from hemagglutinin__InfluenzaA__AIL93776

SEQ ID NO: 204667 - RNA, 1701 nt, Artificial Sequence; identical to SEQ ID NO: 202066
  derived and/or modified CDS sequence (opt5) from hemagglutinin__InfluenzaA__AIL93788

SEQ ID NO: 204668 - RNA, 1701 nt, Artificial Sequence; identical to SEQ ID NO: 202066
  derived and/or modified CDS sequence (opt5) from hemagglutinin__InfluenzaA__AIL93812

SEQ ID NO: 204669 - RNA, 1701 nt, Artificial Sequence; identical to SEQ ID NO: 202066
  derived and/or modified CDS sequence (opt5) from hemagglutinin__InfluenzaA__AIL93824

SEQ ID NO: 204670 - RNA, 1701 nt, Artificial Sequence; identical to SEQ ID NO: 204659
  derived and/or modified CDS sequence (opt5) from hemagglutinin__InfluenzaA__AIL93836

SEQ ID NO: 204671 - RNA, 1701 nt, Artificial Sequence
  derived and/or modified CDS sequence (opt5) from hemagglutinin__InfluenzaA__AIL93847
augaaggccauccuggugguccuccuguacaccuucgcuacagccaacgcggacacgcuuugcauuggcuaucacgcuaauaacagcaccgauacaguugacaccgugcuggagaagaaugugacagucacccauuccgugaaccuccuggaagauaagcacaaugggaaacuuuguaagcugagaggaguugcuccccuccaucugggcaaaugcaacaucgccggguggauucugggaaauccugagugugaaucucucagcacagccuccucuuggagcuacaucguggagaccuccucuagcgacaacggcacgugcuauccgggggauuuuauuaauuacgaagaacugcgggagcagcuuuccagcgucucuuccuucgaacgcuuugagaucuuccccaagaccagcucuuggccuaaccacgacuccaauaagggagugacagccgcuuguccccaugccggcgcgaaaucuuuuuauaagaaccugaucuggcucguuaaaaagggcaauagcuacccuaaacugucccaaagcuauauuaacgauaaggggaaggaagugcuuguccuguggggaauccaccaccccuccaccacagccgaccagcagucucucuaccagaaugcugaugccuacguguucgugggcaccagcagauauuccaaaaaguuuaaaccugagauugcuauccggccgaagguccgcgaccaagaggggagaaugaacuacuauuggacgcugguugaacccggagauaaaauuacauucgaggccaccggcaaccugguggugccucgguacgcguuuacaauggaacgcagcgccgggucuggaaucauuaucuccgacacccccguccaugauugcaauaccacaugucagacgccugagggcgcuaucaacaccagccuccccuuccagaauauucacccgaucacaauuggcaagugcccuaaauaugugaagucuaccaagcugagacuugccacagggcugcggaacguucccagcauccagucccgcggacucuuuggcgcuauugccggguucaucgaaggaggcuggaccgggaugguggacggaugguacggcuaucaucaccaaaaugagcagggcucuggguacgccgcugaccugaaaagcacgcagaacgcgaucgauaagauuacaaauaaagucaacuccgugaucgagaagaugaauacccaguuuaccgccguuggaaaagaguucaaccaccuugagaagagaauugaaaaucugaacaagaaaguggacgauggcuuccucgacaucuggacauacaaugcugagcugcugguccuccuggaaaacgagcggacccuugauuaucaugacagcaaugugaagaaccuguacgagaaaguccgcaaccaacucaagaauaacgccaaagaaauugggaauggauguuuugaguucuaucacaagugcgauaacacauguauggaaucugugaagaauggcacguacgacuauccuaaauacuccgaggaagccaagcugaacagagagaaaaucgaugggguuaaacuugagagcacccggaucuaucagauucuggcuaucuacucuacaguggccuccagccucguccuggugguuucccugggcgcgauuugcuuuuggaugugcucuaauggaagccuccagugucgcaucugcauuuga

SEQ ID NO: 204672 - RNA, 1701 nt, Artificial Sequence; identical to SEQ ID NO: 204656
  derived and/or modified CDS sequence (opt5) from hemagglutinin__InfluenzaA__AIL93858

SEQ ID NO: 204673 - RNA, 1701 nt, Artificial Sequence; identical to SEQ ID NO: 202066
  derived and/or modified CDS sequence (opt5) from hemagglutinin__InfluenzaA__AIL93870

SEQ ID NO: 204674 - RNA, 1701 nt, Artificial Sequence
  derived and/or modified CDS sequence (opt5) from hemagglutinin__InfluenzaA__AIL93882
augaagaccaucauugcccugagcuacauccucugccugguguucgcucagaaacccccuggcaacgacaauuccacagccacgcuuugucuggggcaccaugcggucccgaacggaaccauuguuaagacaaucaccaaugauagaauugaggugacaaacgcuaccgaacucgugcaaaauucuagcaucggcgagaucugcgacucuccccaccagauucuggauggggaaaacuguacacuuaucgacgcccugcucggagauccucagugcgacggcuuucagaauaaaaagugggaucuguucgucgagcgguccaaagccuauagcaacuguuaccccuaugacgugccugauuacgcuucccugcgcucucucguugccagcuccgggacccuggaauuuaauaacgagagcuucaauugggcuggagugacgcaaaacggcaccucuuccgccugcauuagaggcagcaauucuuccuuuuucagccggcuuaacuggcugacacaucucaauuuuaaguaucccgcgcugaacgucaccaugccuaacaaugagcaguucgacaaacuuuacaucuggggagugcaccauccggggacagauaaggaccagauuuuucuguaugcccagucuuccggccgcaucaccguuagcacgaagagaucccaacaggcugugauucccaacaucgggucucggccucgcaucagaaauauucccagccggaucuccauuuacuggacaaucgucaaaccuggagauauucuccugaucaacagcaccggcaaucugaucgcuccccgcggguacuucaagauuagaucuggaaaauccagcaucaugcggucugacgccccgauuggcaaguguaagagcgaaugcaucacaccuaacggcuccauucccaaugacaaaccuuuucagaacgugaaucgcaucaccuauggggccugucccagauacgugaagcagucuacccucaaacuggcgacaggaaugcggaacguccccgagaagcaaacgcgcggcaucuucggggccauugcuggauuuaucgaaaauggcugggaggggaugguugauggaugguauggcuucagacaccagaacagcgagggccgggggcaggccgcugaccuuaaauccacccaagccgccauugaucagaucaauggaaagcugaacagacucauuggcaaaacaaaugaaaaguuccaccagaucgagaaggaauuuagcgagguggaagggcgcauucaggaccuggagaaauacguggaggauaccaagaucgaccuuuggucuuauaacgcugaacugcucgucgcgcuggagaaccaacauacaaucgaucugaccgacuccgaaaugaauaaacucuucgagaagacgaaaaagcagcugcgggaaaacgccgaggauaugggaaauggcugcuuuaagauuuaccacaaaugugacaacgcuugcaucgggagcauuagaaauggcacauaugaucaugacguguaccgcgacgaggcccuuaacaaucgguuccagaucaagggaguugaacugaaaucuggcuacaaggauuggauucucuggaucuccuuugccaucagcugcuuccugcuuuguguggcucugcucggguuuauuaugugggccugccagaaaggaaacaucagauguaauauuugcaucuga

SEQ ID NO: 204675 - RNA, 1701 nt, Artificial Sequence; identical to SEQ ID NO: 202066
  derived and/or modified CDS sequence (opt5) from hemagglutinin__InfluenzaA__AIL93894

SEQ ID NO: 204676 - RNA, 1701 nt, Artificial Sequence
  derived and/or modified CDS sequence (opt5) from hemagglutinin__InfluenzaA__AIL93906
augaaggccauccuggugguccuccuguacaccuucgcuacagccaacgcggacacgcuuugcauuggcuaucacgcuaauaacagcaccgauacaguugacaccgugcuggagaagaaugugacagucacccauuccaucaaccuccuggaagauaagcacaaugggaaacuuuguaagcugagaggaguggcuccccuccaucugggcaaaugcaacauugccggguggauccugggaaauccugagugugaaucucucagcacagccuccucuuggagcuacauuguugagaccuccucuagcgacaacggcacgugcuauccgggggauuuuaucaauuacgaagaacugcgggagcagcuuuccagcgugucuuccuucgaacgcuuugagauguuccccaagaccagcucuuggccuaaccacgacuccaauaagggagucacagccgcuuguccccaugccggcgcgaaaucuuuuuauaagaaccugaucuggcucgugaaaaagggcaauagcuacccuaaacuguccaagagcuauauuaacgauaaggggaaagaaguucuugugcuguggggaauccaccaccccuccaccacagccgaccaacagucucucuaccagaaugcugaugccuacgucuucgugggcaccagcaaguauuccaaaaaguuuaaaccugagauugcuaucagaccgaaggugcgggaccaggaggggcgcaugaacuacuauuggacgcugauugaacccggagauaaaaucacauucgaggccaccggcaaccuggucguuccuagauacgcguuugccauggaacggaaugcugggagcggaauuaucaucucugacacacccgugcaugauugcaacaccaccugucaaacaccugagggcgccauuaauacgucccuccccuuccagaacauccacccgauuaccaucggcaagugcccuaaguaugugaaaagcacaaagcugcgccuugcuaccgggcugagaaauguccccucuauucagagccggggacucuuuggcgccaucgccggguucaucgaaggaggcuggacagggaugguggacggaugguacggcuaucaucaccagaacgagcaaggcuccggguacgcugcggaccugaaaucuacccagaaugccauugauaagaucacgaacaaaguuaauagcgugauugagaagaugaacacacaguuuaccgcugucggaaaggaguucaaucaccuugagaaacgcaucgaaaaccugaauaagaaaguggacgauggcuuccucgacauuuggaccuacaacgccgagcugcugguucuccuggaaaaugagagaacacuugauuaucaugacuccaacgugaagaaccuguacgagaaaguccggaaucagcucaagaacaaugccaaggaaaucgggaacggauguuuugaguucuaucacaaaugcgauaauaccuguauggaaagcgugaagaacggcacauacgacuauccuaaauacucugaggaagcuaagcugaaucgcgagaaaaucgauggggucaaacuugaguccacgagaauuuaucaaauccuggccauuuacagcaccguggcgucuucccucguucugguggucagccugggcgcuaucuccuuuuggaugugcucuaacggaagccuccagugccggauuuguaucuga

SEQ ID NO: 204677 - RNA, 1701 nt, Artificial Sequence
  derived and/or modified CDS sequence (opt5) from hemagglutinin__InfluenzaA__AIL93917
augaagaccaucauugcccugagcuacauccucugccugguguucgcucagaaacuucccggcaacgacaauuccacagccacgcugugucucgggcaccaugcggucccuaacggaaccauuguuaagacaaucaccaaugauagaauugaggugacaaacgcuaccgaacuggugcaaaauucuagcaucggcgagaucugcgaccggccgcaccagauucuugauggggaaaacuguacacugaucgacgcccuccugggagauccccagugcgacggcuuucagaauaaaaagugggaucuguucgucgagcgcuccaaagccuauucuaacuguuacccuuaugacgugcccgauuacgcuagccucagaucccugguugccucuagcgggacccuugaauuuaauaacgaguccuucaauugggcuggagugacgcaaaacggcaccagcucugccugcauucggggcuccaauagcuccuuuuucucucgccugaacuggcucacacaucugaauuuuaaguauccugcgcuuaacgucaccaugcccaacaaugagcaguucgacaagcuguacaucuggggagugcaccauccugggacagauaaagaccagauuuuucucuaugcccagagcucuggcagaaucaccguuuccacgaagcggagccaacaggcugugauuccgaacaucgggucccgccccagaauccggaauauuccuucucgcaucagcauuuacuggacaaucgucaaacccggagauauucugcugaucaacuccaccggcaaucucaucgccccuagaggguacuucaagauucggagcggaaaaucuuccaucaugcgcagcgacgcucccauuggcaaguguaagucugaaugcaucacaccgaacggcagcauuccuaaugacaaacccuuucagaacgugaauagaaucaccuauggggccuguccucgguacgugaagcaguccacccugaaacuugcgacaggaaugcgcaacguccccgagaagcaaacgagaggcaucuucggggccauugcuggauuuaucgaaaauggcugggaggggaugguugauggaugguauggcuuccggcaccagaacucugagggcagagggcaggccgcugaccugaaaagcacccaagccgccauugaucagaucaauggaaagcucaaccgccugauuggcaaaacaaaugaaaaguuccaccagaucgagaaggaauuuuccgagguggaagggcggauucaggaccuugagaaauacguggaggauaccaagaucgaccuguggagcuauaacgcugaacuccuggucgcgcuggagaaccaacauacaaucgaucucaccgacucugaaaugaauaaacuguucgagaagacgaaaaagcagaugagagaaaacgccgaggauaugggaaauggcugcuuuaagauuuaccacaaaugugacaacgcuugcaucggguccauucgcaauggcacauaugaucaugacguguaccgggacgaggcccuuaacaauagauuccagaucaagggaguugaacugaaaagcggcuacaaggauuggauucucuggaucucuuuugccaucuccugcuuccugcuuuguguggcucugcucggguuuauuaugugggccugccagaaaggaaacauccgcuguaauauuugcaucuga

SEQ ID NO: 204678 - RNA, 1701 nt, Artificial Sequence; identical to SEQ ID NO: 202112
  derived and/or modified CDS sequence (opt5) from hemagglutinin__InfluenzaA__AIL93929

SEQ ID NO: 204679 - RNA, 1701 nt, Artificial Sequence
  derived and/or modified CDS sequence (opt5) from hemagglutinin__InfluenzaA__AIL93940
augaaggccauccuggugguccuccuguacaccuucgcuacagccaacgcggacacgcuuugcauuggcuaucacgcuaauaacagcaccgauacaguugacaccgugcuggagaagaaugugacagucacccauuccgugaaccuccuggaagauaagcacaaugggaaacuuuguaagcugagaggaguuucuccccuccaucugggcaaaugcaacaucgccggguggauucugggaaauccugagugugaaagccucuccacagccucuagcugguccuacaucguggagaccucuagcuccgacaacggcacgugcuauccgggggauuuuauuaauuacgaagaacugcgggagcagcuuagcucugucuccagcuucgaacgcuuugagaucuuccccaagaccucuuccuggccuaaccacgacagcaauaagggagugacagcugccuguccccaugcuggcgccaaaucuuuuuauaagaaccugaucuggcucguuaaaaagggcaauuccuacccuaaacugagccaauccuauauuaacgauaaggggaaggaagugcuuguccuguggggaauccaccaccccucuaccacagcggaccagcagagccucuaccagaaugccgaugcuuacguguucgugggcaccuccagauauagcaaaaaguuuaaaccugagauugccauccggccgaagguccgcgaccaagaggggagaaugaacuacuauuggacgcugguugaacccggagauaaaauuacauucgaggcuaccggcaaccugguggugccucgguacgccuuuacaauggaacgcaaugcggggucuggaaucauuaucuccgacacccccguccaugauugcaacaccacaugucagacgccugagggcgccaucaauaccagccuccccuuccagaacauucacccgaucacaauuggcaagugcccuaaauaugugaagucuaccaagcugagacuugcuacagggcugcggaauguucccagcauccagucccgcggacucuuuggcgccauugcuggguucaucgaaggaggcuggaccgggaugguggacggaugguacggcuaucaucaccaaaacgagcagggcucuggguacgccgccgaccugaaaagcacgcagaaugcuaucgauaagauuacaaacaaagucaauuccgugaucgagaagaugaacacccaguuuaccgcgguuggaaaagaguucaaucaccuugagaagagaauugaaaaccugaauaagaaaguggacgauggcuuccucgacaucuggacauacaacgccgagcugcugguccuccuggaaaaugagcggacccuugauuaucaugacagcaacgugaagaaccuguacgagaaaguccgcaaucaacucaagaacaaugcuaaagaaauugggaacggauguuuugaguucuaucacaagugcgauaauacauguauggaaucugugaagaacggcacguacgacuauccuaaauacuccgaggaagccaagcugaauagagagaaaaucgaugggguuaaacuugagagcacccggaucuaucagauucuggccaucuacucuacaguggcuuccagccucguccuggugguuucccugggcgccauuucuuuuuggaugugcagcaacggaucccuccagugccgcaucuguauuuga

SEQ ID NO: 204680 - RNA, 1701 nt, Artificial Sequence; identical to SEQ ID NO: 202066
  derived and/or modified CDS sequence (opt5) from hemagglutinin__InfluenzaA__AIL93951

SEQ ID NO: 204681 - RNA, 1701 nt, Artificial Sequence; identical to SEQ ID NO: 202066
  derived and/or modified CDS sequence (opt5) from hemagglutinin__InfluenzaA__AIL93963

SEQ ID NO: 204682 - RNA, 1701 nt, Artificial Sequence; identical to SEQ ID NO: 201930
  derived and/or modified CDS sequence (opt5) from hemagglutinin__InfluenzaA__AIL93975

SEQ ID NO: 204683 - RNA, 1701 nt, Artificial Sequence; identical to SEQ ID NO: 204659
  derived and/or modified CDS sequence (opt5) from hemagglutinin__InfluenzaA__AIL93987

SEQ ID NO: 204684 - RNA, 1701 nt, Artificial Sequence; identical to SEQ ID NO: 202066
  derived and/or modified CDS sequence (opt5) from hemagglutinin__InfluenzaA__AIL93998

SEQ ID NO: 204685 - RNA, 1701 nt, Artificial Sequence; identical to SEQ ID NO: 204656
  derived and/or modified CDS sequence (opt5) from hemagglutinin__InfluenzaA__AIL94010

SEQ ID NO: 204686 - RNA, 1701 nt, Artificial Sequence; identical to SEQ ID NO: 204656
  derived and/or modified CDS sequence (opt5) from hemagglutinin__InfluenzaA__AIL94022

SEQ ID NO: 204687 - RNA, 1701 nt, Artificial Sequence
  derived and/or modified CDS sequence (opt5) from hemagglutinin__InfluenzaA__AIL94046
augaagaccaucauugcccugagcuacauccucugccugguguucgcucagaaacuucccggcaacgacaauuccacagccacgcugugucucgggcaccaugcggucccuaacggaaccauuguuaagacaaucaccaaugauagaauugaggugacaaacgcuaccgaacuggugcaaaauucuagcaucggcgagaucugcgaccggccgcaccagauucuugauggggaaaacuguacacugaucgacgcccuccugggagauccccagugcgacggcuuucagaauaaaaagugggaucuguucgucgagcgcuccaaagccuauucuaacuguuacccuuaugacgugcccgauuacgcuagccucagaucccugguugccucuagcgggacccuugaauuuaauaacgaguccuucaauugggcuggagugacgcaaaacggcaccagcucugccugcauucggggcuccaauagcuccuuuuucucucgccugaacuggcucacacaucugaauuuuaaguauccugcgcuuaacgucaccaugcccaacaaugagcaguucgacaagcuguacaucuggggagugcaccauccugggacagauaaagaccagauuuuucucuaugcccagagcucuggcagaaucaccguuuccacgaagcggagccaacaggcugugauuccgaacaucgggucccgccccagaauccggaauauuccuucucgcaucagcauuuacuggacaaucgucaaacccggagauauucugcugaucaacuccaccggcaaucucaucgccccuagaggguacuucaagauucggagcggaaaaucuuccaucaugcgcagcgacgcucccauuggcaaguguaagucugaaugcaucacaccgaacggcagcauuccuaaugacaaacccuuucagaacgugaauagaaucaccuauggggccuguccucgguacgugaagcaguccacccugaaacuugcgacaggaaugcgcaacguccccgagaagcaaacgagaggcaucuucggggccauugcuggauuuaucgaaaauggcugggaggggaugguugauggaugguauggcuuccggcaccagaacucugagggcagagggcaggccgcugaccugaaaagcacccaagccgccauugaucagaucaauggaaagcucaaccgccugauuggcaaaacaaaugaaaaguuccaccagaucgagaaggaauuuuccgagguggaagggcggauucaggaccuugagaaauacguggaggauaccaagaucgaccuguggagcuauaacgcugaacuccuggucgcgcuggagaaccaacauacaaucgaucucaccgacucugaaaugaauaaacuguucgagaagacgaaaaagcagcuuagagaaaacgccgaggauaugggaaauggcugcuuuaagauuuaccacaaaugugacaacgcuugcaucggguccauucgcaauggcacauaugaucaugacguguaccgggacgaggcccugaacaauagauuccagaucaagggaguugaacucaaaagcggcuacaaggauuggauucuguggaucucuuuugccaucuccugcuuccuucuguguguggcucuccugggguuuauuaugugggccugccagaaaggaaacauccgcuguaauauuugcaucuga

SEQ ID NO: 204688 - RNA, 1701 nt, Artificial Sequence
  derived and/or modified CDS sequence (opt5) from hemagglutinin__InfluenzaA__AIL94058
augaaggccauccuggugguccuccuguacaccuucgcucccgccaacgcggacacacuuugcauuggcuaucacgcuaauaacagcacggauaccguugacacagugcuggagaagaaugugaccgucacacauuccgugaaccuccuggaagauaagcacaaugggaaacuuuguaagcugagaggaguugccccucuccaucugggcaaaugcaacaucgccggguggauucugggaaauccggagugugaaucucucagcaccgcuuccucuuggagcuacaucguggagacauccucuagcgacaacgggaccugcuaucccggcgauuuuauuaauuacgaagaacugcgggagcagcuuuccagcgucucuuccuucgaacgcuuugagaucuucccuaagacgagcucuuggcccaaccacgacuccaauaagggagugaccgccgcuuguccucaugccggcgcgaaaucuuuuuauaagaaccugaucuggcucguuaaaaagggcaauagcuaccccaaacugucccaaagcuauauuaacgauaaggggaaggaagugcuuguccuguggggaauccaccacccuuccacaaccgccgaccagcagucucucuaccagaaugcugaugccuacguguucgugggcacaagcagauauuccaaaaaguuuaaaccggagauugcuauccggcccaagguccgcgaccaagaggggagaaugaacuacuauuggacccugguugaaccuggagauaaaauuacguucgaggccacaggcaaccugguggugccccgguacgcguuuaccaucgaacgcagcgccgggucuggaauuaucaucuccgacacaccuguccaugauugcaauaccaccugucagacacccgagggcgcuauuaacacgagccucccguuccagaauauccacccuauuaccaucggcaagugccccaaauaugugaagucuacaaagcugagacuugccaccgggcugcggaacguuccuagcauucagucccgcggacucuuuggcgcuaucgccggguucaucgaaggaggcuggacagggaugguggacggaugguacggcuaucaucaccaaaaugagcagggcucuggguacgccgcugaccugaaaagcacccagaacgcgauugauaagaucacgaauaaagucaacuccgugauugagaagaugaauacacaguuuaccgccguuggaaaagaguucaaccaccuugagaagagaaucgaaaaucugaacaagaaaguggacgauggcuuccucgacauuuggaccuacaaugcugagcugcugguccuccuggaaaacgagcggacacuugauuaucaugacagcaaugugaagaaccuguacgagaaaguccgcaaccaacucaagaauaacgccaaagaaaucgggaauggauguuuugaguucuaucacaagugcgauaacaccuguauggaaucugugaagaauggcacauacgacuaucccaaauacuccgaggaagccaagcugaacagagagaaaaucgaugggguuaaacuugagagcacgcggauuuaucagauccuggcuauuuacucuaccguggccuccagccucguccuggugguuucccugggcgcgaucucuuuuuggaugugcagcaauggaucccuccagugccgcauuuguaucuga

SEQ ID NO: 204689 - RNA, 1701 nt, Artificial Sequence; identical to SEQ ID NO: 204659
  derived and/or modified CDS sequence (opt5) from hemagglutinin__InfluenzaA__AIL94069

SEQ ID NO: 204690 - RNA, 1701 nt, Artificial Sequence; identical to SEQ ID NO: 202112
  derived and/or modified CDS sequence (opt5) from hemagglutinin__InfluenzaA__AIL94080

SEQ ID NO: 204691 - RNA, 1701 nt, Artificial Sequence; identical to SEQ ID NO: 204656
  derived and/or modified CDS sequence (opt5) from hemagglutinin__InfluenzaA__AIL94235

SEQ ID NO: 204692 - RNA, 1701 nt, Artificial Sequence; identical to SEQ ID NO: 202112
  derived and/or modified CDS sequence (opt5) from hemagglutinin__InfluenzaA__AIL94247

SEQ ID NO: 204693 - RNA, 1701 nt, Artificial Sequence
  derived and/or modified CDS sequence (opt5) from hemagglutinin__InfluenzaA__AIL94258
augaagaccaucauugcccugagcuacauccucugccugguguucacacagaaacuucccggcaacgacaauuccacggcuacccugugucucgggcaccaugccgucccuaacggaacaauuguuaagaccaucacaaaugauagaauugaggugaccaacgcgacagaacuggugcaaaauucuagcaucggcgagaucugcgacuccccgcaccagauucuugauggggaaaacuguacccugaucgacgcucuccugggagauccccagugcgacggcuuucagaauaaaaagugggaucuguucgucgagcggucuaaagccuauagcaacuguuacccuuaugacgugcccgauuacgccucccuccgcucucugguugcuagcuccgggacgcuugaauuuaauaacgagagcuucaauugggccggagugacccaaaacggcacaucuuccgcuugcauuagaggcagcaauucuuccuuuuucagccggcugaacuggcucacccaucugaauuuuaaguauccugcccuuaacgucacaaugcccaacaaugagcaguucgacaagcuguacaucuggggagugcaccauccugggaccgauaaagaccagauuuuucucuaugcgcagucuuccggccgcaucacgguuagcacaaagagaucccaacaggccgugauuccgaacaucgggucucggccccgcaucagaaauauuccuagccggaucuccauuuacuggaccaucgucaaacccggagauauucugcugaucaacagcacaggcaaucucaucgcuccucgcggguacuucaagauuagaucuggaaaauccagcaucaugcggucugacgcccccauuggcaaguguaagagcgaaugcaucaccccgaacggcuccauuccuaaugacaaacccuuucagaacgugaaucgcaucaccuauggggcuuguccuagauacgugaagcagucuacacugaaacuugccacgggaaugcggaacguccccgagaagcaaacccgcggcaucuucggggcgauugccggauuuaucgaaaauggcugggaggggaugguugauggaugguauggcuucagacaccagaacagcgagggccgggggcaggcugccgaccugaaauccacacaagcugccauugaucagaucaauggaaagcucaacagacugauuggcaaaaccaaugaaaaguuccaccagaucgagaaggaauuuagcgagguggaagggcgcauucaggaccuugagaaauacguggaggauacaaagaucgaccuguggucuuauaacgccgaacuccuggucgcucuggagaaccaacauaccaucgaucucacggacuccgaaaugaauaaacuguucgagaagaccaaaaagcagcuucgggaaaacgcggaggauaugggaaauggcugcuuuaagauuuaccacaaaugugacaacgccugcaucgggagcauuagaaauggcacauaugaucaugacguguaccgcgacgaggcucugaacaaucgguuccagaucaagggaguugaacucaaaucuggcuacaaggauuggauucuguggaucuccuuugccaucagcugcuuccuucuguguguggcccuccugggguuuauuaugugggcuugccagaaaggaaacaucagauguaauauuugcaucuga

SEQ ID NO: 204694 - RNA, 1701 nt, Artificial Sequence
  derived and/or modified CDS sequence (opt5) from hemagglutinin__InfluenzaA__AIL94270
augaagaccaucauugcccugagcuacauccucugccugguguucgcucagaaacuucccggcaacgacaauuccacagccacgcugugucucgggcaccaugcggucccuaacggaaccauuguuaagacaaucaccaaugauagaauugaggugacaaacgcuaccgaacuggugcaaaauucuagcaucggcgagaucugcgacuccccgcaccagauucuugauggggaaaacuguacacugaucgacgcccuccugggagauccccagugcgacggcuuucagaauaaaaagugggaucuguucgucgagcggucuaaagccuauagcaacuguuacccuuaugacgugcccgauuacgcuucccuccgcucucugguugccagcuccgggacccuugaauuuaauaacgagagcuucaauugggcuggagugacgcaaaacggcaccucuuccgccugcauuagaggcagcaauucuuccuuuuucagccggcugaacuggcucacacaucugaauuuuaaguauccugcgcuuaacgucaccaugcccaacaaugagcaguucgacaagcuguacaucuggggagugcaccauccugggacagauaaagaccagauuuuucucuaugcccagucuuccggccgcaucaccguuagcacgaagagaucccaacaggcugugauuccgaacaucgggucucggccccgcaucagaaauauuccuagccggaucuccauuuacuggacaaucgucaaacccggagauauucugcugaucaacagcaccggcaaucucaucgccccucgcggguacuucaagauuagaucuggaaaauccagcaucaugcggucugacgcucccauuggcaaguguaacagcgaaugcaucacaccgaauggcuccauuccuaacgacaagcccuuucagaaugugaaccgcaucaccuauggggccuguccuagauacgugaaacagucuacccugaaacuugcgacaggaaugcggaauguccccgagaagcaaacgcgcggcaucuucggggccauugcuggauuuaucgaaaacggcugggaggggaugguugauggaugguauggcuucagacaccagaauagcgagggccgggggcaggccgcugaccugaaguccacccaagccgccauugaucagaucaacggaaaacucaauagacugauuggcaagacaaacgaaaaauuccaccagaucgagaaggaauuuagcgagguggaagggcgcauucaggaccuugagaaguacguggaggauaccaaaaucgaccuguggucuuauaacgcugaacuccuggucgcgcuggagaaucaacauacaaucgaucucaccgacuccgaaaugaacaagcuguucgagaaaacgaagaaacagcuucgggaaaaugccgaggauaugggaaacggcugcuuuaagauuuaccacaagugugacaaugcuugcaucgggagcauuagaaacggcacauaugaucaugacguguaccgcgacgaggcccugaauaaccgguuccagaucaaaggaguugaacucaagucuggcuacaaagauuggauucuguggaucuccuuugccaucagcugcuuccuucuguguguggcucuccugggguuuauuaugugggccugccagaagggaaauaucagauguaacauuugcaucuga

SEQ ID NO: 204695 - RNA, 1701 nt, Artificial Sequence; identical to SEQ ID NO: 202066
  derived and/or modified CDS sequence (opt5) from hemagglutinin__InfluenzaA__AIL94282

SEQ ID NO: 204696 - RNA, 1701 nt, Artificial Sequence; identical to SEQ ID NO: 202066
  derived and/or modified CDS sequence (opt5) from hemagglutinin__InfluenzaA__AIL94294

SEQ ID NO: 204697 - RNA, 1701 nt, Artificial Sequence
  derived and/or modified CDS sequence (opt5) from hemagglutinin__InfluenzaA__AIL94306
augaagaccaucacagcccugagcuacauucucugccuggcuuucgcccagaaacccccuggcaacgacaauuccacggcgacccuuugucuggggcaccaugcugugccgaacggaacaaucgucaagaccauuacaaaugauagaaucgagguuaccaacgccacagaacucgugcaaaauucuagcauuggcgagaucugcgacucuccccaccagauccuggauggggaaaacuguacccuuauugacgcccugcucggagauccucagugcgacggcuuucagaauaaaaagugggaucuguucguggagcgguccaaggcuuauagcaacuguuaccccuaugacgucccugauuacgccucccugcgcucucucguggcuagcuccgggacgcuggaauuuaauaacgagagcuucaauugggccggaguuacccaaaacggcacaucuuccgcgugcaucagaggcagcaauucuuccuuuuucagccggcuuaacuggcugacccaucucaauuuuaaguaucccgcccugaacgugacaaugccuaacaaugagcaguucgacaaacuuuacauuuggggaguccaccauccggggaccgauaaagaccagaucuuucuguaugcucagucuuccggccgcauuacggugagcacaaagagaucccaacaggccguuauccccaacauugggucucggccucgcaucagaaauauccccagccggauuuccaucuacuggaccauugugaaaccuggagauauccuccugauuaacagcacaggcaaucugaucgcuccccgcggguacuucaagaucagaucuggaaaauccagcauuaugcggucugacgccccgaucggcaaguguaagagcgaaugcauuaccccuaacggcuccauccccaaugacaaaccuuuucagaacgucaaucgcauuaccuauggggcgugucccagauacgugaagcagucuacacucaaacuggccacgggaaugcggaacgugcccgagaagcaaacccgcggcaucuucggggcuaucgccggauuuauugaaaauggcugggaggggauggucgauggaugguauggcuucagacaccagaacagcgagggccgggggcaggcugccgaccuuaaauccacacaagccgcuaucgaucagauuaauggaaagcugaacagacucaucggcaaaaccaaugaaaaguuccaccagauugagaaggaauuuagcgagguugaagggcgcauccaggaccuggagaaauacguggaggauacaaagauugaccuuuggucuuauaacgcggaacugcucguggcccuggagaaccaacauaccaucgaucugacggacuccgaaaugaauaaacucuucgagaagaccaaaaagcagcugcgggaaaacgcugaggauaugggaaauggcugcuuuaagaucuaccacaaaugugacaacgccugcauugggagcaucagaaauggcacauaugaucaugacgucuaccgcgacgaggcccuuaacaaucgguuccagauuaagggaguggaacugaaaucuggcuacaaggauuggauccucuggauuuccuuugcuaucagcugcuuccugcuuuguguugcccugcucggguuuaucaugugggcgugccagaaaggaaacauuagauguaauaucugcauuuga

SEQ ID NO: 204698 - RNA, 1701 nt, Artificial Sequence
  derived and/or modified CDS sequence (opt5) from hemagglutinin__InfluenzaA__AIL94318
augaagaccaucauugcccugagcuacauccucugccugguguucgcucagaaacuucccggcaacgacaauuccacagccacgcugugucucgggcaccaugcggucccuaacggaaccauuguuaagacaaucaccaaugauagaauugaggugacaaacgcuaccgaacuggugcaaaauucuagcaucggcgagaucugcgacuccccgcaccagauucuugauggggaaaacuguacacugaucgacgcccuccugggagauccccagugcgacggcuuucagaauaaaaagugggaucuguucgucgagcggucuaaagccuauagcaacuguuacccuuaugacgugcccgauuacgcuucccuccgcucucugguugccagcuccgggacccuugaauuuaauaacgagagcuucaauuggacgggagugacccaaaacggcacaucuuccgcuugcauuagacggagcaauucuuccuuuuucagccgccugaacuggcucacccaucugaauuuuaaguauccugcccuuaacgucacaaugcccaacaaugagcaguucgacaagcuguacaucuggggcgugcaccauccugggaccgauaaagaccagauuuuucucuaugcgcagucuuccggaagaaucacgguuagcacaaagcggucccaacaggccgugauuccgaacaucggcucucgccccagaauccggaauauuccuagccgcaucuccauuuacuggaccaucgucaaacccggggauauucugcugaucaacagcacaggaaaucucaucgcuccuagaggcuacuucaagauucggucugggaaauccagcaucaugcgcucugacgcccccauuggaaaguguaagagcgaaugcaucaccccgaacggcuccauuccuaaugacaaacccuuucagaacgugaauagaaucaccuauggcgcuuguccucgguacgugaagcagucuacacugaaacuugccacggggaugcgcaacguccccgagaagcaaaccagaggaaucuucggcgcgauugccggguuuaucgaaaauggaugggagggcaugguugaugggugguauggauuccggcaccugaacagcgagggcagaggccaggcugccgaccucaaauccacacaggcugccauugaucaaaucaaugggaagcugaaccgccuuauuggaaaaaccaaugaaaaguuccaccagaucgagaaggaauuuagcgagguggaaggccggauucaggaccuggagaaauacguggaggauacaaagaucgaccucuggucuuauaacgccgaacugcuggucgcucucgagaaccagcauaccaucgaucugacggacuccgaaaugaauaaacuuuucgagaagaccaaaaagcaacugagagaaaacgcggaggauauggggaauggaugcuuuaagauuuaccacaaaugugacaacgccugcaucggcagcauucgcaaugggacauaugaucauaacguguaccgggacgaggcucucaauaacagauuccagaucaagggcguugaacugaaaucuggauacaaggacuggauucuuuggaucuccuuugccaucagcugcuuccugcucuguguggcccugcugggcuuuauuaugugggcuugccagaaagggaauauccgcuguaacauuugcaucuga

SEQ ID NO: 204699 - RNA, 1701 nt, Artificial Sequence; identical to SEQ ID NO: 201930
  derived and/or modified CDS sequence (opt5) from hemagglutinin__InfluenzaA__AIL94330

SEQ ID NO: 204700 - RNA, 1701 nt, Artificial Sequence; identical to SEQ ID NO: 202112
  derived and/or modified CDS sequence (opt5) from hemagglutinin__InfluenzaA__AIL94354

SEQ ID NO: 204701 - RNA, 1701 nt, Artificial Sequence; identical to SEQ ID NO: 202066
  derived and/or modified CDS sequence (opt5) from hemagglutinin__InfluenzaA__AIL94365

SEQ ID NO: 204702 - RNA, 1701 nt, Artificial Sequence
  derived and/or modified CDS sequence (opt5) from hemagglutinin__InfluenzaA__AIL94377
augaagaccaucauugcccugagcuacauccucugccugguguucgcucagaaacuucccggcaacgacaauuccacagccacgcugugucucgggcaccaugcggucccuaacggaaccauuguuaagacaaucaccaaugauagaauugaggugacaaacgcuaccgaacuggugcaaaauucuagcaucggcgagaucugcgacuccccgcaccagauucuugauggggaaaacuguacacugaucgacgcccuccugggagauccccauugcgacggcuuucagaauaaaaagugggaucuguucgucgagcggucuaaagccuauagcaacuguuacccuuaugacgugcccgauuacgcuucccuccgcucucugguugccagcuccgggacccuugaauuuaauaacgagagcuucaauugggcuggagugacgcagaacggcaccucuuccgccugcauuagaggcagcaauucuuccuuuuucagccggcugaacuggcucacacaccugaauuuuaaguauccugcgcuuaacgucaccaugcccaacaaugagcaauucgacaagcuguacaucuggggagugcaucacccugggacagauaaagaccagauuuuucucuaugcccagucuuccggccgcaucaccguuagcacgaagagaucccagcaagcugugauuccgaacaucgggucucggccccgcaucagaaauauuccuagccggaucuccauuuacuggacaaucgucaaacccggagauauucugcugaucaacagcaccggcaaucucaucgccccucgcggguacuucaagauuagaucuggaaaauccagcaucaugcggucugacgcucccauuggcaaguguaagagcgaaugcaucacaccgaacggcuccauuccuaaugacaaacccuuucagaacgugaaucgcaucaccuauggggccuguccuagauacgugaagcagucuacccugaaacuugcgacaggaaugcggaacguccccgagaagcagacgcgcggcaucuucggggccauugcuggauuuaucgaaaauggcugggaggggaugguugauggaugguauggcuucagacaccaaaacagcgagggccgggggcaggccgcugaccugaaauccacccaggccgccauugaucaaaucaauggaaagcucaacagacugauuggcaaaacaaaugaaaaguuccaucagaucgagaaggaauuuagcgagguggaagggcgcauucaggaccuugagaaauacguggaggauaccaagaucgaccuguggucuuauaacgcugaacuccuggucgcgcuggagaaccagcacacaaucgaucucaccgacuccgaaaugaauaaacuguucgagaagacgaaaaagcaacuucgggaaaacgccgaggauaugggaaauggcugcuuuaagauuuaccauaaaugugacaacgcuugcaucgggagcauuagaaauggcacauaugaucacgacguguaccgcgacgaggcccugaacaaucgguuccagaucaagggaguugaacucaaaucuggcuacaaggauuggauucuguggaucuccuuugccaucagcugcuuccuucuguguguggcucuccugggguuuauuaugugggccugccagaaaggaaacaucagauguaauauuugcaucuga

SEQ ID NO: 204703 - RNA, 1701 nt, Artificial Sequence
  derived and/or modified CDS sequence (opt5) from hemagglutinin__InfluenzaA__AIL94389
augaaggccauccuggugguccuccuguacaccuucgcuacagccaacgcggacacgcuuugcauuggcuaucacgcuaauaacagcaccgauacaguugacaccgugcuggagaagaaugugacagucacccauuccgugaaccuccuggaagauaagcacaaugggaaacuuuguaagcugagaggaguugcuccccuccaucugggcaaaugcaacaucgccggguggauucugggaaauccugagugugaaucucucagcacagccuccucuuggagcuacaucguggagaccuccucuagcgacaacggcacgugcuauccgggggauuuuauuaauuacgaagaacugcgggagcagcuuuccagcgucucuuccuucgaacgcuuugagaucuuccccaagaccagcucuuggccuaaccacgacuccaauaagggagugacagccgcuuguccccaugccggcgcgaaaucuuuuuauaagaaccugaucuggcucguuaaaaagggcaauagcuacccuaaacugucccaaagcuauauuaacgauaaggggaaggaagugcuuguccuguggggaauccaccaccccuccaccacagccgaccagcagucucucuaccagaaugcugaugccuacguguucgugggcaccagcagauauuccaaaaaguuuaaaccugagauugcuauccggccgaagguccgcgaccaagaggggagaaugaacuacuauuggacgcugguugaacccggagauaaaauuacauucgaggccaccggcaaccugguggugccucgguacgcguuuacaauggaacgcaaugccgggagcggaaucauuaucucugacacccccguccaugauugcaacaccacaugucagacgccugagggcgcuaucaauaccucccuccccuuccagaacauucacccgaucacaauuggcaagugcccuaaauauguuaagagcaccaagcugagacuugccacagggcugcggaaugugcccucuauccagagccgcggacucuuuggcgcuauugccggguucaucgaaggaggcuggaccgggaugguggacggaugguacggcuaucaucaccaaaacgagcagggcuccggguacgccgcugaccugaaaucuacgcagaaugcgaucgauaagauuacaaacaaagucaauagcgugaucgagaagaugaacacccaguuuaccgccguuggaaaagaguucaaucaccuugagaagagaauugaaaaccugaauaagaaaguggacgauggcuuccucgacaucuggacauacaacgcugagcugcugauucuccuggaaaaugagcggacccuugauuaucaugacuccaacgucaagaaccuguacgagaaagugcgcaaucaacucaagaacaaugccaaagaaaucgggaacggauguuuugaguucuaucacaagugcgauaauacauguauggaaagcgucaagaacggcacguacgacuauccuaaauacucugaggaagccaagcugaauagagagaaaaucgauggggugaaacuugaguccacccggauuuaucagauccuggcuauuuacagcacaguugccucuucccucgugcuggucgugagccugggcgcgaucuccuuuuggaugugcucuaacggaagccuccagugccgcauuuguaucuga

SEQ ID NO: 204704 - RNA, 1701 nt, Artificial Sequence; identical to SEQ ID NO: 202066
  derived and/or modified CDS sequence (opt5) from hemagglutinin__InfluenzaA__AIL94411

SEQ ID NO: 204705 - RNA, 1701 nt, Artificial Sequence; identical to SEQ ID NO: 202066
  derived and/or modified CDS sequence (opt5) from hemagglutinin__InfluenzaA__AIL94423

SEQ ID NO: 204706 - RNA, 1701 nt, Artificial Sequence; identical to SEQ ID NO: 204659
  derived and/or modified CDS sequence (opt5) from hemagglutinin__InfluenzaA__AIL94435

SEQ ID NO: 204707 - RNA, 1701 nt, Artificial Sequence; identical to SEQ ID NO: 202066
  derived and/or modified CDS sequence (opt5) from hemagglutinin__InfluenzaA__AIL94446

SEQ ID NO: 204708 - RNA, 1701 nt, Artificial Sequence; identical to SEQ ID NO: 202066
  derived and/or modified CDS sequence (opt5) from hemagglutinin__InfluenzaA__AIL94458

SEQ ID NO: 204709 - RNA, 1701 nt, Artificial Sequence
  derived and/or modified CDS sequence (opt5) from hemagglutinin__InfluenzaA__AIL94470
augaaggccauccuggugguccuccuguacaccuucgcuacagccaacgcggacacgcuuugcauuggcuaucacgcuaauaacagcaccgauacaguugacaccgugcuggagaagaaugugacagucacccauuccgugaaccuccuggaagauaagcacaaugggaaacuuuguaagcugagaggaguugcuccccuccaucugggcaaaugcaacaucgccggguggauucugggaaauccugagugugaaucucucagcacagccuccucuuggagcuacaucguggagaccuccucuagcgacaacggcacgugcuauccgggggauuuuauuaauuacgaagaacugcgggagcagcuuuccagcgucucuuccuucgaacgcuuugagaucuuccccaagaccagcucuuggccuaaccacgacuccaauaagggagugacagccgcuuguccccaugccggcgcgaaaucuuuuuauaagaaccugaucuggcucguuaaaaagggcaauagcuacccuaaacugucccaaagcuauauuaacgauaaggggaaggaagugcuuguccuguggggaauccaccaccccuccaccacagccgaccagcagucucucuaccagaaugcugaugccuacguguucgugggcaccagcagauauuccaaaaaguuuaaaccugagauugcuauccggccgaagguccgcgaccaagaggggagaaugaacuacuauuggacgcugguugaacccggagauaaaauuacauucgaggccaccggcaaccugguggugccucgguacgcguuuacaauggaacgcaaugccgggagcggaaucauuaucucugacacccccgcucaugauugcaacaccacaugucagacgccugagggcgccaucaauaccucccuccccuuccagaacauucacccgaucacaauuggcaagugcccuaaauaugucaagagcaccaagcugagacuugcuacagggcugcggaaugugcccucuauccagagccgcggacucuuuggcgccauugccggguucaucgaaggaggcuggaccgggaugguugacggaugguacggcuaucaucaccaaaacgagcagggcuccggguacgcugcggaccugaaaucuacgcagaaugccaucgauaagauuacaaacaaagugaauagcgucaucgagaagaugaacacccaguuuaccgcugugggaaaagaguucaaucaccuugagaagagaauugaaaaccugaauaagaaaguugacgauggcuuccucgacaucuggacauacaacgccgagcugcuggugcuccuggaaaaugagcggacccuugauuaucaugacuccaacgucaagaaccuguacgagaaagugcgcaaucaacucaagaacaaugccaaagaaauugggaacggauguuuugaguucuaucacaagugcgauaauacauguauggaaagcgucaagaacggcacguacgacuauccuaaauacucugaggaagcuaagcugaauagagagaaaaucgauggggugaaacuugaguccacccggaucuaucagauucuggccaucuacagcacaguugcgucuucccucgugcuggucgugagccugggcgcuauuuccuuuuggaugugcucuaacggaagccuccagugccgcaucuguauuuga

SEQ ID NO: 204710 - RNA, 1701 nt, Artificial Sequence
  derived and/or modified CDS sequence (opt5) from hemagglutinin__InfluenzaA__AIL94481
augaagaccaucauugcccugagcuacauccucugccugguguucgcucagaaacuucccggcaacgacaauuccacagccacgcugugucucgggcaccaugcggucccuaacggaaccauuguuaagacaaucaccaaugauagaauugaggugacaaacgcuaccgaacuggugcaaaauucuagcaucggcgagaucugcgacuccccgcaccagauucuugauggggaaaacuguacacugaucgacgcccuccugggagauccccagugcgacggcuuucagaauaaaaagugggaucuguucgucgagcggucuaaagccuauagcaacuguuacccuuaugacgugcccgauuacgcuucccuccgcucucugguugccagcuccgggacccuugaauuuaauaacgagagcuucaauugggcuggagugacgcaaaacggcaccucuuccgccugcauuagaggcagcaauucuuccuuuuucagccggcugaacuggcucacacaucugaauuuuaaguauccugcgcuuaacgucaccaugcccaacaaugagcaguucgacaagcuguacaucuggggagugcaccauccugggacagauaaagaccagauuuuucucuaugcccagucuuccggccgcaucaccguuagcacgaagagaucccaacaggcugugauuccgaacaucgggucucggccccgcaucagaaauauuccuagccggaucuccauuuacuggacaaucgucaaacccggagauauucugcugaucaacagcaccggcaaucucaucgccccucgcggguacuucaagauuagaucuggaaaauccagcaucaugcggucugacgcucccauuggcaaguguaagagcgaaugcaucacaccgaacggcuccauuccuaaugacaaacccuuucagaacgugaaucgcaucaccuauggggccuguccuagauacgugaagcagucuacccugaaacuugcgacaggaaugcggaacguccccgagaagcaaacgcgcggcaucuucggggccauugcuggauuuaucgaaaauggcugggaggggaugguugauggaugguauggcuucagacaccagaacagcgagggccgggggcaggccgcugaccugaaauccacccaagccgccauugaucagaucaauggaaagcucaacagacugauuggcaaaacaaaugaaaaguuccaccagaucgagaaggaauuuagcgagguggaagggcgcauucaggaccuugagaaauacguggaggauaccaagaucgaccuguggucuuauaacgcugaacuccuggucgcgcuggagaaccaacauacaaucgaucucaccgacuccgaaaugaauaaacuguucgagaagacgaaaaagcagcuucgggaaaacgccgaggauaugggaaauggcugcuuuaagauuuaccacaaaugugacaacgcuugcaucgggagcauuagaaauggcacauaugaucaugacguguaccgcgacgaggcccugaacaaucgguuccagaucaagggaguugaacucaaaucuggcuacaaggauuggauuaucuggaucuccuuugccauuagcugcuuccugcuuuguguggcucugcucggguuuaucaugugggccugccagaaaggaaacauuagauguaauaucugcauuuga

SEQ ID NO: 204711 - RNA, 1701 nt, Artificial Sequence
  derived and/or modified CDS sequence (opt5) from hemagglutinin__InfluenzaA__AIL94493
augaaggccauccuggugguccuccuguacaccuucgcuacagccaacgcggacacgcuuugcauuggcuaucacgcuaauaacagcaccgauacaguugacaccgugcuggagaaaaaugugacagucacccauuccgugaaccuccuggaagauaagcacaaugggaaacuuuguaagcugagaggaguugcuccccuccaucugggcaaaugcaacaucgccggguggauucugggaaauccugagugugaaucucucagcacagccuccucuuggagcuacaucguggagaccuccucuagcgacaacggcacgugcuauccgggggauuuuauuaauuacgaagaacugcgggagcagcuuuccagcgucucuuccuucgaacgcuuugagaucuuccccaagaccagcucuuggccuaaccacgacuccaauaagggagugacagccgcuuguccccaugccggcgcgaaaucuuuuuauaagaaccugaucuggcucguuaaaaagggcaauagcuacccuaaacugucccaaagcuauauuaacgauaaggggaaggaagugcuuguccuguggggaauccaccaccccuccaccacagccgaccagcagucucucuaccagaaugcugaugccuacguguucgugggcaccagcagauauuccaaaaaguuuaaaccugagauugcuauccggccgaagguccgcgaccaagaggggagaaugaacuacuauuggacgcugguugaacccggagauaaaauuacauucgaggccaccggcaaccugguggugccucgguacgcguuuacaauggaaaagaaugccgggagcggaaucauuaucucugacacccccguccaugauugcaacaccacaugucagacgccugagggcgcuaucaauaccuccuuccccuuucagaacauucacccgaucacaauuggcaaaugcccuaaguauguuaagagcaccaaacuccgccuggccacagggcuuagaaaugugcccucuauccagagccggggacuguucggcgcuauugccggguuuaucgaaggaggcuggaccgggaugguggacggaugguacggcuaucaucaccaaaacgagcagggcuccggguacgccgcugaccucaagucuacgcagaaugcgaucgauaaaauuacaaacaaggucaauagcgugaucgagaaaaugaacacccaguucaccgccguuggaaaggaguucaaucaccuggagaagcgcauugaaaaccuuaauaaaaagguggacgauggcuuucuggacaucuggacauacaacgcugagcuccugguccugcucgaaaaugagagaacccuggauuaucaugacuccaacgugaaaaaccuuuacgagaagguccggaaucaacugaaaaacaaugccaaggaaauugggaacggauguuucgaguuuuaucacaagugcgauaauacauguauggaaagcgugaaaaacggcacguacgacuauccuaaguacucugaggaagccaaacucaaucgcgagaagaucgaugggguuaaacuggaguccaccagaaucuaucagauucuugcuaucuacagcacaguggccucuucccugguccucgugguuagccugggcgcgauuuccuucuggaugugcucuaacggaagccugcagugccggaucuguauuuga

SEQ ID NO: 204712 - RNA, 1701 nt, Artificial Sequence; identical to SEQ ID NO: 204659
  derived and/or modified CDS sequence (opt5) from hemagglutinin__InfluenzaA__AIL94504

SEQ ID NO: 204713 - RNA, 1701 nt, Artificial Sequence; identical to SEQ ID NO: 202066
  derived and/or modified CDS sequence (opt5) from hemagglutinin__InfluenzaA__AIL94515

SEQ ID NO: 204714 - RNA, 1701 nt, Artificial Sequence; identical to SEQ ID NO: 202066
  derived and/or modified CDS sequence (opt5) from hemagglutinin__InfluenzaA__AIL94527

SEQ ID NO: 204715 - RNA, 1701 nt, Artificial Sequence
  derived and/or modified CDS sequence (opt5) from hemagglutinin__InfluenzaA__AIL94539
augaaggccauccuggugguccuccuguacaccuucgcuacagccaacgcggacacgcuuugcauuggcuaucacgcuaauaacagcaccgauacaguugacaccgugcuggagaagaaugugacagucacccauuccgugaaccuccuggaagauaagcacaaugggaaacuuuguaagcugagaggaguugcuccccuccaucugggcaaaugcaacaucgccggguggauucugggaaauccugagugugaaucucucagcacagccuccucuuggagcuacaucguggagaccuccucuagcgacaacggcacgugcuauccgggggauuuuauuaauuacgaagaacugcgggagcagcuuuccagcgucucuuccuucgaacgcuuugagaucuuccccaagaccagcucuuggccuaaccacgacuccaauaagggagugacagccgcuuguccccaugccggcgcgaaaucuuuuuauaagaaccugaucuggcucguuaaaaagggcaauagcuacccuaaacugucccaaagcuauauuaacgauaaggggaaggaagugcuuguccuguggggaauccaccaccccuccaccacagccgaccagcagucucucuaccagaaugcugaugccuacguguucgugggcaccagcagauauuccaaaaaguuuaaaccugagauugcuauccggccgaagguccgcgaccaagaggggagaaugaacuacuauuggacgcugguugaacccggagauaaaauuacauucgaggccaccggcaaccugguggugccucgguacgcguuuacaauggaacgcaaugccgggagcggaaucauuaucucugacacccccgcucaugauugcaacaccacaugucagacgccugagggcgccaucaauaccucccuccccuuccagaacauucacccgaucacaauuggcaagugcccuaaauaugucaagagcaccaagcugagacuugcuacagggcugcggaaugugcccucuauccagagccgcggacucuuuggcgccauugccggguucaucgaaggaggcuggaccgggaugguugacggaugguacggcuaucaucaccaaaacgagcagggcuccggguacgcugcggaccugaaaucuacgcagaaugccaucgauaagauuacaaacaaagugaauagcgucaucgagaagaugaacacccaguuuaccgcugugggaaaagaguucaaucaccuugagaagagaauugaaaaccugaauaagaaaguugacgauggcuuccucgacaucuggacauacaacgccgagcugcuggugcuccuggaaaaugagcggacccuugauuaucaugacuccaacgucaagaaccuguacgagaaagugcgcaaucaacucaagaacaaugccaaagaagucgggaacggauguuuugaguucuaucacaagugcgauaauacauguauggaaagcgugaagaacggcacguacgacuauccuaaauacucugaggaagcuaagcugaauagagagaaaauugaugggguuaaacuugaguccacccggaucuaucagauccuggccauuuacagcacaguggcgucuucccucguccuggugguuagccugggcgcuaucuccuuuuggaugugcucuaacggaagccuccagugccgcauuuguaucuga

SEQ ID NO: 204716 - RNA, 1701 nt, Artificial Sequence; identical to SEQ ID NO: 204659
  derived and/or modified CDS sequence (opt5) from hemagglutinin__InfluenzaA__AIL94550

SEQ ID NO: 204717 - RNA, 1701 nt, Artificial Sequence
  derived and/or modified CDS sequence (opt5) from hemagglutinin__InfluenzaA__AIL94561
augaagaccaucauugcccugagcuacauccucugccugguguucgcucagaaacuucccggcaacgacaauuccacagccacgcugugucucgggcaccaugcggucccuaacggaaccauuguuaagacaaucaccaaugauagaauugaggugacaaacgcuaccgaacuggugcaaaauucuagcaucggcgagaucugcgacuccccgcaccagauucuugauggggaaaacuguacacugaucgacgcccuccugggagauccccagugcgacggcuuucagaauaaaaagugggaucuguucgucgagcggucuaaagccuauagcaacuguuacccuuaugacgugcccgauuacgcuucccuccgcucucugguugccagcuccgggacccuugaauuuaauaacgagagcuucaauugggcuggagugacgcaaaacggcaccucuuccgccugcauuagaggcagcaauucuuccuuuuucagccggcugaacuggcucacacaucugaauuuuaaguauccugcgcuuaacgucaccaugcccaacaaugagcaguucgacaagcuguacaucuggggagugcaccauccugggacagauaaagaccagauuuuucucuaugcccagucuuccggccgcaucaccguuagcacgaagagaucccaacaggcugugauuccgaacaucgggucucggccccgcaucagaaauauuccuagccggaucuccauuuacuggacaaucgucaaacccggagauauucugcugaucaacagcaccggcaaucucaucgccccucgcggguacuucaagauuagaucuggaaaauccagcaucaugcggucugacgcucccauuggcaaguguaagagcgaaugcaucacaccgaacggcuccauuccuaaugacaaacccuuucagaacgugaaucgcaucaccuauggggccuguccuagauacgugaagcagucuacccugaaacuugcgacaggaaugcggaacguccccgagaagcaaacgcgcggcaucuucggggccauugcuggauuuaucgaaaauggcugggaggggaugguugauggaugguauggcuucagacaccagaacagcgagggccgggggcaggccgcugaccugaaauccacccaagccgccauugaucagaucaauggaaagcucaacagacugauuggcaaaacaaaugaaaaguuccaccagaucgagaaggaauuuagcgagguggaagggcgcauucaggaccuugagaaauacguggaggauaccaagaucgaccuguggucuuauaacgcugaacuccuggucgcgcuggagaaccaacauacaaucgaucucaccgacuccgaaaugaauaaacuguucgagaagacgaaaaagcagcuucgggaaaacgccgaggauaugggaaauggcugcuuuaagauuuaccacaaaugugacaacgcuugcaucgggagcauuagaaauggcacauaugaucaugacguguaccgcgacgaggcccugaacaaucgguuccagaucaagggaguugaacucaaaucuggcuacaaggauuggauucuguggaucuccuuugccaucagcugcuuccuucuguguguggcucuccugggguuuauuaugugggccugccagagaggaaacauccgcuguaauauuugcaucuga

SEQ ID NO: 204718 - RNA, 1701 nt, Artificial Sequence
  derived and/or modified CDS sequence (opt5) from hemagglutinin__InfluenzaA__AIL94573
augaaggccauccuggugguccuccuguacaccuucgcuacagccaacgcggacacgcuuugcauuggcuaucacgcuaauaacagcaccgauacaguugacaccgugcuggagaagaaugugaucgucacacauuccgugaaccuccuggaagauaagcacaaugggaaacuuuguaagcugagaggaguugcuccccuccaucugggcaaaugcaacauugccggguggauccugggaaauccugagugugaaucucucagcaccgccuccucuuggagcuacauuguggagacauccucuagcgacaacggaaccugcuauccgggggauuuuaucaauuacgaagaacugcgggagcagcuuuccagcgucucuuccuucgaacgcuuugagaucuuccccaagacgagcucuuggccuaaccacgacuccaauaagggagugaccgccgcuuguccccaugccggcgcgaaaucuuuuuauaagaaccugauuuggcucguuaaaaagggcaauagcuacccuaaacugucccaaagcuauaucaacgauaaggggaaggaagugcuuguccuguggggcauucaccaccccuccacaaccgccgaccagcagucucucuaccagaaugcugaugccuacguguucgugggcacaagcagauauuccaaaaaguuuaaaccugagaucgcuauucggccgaagguccgcgaccaagaggggagaaugaacuacuauuggacccugguugaacccggagauaaaaucacguucgaggccacaggcaaccugguggugccucgguacgcguuuaccauggaacgcaaugccgggagcggaauuaucaucucugacacacccguccaugauugcaacaccaccugucagacaccugagggcgcuauuaauacgucccuccccuuccagaacauccacccgauuaccaucggcaagugcccuaaauauguuaagagcacaaagcugagacuugccaccgggcugcggaaugugcccucuauucagagccgcggacucuuuggcgcuaucgccggguucaucgaaggaggcuggacagggaugguggacggaugguacggcuaucaucaccaaaacgagcagggcuccggguacgccgcugaccugaaaucuacccagaaugcgauugauaagaucacgaacaaagucaauagcgugauugagaagaugaacacacaguuuaccgccguuggaaaagaguucaaucaccuugagaagagaaucgaaaaccugaauaagaaaguggacgauggcuuccucgacauuuggaccuacaacgcugagcugcugguccuccuggaaaaugagcggacacuugauuaucaugacuccaacgugaagaaccuguacgagaaaguccgcaaucaacucaagaacaaugccaaagaaaucgggaacggauguuuugaguucuaucacaagugcgauaauaccuguauggaaagcgugaagaacggcacauacgacuauccuaaauacucugaggaagccaagcugaauagagagaaaaucgaugggguuaaacuugaguccacgcggguguaucagauucuggcuaucuacagcaccgucgccucuucccucgugcugguugugagccugggcgcgauuuccuuuuggaugugcucuaacggaagccuccagugccgcaucuguauuuga

SEQ ID NO: 204719 - RNA, 1701 nt, Artificial Sequence
  derived and/or modified CDS sequence (opt5) from hemagglutinin__InfluenzaA__AIL94584
augaaggccauccuggugguccuccuguacaccuucgcuacagccaacgcggacacgcuuugcauuggcuaucacgcuaauaacagcaccgauacaguugacaccgugcuggagaaaaauaucacagugacccauuccgucaaccuccuggaagauaagcacaaugggaaacuuuguaagcugagaggaguggcuccccuccaucugggcaaaugcaacauugccggguggauccugggaaauccugagugugaaucucucagcacagccuccucuuggagcuacauuguugagaccuccucuagcgacaacggcacgugcuauccgggggauuuuaucaauuacgaagaacugcgggagcagcuuuccagcgugucuuccuucgaacgcuuugagaucuuccccaagaccagcucuuggccuaaccacgacuccaauaagggagucacagccgcuuguccccaugccggcgcgaaaucuuuuuauaagaaccugauuuggcucgugaaaaagggcaauagcuacccuaaacugucccaaagcuauaucaacgauaaggggaaggaaguucuugugcuguggggcauucaccaccccuccaccacagccgaccagcagucucucuaccagaaugcugaugccuacgucuucgugggaaccagcagauauuccaaaaaguuuaaaccugagaucgcuauucggccgaaggugcgcgaccaagaggggagaaugaacuacuauuggacgcuggucgaacccggagauaaaaucacauucgaggccaccggcaaccugguugugccucgguacgcguuuacaauggaacgcaaugccgggagcggaauuaucaucucugacacccccgugcaugauugcaacaccacaugucagacgccugagggcgcuauuaauaccucccuccccuuccagaacauccacccgauuacaaucggcagaugcccuaaguaugucaaaagcaccaagcugcggcuugccacagggcugcgcaaugugcccucuauucagagcagaggacucuuuggcgcuaucgccggguucaucgaaggaggcuggaccgggaugguugacggaugguacggcuaucaucaccaaaacgagcagggcuccggguacgccgcugaccugaagucuacgcagaaugcgauugauaaaaucacaaacaaggugaauagcgucauugagaaaaugaacacccaguuuaccgccgugggaaaggaguucaaucaccuugagaaacggaucgaaaaccugaauaagaagguugacgauggcuuccucgacauuuggacauacaacgcugagcugcuggugcuccuggaaaaugagcgcacccuugauuaucaugacuccaacgucaaaaaccuguacgagaaggugagaaaucaacucaaaaacaaugccaaggaaaucgggaacggauguuuugaguucuaucacaaaugcgauaauacauguauggaaagcgucaagaacggcacguacgacuauccuaaguacucugaggaagccaaacugaaucgggagaagaucgauggggugaaacuugaguccacccgcauuuaucagauccuggcuauuuacagcacaguugccucuucccucgugcuggucgugagccugggcgcgaucuccuuuuggaugugcucuaacggaagccuccagugcagaauuuguaucuga

SEQ ID NO: 204720 - RNA, 1701 nt, Artificial Sequence; identical to SEQ ID NO: 204127
  derived and/or modified CDS sequence (opt5) from hemagglutinin__InfluenzaA__AIL94595

SEQ ID NO: 204721 - RNA, 1701 nt, Artificial Sequence; identical to SEQ ID NO: 202066
  derived and/or modified CDS sequence (opt5) from hemagglutinin__InfluenzaA__AIL94606

SEQ ID NO: 204722 - RNA, 1701 nt, Artificial Sequence; identical to SEQ ID NO: 202112
  derived and/or modified CDS sequence (opt5) from hemagglutinin__InfluenzaA__AIL94618

SEQ ID NO: 204723 - RNA, 1701 nt, Artificial Sequence; identical to SEQ ID NO: 204659
  derived and/or modified CDS sequence (opt5) from hemagglutinin__InfluenzaA__AIL94629

SEQ ID NO: 204724 - RNA, 1701 nt, Artificial Sequence; identical to SEQ ID NO: 202066
  derived and/or modified CDS sequence (opt5) from hemagglutinin__InfluenzaA__AIL94640

SEQ ID NO: 204725 - RNA, 1701 nt, Artificial Sequence
  derived and/or modified CDS sequence (opt5) from hemagglutinin__InfluenzaA__AIL94652
augaaggccauccuggugguccuccuguacaccuucgcuacagccaacgcggacacgcuuugcauuggcuaucacgcuaauaacagcaccgauacaguugacaccgugcuggagaagaaugugacagucacccauuccaucaaccuccuggaagauaagcacaaugggaaacuuuguaagcugagaggaguggcuccccuccaucugggcaaaugcaacauugccggguggauccugggaaauccugagugugaaucucucagcacagccuccucuuggagcuacauuguugagaccuccucuagcgacaacggcacgugcuauccgggggauuuuaucaauuacgaagaacugcgggagcagcuuuccagcgugucuuccuucgaacgcuuugagauguuccccaagaccagcucuuggccuaaccacgacuccaauaagggagucacagccgcuuguccccaugccggcgcgaaaucuuuuuauaagaaccugaucuggcucgugaaaaagggcaauagcuacccuaaacuguccaagagcuauauuaacgauaaggggaaagaaguucuugugcuguggggaauccaccaccccuccaccacagccgaccaacagucucucuaccagaaugcugaugccuacgucuucgugggcaccagcaaguauuccaaaaaguuuaaaccugagauugcuaucagaccgaaggugcgggaccaggaggggcgcaugaacuacuauuggacgcugauugaacccggagauaaaaucacauucgaggccaccggcaaccuggucguuccuagauacgcguuugccauggaacggaaugcugggagcggaauuaucaucucugacacacccgugcaugauugcaacaccaccugucaaacaccugagggcgccauuaauacgucccuccccuuccagaacauccacccgauuaccaucggcaagugcccuaaguaugugaaaagcacaaagcugcgccuugcuaccgggcugagaaauguccccucuauucagagccggggacucuuuggcgccaucgccggguucaucgaaggaggcuggacagggaugguggacggaugguacggcuaucaucaccagaacgagcaaggcuccggguacgcugcggaccugaaaucuacccagaaugccauugauaagaucacgaacaaaguuaauagcgugauugagaagaugaacacacaguuuaccgcugucggaaaggaguucaaucaccuugagaaacgcaucgaaaaccugaauaagaaaguggacgauggcuuccucgacauuuggaccuacaacgccgagcugcugguucuccuggaaaaugagagaacacuugauuaucaugacuccaacgugaagaaccuguacgagaaaguccggaaucagcucaagaacaaugccaaggaaaucgggaacggauguuuugaguucuaucacaaaugcgauaauaccuguauggaaagcgugaagaacggcacauacgacuauccuaaauacucugaggaagcuaagcuggaucgcgagaaaaucgacggggucaaacuugaguccacgagaauuuaucaaauccuggccauuuacagcaccguggcgucuucccucguucugguggucagccugggcgcuaucuccuuuuggaugugcucuaauggaagccuccagugccggauuuguaucuga

SEQ ID NO: 204726 - RNA, 1701 nt, Artificial Sequence; identical to SEQ ID NO: 202112
  derived and/or modified CDS sequence (opt5) from hemagglutinin__InfluenzaA__AIL94663

SEQ ID NO: 204727 - RNA, 1701 nt, Artificial Sequence; identical to SEQ ID NO: 202112
  derived and/or modified CDS sequence (opt5) from hemagglutinin__InfluenzaA__AIL94674

SEQ ID NO: 204728 - RNA, 1701 nt, Artificial Sequence; identical to SEQ ID NO: 202066
  derived and/or modified CDS sequence (opt5) from hemagglutinin__InfluenzaA__AIL94697

SEQ ID NO: 204729 - RNA, 1701 nt, Artificial Sequence; identical to SEQ ID NO: 202112
  derived and/or modified CDS sequence (opt5) from hemagglutinin__InfluenzaA__AIL94709

SEQ ID NO: 204730 - RNA, 1701 nt, Artificial Sequence; identical to SEQ ID NO: 202112
  derived and/or modified CDS sequence (opt5) from hemagglutinin__InfluenzaA__AIL94720

SEQ ID NO: 204731 - RNA, 1701 nt, Artificial Sequence; identical to SEQ ID NO: 202066
  derived and/or modified CDS sequence (opt5) from hemagglutinin__InfluenzaA__AIL94731

SEQ ID NO: 204732 - RNA, 1701 nt, Artificial Sequence; identical to SEQ ID NO: 204659
  derived and/or modified CDS sequence (opt5) from hemagglutinin__InfluenzaA__AIL94743

SEQ ID NO: 204733 - RNA, 1701 nt, Artificial Sequence
  derived and/or modified CDS sequence (opt5) from hemagglutinin__InfluenzaA__AIL94754
augaaggccauccuggugguccuccuguacaccuucgcuacagccaacgcggacacgcuuugcauuggcuaucacgcuaauaacagcaccgauacaguugacaccgugcuggagaagaaugugacagucacccauuccgugaaccuccuggaagauaagcacaaugggaaacuuuguaagcugagaggaguugcuccccuccaucugggcaaaugcaacaucgccggguggauucugggaaauccugagugugaaucucucagcacagccuccucuuggagcuacaucguggagaccuccucuagcgacaacggcacgugcuauccgggggauuuuauuaauuacgaagaacugcgggagcagcuuuccagcgucucuuccuucgaacgcuuugagaucuuccccaagaccagcucuuggccuaaccacgacuccaauaagggagugacagccgcuuguccccaugccggcgcgaaaucuuuuuauaagaaccugaucuggcucguuaaaaagggcaauagcuacccuaaacugucccaaagcuauauuaacgauaaggggaaggaagugcuuguccuguggggaauccaccaccccuccaccacagccgaccagcagucucucuaccagaaugcugaugccuacguguucgugggcaccagcagauauuccaaaaaguuuaaaccugagauugcuauccggccgaagguccgcgaccaagaggggagaaugaacuacuauuggacgcugguugaacccggagauaaaauuacauucgaggccaccggcaaccugguggugccucgguacgcguuuacaauggaacgcaaugccgggagcggaaucauuaucucugacacccccguccaugauugcaacaccacaugucagacgccugagggcgcuaucaauaccucccuccccuuccagaacauucacccgaucacaauuggcaagugcccuaaauauguuaagagcaccaagcugagacuugccacagggcugcggaaugugcccucuauccagagccgcggacucuuuggcgcuauugccggguucaucgaaggaggcuggaccgggaugguggacggaugguacggcuaucaucaccaaaacgagcagggcuccggguacgccgcugaccugaaaucuacgcagaaugcgaucgauaagauuacaaacaaagucaauagcgugaucgagaagaugaacacccaguuuaccgccguuggaaaagaguucaaucaccuugagaagagaauugaaaaccugaauaagaaaguggacgauggcuuccucgacaucuggacauacaacgcugagcugcugauucuccuggaaaaugagcggacccuugauuaucaugacuccaacgucaagaaccuguacgagaaagugcgcaaucaacucaagaacaaugccaaagaaaucgggaacggauguuuugaguucuaucacaagugcgauaauacauguauggaaagcgccaagaacggcacguacgacuauccuaaauacucugaggaagcuaagcugaauagagagaaaaucgauggggucaaacuugaguccacccggauuuaucagauccuggccauuuacagcacaguggcgucuucccucguucugguggucagccugggcgcuaucuccuuuuggaugugcucuaacggaagccuccagugccgcauuuguaucuga

SEQ ID NO: 204734 - RNA, 1701 nt, Artificial Sequence; identical to SEQ ID NO: 204687
  derived and/or modified CDS sequence (opt5) from hemagglutinin__InfluenzaA__AIL94765

SEQ ID NO: 204735 - RNA, 1701 nt, Artificial Sequence; identical to SEQ ID NO: 202066
  derived and/or modified CDS sequence (opt5) from hemagglutinin__InfluenzaA__AIL94777

SEQ ID NO: 204736 - RNA, 1701 nt, Artificial Sequence; identical to SEQ ID NO: 203974
  derived and/or modified CDS sequence (opt5) from hemagglutinin__InfluenzaA__AIL94789

SEQ ID NO: 204737 - RNA, 1701 nt, Artificial Sequence; identical to SEQ ID NO: 202112
  derived and/or modified CDS sequence (opt5) from hemagglutinin__InfluenzaA__AIL94800

SEQ ID NO: 204738 - RNA, 1701 nt, Artificial Sequence
  derived and/or modified CDS sequence (opt5) from hemagglutinin__InfluenzaA__AIL94811
augaagaccaucauugcccugagcuacauccucugccugguguucgcucagaaacuucccggcaacgacaauuccacagccacgcugugucucgggcaccaugcggucccuaacggaaccauuguuaagacaaucaccaaugauagaauugaggugacaaacgcuaccgaacuggugcaaaauucuagcaucggcgagaucugcgacuccccgcaccagauucuugauggggaaaacuguacacugaucgacgcccuccugggagauccccagugcgacggcuuucagaauaaaaagugggaucuguucgucgagcggucuaaagccuauagcaacuguuacccuuaugacgugcccgauuacgcuucccuccgcucucugguugccagcuccgggacccuugaauuuaauaacgagagcuucaauuggacgggagugacccaaaacggcacaucuuccgcuugcauuagacggagcaauucuuccuuuuucagccgccugaacuggcucacccaucugaauuuuaaguauccugcccuuaacgucacaaugcccaacaaugagcaguucgacaagcuguacaucuggggcgugcaccauccugggaccgauaaagaccagauuuuucucuaugcgcagucuuccggaagaaucacgguuagcacaaagcggucccaacaggccgugauuccgaacaucggcucucgccccagaauccggaauauuccuagccgcaucuccauuuacuggaccaucgucaaacccggggauauucugcugaucaacagcacaggaaaucucaucgcuccuagaggcuacuucaagauucggucugggaaauccagcaucaugcgcucugacgcccccauuggaaaguguaagagcgaaugcaucaccccgaacggcuccauuccuaaugacaaacccuuucagaacgugaauagaaucaccuauggcgcuuguccucgguacgugaagcagaacacacugaaacuugccacggggaugcgcaauguccccgagaagcaaaccagaggaaucuucggcgcgauugccggguuuaucgaaaacggaugggagggcaugguugaugggugguauggauuccggcaccaaaauucugagggcagaggccaggcugccgaccugaaaagcacacaggcugccauugaucagaucaacgggaagcucaaucgccugauuggaaaaaccaacgaaaaguuccaccagaucgagaaggaauuuuccgagguggaaggccggauucaggaccuugagaaauacguggaggauacaaagaucgaccuguggagcuauaacgccgaacuccuggucgcucuggagaaucaacauaccaucgaucucacggacucugaaaugaacaaacuguucgagaagaccaaaaagcagcuuagagaaaaugcggaggauauggggaacggaugcuuuaagauuuaccacaaaugugacaaugccugcaucggcuccauucgcaacgggacauaugaucauaauguguaccgggacgaggcucugaacaauagauuccagaucaagggcguugaacucaaaagcggauacaaggacuggauucuguggaucucuuuugccaucuccugcuuccuucuguguguggcccuccugggcuuuauuaugugggcuugccagaaagggaacauccgcuguaauauuugcaucuga

SEQ ID NO: 204739 - RNA, 1701 nt, Artificial Sequence; identical to SEQ ID NO: 201930
  derived and/or modified CDS sequence (opt5) from hemagglutinin__InfluenzaA__AIL94823

SEQ ID NO: 204740 - RNA, 1701 nt, Artificial Sequence
  derived and/or modified CDS sequence (opt5) from hemagglutinin__InfluenzaA__AIL94835
augaagaccaucauugcccugagcuacauccucugccugguguucgcucagaaacuucccggcaacgacaauuccacagccacgcugugucucgggcaccaugcggucccuaacggaaccauuguuaagacaaucaccaaugauagaauugaggugacaaacgcuaccgaacuggugcaaaauuauucuaucggcgagaucugcgacagcccgcaccagauucuugauggggaaaacuguacacugaucgacgcccuccugggagauccccagugcgacggcuuucagaauaaaaagugggaucuguucgucgagcgguccaaagccuacucuaacuguuauccuuacgacgugcccgauuaugcuagccuccgcucccugguugccucuagcgggacccuugaauuuaauaacgaguccuucaauugggcuggagugacgcaaaacggcaccagcucugccugcauuagaggcuccaauagcuccuuuuucucucggcugaacuggcucacacaucugaauuuuaaguacccugcgcuuaacgucaccaugcccaacaaugagcaguucgacaagcuguauaucuggggagugcaccauccugggacagauaaagaccagauuuuucucuacgcccagagcucuggccgcaucaccguuuccacgaagagaagccaacaggcugugauuccgaacaucgggucccggccccgcaucagaaauauuccuucucggaucagcauuuacuggacaaucgucaaacccggagauauucugcugaucaacuccaccggcaaucucaucgccccucgcggguauuucaagauuagaagcggaaaaucuuccaucaugcggagcgacgcucccauuggcaaguguaagucugaaugcaucacaccgaacggcagcauuccuaaugacaaacccuuucagaacgugaaucgcaucaccuacggggccuguccuagauaugugaagcaguccacccugaaacuugcgacaggaaugcggaacguccccgagaagcaaacgcgcggcaucuucggggccauugcuggauuuaucgaaaauggcugggaggggaugguugauggaugguacggcuucagacaccagaacucugagggccgggggcaggccgcugaccugaaaagcacccaagccgccauugaucagaucaauggaaagcucaacagacugauuggcaaaacaaaugaaaaguuccaccagaucgagaaggaauuuuccgagguggaagggcgcauucaggaccuugagaaauauguggaggauaccaagaucgaccuguggagcuacaacgcugaacuccuggucgcgcuggagaaccaacauacaaucgaucucaccgacucugaaaugaauaaacuguucgagaagacgaaaaagcagcuucgggaaaacgccgaggauaugggaaauggcugcuuuaagauuuaucacaaaugugacaacgcuugcaucggguccauuagaaauggcacauacgaucaugacguguaccgcgacgaggcccugaacaaucgguuccagaucaagggaguugaacucaaaagcggcuauaaggauuggauucuguggaucucuuuugccaucuccugcuuccuucuguguguggcucuccugggguuuauuaugugggccugccagaaaggaaacaucagauguaauauuugcaucuga

SEQ ID NO: 204741 - RNA, 1701 nt, Artificial Sequence
  derived and/or modified CDS sequence (opt5) from hemagglutinin__InfluenzaA__AIL94847
augaagaccaucauugcccugagcuacauccucugccugguguucgcucagaaacuucccggcaacgacaauuccacagccacgcugugucucgggcaccaugcggucccuaacggaaccauuguuaagacaaucaccaaugaucaaauugaggugacaaacgcuaccgaacuggugcagucuagcuccacaggcgagaucugcgacucuccgcaccagauccuugauggggaaaauuguacccugauugacgcccuccugggagauccccagugcgacggcuuucaaaacaaaaagugggaucuguucgucgagagaagcaaagccuauuccaauuguuacccuuaugacgugcccgauuacgcuucucuccggagccugguugccuccagcgggacgcuugaauuuaacaaugagucuuucaacuggaccggagugacacagaauggcaccuccagcgcuugcauccgcagaucuaacaauuccuuuuucagccggcugaacuggcucacacaucugaaguuuaaguauccugcccuuaaugucaccaugcccaacgacgagaaauucgauaagcuguacauuuggggcgugcaccauccugggacggacaacgaucagaucuuucucuaugcgcaggccucuggacgcauuacaguuuccaccaaaagaagccaacagacagugaucccgaauauuggcucccggccccgcgucagaaacaucccuucucggaucagcauuuacuggaccaucgugaagcccggggacauucugcugaucaauuccaccggaaaccucauugcuccucgcggcuacuucaaaaucagaagcgggaagucuuccaucaugcggagcgacgcccccauuggaaaguguaauucugaaugcaucacaccgaacggcagcauuccuaaugauaaacccuuucagaacgugaaucgcaucacguauggcgcuuguccuagauacgucaagcagaacacccugaaacuugccacagggaugcggaauguucccgagaagcaaacccgcggaauuuucggcgcgaucgccggguuuaucgaaaacggaugggagggcaugguggacgggugguauggauucagacaccaaaauuccgagggcauuggccaggcugccgaucugaaaucuacacaggcugccaucgaccagauuaacgggaagcucaaucggcugaucggaaaaaccaacgaaaaguuccaccagauugagaaggaauuuagcgagguggaaggcagaauccaggaucuugagaaauacgucgaggacacgaagauugaucugugguccuauaacgccgaacuccugguggcucuggagaaucaacauacaaucgaccucaccgauagcgaaaugaacaaacuguucgagaagaccaaaaagcagcuucgcgaaaaugcggaggacauggggaacggaugcuuuaagaucuaccacaaaugugauaaugccugcauuggcucuauccggaacgggacauaugaccaugacguuuacagagaugaggcucugaauaaccgcuuccagauuaagggcguggaacucaaauccggauacaaggacuggauccuguggauuagcuuugccaucucuugcuuccuucugugugucgcccuccugggcuuuaucaugugggcuugccagaaagggaauauucgguguaacaucugcauuuga

SEQ ID NO: 204742 - RNA, 1701 nt, Artificial Sequence; identical to SEQ ID NO: 197605
  derived and/or modified CDS sequence (opt5) from hemagglutinin__InfluenzaA__AIL94859

SEQ ID NO: 204743 - RNA, 1701 nt, Artificial Sequence
  derived and/or modified CDS sequence (opt5) from hemagglutinin__InfluenzaA__AIL94871
augaagaccaucauugcccugagcuacauccucugccugguguucgcucagaaacuucccggcaacgacaauuccacagccacgcugugucucgggcaccaugcggucccuaacggaaccauuguuaagacaaucaccaaugaucaaauugaggugacaaacgcuaccgaacuggugcagucuagcuccacaggcgagaucugcgacucuccgcaccagauccuugauggggaaaauuguacccugauugacgcccuccugggagauccccagugcgacggcuuucaaaacaaaaagugggaucuguucgucgagagaagcaaagccuauuccaauuguuacccuuaugacgugcccgauuacgcuucucuccggagccugguugccuccagcgggacgcuugaauuuaacaaugagucuuucaacuggaccggagugacacagaauggcaccuccagcgcuugcauccgcagaucuaacaauuccuuuuucagccggcugaacuggcucacacaucugaauuuuaaguauccugcccuuaacgucaccaugcccaacaaugagcaguucgacaagcuguacauuuggggcgugcaccauccugggacggauaaagaccagaucuuucucuaugcgcaagccucuggacgcauuacaguuuccaccaagagaagccagcaggcugugaucccgaacauuggcucccggccccgcgucagaaauaucccuucucggaucagcauuuacuggacaaucgugaaacccggggauauucugcugaucaacuccaccggaaaucucauugccccucgcggcuacuucaagaucagaagcgggaaaucuuccaucaugcggagcgacgcucccauuggaaaguguaacucugaaugcaucaccccgaauggcagcauuccuaacgacaagcccuuucagaaugugaaccgcaucacauauggcgccuguccuagauacgucaaacaauccacgcugaagcuggcgaccgggaugcggaauguucccgagaaacagacacgcggaauuuucggcgccaucgcuggguuuaucgaaaacggaugggagggcaugguggaugggugguauggauucagacaccaaaauucugagggccggggccaggccgcugaccuuaagagcacccaggccgccauugaucagaucaacgggaaacucaauagacugauuggaaagacaaacgaaaaauuccaccagaucgagaaggaauuuuccgagguggaaggccgcauucaagaccuugagaaguacgucgaggauaccaaaaucgaccuguggagcuauaacgcugaacuccugguggcgcuggagaaucagcauacgauugaucucacagacucugaaaugaacaagcuguucgagaaaaccaagaaacagcuucgggaaaaugccgaggauauggggaacggaugcuuuaccaucuaccacaagugugacaaugcuugcaucggcuccauuagaaacgggacauaugaucauaauguuuaccgcgacgaggcccugaacaaucgguuccagaucaagggcauugaacucaaaagcggauacaaggacuggauccuguggauuucuuuugccaucuccugcuuccuucuguguguggcucuccugggcuuuaucaugugggccugccaaaaagggaacauuagauguaauaucugcauuuga

SEQ ID NO: 204744 - RNA, 1701 nt, Artificial Sequence; identical to SEQ ID NO: 204152
  derived and/or modified CDS sequence (opt5) from hemagglutinin__InfluenzaA__AIL94883

SEQ ID NO: 204745 - RNA, 1701 nt, Artificial Sequence; identical to SEQ ID NO: 204137
  derived and/or modified CDS sequence (opt5) from hemagglutinin__InfluenzaA__AIL94894

SEQ ID NO: 204746 - RNA, 1701 nt, Artificial Sequence; identical to SEQ ID NO: 201930
  derived and/or modified CDS sequence (opt5) from hemagglutinin__InfluenzaA__AIL94906

SEQ ID NO: 204747 - RNA, 1701 nt, Artificial Sequence; identical to SEQ ID NO: 202066
  derived and/or modified CDS sequence (opt5) from hemagglutinin__InfluenzaA__AIL94918

SEQ ID NO: 204748 - RNA, 1701 nt, Artificial Sequence; identical to SEQ ID NO: 202066
  derived and/or modified CDS sequence (opt5) from hemagglutinin__InfluenzaA__AIL94930

SEQ ID NO: 204749 - RNA, 1701 nt, Artificial Sequence; identical to SEQ ID NO: 202066
  derived and/or modified CDS sequence (opt5) from hemagglutinin__InfluenzaA__AIL94942

SEQ ID NO: 204750 - RNA, 1701 nt, Artificial Sequence; identical to SEQ ID NO: 202112
  derived and/or modified CDS sequence (opt5) from hemagglutinin__InfluenzaA__AIL94954

SEQ ID NO: 204751 - RNA, 1701 nt, Artificial Sequence; identical to SEQ ID NO: 201930
  derived and/or modified CDS sequence (opt5) from hemagglutinin__InfluenzaA__AIL94965

SEQ ID NO: 204752 - RNA, 1701 nt, Artificial Sequence
  derived and/or modified CDS sequence (opt5) from hemagglutinin__InfluenzaA__AIM55837
augaaggccauccuggugguccuccuguacaccuucgcuacagccacggcggacacccuuugcauuggcuaucacgcuaacaauagcacagauaccguugacacagugcuggagaagaacgugaccgucacacauuccgugaaucuccuggaagauaagcacaacgggaaacuuuguaagcugagaggaguugcuccccuccaucugggcaaaugcaauaucgccggguggauucugggaaacccugagugugaaucucucagcaccgccuccucuuggagcuacaucguggagacguccucuagcgacaaugggaccugcuauccgggcgauuuuauuaacuacgaagaacugcgggagcagcuuuccagcgucucuuccuucgaacgcuuugagaucuuccccaagacaagcucuuggccuaaucacgacuccaacaagggagugaccgccgcuuguccccaugccggcgcgaaaucuuuuuauaagaaucugaucuggcucguuaaaaagggcaacagcuacccuaaacugucccaaagcuauauuaaugauaaggggaaggaagugcuuguccuguggggaauccaccaccccuccacaaccgccgaccagcagucucucuaccagaacgcugaugccuacguguucgugggcacgagcagauauuccaaaaaguuuaaaccugagauugcuauccggccgaagguccgcgaccaagaggggagaaugaauuacuauuggacacugguugaacccggagauaaaauuaccuucgaggccacaggcaaccugguggugccucgguacgcguuuaccauggaacgcaacgccgggagcggaaucauuaucucugacacccccguccaugauugcaauacaacgugucagaccccugagggcgcuaucaacacaucccuccccuuccagaauauucacccgaucaccauuggcaagugcccuaaauauguuaagagcacaaagcugucucuugccaccgggcugagaaacgugcccagcauccagucccggggacucuuuggcgcuauugccggguucaucgaaggaggcuggacggggaugguggacggaugguacggcuaucaucaccaaaaugagcagggcucuggguacgccgcugaccugaaaagcacacagaacgcgaucgauaagauuaccaauaaagucaacuccgugaucgagaagaugaauacccaguuuacagccguuggaaaagaguucaaccaccuugagaagcgcauugaaaaucugaacaagaaaguggacgauggcuuccucgacaucuggaccuacaaugcugagcugcugguccuccuggaaaacgagagaacacuugauuaucaugacagcaaugugaagaaccuguacgagaaaguccggaaccaacucaagaauaacgccaaagaaauugggaauggauguuuugaguucuaucacaagugcgauaacacguguauggaaucugugaagaauggcaccuacgacuauccuaaauacuccgaggaagccaagcugaaccgcgagaaaaucgaugggguuaaacuugagagcacaagaaucuaucagauucuggcuaucuacucuaccguggccuccagccucguccuggugguuucccugggcgcgauuucuuuuuggaugugcagcaauggaucccuccagugccggaucuguauuuga

SEQ ID NO: 204753 - RNA, 1701 nt, Artificial Sequence
  derived and/or modified CDS sequence (opt5) from hemagglutinin__InfluenzaA__AIM55848
augaaggccauccuggugguccuccuguacaccuucgcuacagccaacgcggacacgcuuugcauuggcuaucacgcuaauaacagcaccgauacaguugacaccgugcuggagaagaaugugacagucacccauuccgugaaccuccuggaagauaagcacaaugggaaacuuuguaagcugagaggaguugcuccccuccaucugggcaaaugcaacaucgccggguggauucugggaaauccugagugugaaucucucagcacagccuccucuuggagcuacaucguggagaccuccucuagcgacaacggcacgugcuauccgggggauuuuauuaauuacgaagaacugcgggagcagcuuuccagcgucucuuccuucgaacgcuuugagaucuuccccaagaccagcucuuggccuaaccacgacuccaauaagggagugacagccgcuuguccccaugccggcgcgaaaucuuuuuauaagaaccugaucuggcucguuaaaaagggcaauagcuacccuaaacugucccaaagcuauauuaacgauaaggggaaggaagugcuuguccuguggggaauccaccaccccuccaccacagccgaccagcagucucucuaccagaaugcugaugccuacguguucgugggcaccagcagauauuccaaaaaguuuaaaccugagauugcuauccggccgaagguccgcgaccaagaggggagaaugaacuacuauuggacgcugguugaacccggagauaaaauuacauucgaggccaccggcaaccugguggugccucgguacgcguuuacaauggaacgcaaugccgggagcggaaucauuaucucugacacccccguccaugauugcaacaccacaugucagacgccugagggcgcuaucaauaccucccuccccuuccagaacauucacccgaucacaauuggcaagugcccuaaauauguuaagagcaccaagcugagacuugccacagggcugcggaauauccccucuauucagagccgcggacucuuuggcgcuaucgccggguucaucgaaggaggcuggaccgggaugguggacggaugguacggcuaucaucaccaaaacgagcagggcuccggguacgccgcugaccugaaaucuacgcagaaugcgauugauaagaucacaaacaaagugaauagcgucauugagaagaugaacacccaguuuaccgccgugggaaaagaguucaaucaccuugagaagagaaucgaaaaccugaauaagaaaguugacgauggcuuccucgacauuuggacauacaacaccgagcugcuggugcuccuggaaaaugagcggacacuugauuaucaugacuccaacgucaagaaccuguacgagaaagugcgcaaucaacucaagaacaaugcuaaagaaaucgggaacggauguuuugaguucuaucacaagugcgauaauacguguauggaaagcgucaagaacggcaccuacgacuauccuaaauacucugaggaagccaagcugaauagagagaaaaucgauggggugaaacuugaguccacacggauuuaucagauccuggccauuuacagcaccguugcuucuucccucgugcuggucgugagccugggcgccaucuccuuuuggaugugcucuaacggaagccuccagugccgcauuuguaucuga

SEQ ID NO: 204754 - RNA, 1701 nt, Artificial Sequence; identical to SEQ ID NO: 202112
  derived and/or modified CDS sequence (opt5) from hemagglutinin__InfluenzaA__AIM55859

SEQ ID NO: 204755 - RNA, 1701 nt, Artificial Sequence; identical to SEQ ID NO: 202112
  derived and/or modified CDS sequence (opt5) from hemagglutinin__InfluenzaA__AIM55870

SEQ ID NO: 204756 - RNA, 1701 nt, Artificial Sequence; identical to SEQ ID NO: 202112
  derived and/or modified CDS sequence (opt5) from hemagglutinin__InfluenzaA__AIM55881

SEQ ID NO: 204757 - RNA, 1701 nt, Artificial Sequence; identical to SEQ ID NO: 203974
  derived and/or modified CDS sequence (opt5) from hemagglutinin__InfluenzaA__AIM55893

SEQ ID NO: 204758 - RNA, 1701 nt, Artificial Sequence; identical to SEQ ID NO: 203093
  derived and/or modified CDS sequence (opt5) from hemagglutinin__InfluenzaA__AIM55904

SEQ ID NO: 204759 - RNA, 1701 nt, Artificial Sequence; identical to SEQ ID NO: 202112
  derived and/or modified CDS sequence (opt5) from hemagglutinin__InfluenzaA__AIM55915

SEQ ID NO: 204760 - RNA, 1710 nt, Artificial Sequence
  derived and/or modified CDS sequence (opt5) from hemagglutinin__InfluenzaA__AIM55926
augaaggccauccuggugguccuccuguacaccuucgcuacaacgaacgccgacacccuuugcauuggcuaucacgcgaauaacagcacagauaccguugacacagugcuggagaaaaaugugaccgucacacauuccgugaaccuccuggaagauaagcacaaugggaaacuuuguaagcugagaggaguugcuccccuccaucugggcaaaugcaacaucgccggguggauucugggaaauccugagugugaaucucucagcaccgccuccucuuggagcuacaucguggagacguccucuagcgacaacgggaccugcuauccgggcgauuuuauuaauuacgaagaacugcgggagcagcuuuccagcgucucuuccuucgaacgcuuugagaucuuccccaagacaagcucuuggccuaaccacgacuccaauaagggagugaccgcugccuguccccaugcuggcgccaagagcuuuuauaagaaccugaucuggcucguuaaaaagggcaauucuuacccuaaacugucccaaagcuauauuaacgauaaggggaaggaagugcuuguccuguggggaauccaccaccccuccacaaccgcggaccagcagucucucuaccagaaugccgaugcuuacguguucgugggcacgagcagauauuccaaaaaguuuaaaccugagauugccauccggccgaagguccgcgaccaagaggggagaaugaacuacuauuggacacugguugaacccggagauaaaauuaccuucgaggcuacaggcaaccugguggugccucgguacgccuuuaccauggaacgcaaugcggggagcggaaucauuaucucugacacccccguccaugauugcaacacaacgugucagaccccugagggcgccaucaauacaucccucaccagccugcccuuccagaacauucacccgaucacaauuggcaagugcccuaaauaugugaagucuaccaaacuuagacuggcuacggggcuccggaauguucccagcauccagucccgcggacuguuuggcgccauugcuggguucaucgaaggaggcuggacagggaugguggacggaugguacggcuaucaucaccaaaacgagcagggcucuggguacgccgccgaccuuaaaagcacccagaaugcuaucgauaagauuaccaacaaagucaauuccgugaucgagaagaugaacacacaguuuaccgcgguuggaaaagaguucaaucaccuggagaagagaauugaaaaccucaauaagaaaguggacgauggcuuccuggacaucuggacauacaacgccgagcugcucguccugcuugaaaaugagcggacgcuggauuaucaugacagcaacgugaagaaccucuacgagaaaguccgcaaucaacugaagaacaaugcuaaagaaauugggaacggauguuuugaguucuaucacaagugcgauaauaccuguauggaaucugugaagaacggcacauacgacuauccuaaauacuccgaggaagccaaacuuaauagagagaagaucgaugggguuaagcuggagagcacccggaucuaucagauucucgccaucuacucuacaguggcuuccagccugguccuggugguuucccucggcgccauuucuuuuuggaugugcagcaacggaucccugcagugccgcaucuguauuuga

SEQ ID NO: 204761 - RNA, 1701 nt, Artificial Sequence; identical to SEQ ID NO: 202112
  derived and/or modified CDS sequence (opt5) from hemagglutinin__InfluenzaA__AIM55937

SEQ ID NO: 204762 - RNA, 1701 nt, Artificial Sequence; identical to SEQ ID NO: 203093
  derived and/or modified CDS sequence (opt5) from hemagglutinin__InfluenzaA__AIM55948

SEQ ID NO: 204763 - RNA, 1701 nt, Artificial Sequence; identical to SEQ ID NO: 203075
  derived and/or modified CDS sequence (opt5) from hemagglutinin__InfluenzaA__AIM55962

SEQ ID NO: 204764 - RNA, 1701 nt, Artificial Sequence; identical to SEQ ID NO: 203093
  derived and/or modified CDS sequence (opt5) from hemagglutinin__InfluenzaA__AIM55984

SEQ ID NO: 204765 - RNA, 1701 nt, Artificial Sequence; identical to SEQ ID NO: 203974
  derived and/or modified CDS sequence (opt5) from hemagglutinin__InfluenzaA__AIM55995

SEQ ID NO: 204766 - RNA, 1701 nt, Artificial Sequence
  derived and/or modified CDS sequence (opt5) from hemagglutinin__InfluenzaA__AIM56017
augaaggccauccuggugguccuccuguacaccuucgcuacaacgaacgccgacacccuuugcauuggcuaucacgcgaauaacagcacagauaccguugacacagugcuggagaaaaaugugaccgucacacauuccgugaaccuccuggaagauaagcacaaugggaaacuuuguaagcugagaggaguugcuccccuccaucugggcaaaugcaacaucgccggguggauucugggaaauccugagugugaaucucucagcaccgccuccucuuggagcuacaucguggagacguccucuagcgacaacgggaccugcuauccgggcgauuuuauuaauuacgaagaacugcgggagcagcuuuccagcgucucuuccuucgaacgcuuugagaucuuccccaagacaagcucuuggccuaaccacgacuccaauaagggagugaccgcugccuguccccaugcuggcgccaagagcuuuuauaagaaccugaucuggcucguuaaaaagggccacucuuacccuaaacugucccaaagcuauauuaaugauaaggggaaggaagugcuuguccuguggggaauccaccaucccuccacaaccgcggaccagcagucucucuaccagaacgccgaugcuuacguguucgugggcacgagcagauauuccaaaaaguuuaaaccugagauugccauccggccgaagguccgcgaccaagaggggagaaugaauuacuauuggacacugguugaacccggagauaaaauuaccuucgaggcuacaggcaaccugguggugccucgguacgccuuuaccauggaacgcaacgcggggagcggaaucauuaucucugacacccccguccacgauugcaauacaacgugucagaccccugagggcgccaucaacacaucccuccccuuccagaauauucauccgaucaccauuggcaagugcccuaaauauguuaagagcacaaagcugagacuugcuaccgggcugcggaacgugcccucuauccagagccgcggacucuuuggcgccauugcuggguucaucgaaggaggcuggacggggaugguggacggaugguacggcuaucaccaccaaaaugagcagggcuccggguacgccgccgaccugaaaucuacacagaacgcuaucgauaagauuaccaauaaagucaacagcgugaucgagaagaugaauacccaguuuacagcgguuggaaaagaguucaaccaucuugagaagagaauugaaaaucugaacaagaaaguggacgauggcuuccucgacaucuggaccuacaaugccgagcugcugguccuccuggaaaacgagcggacacuugauuaucacgacuccaaugugaagaaccuguacgagaaaguccgcaaccaacucaagaauaacgcuaaagaaauugggaauggauguuuugaguucuaucauaagugcgauaacacguguauggaaagcgugaagaauggcaccuacgacuauccuaaauacucugaggaagccaagcugaacagagagaaaaucgaugggguuaaacuugaguccacacggaucuaucagauucuggccaucuacagcaccguggcuucuucccucguccuggugguuagccugggcgccauuuccuuuuggaugugcucuaauggaagccuccagugccgcaucuguauuuga

SEQ ID NO: 204767 - RNA, 1701 nt, Artificial Sequence; identical to SEQ ID NO: 204766
  derived and/or modified CDS sequence (opt5) from hemagglutinin__InfluenzaA__AIM56028

SEQ ID NO: 204768 - RNA, 1701 nt, Artificial Sequence
  derived and/or modified CDS sequence (opt5) from hemagglutinin__InfluenzaA__AIM56039
augaaggccauccuggugguccuccuguaccccuucgcuaccgccaacgcggacacacuuugcauuggcuaucacgcuaauaacagcacggauaccguugacacagugcuggagaaaaaugugaccgucacacauuccgugaaccuccuggaagauaagcacaaugggaaacuuuguaagcugagaggaguugccccucuccaucugggcaaaugcaacaucgccggguggauucugggaaauccggagugugaaucucucagcaccgcuuccucuuggagcuacaucguggaggccuccucuagcgacaacggcacaugcuaucccggggauuuuauuaauuacgaagaacugcgggagcagcuuuccagcgucucuuccuucgaacgcuuugagaucuucccuaagaccagcucuuggcccaaccacgacuccaauaagggagugacggcugccuguccucaugcgggcgccaagagcuuuuauaagaaccugaucuggcucguuaaaaagggcaauucuuaccccaaacugucccaaagcuauauuaacgauaaggggaaggaagugcuuguccuguggggaauccaccacccuuccaccacagcugaccagcagucucucuaccagaaugccgaugcuuacguguucgugggcaccagcagauauuccaaaaaguuuaaaccggagauugccauccggcccaagguccgcgaccaagaggggagaaugaacuacuauuggacacugguugaaccuggagauaaaauuaccuucgaggcgacgggcaaccugguggugccccgguacgccuuuacaauggaacgcaaugcugggagcggaaucauuaucucugacaccccuguccaugauugcaacacaaccugucagacccccgagggcgccaucaauacaucccucccguuccagaacauucacccuaucacgauuggcaagugccccaaauauguuaagagcaccaagcugagacuugcuacagggcugcggaaugugccuucuauccagagccgcggacucuuuggcgccauugccggguucaucgaaggaggcuggaccgggaugguggacggaugguacggcuaucaucaccaaaacgagcagggcuccggguacgcugcggaccugaaaucuacacagaaugccaucgauaagauuaccaacaaagucaauagcgugaucgagaagaugaacacgcaguuuacagcuguuggaaaagaguucaaucaccuugagaagagaauugaaaaccugaauaagaaaguggacgauggcuuccucgacaucuggaccuacaacgccgagcugcugguccuccuggaaaaugagcggacccuugauuaucaugacuccaacgugaagaaccuguacgagaaaguccgcaaucaacucaagaacaaugccaaagaaauugggaacggauguuuugaguucuaucacaagugcgauaauacauguauggaaagcgugaagaacggcaccuacgacuaucccaaauacucugaggaagcuaagcugaauagagagaaaaucgaugggguuaaacuugaguccacacggaucuaucagauucuggccaucuacagcacgguggcgucuucccucguccuggugguuagccugggcgcuauuuccuuuuggaugugcucuaacggaagccuccagugccgcaucuguauuuga

SEQ ID NO: 204769 - RNA, 1701 nt, Artificial Sequence
  derived and/or modified CDS sequence (opt5) from hemagglutinin__InfluenzaA__AIM56050
augaaggccauccuggugguccuccuguacaccuucgcuacaacgaacgccgacacccuuugcauuggcuaucacgcgaauaacagcacagauaccguugacacagugcuggagaaaaaugugaccgucacacauuccgugaaccuccuggaagauaagcacaaugggaaacuuuguaagcugagaggaguugcuccccuccaucugggcaaaugcaacaucgccggguggauucugggaaauccugagugugaaucucucagcaccgccuccucuuggagcuacaucguggagacguccucuagcgacaacgggaccugcuauccgggcgauuuuauuaauuacgaagaacugcgggagcagcuuuccagcgucucuuccuucgaacgcuuugagaucuuccccaagacaagcucuuggccuaaccacgacuccaauaagggagugaccgcugccuguccccaugcuggcgccaagagcuuuuauaagaaccugaucuggcucguuaaaaagggcaauucuuacccuaaacugucccaaagcuauauuaacgauaaggggaaggaagugcuuguccuguggggaauccaccaccccuccacaaccgcggaccagcagucucucuaccagaaugccgaugcuuacguguucgugggcacgagcagauauuccaaaaaguuuaaaccugagauugccauccggccgaagguccgcgaccaagaggggagaaugaacuacuauuggacacugguugaacccggagauaaaauuaccuucgaggcuacaggcaaccugguggugccucgguacgccuuuaccauggaacgcaaugcggggagcggaaucauuaucucugacacccccguccaugauugcaacacaacgugucagaccccugagggcgccaucaauacaucccuccccuuccagaacauucacccgaucaccauuggcaagugcccuaaauauguuaagagcacaaagcugagacuugcuaccgggcugcggaaugugcccucuauccagagccgcggacucuuuggcgccauugcuggguucaucgaaggaggcuggacggggaugguggacggaugguacggcuaucaucaccaaaacgagcagggcuccggguacgccgccgaccugaaaucuacacagaaugcuaucgauaagauuaccaacaaagucaauagcgugaucgagaagaugaacacccaguuuacagcgguuggaaaagaguucaaucaccuugagaagagaauugaaaaccugaauaagaaaguggacgauggcuuccucgacaucuggaccuacaacgccgagcugcugguccuccuggaaaaugagcggacacuugauuaucaugacuccaacgugaagaaccuguacgagaaaguccgcaaucaacucaagaacaaugcuaaagaaauugggaacggauguuuugaguucuaucacaagugcgauaauacguguauggaaagcgugaagaacggcaccuacgacuauccuaaauacucugaggaagccaagcugaauagagggaaaaucgauggcguuaaacuugaguccacacggaucuaucagauucuggccaucuacagcaccguggcuucuucccucguccuggugguuagccugggagccauuuccuuuuggaugugcucuaacggcagccuccagugccgcaucuguauuuga

SEQ ID NO: 204770 - RNA, 1701 nt, Artificial Sequence; identical to SEQ ID NO: 202112
  derived and/or modified CDS sequence (opt5) from hemagglutinin__InfluenzaA__AIM56061

SEQ ID NO: 204771 - RNA, 1701 nt, Artificial Sequence; identical to SEQ ID NO: 202112
  derived and/or modified CDS sequence (opt5) from hemagglutinin__InfluenzaA__AIM56072

SEQ ID NO: 204772 - RNA, 1701 nt, Artificial Sequence; identical to SEQ ID NO: 203965
  derived and/or modified CDS sequence (opt5) from hemagglutinin__InfluenzaA__AIM56083

SEQ ID NO: 204773 - RNA, 1701 nt, Artificial Sequence; identical to SEQ ID NO: 202112
  derived and/or modified CDS sequence (opt5) from hemagglutinin__InfluenzaA__AIM56105

SEQ ID NO: 204774 - RNA, 1701 nt, Artificial Sequence; identical to SEQ ID NO: 202112
  derived and/or modified CDS sequence (opt5) from hemagglutinin__InfluenzaA__AIM56116

SEQ ID NO: 204775 - RNA, 1701 nt, Artificial Sequence
  derived and/or modified CDS sequence (opt5) from hemagglutinin__InfluenzaA__AIM56127
augaaggccauccuggugguccuccuguacaccuucgcuacagccaacgcggacacgcuuugcauuggcuaucacgcuaauaacagcaccgauacaguugacaccgugcuggagaaaaaugugacagucacccauuccgugaaccuccuggaagauaagcacaaugggaaacuuuguaagcugagaggaguugcuccccuccaucugggcaaaugcaacaucgccggguggauucugggaaauccugagugugaaucucucagcacagccuccucuuggagcuacaucguggagaccuccucuagcgacaacggcacgugcuauccgggggauuuuauuaauuacgaagaacugcgggagcagcuuuccagcgucucuuccuucgaacgcuuugagaucuuccccaaggccagcucuuggccuaaccacgacuccaauaagggagugaccgcugccuguccccaugcgggcgccaagagcuuuuauaagaaccugaucuggcucguuaaaaagggcaauucuuacccuaaacugucccaaagcuauauuaacgauaaggggaaggaagugcuuguccuguggggaauccaccaccccuccacaaccgcugaccagcagucucucuaccagaaugccgaugcuuacguguucgugggcacaagcagauauuccaaaaaguuuaaaccugagauugccauccggccgaagguccgcgaccaagaggggagaaugaacuacuauuggacccugguugaacccggagauaaaauuacguucgaggcgacaggcaaccugguggugccucgguacgccuuuaccauggaacgcaaugcugggagcggaaucauuaucucugacacacccguccaugauugcaacaccaccugucagacaccugagggcgccaucaauacgucccuccccuuccagaacauucacccgaucaccauuggcaagugcccuaaauauguuaagagcacaaagcugagacuugcuaccgggcugcggaauauccccucuauucagagccgcggacucuuuggcgccaucgccggguucaucgaaggaggcuggacagggaugguggacggaugguacggcuaucaucaccaaaacgagcagggcuccggguacgcugcggaccugaaaucuacccagaaugccauugauaagaucacgaacaaagugaauagcgucauugagaagaugaacacacaguuuaccgcugugggaaaagaguucaaucaccuugagaagagaaucgaaaaccugaauaagaaaguugacgauggcuuccucgacauuuggaccuacaacgccgagcugcuggugcuccuggaaaaugagcggacacuugauuaucaugacuccaacgucaagaaccuguacgagaaagugcgcaaucaacucaagaacaaugccaaagaaaucgggaacggauguuuugaguucuaucacaagugcgauaauaccuguauggaaagcgucaagaacggcacauacgacuauccuaaauacucugaggaagcuaagcugaauagagagaaaaucgauggggugaaacuugaguccacgcggauuuaucagauccuggccauuuacagcaccguugcgucuucccucgugcuggucgugagccugggcgcuaucuccuuuuggaugugcucuaacggaagccuccagugccgcauuuguaucuga

SEQ ID NO: 204776 - RNA, 1701 nt, Artificial Sequence; identical to SEQ ID NO: 202112
  derived and/or modified CDS sequence (opt5) from hemagglutinin__InfluenzaA__AIM56138

SEQ ID NO: 204777 - RNA, 1701 nt, Artificial Sequence; identical to SEQ ID NO: 202112
  derived and/or modified CDS sequence (opt5) from hemagglutinin__InfluenzaA__AIM56149

SEQ ID NO: 204778 - RNA, 1701 nt, Artificial Sequence; identical to SEQ ID NO: 203965
  derived and/or modified CDS sequence (opt5) from hemagglutinin__InfluenzaA__AIM56160

SEQ ID NO: 204779 - RNA, 1701 nt, Artificial Sequence; identical to SEQ ID NO: 202112
  derived and/or modified CDS sequence (opt5) from hemagglutinin__InfluenzaA__AIM56171

SEQ ID NO: 204780 - RNA, 1701 nt, Artificial Sequence
  derived and/or modified CDS sequence (opt5) from hemagglutinin__InfluenzaA__AIM56182
augaaggccauccuggugguccuccuguacaccuucgcuacagccaacgcggacacgcuuugcauuggcuaucacgcuaauaacagcaccgauacaguugacaccgugcuggagaaaaaugugacagucacccauuccgugaaccuccuggaagauaagcacaaugggaaacuuuguaagcugagaggaguugcuccccuccaucugggcaaaugcaacaucgccggguggauucugggaaauccugagugugaaucucucagcacagccuccucuuggagcuacaucguggagaccuccucuagcgacaacggcacgugcuauccgggggauuuuauuaauuacgaagaacugcgggagcagcuuuccagcgucucuuccuucgaacgcuuugagaucuuccccaaggccagcucuuggccuaaccacgacuccaauaagggagugaccgcugccuguccccaugcgggcgccaagagcuuuuauaagaaccugaucuggcucguuaaaaagggcaauucuuacccuaaacugucccaaagcuauauuaacgauaaggggaaggaagugcuuguccuguggggaauccaccaccccuccacaaccgcugaccagcagucucucuaccagaaugccgaugcuuacguguucgugggcacaagcagauauuccaaaaaguuuaaaccugagauugccauccggccgaagguccgcgaccaagaggggagaaugaacuacuauuggacccugguugaacccggagauaaaauuacguucgaggcgacaggcaaccugguggugccucgguacgccuuuaccauggaacgcaaugcugggagcggaaucauuaucucugacacacccguccaugauugcaacaccaccugucagacaccugagggcgccaucaauacgucccuccccuuccagaacauucacccgaucaccauuggcaagugcccuaaauaugugaaaagcacaaagcugagacuugcuaccgggcugcggaauauccccucuauucagagccgcggacucuuuggcgccaucgccggguucaucgaaggaggcuggacagggaugguugacggaugguacggcuaucaucaccaaaacgagcagggcuccggguacgcugcggaccugaaaucuacccagaaugccauugauaagaucacgaacaaagugaauagcgucauugagaagaugaacacacaguuuaccgcugugggaaaagaguucaaucaccuugagaagagaaucgaaaaccugaauaagaaaguugacgauggcuuccucgacauuuggaccuacaacgccgagcugcuggugcuccuggaaaaugagcggacacuugauuaucaugacuccaacgucaagaaccuguacgagaaagugcgcaaucaacucaagaacaaugccaaagaaaucgggaacggauguuuugaguucuaucacaagugcgauaauaccuguauggaaagcgucaagaacggcacauacgacuauccuaaauacucugaggaagcuaagcugaauaaagagaagaucgauggggugaaacuugaguccacgagaauuuaucagauccuggccauuuacagcaccguugcgucuucccucgugcuggucgugagccugggcgcuaucuccuuuuggaugugcucuaacggaagccuccagugccggauuuguaucuga

SEQ ID NO: 204781 - RNA, 1701 nt, Artificial Sequence
  derived and/or modified CDS sequence (opt5) from hemagglutinin__InfluenzaA__AIM56193
augaaggccauccuggugguccuccuguacaccuucgcuacagccaacgcggacacgcuuugcauuggcuaucacgcuaauaacagcaccgauacaguugacaccgugcuggagaagaaugugacagucacccauuccgugaaccuccuggaagauaagcacaaugggaaacuuuguaagcugagaggaguugcuccccuccaucugggcaaaugcaacaucgccggguggauucugggaaauccugagugugaaucucucagcacagccuccucuuggagcuacaucguggagaccuccucuagcgacaacggcacgugcuauccgggggauuuuauuaauuacgaagaacugcgggagcagcuuuccagcgucucuuccuucgaacgcuuugagaucuuccccaagaccagcucuuggccuaaccacgacuccaauaagggagugacagccgcuuguccccaugccggcgcgaaaucuuuuuauaagaaccugaucuggcucguuaaaaagggcaauagcuacccuaaacugucccaaagcuauauuaacgauaaggggaaggaagugcuuguccuguggggaauccaccaccccuccaccacagccgaccagcagucucucuaccagaaugcugaugccuacguguucgugggcaccagcagauauuccaaaaaguuuaaaccugagauugcuauccggccgaagguccgcgaccaagaggggagaaugaacuacuauuggacgcugguugaacccggagauaaagugacauucgaggccaccggcaaccugguggucccucgguacgcguuuacaauggaacgcaaugccgggagcggaauuaucauuucugacacccccgugcaugauugcaacaccacaugucagacgccugagggcgcuaucaauaccucccuccccuuccagaacauccacccgauuacaaucggcaagugcccuaaauauguuaagagcaccaagcugagacuugccacagggcugcggaaugugcccucuauucagagccgcggacucuuuggcgcuaucgccggguucauugaaggaggcuggaccgggauggucgacggaugguacggcuaucaucaccaaaacgagcagggcuccggguacgccgcugaccugaaaucuacgcagaaugcgaucgauaagaucacaaacaaagugaauagcguuauugagaagaugaacacccaguuuaccgccgugggaaaagaguucaaucaccuugagaagagaaucgaaaaccugaauaagaaagucgacgauggcuuccucgacauuuggacauacaacgcugagcugcuggugcuccuggaaaaugagcggacccuugauuaucaugacuccaacgucaagaaccuguacgagaaagugcgcaaucaacucaagaacaaugccaaagaaaucgggaacggauguuuugaguucuaucacaagugcgauaauacauguauggaaagcguuaagaacggcacguacgacuauccuaaauacucugaggaagccaagcugaauagagagaaaauugauggggugaaacuugaguccacccggaucuaucagauccuggcuauuuacagcacagucgccucuucccucgugcugguugugagccugggcgcgaucuccuuuuggaugugcucuaacggaagccuccagugccgcauuuguaucuga

SEQ ID NO: 204782 - RNA, 1701 nt, Artificial Sequence; identical to SEQ ID NO: 202112
  derived and/or modified CDS sequence (opt5) from hemagglutinin__InfluenzaA__AIM56204

SEQ ID NO: 204783 - RNA, 1701 nt, Artificial Sequence; identical to SEQ ID NO: 202112
  derived and/or modified CDS sequence (opt5) from hemagglutinin__InfluenzaA__AIM56215

SEQ ID NO: 204784 - RNA, 1701 nt, Artificial Sequence; identical to SEQ ID NO: 202112
  derived and/or modified CDS sequence (opt5) from hemagglutinin__InfluenzaA__AIM56226

SEQ ID NO: 204785 - RNA, 1701 nt, Artificial Sequence; identical to SEQ ID NO: 204523
  derived and/or modified CDS sequence (opt5) from hemagglutinin__InfluenzaA__AIM56237

SEQ ID NO: 204786 - RNA, 1701 nt, Artificial Sequence; identical to SEQ ID NO: 202112
  derived and/or modified CDS sequence (opt5) from hemagglutinin__InfluenzaA__AIM56259

SEQ ID NO: 204787 - RNA, 1701 nt, Artificial Sequence
  derived and/or modified CDS sequence (opt5) from hemagglutinin__InfluenzaA__AIM56270
augaaggccauccuggugguccuccuguacaccuucgcuacagccaacgcggacacgcuuugcauuggcuaucacgcuaauaacagcaccgauacaguugacaccgugcuggagaagaaugugacagucacccauuccgugaaccuccuggaagauaagcacaaugggaaacuuuguaagcugagaggaguugcuccccuccaucugggcaaaugcaacaucgccggguggauucugggaaauccugagugugaaucucucagcacagccuccucuuggagcuacaucguggagaccuccucuagcgacaacggcacgugcuauccgggggauuuuauuaauuacgaagaacugcgggagcagcuuuccagcgucucuuccuucgaacgcuuugagaucuuccccaagaccagcucuuggccuaaccacgacuccaauaagggagugacagccgcuuguccccaugccggcgcgaaaucuuuuuauaagaaccugaucuggcucguuaaaaagggcaauagcuacccuaaacugucccaaagcuauauuaacgauaaggggaaggaagugcuuguccuguggggaauccaccaccccuccaccacagccgaccagcagucucucuaccagaaugcugaugccuacguguucgugggcaccagcagauauuccaaaaaguuuaaaccugagauugcuauccggccgaagguccgcgaccaagaggggagaaugaacuacuauuggacgcugguugaacccggagauaaaauuacauucgaggccaccggcaaccugguggugccucgguacgcguuuacaauggaacgcaaugccgggagcggaaucauuaucucugacacccccguccaugauugcaacaccacaugucagacgccugagggcgcugugaauaccucccuccccuuccagaacauccacccgauuacaaucggcaagugcccuaaauauguuaagagcaccaagcugagacuugccacagggcugcggaaugugcccucuauucagagccgcggacucuuuggcgcuaucgccggguucauugaaggaggcuggaccgggauggucgacggaugguacggcuaucaucaccaaaacgagcagggcuccggguacgccgcugaccugaaaucuacgcagaaugcgaucgauaagaucacaaacaaagugaauagcguuauugagaagaugaacacccaguuuaccgccgugggaaaagaguucaaucaccuugagaagagaaucgaaaaccugaauaagaaagucgacgauggcuuccucgacauuuggacauacaacgcugagcugcuggugcuccuggaaaaugagcggacccuugauuaucaugacuccaacgucaagaaccuguacgagaaagugcgcaaucaacucaagaacaaugccaaagaaaucgggaacggauguuuugaguucuaucacaagugcgauaauacauguauggaaagcguuaagaacggcacguacgacuauccuaaauacucugaggaagccaagcugaauagagagaaaauugauggggugaaacuugaguccacccggaucuaucagauccuggcuauuuacagcacagucgccucuucccucgugcugguugugagccugggcgcgaucuccuuuuggaugugcucuaacggaagccuccagugccgcauuuguaucuga

SEQ ID NO: 204788 - RNA, 1701 nt, Artificial Sequence; identical to SEQ ID NO: 202112
  derived and/or modified CDS sequence (opt5) from hemagglutinin__InfluenzaA__AIM56281

SEQ ID NO: 204789 - RNA, 1701 nt, Artificial Sequence
  derived and/or modified CDS sequence (opt5) from hemagglutinin__InfluenzaA__AIM56292
augaaggccauccuggugguccuccuguacacccuugcuacagccaacgcggacacgcugugcauuggcuaucacgcuaauaacagcaccgauacaguugacaccgugcucgagaaaaaugugacagucacccauuccgugaaccugcuugaagauaagcacaaugggaaacuguguaagcucagaggaguugcuccccugcaucugggcaaaugcaacaucgccggguggauucucggaaauccugagugugaaucucugagcacagccuccucuuggagcuacaucguggagaccuccucuagcgacaacggcacgugcuauccgggggauuucauuaauuacgaggaacuucgggagcagcuguccagcgucucuuccuuugaacgcuucgagaucuuucccaagaccagcucuuggccuaaccacgacuccaauaagggagugacagccgcuuguccccaugccggcgcgaaaucuuucuauaagaaccucaucuggcugguuaaaaagggcaauagcuacccuaaacuuucccaaagcuauauuaacgauaaggggaaggaaauccuggugcucuggggcauucaccaccccuccaccacagccgaccagcagucucuguaccagaaugcugaugccuacgucuuugugggaaccagcagauauuccaaaaaguucaaaccugagaucgcuauucggccgaaggugcgcgaccaagaggggagaaugaacuacuauuggacgcuggucgaacccggagauaaaaucacauuugaggccaccggcaaccucguugugccucgguacgcguucacaauggaacgcaaugccgggagcggaauuaucaucucugacacccccgugcaugauugcaacaccacaugucagacgccugagggcgcuauuaauaccucccugcccuuucagaacauccacccgauuacaaucggcaagugcccuaaauaugucaagagcaccaaacuuagacuggccacagggcuccggaaugugcccucuauucagagccgcggacuguucggcgcuaucgccggguuuaucgaaggaggcuggaccgggaugguugacggaugguacggcuaucaucaccaaaacgagcagggcuccggguacgccgcugaccuuaagucuacgcagaaugcgauugauaagaucacaaacaaagugaauagcgucauugagaagaugaacacccaguucaccgccgugggaaaagaauuuaaucaccuggagaagagaaucgaaaaccucaauaagaaaguugacgauggcuuccuggacauuuggacauacaacgcugagcugcucgugcugcuugaaaaugagcggacccuggauuaucaugacuccaacgucaagaaccucuacgagaaagugcgcaaucaacugaagaacaaugccaaagaaaucgggaacggauguuucgaguuuuaucacaagugcgauaauacauguauggaaagcgucaagaacggcacguacgacuauccuaaauacucugaggaagccaaacuuaauagagagaagaucgauggggugaagcuggaguccacccggauuuaucagauccucgcuauuuacagcacaguugccucuucccuggugcuggucgugagccucggcgcgaucuccuucuggaugugcucuaacggaagccugcagugccgcauuuguaucuga

SEQ ID NO: 204790 - RNA, 1701 nt, Artificial Sequence
  derived and/or modified CDS sequence (opt5) from hemagglutinin__InfluenzaA__AIM56303
augaaggccauccuggugguccuccuguacacccuugcuacagccaacgcggacacgcugugcauuggcuaucacgcuaauaacagcaccgauacaguugacaccgugcucgagaaaaaugugacagucacccauuccgugaaccugcuugaagauaagcacaaugggaaacuguguaagcucagaggaguugcuccccugcaucugggcaaaugcaacaucgccggguggauucucggaaauccugagugugaaucucugagcacagccuccucuuggagcuacaucguggagaccuccucuagcgacaacggcacgugcuauccgggggauuucauuaauuacgaggaacuucgggagcagcuguccagcgucucuuccuuugaacgcuucgagaucuuucccaagaccagcucuuggccuaaccacgacuccaauaagggagugacagccgcuuguccccaugccggcgcgaaaucuuucuauaagaaccucaucuggcugguuaaaaagggcaauagcuacccuaaacuuucccaaagcuauauuaacgauaaggggaaggaagugcugguccucuggggaauccaccaccccuccaccacagccgaccagcagucucuguaccagaaugcugaugccuacguguuugugggcaccagcagauauuccaaaaaguucaaaccugagauugcuauccggccgaagguccgcgaccaagaggggagaaugaacuacuauuggacgcugguugaacccggagauaaaauuacauuugaggccaccggcaaccucguggugccucgguacgcguucacaauggaacgcaaugccgggagcggaaucauuaucucugacacccagguccaugauugcaacaccacaugucagacgcccgagggcgcuaucaauaccucccugccuuuucagaacauucaccccaucacaauuggcaagugcccgaaauauguuaagagcaccaaacuuagacuggccacagggcuccggaaugugccuucuauccaaagccgcggacuguucggcgcuauugccggguuuaucgaaggaggcuggaccgggaugguggacggaugguacggcuaucaucaccagaacgagcagggcuccggguacgccgcugaccuuaagucuacgcagaaugcgaucgauaagauuacaaacaaagucaauagcgugaucgagaagaugaacacccaauucaccgccguuggaaaagaauuuaaucaccuggagaagagaauugaaaaccucaauaagaaaguggacgauggcuuccuggacaucuggacauacaacgcugagcugcucguccugcuugaaaaugagcggacccuggauuaucaugacuccaacgugaagaaccucuacgagaaaguccgcaaucagcugaagaacaaugccaaagaaauugggaacggauguuucgaguuuuaucacaagugcgauaauacauguauggaaagcgugaagaacggcacguacgacuaucccaaauacucugaggaagccaaacuuaauagagagaagaucgaugggguuaagcuggaguccacccggaucuaucagauucucgcuaucuacagcacaguggccucuucccugguccuggugguuagccucggcgcgauuuccuucuggaugugcucuaacggaagccugcaaugccgcaucuguauuuga

SEQ ID NO: 204791 - RNA, 1701 nt, Artificial Sequence
  derived and/or modified CDS sequence (opt5) from hemagglutinin__InfluenzaA__AIM56314
augaaggccauccuggugguccuccuguacaccuucgcuacagccaacgcggacacgcuuugcauuggcuaucacgcuaauaacagcaccgauacaguugacaccgugcuggagaaaaaugugacagucacccauuccgugaaccuccuggaagauaagcacaaugggaaacuuuguaagcugagaggaguugcuccccuccaucugggcaaaugcaacaucgccggguggauucugggaaauccugagugugaaucucucagcacagccuccucuuggagcuacaucguggagaccuccucuagcgacaacggcacgugcuauccgggggauuuuauuaauuacgaagaacugcgggagcagcuuuccagcgucucuuccuucgaacgcuuugagaucuuccccaagaccagcucuuggccuaaccacgacuccaauaagggagugacagccgcuuguccccaugccggcgcgaaaucuuuuuauaagaaccugaucuggcucguuaaaaagggcaauagcuacccuaaacugucccaaagcuauauuaacgauaaggggaaggaagugcuuguccuguggggaauccaccaccccuccaccacagccgaccagcagucucucuaccagaaugcugaugccuacguguucgugggcaccagcagauauuccaaaaaguuuaaaccugagauugcuauccggccgaagguccgcgaccaagaggggagaaugaacuacuauuggacgcugguugaacccggagauaaaauuacauucgaggccaccggcaaccugguggugccucgguacgcguuuacaauggaacgcaaugccgggagcggaaucauuaucucugacacccccguccaugauugcaacaccacaugucagacgccugagggcgcuaucaauaccucccuccccuuccagaacauucacccgaucacaauuggcaagugcccuaaauauguuaagagcaccaagcugagacuugccacagggcugcggaaugugcccucuauccagagccgcggacucuuuggcgcuauugccggguucaucgaaggaggcuggaccgggaugguggacggaugguacggcuaucaucaccaaaacgagcagggcuccggguacgccgcugaccugaaaucuacgcagaaugcgaucgauaagauuacaaacaaagucaauagcgugaucgagaagaugaacacccaguuuaccgccguuggaaaagaguucaaucaccuugagaagagaauugaaaaccugaauaagaaaguggacgauggcuuccucgacaucuggacauacaacgcugagcugcugguccuccuggaaaaugagcggacccuugauuaucaugacuccaacgugaagaaacuguacgagaagguccgcaaccaacucaaaaauaacgccaaggaaauugggaauggauguuuugaguucuaucacaagugcgauaacacauguauggaaagcgugaaaaauggcacguacgacuauccuaaguacucugaggaagccaaacugaacagagagaagaucgaugggguuaaacuugaguccacccggaucuaucagauucuggcuaucuacagcacaguggccucuucccucguccuggugguuagccugggcgcgauuuccuuuuggaugugcucuaauggaagccuccagugccgcaucuguauuuga

SEQ ID NO: 204792 - RNA, 1701 nt, Artificial Sequence; identical to SEQ ID NO: 202112
  derived and/or modified CDS sequence (opt5) from hemagglutinin__InfluenzaA__AIM56325

SEQ ID NO: 204793 - RNA, 1701 nt, Artificial Sequence
  derived and/or modified CDS sequence (opt5) from hemagglutinin__InfluenzaA__AIM56336
augaaggccauccuggugguccuccuguacaccuucgcuacagccaacgcggacacgcuuugcauuggcuaucacgcuaauaacagcaccgauacaguugacaccgugcuggagaagaaugugacagucacccauuccgugaaccuccuggaagauaagcacaaugggaaacuuuguaagcugagaggaguugcuccccuccaucugggcaaaugcaacaucgccggguggauucugggaaauccugagugugaaucucucagcacagccuccucuuggagcuacaucguggagaccuccucuagcgacaacggcacgugcuauccgggggauuuuauuaauuacgaagaacugcgggagcagcuuuccagcgucucuuccuucgaacgcuuugagaucuuccccaagaccagcucuuggccuaaccacgacuccaauaagggagugacagccgcuuguccccaugccggcgcgaaaucuuuuuauaagaaccugaucuggcucguuaaaaagggcaauagcuacccuaaacugucccaaagcuauauuaacgauaaggggaaggaagugcuuguccuguggggaauccaccaccccuccaccacagccgaccagcagucucucuaccagaaugcugaugccuacguguucgugggcaccagcagauauuccaaaaaguuuaaaccugagauugcuauccggccgaagguccgcgaccaagaggggagaaugaacuacuauuggacgcugguugaacccggagauaaaauuacauucgaggccaccggcaaccugguggugccucgguacgcguuuacaauggaacgcaaugccgggagcggaaucauuaucucugacacccccguccaugauugcaacaccacaugucagacgccugagggcgcuaucaauaccucccuccccuuccagaacauucacccgaucacaauuggcaagugcccuaaauauguuaagagcaccaagcugagacuugccacagggcugcggaauauccccucuauucagagccgcggacucuuuggcgcuaucgccggguucaucgaaggaggcuggaccgggaugguggacggaugguacggcuaucaucaccaaaacgagcagggcuccggguacgccgcugaccugaaaucuacgcagaaugcgauugauaagaucacaaacaaagugaauagcgucauugagaagaugaacacccaguuuaccgccgugggaaaagaguucaaucaccuugagaagagaaucgaaaaccugaauaagaaaguugacgauggcuuccucgacauuuggacauacaacgcugagcugcuggugcuccuggaaaaugagcggacccuugauuaucaugacuccaacgucaagaaccuguacgagaaaauccgcaaucaacucaagaacaaugccaaagaaaucgggaacggauguuuugaguucuaucacaagugcgauaauauguguauggaaagcgugaagaacggcacauacgacuauccuaaauacucugaggaagccaagcugaauagagagaaaauugauggggucaaacuugaguccacgcggaucuaucagauucuggcuaucuacagcaccguggccucuucccucguucugguggucagccugggcgcgauuuccuuuuggaugugcucuaacggaagccuccagugccgcaucuguauuuga

SEQ ID NO: 204794 - RNA, 1701 nt, Artificial Sequence
  derived and/or modified CDS sequence (opt5) from hemagglutinin__InfluenzaA__AIM56347
augaaggccauccuggugguccuccuguacaccuucgcuacagccaacgcggacacgcuuugcauuggcuaucacgcuaauaacagcaccgauacaguugacaccgugcuggagaaaaaugugacagucacccauuccgugaaccuccuggaagauaagcacaaugggaaacuuuguaagcugagaggaguugcuccccuccaucugggcaaaugcaacaucgccggguggauucugggaaauccugagugugaaucucucagcacaaccuccucuuggagcuacaucguggagacguccucuagcgacaacgggaccugcuauccgggcgauuuuauuaauuacgaagaacugcgggagcagcuuuccagcgucucuuccuucgaacgcuuugagaucuuccccaagacaagcucuuggccuaaccacgacuccaauaagggagugaccgccgccuguccccaugcuggcgccaagagcuuuuauaagaaccugaucuggcucguuaaaaagggcaauucuuacccuaaacugucccaaagcuauauuaacgauaaggggaaggaagugcuuguccuguggggaauccaccaccccuccacaaccgcggaccagcagucucucuaccagaaugccgaugcuuacguguucgugggcacgagcagauauuccaaaaaguuuaaaccugagauugccauccggccgaagguccgcgaccaagaggggagaaugaacuacuauuggacacugguugaacccggagauaaaauuaccuucgaggcuacaggcaaccugguggugccucgguacgccuuuaccauggaacgcaaugcggggagcggaaucauuaucucugacacccccguccaugauugcaacacaacgugucagaccccugagggcgccaucaauacaucccuccccuuccagaacauucacccgaucaccauuggcaagugcccuaaauauguuaagagcacaaagcugagacuugcuaccgggcugcggaaugugcccucuauccagagccgcggacucuuuggcgccauugcuggguucaucgaaggaggcuggacggggaugguggacggaugguacggcuaucaucaccaaaacgagcagggcuccggguacgccgccgaccugaaaucuacacagaaugcuaucgauaagauuaccaacaaagucaauagcgugaucgagaagaugaacacccaguuuacagcgguuggaaaagaguucaaucaccuugagaagagaauugaaaaccugaauaagaaaguggacgauggcuuccucgacaucuggaccuacaacgccgagcugcugguccuccuggaaaaugagcggacacuugauuaucaugacuccaacgugaagaaccuguacgagaaaguccgcaaucaacucaagaacaaugcuaaagaaauugggaacggauguuuugaguucuaucacaagugcgauaauacguguauggaaagcgugaagaacggcaccuacgacuauccuaaauacucugaggaagccaagcugaauagagagaaaaucgaugggguuaaacuugaguccacacggaucuaucagauucuggccaucuacagcaccguggcuucuucccucguccuggugguuagccugggcgccauuuccuuuuggaugugcucuaacggaagccuccagugccgcaucuguauuuga

SEQ ID NO: 204795 - RNA, 1701 nt, Artificial Sequence
  derived and/or modified CDS sequence (opt5) from hemagglutinin__InfluenzaA__AIM56358
augaaggccauccuggugguccuccuguacaccuucgcuacagccaacgcggacacgcuuugcauuggcuaucacgcuaauaacagcaccgauacaguugacaccgugcuggagaaaaaugugacagucacccauuccgugaaccuccuggaagauaagcacaaugggaaacuuuguaagcugagaggaguugcuccccuccaucugggcaaaugcaacaucgccggguggauucugggaaauccugagugugaaucucucagcacagccuccucuuggagcuacaucguggagaccuccucuagcgacaacggcacgugcuauccgggggauuuuauuaauuacgaagaacugcgggagcagcuuuccagcgucucuuccuucgaacgcuuugagaucuuccccaagaccagcucuuggccuaaccacgacuccaauaagggagugacagccgcuuguccccaugccggcgcgaaaucuuuuuauaagaaccugaucuggcucguuaaaaagggcaauagcuacccuaaacugucccaaagcuauauuaacgauaaggggaaggaagugcuuguccuguggggaauccaccaccccuccaccacagccgaccagcagucucucuaccagaaugcugaugccuacguguucgugggcaccagcagauauuccaaaaaguuuaaaccugagauugcuauccggccgaagguccgcgaccaagaggggagaaugaacuacuauuggacgcugguuaaacccggagauaagauuacauucgaagccaccggcaaccugguggugccucgguacgcguuuacaauggagcgcaaugccgggagcggaaucauuaucucugacacccccguccaugauugcaacaccacaugucagacgccugaaggcgcuaucaauaccucccuccccuuccagaacauucacccgaucacaauuggcaaaugcccuaaguauguuaagagcaccaaacugagacuugccacagggcugcggaaugugcccucuauccagagccgcggacucuuuggcgcuauugccggguucaucgagggaggcuggaccgggaugguggacggaugguacggcuaucaucaccaaaacgaacagggcuccggguacgccgcugaccugaagucuacgcagaaugcgaucgauaaaauuacaaacaaggucaauagcgugaucgagaaaaugaacacccaguuuaccgccguuggaaaggaguucaaucaccuugaaaagagaauugagaaccugaauaaaaagguggacgauggcuuccucgacaucuggacauacaacgcugaacugcugguccuccuggagaaugaacggacccuugauuaucaugacuccaacgugaaaaaccuguacgagaagguccgcaaucaacucaaaaacaaugccaaggagauugggaacggauguuuugaguucuaucacaagugcgauaauacauguauggagagcgugaaaaacggcacguacgacuauccuaaguacucugaagaggccaaacugaauagagaaaagaucgaugggguuaaacuugaguccacccggaucuaucagauucuggcuaucuacagcacaguggccucuucccucguccuggugguuagccugggcgcgauuuccuuuuggaugugcucuaacggaagccuccagugccgcaucuguauuuga

SEQ ID NO: 204796 - RNA, 1701 nt, Artificial Sequence; identical to SEQ ID NO: 202112
  derived and/or modified CDS sequence (opt5) from hemagglutinin__InfluenzaA__AIM56369

SEQ ID NO: 204797 - RNA, 1701 nt, Artificial Sequence
  derived and/or modified CDS sequence (opt5) from hemagglutinin__InfluenzaA__AIM56380
augaaggccauccuggugguccuccuguacaccuucgcuacagccaacgcggacacgcuuugcauuggcuaucacgcuaauaacagcaccgauacaguugacaccgugcuggagaagaaugugacagucacccauuccgugaaccuccuggaagauaagcacaaugggaaacuuuguaagcugagaggaguugcuccccuccaucugggcaaaugcaacaucgccggguggauucugggaaauccugagugugaaucucucagcacagccuccucuuggagcuacaucguggagaccuccucuagcgacaacggcacgugcuauccgggggauuuuauuaauuacgaagaacugcgggagcagcuuuccagcgucucuuccuucgaacgcuuugagaucuuccccaagaccagcucuuggccuaaccacgacuccaauaagggagugacagccgcuuguccccaugccggcgcgaaaucuuuuuauaagaaccugaucuggcucguuaaaaagggcaauagcuacccuaaacugucccaaagcuauauuaacgauaaggggaaggaagugcuuguccuguggggaauccaccaccccuccaccacagccgaccagcagucucucuaccagaaugcugaugccuacguguucgugggcaccagcagauauuccaaaaaguuuaaaccugagauugcuauccggccgaagguccgcgaccaagaggggagaaugaacuacuauuggacgcugguugaacccggagauaaaauuacauucgaggccaccggcaaccugguggugccucgguacgcguuuacaauggaacgcaaugccgggagcggaaucauuaucucugacacccccguccaugauugcaacaccacaugucagacgccugagggcgcuaucaauaccucccuccccuuccagaacauucacccgaucacaauuggcaagugcccuaaauauguuaagagcaccaagcugagacuugccacagggcugcggaaugugcccucuauccagagccgcggacucuuuggcgcuauugccggguucaucgaaggaggcuggaccgggaugguggacggaugguacggcuaucaucaccaaaacgagcagggcuccggguacgccgcugaccugaaaucuacgcagaaugcgaucgauaagauuacaaacaaagucaauagcgugaucgagaagaugaacacccaguuuaccgccguuggaaaagaguucaaucaccuugagaagagaauugaaaaccugaauaagaaaguggacgauggcuuccucgacaucuggacauacaacgcugagcugcugguccuccuggaaaaugagcggacccuugauuaucaugacuccaacgugaagaaccuguacgagaaaguccgcaaucaacucaagaacaaugccaaagaaauugggaacggauguuuugaguucuaucacaagugcgauaauacauguauggaaagcgugaagaacggcacguacgacuauccuaaauacucugaggaagccaagcuguccagagagaaaaucgaugggguuaaacuugagagcacccggaucuaucagauucuggcuaucuacucuacaguggccuccagccucguccuggugguuucccugggcgcgauuucuuuuuggaugugcagcaauggaucccuccagugccgcaucuguauuuga

SEQ ID NO: 204798 - RNA, 1701 nt, Artificial Sequence; identical to SEQ ID NO: 202112
  derived and/or modified CDS sequence (opt5) from hemagglutinin__InfluenzaA__AIM56391

SEQ ID NO: 204799 - RNA, 1701 nt, Artificial Sequence; identical to SEQ ID NO: 202112
  derived and/or modified CDS sequence (opt5) from hemagglutinin__InfluenzaA__AIM56402

SEQ ID NO: 204800 - RNA, 1701 nt, Artificial Sequence; identical to SEQ ID NO: 203965
  derived and/or modified CDS sequence (opt5) from hemagglutinin__InfluenzaA__AIM56413

SEQ ID NO: 204801 - RNA, 1701 nt, Artificial Sequence; identical to SEQ ID NO: 202112
  derived and/or modified CDS sequence (opt5) from hemagglutinin__InfluenzaA__AIM56425

SEQ ID NO: 204802 - RNA, 1701 nt, Artificial Sequence; identical to SEQ ID NO: 202112
  derived and/or modified CDS sequence (opt5) from hemagglutinin__InfluenzaA__AIM56436

SEQ ID NO: 204803 - RNA, 1701 nt, Artificial Sequence; identical to SEQ ID NO: 202112
  derived and/or modified CDS sequence (opt5) from hemagglutinin__InfluenzaA__AIM56447

SEQ ID NO: 204804 - RNA, 1701 nt, Artificial Sequence; identical to SEQ ID NO: 202112
  derived and/or modified CDS sequence (opt5) from hemagglutinin__InfluenzaA__AIM56469

SEQ ID NO: 204805 - RNA, 1701 nt, Artificial Sequence
  derived and/or modified CDS sequence (opt5) from hemagglutinin__InfluenzaA__AIM56480
augaaggccauccuggugguccuccuguacaccuucgcuacaacgaacgccgacacccuuugcauuggcuaucacgcgaauaacagcacagauaccguugacacagugcuggagaaaaaugugaccgucacacauuccgugaaccuccuggaagauaagcacaaugggaaacuuuguaagcugagaggaguugcuccccuccaucugggcaaaugcaacaucgccggguggauucugggaaauccugagugugaaucucucagcaccgccuccucuuggagcuacaucguggagacguccucuagcgacaacgggaccugcuauccgggcgauuuuauuaauuacgaagaacugcgggagcagcuuuccagcgucucuuccuucgaacgcuuugagaucuuccccaagacaagcucuuggccuaaccacgacuccaauaagggagugaccgcugccuguccccaugcuggcgccaagagcuuuuauaagaaccugaucuggcucguuaaaaagggcaauucuuacccuaaacugucccaaagcuauauuaacgauaaggggaaggaagugcuuguccuguggggaauccaccaccccuccacaaccgcggaccagcagucucucuaccagaaugccgaugcuuacguguucgugggcacgagcagauauuccaaaaaguuuaaaccugagauugccauccggccgaagguccgcgaccaagaggggagaaugaacuacuauuggacacugguugaacccggagauaaaauuaccuucgaggcuacaggcaaccugguggugccucgguacgccuuuaccauggaacgcaaugcggggagcggaaucauuaucucugacacccccguccaugauugcaacacaacgugucagaccccugagggcgccaucaauacaucccuccccuuccagaacauucacccgaucacccugggcaagugcccuaaauauguuaagagcacaaaacuuagacuggcuaccgggcuccggaaugugcccucuauucagagccgcggacuguuuggcgccaucgcuggguucauugaaggaggcuggacggggaugguggacggaugguacggcuaucaucaccaaaacgagcagggcuccggguacgccgccgaccuuaaaucuacacagaaugcuaucgauaagaucaccaacaaagucaauagcgugauugagaagaugaacacccaguuuacagcgguuggaaaagaguucaaucaccuggagaagagaaucgaaaaccucaauaagaaaguggacgauggcuuccuggacauuuggaccuacaacgccgagcugcucguccugcuugaaaaugagcggacacuggauuaucaugacuccaacgugaagaaccucuacgagaaaguccgcaaucaacugaagaacaaugcuaaagaaaucgggaacggauguuuugaguucuaucacaagugcgauaauacguguauggaaagcgugaagaacggcaccuacgacuauccuaaauacucugaggaagccaaacuuaauagagagaagauugaugggguuaagcuggaguccacacggaucuaucagauccucgccauuuacagcaccguggcuucuucccugguccuggugguuagccucggcgccaucuccuuuuggaugugcucuaacggaagccugcagugccgcauuuguaucuga

SEQ ID NO: 204806 - RNA, 1701 nt, Artificial Sequence; identical to SEQ ID NO: 202112
  derived and/or modified CDS sequence (opt5) from hemagglutinin__InfluenzaA__AIM56491

SEQ ID NO: 204807 - RNA, 1710 nt, Artificial Sequence
  derived and/or modified CDS sequence (opt5) from hemagglutinin__InfluenzaA__AIM56502
augaaggccauccuggugguccuccuguacaccuucgcuacagccaacgcggacacgcuuugcauuggcuaucacgcuaauaacagcaccgauacaguugacaccgugcuggagaaaaaugugacagucacccauuccgugaaccuccuggaagauaagcacaaugggaaacuuuguaagcugagaggaguugcuccccuccaucugggcaaaugcaacaucgccggguggauucugggaaauccugagugugaaucucucagcacagccuccucuuggagcuacaucguggagaccuccucuagcgacaacggcacgugcuauccgggggauuuuauuaauuacgaagaacugcgggagcagcuuuccagcgucucuuccuucgaacgcuuugagaucuuccccaaggccagcucuuggccuaaccacgacuccaauaagggagugaccgcugccuguccccaugcgggcgccaagagcuuuuauaagaaccugaucuggcucguuaaaaagggcaauucuuacccuaaacugucccaaagcuauauuaacgauaaggggaaggaagugcuuguccuguggggaauccaccaccccuccacaaccgcugaccagcagucucucuaccagaaugccgaugcuuacguguucgugggcacaagcagauauuccaaaaaguuuaaaccugagauugccauccggccgaagguccgcgaccaagaggggagaaugaacuacuauuggacccugguugaacccggagauaaaauuacguucgaggcgacaggcaaccugguggugccucgguacgccuuuaccauggaacgcaaugcugggagcggaaucauuaucucugacacacccguccaugauugcaacaccaccugucagacaccugagggcgccaucaauacgucccucaccagccugcccuuccagaacauucacccgaucacaauuggcaagugcccuaaauaugugaagucuaccaaacuuagacuggcuacagggcuccggaauauccccagcauucagucccgcggacuguuuggcgccaucgccggguucaucgaaggaggcuggaccgggaugguugacggaugguacggcuaucaucaccaaaacgagcagggcucuggguacgcugcggaccuuaaaagcacgcagaaugccauugauaagaucacaaacaaagucaauuccgugauugagaagaugaacacccaguuuaccgcugugggaaaagaguucaaucaccuggagaagagaaucgaaaaccucaauaagaaaguugacgauggcuuccuggacauuuggacauacaacgccgagcugcucgugcugcuugaaaaugagcggacccuggauuaucaugacagcaacgucaagaaccucuacgagaaagugcgcaaucaacugaagaacaaugccaaagaaaucgggaacggauguuuugaguucuaucacaagugcgauaauacauguauggaaucugucaagaacggcacguacgacuauccuaaauacuccgaggaagcuaaacuuaauagagagaagaucgauggggugaagcuggagagcacccggauuuaucagauccucgccauuuacucuacaguugcguccagccuggugcuggucgugucccucggcgcuaucucuuuuuggaugugcagcaacggaucccugcagugccgcauuuguaucuga

SEQ ID NO: 204808 - RNA, 1701 nt, Artificial Sequence; identical to SEQ ID NO: 202112
  derived and/or modified CDS sequence (opt5) from hemagglutinin__InfluenzaA__AIM56513

SEQ ID NO: 204809 - RNA, 1701 nt, Artificial Sequence; identical to SEQ ID NO: 204057
  derived and/or modified CDS sequence (opt5) from hemagglutinin__InfluenzaA__AIM56524

SEQ ID NO: 204810 - RNA, 1701 nt, Artificial Sequence; identical to SEQ ID NO: 202112
  derived and/or modified CDS sequence (opt5) from hemagglutinin__InfluenzaA__AIM56535

SEQ ID NO: 204811 - RNA, 1701 nt, Artificial Sequence; identical to SEQ ID NO: 202112
  derived and/or modified CDS sequence (opt5) from hemagglutinin__InfluenzaA__AIM56546

SEQ ID NO: 204812 - RNA, 1701 nt, Artificial Sequence; identical to SEQ ID NO: 203965
  derived and/or modified CDS sequence (opt5) from hemagglutinin__InfluenzaA__AIM56557

SEQ ID NO: 204813 - RNA, 1701 nt, Artificial Sequence
  derived and/or modified CDS sequence (opt5) from hemagglutinin__InfluenzaA__AIM56568
augaaggccauccuggugguccuccuguacaccuucgcuacagccaacgcggacacgcuuugcauuggcuaucacgcuaauaacagcaccgauacaguugacaccgugcuggagaagaaugugacagucacccauuccgugaaccuccuggaagauaagcacaaugggaaacuuuguaagcugagaggaguugcuccccuccaucugggcaaaugcaacaucgccggguggauucugggaaauccugagugugaaucucucagcacagccuccucuuggagcuacaucguggagaccuccucuagcgacaacggcacgugcuauccgggggauuuuauuaauuacgaagaacugcgggagcagcuuuccagcgucucuuccuucgaacgcuuugagaucuucagcaagaccucuuccuggcccaaccacgacagcaauaagggagugacagccgcuuguccucaugccggcgcgaaaucuuuuuauaagaaccugaucuggcucguuaaaaagggcaauuccuaccccaaacugagccaauccuauauuaacgauaaggggaaggaagugcuuguccuguggggaauccaccacccuucuaccacagccgaccagcagagccucuaccagaaugcugaugccuacguguucgugggcaccuccagauauagcaaaaaguuuaaacccgagauugcuauccggccuaagguccgcgaccaagaggggagaaugaacuacuauuggacgcugguugaaccgggagauaaaauuacauucgaggccaccggcaaccugguggugccccgguacgcguuuacaauggaacgcaaugccgggucuggaaucauuaucuccgacaccccuguccaugauugcaacaccacaugucagacgcccgagggcgcuaucaauaccagccucccuuuccagaacauucaccccaucacaauuggcaagugcccgaaauaugugaagucuaccaagcugagacuugccacagggcugcggaauguuccuagcauccagucccgcggacucuuuggcgcuauugccggguucaucgaaggaggcuggaccgggaugguggacggaugguacggcuaucaucaccaaaacgagcagggcucuggguacgccgcugaccugaaaagcacgcagaaugcgaucgauaagauuacaaacaaagucaauuccgugaucgagaagaugaacacccaguuuaccgccguuggaaaagaguucaaucaccuugagaagagaauugaaaaccugaauaagaaaguggacgauggcuuccucgacaucuggacauacaacgcugagcugcugguccuccuggaaaaugagcggacccuugauuaucaugacagcaacgugaagaaccuguacgagaaaguccgcaaucaacucaagaacaaugccaaagaaauugggaacggauguuuugaguucuaucacaagugcgauaauacauguauggaaucugugaagaacggcacguacgacuaucccaaauacuccgaggaagccaagcugaauagagagaaaaucgaugggguuaaacuugagagcacccggaucuaucagauucuggcuaucuacucuacaguggccuccagccucguccuggugguuucccugggcgcgauuucuuuuuggaugugcagcaacggaucccuccagugccgcaucuguauuuga

SEQ ID NO: 204814 - RNA, 1701 nt, Artificial Sequence
  derived and/or modified CDS sequence (opt5) from hemagglutinin__InfluenzaA__AIM56579
augaaggccauccuggugguccuccuguacaccuucgcuacaacgaacgccgacacccuuugcauuggcuaucacgcgaauaacagcacagauaccguugacacagugcuggagaaaaaugugaccgucacacauuccgugaaccuccuggaagaugagcacaaugggaaacuuuguaaacugagaggaguugcuccccuccaucugggcaagugcaacaucgccggguggauucugggaaauccugaaugugagucucucagcaccgccuccucuuggagcuacaucguggaaacguccucuagcgacaacgggaccugcuauccgggcgauuuuauuaauuacgaggagcugcgggaacagcuuuccagcgucucuuccuucgagcgcuuugaaaucuuccccaaaacaagcucuuggccuaaccacgacuccaauaagggagugaccgcugccuguccccaugcuggcgccaagagcuuuuauaaaaaccugaucuggcucguuaagaaaggcaauucuuacccuaagcugucccaaagcuauauuaacgauaaagggaaggaggugcuuguccuguggggaauccaccaccccuccacaaccgcggaccagcagucucucuaccagaauacggaugccuacguguucgugggcacaagcagauauuccaagaaauuuaagccugagauugcuauccggccgaaaguccgcgaccaagaagggagaaugagcuacuauuggacccugguugagcccggagauaagauuacauucgaagccaccggcaaccugguggugccucgguacgcuuuuaccauggagcgcaacgccgggucuggaaucauuaucuccgacacacccguccaugauugcaauacgaccugucagacaccugaaggcgcgaucaacaccagccuccccuuccagaauauucacccgaucacaauuggcaaaugcccuaaguaugugaaaucuaccaagcugagacuugccacggggcugcggaacguucccagcauccagucccgcggacucuuuggcgcuauugccggguucaucgagggaggcuggacagggaugguggacggaugguacggcuaucaucaccaaaaugagcagggcucuggguacgcugccgaccugaaaagcacccagaacgccaucgauaaaauuaccaauaaggucaacuccgugaucgaaaagaugaauacacaguuuaccgcuguuggaaaggaguucaaccaccuugaaaagagaauugagaaucugaacaagaagguggacgauggcuuccucgacaucuggacauacaaugcggaacugcugguccuccuggagaacgagcggacgcuugauuaucaugacagcaaugugaaaaaccuguacgaaaagguccgcaaccaacucaaaaauaacgccaaggagauugggaauggauguuuugaguucuaucacaaaugcgauaacaccuguauggaaucugugaagaauggcacauacgacuauccuaaguacuccgaagaggcuaaacugaacagagagaagaucgaugggguuaaacuugaaagcacccggaucuaucagauucuggccaucuacucuacaguggccuccagccucguccuggugguuucccugggcgcuauuucuuuuuggaugugcagcaauggaucccuccagugccgcaucuguauuuga

SEQ ID NO: 204815 - RNA, 1710 nt, Artificial Sequence
  derived and/or modified CDS sequence (opt5) from hemagglutinin__InfluenzaA__AIM56590
augaaggccauccuggugguccuccuguacaccuucgcuacagccaacgcggacacgcuuugcauuggcuaucacgcuaauaacagcaccgauacaguugacaccgugcuggagaaaaaugugacagucacccauuccgugaaccuccuggaagauaagcacaaugggaaacuuuguaagcugagaggaguugcuccccuccaucugggcaaaugcaacaucgccggguggauucugggaaauccugagugugaaucucucagcacagccuccucuuggagcuacaucguggagaccuccucuagcgacaacggcacgugcuauccgggggauuuuauuaauuacgaagaacugcgggagcagcuuuccagcgucucuuccuucgaacgcuuugagaucuuccccaagaccagcucuuggccuaaccacgacuccaauaagggagugacagccgcuuguccccaugccggcgcgaaaucuuuuuauaagaaccugaucuggcucguuaaaaagggcaauagcuacccuaaacugucccaaagcuauauuaacgauaaggggaaggaagugcuuguccuguggggaauccaccaccccuccaccacagccgaccagcagucucucuaccagaaugcugaugccuacguguucgugggcaccagcagauauuccaaaaaguuuaaaccugagauugcuauccggccgaagguccgcgaccaagaggggagaaugaacuacuauuggacgcugguugaacccggagauaaaauuacauucgaggccaccggcaaccugguggugccucgguacgcguuuacaauggaacgcaaugccgggagcggaaucauuaucucugacacccccguccaugauugcaacaccacaugucagacgccugagggcgcuaucaauaccucccucacaagccugcccuuccagaacauucacccgaucaccauuggcaagugcccuaaauaugugaagucuacaaaacuuagacuggccaccgggcuccggaauguucccagcauccagucccgcggacuguuuggcgcuauugccggguucaucgaaggaggcuggacggggaugguggacggaugguacggcuaucaucaccaaaacgagcagggcucuggguacgccgcugaccuuaagagcacacagaaugcgaucgauaagauuaccaacaaagucaauuccgugaucgagaagaugaacacccaguuuacagccguuggaaaagaguucaaucaccuggagaagagaauugaaaaccucaauaagaaaguggacgauggcuuccuggacaucuggaccuacaacgcugagcugcucguccugcuugaaaaugagcggacacuggauuaucaugacagcaacgugaagaaccucuacgagaaaguccgcaaucaacugaagaacaaugccaaagaaauugggaacggauguuuugaguucuaucacaagugcgaugacacguguauggaaucugugaagaauggcaccuacgauuauccuaaauacuccgaggaagccaaacuuaacagagagaagaucgacgggguuaagcuggagagcacacggaucuaucagauucucgcuaucuacucuaccguggccuccagccugguccuggugguuucccucggcgcgauuucuuuuuggaugugcagcaauggaucccugcagugccgcaucuguauuuga

SEQ ID NO: 204816 - RNA, 1710 nt, Artificial Sequence
  derived and/or modified CDS sequence (opt5) from hemagglutinin__InfluenzaA__AIM56601
augaaggccauccuggugguccuccuguacaccuucgcuacagccaacgcggacacgcuuugcauuggcuaucacgcuaauaacagcaccgauacaguugacaccgugcuggagaaaaaugugacagucacccauuccgugaaccuccuggaagauaagcacaaugggaaacuuuguaagcugagaggaguugcuccccuccaucugggcaaaugcaacaucgccggguggauucugggaaauccugagugugaaucucucagcacagccuccucuuggagcuacaucguggagaccuccucuagcgacaacggcacgugcuauccgggggauuuuauuaauuacgaagaacugcgggagcagcuuuccagcgucucuuccuucgaacgcuuugagaucuuccccaagaccagcucuuggccuaaccacgacuccaauaagggagugacagccgcuuguccccaugccggcgcgaaaucuuuuuauaagaaccugaucuggcucguuaaaaagggcaauagcuacccuaaacugucccaaagcuauauuaacgauaaggggaaggaagugcuuguccuguggggaauccaccaccccuccaccacagccgaccagcagucucucuaccagaaugcugaugccuacguguucgugggcaccagcagauauuccaaaaaguuuaaaccugagauugcuauccggccgaagguccgcgaccaagaggggagaaugaacuacuauuggacgcugguugaacccggagauaaaauuacauucgaggccaccggcaaccugguggugccucgguacgcguuuacaauggaacgcaaugccgggagcggaaucauuaucucugacacccccguccaugauugcaacaccacaugucagacgccugagggcgcuaucaauaccucccucacaagccugcccuuccagaacauucacccgaucaccauuggcaagugcccuaaauaugugaagucuacaaaacuuagacuggccaccgggcuccggaauguucccagcauccagucccgcggacuguuuggcgcuauugccggguucaucgaaggaggcuggacggggaugguggacggaugguacggcuaucaucaccaaaacgagcagggcucuggguacgccgcugaccuuaagagcacacagaaugcgaucgauaagauuaccaacaaagucaauuccgugaucgagaagaugaacacccaguuuacagccguuggaaaagaguucaaucaccuggagaagagaauugaaaaccucaauaagaaaguggacgauggcuuccuggacaucuggaccuacaacgcugagcugcucguccugcuugaaaaugagcggacacuggauuaucaugacagcaacgugaagaaccucuacgagaaaguccgcaaucaacugaagaacaaugccaaagaaauugggaacggauguuuugaguucuaucacaagugcgauaauacguguauggaaucugugaagaacggcaccuacgacuauccuaaauacuccgaggaagccaaacuuaauagagagaagaucgaugggguuaagcuggagagcacacggaucuaucagauucucgcuaucuacucuaccguggccuccagccugguccuggugguuucccucggcgcgauuucuuuuuggaugugcagcaacggaucccugcagugccgcaucuguauuuga

SEQ ID NO: 204817 - RNA, 1710 nt, Artificial Sequence
  derived and/or modified CDS sequence (opt5) from hemagglutinin__InfluenzaA__AIM56612
augaaggccauccuggugguccuccuguacaccuucgcuacagccaacgcggacacgcuuugcauuggcuaucacgcuaauaacagcaccgauacaguugacaccgugcuggagaaaaaugugacagucacccauuccgugaaccuccuggaagauaagcacaaugggaaacuuuguaagcugagaggaguugcuccccuccaucugggcaaaugcaacaucgccggguggauucugggaaauccugagugugaaucucucagcacagccuccucuuggagcuacaucguggagaccuccucuagcgacaacggcacgugcuauccgggggauuuuauuaauuacgaagaacugcgggagcagcuuuccagcgucucuuccuucgaacgcuuugagaucuuccccaagaccagcucuuggccuaaccacgacuccaauaagggagugacagccgcuuguccccaugccggcgcgaaaucuuuuuauaagaaccugaucuggcucguuaaaaagggcaauagcuacccuaaacugucccaaagcuauauuaacgauaaggggaaggaagugcuuguccuguggggaauccaccaccccuccaccacagccgaccagcagucucucuaccagaaugcugaugccuacguguucgugggcaccagcagauauuccaaaaaguuuaaaccugagauugcuauccggccgaagguccgcgaccaagaggggagaaugaacuacuauuggacgcugguugaacccggagauaaaauuacauucgaggccaccggcaaccugguggugccucgguacgcguuuacaauggaacgcaauaccgggagcggaaucauuaucucugacacccccguccaugauugcaacacaacgugucagaccccugagggcgccaucaauacaucccucaccagccugcccuuccagaacauucacccgaucacaauuggcaagugcccuaaauaugugaagucuaccaaacuuagacuggcuacggggcuccggaauguucccagcauccagucccgcggacuguuuggcgccauugcuggguucaucgaaggaggcuggacagggaugguggacggaugguacggcuaucaucaccaaaacgagcagggcucuggguacgccgccgaccuuaagagcacccagaaugcuaucgauaagauuaccaacaaagucaauuccgugaucgagaagaugaacacacaguuuaccgcgguuggaaaagaguucaaucaccuggagaagagaauugaaaaccucaauaagaaaguggacgauggcuuccuggacaucuggacauacaacgccgagcugcucguccugcuugaaaaugagcggacgcuggauuaucaugacagcaacgugaagaaccucuacgagaaaguccgcaaucaacugaagaacaaugcuaaagaaauugggaacggauguuuugaguucuaucacaagugcgauaauaccuguauggaaucugugaagaacggcacauacgacuauccuaaauacuccgaggaagccaaacuuaauagagagaagaucgaugggguuaagcuggagagcacccggaucuaucagauucucgccaucuacucuacaguggcuuccagccugguccuggugguuucccucggcgccauuucuuuuuggaugugcagcaacggaucccugcagugccgcaucuguauuuga

SEQ ID NO: 204818 - RNA, 1701 nt, Artificial Sequence
  derived and/or modified CDS sequence (opt5) from hemagglutinin__InfluenzaA__AIM56623
augaaggccauccuggugguccuccuguacaccuucgcuacagccaacgcggacacgcuuugcauuggcuaucacgcuaauaacagcaccgauacaguugacaccgugcuggagaagaaugugacagucacccauuccgugaaccuccuggaagauaagcacaaugggaaacuuuguaagcugagaggaguugcuccccuccaucugggcaaaugcaacaucgccggguggauucugggaaauccugagugugaaucucucagcacagccuccucuuggagcuacaucguggagaccuccucuagcgacaacggcacgugcuauccgggggauuuuauuaauuacgaagaacugcgggagcagcuuuccagcgucucuuccuucgaacgcuuugagaucuuccccaagaccagcucuuggccuaaccacgacuccaauaagggagugacagccgcuuguccccaugccggcgcgaaaucuuuuuauaagaaccugaccuggcucguuaaaaagggcaauagcuacccuaaacugucccaaagcuauaucaacgauaaggggaaggaagugcuuguccuguggggcauucaccaccccuccacaaccgccgaccagcagucucucuaccagaaugcugaugccuacguguucgugggaacgagcagauauuccaaaaaguuuaaaccugagaucgcuauucggccgaagguccgcgaccaagaggggagaaugaacuacuauuggacacugguugaacccggagauaaaaucaccuucgaggccacaggcaaccugguggugccucgguacgcguuuaccauggaacgcaaugccgggagcggaauuaucauuucugacacccccguccaugauugcaacacaacgugucagaccccugagggcgcuaucaauacaucccuccccuuccagaacauccacccgauuaccaucggcaagugcccuaaauauguuaagagcacaaagcugagacuugccaccgggcugcggaaugugcccucuauucagagccgcggacucuuuggcgcuaucgccggguucauugaaggaggcuggacggggaugguggacggaugguacggcuaucaucaccaaaacgagcagggcuccggguacgccgcugaccugaaaucuacacagaaugcgaucgauaagaucaccaacaaagucaauagcgugauugagaagaugaacacccaguuuacagccguuggaaaagaguucaaucaccuugagaagagaaucgaaaaccugaauaagaaaguggacgauggcuuccucgacauuuggaccuacaacgcugagcugcugguccuccuggaaaaugagcggacacuugauuaucaugacuccaacgugaagaaccuguacgagaaaguccgcaaucaacucaagaacaaugccaaagaaaucgggaacggauguuuugaguucuaucacaagugcgauaauacguguauggaaagcgugaagaacggcaccuacgacuauccuaaauacucugaggaagccaagcugaauagagagaaaauugaugggguuaaacuugaguccacacggaucuaucagauccuggcuauuuacagcaccguggccucuucccucguccuggugguuagccugggcgcgaucuccuuuuggaugugcucuaacggaagccuccagugccgcauuuguaucuga

SEQ ID NO: 204819 - RNA, 1701 nt, Artificial Sequence
  derived and/or modified CDS sequence (opt5) from hemagglutinin__InfluenzaA__AIM56634
augaaggccauccuggugguccuccuguacaccuucgcuacagccaacgcggacacgcuuugcauuggcuaucacgcuaauaacagcaccgauacaguugacaccgugcuggagaagaaugugacagucacccauuccgugaaccuccuggaagauaagcacaaugggaaacuuuguaagcugagaggaguugcuccccuccaucugggcaaaugcaacaucgccggguggauucugggaaauccugagugugaaucucucagcacagccaacuccuggucuuacaucguggagaccagcuccucugacaauggcacgugcuauccgggggauuuuauuaacuacgaagaacugcgggagcagcuuagcuccgucagcucuuucgaacgcuuugagaucuuccccaagaccuccagcuggccuaaucacgacucuaacaagggagugacagccgcuuguccccaugccggcgcgaaauccuuuuauaagaaucugaucuggcucguuaaaaagggcaacagcuacccuaaacugucucaauccuauauuaaugauaaggggaaggaagugcuuguccuguggggaauccaccaccccagcaccacagccgaccagcagucccucuaccagaacgcugaugccuacguguucgugggcaccucuagauauagcaaaaaguuuaaaccugagauugcuauccggccgaagguccgcgaccaagaggggagaaugaacuacuauuggacgcugguugaacccggagauaaaauuacauucgaggccaccggcaaucugguggugccucgguacgcguuuacaauggaacgcaacgccggguccggaaucauuaucagcgacacccccguccaugauugcaauaccacaugucagacgccugagggcgcuaucaacaccucucuccccuuccagaauauucacccgaucacaauuggcaagugcccuaaauaugugaaguccaccaagcugagacuugccacagggcugcggaacguucccagcauccagucucgcggacucuuuggcgcuauugccggguucaucgaaggaggcuggaccgggaugguggacggaugguacggcuaucaucaccaaaaugagcagggcagcggguacgccgcugaccugaaauccacgcagaacgcgaucgauaagauuacaaauaaagucaacucugugaucgagaagaugaauacccaguuuaccgccguuggaaaagaguucaaccaccuugagaagagaauugaaaaucugaacaagaaaguggacgauggcuuccucgacaucuggacauacaaugcugagcugcugguccuccuggaaaacgagcggacccuugauuaucaugacagcaacgugaagaaucuguacgagaaaguccgcaaccaacucaagaauaacgccaaagaaauugggaauggauguuuugaguucuaucacaagugcgauaacacauguauggaauccgugaagaauggcacguacgacuauccuaaauacagcgaggaagccaagcugaacagagagaaaaucgaugggguuaaacuugagucuacccggaucuaucagauucuggcuaucuacuccacaguggccagcucucucguccuggugguuucccugggcgcgauuagcuuuuggaugugcuccaauggaucucuccagugccgcaucuguauuuga

SEQ ID NO: 204820 - RNA, 1710 nt, Artificial Sequence
  derived and/or modified CDS sequence (opt5) from hemagglutinin__InfluenzaA__AIM56645
augaaggccauccuggugguccuccuguacaccuucgcuacagccaacgcggacacgcuuugcauuggcuaucacgcuaauaacagcaccgauacaguugacaccgugcuggagaagaaugugacagucacccauuccgugaaccuccuggaagauaagcacaaugggaaacuuuguaagcugagaggaguugcuccccuccaucugggcaaaugcaacaucgccggguggauucugggaaauccugagugugaaucucucagcacagccuccucuuggagcuacaucguggagaccuccucuagcgacaacggcacgugcuauccgggggauuuuauuaauuacgaagaacugcgggagcagcuuuccagcgucucuuccuucgaacgcuuugagaucuuccccaagaccagcucuuggccuaaccacgacuccaauaagggagugacagccgcuuguccccaugccggcgcgaaaucuuuuuauaagaaccugaucuggcucguuaaaaagggcaauagcuacccuaaacugucccaaagcuauauuaacgauaaggggaaggaagugcuuguccuguggggaauccaccaccccuccaccacagccgaccagcagucucucuaccagaaugcugaugccuacguguucgugggcaccagcagauauuccaaaaaguuuaaaccugagauugcuauccggccgaagguccgcgaccaagaggggagaaugaacuacuauuggacgcugguugaacccggagauaaaauuacauucgaggccaccggcaaccugguggugccucgguacgcguuuacaauggaacgcaaugccgggagcggaaucauuaucucugacacccccguccaugauugcaacaccacaugucagacgccugagggcgcuaucaauaccucccucacaagccugcccuuccagaacauucacccgaucaccauuggcaagugcccuaaauaugugaagucuacaaagcugagacuugccaccgggcuccggaauguucccagcauccagucccgcggacuguuuggcgcuauugccggguucaucgaaggaggcuggacggggaugguggacggaugguacggcuaucaucaccaaaacgagcagggcucuggguacgccgcugaccagaaaagcacacagaaugcgaucgauaagauuaccaacaaagucaauuccgugaucgagaagaugaacacccaauuuacagccguuggaaaagaguucaaucaccuugagaagagaauugaaaaccugaauaagaaaguggacgauggcuuccucgacaucuggaccuacaacgcugagcugcugguccuccuggaaaaugagcggacacuugauuaucaugacagcaacgugaagaaccuguacgagaaaguccgcaaucagcucaagaacaaugccaaagaaauugggaacggauguuuugaguucuaucacaagugcgauaauacguguauggaaucugugaagaacggcaccuacgacuauccuaaauacuccgaggaagccaagcugaauagagagaaaaucgaugggguuaaacuugagagcacacggaucuaucagauucuggcuaucuacucuaccguggccuccagccucguccuggugguuucccugggcgcgauuucuuuuuggaugugcagcaacggaucccuccaaugccgcaucuguauuuga

SEQ ID NO: 204821 - RNA, 1701 nt, Artificial Sequence
  derived and/or modified CDS sequence (opt5) from hemagglutinin__InfluenzaA__AIM56656
augaaggccauccuggugguccuccuguacaccuucgcuacagccaacgcggacacgcuuugcauuggcuaucacgcuaauaacagcaccgauacaguugacaccgugcuggagaaaaaugugacagucacccauuccgugaaccuccuggaagauaagcacaaugggaaacuuuguaagcugagaggaguugcuccccuccaucugggcaaaugcaacaucgccggguggauucugggaaauccugagugugaaucucucagcacagccuccucuuggagcuacaucguggagaccuccucuagcgacaacggcacgugcuauccgggggauuuuauuaauuacgaagaacugcgggagcagcuuuccagcgucucuuccuucgaacgcuuugagaucuuccccaagaccaacagcuggccuaaucacgacucuaacaagggagugacagccgcuuguccccaugccggcgcgaaauccuuuuauaagaaucugaucuggcucguuaaaaagggcaacagcuacccuaaacugucucaauccuauauuaaugauaaggggaaggaagugcuuguccuguggggaauccaccaccccagcaccacagccgaccagcagucccucuaccagaacgcugaugccuacguguucgugggcaccucuagauauagcaaaaaguuuaaaccugagauugcuauccggccgaagguccgcgaccaagaggggagaaugaacuacuauuggacgcugguugaacccggagauaaaauuacauucgaggccaccggcaauaucguggugccucgguacgcguuuacaauggaacgcaacgccggguccggaauuaucaucagcgacacccccguccaugauugcaauaccacaugucagacgccugagggcgcuauuaacaccucucugcccuuccagaauauccacccgauuacaaucggcaagugcccuaaauaugugaaguccaccaagcucagacuggccacagggcuucggaacguucccagcauucagucucgcggacuguuuggcgcuaucgccggguucaucgaaggaggcuggaccgggaugguggacggaugguacggcuaucaucaccaaaaugagcagggcagcggguacgccgcugaccucaaauccacgcagaacgcgauugauaagaucacaaauaaagucaacucugugauugagaagaugaauacccaguuuaccgccguuggaaaagaguucaaccaccuggagaagagaaucgaaaaucuuaacaagaaaguggacgauggcuuccuggacauuuggacauacaaugcugagcuccugguccugcucgaaaacgagcggacccuggauuaucaugacagcaacgugaagaaucuuuacgagaaaguccgcaaccaacugaagaauaacgccaaagaaaucgggaauggauguuuugaguucuaucacaagugcgauaacacauguauggaauccgugaagaauggcacguacgacuauccuaaauacagcgaggaagccaagcucaacagagagaaaaucgaugggguuaagcuggagucuacccggauuuaucagauccuugcuauuuacuccacaguggccagcucucugguccucgugguuucccugggcgcgaucagcuuuuggaugugcuccaauggaucucugcagugccgcauuuguaucuga

SEQ ID NO: 204822 - RNA, 1701 nt, Artificial Sequence; identical to SEQ ID NO: 202112
  derived and/or modified CDS sequence (opt5) from hemagglutinin__InfluenzaA__AIM56667

SEQ ID NO: 204823 - RNA, 1701 nt, Artificial Sequence
  derived and/or modified CDS sequence (opt5) from hemagglutinin__InfluenzaA__AIM56678
augaaggccauccuggugguccuccuguacaccuucgcuacagccaacgcggacacgcuuugcauuggcuaucacgcuaauaacagcaccgauacaguugacaccgugcuggagaaaaaugugacagucacccauuccgugaaccuccuggaagauaagcacaaugggaaacuuuguaagcugagaggaguucccccucuccaucugggcaaaugcaacaucgccggguggauucugggaaauccggagugugaaucucucagcacagccuccucuuggagcuacaucguggagaccuccucuagcgacaacggcacgugcuaucccggggauuuuauuaauuacgaagaacugcgggagcagcuuuccagcgucucuuccuucgaacgcuuugagaucuucccuaagaccagcucuuggcccaaccacgacuccaauaagggagugacagcugccuguccucaugcuggcgccaagagcuuuuauaagaaccugaucuggcucguuaaaaagggcaauucuuaccccaaacugucccaaagcuauauuaacgauaaggggaaggaagugcuuguccuguggggaauccaccacccuuccaccacagcggaccagcagucucucuaccagaaugccgaugcuuacguguucgugggcaccagcagauauuccaaaaaguuuaaaccggagauugccauccggcccaagguccgcgaccaagaggggagaaugaacuacuauuggacgcugguugaaccuggagauaaaauuacauucgaggcuaccggcaaccugguggugccccgguacgccuuuacaauggaacgcaaugcggggagcggaaucauuaucucugacaccccuguccaugauugcaacaccacaugucagacgcccgagggcgccaucaauaccucccucccguuccagaacauucacccuaucacaauuggcaagugccccaaauauguuaagagcaccaagcugagacuugcuacagggcugcggaaugugccuucuauccagagccgcggacucuuuggcgccauugcuggguucaucgaaggaggcuggaccgggaugguggacggaugguacggcuaucaucaccaaaacgagcagggcuccggguacgccgccgaccugaaaucuacgcagaaugcuaucgauaagauuacaaacaaagucaauagcgugaucgagaagaugaacacccaguuuaccgcgguuggaaaagaguucaaucaccuugagaagagaauugaaaaccugaauaagaaaguggacgauggcuuccucgacaucuggacauacaacgccgagcugcugguccuccuggaaaaugagcggacccuugauuaucaugacuccaacgugaagaaccuguacgagaaaguccgcaaucaacucaagaacaaugcuaaagaaauugggaacggauguuuugaguucuaucacaagugcgauaauacauguauggaaagcgugaagaacggcacguacgacuaucccaaauacucugaggaagccaagcugaauagagagaaaaucgaugggguuaaacuugaguccacccggaucuaucagauucuggccaucuacagcacaguggcuucuucccucguccuggugguuagccugggcgccauuuccuuuuggaugugcucuaacggaagccuccagugccgcaucuguauuuga

SEQ ID NO: 204824 - RNA, 1701 nt, Artificial Sequence; identical to SEQ ID NO: 204460
  derived and/or modified CDS sequence (opt5) from hemagglutinin__InfluenzaA__AIM56689

SEQ ID NO: 204825 - RNA, 1701 nt, Artificial Sequence; identical to SEQ ID NO: 202112
  derived and/or modified CDS sequence (opt5) from hemagglutinin__InfluenzaA__AIM56700

SEQ ID NO: 204826 - RNA, 1710 nt, Artificial Sequence
  derived and/or modified CDS sequence (opt5) from hemagglutinin__InfluenzaA__AIM56711
augaaggccauccuggugguccuccuguacaccuucgcuacagccaacgcggacacgcuuugcauuggcuaucacgcuaauaacagcaccgauacaguugacaccgugcuggagaaaaaugugacagucacccauuccgugaaccuccuggaagauaagcacaaugggaaacuuuguaagcugagaggaguucccccucuccaucugggcaaaugcaacaucgccggguggauucugggaaauccggagugugaaucucucagcacagccuccucuuggagcuacaucguggagaccuccucuagcgacaacggcacgugcuaucccggggauuuuauuaauuacgaagaacugcgggagcagcuuuccagcgucucuuccuucgaacgcuuugagaucuucccuaagaccagcucuuggcccaaccacgacuccaauaagggagugacagcugccuguccucaugcuggcgccaagagcuuuuauaagaaccugaucuggcucguuaaaaagggcaauucuuaccccaaacugucccaaagcuauauuaacgauaaggggaaggaagugcuuguccuguggggaauccaccacccuuccaccacagcggaccagcagucucucuaccagaaugccgaugcuuacguguucgugggcaccagcagauauuccaaaaaguuuaaaccggagauugccauccggcccaagguccgcgaccaagaggggagaaugaacuacuauuggacgcugguugaaccuggagauaaaauuacauucgaggcuaccggcaaccugguggugccccgguacgccuuuacaauggaacgcaaugcggggagcggaaucauuaucucugacaccccuguccaugauugcaacaccacaugucagacgcccgagggcgccaucaauaccucccucacaagccugccguuccagaacauucacccuaucaccauuggcaagugccccaaauaugugaagucuacaaaacuuagacuggcuaccgggcuccggaauguuccuagcauccagucccgcggacuguuuggcgccauugcuggguucaucgaaggaggcuggacggggaugguggacggaugguacggcuaucaucaccaaaacgagcagggcucuggguacgccgccgaccuuaaaagcacacagaaugcuaucgauaagauuaccaacaaagucaauuccgugaucgagaagaugaacacccaguuuacagcgguuggaaaagaguucaaucaccuggagaagagaauugaaaaccucaauaagaaaguggacgauggcuuccuggacaucuggaccuacaacgccgagcugcucguccugcuugaaaaugagcggacacuggauuaucaugacagcaacgugaagaaccucuacgagaaaguccgcaaucaacugaagaacaaugcuaaagaaauugggaacggauguuuugaguucuaucacaagugcgauaauacguguauggaaucugugaagaacggcaccuacgacuaucccaaauacuccgaggaagccaaacuuaauagagagaagaucgaugggguuaagcuggagagcacacggaucuaucagauucucgccaucuacucuaccguggcuuccagccugguccuggugguuucccucggcgccauuucuuuuuggaugugcagcaacggaucccugcagugccgcaucuguauuuga

SEQ ID NO: 204827 - RNA, 1701 nt, Artificial Sequence; identical to SEQ ID NO: 204460
  derived and/or modified CDS sequence (opt5) from hemagglutinin__InfluenzaA__AIM56722

SEQ ID NO: 204828 - RNA, 1701 nt, Artificial Sequence; identical to SEQ ID NO: 202112
  derived and/or modified CDS sequence (opt5) from hemagglutinin__InfluenzaA__AIM56733

SEQ ID NO: 204829 - RNA, 1701 nt, Artificial Sequence; identical to SEQ ID NO: 202112
  derived and/or modified CDS sequence (opt5) from hemagglutinin__InfluenzaA__AIM56744

SEQ ID NO: 204830 - RNA, 1701 nt, Artificial Sequence
  derived and/or modified CDS sequence (opt5) from hemagglutinin__InfluenzaA__AIM56755
augaaggccauccuggugguccuccuguacaccuucgcuacagccaacgcggacacgcuuugcauuggcuaucacgcuaauaacagcaccgauacaguugacaccgugcuggagaagaaugugacagucacccauuccgugaaccuccuggaagauaagcacaaugggaaacuuuguaagcugagaggaguugcuccccuccaucugggcaaaugcaacaucgccggguggauucugggaaauccugagugugaaucucucagcacagccuccucuuggagcuacaucguggagaccuccucuagcgacaacggcacgugcuauccgggggauuuuauuaauuacgaagaacugcgggagcagcuuuccagcgucucuuccuucgaacgcuuugagaucuuccccaagaccagcucuuggccuucccacgacagcaacaagggagugacagccgcuuguccccaugccggcgcgaaaucuuuuuauaagaaucugaucuggcucguuaaaaagggcaacuccuacccuaaacugagccaauccuauauuaaugauaaggggaaggaagugcuuguccuguggggaauccaccaccccucuaccacagccgaccagcagagccucuaccagaacgcugaugccuacguguucgugggcaccuccagauauagcaaaaaguuuaaaccugagauugcuauccggccgaagguccgcgaccaagaggggagaaugaauuacuauuggacgcugguugaacccggagauaaaauuacauucgaggccaccggcaaccugguggugccucgguacgcguuuacaauggaacgcaacgccgggucuggaaucauuaucuccgacacccccguccaugauugcaauaccacaugucagacgccugagggcgcuaucaacaccagccuccccuuccagaauauucacccgaucacaauuggcaagugcccuaaauaugugaagucuaccaagcugagacuugccacagggcugcggaacguucccagcauccagucccgcggacucuuuggcgcuauugccggguucaucgaaggaggcuggaccgggaugguggacggaugguacggcuaucaucaccaaaaugagcagggcucuggguacgccgcugaccugaaaagcacgcagaacgcgaucgauaagauuacaaauaaagucaacuccgugaucgagaagaugaauacccaguuuaccgccguuggaaaagaguucaaccaccuugagaagagaauugaaaaucugaacaagaaaguggacgauggcuuccucgacaucuggacauacaaugcugagcugcugguccuccuggaaaacgagcggacccuugauuaucaugacagcaaugugaagaaccuguacgagaaaguccgcaaccaacucaagaauaacgccaaagaaauugggaauggauguuuugaguucuaucacaagugcgauaacacauguauggaaucugugaagaauggcacguacgacuauccuaaauacuccgaggaagccaagcugaacagagagaaaaucgaugggguuaaacuugagagcacccggaucuaucagauucuggcuaucuacucuacaguggccuccagccucguccuggugguuucccugggcgcgauuucuuuuuggaugugcagcaauggaucccuccagugccgcaucuguauuuga

SEQ ID NO: 204831 - RNA, 1710 nt, Artificial Sequence; identical to SEQ ID NO: 204816
  derived and/or modified CDS sequence (opt5) from hemagglutinin__InfluenzaA__AIM56766

SEQ ID NO: 204832 - RNA, 1701 nt, Artificial Sequence
  derived and/or modified CDS sequence (opt5) from hemagglutinin__InfluenzaA__AIM56777
augaaggccauccuggugguccuccuguacaccuucgcuacagccaacgcggacacgcuuugcauuggcuaucacgcuaauaacagcaccgauacaguugacaccgugcuggagaagaaugugacagucacccauuccgugaaccuccuggaagggaagcacaauggaaaacuuuguaagcugagaggcguugcuccccuccaucuggggaaaugcaacaucgccggauggauucugggcaauccugagugugaaucucucagcacagccuccucuuggagcuacaucguggagaccuccucuagcgauaacgggacgugcuauccgggagacuuuauuaauuacgaggaacugcgggagcagcuuuccagcgucucuuccuucgaacgcuuugagaucuuccccaagaccagcucuuggccuaaccacgauuccaauaagggcgugacagccgcuuguccccaugccggcgcgaaaucuuuuuauaagaaccugaucuggcucguuaaaaaggggaauagcuacccuaaacugucccaaagcuauauuaacgacaagggaaaggaagugcuuguccuguggggcauccaccaccccuccaccacagccgaucagcagucucucuaccagaaugcugacgccuacguguucguggggaccagcagauauuccaaaaaguuuaaaccugagauugcuauccggccgaagguccgcgaucaagagggaagaaugaacuacuauuggacgcugguugaacccggcgacaaaauuacauucgaggccaccgggaaccugguggugccucgguacgcguuuacaauggaacgcaaugccggaagcggcaucauuaucucugauacccccguccaugacugcaacaccacaugucagacgccugagggcgcuaucaauaccucccuccccuaucagaacauucacccgaucacaauugggaagugcccuaaauacguuaagagcaccaagcugagacuugccacaggacugcggaaugugcccucuauccagagccgcggccucuucggggcuauugccggauuuaucgaaggcggguggaccggaaugguggauggcugguauggcuaccaucaccaaaacgagcagggguccggauacgccgcugaccugaaaucuacgcagaaugcgaucgacaagauuacaaacaaagucaauagcgugaucgagaagaugaacacccaguucaccgccguuggcaaagaauuuaaucaccuugagaagagaauugaaaaccugaauaagaaaguggaugacggguuccucgauaucuggacauauaacgcugagcugcugguccuccuggaaaaugagcggacccuugacuaccaugauuccaacgugaagaaccuguaugagaaaguccgcaaucaacucaagaacaaugccaaagaaauuggaaacggcuguuucgaguuuuaccacaagugcgacaauacauguauggaaagcgugaagaacgggacguaugauuacccuaaauauucugaggaagccaagcugaauagagagaaaaucgacggcguuaaacuugaguccacccggaucuaccagauucuggcuaucuacagcacaguggccucuucccucguccuggugguuagccugggagcgauuuccuucuggaugugcucuaacggcagccuccagugccgcaucuguauuuga

SEQ ID NO: 204833 - RNA, 1701 nt, Artificial Sequence; identical to SEQ ID NO: 202112
  derived and/or modified CDS sequence (opt5) from hemagglutinin__InfluenzaA__AIM56788

SEQ ID NO: 204834 - RNA, 1701 nt, Artificial Sequence; identical to SEQ ID NO: 202112
  derived and/or modified CDS sequence (opt5) from hemagglutinin__InfluenzaA__AIM56799

SEQ ID NO: 204835 - RNA, 1701 nt, Artificial Sequence; identical to SEQ ID NO: 202112
  derived and/or modified CDS sequence (opt5) from hemagglutinin__InfluenzaA__AIM56810

SEQ ID NO: 204836 - RNA, 1701 nt, Artificial Sequence; identical to SEQ ID NO: 202112
  derived and/or modified CDS sequence (opt5) from hemagglutinin__InfluenzaA__AIM56821

SEQ ID NO: 204837 - RNA, 1683 nt, Artificial Sequence
  derived and/or modified CDS sequence (opt5) from hemagglutinin__InfluenzaA__AIN76383
augaacacccagauccugguguucgcccucauugcuaucguccccacaaaugccgacaagauuugccugggccaccaugcgguuagcaacgggacgaaagugaauacccuuacagagagaggaguggaagucgugaacgcuaccgagacaguugaacggaccaauaucccucgcauuuguuccaagggcaaaaagacaguggaucuggggcaaugcggacuccugggcaccaucacggggccgccccagugugaccaguuucuugaguucucugccgaucugaucauugaaagacgggagggaagcgacgucugcuacccuggcaaauuugugaacgaggaagcccuccgccagauccugagagaguccggcgggauugauaaggaagcuaugggauucaccuauucuggcauccggacaaaugggaccacaagcgccugucgcagauccggaucuagcuuuuacgcugagaugaaguggcugcucuccaacaccgacaaugccgcguucccccaaaugacgaaaagcuauaagaacacacggaaaucuccugcccugauuguuuggggcauccaccauuccgugagcaccgcugagcagacaaaacuuuacgggucuggaaauaagcuggucaccgugggcuccagcaacuaucagcagucuuuugugcccuccccuggcgcccgcccgcaagucaaugggcucagcggaagaauugauuuccacuggcugaugcuuaaccccaaugacaccguuacauuuuccuucaacggcgcuuuuaucgccccugaucgggcgucuuuccugcgcggaaagagcauggggauccaguccggcguccagguggacgccaacugcgaaggggauuguuaccauagcggaggcacgauuaucucuaaucuccccuuucagaacauugacuccagagcugugggcaagugcccucgguaugugaaacaaaagagccugcugcucgccaccgggaugaaaaauguucccgagaucccgaagggacgcggccuguucggggcuauugccggauucaucgaaaacggcugggaggggcuuaucgauggcugguacggauuuagacaccagaaugcccagggcgaagggacagcugcggacuacaaaucuacccaaagcgccauugaccagaucacaggaaagcugaaccggcucauugagaaaaccaaucagcaguucgagcugaucgauaacgaauuuaaugagguggaaaagcaaauuggcaacgucaucaauuggacgagagacuccaucacagagguguggucuuauaacgcugaacuucugguugccauggagaaucagcacaccauugaucucgccgacagcgagauggauaagcuguacgaacgcgugaaacggcagcugagagagaacgcugaagaggacgggaccggauguuucgaaaucuuucauaagugcgaugacgauuguauggccuccauucgcaauaacacauaugaccacagcaaauaccgggaggaggcgaugcagaacagaauccaaauugauccugucaagcucucuuccggcuauaaagacgugauccugugguucagcuuuggggcuucuugcuucauucuucuggccaucgucaugggccucguguuuaucugcguuaagaauggaaacaugcgcuguaccauuugcaucuga

SEQ ID NO: 204838 - RNA, 1689 nt, Artificial Sequence
  derived and/or modified CDS sequence (opt5) from hemagglutinin__InfluenzaA__AIP93103
auggccaucauuuaccugauccuccuguucaccgcugugagaggcgaccagauuugcaucggguaucacgccaacaauagcacagagaaggucgauacgauucuugaacggaacguuaccgugacacaugcgaaagacauccuggagaagacccacaauggaaaacucuguaagcugaacggcauucccccucuugaacugggggauugcuccaucgcuggauggcuccugggcaauccggagugugaccgccugcucagagugcccgaauggucuuacaucauggagaaagagaacccucgguauagccugugcuaccccggguccuuuaaugauuaugaagaacuuaagcaucugcucucuagcgucaagcacuucgaaaaagugaagauucugccuaaagacggauggacacaacaugagaccgauggcggcuccaaggccugugccguuucugggaaacccagcuuuuuccgcaacaugguguggcuuacaaagaagggaccuaauuacccggucgcuaaaagauccuauaacaauaccagcggcgagcagaugcugaucauuuggggagugcaccaccccaacgacgaagccgagcagcgggcucucuaccagaauguugggacguacgugucugccuccaccagcacacugaacaagcgcucuaccccugaaaucgcggccagacccaaagucuccggccuggggagccggauggaguuuucuuggacacuccuggaugugugggacaccauuuccuucgaaagcacgggaaaucuuguggcuccugaguauggcuuuaagaucuccaaacgcggcucuagcgggaucaugaagacagagggaacccugggcaacugcgaaacaaaaugucaaacaccccucggggccauuaacaccacccugccguuccauaauguccacccucuuacgaucggagagugccccaaguacguuaaguccgaaaaacuggugcucgcuaccggcccuagaaacgugccccagauugagagccgggggcuguuuggagccaucgcgggcuucauugaaggcggguggcagggaauggucgauggcugguauggguaccaucacucuaaugaccagggauccggcuaugccgcugauaaggagagcacacaaaaagccuuugaccgcaucaccaacaagguuaauucugugaucgagaaaaugaacacacaguucgaagcuguggggaaggaguuuagcaaucuggaaaagagacucgagaaccugaauaaaaagauggaagacggcuuccuugaugucuggaccuacaacgccgagcugcucgugcugauggagaaugaacggacgcuugacuuccacgauuccaacguuaaaaaucuguaugacaaggugcgcaugcagcucagagauaacgucaaagagcugggaaauggcuguuuugaguucuaccauaagugcgacgaugaguguaugaacucugugaagaacgggacauacgacuaucccaaauacgaggaagagagcaagcugaaacggaaugaaauuaagggagucaaacucuccagcaugggcguguaucagauccuggccauuuacgcuaccguugcggggucucuuucccuggccaucaugauugcuggaaucagcuuuuggaugugcucuaacggcucccuccaaugcagaaucuguauuuga

SEQ ID NO: 204839 - RNA, 1689 nt, Artificial Sequence; identical to SEQ ID NO: 193727
  derived and/or modified CDS sequence (opt5) from hemagglutinin__InfluenzaA__AIP93115

SEQ ID NO: 204840 - RNA, 1701 nt, Artificial Sequence
  derived and/or modified CDS sequence (opt5) from hemagglutinin__InfluenzaA__AIR93971
augaaggccauccuggugguccuccuguacaccuucgcuacaacgaacgccgacauucuuugcaucggcuaucacgcgaauaacagcaccgauacaguugacaccgugcuggagaaaaaugugacagucacccauuccgugaaccuccuggaagauaagcacaaugggaaacuuuguaagcugagaggaguugcuccccuccaucugggcaaaugcaacauugccggguggauccugggaaauccugagugugaaucucucagcacagccuccucuuggagcuacauuguggagaccuccucuagcgacaacggcacgugcuauccgggggauuuuaucgacuacgaagaacugcgggagcagcuuuccagcgucucuuccuucgaacgcuuugagaucuuccccaagaccagcucuuggccuaaucacgauuccaacaagggagugacagcugccuguccccaugcuggcgcccggagcuuuuauaaaaaucugauuuggcucguuaagaaaggcaacucuuacccuaagcuguccaaaagcuauaucaaugacaaggggaaggaagugcuuguccuguggggcauucaccaccccuccaccucugcggaucaacagagccucuaccagaacgccgacgcuuacguguucgugggaacauccagauauagcaaaaaguuuaaaccugagaucgccauucgcccgaaggucagagaucgggaggggcgcaugaauuacuauuggacccugguugaacccggagacaaaaucacguucgaggcuacaggcaaccugguggugccuagauacgccuuugcgauggaacggaacgccgggucuggaauuaucaccuccgauacacccguccaugacugcaauaccaccugucagacaccuaagggcgcuaucaacacgagccuccccuuccaaaauauucacccgaucaccauuggcaaaugcccuaaguaugugaagucuacaaaacugcgccuugccaccgggcugagaaacguucccagcauccagucccggggacucuuuggcgcuauugccggguucaucgagggaggcuggacagggaugguggacggaugguacggcuaucaucaccagaaugaacagggcucuggguacgccgcugaucuuaagagcacccaaaacgcgaucgacgagauuacgaauaaagucaacuccgugaucgagaagaugaauacacaguuuaccgccguuggaaaagaguucaaccaccuggagaagcgcauugaaaaucugaacaagaaaguggaugacggcuuccucgauaucuggaccuacaaugcugagcugcugguccuccuggaaaacgagagaacacuugacuaucaugauagcaaugugaagaaccuguacgagaaaguccggucucagcucaagaacaaugccaaagaaauugggaacggauguuuugaguucuaucacaagugcgacaauaccuguauggaauccgugaagaacggcacauacgauuauccuaaauacagcgaggaagccaagcugaaucgcgaggagaucgacgggguuaaacuugaaucuacgagaaucuaucagauucuggcuaucuacuccaccguggccagcucccucguccuggugguuucucugggcgcgauuagcuuuuggaugugcuccaacggaucucuccaaugccggaucuguauuuga

SEQ ID NO: 204841 - RNA, 1701 nt, Artificial Sequence
  derived and/or modified CDS sequence (opt5) from hemagglutinin__InfluenzaA__AIR93982
augaaggccauccuggugguccuccuguacaccauugcuacagccaacgcggacacgcuuugcaucggcuaucacgcuaauaacagcaccgauacaguugacaccgugcuggagaaaaaugugacagucacccauuccgugaaccuccuggaagauaagcacaaugggaaacuuuguaagcugagaggaguugcuccccuccaucugggcaaaugcaacauugccggguggauccugggaaauccugagugugaaucucucagcacagccuccucuuggagcuacauuguggagaccuccucuagcgacaacggcacgugcuauccgggggauuucaucgacuacgaggaacugcgggagcagcuuuccagcgucucuuccuuugaacgcuucgagaucuuucccaagaccagcucuuggccuaaucacgauuccaacaagggagugacagccgcuuguccccaugccggcgcgcggagcuucuauaaaaaucugauuuggcucguuaagaaaggcaacucuuacccuaagcuguccaaaagcuauaucaaugacaaggggaaggaagugcuuguccuguggggcauucaccaccccuccaccucugccgaucaacagagccucuaccagaacgcugacgccuacguguuugugggaacauccagauauagcaaaaaguucaaaccugagaucgcuauucgcccgaaggucagagaucgggaggggcgcaugaauuacuauuggacccugguugaacccggagacaaaaucacguuugaggccacaggcaaccugguggugccuagauacgcguucaccauggaacggaacgccgggucuggaauuaucaucuccgauacacccguccaugacugcaauaccaccugucagacaccuaagggcgcuauuaacacgagccuccccuuucaaaauauccacccgauuaccaucggcaaaugcccuaaguaugugaagucuacaaaacugcgccuugccaccgggcugagaaacguucccagcauucagucccggggacucuucggcgcuaucgccggguuuaucgagggaggcuggacagggaugguggacggaugguacggcuaucaucaccagaaugaacagggcucuggguacgccgcugaucuuaagagcacccaaaacgcgauugacgagaucacgaauaaagucaacuccgugauugagaagaugaauacacaguucaccgccguuggaaaagaauuuaaccaccuggagaagcgcaucgaaaaucugaacaagaaaguggaugacggcuuccucgauauuuggaccuacaaugcugagcugcugguccuccuggaaaacgagagaacacuugacuaucaugauagcaaugugaagaaccuguacgagaaaguccggucucagcucaagaccaacgccaaagaaaucgggaauggauguuucgaguuuuaucacaagugcgacaacacauguauggaauccgugaagaauggcacguacgauuauccuaaauacagcgaggaagccaagcugaaccgcgaggagaucgacgggguuaaacuugaaucuaccagaauuuaucagauccuggcuauuuacuccacaguggccagcucccucguccuggugguuucucugggcgcgaucagcuucuggaugugcuccaauggaucucuccaaugccggauuuguaucuga

SEQ ID NO: 204842 - RNA, 1701 nt, Artificial Sequence
  derived and/or modified CDS sequence (opt5) from hemagglutinin__InfluenzaA__AIR93993
augaaggccauccuggugguccuccuguacaccuucgcuacagccaacgcggacacgcuuugcauuggcuaucacgcuaauaacagcaccgauacaguugacaccgugcuggagaagaaugugacagucacccauuccgugaaccuccuggaagauaagcacaaugggaaacuuuguaagcugaaaggaguugcuccccuccaucugggcaagugcaacaucgccggguggauucugggaaauccugaguguggcucucucagcacagccuccucuuggagcuacaucguggaaaccuccucuagcgacaacgggacgugcuauccgggagauuuuauugacuacgaggaacugagagagcagcuuuccagcgucucuuccuucgagcgguuugaaaucuuccccaagaccagcucuuggccuaaucacgauuccaacaaaggcgugacagccgcuugucccaaugccggcagcaagucuuuuuauaaaaaccugaucuggcucguuaagaaagggaauagcuacccuaagcugagcaaguccuauauuaacgacaaaggaaaggaggugcuuguccuguggggcauccaucaccccucuaccagcgcggaucaacagucccucuaccagaaugccgacgcuuacguguucguggggacaagccgcuauucuaaaaaguuuaaaccugaaauugccaucagaccgaagguccggggacaggagggccgcauggauuacuauuggacccugguugagcccggggacaaaauuacguucgaagcuacaggaaaccugguggugccuagauacgccuuugcgauggagcggaacaccggcuccggcaucauuaucagcgauacacccguccacgacugcaauaccaucugucaaaccccuaagggggccauuaacacaucucuccccuuccagaauauccauccgauuacgaucggaaagugcccuaaauaugugaaguccaccaaacugcgccuugcuacaggccugagaaacguucccuccauucagucucgggggcucuuuggagccaucgcuggcuucaucgaagggggauggaccggcaugguggacggcugguacggguaucaccaucagaaugagcaaggaagcggcuacgccgccgaucugaaguccacacagaacgcuauugacgaaaucaccaauaaagucaacagcgugauugagaagaugaauacgcaguuuacagcgguugggaaggaguucaaccaccuugaaaaacgcaucgagaaucugaacaagaaaguggaugacggauuccucgauauuuggaccuacaaugccgaacugcugguccuccuggagaacgaaagaacccuugacuaucacgauucuaaugugaagaaccuguacgagaaaguccggucccagcucaagaacaaugcuaaggagaucggcaaaggguguuuugaguucuaucauaagugcgacacaauguguauggaaagcgugaaaaacggcaccuacgauuauccuaaguacucugaagaggccaaacugaaucgcgaagagaucgacggaguuaaacuugaguccacaagaauuuaucaaauccuggccauuuacagcacgguggcuuccucucucguccuggugguuagccugggcgccaucuccuuuuggaugugcucuaacgggagccuccagugccggauuuguaucuga

SEQ ID NO: 204843 - RNA, 1701 nt, Artificial Sequence
  derived and/or modified CDS sequence (opt5) from hemagglutinin__InfluenzaA__AIR94000
augaaggccauccuggugguccuccuguacaccuucgcuacagccaacgcggacacgcuuugcauuggcuaucacgcuaauaacagcaccgauacaguugacaccgugcuggagaaaaaugugacagucacccauuccgugaaccuccuggaagauaagcacaaugggaaacuuuguaagcugagaggaguugcuccccuccaucugggcaaaugcaacaucgccggguggauucugggaaauccugagugugaaucucucagcacagccuccucuuggagcuacaucguggagaccuccucuagcgacaacggcacgugcuauccgggggauuuuauugacuacgaagaacugcgggagcagcuuuccagcgucucuuccuucgaacgcuuugagaucuuccccaagaccagcucuuggccuaaucacgauuccaacaagggagugacagccgcuuguccccaugccggcgcgaaaucuuuuuauaagaaucugaucuggcucguuaaaaagggcaacagcuacccuaaacuguccaagagcuauauuaaugacaaggggaaagaagugcuuguccuguggggaauccaccaccccuccaccucugccgaucaacagagccucuaccagaacgcugacgccuacguguucgugggcacauccagauauagcaagaaauuuaagccugagauugcuauccggccgaaaguccgcgaucaggaggggagaaugaauuacuauuggacccugguugaacccggagacaagauuacguucgaggccacaggcaaccugguggugccucgguacgcguuugccauggaacgcaacgcugggucuggaaucauuaucuccgauacccccguccaugacugcaauacaaccugucaaaccccuaaaggcgccaucaacacgagcuuccccuuucagaauauucacccgaucacaauuggcaagugcccuaaguaugugaaaucuaccaagcucagacuggcuacagggcuucggaacguucccagcauccagucccgcggacuguucggcgccauugccggguuuaucgagggaggcuggaccgggaugguggacggaugguacggcuaucaucaccagaaugaacaaggcucuggguacgcugcggaucucaaaagcacacagaacgccaucgacgagauuaccaauaaggucaacuccgugaucgagaaaaugaauacgcaguucacagcuguuggaaaggaguucaaccaccuggagaagagaauugaaaaucuuaacaaaaagguggaugacggcuuucuggauaucuggaccuacaaugccgagcuccugguccugcucgaaaacgagcggacccuggacuaucaugauagcaaugugaaaaaccuuuacgagaagguccgcucucagcugaaaacaaacgccaaggaaauugggaauggauguuucgaguuuuaucacaagugcgacaacaccuguauggaauccgugaaaaauggcacauacgauuauccuaaguacagcgaggaagcuaaacucaacagagaggagaucgacgggguuaagcuggaaucuacgcggaucuaucaaauucuugccaucuacuccaccguggcgagcucccugguccucgugguuucucugggcgcuauuagcuucuggaugugcuccaauggaucucugcagugccgcaucuguauuuga

SEQ ID NO: 204844 - RNA, 1683 nt, Artificial Sequence
  derived and/or modified CDS sequence (opt5) from hemagglutinin__InfluenzaA__AIR94116
auggagaccgccagccugaucacaauucuccugguggucacgguuuccaacgcugacaagaucugcauuggcuaccagucuaccaauagcacagaaaccguggauacacuuaccgagaacaaugugcccgucacacacgccaaggaacugcuccauaccgagcacaacgggaugcugugugcgacgucccuuggacauccucugauccucgauaccugcacaauugaaggccugaucuaugggaauccgucuugugaccugcuccugggaggcagagaguggagcuacaucguggagcggcccuccgcuguuaacgggcuuugcuauccuggaaauguggaaaaccuggaggaacuccgcucucuguucagcuccgccagaagcuaccaacggauucagaucuuucccgacaccauuuggaaugucucuuauuccggcacaagcaaggccuguucugauuccuucuaccgcagcaugagauggcuuacccagaaagacaacgcuuauccuauccaggaugcccaauacacgaauaaccagggcaagaauauucuguuuaugugggggaucaaccaucccccuacagacaccgcucagacaaaucucuacacccggaccgauacaacgaccucuguggccacagaggagauuaaccgcaccuucaaaccgcugaucggacccagaccucugguuaacggccucauggggcggaucaauuauuacugguccgugcugaagcccggacagacacuucgcauuaagagcaacggcaaucugaucgcgccuugguaugggcacauucucuccggagaaucucacggcagaauccugaaaaccgaccuuaagcggggcagcugcacgguccaaugucagacagagaaagggggacugaacaccacccuccccuuucagaauguguccaaguacgccuucggcaacugcagcaaauauauugggaucaagucucugaagcuggcugugggacuccgcaaugucccguccagaagcucucggggccuguuuggggccaucgcuggauucauugaaggcggcuggagcgggcuuguugccggaugguacggcuuucagcacuccaacgaucaaggggugggaauggcggccgaccgcgauucuacacagaaagcuaucgacaagauuaccagcaaagugaauaacaucgucgacaagaugaauaaacaguaugagauuaucgaucaugaguucaacgaaguggagacaagacugaauaugaucaacaauaagauugacgaucaaauccaggacauuugggccuacaacgcugaacuccugguucuucuggagaaccagaaaacgcucgaugaacacgacgccaaugugaacaaucuguacaacaaggucaagcgggcccugggcuccaaugcuguggaggaugggaaaggcuguuuugaacucuaucauaagugcgacgaucaguguauggagaccaucagaaacggaacauacaaucgccggaaauaucaagaggaaagcaagcuggagagacagaaaauugaaggcguuaaacuugagucugaagggaccuacaagauccugacaauuuauuccaccguggcgagcucucucgucaucgccaugggauucgcugccuuucuguucugggccauguccaacggcagcugccgcugcaauaucuguauuuga

SEQ ID NO: 204845 - RNA, 1701 nt, Artificial Sequence
  derived and/or modified CDS sequence (opt5) from hemagglutinin__InfluenzaA__AIT38333
augaagaccaucauuacacugagcuacauccucugccacguguucgcccagaaaauucauggcuccgacucuagcacggcuacccugugucuugggcaccaugccguccccaacggaacacugguuaagaccaucacaaaugaucaaauugaggugaccaacgcgacagaacucgugcaguccucuagcaccggcagaaucugcgacaauccucaccggauccuggaugggaaaaacuguacgcuuauugacgcucugcucggagauccgcauugcgacgaguuucagaauaaggaaugggaucuguucgucgagcgcuccaacgccuauucugacuguuaccccuauuacgugccugauuaugccagccugagaucccucguugcuagcucuggcacccuggaauuuaauaacgaguccuucaauuggacagggaucagccaggacggaaccucuuccagcugccggcgcggcucugugaaauccuuuuucagcagacuuaacuggcugcacggccucgaguacaaguaucccgcccaaaaugucacaaugcugaacaaugaugaauuugacaaacuuuacauuuggggagugcaccauccuuccaccgauucugaccagacgagccuguacguucagacauccgggcgggugaccgucagcacaaagcgcucucagcaaaccgugauccccaacauuggcuccagaccuugggugcgggggaucagcucucgcauuagcauccacuggaccaucgucaagccgggagacauucuccugaucaauuccacaggcaaccugauugcucccagaggguauuucaaaauccggggaggcaagucuagcauuaugcgcuccgaugccccuaucgacaacugugauagcgagugcguuacgcccaauggcaacaucccuaaugacaaacccuuucagaacgugaauagaauuaccuacgggccguguccucgguauaucaagcagaacacacucaagcuggcgaccggaaugcgcaaugugcccgaaaaacagacaagaggcguccuuggggccauugcuggauucaucgagaacggcugggaggggaugguggauggaugguacggcuuucggcaucaaaauucugaaggcaccgggcaggccgcugaccugaaguccacgcaggccgcgauugaucaaaucaacggaaaacucaauagacugaucggcaagacaaacgagaaauuccaccagauugaaaaggaguuuagcgaaaucgaggggcgcguucaggaccuugagaaauauguggaagauaccaagauugaccuguggucuuacaaugccgagcuccuggucgugcuggaaaaccagcacaccaucgaucucacagacuccgagaugaauaagcuguucgaacggaccagacgccaacuucgggagaacgcugaggacaugggaaacggcugcuucaaaauuuaucauaagugugauaaugccugcaucgggagcauuagaaacggcacauacguucacgacguguaccgcgaugaagcucugaauaaccgguuucagaucaaaggagucgagcucaaguccggcuauaaagacuggauccuguggauuucuuucgccaucagcugcuuucuucugugugccgugcuccugggguucauuacgugggcuugccagaagggaaauaucagauguaacauuugcaucuga

SEQ ID NO: 204846 - RNA, 1698 nt, Artificial Sequence
  derived and/or modified CDS sequence (opt5) from hemagglutinin__InfluenzaA__AIT38344
augaagaucaaacugcucauucugcuuugcaccuucacagccacguacgcugacaccaucuguauuggcuaucacgccaacaauagcacagauaccguggacacaguccuggagaagaacguuaccgugacacauuccgugaaucuccuggaagauucucacaacgggaaacuuugccugcucagaggaaucgcgccccugcagcugggcaauuguagcgucgcuggguggauucucggaaacccugagugcgaaucccugaucucuaaggagagcugguccuacaucguggaaaaaccgaaucccgagaacggcaccuguuauccuggguacuuugccgacuaugaggaacuucgggagcaacugucuagcguuuccagcuucgaacgcuuugagauuuuccccaaggagucuuccuggccuaaucauacggugaccggagucagcgccucuugcuccuacaacggcaagggcaauuuuuauaaaaaccuccuguggcuuacaagaaagaaugggcuguaccccaaccucagcaaaucuuacaccaauaacaaggaaaaagaggugcugauccuguggggaguucaccauccuuccaacauuaaggaucagcggacacucuaucacaccgaaaaugcuuacgugagcgucguguccucucacuauagccgcagauucacgccggagaucacaaagcggcccaaagugcgcgaccaggaaggcagaauuaacuacuauuggacccugcuugagccuggggauacaaucauuuuugaggccaauggaaaccugaucgcucccugguacgccuucgcgcucucccggggcuuugggagcggaaucauuaccucuaaugccccuauggacgaaugugaggcuaagugccagacaccccgcggcgccaucaacuccagccugccguuccaaaauguccauccuguuaccauuggcgaaugucccaaauaugugagaucugcuaaacuucggauggugacggggcugcgcaacaucccuagcauucaguccagaggacucuuuggcgccaucgcgggguucaucgagggaggcuggaccgggaugauugauggaugguacggcuaccaccaucagaaugaacagggcucuggguaugccgcugacaaggagagcacacaaaacgccaucaauggaauuaccaacaaggucaauuccgugaucgagaaaaugaacacacaguuuaccacgguuggcaaggaguucaauaagcuggaacggcgcauggaaaaccugaacaaaaagguggaugacggguuccucgauauuuggacauacaaugcugagcugcuuguccugcucgaaaacgagagaacccuggacuuucacgacagcaaugugaaaauccuuuaugagaagguuaaaucucagcugaagaacaaugccaaggaaaucggaaacggcugcuucgaguuuuaccacaaauguaauaacgaaugcauggaguccgugaagaaugggaccuaugauuaccccaaauauagcgaggaaucuaagcucaaccgggagaaaauugacggcgucaagcuggaauccaugggaguguaccagauccuggccauuuacagcacagucgcuuccucucucgugcugcuuguuagccugggcgcgaucuccuucuggaugugcucuaaugggagccuccaauguagaauuugcaucuga

SEQ ID NO: 204847 - RNA, 1698 nt, Artificial Sequence
  derived and/or modified CDS sequence (opt5) from hemagglutinin__InfluenzaA__AIT38360
augaagaucaaacugcucauucugcuuugcaccuucacagccacguacgcugacaccaucuguauuggcuaucacgccaacaauagcacagauaccguggacacaguccuggagaagaacguuaccgugacacauuccgugaaucuccuggaagauucucacaacgggaaacuuugccugcucaagggaaucgcgccccugcagcugggcaauuguagcgucgcuggguggauucucggaaacccugagugcgaaucccugaucucuaaagagagcugguccuacaucguggaaaagccgaaucccgagaacggcaccuguuauccuggguacuuugccgacuaugaggaacuuagagagcaacugucuagcguuuccagcuucgaacgguuugagauuuuccccaaggagucuuccuggccuaaucauacggugaccggagucagcgccucuugcuccuacaacggcaaaggcaauuuuuauaagaaccuccuguggcuuacacgcaaaaaugggcuguaccccaaccucagcaagucuuacaccaauaacaaagaaaaggaggugcugauccuguggggaguucaccauccuuccaacauugaagaucagagaacacucuaucacaccgagaaugcuuacgugagcgucguguccucucacuauagccggcgcuucacgccggaaaucacaaagagacccaaagugcggggccaggaggggcgcauuaacuacuauuggacccugcuugagccuggagacacaaucauuuuugaagccaauggcaaccugaucgcucccugguacgccuucgcgcucuccagagggcugggaagcggcaucauuaccucuaaugccccuauggaugagugugaagcuaagugccagacaccccggggcgccaucaacuccagccuuccguuucaaaauguccauccuguuaccauuggggagugucccaaauaugugcgcucugcuaagcugagaauggugacgggacuccggaacaucccuagcauucagucccgcggccuguucggggccaucgcgggauuuaucgaaggcggguggaccggaaugauugacggcugguacggcuaccaccaucagaaugagcaggggucuggauaugccgcugauaaagagagcacacaaaacgccaucaauggcauuaccaacaaggucaauuccgugaucgagaaaaugaacacacaguucaccacgguugggaaggaauuuaauaagcuggaaagacggauggagaaccucaacaaaaagguggacgauggauuccuggacauuuggacauacaaugcugaacuucugguccuccuggagaacgagcgcacccuugauuuccacgacagcaaugugaaaaaccuguaugaaaagguuaaaucucagcucaagaauaacgccaaggagaucggcaaugggugcuuugaguucuaccacaaauguaacaaugaaugcauggaguccgugaagaacggcaccuaugacuaccccaaauauagcgaagagucuaagcugaauagagagaaaaucgauggagucaagcuggaauccaugggcguguaccagauucucgccaucuacagcacagucgcuuccucucuggugcuucugguuagccucggggcgauuuccuuuuggaugugcucuaacggaagccugcaaugucggaucugcauuuga

SEQ ID NO: 204848 - RNA, 1701 nt, Artificial Sequence; identical to SEQ ID NO: 202112
  derived and/or modified CDS sequence (opt5) from hemagglutinin__InfluenzaA__AIT93147

SEQ ID NO: 204849 - RNA, 1701 nt, Artificial Sequence; identical to SEQ ID NO: 194741
  derived and/or modified CDS sequence (opt5) from hemagglutinin__InfluenzaA__AIU39700

SEQ ID NO: 204850 - RNA, 1701 nt, Artificial Sequence
  derived and/or modified CDS sequence (opt5) from hemagglutinin__InfluenzaA__AIU39702
augaaggccauccuggugguccuccuguacaccuucgcuacagccaacgcggacacgcuuugcauuggcuaucacgcuaauaacagcaccgauacaguugacaccgugcuggagaaaaaugugacagucacccauuccgugaaccuccuggaagauaagcacaaugggaaacuuuguaagcugagaggaguugcuccccuccaucugggcaaaugcaacaucgccggguggauucugggaaauccugagugugaaucucucagcacagccuccucuuggagcuacaucguggagaccuccucuagcgacaacggcacgugcuauccgggggauuuuauugacuacgaagaacugcgggagcagcuuuccagcgucucuuccuucgaacgcuuugagaucuuccccaagaccagcucuuggccuaaucacgauuccaacaagggagugacagccgcuuguccccaugccggcgcgaaaucuuuuuauaagaaucugaucuggcucguuaaaaagggcaacagcuacccuaaacuguccaagagcuauauuaaugacaaggggaaagaagugcuuguccuguggggaauccaccaccccuccaccucugccgaucaacagagccucuaccagaacgcugacgccuacguguucgugggcacauccagauauagcaagaaauuuaagccugagauugcuauccggccgaaaguccgcgaucaggaggggagaaugaauuacuauuggacccugguugaacccggagacaagauuacguucgaggccacaggcaaccugguggugccucgguacgcguuugccauggaacgcaacgcugggucuggaaucauuaucuccgauacccccguccaugacugcaauacaaccugucaaaccccuaaaggcgccaucaacacgagcuuccccuuucagaauauucacccgaucacaauuggcaagugcccuaaguaugugaaaucuaccaagcucagacuggcuacagggcuucggaacauccccagcauucagucccgcggacuguucggcgccaucgccggguuuaucgagggaggcuggaccgggaugguugacggaugguacggcuaucaucaccagaaugaacaaggcucuggguacgcugcggaucucaaaagcacacagaacgccauugacgagaucaccaauaaggugaacuccgucauugagaaaaugaauacgcaguucacagcugugggaaaggaguucaaccaccuggagaagagaaucgaaaaucuuaacaaaaagguugaugacggcuuucuggauauuuggaccuacaaugccgagcuccuggugcugcucgaaaacgagcggacccuggacuaucaugauagcaaugucaaaaaccuuuacgagaaggugcgcucucagcugaaaaacaaugccaaggaaaucgggaacggauguuucgaguuuuaucacaagugcgacaauacauguauggaauccgucaaaaacggcaccuacgauuauccuaaguacagcgaggaagcuaaacucaauagagaggagaucgacggggugaagcuggaaucuacacggauuuaucaaauccuugccauuuacuccacgguugcgagcucccuggugcucgucgugucucugggcgcuaucagcuucuggaugugcuccaacggaucucugcagugccgcauuuguaucuga

SEQ ID NO: 204851 - RNA, 1701 nt, Artificial Sequence; identical to SEQ ID NO: 198981
  derived and/or modified CDS sequence (opt5) from hemagglutinin__InfluenzaA__AIU39704

SEQ ID NO: 204852 - RNA, 1704 nt, Artificial Sequence
  derived and/or modified CDS sequence (opt5) from hemagglutinin__InfluenzaA__AIU46609
auggagaagaucgugcugcuccuggccauugucagccuuguuaaauccgaccagaucugcauuggcuaccacgcuaacaauucuaccgaacaaguggauacaaucauggagaagaacgugacggucacccaugcccaggacauucuggagaaaacacacaaugggaagcucugugaucugaacggagugaaaccccuuauccugaaggacugcagcguugcgggcuggcuccuggggaauccuaugugugaugaguucaucagagugccggaaugguccuauauugucgagcgggcuaaccccgccaaugaccugugcuacccuggaaaccucaaugauuaugaggaacugaagcaucuucugucucgcaucaaccacuuugagaaaauucucaucauucccaagagcuccuggaccaaucaugaaacaucucugggcgugagcgccgcuuguccuuaccaggggacccccuccuucuuuagaaacguuguguggcuuaucaaaaagaaugacgccuauccuacaauuaaaaucagcuacaacaauaccaaccaggaggaucugcucauccuguggggcauucaccacucuaacaaugcugccgagcaaacgaaccuguauaagaauccgaccacauacaucuccgucggaaccagcacacucaaccagcggcuggugcccaagauugcgacccgcucucaggugaauggccagagagggcggauggacuucuuuuggacgauccuuaaaccuaacgaugccauucauuucgaauccaauggaaacuuuaucgcucccgaguacgccuauaagaucgucaaaaagggcgacagcacaauuaugaaaucugaaguugaguacgggcacugcaauaccaagugucaaacaccuaucggagcuauuaacuccagcaugcccuuccauaauauccacccgcugaccauuggcgaaugcccuaaauaugugaaguccaacaagcucgugcuggccaccgggcuucgcaauucuccccugagagagaaacggcgcaagagaggacucuuuggcgcgaucgccggcuucaucgaagggggauggcagggcauggucgaugggugguacggauaucaccauagcaacgaacagggcuccggguacgcugccgacaaagagagcacacagaaggcuauugacggagugacgaauaaaguuaacucuaucauugauaagaugaacacccaauuugaagccgugggccgggaguucaauaaccuggaacgcagaaucgagaaucugaacaagaaaauggaggacggcuuucucgaugucuggacauauaaugccgaacugcuugugcugauggagaacgaacggacccucgacuuccacgauuccaauguuaagaaccuguacgacaaagugcgccuucagcugagagauaaugcuaaggagcucgggaacggauguuucgaauuuuaccauaaaugcgacaaugaguguauggagagcguccggaacggcacauaugauuacccucaguauucugaagaggcgagacugaagcgcgaagagauuagcggggugaagcuggaguccaucggaaccuaccaaauucucucuaucuauagcacggucgccuccagccuggcucuugccaucauuguggccggccugucucucuggaugugcuccaaugggagccugcagugccggaucuguauuuga

SEQ ID NO: 204853 - RNA, 1689 nt, Artificial Sequence
  derived and/or modified CDS sequence (opt5) from hemagglutinin__InfluenzaA__AIU46714
auggccaucauuuaccugauccuccuguucaccgcugugagaggcgaccagauuugcaucggguaucacgccaacaauagcacagagaaggucgauacgauucuugaacggaacguuaccgugacacaugcgaaagacauccuggagaagacccacaauggaaaacucuguaagcugaacggcauucccccucuugaacugggggauugcuccaucgcuggauggcuccugggcaauccggagugugaccgccugcucagagugcccgaauggucuuacaucauggagaaagagaacccuaaguauagccugugcuaccccggguccuuuaaugauuaugaagaacuuaagcaucugcucucuagcgucaaacacuucgaaaaggugaaaauucugccuaaggacggauggacacaacauaaaaccgauggcggcuccaaggccugugccguuucugggaagcagagcuuuuuccggaacaugguguggcuuaccaaaaagggacagaauuaccccgucgcuaaacgcuccuauaacaauaccagcggcgagcagaugcugaucauuuggggagugcaccacccuaacgacgaggaggagcaaagagcccucuaccagaagguugggacguacgugucugcuuccaccagcacacugaauaaacggucuaccccggaaaucgccgcgcgccccgaggucaacggccugggguccagaauggaauuuagcuggacacuccuggaugugugggacaccauuaauuucgagucuacgggaaaccuuguggccccugaguauggcuuuaagaucuccaaacggggcagcuccgggaucauuaagacagaaggaacccugggcaacugcgagacaaagugucagacaccccucggggcuaucaauaccacacugccuuuccauaacguccacccccuuacgauuggagaaugcccgaaauacguuaagucugagaaacuggugcucgccaccggccugcgcaaugugccucagaucgaaagcagagggcuguuuggagcuauugccggcuucaucgagggcggguggcaaggaauggucgauggcugguauggguaccaucacuccaacgaccagggaagcggcuaugcggccgauaaggagucuacacagaaggcuuuugaccggaucaccaauaaagugaacuccguuauugaaaagaugaauacacaguucgaggccguggggaaagaauuuagcaaccucgagcgcagacuggaaaaucuuaacaagaaaauggaggacggcuuccuggaugucuggaccuacaaugcugagcuccuggugcuuauggaaaacgagcggacgcuggacuuccacgauucuaauguuaagaaccucuaugacaaagugcgcaugcaacugagagauaaugucaaggaacugggaaacggcuguuuugaguucuaccauaagugcgacaacgaguguaugaauagcgugaaaaacgggacauacgauuaucccaaguacgaagaggaauccaaacucaagcggaaugagaucaaaggagucaagcugucuagcaugggcguguaucagauucuugccaucuacgccaccguugcugggucccugagccucgcgauuaugaucgccggaaucucuuuuuggaugugcuccaacggcagccugcagugcagaauuuguaucuga

SEQ ID NO: 204854 - RNA, 1701 nt, Artificial Sequence
  derived and/or modified CDS sequence (opt5) from hemagglutinin__InfluenzaA__AIV09219
augaaggccauccuggugguccuccuguacaccuucgcuacaacgaacgccgacauucuuugcaucggcuaucacgcgaauaacagcaccgauacaguugacaccgugcuggagaaaaaugugacagucacccauuccgugaaccuccuggaagauaagcacaaugggaaacuuuguaagcugagaggaguugcuccccuccaucugggcaaaugcaacauugccggguggauccugggaaauccugagugugaacuccugucuacaaccagcuccuggucuuacauuguggagacgagcuccucugacaacgggaccugcuauccgggcgauuuuaucgacuacgaagaacuucgggagcagcugagcuccgucagcucuuucgaacgcuuugagaucuuccccaagacauccagcuggccugaucacgacucuaauaagggagugaccgccgcuuguccccaugccggcgcuggcuccuuuuauaaaaaccucauuuggcugguuaagaaagggaauagcuacccuaaacuuucuaaguccuauaucaacgauaagggaaaggaagugcugguccucuggggcauucaccaucccccuacaagcgccgaccaacagagacuguaccagaaugcggaugccuacguguucguggggaccucccgguauucuaaaaaguuuaaaccggagaucgcuauucgccccaaggucagagaccaggagggacggaugaacuacuauuggacgcugguugaaccuggcgauaaaaucacauucgaggccaccgggaaucucguggugccccgcuacgcuuuugccauggaaagaaacgcgggaagcggcauuaucacauccgacaccccuguccacgacugcaacaccacaugucaaacgcccaagggcgccaucaauaccagccugccguuccagaacauucacccuaucacaauugggaaaugccccaaguaugugaagucuaccaaacuucggcuggcuacaggacuccgcaauguuccuuccauccagagcagaggccuguuuggggccauugcuggauucaucgagggcggguggaccggaaugguggauggcugguacggcuaucaucaccagaacgaacaagggucuggauacgccgccgaccuuaagagcacgcagaaugcuaucgaugagauuacaaacaaagucaauuccgugaucgacaagaugaacacccaguuuaccgcgguuggcaaagaguucaaucaccuggaaaagcggauugagaaccucaauaagaaaguggaugacggguuccuggauaucuggacauacaacgccgaacugcucguccugcuugagaaugaacgcacccuggacuaucaugauucuaacgugaagaaucucuacgagaaagucagaagccagcugaagaacaacgcuaaagagauuggaaauggcuguuuugaguucuaucacaagugcgacaacacauguauggaguccgugaagaaugggacguacgauuaucccaaauacagcgaagaggccaaacuuaaccgggaagagaucgacggcguuaagcuggagucuacccgcaucuaucaaauucucgccaucuacuccacaguggcuagcucucugguccuggugguuucccucggagccauuagcuuuuggaugugcuccaauggcucucugcagugcagaaucuguauuuga

SEQ ID NO: 204855 - RNA, 1701 nt, Artificial Sequence
  derived and/or modified CDS sequence (opt5) from hemagglutinin__InfluenzaA__AIW60689
augaagaccaucauugcccugagcuacauccucugccugguguucgcucagaaacuucccggcaacgacaauuccacagccacgcugugucucgggcaccaugcggucccuaacggaacccugguuaagacaauuaccaaugaucaaaucgaggugacaaacgcuaccgaacuugugcagucuagcuccacaggcagaauuugcgacucuccgcaccggauccuggaugggaaaaauuguacccucaucgacgcccugcugggagauccccauugcgacggcuuucagaacaaggagugggaucucuucgucgaacgcagcaaagccuauuccgacuguuacccuuaugaugugcccgacuacgcuucucugagaagccuuguugccuccagcgggacgcuggaguuuaccaaugaaggauucaacuggacaggcguggcucaggauggcaccucuuaugccugcaagcggggguccgucaagagcuuuuucucucgccucaauuggcugcacaaacuugaguacaaguauccugcgcugaacgugacaaugcccaauaacgacaaauuugauaagcucuacauuuggggaguucaucacccuuccaccgacagcgaccaaacgucuaucuacgugcaggccuccggcagagucacagugagcaccaaacggucccagcagacagugauuccgaauaucgggucucgccccugggucagaggaauuagcucccggaucagcauuuauuggaccaucguuaagccuggcgauauccugcugauuaacucuaccgggaaucucaucgcuccccgcggauacuucaagauuagauccggcaaaagcucuaucaugcggagcgacgccccuauuggcaacuguaacuccgagugcaucacacccaaugggucuaucccgaacgauaagccuuuucaaaaugugaaccgcauuacguauggagcuugucccagauacgugaaacagaauacccugaagcuggccacaggcaugcggaacgucccugaaaaacagacccgcgggaucuucggagcgauugccggcuuuaucgagaaugggugggaaggaaugguggacggcugguauggcuucagacaccagaacuacgaggggacaggacaagcugccgaucuuaagagcacccaggcugccauuaaucagaucaacggcaaacucaaucggcugaucgagaagacgaacgaaaaguuucaucaaauugagaaagaguucuccgaaguugaagggagaauccaggaccuugagaaguauguggaggauacaaaaauugaccuguggagcuacaaugccgaacuccuggucgcucuggagaaccagcacaccaucgaucucaccgacucugaaaugaauaagcuguucgagcgcacacggaaacagcuuagagaaaacgcggaggauaugggaaacggcugcuuuaagauuuaccauaagugugacaaugccugcaucggguccauucgcaacggcaccuaugaccacgaugcuuaccgggacgaggcccugaauaacagauuccaaaucaaaggaguggaacucaagagcggcuauaaagauuggauccuguggauuucuuuugccaucuccugcuuccuucuguguguugugcuccugggguuuauuaugugggcuugccagaagggaaauauccgcuguaacauuugcaucuga

SEQ ID NO: 204856 - RNA, 1701 nt, Artificial Sequence
  derived and/or modified CDS sequence (opt5) from hemagglutinin__InfluenzaA__AIW60690
augaagaccaucauugcccugagcuacauccucugccugguguucgcucagaaacuucccggcaacgacaauuccacagccacgcugugucucgggcaccaugcggucccuaacggaacccugguuaagacaauuaccaaugaucaaaucgaggugacaaacgcuaccgaacuugugcagucuagcuccacaggcagaauuugcgacucuccgcaccggauccuggaugggaaaaauuguacccucaucgacgcccugcugggagauccccauugcgacggcuuucagaacaaggagugggaucucuucgucgaacgcagcaaagccuauuccgacuguuacccuuaugaugugcccgacuacgcuucucugagaagccuuguugccuccagcgggacgcuggaguuuaccaaugaaggauucaacuggacaggcguggcucaggauggcaccucuuaugccugcaagcggggguccgucaagagcuuuuucucucgccucaauuggcugcacaaacuugaguacaaguauccugcgcugaacgugacaaugcccaauaacgacaaauuugauaagcucuacauuuggggaguucaucacccuuccaccgacagcgaccaaacgucucuguacgugcaggccuccggcagagucacagugagcaccaaacggucccagcagacagugaucccgaauauugggucucgccccugggucagaggaguuagcucccggaucagcauuuauuggaccaucgugaagccuggcgauauucugcucaucaacucuaccgggaaucugaucgcuccccgcggauacuucaagauuagauccggcaaaagcucuaucaugcggagcgacgccccuauuggcaacuguaacuccgagugcaucacacccaaugggucuauuccgaacgauaagccuuuucaaaaugugaaccgcaucacguauggagcuugucccagauacgucaaacagaauacccuuaagcuggccacaggcaugcggaacgugccugaaaaacagacccgcgggaucuucggagcgauugccggcuuuaucgagaaugggugggaaggaaugguugacggcugguauggcuucagacaccagaacuacgaggggacaggacaagcugccgaucucaagagcacccaggcugccauuaaucagaucaacggcaaacugaaucggcuuauugagaagacgaacgaaaaguuucaucaaaucgagaaagaguucuccgaaguggaagggagaauccaggaccuggagaaguaugucgaggauacaaaaauugaccucuggagcuacaaugccgaacugcugguggcucucgagaaccagcacaccaucgaucugaccgacucugaaaugaauaagcuguucgagcgcacacggaaacagcugagagaaaacgcggaggauaugggaaacggcugcuuuaagauuuaccauaagugugacaaugccugcaucggguccauucgcaacggcaccuaugaccacgaugcuuaccgggacgaggcccucaauaacagauuccaaaucaaaggaguugaacuuaagagcggcuauaaagauuggauucuuuggaucucuuuugccaucuccugcuuccugcucugugugguccugcugggguuuauuaugugggcuugccagaagggaaauauccgcuguaacauuugcaucuga

SEQ ID NO: 204857 - RNA, 1701 nt, Artificial Sequence
  derived and/or modified CDS sequence (opt5) from hemagglutinin__InfluenzaA__AIW60691
augaagaccaucauugcccugagcuacauccucugccugguguucgcucagaaacuucccggcaacgacaauuccacagccacgcugugucucgggcaccaugcggucccuaacggaacccugguuaaggcuauuacaaaugaucaaaucgaggugaccaacgccacagaacuugugcagucuagcuccaccggcagaauuugcgacucuccgcaccggauccuggaugggaaaaauuguacacucaucgacgcccugcugggagauccccauugcgacggcuuucagaacaaggagugggaucucuucgucgaacgcagcaaggcuuauuccgacuguuacccuuaugaugugcccgacuacgccucucugagaagccuuguugcuuccagcgggacccuggaguuuacgaaugaaggauucaacuggaccggcguggcccaggauggcacaucuuaugcgugcaagcggggguccgucaagagcuuuuucucucgccucaauuggcugcacaaacuugaguacaaguauccugcccugaacgugaccaugcccaauaacgacaaauuugauaagcucuacauuuggggaguucaucacccuuccacagacagcgaccaaaccagacuguacgugcaggcuucuggccgggucacgguguccacaaaacgcagccagcagaccgugaucccgaauauuggguccagacccuggguccggggaaucucuagccgcauuuccaucuauuggacaauuguuaagccuggcgauauccugcucaucaacagcaccgggaaucugauugcccccagaggauacuucaagauccggucuggcaaauccagcauuaugcgcucugacgcuccuaucggcaacuguaacagcgagugcauuacccccaauggguccaucccgaacgauaagccuuuucaaaaugugaacagaaucacauauggagccuguccccgguacgugaaacagaauacgcuuaagcuggcgaccggcaugcgcaacgucccugaaaaacagacaagagggauuuucggagccaucgcuggcuuuauugagaaugggugggaaggaaugguggacggcugguauggcuuccggcaccagaacucugaggggaccggacaagccgcugaucucaagagcacacaggccgccaucaaucagauuaacggcaaacugaauagacuuaucgagaagaccaacgaaaaguuucaucaaaucgagaaagaguucuccgaaguugaagggcgcauucaggaccuggagaaguacguggaggauacgaaaaucgaccucuggagcuauaaugcugaacugcuggucgcgcucgagaaccagcacacaauugaucugaccgacucugaaaugaauaaacuuuucgagcggaccagaaaacagcugcgcgaaaacgccgaggauaugggaaacggcugcuuuaagaucuaccauaagugugacaaugcuugcauuggguccauccggaacggcacauacgaccacgauguguauagagacgaggcccucaauaaccgcuuccaaauuaaaggaguugaacuuaagagcggcuacaaagauuggauccuguggaucucuuuugccauuuccugcuuccugcucugugugguccugcugggguuuaucaugugggcuugccagaagggaaauauucgguguaacaucugcauuuga

SEQ ID NO: 204858 - RNA, 1701 nt, Artificial Sequence
  derived and/or modified CDS sequence (opt5) from hemagglutinin__InfluenzaA__AIW60692
augaagaccaucauugcccugagcuacauccucugccugguguucgcucagaaacuucccggcaacgacaauuccacagccacgcugugucucgggcaccaugcggucccuaacggaacccugguuaaggcuauuacaaaugaucaaaucgaggugaccaacgccacagaacuugugcagucuagcuccaccggcagaauuugcgacucuccgcaccggauccuggaugggaaaaauuguacacucaucgacgcccugcugggagauccccauugcgacggcuuucagaacaaggagugggaucucuucgucgaacgcagcaaggcuuauuccgacuguuacccuuaugaugugcccgacuacgccucucugagaagccuuguugcuuccagcgggacccuggaguuuacgaaugaaggauucaacuggaccggcguggcccaggauggcacaucuuaugcgugcaagcggggguccgucaagagcuuuuucucucgccucaauuggcugcacaaacuugaguacaaguauccugcccugaacgugaccaugcccaauaacgacaaauuugauaagcucuacauuuggggaguucaucacccuuccacagacagcgaccaaaccucucuguacgugcaggcuuccggcagagucacggugagcacaaaacggucccagcagaccgugaucccgaauauugggucucgccccugggucagaggaaucagcucccggauuagcaucuauuggacaauuguuaagccuggcgauauccugcucaucaacucuaccgggaaucugauugcccccagaggauacuucaagaucagauccggcaaaagcucuauuaugcggagcgacgcuccuaucggcaacuguaacuccgagugcauuacccccaaugggucuaucccgaacgauaagccuuuucaaaaugugaaccgcaucacauauggagccugucccagauacgugaaacagaauacgcuuaagcuggcgaccggcaugcggaacgucccugaaaaacagacacgcgggauuuucggagccaucgcuggcuuuauugagaaugggugggaaggaaugguggacggcugguauggcuucagacaccagaacagcgaggggaccggacaagccgcugaucucaaguccacacaggccgccaucaaucagauuaacggcaaacugaaucggcuuaucgagaagaccaacgaaaaguuucaucaaaucgagaaagaguucagcgaaguugaagggcgcauucaggaccuggagaaguacguggaggauacgaaaaucgaccucuggucuuauaaugcugaacugcuggucgcgcucgagaaccagcacacaauugaucugaccgacuccgaaaugaauaaacuuuucgagcgcacccggaaacagcugagagaaaacgccgaggauaugggaaacggcugcuuuaagaucuaccauaagugugacaaugcuugcauugggagcauccgcaacggcacauacgaccacgauguguaucgggacgaggcccucaauaacagauuccaaauuaaaggaguugaacugaagucuggcuacaaagauuggauccuuuggaucuccuuugccauuagcugcuuccugcucugugugguccugcugggguuuaucaugugggcuugccagaagggaaauauucgcuguaacaucugcauuuga

SEQ ID NO: 204859 - RNA, 1701 nt, Artificial Sequence
  derived and/or modified CDS sequence (opt5) from hemagglutinin__InfluenzaA__AIW60693
augaagaccaucauugcccugagcuacauccucugccugguguucgcucagaaacuucccggcaacgacaauuccacagccacgcugugucucgggcaccaugcgguccugaacggaacccuuguuaagacaauuaccaaugaucaaaucgaggugacaaacgcuaccgaacuggugcaaaauucuagcacaggcagaauuugcgacuccccucaccagauccucgauggggagaacuguacccugaucgacgcccugcucggagauccgcauugcgacggcuuucagaauaaagaaugggaucuguucgucgagcggucuaaggccuauagcaacuguuaccccuaugacgugccugauuacgcuucccuucgcucucugguugccagcuccgggacgcucgaauuuaauaacgagagcuucaauuggaccggaguggcucagaacggcacaucuuccgccugcaaaagacggagcauuaaguccuuuuucucucgccugaauuggcuucaccagcugaaguauaaauaccccgcgcucaacgucaccaugccuaauaacgagaaguuugacaaacuguauaucuggggcgugcaucaccccagcacagauucugaccagaccuccauuuacgcccaggcuagcgggagaguuacgguguccacaaagcggucucaacagaccgucaucccuaacauuggaagccgcccgugggugagaggcguguccagcaucauuucuaucuacuggacaaucgucaaacccggggauauucugcucaucaauuccaccggaaaccugauugccccucggggcuauuucaagauccgcagcgggaagucuagcauuaugagauccgacgcucccaucggaaaauguaauucugaaugcaucaccccuaacggcagcauucccaaugacaagccguuucagaacguuaaucggaucacauacggcgccuguccucgcuaugugaaacagaacacgcuuaagcuggcgaccgggaugagaaaugugcccgagaaacaaacacggggaauuuucggcgccaucgcuggguuuauugaaaacggaugggagggcauggucgaugggugguacggauuccgccaccaaaauuccgagggcaccggccaggccgcugaccucaagagcacacaggccgccaucaaccagaucaaugggaaacugaacagacuuauugaaaagaccaaugagaaguuucaucagaucgaaaaagaguucucugaaguggagggacggauucaggaucuggagaaguauguugaagacacgaaaaucgaucucugguccuacaacgcugagcugcugguggcgcucgaaaaccaacacacaauugaccugaccgauagcgagaugaauaaacuuuucgaaagaacccgcaagcagcugcgggagaacgccgaggacaugggcaaugggugcuuuaagaucuaucauaagugugauaacgcuugcauuggaucuaucagaaauggcacauacgaccacgaugucuaccgcgacgaagcccucaacaaucgguuccagaucaaagggguggagcugaaguccggcuauaaagacuggauucuuuggaucagcuuugccauuuccugcuuccugcucuguguugugcugcugggauuuaucaugugggcuugccagaagggcaacauuagauguaauaucugcaucuga

SEQ ID NO: 204860 - RNA, 1701 nt, Artificial Sequence
  derived and/or modified CDS sequence (opt5) from hemagglutinin__InfluenzaA__AIW60694
augaagaccaucauugcccugagcuacauccucugccugguguucgcucagaaacuucccggcaacgacaauuccacagccacgcugugucucgggcaccaugcgguccugaacggaacccuuguuaagacaauuaccaaugaucaaaucgaggugacaaacgcuaccgaacuggugcaaaauucuagcacaggcagaauuugcgacuccccucaccagauccucgauggggagaacuguacccugaucgacgcccugcucggagauccgcauugcgacggcuuucagaauaaagaaugggaucuguucgucgagcggucuaaggccuauagcaacuguuaccccuaugacgugccugauuacgcuucccuucgcucucugguugccagcuccgggacgcucgaauuuaauaacgagagcuucaauuggaccggaguggcucagaacggcacaucuuccgccugcaaaagacggagcauuaagagcuuuuucucccgccugaauuggcuucaccagcugaaguauaaauaccccgcgcucaacgucaccaugccuaauaacgagaaguuugacaaacuguauaucuggggcgugcaucaccccagcacagauucugaccagaccucccuguacgcccaggcuagcgggagaguuacgguguccacaaagcggucucaacagaccgucauuccuaacaucggaagccgcccgugggugagaggcguguccagccggauuucuaucuacuggacaauugucaaacccggggauauccuccugaucaauuccaccggaaaccuuauugccccucgcggcuauuucaagaucagaagcgggaagucuagcauuaugcgguccgacgcucccaucggaaaauguaauucugaaugcauuaccccuaacggcagcauccccaaugacaagccguuucagaacguuaaucgcaucacauacggcgccuguccuagauaugugaaacagaacacgcugaagcucgcgaccgggaugcggaaugugcccgagaaacaaacacgcggaauuuucggcgccaucgcuggguuuauugaaaacggaugggagggcauggucgaugggugguacggauucagacaccaaaauuccgagggcaccggccaggccgcugaccugaagucuacacaggccgccaucaaccagauuaaugggaaacuuaaccggcugaucgaaaagaccaaugagaaguuucaucagaucgaaaaagaguucucugaaguggagggacgcauucaggaucucgagaaguauguugaagacacgaaaaucgaucugugguccuacaacgcugagcugcucguggcgcuggaaaaccaacacacaauugaccuuaccgauagcgagaugaauaagcuguucgaaagaacccggaaacagcucagagagaacgccgaggacaugggcaaugggugcuuuaagaucuaucauaagugugauaacgcuugcauuggaucuauccgcaauggcacauacgaccacgaugucuaccgggacgaagcccugaacaauagauuccagauuaaagggguggagcuuaaguccggcuauaaagacuggauccuguggaucagcuuugccauuuccugcuuccuccuguguguugugcugcucggauuuaucaugugggcuugccagaagggcaacauucgcuguaauaucugcauuuga

SEQ ID NO: 204861 - RNA, 1701 nt, Artificial Sequence
  derived and/or modified CDS sequence (opt5) from hemagglutinin__InfluenzaA__AIW60695
augaagaccaucauugcccugagcuacauccucugccugguguucgcucagaaacuucccggcaacgacaauuccacagccacgcugugucucgggcaccaugcggucccuaacggaacccugguuaagacaauuaccaaugaucaaaucgaggugacaaacgcuaccgaacuugugcagucuagcuccacaggcgggauuugcgacucuccgcaccagauccuggauggagagaauuguacccucaucgacgcccugcugggcgauccccauugcgacggguuucagaacaaagaaugggaucucuucgucgagagaagcaaggccuauuccaauuguuacccuuaugacgugcccgauuacgcuucucugcggagccuuguugccuccagcggaacgcuggaauuuaacaaugagucuuucaacuggaccggcguggcucaaaauggcacauccagcgccugcaaacgcagaucuaacaaguccuuuuucagccggcucaauuggcugcaccagcuuaacuauaaguacccugcgcugaaugucaccaugcccaacaacgagaaauuugacaagcucuauauuuggggagugcaucacccuucuacagauuccgaccagaucagcauuuacgcccaggcuccggggcgcguuaccguguccacgaaaagaucucaacagacagucauccccaauauuggcagccggccuugggugcgcgggguguccagcaucauuucuaucuacuggaccaucgucaagcccggagauauucugcugaucaacuguacaggcaaucucauugccccuagaggguauuucaaaauccgguccggaaagagcucuauuaugcgcagcgacgcuuccaucggcaagugcaacucugaauguaucacccccaauggcagcauuccgaacgacaaaccuuuucagaauguuaacagaaucaccuacggggccugcccccgguaugugaagcagaauacacugaaacuugcgacgggaaugcgcaacgugccugagaagcaaaccagaggcauuuucggggccaucgcuggauuuauugaaaauggcugggaggggauggucgauggaugguacggcuuccggcaccagaacuccgagggcacagggcaggccgcugaccugaaaagcacccaagccgccaucaaucagaucaacggaaagcucaaucgccugauugagaaaacaaacgaaaaguuucaucagaucgaaaaggaguucucugaaguggagggccggauucaggaucuugagaaauauguugaagacaccaagaucgaucugugguccuacaacgcugagcuccugguggcgcuggaaaaucaacacacgauugaccucacagauagcgagaugaacaaacuguucgaaagaaccaagaaacagcuuagagagaaugccgaggacauggggaacggauguuuuaagaucuaucauaagugcgauaaugcuugcauuggcucuauccgcaacgggaccuacgaccacgaugucuaccgggacgaagcccugaauaacagauuccagaucaaaggcguggagcucaaguccggauauaaagacuggauucuguggaucagcuuugccauuuccuguuuccuucugugcguugugcuccugggcuuuaucaugugggcuugucagaaggggaauauucgcugcaacaucuguaucuga

SEQ ID NO: 204862 - RNA, 1701 nt, Artificial Sequence
  derived and/or modified CDS sequence (opt5) from hemagglutinin__InfluenzaA__AIW60696
augaagaccaucauugcccugagcuacauccucugccugguguucgcucagaaacuucccggcaacgacaauuccacagccacgcugugucucgggcaccaugcggucccuaacggaacccugguuaagacaauuaccaaugaucaaaucgaggugacaaacgcuaccgaacuugugcagucuagcuccacaggcgggauuugcgacucuccgcaccagauccuggauggagagaauuguacccucaucgacgcccugcugggcgauccccauugcgacggguuucagaacaaagaaugggaucucuucgucgagagaagcaaggccuauuccaauuguuacccuuaugacgugcccgauuacgcuucucugcggagccuuguugccuccagcggaacgcuggaauuuaacaaugagucuuucaacuggaccggcguggaccaaaauggcacauccagcgcuugcaaacgcagaucuaacaaguccuuuuucagccggcucaauuggcugcaccagcuuaaguauaaauacccugcccugaacgucgcgaugcccaauaacgagaaguuugauaaacucuauauuuggggagugcaucacccuucuaccgacuccgaucagaucagccuguacgcccaggcuccggggcgcguuacaguguccaccaagagaucucaacagacggucauucccaacaucggcagccggccuugggugcgcgggguguccagcagaauuucuaucuacuggacaauugucaaacccggagacauccugcucaucaauuguaccggcaaccugauugccccucggggguauuucaagauccgcuccggaaagagcucuauuaugagaagcgacgcuuccaucggcaaaugcaauucugaauguauuacacccaacggcagcaucccgaaugauaagccuuuucagaacguuaaucggaucaccuacggggccugcccccgcuaugugaaacagaacacccuuaagcuggcgacaggaaugagaaaugugccugagaaacaaacgcggggcauuuucggggccaucgcuggauuuauugaaaacggcugggaggggauggucgacggaugguacggcuuccgccaccaaaauuccgagggcaccgggcaggccgcugaucucaagagcacacaggccgccaucaaccagauuaauggaaaacugaacagacuuaucgaaaagaccaaugagaaguuucaucagaucgaaaaagaguucucugaaguggagggccggauucaggaccuggagaaguauguugaagauacaaaaaucgaccucugguccuacaacgcugagcugcugguggcgcucgaaaaccaacacaccauugaucugacggacagcgagaugaauaaacuuuucgaaagaacaaagaagcagcugcgcgagaacgccgaggauauggggaauggauguuuuaagaucuaucauaaaugcgacaacgcuugcauuggcucuauccggaaugggaccuacgaucacgacgucuacagagacgaagcccucaacaaucgcuuccagauuaagggcguggagcugaaauccggauauaaggauuggauccuuuggaucagcuuugccauuuccuguuuccugcucugcguugugcugcugggcuuuaucaugugggcuugucagaaagggaacauucggugcaauaucuguauuuga

SEQ ID NO: 204863 - RNA, 1701 nt, Artificial Sequence
  derived and/or modified CDS sequence (opt5) from hemagglutinin__InfluenzaA__AIW60697
augaagaccaucauugcccugagcuacauccucugccugguguucgcucagaaacuucccggcaacgacaauuccacagccacgcugugucucgggcaccaugcggucccuaacggaaccauuguuaagacaaucaccaaugaucaaauugaggugacaaacgcuaccgaacuggugcagucuagcuccacaggcgggaucugcgacucuccgcaccagauccuugauggagagaauuguacccugauugacgcccuccugggcgauccccagugcgacggguuucaaaacaaaaagugggaucuguucgucgaaagaagcaaagccuauuccaauuguuacccuuaugacgugcccgaucaugcuucucuccggagccugguugccuccagcggaacgcuugaguuuaacaaugaaucuuucgacuggaccggcgugacacagaacggcaccuccagcucuugcaagcgcagauccaauaagagcuuuuucucucggcugaacuggcucacacaccugaaauacaaguauccugcucuuaaugucaccaugcccaacaaugagaaauuugauaagcuguacaucuggggagugcaucacccugacacggauuccguucagauuagccucuaugcccaggcguccgggcgcaucacagugucuaccaaaagaagccaacagacagucauuccgaacaucggcucccggccccgcgugagagacauuagcucucggaucuccaucuacuggaccauugugaagccuggggacauccugcugauuaacagcaccggaaaucucaucgcuccccgcggcuacuucaagauuagaucugggaaaagcuccaucaugcggucugaugccccuaucggaaaguguaacagcgagugcauuacacccaauggcuccaucccgaacgacaaaccuuuucagaaugucaaccgcauuacguauggcgccugucccagauacguuaagcagaauacccugaaacuugcuacagggaugcggaacgugccugaaaagcaaacccgcggaaucuucggcgccauugcgggguuuaucgagaauggaugggaaggcaugguggaugggugguauggauucagacaccagaacagcgagggcacaggccaggccgcugaccugaaaucuacccaagccgcuaucaaucagauuaacgggaagcucaaucggcugaucggaaagacgaacgagaaauuucaucagauugaaaaggaguucuccgaagucgagggcagaauccaggaucuugaaaaauacguggaggacacaaagauugaucuguggagcuauaaugccgagcuccugguugcccuggaaaaccaacacaccaucgaccucaccgauucugagaugaacaaacuguucgaacgcacaaagaagcagcuucgggagaaugcugaagacauggggaacggaugcuuuaaaauuuaccauaagugugauaaugcgugcaucggcuccaucagaaacgggaccuaugaccacgacguguaccgcgaugaggcccugaauaaccgguuccagauuaaaggcgucgagcucaagagcggauacaaagacuggauccuguggauuuccuuugcuaucucuugcuuccuucuguguguggcccuccugggcuuuauuaugugggccugccagaaggggaauaucagauguaacaucugcauuuga

SEQ ID NO: 204864 - RNA, 1701 nt, Artificial Sequence
  derived and/or modified CDS sequence (opt5) from hemagglutinin__InfluenzaA__AIW60698
augaagaccaucauugcccugagcuacauccucugccugguguucgcucagaaacuucccggcaacgacaauuccacagccacgcugugucucgggcaccaugcggucccuaacggaaccauuguuaagacaaucaccaaugaucaaauugaggugacaaacgcuaccgaacuggugcagucuagcuccacaggcgggaucugcgacucuccgcaccagauccuugauggagagaauuguacccugauugacgcccuccugggcgauccccagugcgacggguuucaaaacaaaaagugggaucuguucgucgaaagaagcaaagccuauuccaauuguuacccuuaugacgugcccgaucaugcuucucuccggagccugguugccuccagcggaacgcuugaguuuaacaaugaaucuuucgacuggaccggcgugacacagaacggcaccuccagcgcuugcaagcgcagaucuaauaaguccuuuuucagccggcugaacuggcucacacaccugaaauacaaguauccugcccuuaaugucaccaugcccaacaaugagaaauuugauaagcuguacaucuggggagugcaucacccugggacggacucugaucagauuucccucuaugcgcaggccagcggccgcaucacaguuuccaccaaaagaucucaacagacagugauuccgaacaucgggagccggccccgcgucagagacauuuccagccggaucucuaucuacuggaccauugugaagccuggagacauccugcugauuaacuccaccggcaaucucaucgcuccccgcggguacuucaagauuagaagcggaaaaucuagcaucaugcgguccgaugccccuaucggcaaguguaacucugagugcauuacacccaauggcagcaucccgaacgacaaaccuuuucagaaugugaaccgcauuacguauggggcuugucccagauacgucaagcagaauacccugaaacuugccacaggaaugcggaacguuccugaaaagcaaacccgcggcaucuucggggcgauugccggauuuaucgagaauggcugggaagggaugguggauggaugguauggcuucagacaccagaacuccgagggcacagggcaggcugccgaccugaaaagcacccaagcugccaucaaucagauuaacggaaagcucaaucggcugaucggcaagacgaacgagaaauuucaucagauugaaaaggaguucucugaaguggaggggagaauccaggaucuugaaaaauacgucgaggacacaaagauugaucugugguccuauaaugccgagcuccugguggcucuggaaaaccaacacaccaucgaccucaccgauagcgagaugaacaaacuguucgaacgcacaaagaagcagcuucgggagaaugcggaagacaugggaaacggcugcuuuaaaauuuaccauaagugugauaaugccugcaucgggucuaucagaaacggcaccuaugaccacgacguuuaccgcgaugaggcucugaauaaccgguuccagauuaaaggaguggagcucaaguccggcuacaaagacuggauccuguggauuagcuuugccaucuccugcuuccuucugugugucgcccuccugggguuuauuaugugggcuugccagaagggaaauaucagauguaacaucugcauuuga

SEQ ID NO: 204865 - RNA, 1701 nt, Artificial Sequence
  derived and/or modified CDS sequence (opt5) from hemagglutinin__InfluenzaA__AIW60699
augaagaccaucauugcccugagcuacauccucugccugguguucgcucagaaacuucccggcaacgacaauuccacagccacgcuguguauugggcaccaugcggucccuaacggaaccaucguuaagacaauuaccaaugaucaaaucgaggugacaaacgcuaccgaacucgugcagucuagcuccacaggcgggaucugcgacucuccgcaccagauucuggauggagagaauuguacccuuaucgacgcccugcucggcgauccccagugcgacggguuucaaaacaaaaagugggaucuguucgucgaaagaagcaaagccuauuccaauuguuacccuuaugacgugcccgauuacgcuucucugcggagccucauugccuccagcggaacgcuggaguuuaacaaugaaucuuucaacuggaccggcguuacacagaauggcaccuccagcgcuugcaagcgcagaucuaacaauuccuuuuucagccggcuuaacuggcugacacaucucaaguuuaaauauccugcccugaaugugaccaugcccaacaacgaggaguucgacaagcuguacaucuggggaguccaccauccugugacggauaaugaccagauuucucuguaugcgcaggccuccgggaaaaucacaguuagcaccaagcgcucccaacagacagugauuccgaacaucggcucuagaccccggguccgcgauaucccuagcagaauuuccaucuacuggaccauugugaaacccggggacauccuccugauuaagagcaccggaaaucugaucgcuccucggggcuacuuuaagauccgcucugggaaauccagcauuaugagaucugacgcccccaucggaaaguguaacagcgaaugcauuacaccgaauggcuccaucccuaacgauaaacccuuccagaaugugaaccggauuacguauggcgcuuguccucgcuacgucaagcagaauacccucaaacuggccacagggaugagaaacguucccgagaagcaaacccggggaaucuuuggcgcgaucgccggguucauugaaaauggaugggagggcaugguggacgggugguauggauuucgccaccagaacucugagggcaucggccaggcugccgaucuuaaaagcacacaagcugccauugaccagaucaaugggaagcugaacagacucauuggaaagaccaaugaaaaauuccaccagaucgagaaggaguucuccgaaguggaaggccggauucaggaucuggagaaauacgucgaggacacgaagaucgaucuuuggagcuauaacgccgaacugcucguggcucuggagaaccaacauacaaucgaccugaccgauucugaaaugaauaaacucuuugaggaaaccaagaagcagcugagagagaacgcggaggacauggggaauggaugcuucaaaauuuaccacaagugugauaacgccugcaucggcuccauucgcaaugggacauaugaccaugacguuuaccgggaugaagcucuuaacaauagauuucagaucaaaggcguggagcuuaagagcggauacaaagacuggauucucuggaucucuuucgccaucuccugcuuucugcuuugugucgcccugcucggcuucauuaugugggcuugccagaaggggaacauccgcuguaauauuugcaucuga

SEQ ID NO: 204866 - RNA, 1701 nt, Artificial Sequence
  derived and/or modified CDS sequence (opt5) from hemagglutinin__InfluenzaA__AIW60700
augaagaccaucauugcccugagcuacauccucugccugguguucgcucagaaacuucccggcaacgacaauuccacagccacgcuguguauugggcaccaugcggucccuaacggaaccaucguuaagacaauuaccaaugaucaaaucgaggugacaaacgcuaccgaacucgugcagucuagcuccacaggcgggaucugcgacucuccgcaccagauucuggauggagagaauuguacccuuaucgacgcccugcucggcgauccccagugcgacggguuucaaaacaaaaagugggaucuguucgucgaaagaagcaaagccuauuccaauuguuacccuuaugacgugcccgauuacgcuucucugcggagccucauugccuccagcggaacgcuggaguuuaacaaugaaucuuucaacuggaccggcguuacacagaauggcaccuccagcgcuugcaagcgcagaucuaacaauuccuuuuucagccggcuuaacuggcugacacaucucaaguuuaaauauccugcccugaaugugaccaugcccaacaacgaggaguucgacaaacuuuacaucuggggaguccaccauccugggacggauaaugaccagauuucucuguaugcgcaggccuccggcaagaucacagugagcaccaagcgcucccaacagacaguuauuccgaacaucgggucuagaccccgggugcgcgauaucccuagcagaauuuccaucuacuggaccauugucaaacccggagacauccuccugauuaauagcaccggcaaccugaucgcuccucggggguacuuuaagauccgcucuggaaaguccagcauuaugagaucugacgcccccaucggcaaauguaauagcgaaugcauuacaccgaacggcuccaucccuaaugauaagcccuuccagaacgugaaucggauuacguauggggcuuguccucgcuacgugaaacagaacacccucaagcuggccacaggaaugagaaauguccccgagaaacaaacccggggcaucuuuggggcgaucgccggauucauugaaaacggcugggaggggaugguugacggaugguauggcuuucgccaccaaaauucugagggcaucgggcaggcugccgaucuuaagagcacacaggcugccauugaccagaucaacggaaaacugaauagacucauuggcaagaccaacgaaaaguuccaccagaucgagaaagaguucuccgaaguggaagggcggauucaggaucuggagaaguacguggaggacacgaaaaucgaucuuuggagcuauaacgccgaacugcucgucgcucuggagaaucaacauacaaucgaccugaccgauucugaaaugaacaagcucuuugaggaaaccaaaaagcagcugagagagaaugcggaggacaugggaaacggcugcuucaagauuuaccacaaaugugauaaugccugcaucggguccauucgcaacggcacauaugaccaugacguguaccgggaugaagcucuuaauaacagauuucagaucaagggaguugagcugaaaagcggcuacaaggacuggauucucuggaucucuuucgccaucuccugcuuucugcuuuguguggcccugcucggguucauuaugugggcuugccagaaaggaaauauccgcuguaacauuugcaucuga

SEQ ID NO: 204867 - RNA, 1701 nt, Artificial Sequence
  derived and/or modified CDS sequence (opt5) from hemagglutinin__InfluenzaA__AIW60701
augaagaccaucauugcccugagcuacauccucugccugguguucacacagaaacuucccggcaacgacaauuccacggcuacccugugucucgggcaccaugccgucccuaacggaacaauuguuaagaccaucacaaaugaucaaauugaggugaccaacgcgacagaacuggugcagucuagcuccaccggcgagaucugcgacucuccgcaccagauccuugauggggaaaauuguacgcugauugacgcucuccugggagauccccagugcgacggcuuucaaaacaaaaagugggaucuguucgucgagagaagcaaagccuauuccaauuguuacccuuaugacgugcccgauuacgccucucuccggagccugguugcuuccagcgggacccuugaauuuaacaaugagucuuucaacuggacaggagugacccagaauggcacauccagcgccugcauccgcagaucuaacaauuccuuuuucagccggcugaacuggcucacccaucugaaguuuaaguauccugcucuuaaugucacgaugcccaacaacgagaaauucgacaagcuguacauuuggggcgugcaccauccugggacagauaaugaccagaucuuuccguaugcccaggcgucuggacgcauuaccguuuccacaaaaagaagccaacagaccgugauccccaacauuggcucccggccucgcgucagaaauauccccucucggaucagcauuuacuggaccaucgugaagccuggggauauucuccugaucaacuccacaggaaaucugauugcuccccgcggcuacuucaaaaucagaagcgggaagucuuccaucaugcggagcgacgccccgauuggaaaguguaacucugaaugcaucacgccuaauggcagcauucccaacgacaaaccuuuucagaaugugaaccgcaucaccuauggcgccugucccagauacgucaagcagaauacacucaaacuggcuaccgggaugcggaacguucccgagaagcaaacacgcggaauuuucggcgccaucgcgggguuuaucgaaaauggaugggagggcaugguggaugggugguauggauucagacaccagaacuccgagggcauuggccaggccgcugaccuuaaaucuacccaagccgcuaucgaucagauuaaugggaagcugaaccggcucaucggaaaaacgaacgaaaaguuccaccagauugagaaggaauuuagcgagguggaaggcagaauccaggaccuggagaaauacgucgaggauacaaagauugaccuuugguccuauaaugccgaacugcucguggcccuggagaaccaacauaccaucgaucugaccgacagcgaaaugaauaaacucuucgagaagaccaaaaagcagcugcgcgaaaacgcugaggauauggggaauggaugcuuuaagaucuaccacaaaugugacaacgcgugcauuggcucuauccggaaugggacauaugaucaugacguuuacagagacgaggcccuuaacaaucgcuuccagauuaagggcguggaacugaaauccggauacaaggauuggauccucuggauuagcuuugcuaucucuugcuuccugcuuugugucgcccugcucggcuuuaucaugugggccugccagaaagggaacauucgguguaauaucugcauuuga

SEQ ID NO: 204868 - RNA, 1701 nt, Artificial Sequence
  derived and/or modified CDS sequence (opt5) from hemagglutinin__InfluenzaA__AIW60702
augaagaccaucauugcccugagcuacauccucugccugguguucacacagaaacuucccggcaacgacaauuccacggcuacccugugucucgggcaccaugccgucccuaacggaacaauuguuaagaccaucacaaaugaucaaauugaggugaccaacgcgacagaacuggugcagucuagcuccaccggcgagaucugcgacucuccgcaccagauccuugauggggaaaauuguacgcugauugacgcucuccugggagauccccagugcgacggcuuucaaaacaaaaagugggaucuguucgucgagagaagcaaagccuauuccaauuguuacccuuaugacgugcccgauuacgccucucuccggagccugguugcuuccagcgggacccuugaauuuaacaaugagucuuucaacuggacaggagugacccagaauggcacauccagcgccugcauccgcagaucuaacaauuccuuuuucagccggcugaacuggcucacccaucugaaguuuaaguauccugcucuuaaugucacgaugcccaacaacgagaaauucgacaagcuguacauuuggggcgugcaccauccugggacagauaaugaccagaucuuucucuaugcccaggcgucuggacgcauuaccguuuccacaaaaagaagccaacagaccgugaucccgaacauuggcucccggccccgcgucagaaauaucccuucucggaucagcauuuacuggaccaucgugaagcccggggauauucugcugaucaacuccacaggaaaucucauugccccucgcggcuacuucaaaaucagaagcgggaagucuuccaucaugcggagcgacgcucccauuggaaaguguaacucugaaugcaucacgccgaauggcagcauuccuaacgacaaacccuuucagaaugugaaccgcaucaccuauggcgccuguccuagauacgucaagcagaauacacugaaacuugcuaccgggaugcggaacguucccgagaagcaaacacgcggaauuuucggcgccaucgcgggguuuaucgaaaauggaugggagggcaugguggaugggugguauggauucagacaccagaacuccgagggcauuggccaggccgcugaccugaaaucuacccaagccgcuaucgaucagauuaaugggaagcucaaccggcugaucggaaaaacgaacgaaaaguuccaccagauugagaaggaauuuagcgagguggaaggcagaauccaggaccuugagaaauacgucgaggauacaaagauugaccugugguccuauaaugccgaacuccugguggcccuggagaaccaacauaccaucgaucucaccgacagcgaaaugaauaaacuguucgagaagaccaaaaagcagcuucgcgaaaacgcugaggauauggggaauggaugcuuuaagaucuaccacaaaugugacaacgcgugcauuggcucuauccggaaugggacauaugaucaugacguuuacagagacgaggcccugaacaaucgcuuccagauuaagggcguggaacucaaauccggauacaaggauuggauccuguggauuagcuuugcuaucucuugcuuccuucugugugucgcccuccugggcuuuaucaugugggccugccagaaagggaacauucgguguaauaucugcauuuga

SEQ ID NO: 204869 - RNA, 1701 nt, Artificial Sequence; identical to SEQ ID NO: 204613
  derived and/or modified CDS sequence (opt5) from hemagglutinin__InfluenzaA__AIZ07211

SEQ ID NO: 204870 - RNA, 1701 nt, Artificial Sequence
  derived and/or modified CDS sequence (opt5) from hemagglutinin__InfluenzaA__AIZ07212
augaagaccaucauggcccugagcuacauucucugccugguguucgcucagaaacuucccggcaacgacaauuccacagccacgcugugucucgggcaccaugcggucccuaacggaaccaucguuaagacaauuaccaaugauagaaucgaggugacaaacgcuaccgaacuggugcaaaauucuagcauuggcgagaucugcgacuccccgcaccagauccuugauggggaaaacuguacacugauugacgcccuccugggagauccccagugcgacggcuuucagaauaaaaagugggaucuguucgucgagcggucuaaagccuauagcaacuguuacccuuaugacgugcccgauuacgcuucccuccgcucucugguugccagcuccgggacccuugaauuuaauaacgagagcuucaauugggcuggagugacgcaaaacggcaccucuuccgccugcaucagaggcagcaauucuuccuuuuucagccggcugaacuggcucacacauucuaauuuuaaguauccugcgcugaacgucaccaugcccaacaaugagcaguucgacaaacuuuacauuuggggagugcaccauccugggacagauaaggaccagaucuuucuguaugcccaguccagcggccgcauuaccguuuccacgaagagaucucaacaggcugugaucccgaacauugggagccggccccgcaucagaaauaucccuucccggauuagcaucuacuggacaauugucaaacccggagauauccuccugauuaacucuaccggcaaucugaucgccccucgcggguacuucaagaucagauccggaaaaagcucuauuaugcggagcgacgcucccaucggcaaguguaaguccgaaugcauuacaccgaacggcucuaucccuaaugacaaacccuuucagaacgugaaucgcauuaccuauggggccuguccuagauacgugaagcagagcacccucaaacuggcgacaggaaugcggaacguccccgagaagcaaacgcgcggcaucuucggggccaucgcuggauuuauugaaaauggcugggaggggaugauggauggaugguauggcuucagacaccagaacuccgagggccgggggcaggccgcugaccuuaaaagcacccaagccgccaucgaucagauuaauggaaagcugaacagacucaucggcaaaacaaaugaaaaguuccaccagauugagaaggaauuuucugagguugaagggcgcauccaggaccuggagaaauacguggaggauaccaagauugaccuuugguccuauaacgcugaacugcucguggcgcuggagaaccaacauacaaucgaucugaccgacagcgaaaugaauaaacucuucgagaagacgaaaaagcagcugcgggaaaacgccgaggauaugggaaauggcugcuuuaagaucuaccacaaaugugacaacgcuugcauugggucuaucagaaauggcacauaugaucaugacgucuaccgcgacgaggcccuuaacaaucgguuccagauuaagggaguggaacugaaauccggcuacaaggauuggauccucuggauuagcuuugccaucuccugcuuccugcuuuguguugcucugcucggguuuaucaugugggccugccagaaaggaaacauuagauguaauaucugcauuuga

SEQ ID NO: 204871 - RNA, 1683 nt, Artificial Sequence
  derived and/or modified CDS sequence (opt5) from hemagglutinin__InfluenzaA__AJD78175
auggagaccgccagccugaucacaauucuccugguggucacgguuuccaacgcugacaagaucugcauuggcuaccagucuaccaauagcacagaaaccguggauacacuuaccgagaacaaugugcccgucacacacgccaaggaacugcuccauaccgagcacaacgggaugcugugugcgacgucccuuggacaaccucugauccucgauaccugcacaauugaaggccugaucuaugggaauccgucuugugaccugcuccugggaggcagagaguggagcuacaucguggagcggcccuccgcugccaacgggcuuugcuauccuggaaauguugaaaaccuggaggaacuccgcucucuguucagcuccgccagaagcuaccagcggauucagaucuuucccgacaccauuuggaaugugucuuauuccggcacaagcaaggcuuguucugauuccuucuaccgcagcaugagauggcuuacccagaaagacaacacguauccuauccaagaugcccaguacacaaauaaccagggcaagaauauucuguuuaugugggggaucaaccaucccccuaccgacacagcucagaccaaucucuacacccggacagauacgaccacaucugucgccaccgaggagauuaaccgcacauucaaaccgcugaucggacccagaccucuggugaacggccucauggggcggaucaauuauuacugguccguucugaagcccggacaaacccuucgcauuaagagcaacggcaaucugaucgcgccuugguaugggcacauucucuccggagaaucucauggcagaauccugaaaacggaccuuaagcggggcagcugcacagugcagugucagaccgagaaagggggacugaacaccacacuccccuuucagaaugucuccaaguacgccuucggcaacugcagcaaauauauugggaucaagucucugaagcuggcugugggacuccgcaaugugccguccagaagcucucggggccuguuuggggccaucgcuggauucauugaaggcggcuggagcgggcuugucgccggaugguacggcuuucaacacuccaacgaucaggggguuggaauggcggccgaccgcgauucuacccagaaagcuaucgacaagauuacaagcaaagugaauaacaucguggacaagaugaauaaacaauaugagauuaucgaucacgaguucaacgaagucgagacgagacugaauaugaucaacaauaagauugacgaucagauccaggacauuugggccuacaacgcugaacuccuggugcuucuggagaaccagaaaacccucgaugaacaugacgccaauguuaacaaucuguacaacaaggugaagcgggcccugggcuccaaugcugucgaggaugggaaaggcuguuuugaacucuaucacaagugcgacgaucaauguauggagacaaucagaaacggaaccuacaaucgccggaaauaucaggaggaaagcaagcuggagagacagaaaauugaaggcgugaaacuugagucugaagggacauacaagauccugaccauuuauuccacgguugcgagcucucucgugaucgccaugggauucgcugccuuucuguucugggccauguccaacggcagcugccgcugcaauaucuguauuuga

SEQ ID NO: 204872 - RNA, 1683 nt, Artificial Sequence
  derived and/or modified CDS sequence (opt5) from hemagglutinin__InfluenzaA__AJD78187
auggagaccgccagccugaucacaauucuccugguggucacgguuuccaacgcugacaagaucugcauuggcuaccagucuaccaauagcacagaaaccguggauacacuuaccgagaacaaugugcccgucacacacgccaaggaacugcuccauaccgagcacaacgggaugcugugugcgacgucccuuggacauccucugauccucgauaccugcacaauugaaggccugaucuaugggaauccgucuugugaccugcuccugggaggcagagaguggagcuacaucguggagcggcccuccgcuguuaacgggcuuugcuauccuggaaauguggaaaaccuggaggaacuccgcucucuguucagcuccgccagaagcuaccaacggauucagaucuuucccgacaccauuuggaaugucucuuauuccggcacaagcaagaccuguucugauuccuucuaccgcagcaugagauggcuuacgcagaaagacaacgccuauccuauccaggaugcucaauacacaaauaaccagggcaagaauauucuguuuaugugggggaucaaccaucccccuaccgacacaacccagaccaaucucuacacacggacggauaccacaaccucuguggccacagaggagauuaaccgcaccuucaaaccgcugaucggacccagaccucugguuaacggccucauggggcggaucaauuauuacugguccgugcugaagcccggacagacgcuucgcauuaagagcaacggcaaucugaucgcuccuugguaugggcacauucucuccggagaaucucacggcagaauccugaaaacagaccuuaagcggggcagcugcaccguccaaugucagaccgagaaagggggacugaacacaacccuccccuuucagaauguguccaaguacgccuucggcaacugcagcaaauauauugggaucaagucucugaagcuggcggugggacuccgcaaugucccguccagaagcucucggggccuguuuggggccaucgcuggauucauugaaggcggcuggagcgggcuuguugccggaugguacggcuuucagcacuccaacgaucaaggggugggaauggcugccgaccgcgauucuacacagaaagcgaucgacaagauuacgagcaaagugaauaacaucgucgacaagaugaauaaacaguaugagauuaucgaucaugaguucuccgaaguggagaccagacugaacaugaucaauaacaagauugacgaucaaauccaggacauuugggccuacaaugcugaacuccugguucuucuggagaaccagaaaacacucgaugaacacgacgccaacgugaauaaccuguacaauaaggucaagcgggcucugggcagcaacgccguggaggaugggaaaggcuguuuugaacucuaucauaagugcgacgaucaguguauggagaccaucagaaauggaacauacaaccgccggaaauaucaagaggaaucuaagcuggagagacagaaaauugaaggcguuaaacuugaguccgaagggaccuacaagauccugacgauuuauagcaccguggccucuucccucgucaucgcuaugggauucgcggccuuucuguucugggcuaugagcaauggcuccugccgcugcaacaucuguauuuga

SEQ ID NO: 204873 - RNA, 1683 nt, Artificial Sequence
  derived and/or modified CDS sequence (opt5) from hemagglutinin__InfluenzaA__AJD78199
auggagaccgugagccugaucacaauucuccuggucgccacgguuuccaacgcugacaagaucugcauuggcuaccagucuaccaauagcacagaaaccguggauacacuuaccgagaacaaugugcccgucacacacgccaaagaacugcuccauaccgagcacaacgggaugcugugugcgacgucccuuggacaaccucugauccucgauaccugcacaauugaaggccugaucuaugggaauccgucuugugaccugagccucgagggaagagagugguccuacaucguggaacggcccucugcuguuaacggccugugcuauccugggaauguggagaaccuugaggaacugcgcagccucuucuccagcgccagaucuuaccagcggauucagaucuuucccgacaccauuuggaaugucuccuaugauggaacaagcaccgccuguucuggcuccuucuaccgcagcaugagauggcugacgcggaagaacggcgacuauccuauccaggaugcucaauacacaaauaaccaggggaaaaauauucuuuuuauguggggaaucaaccaucccccuaccgacacaacccagcgcgaucuguacaccagaacagacacgaccacaucuguggccaccgaggaaauuaaucggaucuucaagccgcucaucggcccccgcccucugguuaacgggcugaugggaagaauugauuauuacugguccgugcucaaacccggccagacacugcggaucaagagcgacgggaaccuuauugcuccuugguauggacacauccuguccggcgagucucauggccgcauucucaagaccgaucugaaaagagggagcugcacgguccaaugucagacagaaaagggaggccuuaauaccacccugcccuuucagaacguguccaaauacgccuucgggaauugcagcaaguauaucggaaucaaaucucucaagcuggcggugggccugcggaacgucccgucccgcagcucuagagggcucuuuggagccauugcuggcuucaucgagggcggguggagcggacugguugccggcugguacggguuucagcacuccaaugaccaaggagugggcauggcugccgaccgggauucuacacagaaggcgauugacaaaaucaccagcaaggugaacaauauugucgauaaaaugaacaagcaguaugaaaucaucgaccacgaguucuccgagguggaaacaagacuuaauaugauuaacaauaaaaucgaugaccaaauucaggauaucugggccuacaacgcugagcugcucguucugcuugaaaaucagaagacgcuggacgagcaugaugccaacgugaauaaccucuacaacaaagucaagcgcgcucuggggagcaaugccguggaagacggcaagggauguuuugagcuguaucacaaaugcgaugaccaguguauggagaccauucggaacggcacauacaauagacgcaaguaucaagaagagucuaaacucgaacggcagaagaucgaggggguuaaacuggaauccgagggaaccuacaagauucuuacaaucuauagcaccguggccucuucccuggucaucgcuaugggcuucgcggccuuucucuucugggcuaugagcaacggguccugcagaugcaauauuuguaucuga

SEQ ID NO: 204874 - RNA, 1683 nt, Artificial Sequence
  derived and/or modified CDS sequence (opt5) from hemagglutinin__InfluenzaA__AJD78211
auggagaccgugagccugaucacaauucuccuggucgccacgguuuccaacgcugacaagaucugcauuggcuaccagucuaccaauagcacagaaaccguggauacacuuaccgagaacaaugugcccgucacacacgccaaagaacugcuccauaccgagcacaacgggaugcugugugcgacgucccuuggacaaccucugauccucgauaccugcacaauugaaggccugaucuaugggaauccgucuugugaccugagccucgagggaagagagugguccuacaucguggaacggcccucugcuguuaacggccugugcuauccugggaauguggagaaccuugaggaacugcgcagccucuucuccagcgccagaucuuaccagcggauucagaucuuucccgacaccauuuggaaugucuccuaugauggaacaagcaccgccuguucuggcuccuucuaccgcagcaugagauggcugacgcggaagaacggcgacuauccuauccaggaugcucaauacacaaauaaccaggggaaaaauauucuuuuuauguggggaaucaaccaucccccuaccgacacaacccagcgcgaucuguacaccagaacagacacgaccacaucuguggccaccgaggaaauuaaucggaucuucaagccgcucaucggcccccgcccucugguuaacgggcugaugggaagaauugauuauuacugguccgugcucaaacccggccagacacugcggaucaagagcgacgggaaccuuauugcuccuugguauggacacauccuguccggcgagucucauggccgcauucucaagaccgaucugaaaagagggagcugcacgguccaaugucagacagaaaagggaggccuuaauaccacccugcccuuucagaacguguccaaauacgccuucgggaauugcagcaaguauaucggaaucaaaucucucaagcuggcggugggccugcggaacgucccgucccgcagcagacgggggcucuuuggagccauugcuggcuucaucgagggcggguggucuggacugguugccggcugguacggguuucagcacagcaaugaccaaggagugggcauggcugccgacagagauuccacacagaaggcgauugacaaaaucaccucuaaggugaacaauauugucgauaaaaugaacaagcaguaugaaaucaucgaccacgaguucagcgagguggaaacacgccuuaauaugauuaacaauaaaaucgaugaccaaauucaggauaucugggccuacaacgcugagcugcucguucugcuugaaaaucagaagacgcuggacgagcaugaugccaacgugaauaaccucuacaacaaagucaagcgggcucugggguccaaugccguggaagacggcaagggauguuuugagcuguaucacaaaugcgaugaccaguguauggagaccauuagaaacggcacauacaaucgccggaaguaucaagaagagagcaaacucgaaagacagaagaucgaggggguuaaacuggaaucugagggaaccuacaagauucuuacaaucuauuccaccguggccagcucucuggucaucgcuaugggcuucgcggccuuucucuucugggcuauguccaacgggagcugccgcugcaauauuuguaucuga

SEQ ID NO: 204875 - RNA, 1689 nt, Artificial Sequence
  derived and/or modified CDS sequence (opt5) from hemagglutinin__InfluenzaA__AJI76401
auggccaucauuuaccugauccuccuguucgcuaccgugagaggcgaccagauuugcaucggguaucacgccaacaauagcacagagaaggucgauacgauucuugaacggaacguuaccgugacacaugcgaaagacauccuggagaagacccacaauggaaaacucuguaagcugaacggcauucccccucuugaacugggggauugcuccaucgcuggauggcuccugggcaauccggagugugaccgccugcucagagugcccgaauggucuuacaucauggagaaagagaacccucgguauagccugugcuaccccgggucccuuaaugauuaugaagaacugaagcaucuccugucuagcgucaagcacuuugaaaaagugcgcauucuuccuaaggacagauggacaaaccauaccacaaccggaggcuccaaagccugugccguuucuggcaagcccagcuucuuucggaauaugguguggcugacgaaaaaggggccuaacuacccggucgcuaagggauccuauaauaacaccagcggcgagcaaaugcucaucauuuggggagugcaccaccccaucgaugaggccgaacagcgcgcucuguaccagaauguugggacauacgugucugccuccaccagcacacuguauaaaagaucuauuccugagaucgcggcccggcccgaagucaacggccucgggucccgcauggaguucagcuggacccugcuugacgugugggauacgaucaauuuugaaucuacaggaaaccugguggcuccugaguacggcuucaagauuuccaaaagaggcagcuccgggaucaugaagaccgagggaacacucggcaacugcgaaaccaaaugucagacaccccugggggccauuaauaccacgcuuccguuucauaacguccacccucugaccaucggagagugccccaaguauguuaaaucugaaaagcucgugcuggcuacaggccugcggaaugugccucaaauugagagccgcggacucuucggggccaucgcgggcuuuaucgaaggcggguggcagggaauggucgacggcugguacggguaucaucacuccaacgaucagggaagcggcuacgccgcugacaaggagucuacccagaaagccuucgaugggauuacaaauaaggugaacuccguuaucgagaaaaugaauacccaauuugaagcugugggcaaggaguucaacaaucuggagaaaagacuugagaaccugaauaagcggauggaagacggauuucucgacgucuggacguauaacgccgagcugcuugugcugauggagaaugaacgcacacucgauuuccacgacagcaacguuaagaaucuguacgagaaagugagaaugcagcugcgggauaacgucagagaacucggcaacggguguuucgaguuuuaccauaagugcgacgaugaguguaugaacucugugaaaaauggaaccuaugacuaccccaaguaugaagaggaaagcaaacugaagcgcaaugagauuaagggcgucaaacuuuccucuauggggguguaccagauccuggccauuuaugcuaccguugcgggaagccucucccuggccaucaugguggcuggcaucagcuucuggaugugcucuaacgggucccugcagugccggauuuguaucuga

SEQ ID NO: 204876 - RNA, 1701 nt, Artificial Sequence; identical to SEQ ID NO: 204137
  derived and/or modified CDS sequence (opt5) from hemagglutinin__InfluenzaA__AJI80137

SEQ ID NO: 204877 - RNA, 1701 nt, Artificial Sequence; identical to SEQ ID NO: 204137
  derived and/or modified CDS sequence (opt5) from hemagglutinin__InfluenzaA__AJI80149

SEQ ID NO: 204878 - RNA, 1701 nt, Artificial Sequence; identical to SEQ ID NO: 202112
  derived and/or modified CDS sequence (opt5) from hemagglutinin__InfluenzaA__AJI80161

SEQ ID NO: 204879 - RNA, 1701 nt, Artificial Sequence
  derived and/or modified CDS sequence (opt5) from hemagglutinin__InfluenzaA__AJI80172
augaagaccaucauugcccugagcuacauccucugccugguguucgcucagaaacuucccggcaacgacaauuccacagccacgcugugucucgggcaccaugcggucccuaacggaaccauuguuaagacaaucaccaaugauagaauugaggugacaaacgcuaccgaacuggugcaaaauucuagcaucggcgagaucugcgacuccccgcaccagauucuugauggggaaaacuguucucugaucgacgcccuccugggagauccccagugcgacggcuuucagaauaaaaagugggaucuguucgucgagcggagcaaagccuauuccaacuguuacccuuaugacgugcccgauuacgcuucucuccgcagccugguugccuccagcgggacacuugaauuuaauaacgagucuuucaauugggcuggagugacccaaaacggcacguccagcgccugcauuagaggcucuaauuccagcuuuuucucucggcugaacuggcucacccaucugaauuuuaaguauccugcgcuuaacgucacaaugcccaacaaugagcaguucgacaagcuguacaucuggggagugcaccauccugggaccgauaaagaccagauuuuucucuaugcccaguccagcggccgcaucacaguuuccaccaagagaucucaacaggcugugauuccgaacaucgggagccggccccgcaucagaaauauuccuucccggaucagcauuuacuggacgaucgucaaacccggagauauucugcugaucaacucuacaggcaaucucaucgccccucgcggguacuucaagauuagauccggaaaaagcucuaucaugcggagcgacgcucccauuggcaaguguaaguccgaaugcaucaccccgaacggcucuauuccuaaugacaaacccuuucagaacgugaaucgcaucacauauggggccuguccuagauacgugaagcagagcacccugaaacuugcgaccggaaugcggaacguccccgagaagcaaacacgcggcaucuucggggccauugcuggauuuaucgaaaauggcugggaggggaugguugauggaugguauggcuucagacaccagaacuccgagggccgggggcaggccgcugaccugaaaagcacgcaagccgccauugaucagaucaauggaaagcucaacagacugauuggcaaaaccaaugaaaaguuccaccagaucgagaaggaauuuucugagguggaagggcgcauucaggaccuugagaaauacguggaggauacaaagaucgaccugugguccuauaacgcugaacuccuggucgcgcuggagaaccaacauaccaucgaucucacagacagcgaaaugaauaaacuguucgagaagaccaaaaagcagcuucgggaaaacgccgaggauaugggaaauggcugcuuuaagauuuaccacaaaugugacaacgcuugcaucgggucuauuagaaauggcacguaugaucaugacguguaccgcgacgaggcccugaacaaucgguuccagaucaagggaguugaacucaaauccggcuacaaggauuggauucuguggaucagcuuugccaucuccugcuuccuucuguguguggcucuccugggguuuauuaugugggccugccagaaaggaaacaucagauguaauauuugcaucuga

SEQ ID NO: 204880 - RNA, 1701 nt, Artificial Sequence
  derived and/or modified CDS sequence (opt5) from hemagglutinin__InfluenzaA__AJI80196
augaagaccaucauugcccugagcuacauccucugccugguguucgcucagaaacuucccggcaacgacaauuccacagccacgcugugucucgggcaccaugcggucccuaacggaaccauuguuaagacaaucaccaaugauagaauugaggugacaaacgcuaccgaacuggugcaaaauucuagcaucggcgagaucugcgacuccccgcaccagauucuugauggggaaaacuguacacugaucgacgcccuccugggagauccccagugcgacggcuuucagaauaaagagugggaucuguucgucgaacggucuaaggccuauagcaacuguuacccuuaugacgugcccgauuacgcuucccuccgcucucugguugccagcuccgggacccuugaguuuaauaacgagagcuucaauugggcuggagugacgcaaaacggcaccucuuccgccugcauuagaggcagcaauucuuccuuuuucagccggcugaacuggcucacacaucugaauuuuaaauauccugcgcuuaacgucaccaugcccaacaaugaacaguucgacaagcuguacaucuggggagugcaccauccugggacagauaaggaccagauuuuucucuaugcccagucuuccggccgcaucaccguuagcacgaaaagaucccaacaggcugugauuccgaacaucgggucucggccccgcaucagaaauauuccuagccggaucuccauuuacuggacaaucgucaagcccggagauauucugcugaucaacagcaccggcaaucucaucgccccucgcggguacuucaaaauuagaucuggaaaguccagcaucaugcggucugacgcucccauuggcaaauguaagagcgagugcaucacaccgaacggcuccauuccuaaugacaagcccuuucagaacaucaaucgcaucaccuauggggccuguccuagauacgugaaacagucuacccugaaacuugcgacaggaaugcggaacgugcccgaaaaacaaacgcgcggcauuuucggggccaucgcuggauuuauugagaauggcugggaggggauggucgauggaugguauggcuucagacaccagaacagcgaaggccgggggcaggccgcugaccugaaguccacccaagccgccaucgaucagauuaauggaaaacucaacagacugaucggcaagacaaaugagaaauuccaccagauugaaaaggaguuuagcgaaguugaggggcgcauccaggaccuugagaaguacguggaagauaccaaaaucgaccuguggucuuauaacgcugaguuccucguggcgcuggaaaaccaacauacaauugaucugaccgacuccgagaugaauaagcucuuugaaaagacgaagaaacagcugcgggagaacgccgaggauaugggaaauggcugcuucaagaucuaccacaagugugacaacgcuugcauugggagcaucagaaauggcacauaugaucaugacgucuaccgcgacgaagcccuuaacaaucgguuucagauuaaaggaguggagcugaagucuggcuacaaagauuggauccucuggaucuccuucgccauuagcugcuuucugcuuuguguugcucugcucggguucaucaugugggccugccagaagggaaacauuagauguaauaucugcauuuga

SEQ ID NO: 204881 - RNA, 1701 nt, Artificial Sequence; identical to SEQ ID NO: 204687
  derived and/or modified CDS sequence (opt5) from hemagglutinin__InfluenzaA__AJI80208

SEQ ID NO: 204882 - RNA, 1701 nt, Artificial Sequence; identical to SEQ ID NO: 202066
  derived and/or modified CDS sequence (opt5) from hemagglutinin__InfluenzaA__AJI80220

SEQ ID NO: 204883 - RNA, 1701 nt, Artificial Sequence; identical to SEQ ID NO: 204879
  derived and/or modified CDS sequence (opt5) from hemagglutinin__InfluenzaA__AJI80232

SEQ ID NO: 204884 - RNA, 1701 nt, Artificial Sequence; identical to SEQ ID NO: 202066
  derived and/or modified CDS sequence (opt5) from hemagglutinin__InfluenzaA__AJI80244

SEQ ID NO: 204885 - RNA, 1701 nt, Artificial Sequence; identical to SEQ ID NO: 201930
  derived and/or modified CDS sequence (opt5) from hemagglutinin__InfluenzaA__AJI80256

SEQ ID NO: 204886 - RNA, 1701 nt, Artificial Sequence; identical to SEQ ID NO: 202066
  derived and/or modified CDS sequence (opt5) from hemagglutinin__InfluenzaA__AJI80268

SEQ ID NO: 204887 - RNA, 1701 nt, Artificial Sequence
  derived and/or modified CDS sequence (opt5) from hemagglutinin__InfluenzaA__AJI80280
augaagaccaucauugcccugagcuacauccucugccugguguucgcucagaaacuucccggcaacgacaauuccacagccacgcugugucucgggcaccaugcggucccuaacggaaccauuguuaagacaaucaccaaugauagaauugaggugacaaacgcuaccgaacuggugcaaaauucuagcaucggcaaaaucugcgacuccccgcaccagauucuugauggggagaacuguacacugaucgacgcccuccugggagauccccagugcgacggcuuucagaauaaggaaugggaucuguucgucgagcggucuaaagccuauagcaacuguuacccuuaugacgugcccgauuacgcuucccuccgcucucugguugccagcuccgggacccuugaauuuaauaacgagagcuucaauugggcuggagugacgcaaaacggcaccucuuccgccugcauuagaggcagcaauucuuccuuuuucagccggcugaacuggcucacacaucugaauuuuaaguauccugcgcuuaacgucaccaugcccaacaaugagcaguucgacaagcuguacaucuggggagugcaccauccugggacagauaaagaccagauuuuucucuaugcccagucuuccggccgcaucaccguuagcacgaagagaucccaacaggcugugauuccgaacaucgggucucggccccgcaucagaaauauuccuagccggaucuccauuuacuggacaaucgucaaacccggagauauucugcugaucaacagcaccggcaaucucaucgccccucgcggguacuucaagauuagaucuggaaaauccagcaucaugcggucugacgcucccauuggcaaguguaagagcgaaugcaucacaccgaacggcuccauuccuaaugacaaacccuuucagaacgugaaucgcaucaccuauggggccuguccuagauacgugaagcagucuacccugaaacuugcgacaggaaugcggaacguccccgagaagcaaacgcgcggcaucuucggggccauugcuggauuuaucgaaaauggcugggaggggaugguugauggaugguauggcuucagacaccagaacagcgagggccgggggcaggccgcugaccugaaauccacccaagccgccauugaucagaucaauggaaagcucaacagacugauuggcaaaacaaaugaaaaguuccaccagaucgagaaggaauuuagcgagguggaagggcgcauucaggaccuugagaaauacguggaggauaccaagaucgaccuguggucuuauaacgcugaacuccuggucgcgcuggagaaccaacauacaaucgaucucaccgacuccgaaaugaauaaacuguucgagaagacgaaaaagcagcuucgggaaaacgccgaggauaugggaaauggcugcuuuaagauuuaccacaaaugugacaacgcuugcaucgggagcauuagaaauggcacauaugaucaugacguguaccgcgacgaggcccugaacaaucgguuccagaucaagggaguugaacucaaaucuggcuacaaggauuggauucuguggaucuccuuugccaucagcugcuuccuucuguguguggcucuccugggguuuauuaugugggccugccagaaaggaaacaucagauguaauauuugcaucuga

SEQ ID NO: 204888 - RNA, 1701 nt, Artificial Sequence; identical to SEQ ID NO: 204659
  derived and/or modified CDS sequence (opt5) from hemagglutinin__InfluenzaA__AJI80292

SEQ ID NO: 204889 - RNA, 1701 nt, Artificial Sequence; identical to SEQ ID NO: 204687
  derived and/or modified CDS sequence (opt5) from hemagglutinin__InfluenzaA__AJI80303

SEQ ID NO: 204890 - RNA, 1701 nt, Artificial Sequence; identical to SEQ ID NO: 204659
  derived and/or modified CDS sequence (opt5) from hemagglutinin__InfluenzaA__AJI80315

SEQ ID NO: 204891 - RNA, 1701 nt, Artificial Sequence
  derived and/or modified CDS sequence (opt5) from hemagglutinin__InfluenzaA__AJI80326
augaaggccauccuggugguccuccuguacaccuucgcuacagccaacgcggacacgcuuugcauuggcuaucacgcuaauaacagcaccgauacaguugacaccgugcuggagaaaaaugugacagucacccauuccgugaaccuccuggaagauaagcacaaugggaaacuuuguaagcugagaggaguugcuccccuccaucugggcaaaugcaacaucgccggguggauucugggaaauccugagugugaaucucucagcacagccuccucuuggagcuacaucguggagaccuccucuagcgacaacggcacgugcuauccgggggauuuuauuaauuacgaagaacugcgggagcagcuuuccagcgucucuuccuucgaacgcuuugagaucuuccccaagaccagcucuuggccuaaccacgacuccaauaagggagugacagccgcuuguccccaugccggcgcgaaaucuuuuuauaagaaccugaucuggcucguuaaaaagggcaauagcuacccuaaacugucccaaagcuauauuaacgauaaggggaaggaagugcuuguccuguggggaauccaccaccccuccaccacagccgaccagcagucucucuaccagaaugcugaugccuacguguucgugggcaccagcagauauuccaaaaaguuuaaaccugagauugcuauccggccgaagguccgcgaccaagaggggagaaugaacuacuauuggacgcugguugaacccggagauaaaauuacauucgaggccaccggcaaccugguggugccucgguacgcguuuacaauggaaaagaaugccgggagcggaaucauuaucucugacacccccguccaugauugcaacaccacaugucagacgccugagggcgcuaucaauaccucccuccccuuccagaacauucacccgaucacaauuggcaaaugcccuaaguauguuaagagcaccaaacugcgccuugccacagggcugagaaaugugcccucuauccagagccggggacucuuuggcgcuauugccggguucaucgaaggaggcuggaccgggaugguggacggaugguacggcuaucaucaccaaaacgagcagggcuccggguacgccgcugaccugaagucuacgcagaaugcgaucgauaaaauuacaaacaaggucaauagcgugaucgagaaaaugaacacccaguuuaccgccguuggaaaggaguucaaucaccuugagaagcgcauugaaaaccugaauaaaaagguggacgauggcuuccucgacaucuggacauacaacgcugagcugcugguccuccuggaaaaugagagaacccuugauuaucaugacuccaacgugaaaaaccuguacgagaagguccggaaucaacucaaaaacaaugccaaggaaauugggaacggauguuuugaguucuaucacaagugcgauaauacauguauggaaagcgugaaaaacggcacguacgacuauccuaaguacucugaggaagccaaacugaaucgcgagaagaucgaugggguuaaacuugaguccaccagaaucuaucagauucuggcuaucuacagcacaguggccucuucccucguccuggugguuagccugggcgcgauuuccuuuuggaugugcucuaacggaagccuccagugccggaucuguauuuga

SEQ ID NO: 204892 - RNA, 1701 nt, Artificial Sequence
  derived and/or modified CDS sequence (opt5) from hemagglutinin__InfluenzaA__AJI80337
augaaggccauccuggugguccuccuguacaccuucgcuacagccaacgcggacacgcuuugcauuggcuaucacgcuaauaacagcaccgauacaguugacaccgugcuggagaagaaugugacagucacccauuccaucaaccuccuggaagauaagcacaaugggaaacuuuguaagcugagaggaguggcuccccuccaucugggcaaaugcaacauugccggguggauccugggaaauccugagugugaaucucucagcacagccuccucuuggagcuacauuguugagaccuccucuagcgacaacggcacgugcuauccgggggauuuuaucaauuacgaagaacugcgggagcagcuuuccagcgugucuuccuucgaacgcuuugagauguuccccaagaccagcucuuggccuaaccacgacuccaauaagggagucacagccgcuuguccccaugccggcgcgaaaucuuuuuauaagaaccugaucuggcucgugaaaaagggcaauagcuacccuaaacuguccaagagcuauauuaacgauaaggggaaagaaguucuugugcuguggggaauccaccaccccuccaccacagccgaccaacagucucucuaccagaaugcuaacgccuacgucuucgugggcaccagcaaguauuccaaaaaguuuaaaccugagauugcuaucagaccgaaggugcgggaucaggaggggcgcaugaacuacuauuggacgcugauugaacccggagacaaaaucacauucgaggccaccggcaaucuggucguuccuagauacgcguuugccauggaacggaacgcugggagcggaauuaucaucucugauacacccgugcaugacugcaauaccaccugucaaacaccugagggcgccauuaacacgucccuccccuuccagaauauccacccgauuaccaucggcaagugcccuaaguaugugaaaagcacaaagcugcgccuugcuaccgggcugagaaacauucccucuauccagagccggggacucuuuggcgccaucgccggguucauugaaggaggcuggacagggauggucgauggaugguacggcuaucaucaccagaaugagcaaggcuccggguacgcugcggaccugaaaucuacccagaacgccaucgacaagauuacgaauaaagugaacagcguuaucgagaagaugaauacacaguuuaccgcugugggaaaggaguucaaccaccuugagaaacgcauugaaaaucugaacaagaaagucgaugacggcuuccucgauaucuggaccuacaaugccgagcugcuggugcuccuggaaaacgagagaacacuugacuaucaugauuccaacguuaagaaucuguacgagaaagugcggaaccagcucaagaauaacgccaaggaaaucgggaauggauguuuugaguucuaucacaaaugcgacaacaccuguauggaaagcgucaagaauggcacauacgauuauccuaaauacucugaggaagcuaagcugaaccgcgagaaaauugacggggugaaacuugaguccacgagaaucuaucaaauucuggccaucuacagcaccgucgcgucuucccucgugcugguugugagccugggcgcuauuuccuuuuggaugugcucuaauggaagccuccagugccggaucuguauuuga

SEQ ID NO: 204893 - RNA, 1701 nt, Artificial Sequence; identical to SEQ ID NO: 202066
  derived and/or modified CDS sequence (opt5) from hemagglutinin__InfluenzaA__AJI80348

SEQ ID NO: 204894 - RNA, 1701 nt, Artificial Sequence; identical to SEQ ID NO: 201930
  derived and/or modified CDS sequence (opt5) from hemagglutinin__InfluenzaA__AJI80360

SEQ ID NO: 204895 - RNA, 1701 nt, Artificial Sequence; identical to SEQ ID NO: 201930
  derived and/or modified CDS sequence (opt5) from hemagglutinin__InfluenzaA__AJI80372

SEQ ID NO: 204896 - RNA, 1701 nt, Artificial Sequence; identical to SEQ ID NO: 202112
  derived and/or modified CDS sequence (opt5) from hemagglutinin__InfluenzaA__AJI80384

SEQ ID NO: 204897 - RNA, 1701 nt, Artificial Sequence; identical to SEQ ID NO: 202112
  derived and/or modified CDS sequence (opt5) from hemagglutinin__InfluenzaA__AJI80395

SEQ ID NO: 204898 - RNA, 1701 nt, Artificial Sequence; identical to SEQ ID NO: 202112
  derived and/or modified CDS sequence (opt5) from hemagglutinin__InfluenzaA__AJI80406

SEQ ID NO: 204899 - RNA, 1701 nt, Artificial Sequence; identical to SEQ ID NO: 202112
  derived and/or modified CDS sequence (opt5) from hemagglutinin__InfluenzaA__AJI80417

SEQ ID NO: 204900 - RNA, 1701 nt, Artificial Sequence; identical to SEQ ID NO: 202112
  derived and/or modified CDS sequence (opt5) from hemagglutinin__InfluenzaA__AJI80428

SEQ ID NO: 204901 - RNA, 1701 nt, Artificial Sequence; identical to SEQ ID NO: 202066
  derived and/or modified CDS sequence (opt5) from hemagglutinin__InfluenzaA__AJI80439

SEQ ID NO: 204902 - RNA, 1701 nt, Artificial Sequence; identical to SEQ ID NO: 202066
  derived and/or modified CDS sequence (opt5) from hemagglutinin__InfluenzaA__AJI80462

SEQ ID NO: 204903 - RNA, 1701 nt, Artificial Sequence
  derived and/or modified CDS sequence (opt5) from hemagglutinin__InfluenzaA__AJI80474
augaaggccauccuggugguccuccuguacaccuucgcuacagccaacgcggacacgcuuugcauuggcuaucacgcuaauaacagcaccgauacaguugacaccgugcuggagaagaaugugacagucacccauuccaucaaccuccuggaagauaagcacaaugggaaacuuuguaagcugagaggaguggcuccccuccaucugggcaaaugcaacauugccggguggauccugggaaauccugagugugaaucucucagcacagccuccucuuggagcuacauuguugagaccuccucuagcgacaacggcacgugcuauccgggggauuuuaucaauuacgaagaacugcgggagcagcuuuccagcgugucuuccuucgaacgcuuugagaucuuccccaagaccagcucuuggccuaaccacgacuccaauaagggagucacagccgcuuguccccaugccggcgcgaaaucuuuuuauaagaaccugauuuggcucgugaaaaagggcaauagcuacccuaaacugucccaaagcuauaucaacgauaaggggaaggaaguucuugugcuguggggcauucaccaccccuccaccacagccgaccagcagucucucuaccagaaugcugaugccuacgucuucgugggaaccagcagauauuccaaaaaguuuaaaccugagaucgcuauucggccgaaggugcgcgaccaagaggggagaaugaacuacuauuggacgcuggucgaacccggagauaaaaucacauucgaggccaccggcaaccugguugugccucgguacgcguuuacaauggaacgcaaugccgggagcggaauuaucaucucugacacccccgugcaugauugcaacaccacaugucagacgccugagggcgcuauuaauaccucccuccccuuccagaacauccacccgauuacaaucggcaagugcccuaaauaugucaagagcaccaagcugagacuugccacagggcugcggaaugugcccucuauucagagccgcggacucuuuggcgcuaucgccggguucaucgaaggaggcuggaccgggaugguugacggaugguacggcuaucaucaccaaaacgagcagggcuccggguacgccgcugaccugaaaucuacgcagaaugcgauugauaagaucacaaacaaagugaauagcgucauugagaagaugaacacccaguuuaccgccgugggaaaagaguucaaucaccuugagaagagaaucgaaaaccugaauaagaaaguugacgauggcuuccucgacauuuggacauacaacgcugagcugcuggugcuccuggaaaaugagcggacccuugauuaucaugacuccaacgucaagaaccuguacgagaaagugcgcaaucaacucaagaacaaugccaaagaaaucgggaacggauguuuugaguucuaucacaagugcgauaauacauguauggaaagcgucaagaacggcacguacgacuauccuaaauacucugaggaagccaagcugaauagagagaaaaucgauggggugaaacuugaguccacccggauuuaucagauccuggcuauuuacagcacaguugccucuucccucgugcuggucgugagccugggcgcgaucuccuuuuggaugugcucuaacggaagccuccagugccgcauuuguaucuga

SEQ ID NO: 204904 - RNA, 1701 nt, Artificial Sequence; identical to SEQ ID NO: 204903
  derived and/or modified CDS sequence (opt5) from hemagglutinin__InfluenzaA__AJI80485

SEQ ID NO: 204905 - RNA, 1701 nt, Artificial Sequence; identical to SEQ ID NO: 202112
  derived and/or modified CDS sequence (opt5) from hemagglutinin__InfluenzaA__AJI80496

SEQ ID NO: 204906 - RNA, 1701 nt, Artificial Sequence; identical to SEQ ID NO: 204715
  derived and/or modified CDS sequence (opt5) from hemagglutinin__InfluenzaA__AJI80507

SEQ ID NO: 204907 - RNA, 1701 nt, Artificial Sequence; identical to SEQ ID NO: 202112
  derived and/or modified CDS sequence (opt5) from hemagglutinin__InfluenzaA__AJI80518

SEQ ID NO: 204908 - RNA, 1701 nt, Artificial Sequence; identical to SEQ ID NO: 200204
  derived and/or modified CDS sequence (opt5) from hemagglutinin__InfluenzaA__AJJ98765

SEQ ID NO: 204909 - RNA, 1701 nt, Artificial Sequence
  derived and/or modified CDS sequence (opt5) from hemagglutinin__InfluenzaA__AJJ98777
augaagaccaucauugcccugagcuacauccucugccugguguucgcucagaaacuucccggcaacgacaauuccacagccacgcugugucucgggcaccaugcggucccuaacggaaccauuguuaagacaaucaccaaugaucaaauugaggugacaaacgcuaccgaacuggugcagucuuuuagcacaggcgagaucugcaauuccccgcaccagauccuugacggggaaaacuguacccugauugaugcccuccugggagacccccagugcgauggcuuccaaaauaaaaagugggaccuguuugucgagagaucuaaagccuauagcaacuguuacccuuaugaugugcccgacuacgcuucccuccggucucugguugccagcuccgggacgcuugaauuuaauaacgagagcuucaauuggaccggagugacacagaacggcaccucuuccgcuugcauccgcagaagcaauaacucuuucuuuucccggcugaauuggcucacacaucugaaguucaaguauccugcccuuaacgucaccaugcccaacaaugaggaauuugauaaacuguacauuuggggcgugcaccauccugggacggacaacgaucagaucuuccucuaugcgcaggccagcggacgcauuacaguuucuaccaagagaucccaacagacagugaucccgaauauuggcagccggccccgcgucagaaacaucccuucccggaucucuauuuacuggaccaucgugaaacccggggacauucugcugaucaauagcaccggaaaccucauugcuccucgcggcuacuuuaagaucagauccgggaaaagcucuaucaugcgguccgaugcccccauuggaaaguguaauagcgagugcaucacaccgaacggcucuauuccuaaugacaagcccuuccagaacgugaaucgcaucacguauggcgcuuguccuagauacgucaaacagaacacccugaaacuugccacagggaugcggaauguucccgaaaaacaaacccgcggaauuuuuggcgcgaucgccggguucaucgagaacggaugggagggcaugguggacgggugguauggauucagacaccagaauagcgaaggcauuggccaggcugccgaucugaaguccacacaagcugccaucgaccagauuaacgggaaacucaaccggcugaucggaaagaccaaugagaaauuucaccagauugaaaaggaguucucugaaguggagggcagaauccaggaucuugagaaguacgucgaagacacgaaaauugaucuguggagcuauaacgccgagcuccugguggcucuggaaaaucaacauacaaucgaccucaccgauuccgagaugaacaagcuguuugaaaagaccaagaaacagcuucgcgagaaugcggaggacauggggaacggaugcuucaagaucuaccacaagugugauaaugccugcauuggcagcauccggaacgggacauaugaccaugauguuuacagagacgaagcucugaauaaccgcuuucagauuaaaggcguggagcucaagucuggauacaaagacuggauccuguggauuuccuucgccaucagcugcuuucuucugugugucgcccuccugggcuucaucaugugggcuugccagaaggggaauauucgguguaacaucugcauuuga

SEQ ID NO: 204910 - RNA, 1701 nt, Artificial Sequence; identical to SEQ ID NO: 201525
  derived and/or modified CDS sequence (opt5) from hemagglutinin__InfluenzaA__AJJ98789

SEQ ID NO: 204911 - RNA, 1701 nt, Artificial Sequence
  derived and/or modified CDS sequence (opt5) from hemagglutinin__InfluenzaA__AJJ98801
augaagaccaucauugcccugagcuacauccucugccugguguucgcucagaaacuucccggcaacgacaauuccacagccacgcugugucucgggcaccaugcggucccuaacggaaccauuguuaagacaaucaccaaugaucaaauugaggugacaaacgcuaccgaacuggugcaaaauucuagcaucggcgagaucugcgacuccccgcaccagauucuugauggggaaaacuguacacugaucgacgcccuccugggagauccccagugcgacggcuuucagaauaaaaagugggaucuguucgucgagagaaacaaagccuauucuaauuguuacccuuaugacgugcccgauuacgcuagccuccggucccugguugccucuagcgggacccuugaauuuaacaaugaguccuucaacuggacgggagugacccagaauggcacaagcucugcuugcauucgcagauccaacaauagcuuuuucucucggcugaacuggcucacccaucugaacuuuaaguauccugcccuuaaugucacaaugcccaacaaugagcaguucgacaagcuguacaucuggggcgugcaccauccugggaccgauaaagaccagauuuuucucuaugcgcaauccagcggacgcaucacgguuucuacaaagagaucccagcaggccgugauuccgaacaucggcagccggccccgcaucagaaauauuccuucccggaucucuauuuacuggaccaucgucaaacccggggauauucugcugaucaacagcacaggaaaucucaucgcuccucgcggcuacuucaagauuagauccgggaaaagcucuaucaugcgguccgacgcccccauuggaaaguguaagagcgaaugcaucaccccgaacggcucuauuccuaaugacaaacccuuucagaacgugaaucgcaucaccuauggcgcuuguccuagauacgugaagcaaagcacacugaaacuugccacggggaugcggaacguccccgagaagcagacccgcggaaucuucggcgcgauugccggguuuaucgaaaauggaugggagggcaugguugaugggugguauggauucagacaccagaacuccgagggccggggccaagcugccgaccugaaaucuacacaggcugccauugaucagaucaaugggaagcucaacagacugauuggaaaaaccaacgaaaaguuccaccagaucgagaaggaauuuagcgagguggaaggccgcauucaagaccuugagaaauacguggaggauacaaagaucgaccugugguccuauaaugccgaacuccuggucgcucuggagaaccagcauaccaucgaucucacggacagcgaaaugaauaaacuguucgagaagaccaaaaagcagcuucgggaaaacgcggaggauauggggaauggaugcuuuaagauuuaccacaaaugugacaacgccugcaucggcucuauuagaaaugggacauaugaucaugacguguaccgcgacgaggcucugaacaaucgguuccagaucaagggcguugaacucaaauccggauacaaggauuggauucuguggaucagcuuugccaucucuugcuuccuucuguguguggcccuccugggcuuuauuaugugggcuugccaaaaagggaacaucagauguaauauuugcaucuga

SEQ ID NO: 204912 - RNA, 1701 nt, Artificial Sequence
  derived and/or modified CDS sequence (opt5) from hemagglutinin__InfluenzaA__AJJ98813
augaagaccaucauugcccugagcuacauccucugccugguguucgcucagaaacuucccggcaacgacaauuccacagccacgcugugucucgggcaccaugcggucccuaacggaaccauuguuaagacaaucaccaaugauagaauugaggugacaaacgcuaccgaacuggugcaaaauucuagcaucggcgagaucugcgacuccccgcaccagauucuugauggggaaaacuguacacugaucgacgcccuccugggagauccccagugcgacggcuuucagaauaaaaagugggaucuguucgucgagcggucuaaagccuauagcaacuguuacccuuaugacgugcccgauuacgcuucccuccgcucucugguugccagcuccgggacccuugaauuuaauaacgagagcuucaauuggacgggagugacccaaaacggcacaucuuccgcuugcauuagacggagcaauucuuccuuuuucagccgccugaacuggcucacccaucugaauuuuaaguauccugcccuuaacgucacaaugcccaacaaugagcaguucgacaagcuguacaucuggggcgugcaccauccugggaccgauaaagaccagauuuuucucuaugcgcagucuuccggaagaaucacgguuagcacaaagcggucccaacaggccguggucccgaacauuggcucucgccccagaauccggaauaucccuagccgcauuuccaucuacuggaccauugugaaacccggggauauccugcugauuaacagcacaggaaaucucaucgcuccuagaggcuacuucaagauccggucugggaaauccagcauuaugcgcucugacgcccccaucggaaaguguaagagcgaaugcauuaccccgaacggcuccaucccuaaugacaaacccuuucagaacgugaauagaauuaccuauggcgcuuguccucgguacgucaagcagucuacacugaaacuugccacggggaugcgcaacguucccgagaagcaaaccagaggaaucuucggcgcgaucgccggguuuauugaaaauggaugggagggcaugguggaugggugguauggauuccggcaccagaacagcgagggcagaggccaggcugccgaccugaaauccacacaagcugccaucgaucagauuaaugggaagcucaaccgccugaucggaaaaaccaaugaaaaguuccaccagauugagaaggaauuuagcgagguggaaggccggauccaggaccuugagaaauacgucgaggauacaaagauugaccuguggucuuauaacgccgaacuccugguggcucuggagaaccaacauaccaucgaucucacggacuccgaaaugaauaaacuguucgagaagaccaaaaagcagcuuagagaaaacgcggaggauauggggaauggaugcuuuaagaucuaccacaaaugugacaacgccugcauuggcagcauccgcaaugggacauaugaucaugacguuuaccgggacgaggcucugaacaauagauuccagauuaagggcguggaacucaaaucuggauacaaggauuggauccuguggauuuccuuugccaucagcugcuuccuucugugugucgcccuccugggcuuuaucaugugggcuugccagaaagggaacauucgcuguaauaucugcauuuga

SEQ ID NO: 204913 - RNA, 1701 nt, Artificial Sequence
  derived and/or modified CDS sequence (opt5) from hemagglutinin__InfluenzaA__AJJ98825
augaagaccaucauugcccugagcuacauccucugccugguguucgcucaggagcuucccggcaacgacaauuccacagccacgcugugucucgggcaccaugcggucccuaacggaaccauuguuaaaacaaucaccaaugauagaauugaagugacaaacgcuaccgagcuggugcaaaauucuagcaucggcgaaaucugcgacuccccgcaccagauucuugauggggagaacuguacacugaucgacgcccuccugggagauccccagugcgacggcuuucagaauaagaaaugggaucuguucgucgaacggucuaaggccuauagcaacuguuacccuuaugacgugcccgauuacgcuucccuccgcucucugguugccagcuccgggacccuugaguuuaauaacgagagcuucaauuggacgggagugacccaaaacggcacaucuuccgcuugcauuagacggagcaauaacagcuuuuucucccgccugaauuggcucacccaucugaacuuuaaauauccugcccuuaacgucacaaugcccaauaacgaacaguucgacaagcuguacaucuggggcgugcaccauccugggaccgauaaggaccagauuuuucucuaugcgcagagcucuggaagaaucacgguuuccacaaaacggagccaacaggccgugauuccgaauaucggcucccgccacagaauccggaacauucccucucgcaucagcauuuacuggaccaucgucaagccuggggauauucugcugaucaauuccacaggaaaccucaucgcucccagaggcuacuucaaaauucggagcgggaagucuuccaucaugcgcagcgacgccccuauuggaaaauguaagucugagugcaucacccccaauggcagcauuccgaacgacaagccuuuucagaaugugaacagaaucaccuauggcgcuuguccccgguacgugaaacaguccacacugaaacuugccacggggaugcgcaaugucccugaaaaacaaaccagaggaaucuucggcgcgauugccggguuuaucgagaacggaugggagggcaugguugaugggugguauggauuccggcaccaaaauucugaaggcagaggccaggcugccgaccugaagucuacacaggcugccauugaucagaucaacgggaaacucaaucgccugauuggaaagaccaacgagaaauuccaucagaucgaaaaggaguuuuccgaaguggagggccggauucaggaccuugagaaguacguggaagauacaaaaaucgaccuguggagcuauaacgccgagcuccuggucgcucuggaaaaucaacacaccaucgaucucacggacucugagaugaacaagcuguucgaaaagacaaagaaacagcuuagagagaaugcggaggauauggggaacggaugcuuuaagauuuaccauaagugugacaaugccugcaucggcuccauucgcaacgggaccuaugaucacgacguguaccgggacgaagcucugaauaacagauuccagaucaaaggcguugagcucaagagcggauacaaagauuggauucuguggaucucuuuugccaucuccugcuuccuucuguguguggcccuccugggcuuuauuaugugggcuugccagaaggggaauauccgcuguaacauuugcaucuga

SEQ ID NO: 204914 - RNA, 1701 nt, Artificial Sequence
  derived and/or modified CDS sequence (opt5) from hemagglutinin__InfluenzaA__AJJ98837
augaagaccaucauugcccugagcuacauccucugccugguguucgcucagaaacuucccggcaacgacaauuccacagccacgcugugucucgggcaccaugcggucccuaacggaaccauuguuaagacaaucaccaaugaucaaauugaggugacaaacgcuaccgaacuggugcagucuagcuccacaggcgagaucugcaauucuccgcaccagauccuugacggggaaaacuguacccugauugaugcccuccugggagacccccagugcgauggcuuucaaaauaaaaagugggaccuguucgucgagagaagcaaagcccauuccaacuguuauccuuacgaugugcccgacuaugcuucucuccggagccugguugccuccagcgggacgcuugaauuuaauaacgagucuuucaauuggaccggagugacacagaacggcaccuccagcgcuugcauccgcagaucuaauaacuccuuuuucagccggcugaauuggcucacacaccugaacuuuaaguacccugcccuuaacgucaccaugcccaauaacgagcaguucgauaagcuguauauuuggggcgugcaucacccugggacggacaaagaucagaucuuucucuacgcgcaagccucuggacgcauuacaguuuccaccaagagaagccagcaggcugugaucccgaauauuggcucccggccccgcgucagaaacaucccuucucgggugagcaucuauuggacaauugugaaacccggggacauccugcugauuaauuccaccggaaaccucaucgccccucgcggcuacuucaagauuagaagcgggaaaucuuccaucaugcggagcgaugcucccaucggaaaguguaauucugccugcauuaccccgaacggcagcaucccuaaugacaagcccuuucagaacgucaaucgcauuacauacggcgcguguccuagauauguuaaacaauccacgcugaaacuugccaccgggaugcggaacgugcccgaaaaacagacacgcggaaucuucggcgcuauugccggguuuaucgagaauggaugggaaggcaugguggacgggugguacggauucagacaccagaacucugagggccggggccaagcugccgaucucaagagcacccaggccgcuaucgaccagauuaaugggaaacugaacagacugaucggaaagacaaacgagaaauuccaucagauugaaaaggaguuuuccgaagucgagggccgcauccaagaucuugaaaaguauguggaggacaccaaaauugaucuguggagcuacaaugcggagcuccugguugcccuggaaaaccagcacacgaucgaccucacagauucugagaugaauaagcuguucgaaaagaccaagaaacagcuucgggagaacgcugaagacauggggaauggaugcuuuaagauuuaucauaagugugauaacgccugcaucggcuccaucagaaaugggaccuacgaccacgauguguaucgcgacgaggcccugaacaaucgguuccagauuaaaggcgucgagcucaagagcggauacaaagacuggauccuguggauuucuuuugcuaucuccugcuuccuucuguguguggcccuccugggcuuuauuaugugggcgugccaaaaggggaacaucagauguaauaucugcauuuga

SEQ ID NO: 204915 - RNA, 1701 nt, Artificial Sequence
  derived and/or modified CDS sequence (opt5) from hemagglutinin__InfluenzaA__AJJ98849
augaagaccaucauugcccugagcuacauccucugccugguguucgcucaggagcuucccggcaacgacaauuccacagccacgcugugucucgggcaccaugcggucccuaacggaaccauuguuaaaacaaucaccaaugaucaaauugaagugacaaacgcuaccgagcuggugcagucuagcuccacaggcgaaaucugcaauucuccgcaccagauccuugacggggagaacuguacccugauugaugcccuccugggagacccccagugcgauggcuuucaaaauaagaaaugggaccuguucgucgaaagaagcaaggcccauuccaacuguuauccuuacgaugugcccgacuaugcuucucuccggagccugguugccuccagcgggacgcuugaguuuaauaacgagucuuucaauuggaccggagugacacagaacggcaccuccagcgcuugcauccgcagaucuaauaacuccuuuuucagccggcugaauuggcucacacaccugaacuuuaaauacccugcccuuaacgucaccaugcccaauaacgaacaguucgauaagcuguauauuuggggcgugcaucacccugggacggacaaggaucagaucuuucucuacgcgcaagccucuggacgcauuacaguuuccaccaaaagaagccagcaggcugugaucccgaauauuggcucccggcugcgcgucagaaacauccccucucgggugagcaucuauuggacaauugugaagccuggggacauccugcucauuaauuccaccggaaaccugaucgcuccccgcggcuacuucaaaauuagaagcgggaagucuuccaucaugcggagcgaugccccuaucggaaaauguaauucugccugcauuacccccaacggcagcaucccgaaugacaagccuuuucagaacgucaaucgcauuacauacggcgcgugucccagauauguuaagcaaaacacgcuuaaacuggccaccgggaugcggaaugugccugagaagcagacacgcggaaucuucggcgcuauugccggguuuaucgaaaacggaugggagggcaugguggacgggugguacggauucagacaccaaaauuccgagggccggggccaggcugccgaucucaaaucuacccaggccgcuaucgaccagauuaacgggaagcugaacagacuuaucggaaaaacaaaugaaaaguuccaucagauugagaaagaauuuagcgaggucgaaggccgcauccaagaucuggagaaguauguggaggacaccaagauugaucucugguccuacaacgcggaacugcugguugcccucgagaaucagcacacgaucgaccugacagauagcgaaaugaacaaacuuuucgagaagaccaaaaagcagcugcgggaaaaugcugaggacauggggaacggaugcuuuaaaauuuaucauaagugugauaaugccugcaucggcucuaucagaaacgggaccuacgaccacgauguguaucgcgacgaggcccucaauaaccgguuccagauuaagggcgucgaacugaaauccggauacaaggacuggauccuuuggauuagcuuugcuaucucuugcuuccugcucuguguggcccugcugggcuuuauuaugugggcgugccaaaaagggaauaucagauguaacaucugcauuuga

SEQ ID NO: 204916 - RNA, 1701 nt, Artificial Sequence
  derived and/or modified CDS sequence (opt5) from hemagglutinin__InfluenzaA__AJJ98861
augaagaccaucauugcccugagcuacauccucugccugguguucgcucagaaacuucccggcaacgacaauuccacagccacgcugugucucgggcaccaugcggucccuaacggaaccauuguuaagacaaucaccaaugaucaaauugaggugacaaacgcuaccgaacuggugcagaucucuagcacaggcgagaucugcgacuccccgcaccagauucuugauggggaaaauuguacccugaucgacgcccuccugggagauccccagugcgacggcuuucaaaacaaaaagugggaucuguucgucgagagaucuaaagccuauagcaauuguuacccuuaugacgugcccgauuacgcuucccuccggucucugguugccagcuccgggacgcuugaauuuaacaaugagagcuucaacuggaccggagugacacagaauggcaccucuuccgcuugcauucgcagaagcaacaauuccuuuuucucucggcugaacuggcucacacaucugaaguuuaaguauccugcccuuaaugucaccaugcccaacaacgagcaguucgacaaacuguacaucuggggcgugcaccauccugggacggauaaugaccagauuuuucucuaugcgcaagccagcggacgcaucacaguuucuaccaagagaucccagcagacagugauuccgaacaucggcagccggccccgcgucagaaauaucccuucccggauuucuaucuacuggaccauugugaaacccggggauauccugcugauuaacagcaccggaaaucucaucgcuccucgcggcuacuucaagaucagauccgggaaaagcucuauuaugaaguccgacgcccccaucggaaaguguaacagcgaaugcauuacaccgaauggcucuaucccuaacgacaaacccuuucagaaugugaaccggauuacguauggcgcuuguccucgcuacgucaagcaaaauacccugaaacuugccacagggaugagaaacguucccgagaagcagacccggggaaucuucggcgcgaucgccggguuuauugaaaauggaugggagggcaugguggaugggugguauggauuccgccaccagaacagcgagggcagaggccaagcugccgaccugaaauccacacaggcugccaucgaucagauuaaugggaagcucaaccggcugaucggaaaaaccaacgaaaaguuccaccagauugagaaggaauuuucugagguggaaggcagaauccaagaccuugagaaauacgucgaggauacgaagauugaccuguggagcuauaaugccgaacuccugguggcucuggagaaccagcauacaaucgaucucaccgacuccgaaaugaauaaacuguucgagaagaccaaaaagcagcuucgcgaaaacgcggaggauauggggaauggaugcuuuaagaucuaccacaaaugugacaacgccugcauuggcagcauccggaaugggacauaugaucaugacguuuacagagacgaggcucugaacaaucgcuuccagauuaagggcguggaacucaaaucuggauacaaggauuggauccuguggauuuccuuugccaucagcugcuuccuucugugugucgcccuccugggcuuuaucaugugggcuugccaaaaagggaacauucgguguaauaucugcauuuga

SEQ ID NO: 204917 - RNA, 1701 nt, Artificial Sequence
  derived and/or modified CDS sequence (opt5) from hemagglutinin__InfluenzaA__AJJ98873
augaagaccaucauugcccugagcuacucccucugccugguguucgcucagaaacuucccggcaacgacaauucuacagccacgcugugucucgggcaccaugcggucccuaacggaaccaucguuaagacaauuaccaaugaucaaaucgaggugacaaacgcuaccgaacuggugcagagcuccucuacaggcgagauuugcgacagcccgcaccagauccuugauggggaaaauuguacccugaucgacgcccuccugggagauccccagugcgacggcuuucaaaacaaaaagugggaucuguucgucgagagauccaaagccuauucuaauuguuacccuuaugacgugcccgauuacgcuagccuccggucccugguugccagcucugggacgcuugaauuuaacaaugaguccuucaacuggaccggagugacacagaauggcaccagcucugcuugcauucgcaaguccaacaauagcuuuuucucuagacugaacuggcucacacaucugaaguuuaaauauccugcccuuaaugucaccaugcccaacaacgagcaguucgacaagcuguacaucuggggcgugcaccauccugggacggauaaugaccagauuuuucucuaugcgcaagccuccggacggaucacaguuagcaccaaacgcucccagcagacagugauuccgaacaucggcucuagaccccggguccgcaauauuccuagcagaaucuccaucuacuggaccauugugaagcccggggauauccugcugauuaacagcaccggaaaucucaucgcuccucggggcuacuucaaaauucgcucugggaaguccagcaucaugagaucugacgcccccaucggaaaguguaacagcgaaugcauuacaccgaauggcuccaucccuaacgacaaacccuuucagaaugugaaccggauuacguauggcgcuuguccucgcuacgucaagcaaaauacccugaaacuugccacagggaugagaaacguucccgagaagcagacccggggaaucuucggcgcgauugccggguuuaucgaaaauggaugggagggcaugguggaugggugguauggauuccgccaccagaacucugagggcagaggccaagcugccgaccugaaaagcacacaggcugccaucgaucagauuaaugggaagcucaaccggcugaucggaaaaaccaacgaaaaguuccaccagauugagaaggaauuuuccgagguggaaggcagaauccaagaccuugagaaauacgucgaggauacgaagauugaccuguggagcuauaaugccgaacuccugguggcucuggagaaccagcauacaaucgaucucaccgacucugaaaugaauaaacuguucgagaagaccaaaaagcagcuucgcgaaaacgcggaggauauggggaauggaugcuuuaagauuuaccacaaaugugacaacgccugcaucggcuccauccggaaugggacauaugaucaugacguuuacagagacgaggcucugaacaaucgcuuccagauuaagggcguggaacucaaaagcggauacaaggauuggauccuguggauuucuuuugccaucuccugcuuccuucugugugucgcccuccugggcuuuauuaugugggcuugccaaaaagggaacauccgguguaauaucugcauuuga

SEQ ID NO: 204918 - RNA, 1701 nt, Artificial Sequence
  derived and/or modified CDS sequence (opt5) from hemagglutinin__InfluenzaA__AJJ98885
augaagaccaucauugcccugagcaacauccucugccugguguucgcucagaaacuucccggcaaugacaacuccacagccacgcugugucucgggcaccaugcggucccuaauggaaccauuguuaagacaaucaccaacgaucaaauugaggugacaaaugcuaccgaacuggugcagucuagcuccacaggcgagaucugcgacucuccgcaccagauccuugauggggaaaacuguacccugauugacgcccuccugggagauccccagugcgacggcuuucaaaauaaaaagugggaucuguucgucgagagaagcaaagccuacuccaacuguuauccuuacgacgugcccgauuaugcuucucuccggagccugguugccuccagcgggacgcuugaauuuaauaacgagucuuucaauuggaccggagugacacagaacggcaccuccagcgcuugcauccgcagaucuaauaacuccuuuuucagccggcugaauuggcucacacaucugaaguuuaaguacccugcccuuaacgucaccaugcccaacaaagagaaguucgacaaacuguauauuuggggcgugcaccauccugggacggauaaugaccagaucuuucucuacgcgcaggccucuggacgcauuacaguuuccaccaagagaagccaacagacagugaucccgaacauuggcucccggccccgcgucagaaauaucccuucucggaucagcauuuauuggaccaucgugaaacccggggauauucugcugaucaacuccaccggaaaucucauugcuccucgcggcuacuucaagaucagaagcgggaagucuuccaucaugcggagcgacgcccccauuggaaaauguaacucugaaugcaucacaccgaauggcagcauuccuaacgacaagcccuuucagaaugugaaccgcaucacguacggcgcuuguccuagauaugucaaacagaauacccugaaacuugccacagggaugcggaacguucccgagaagcaaacccgcggaauuuucggcgcgaucgccggguuuaucgaaaauggaugggagggcaugguggaugggugguacggauucagacaccagaacuccgagggcauuggccaggcugccgaccugaagucuacacaagcugccaucgaucagauuaaugggaaacucaaccggcugaucggaaagaccaacgaaaaguuccaccagauugagaaagaauuuagcgagguggaaggcagaauccaggaccuugagaaguaugucgaggauacgaaaauugaccugugguccuacaaugccgaacuccugguggcucuggagaaccaacauacaaucgaucucaccgacagcgaaaugaauaagcuguucgagaaaaccaagaagcagcuucgcgaaaacgcggaggauauggggaauggaugcuuuaaaaucuaucacaagugugacaacgccugcauuggcucuauccggaaugggacauacgaucaugacguuuauagagacgaggcucugaacaaucgcuuccagauuaaaggcguggaacucaaguccggauacaaagauuggauccuguggauuagcuuugccaucucuugcuuccuucugugugucgcccuccugggcuuuaucaugugggcuugccagaaggggaacauucgguguaauaucugcauuuga

SEQ ID NO: 204919 - RNA, 1701 nt, Artificial Sequence
  derived and/or modified CDS sequence (opt5) from hemagglutinin__InfluenzaA__AJJ98897
augaagaccaucauugcccugagcuacauccucugccugguguucgcucagaaacuucccggcaacgacaauuccacagccacgcugugucucgggcaccaugcggucccuaacggaaccauuguuaagacaaucaccaaugaucaaauugaggugacaaacgcuaccgaacuggugcagucuagcuccacaggcgagaucugcgacucuccgcaccagauccuugauggggaaaauuguacccugauugacgcccuccugggagauccccagugcgacggcuuucaaaacaaaaagugggaucuguucgucgagagaagcaaagccuauuccaauuguuacccuuaugacgugcccgauuacgcuucucuccggagccugguugccuccagcgggacgcuugaauuuaacaaugagucuuucaacuggaccggagugacacagaauggcaccuccagcgcuugcauccgcagaucuaacuccagcuuuuucucucggcugaauuggcucacacaucugaaguuuaaguauccugcccuuaacgucaccaugcccaauaacgagaaauucgacaagcuguacauuuggggcgugcaccauccugggacggauaacgaccagaucuuucucuaugcgcaggccuccggacgcauuacaguuagcaccaaaagaucccaacagacagugaucccgaauauuggcucucggccccgcgucagaaacaucccuagccggaucuccauuuacuggaccaucgugaagcccggggauauucugcugaucaauagcaccggaaaccucauugcuccucgcggcuacuucaaaaucagaucugggaaguccagcaucaugcggucugacgcccccauuggaaaguguaauagcgaaugcaucacaccgaacggcuccauuccuaaugacaaacccuuucagaacgugaaucgcaucacguauggcgcuuguccuagauacgucaagcagaacacccugaaacuugccacagggaugcggaauguucccgagaagcaaacccgcggaauuuucggcgcgaucgccggguuuaucgaaaacggaugggagggcaugguggaugggugguauggauucagacaccaaaauucugagggcauuggccaggcugccgaccugaaaagcacacaggcugccaucgaucagauuaacgggaagcucaaucggcugaucggaaaaaccaacgaaaaguuccaccagauugagaaggaauuuuccgagguggaaggcagaauccaggaccuugagaaauacgucgaggauacgaagguggaccuguggagcuauaacgccgaacuccugguugcucuggagaaucaacauacaauugaucucaccgacucugaaaugaacaaacuguucgagaagaccaaaaagcagcuucgcgaaaaugcggaggauauggggaacggaugcuuuaagaucuaccacaaaugugacaaugccugcaucggcuccauucggaacgggacauaugaucaugacguguacagagacgaggcucugaauaaccgcuuccagaucaagggcgucgaacucaaaagcggauacaaggauuggauucuguggaucucuuuugccauuuccugcuuccuucuguguguggcccuccugggcuuuaucaugugggcuugccagaaagggaauauccgguguaacauuugcaucuga

SEQ ID NO: 204920 - RNA, 1701 nt, Artificial Sequence; identical to SEQ ID NO: 203842
  derived and/or modified CDS sequence (opt5) from hemagglutinin__InfluenzaA__AJJ98909

SEQ ID NO: 204921 - RNA, 1701 nt, Artificial Sequence
  derived and/or modified CDS sequence (opt5) from hemagglutinin__InfluenzaA__AJJ98921
augaagaccaucauugcccugagcuacauccucugccugguguucgcucagaaacuucccggcaaggacaacuccacagccacgcugugucucgggcaccaugcggucccuaauggaaccauuguuaaaacaaucaccaacgaucaaauugaggugacaaaugcuaccgaacuggugcagucuagcuccacaggcgagaucugcaacucuccgcaccagauccuugacggggaaaauuguacccugauugaugcccuccugggagacccccagugcgauggcuuucaaaacaagaaaugggaccuguucgucgagagaagcaaggccuauuccaauuguuacccuuaugaugugcccgacuacgcuucucuccggagccugguugccuccagcgggacgcuugaauuuaacaaugagucuuucaacuggaccggagugaagcagaauggcacauccagcgcuugcauccgcagaucuaacuccagcuuuuucucucggcugaauuggcucacccaucugaacuuuaaauauccugcccuuaaugucacaaugcccaacaacgagcaguucgauaagcuguacauuuggggcgugcaccauccugggaccgacaaagaucagaucuuucucuaugcgcaauccagcggacgcauuacgguuuccacaaagagaucucagcaggccgugaucccgaauauuggcagccggccccgcaucagaaacaucccuucccggauuagcaucuacuggaccauugucaaacccggggacauccugcugauuaauucuacaggaaaccucaucgcuccucgcggcuacuucaagaucagauccggaaagagcucuauuaugcggagcgaugcccccaucgggaaauguaauuccgaaugcauuaccccgaacggcucuaucccuaaugacaagcccuuucagaacgugaaucgcauuaccuauggcgcuuguccuagauacgugaaacaaagcacacugaagcuggccacggggaugcggaacguccccgagaaacagacccgcggaaucuucggcgcgaucgccggguuuauugaaaauggaugggagggcaugguugacgggugguauggauucagacaccagaacuccgagggccggggccaagcugccgaucuuaagagcacacaggcugccaucgaccagauuaaugggaaacucaacagacugaucggaaagaccaaugaaaaguuccaccagauugagaaagaauuuucugagguggaaggccgcauccaagaucuugagaaguacguggaggacacaaaaauugaucugugguccuauaacgccgaacuccuggucgcucuggagaaccagcauaccaucgaccucacggauagcgaaaugaauaagcuguucgagaaaacaaagaagcagcuucgggaaaacgcggaggacauggggaauggaugcuuuaaaaucuaccacaagugugauaacgccugcauuggcucuaucagaaaugggaccuauaaccaugacguguaccgcgaugaggcucugaauaaccgguuccagauuaaaggcguugaacucaaguccggauacaaagacuggauccuguggauuagcuuugccaucuccugcuuccuucuguguguggcccuccugggcuuuaucaugugggcuugccaaaaggggaauauuagauguaacaucugcauuuga

SEQ ID NO: 204922 - RNA, 1701 nt, Artificial Sequence; identical to SEQ ID NO: 201525
  derived and/or modified CDS sequence (opt5) from hemagglutinin__InfluenzaA__AJJ98933

SEQ ID NO: 204923 - RNA, 1701 nt, Artificial Sequence; identical to SEQ ID NO: 199054
  derived and/or modified CDS sequence (opt5) from hemagglutinin__InfluenzaA__AJJ98945

SEQ ID NO: 204924 - RNA, 1701 nt, Artificial Sequence
  derived and/or modified CDS sequence (opt5) from hemagglutinin__InfluenzaA__AJJ98957
augaagaccaucauugcccugagcuacauccucugccugguguucgcucagaaacuucccggcaacgacaauuccacagccacgcugugucucgggcaccaugcggucccuaacggaaccauuguuaagacaaucaccaaugaucaaauugaggugacaaacgcuaccgaacuggugcagucuagcuccacaggcgagaucugcgacucuccgcaccagauccuugauggggaaaauuguacccugauugacgcccuccugggagauccccagugcgacggcuuucaaaacaaaaagugggaucuguucgucgagagaagcaaagccuauuccaauuguuacccuuaugacgugcccgauuacgcuucucuccggagccugguugccuccagcgggacgcuugaauuuaacaaugagucuuucaacuggaccggagugacacagaauggcaccuccagcgcuugcauccgcagaucuaacaauuccuuuuucagccggcugaacuggcucacacauucuaaguuuaaguauccugcccugaaugucaccaugcccaacaacgagcaguucgacaaacuuuacauuuggggcgugcaccauccugggacggauaaugaccagaucuuucuguaugcgcaagccuccggacgcauuacaguuagcaccaagagaucccagcagacagugaucccgaacauuggcucucggccccgcgucagaaauaucccuagccggaucuccauuuacuggaccaucgugaaacccggggauauucuccugaucaacagcaccggaaaucugauugcuccucgcggcuacuucaagaucagaucugggaaauccagcaucaugcggucugacgcccccauuggaaaguguaacagcgaaugcaucacaccgaauggcuccauuccuaacgacaagcccuuucagaaugugaaccgcaucacguauggcgcuuguccuagauacgucaaacaaaauacccucaagcuggccacagggaugcggaacguucccgagaaacagacccgcggaauuuucggcgcgaucgccggguuuaucgaaaauggaugggagggcaugguggaugggugguauggauucagacaccagaacucugagggccggggccaagcugccgaccuuaagagcacacaggcugccauugaucagaucaaugggaaacugaacagacucauuggaaagaccaacgaaaaauuccaccagaucgagaaggaauuuuccgagguggaaggccgcauucaagaccuggagaaguacgucgaggauacgaaaaucgaccuuuggagcuauaaugccgaacugcucguggcucuggagaaccagcauacaauugaucugaccgacucugaaaugaauaagcuguucgagaaaaccaagaaacagcugcgggaaaacgcggaggauauggggaauggaugcuuuaagaucuaccacaagugugacaacgccugcaucggcuccauuagaaaugggacauaugaucaugacguuuaccgcgacgaggcucuuaacaaucgguuccagaucaaaggcguggaacucaagagcggauacaaagauuggauucucuggaucucuuuugccauuuccugcuuccugcuuugugucgcccugcucggcuuuaucaugugggcuugccaaaaggggaacaucagauguaauauuugcaucuga

SEQ ID NO: 204925 - RNA, 1701 nt, Artificial Sequence; identical to SEQ ID NO: 194506
  derived and/or modified CDS sequence (opt5) from hemagglutinin__InfluenzaA__AJJ98969

SEQ ID NO: 204926 - RNA, 1701 nt, Artificial Sequence
  derived and/or modified CDS sequence (opt5) from hemagglutinin__InfluenzaA__AJJ98981
augaagaccaucauugcccugagcuacauccucugccugguguucgcucagaaacuucccggcaacgacaauuccacagccacgcugugucucgggcaccaugcggucccuaacggaaccauuguuaagacaaucaccaaugauagaauugaggugacaaacgcuaccgaacuggugcaaaauucuagcaucggcgagaucugcgacuccccgcaccauauucuugauggggaaaacuguacacugaucgacgcccuccugggagauccccagugcgacggcuuucagaauaaaaagugggaucuguucgucgagcggucuaaagccuauagcaacuguuacccuuaugacgugcccgauuacgcuucccuccgcucucugguugccagcuccgggacccuugaauuuaauaacgagagcuucaauuggacgggagugacccagaacggcacaucuuccgcuugcauuagacggagcaauucuuccuuuuucagccgccugaacuggcucacccaccugaauuuuaaguauccugcccuuaacgucacaaugcccaacaaugagcaauucgacaagcuguacaucuggggcgugcaucacccugggaccgauaaagaccagauuuuucucuaugcgcagucuuccggaagaaucacgguuagcacaaagcggucccagcaagccgugauuccgaacaucggcucucgccccagaauccggaaugucccuagccgcauuuccaucuacuggaccauugugaaacccggggauauccugcugauuaacagcacaggaaaucucaucgcuccuagaggcuacuucaagauccggucugggaaauccagcauuaugcgcucugacgcccccaucggaaaguguaagagcgaaugcauuaccccgaacggcuccaucccuaaugacaaacccuuucagaacgugaauagaauuaccuauggcgcuuguccucgguacgucaagcagucuacacugaaacuugccacggggaugcgcaacguucccgagaagcagaccagaggaaucuucggcgcgaucgccggguuuauugaaaauggaugggagggcaugguggaugggugguauggauuccggcaccaaaacagcgagggcagaggccaggcugccgaccugaaauccacacaggcugccaucgaucaaauuaaugggaagcucaaccgccugaucggaaaaaccaaugaaaaguuccaucagauugagaaggaauuuagcgagguggaaggccggauccaggaccuugagaaauacgucgaggauacaaagauugaccuguggucuuauaacgccgaacuccugguggcucuggagaaccagcacaccaucgaucucacggacuccgaaaugaauaaacuguucgagaagaccaaaaagcaacuuagagaaaacgcggaggauauggggaauggaugcuuuaagaucuaccauaaaugugacaacgccugcauuggcagcauccgcaaugggacauaugaucacaacguuuaccgggacgaggcucugaauaacagauuccagauuaagggcguggaacucaaaucuggauacaaggacuggauccuguggauuuccuuugccaucagcugcuuccuucugugugucgcccuccugggcuuuaucaugugggcuugccagaaagggaauauucgcuguaacaucugcauuuga

SEQ ID NO: 204927 - RNA, 1701 nt, Artificial Sequence
  derived and/or modified CDS sequence (opt5) from hemagglutinin__InfluenzaA__AJJ98993
augaagaccaucauugcccugagcuacauccucugccugguguucgcucagaaacuucccggcaacgacaauuccacagccacgcugugucucgggcaccaugcggucccuaacggaaccauuguuaagacaaucaccaaugaucaaauugaggugacaaacgcuaccgaacuggugcaaaauucuagcaucggcgagaucugcgacaacccgcaccagauucuugauggggaaaauuguacacugaucgacgcccuccugggagauccccagugcgacggcuuucagaacaaaaagugggaucuguucgucgagagauccaaagccuauucuaauuguuacccuuaugacgugcccgauuacgcuagccuccggucccugguugccucuagcgggacccuugaauuuaacaaugaguccuucaacuggacgggagugacccagaauggcacaagcucugcuugcaugcgcagauccaacagcuccuuuuucucucggcugaauuggcucacccaucugaacuuuaaguauccugcccuuaacgucacaaugcccaauaacgagcaguucgacaagcuguacauuuggggcgugcaccauccugggaccgauaaagaccagaucuuucucuaugcgcaaagcucuggacgcauuacgguuuccacaaagagaagccagcaggccgugaucccgaauauuggcucccggccccgcaucagaaacaucccuucucggauuagcaucuacuggaccauugucaaacccggggauauccugcugauuaauuccacaggaaaccucaucgcuccucgcggcuacuucaagaucagaagcgggaaaucuuccauuaugcggagcgacgcccccaucggaaaguguaauucugaaugcauuaccccgaacggcagcaucccuaaugacaagcccuuucagaacgugaaucgcauuaccuauggcgcuuguccuagauacgugaaacaauccacacugaagcuggccacggggaugcggaacguccccgagaaacagacccgcggaaucuucggcgcgaucgccggguuuauugaaaauggaugggagggcaugguugaugggugguauggauucagacaccagaacucugagggccggggccaagcugccgaccuuaagagcacacaggcugccaucgaucagauuaaugggaaacucaacagacugaucggaaagaccaacgaaaaauuccaccagauugagaaggaauuuuccgagguggaaggccgcauccaagaccuugagaaguacguggaggauacaaaaauugaccuguggagcuauaaugccgaacuccuggucgcucuggagaaccagcauaccaucgaucucacggacucugaaaugaauaagcuguucgagaaaacaaagaaacagcuucgggaaaacgcggaggauauggggaauggaugcuuuaagaucuaccacaagugugacaacgccugcauuggcuccaucagaaaugggaccuaugaucaugacguguaccgcgacgaggcucugaacaaucgguuccagauuaaaggcguugaacucaagagcggauacaaagauuggauccuguggauuucuuuugccaucuccugcuuccuucuguguguggcccuccugggcuuuaucaugugggcuugccaaaaggggaacauuagauguaauaucugcauuuga

SEQ ID NO: 204928 - RNA, 1701 nt, Artificial Sequence
  derived and/or modified CDS sequence (opt5) from hemagglutinin__InfluenzaA__AJJ99005
augaagaccaucauugcccugagcuacauccucugccugguguucgcucagaaacuucccggcaacgacaauuccacagccacgcugugucucgggcaccaugcggucccuaacggaaccauuguuaagacaaucaccaaugaucaaauugaggugacaaacgcuaccgaacuggugcagucuagcuccacaggcgagaucugcaauucuccgcaccagauccuugacggggaaaacuguacccugauugaugcccuccugggagacccccagugcgauggcuuucaaaauaaaaagugggaccuguucgucgagagaagcaaagcccauuccaacuguuauccuuacgaugugcccgacuaugcuucucuccggagccugguugccuccagcgggacgcuugaauuuaauaacgagucuuucaauuggaucggagugacccagaacggcacauccagcgcuugcauucgcagaucuaauaacuccuuuuucagccggcugaauuggcucacccaccugaacuuuaaguacccugcccuuaacgucacaaugcccaauaacgagcaguucgauaagcuguauaucuggggcgugcaucacccugggaccgacaaagaucagauuuuucucuacgcgcaagccucuggacgcaucacgguuuccacaaagagaagccagcaggcugugauuccgaauaucggcucccggccccgcgucagaaacaucccuucucgggugagcauuuauuggaccaucgugaaacccggggacauucugcugaucaauuccacaggaaaccucauugccccucgcggcuacuucaagaucagaagcgggaaaucuuccaucaugcggagcgaugcucccauuggaaaguguaauucugccugcaucaccccgaacggcagcauuccuaaugacaagcccuuucagaacgucaaucgcaucaccuacggcgcguguccuagauauguuaaacaaaacacacugaaacuugccacggggaugcggaaugugcccgaaaaacagacccgcggaauuuucggcgcuaucgccggguuuaucgagaacggaugggaaggcaugguggacgggugguacggauucagacaccaaaauuccgagggccggggccaggcugccgaucugaagucuacacaggccgcuauugaccagaucaacgggaaacucaacagacugauuggaaagaccaaugagaaauuccaucagaucgaaaaggaguuuagcgaagucgagggccgcauucaagaucuugaaaaguauguggaggacacaaaaaucgaucugugguccuacaacgcggagcuccugguugcccuggaaaaucagcacaccauugaccucacggauagcgagaugaacaagcuguucgaaaagacaaagaaacagcuucgggagaaugcugaagacauggggaacggaugcuuuaagaucuaucauaagugugauaaugccugcaucggcucuauuagaaacgggaccuacgaccacgauguguaucgcgacgaggcccugaauaaccgguuccagaucaaaggcgucgagcucaaguccggauacaaagacuggauucuguggaucagcuuugcuauuucuugcuuccuucuguguguggcccuccugggcuuuaucaugugggcgugccaaaaggggaauaucagauguaacauuugcaucuga

SEQ ID NO: 204929 - RNA, 1701 nt, Artificial Sequence; identical to SEQ ID NO: 195483
  derived and/or modified CDS sequence (opt5) from hemagglutinin__InfluenzaA__AJJ99017

SEQ ID NO: 204930 - RNA, 1701 nt, Artificial Sequence
  derived and/or modified CDS sequence (opt5) from hemagglutinin__InfluenzaA__AJJ99029
augaagaccaucauugcccugagcuacauccucugccugguguucgcucagaaacuucccggcaacgacaauuccacagccacgcugugucucgggcaccaugcggucccuaacggaaccauuguuaagacaaucaccaaugaucaaauugaggugacaaacgcuaccgaacuggugcagucuagcuccacaggcgagaucugcgacucuccgcaccagauccuugauggggaaaauuguacccugauugacgcccuccugggagauccccagugcgacggcuuucaaaacaaaaagugggaucuguucaucgagagaagcaaagccuauuccaauuguuacccuuaugacguccccgauuacgcuucucuccggagccugguggccuccagcgggacgcuugaauuuaacaaugagucuuucaacuggaccggaguuacacagaauggcaccuccagcucuugcauucgcagauccaacaauagcuuuuucucucggcugaacuggcucacacaucugaaguuuaaguauccugcucuuaaugugaccaugcccaacaacgagcaguucgacaaacuguacaucuggggcguccaccauccugggacggauaaugaccagauuuuucucuaugcccaagcguccggacgcaucacagugagcaccaagagaucccagcagacaguuauuccgaacaucggcucucggccccgcgugagaaauaucccuagccggauuuccaucuacuggaccauugucaaacccggggauauccugcugauuaacagcaccggaaaucucaucgccccucgcggcuacuucaagaucagaucugggaaauccagcauuaugcggucugacgcucccaucggaaaguguaacagcgaaugcauuacaccgaauggcuccaucccuaacgacaagcccuuucagaaugugaaccgcauuacguauggcgccuguccuagauacgugaaacaaaauacccugaagcuggcuacagggaugcggaacguccccgagaaacagacccgcggaaucuucggcgccaucgcgggguuuauugaaaauggaugggagggcaugguugaugggugguauggauucagacaccagaacucugagggccggggccaagccgcugaccuuaagagcacacaggccgcuaucgaucagauuaaugggaaacucaacagacugaucggaaagaccaacgaaaaauuccaccagauugagaaggaauuuuccgagguggaaggccgcauccaagaccuugagaaguacguggaggauacgaaaauugaccuguggagcuauaaugccgaacuccuggucgcccuggagaaccagcauacaaucgaucucaccgacucugaaaugaauaagcuguucgagaaaaccaagaaacagcuucgggaaaacgcugaggauauggggaauggaugcuuuaagaucuaccacaagugugacaacgcgugcauuggcuccaucagaaaugggacauaugaucauaacguguaccgcgacgaggcccugaauaaccgguuccagauuaaaggcguugaacucaagagcggauacaaagacuggauccuguggauuucuuuugcuaucuccugcuuccuucuguguguggcccuccugggcuuuaucaugugggccugccaaaaggggaauauuagauguaacaucugcauuuga

SEQ ID NO: 204931 - RNA, 1701 nt, Artificial Sequence
  derived and/or modified CDS sequence (opt5) from hemagglutinin__InfluenzaA__AJJ99041
augaagaccaucauugcccugagcuacauccucugccugguguucgcucagaaacuucccggcaacgacaauuccacagccacgcugugucucgggcaccaugcggucccuaacggaaccauuguuaagacaaucaccaaugaucaaauugaggugacaaacgcuaccgaacuggugcagucuagcuccacaggcgagaucugcgacucuccgcaccagauccuugauggggaaaauuguacccugauugacgcccuccugggagauccccagugcgacggcuuucaaaacaaaaagugggaucuguucgucgagagaagcaaagccuauuccaauuguuacccuuaugacgugcccgauuacgcuucucuccggagccugguugccuccagcgggacgcuugaauuuaacaaugagucuuucaacuggaccggagugacacagaauggcaccuccagcgcuugcaagcgcggcucugacaacuccuuuuucagcagacugaauuggcucacacaucugaaguuuaaauauccugcccuuaacgucaccaugcccaauaacgagaaguucgauaaacuguacaucuggggagugcaccauccugggacggacaacgaucagauuuuuccguaugcgcaggccucuggccggaucacaguuuccaccaagcgcagccaacagacagugauucccaauaucggguccagaccucggguccgcaacauucccucuagaaucagcaucuacuggaccauugugaaaccuggagacauccuccugauuaauuccaccggcaaccugaucgcuccccggggguacuucaagauucgcagcggaaagucuuccaucaugagaagcgacgccccgaucggcaaauguaauucuggcugcauuacaccuaacgggagcauccccaaugauaagccuuuucagaacgugaaucggauuacguauggagcuuguccccgcuacgucaaacaguccacccucaagcuggccacaggcaugagaaacguucccgaaaaacaaacccgggggaucuucggagcgauugccggcuuuaucgagaaugggugggaaggaaugguggacggcugguauggcuuccgccaccagaacucugaggggaucggacaggcugccgaucuuaagagcacacaagcugccauuaaucagaucaacggcaaacugaauagacucauugggaagaccaacgagaaguuccaccagaucgaaaaagaguuuuccgaaguggagggacggauucaggaccuggaaaaguacgucgaggauacgaaaaucgaccuuuggagcuauaacgccgagcugcucguggcucuggaaaaucaacauacaauugaucugaccgacucugagaugaacaaacucuucgaaagaaccaagaagcagcugcgcgagaaugcggaagauaugggcaacgggugcuuuaagaucuaccacaaaugugacaaugccugcaucggcuccauucggaacggaacauaugaucaugacguuuacagagacgaggcucuuaauaaccgcuuccagaucaagggcguggagcugaaaagcggguacaaggauuggauucucuggaucucuuuugccauuuccugcuuccugcuuugugucgcccugcucggauuuaucaugugggcuugccagaaaggcaauauccgguguaacauuugcaucuga

SEQ ID NO: 204932 - RNA, 1701 nt, Artificial Sequence; identical to SEQ ID NO: 201930
  derived and/or modified CDS sequence (opt5) from hemagglutinin__InfluenzaA__AJJ99053

SEQ ID NO: 204933 - RNA, 1701 nt, Artificial Sequence; identical to SEQ ID NO: 201930
  derived and/or modified CDS sequence (opt5) from hemagglutinin__InfluenzaA__AJJ99065

SEQ ID NO: 204934 - RNA, 1701 nt, Artificial Sequence
  derived and/or modified CDS sequence (opt5) from hemagglutinin__InfluenzaA__AJJ99089
augaagaccaucauugcccugagcuacauccucugccugguguucgcucagaaacuucccggcaacgacaauuccacagccacgcugugucucgggcaccaugcggucccuaacggaaccauuguuaagacaaucaccaaugauagaauugaggugacaaacgcuaccgaacuggugcaaaauucuagcaucggcgagaucugcgacuccccgcaccagauucuugauggggaaaacuguacacugaucgacgcccuccugggagauccccagugcgacggcuuucagaauaaaaagugggaucuguucgucgagcggaacaaagccuauucuaauuguuacccuuaugacgugcccgauuacgcuagccuccgcucccugguugccucuagcgggacccuugaauuuaacaaugaguccuucaacuggacgggagugacccaaaauggcacaagcucugcuugcauuagacgguccaacagcuccuuuuucucucgccugaauuggcucacccaucugaacuuuaaguauccugcccuuaacgucacaaugcccaauaacgagcaguucgacaagcuguacaucuggggcgugcaccauccugggaccgauaaagaccagauuuuucucuaugcgcagagcucuggaagaaucacgguuuccacaaagcggagccaacaggccgugauuccgaauaucggcucccgccccagaauccggaacauuccuucucgcaucagcauuuacuggaccaucgucaaacccggggauauucugcugaucaauuccacaggaaaccucaucgcuccuagaggcuacuucaagauucggagcgggaaaucuuccaucaugcgcagcgacgcccccauuggaaaguguaagucugaaugcaucaccccgaauggcagcauuccuaacgacaaacccuuucagaaugugaacagaaucaccuauggcgcuuguccucgguacgugaagcaguccacacugaaacuugccacggggaugcgcaauguccccgagaagcaaaccagaggaaucuucggcgcgauugccggguuuaucgaaaacggaugggagggcaugguugaugggugguauggauuccggcaccaaaauucugagggcagaggccaggcugccgaccugaaaagcacacaggcugccauugaucagaucaacgggaagcucaaucgccugauuggaaaaaccaacgaaaaguuccaccagaucgagaaggaauuuuccgagguggaaggccggauucaggaccuugagaaauacguggaggauacaaagaucgaccuguggagcuauaacgccgaacuccuggucgcucuggagaaucaacauaccaucgaucucacggacucugaaaugaacaaacuguucgagaagaccaaaaagcagcuuagagaaaaugcggaggauauggggaacggaugcuuuaagauuuaccacaaaugugacaaugccugcaucggcuccauucgcaacgggacauaugaucaugacguguaccgggacgaggcucugaauaacagauuccagaucaagggcguugaacucaaaagcggauacaaggauuggauucuguggaucucuuuugccaucuccugcuuccuucuguguguggcccuccugggcuuuauuaugugggcuugccagaaagggaauauccgcuguaacauuugcaucuga

SEQ ID NO: 204935 - RNA, 1701 nt, Artificial Sequence; identical to SEQ ID NO: 201620
  derived and/or modified CDS sequence (opt5) from hemagglutinin__InfluenzaA__AJJ99101

SEQ ID NO: 204936 - RNA, 1701 nt, Artificial Sequence; identical to SEQ ID NO: 201525
  derived and/or modified CDS sequence (opt5) from hemagglutinin__InfluenzaA__AJJ99113

SEQ ID NO: 204937 - RNA, 1701 nt, Artificial Sequence
  derived and/or modified CDS sequence (opt5) from hemagglutinin__InfluenzaA__AJJ99125
augaagaccaucauugcccugagcuacauccucugcaugguguucgcucagaaacugcccggcaacgacaauuccacagccacgcuuugucuggggcaccaugcggucccuaacggaaccauuguuaagacaaucaccaaugaucaaauugaggugacaaacgcuaccgaacucgugcagucuagcuccacaggcgagaucugcaauucuccgcaccagauccuggacggggaaaacuguacccuuauugaugcccugcucggagacccccagugcgauggcuuucaaaauaaaaagugggaccuguucgucgagagaagcaaagcccauuccaacuguuauccuuacgaugugcccgacuaugcuucucugcggagccucguugccuccagcgggacgcuggaauuuaauaacgagucuuucaauuggaccggagugacacagaacggcaccuccagcgcuugcauccgcagaucuuccaauagcuuuuucucucggcuuaacuggcugacacaccucaauuuuaaguacccugcccugaacgucaccaugcccaacaaugagcaguucgauaagcuguauauuuggggcgugcaucacccugggacggacaaagaucagaucuuucuguacgcgcaagccuccggacgcauuacaguuagcaccaagagaucccagcaggcugugaucccgaacauuggcucucggccccgcgucagaaauaucccuagccggguguccaucuauuggacaauugugaaacccggggacauccuccugauuaacagcaccggaaaucugaucgccccucgcggcuacuucaagauuagaucugggaaauccagcaucaugcggucugaugcucccaucggaaaguguaacagcgccugcauuaccccgaauggcuccaucccuaacgacaagcccuuucagaaugucaaccgcauuacauacggcgcguguccuagauauguuaaacaaaauacgcucaagcuggccaccgggaugcggaacgugcccgaaaaacagacacgcggaaucuucggcgcuauugccggguuuaucgagaauggaugggaaggcaugguggacgggugguacggauucagacaccagaacucugagggccggggccaagcugccgaucuuaagagcacccaggccgcuaucgaccagauuaaugggaaacugaacagacucaucggaaagacaaacgagaaauuccaucagauugaaaaggaguuuuccgaagucgagggccgcauccaagaucuggaaaaguauguggaggacaccaaaauugaucuuuggagcuacaaugcggagcugcucguugcccuggaaaaccagcacacgaucgaccugacagauucugagaugaauaaacucuucgaaaagaccaagaaacagcugcgggagaacgcugaagacauggggaauggaugcuuuaagauuuaucauaagugugauaacgccugcaucggcuccaucagaaaugggaccuacgaccacgauguguaucgcgacgaggcccuuaacaaucgguuccagauuaaaggcgucgagcuuaagagcggauacaaagacuggauccucuggauuucuuuugcuaucuccugcuuccugcuuuguguggcccugcucggcuuuauuaugugggcgugccaaaaggggaacaucagauguaauaucugcauuuga

SEQ ID NO: 204938 - RNA, 1701 nt, Artificial Sequence
  derived and/or modified CDS sequence (opt5) from hemagglutinin__InfluenzaA__AJJ99137
augaagaccaucauugcccugagcuacauccucugccugguguucgcucagaaacuucccggcaacgacaauuccacagccacgcugugucucgggcaccaugcggucccuaacggaaccauuguuaagacaaucaccaaugaucaaauugaggugacaaacgcuaccgaacuggugcagucuagcuccacaggcgagaucugcaauucuccgcaccagauccuugacggggaaaacuguacccugauugaugcccuccugggagacccccagugcgauggcuuucaaaauaaaaagugggaccuguucgucgagagaagcaaagcccauuccaacuguuauccuuacgaugugcccgacuaugcuucucuccggagccugguugccuccagcgggacgcuugaauuuaauaacgagucuuucaauuggaccggagugacacagaacggcaccuccagcgcuugcauccgcagaucuaauaacuccuuuuucagccggcugaauuggcucacacaccugaacuuuaaguacccugcccuuaacgucaccaugcccaauaacgagcaguucgauaagcuguauauuuggggcgugcaucacccugggacggacaaagaucagaucuuucucuacgcgcaagccucuggacgcauuacaguuuccaccaagagaagccagcaggcugugaucccgaauauuggcucccggccccgcgucagaaacaucccuucucgggugagcaucuauuggacaauugugaaacccggggacauccugcugauuaauuccaccggaaaccucaucgccccucgcggcuacuucaagauuagaagcgggaaaucuuccaucaugcggagcgaugcucccaucggaaaguguaauucugccugcauuaccccgaacggcagcaucccuaaugacaagcccuuucagaacgucaaucgcauuacauacggcgcguguccuagauauguuaaacaaaacacgcugaaacuugccaccgggaugcggaaugugcccgaaaaacagacacgcggaaucuucggcgcuauugccggguuuaucgagaacggaugggaaggcaugguggacgggugguacggauucagacaccaaaauuccgagggccggggccaggcugccgaucugaagucuacccaggccgcuaucgaccagauuaacgggaaacucaacagacugaucggaaagacaaaugagaaauuccaucagauugaaaaggaguuuagcgaagucgagggccgcauccaagaucuugaaaaguauguggaggacaccaaaauugaucugugguccuacaacgcggagcuccugguugcccuggaaaaucagcacacgaucgaccucacagauagcgagaugaacaagcuguucgaaaagaccaagaaacagcuucgggagaaugcugaagacauggggaacggaugcuuuaagauuuaucauaagugugauaaugccugcaucgugucuaucagaaacggcaccuacgaccacgaugucuaucgcgacgaggcccugaauaaccgguuccagauuaaagggguggagcucaaguccggcuacaaagacuggauccuguggauuagcuuugcuaucucuugcuuccuucuguguguugcccuccugggauuuauuaugugggcgugccaaaagggcaauaucagauguaacaucugcauuuga

SEQ ID NO: 204939 - RNA, 1701 nt, Artificial Sequence
  derived and/or modified CDS sequence (opt5) from hemagglutinin__InfluenzaA__AJJ99149
augaagaccaucauugcccugagcuacauccucugccugguguucgcucagaaauuucccggcaacgacaauuccacagccacgcuuugucuggggcaccaugcggucccuaacggaaccauuguuaagacaaucaccaaugaucaaauugaggugacaaacgcuaccgaacucgugcagucuagcuccacaggcgagaucugcgacucuccgcaccagauccuggaugggaaaaauuguacccuuauugacgcccugcucggagauccccagugcgacggcuuccaaaacaagaaaugggaucuguuugucgaaagaagcaaggccuauuccaauuguuacccuuaugacaugcccgauuacgcuucucugcggagccucguggccuccagcgggacgcuggaguucaacaaugaaucuuuuaacuggaccggaguuacacagaauggcaccuccagcgcuugcauccgcagaucuaacuccagcuucuuuucucggcuuaauuggcugacacaucucaacuucaaguaucaggcccugaaugugaccaugccuaacaacgagcaguuugacaaacuuuacauuuggggcguccaccaucccgggacggauaaggaccaaaucuuccuguaugcgcaggccuccggacgcauuacagugagcaccaaaagaucccagcagacaguuaucccuaauauuggcucucggccgcgcgugagaaacauccccagccggaucuccauuuacuggaccaucgucaagccuggggauauucuccugaucaauagcaccggaaaccugauugcuccccgcggcuacuuuaaaauccaaucugggaaguccagcaucaugagaucugacgccccuauuggaaaguguaauagcgagugcaucacacccaacggcuccauuccgaaugacaaaccuuuccagaacgugaaucggaucacguauggcgcuuguccccgcuacgugaagcagaacacccucaaacuggccacagggaugagaaaugucccugaaaagcaaacccggggaauuuuuggcgcgaucgccggguucaucgagaacggaugggaaggcaugguugaugggugguauggauuccgccaccaaaauucugagggcagaggccaggcugccgaccuuaaaagcacacaggcugccauugaucagaucaacgggaagcugaaucggcucauuggaaaaaccaacgagaaguuucaccagaucgaaaaggaguucuccgaaguggagggccgcauucaggaccuggaaaaauacguggaggauacgaagaucgaccuuuggagcuauaacgccgagcugcucgucgcucuggaaaaucagcauacaauugaucugaccgacucugagaugaacaaacucuuugaaaagaccaaaaagcaacugagagagaaugcggaagauauggggaacggaugcuucaagaucuaccacaaaugugacaaugccugcaucggcuccauucggaacgggacauaugaucaugacguguacagagacgaggcucuuaauaaccgcuuucagaucaagggcguugagcugaaaagcggauacaaggauuggauucucuggaucucuuucgccauuuccugcuuucugcuuuguguggcccugcucggcuucaucaugugggcuugccagaaagggaauauccgguguaacauuugcaucuga

SEQ ID NO: 204940 - RNA, 1701 nt, Artificial Sequence
  derived and/or modified CDS sequence (opt5) from hemagglutinin__InfluenzaA__AJJ99161
augaagaccaucauugcccugagcuacauccucugccugguguucgcucagaaacuucccggcaacgacaauuccacagccacgcugugucucgggcaccaugcggucccuaacggaaccauuguuaagacaaucaccaaugaucaaauugaggugacaaacgcuaccgaacuggugcagucuagcuccacaggcgagaucugcgacucuccgcaccagauccuugauggggaaaauuguacccugauugacgcccuccugggagauccccagugcgacggcuuucaaaacaaaaagugggaucuguucgucgagagaagcaaagccuauuccaauuguuacccuuaugacgugcccgauuacgcuucucuccggagccugguugccuccagcgggacgcuugaauuuaacaaugagucuuucaacuggaccggagugacacagaauggcaccuccagcgcuugcauccgcagaucuaacaauuccuuuuucagccggcugaacuggcucacacaucugaaguuuaaguauccugcccuuaaugucaccaugcccaacaacgagcaguucgacaaacuguacauuuggggcgugcaccauccugggacggauaaugaccagaucuuucucuaugcgcaagccucuggacgcauuacaguuuccaccaagagaagccagcagacagugaucccgaacauuggcucccggccccgcgucagagauaucccuucucggaucagcauuuacuggaccaucgugaaacccggggacauucugcugaucaauuccaccggaaaccucauugcuccucgcggcuacuucaagaucagaagcgggaaaucuuccaucaugcggagcgacgcccccauuggaaaguguaauucugaaugcaucacaccgaacggcagcauuccuaaugauaagcccuuucagaacgugaaucgcaucacguauggcgcuuguccuagauacgucaaacaaaacacccugaaacuugccacagggaugcggaauguucccgagaagcagacccgcggaauuuucggcgcgaucgccggguuuaucgaaaacggaugggagggcaugguggacgggugguauggauucagacaccaaaauuccgagggccggggccaggcugccgaucugaagucuacacaggcugccauugaccagaucaacgggaaacucaauagacugauuggaaagaccaacgaaaaauuccaccagaucgagaaggaauuuagcgagguggaaggccgcauucaagaucuugagaaguacgucgaggacacgaaaaucgaucugugguccuauaacgccgaacuccugguggcucuggagaaucagcauacaauugaccucaccgauagcgaaaugaacaagcuguucgagaaaaccaagaaacagcuucgggaaaaugcggaggacauggggaacggaugcuuuaagaucuaccacaagugugauaaugccugcaucggcucuauuagaaacgggacauaugaccaugacguuuaccgcgaugaggcucugaauaaccgguuccagaucaaaggcguggaacucaaguccggauacaaagacuggauucuguggaucagcuuugccauuucuugcuuccuucugugugucgcccuccugggcuuuaucaugugggcuugccaaaaggggaauaucagauguaacauuugcaucuga

SEQ ID NO: 204941 - RNA, 1701 nt, Artificial Sequence
  derived and/or modified CDS sequence (opt5) from hemagglutinin__InfluenzaA__AJJ99173
augaagaccaucauugcccugagcuacauccucugccugguguucgcucagaaacuucccggcaacgacaauuccacagccacgcugugucucgggcaccaugcggucccuaacggaaccauuguuaagacaaucaccaaugaucaaauugaggugacaaacgcuaccgaacuggugcagucuagcuccacaggcgagaucugcaauucuccgcaccagauccuugacggggaaaacuguacccugauugaugcccuccugggagacccccagugcgauggcuuucaaaauaaaaagugggaccuguucgucgagagaagcaaagccuauuccaacuguuacccuuaugaugugcccgacuacgcuucucuccggagccugguugccuccagcgggacgcuugaauuuaauaacgagucuuucaauuggaccggagugacacagaacggcaccuccagcgcuugcauccgcagaucuaauuccagcuuuuucucucggcugaacuggcucacacaucugaaguuuaaguauccugcccuuaaugucaccaugcccaacaacgagcaguucgauaaacuguacauuuggggcgugcaccauccugggacggacaaugaucagaucuuucucuaugcgcaagccuccggacgcauuacaguuagcaccaagagaucccagcagacagugaucccgaacauuggcucucggccccgcgucagaaauaucccuagccggaucuccauuuacuggaccaucgugaaacccggggacauucugcugaucaacagcaccggaaaucucauugcuccucgcggcuacuucaagaucagaucugggaaauccagcaucaugcggucugaugcccccauuggaaaguguaacagcgaaugcaucacaccgaauggcuccauuccuaacgacaagcccuuucagaaugugaaccgcaucacguauggcgcuuguccuagauacgucaaacaaaauacccugaagcuggccacagggaugcggaacguucccgagaaacagacccgcggaauuuucggcgcgaucgccggguuuaucgaaaauggaugggagggcaugguggacgggugguauggauucagacaccagaacucugagggccggggccaagcugccgaucuuaagagcacacaggcugccauugaccagaucaaugggaaacucaacagacugauuggaaagaccaacgaaaaauuccaccagaucgagaaggaauuuuccgagguggaaggccgcauucaagaucuugagaaguacgucgaggacacgaaaaucgaucuguggagcuauaaugccgaacuccugguggcucuggagaaccagcauacaauugaccucaccgauucugaaaugaauaagcuguucgagaaaaccaagaaacagcuucgggaaaacgcggaggacauggggaauggaugcuuuagaaucuaccacaagugugauaacgccugcaucggcuccauucgcaaugggacauaugaccaugauguuuaccgggacgaggcucugaacaauagauuccagaucaagggcguggaacucaaaagcggauacaaggacuggauucuguggaucucuuuugccauuuccugcuuccuucugugugucgcccuccugggcuuuaucaugugggcuugccaaaaagggaacauccgcuguaauauuugcaucuga

SEQ ID NO: 204942 - RNA, 1701 nt, Artificial Sequence
  derived and/or modified CDS sequence (opt5) from hemagglutinin__InfluenzaA__AJJ99185
augaagaccaucauugcccugagcuacauccucugccugguguucgcucagaaacuucccggcaacgacaauuccacagccacgcugugucucgggcaccaugcggucccuaacggaaccauuguuaagacaaucaccaaugaucaaauugaggugacaaacgcuaccgaacuggugcagucuagcuccacaggcgagaucugcgacucuccgcaccagauccuugauggggaaaauuguacccugauugacgcccuccugggagauccccagugcgacggcuuucaaaacaaaaagugggaucuguucgucgagagaagcaaagccuauuccaauuguuacccuuaugacgugcccgauuacgcuucucuccggagccugguugccuccagcgggacgcuugaauuuaacaaugagucuuucaacuggaccggagugacacagaauggcaccuccagcgcuugcauccgcaagucuaacaauuccuuuuucagcagacugaacuggcucacacaucugaaguuuaaauauccugcccuuaaugucaccaugcccaacaacgagcaguucgacaagcuguacauuuggggcgugcaccauccugggacggauaaugaccagaucuuucucuaugcgcaagccucuggacggauuacaguuuccaccaaacgcagccagcagacagugaucccgaacauuggcuccagaccccggguccgcaauaucccuucuagaaucagcauuuacuggaccaucgugaagcccggggauauucugcugaucaacuccaccggaaaucucauugcuccucggggcuacuucaaaauccgcagcgggaagucuuccaucaugagagccgacgcucccauuggaaaguguaacagcgaaugcaucacaccgaauggcucuauuccuaacgacaaacccuuucagaaugugaaccggaucacguauggcgccuguccucgcuacgucaagcaaaauacccugaaacuugcgacagggaugagaaacguucccgagaagcagacccggggaauuuucggcgccaucgcuggguuuaucgaaaauggaugggagggcaugguggaugggugguauggauuccgccaccagaacagcgagggcagaggccaagccgcugaccugaaauccacacaggccgccauugaucagaucaaugggaagcucaaccggcugauuggaaaaaccaacgaaaaguuccaccagaucgagaaggaauuuucugagguggaaggccgcauucaagaccuugagaaauacgucgaggauacgaagaucgaccuguggagcuauaaugcugaacuccugguggcgcuggagaaccagcauacaauugaucucaccgacuccgaaaugaauaaacuguucgagaagaccaaaaagcagcuuagagaaaacgccgaggauauggggaauggaugcuuuaagaucuaccacaaaugugacaacgcuugcaucggcagcauucggaaugggacauaugaucaugacguuuacagagacgaggcccugaacaaucgcuuccagaucaagggcguggaacucaaaucuggauacaaggauuggauucuguggaucuccuuugccauuagcugcuuccuucugugugucgcucuccugggcuuuaucaugugggccugccaaaaagggaacauccgguguaauauuugcaucuga

SEQ ID NO: 204943 - RNA, 1701 nt, Artificial Sequence; identical to SEQ ID NO: 200880
  derived and/or modified CDS sequence (opt5) from hemagglutinin__InfluenzaA__AJJ99197

SEQ ID NO: 204944 - RNA, 1701 nt, Artificial Sequence
  derived and/or modified CDS sequence (opt5) from hemagglutinin__InfluenzaA__AJJ99209
augaagaccaucauugcccugagcuacauccucugccugguguucgcucagaaacuucccggcaacgacaauuccacagccacgcugugucucgggcaccaugcggucccuaacggaaccauuguuaagacaaucaccaaugaucaaauugaggugacaaacgcuaccgaacuggugcagucuagcuccacaggcgggaucugcgacucuccgcaccagauccuugauggagagaauuguacccugauugacgcccuccugggcgauccccagugcgacggguuucaaaacaaaaagugggaucuguucgucgaaagaagcaaagccuauuccaauuguuacccuuaugacgugcccgauuacgcuucucuccggagccugguugccuccagcggaacgcuugaguuuaacaaugaaucuuucaacuggaccggcgugacacagaauggcaccuccagcgcuugcaagcgcaagucugacaacuccuuuuucagcagacugaauuggcucacacaucugaaauuuaaguauccugcccuuaacgucaccaugcccaauaacgaggaguucgauaaacuguacaucuggggagugcaccauccugggacggacaacgaucagauuuuucucuaugcgcaggccucuggccggaucacaguuuccaccaagcgcagccaacagacagugauuccgaauaucggguccagaccccggguccgcaacauuccuucuagaaucagcaucuacuggaccauugugaaacccggagacauccugcugauuaauuccaccggcaaccucaucgcuccucggggguacuucaagauucgcagcggaaagucuuccaucaugagaagcgacgcccccaucggcaaauguaauucugaaugcauuacaccgaacggcagcaucccuaaugauaagcccuuucagaacgugaaucggauuacguauggggcuuguccucgcuacgucaaacaguccacccugaagcuggccacaggaaugagaaacguucccgagaaacaaacccggggcaucuucggggcgauugccggauuuaucgaaaauggcugggaggggaugguggacggaugguauggcuuccgccaccagaacucugagggcaucgggcaggcugccgaucuuaagagcacacaagcugccauuaaucagaucaacggaaaacucaauagacugauuggcaagaccaacgaaaaguuccaccagaucgagaaagaauuuuccgagguggaagggcggauucaggaccuugagaaguacgucgaggauacgaaaaucgaccuguggagcuauaacgccgaacuccugguggcucuggagaaucaacauacaauugaucucaccgacucugaaaugaacaagcuguucgagagaaccaaaaagcagcuucgcgaaaaugcggaggauaugggaaacggcugcuuuaagaucuaccacaaaugugacaaugccugcaucggguccauucggaacggcacauaugaucaugacguuuacagagacgaggcucugaauaaccgcuuccagaucaagggaguggaacucaaaagcggcuacaaggauuggauucuguggaucucuuuugccauguccugcuuccuucugugugucgcccuccugggguuuauuaugugggcuugccagaaaggaaauauccgguguaacaucugcauuuga

SEQ ID NO: 204945 - RNA, 1701 nt, Artificial Sequence
  derived and/or modified CDS sequence (opt5) from hemagglutinin__InfluenzaA__AJJ99221
augaagaccaucauugcccugagcuacauccucugccugguguucgcucagaaacuucccggcaacgacaauuccacagccacgcugugucucgggcaccaugcggucccuaacggaaccauuguuaagacaaucaccaaugaucaaauugaggugacaaacgcuaccgaacuggugcagucuagcuccacaggcgagaucugcgacucuccgcaccagauccuugauggggaaaauuguacccugauugacgcccuccugggagauccccagugcgacggcuuucaaaacaaaaagugggaucuguucgucgagagaagcaaagccuauuccaauuguuacccuuaugacgugcccgauuacgcuucucuccggagccugguugccuccagcgggacgcuugaauuuaacaaugagucuuucaacuggaccggagugacacagaauggcaccuccagcgcuugcauccgcagaucuaacuccagcuuuuucucucggcugaauuggcucacacaucugaaguuuaaguauccugcccuuaacgucaccaugcccaauaacgagaaauucgacaagcuguacauuuggggcgugcaccauccugggacggauaacgaccagaucuuucucuaugcgcaggccuccggacgcauuacaguuagcaccaaaagaucccaacagacagugaucccgaauauuggcucucggccccgcgucagaaacaucccuagccggaucuccauuuacuggaccaucgugaagcccggggauauucugcugaucaauagcaccggaaaccucauugcuccucgcggcuacuucaaaauccagucugggaaguccagcaucaugagaucugacgcccccauuggaaaguguaauagcgaaugcaucacaccgaacggcuccauuccuaaugacaaacccuuucagaacgugaaucggaucacguauggcgcuuguccucgcuacgucaagcaaaacacccugaaacuugccacagggaugagaaauguucccgagaagcagacccggggaauuuucggcgcgaucgccggguuuaucgaaaacggaugggagggcaugguggaugggugguauggauuccgccaccaaaauucugagggcauuggccaggcugccgaccugaaaagcacacaggcugccaucgaucagauuaacgggaagcucaauagacugaucggaaaaaccaacgaaaaguuccaccagauugagaaggaauuuuccgagguggaaggccggauccaagaccuugagaaauacgucgaggauacgaagauugaccuguggagcuauaacgccgaacuccugguggcucuggagaaucagcauacaaucgaucucaccgacucugaaaugaacaaacuguucgagaagaccaaaaagcagcuuagagaaaaugcggaggauauggggaacggaugcuuuaagaucuaccacaaaugugacaaugccugcauuggcuccauccgcaacgggacauaugaucaugacguuuaccgggacgaggcucugaauaacagauuccagauuaagggcguggaacucaaaagcggauacaaggauuggauccuguggauuucuuuugccaucuccugcuuccuucugugugucgcccuccugggcuuuaucaugugggcuugccaaaaagggaauauucgcuguaacaucugcauuuga

SEQ ID NO: 204946 - RNA, 1701 nt, Artificial Sequence; identical to SEQ ID NO: 193987
  derived and/or modified CDS sequence (opt5) from hemagglutinin__InfluenzaA__AJJ99233

SEQ ID NO: 204947 - RNA, 1701 nt, Artificial Sequence
  derived and/or modified CDS sequence (opt5) from hemagglutinin__InfluenzaA__AJJ99244
augaaggccauccugguggucaugcucuacaccuucgcuacagccaacgcggacacgcugugcauuggcuaucacgcuaauaacagcaccgauacaguugacaccgugcuugagaaaaaugugacagucacccauuccgugaaccugcucgaagauaagcacaaugggaaacuguguaaacuuagaggaguugcuccccugcaucucggcaaaugcaacaucgccggguggauucugggaaauccugagugugaaucucugagcacagccuccucuuggagcuacaucguggagaccuccggcucugacaacgggacgugcuauccgggagauuuuauugacuacgaggagcuccgggagcagcugagcuccgucagcucuuucgaacgcuuugagaucuuccccaagaccuccagcuggccuaaucacgauucuaacaagggcgugacagccgcuuguccccaugccggcgcgaaaggguuuuauaagaaucuuaucuggcugguuaaaaagggaaacuccuacccuaaacucagcaagucuuauauuaaugacaagggcaaagaagugcugguccuuugggggauccaccaccccuccaccacagccgaucaacagagccuguaccagaacgcugacaccuacguguucgugggaacguccagauauucuaagaaauuuaagccugagauugccauccggccgaaaguccgcgaucaggagggcagaaugaauuacuauuggacacucguugaacccggggacaagauuaccuucgaggcuacaggaaaccugguggugccucgguacgccuuugcgauggaacgcaacgccggcagcggcaucauuaucuccgauacccccguccaugacugcaauaccacaugucaaacgccuaaaggggcuaucaacaccagccugcccuuccagaauauucacccgaucacaauuggaaagugcccuaaguaugugaaaucuaccaagcucagacuggccacaggccuucggaacguucccuccauccagagccgcgggcuguuuggagcuauugccggcuucaucgaagggggauggaccggcaugguggacggcugguacggguaucaucaccagaaugaacaaggaucuggcuacgccgcugaucucaaaagcacgcagaacgcgaucgacaagauuacaaauaaagucaacuccgugaucgagaagaugaauacccaguuuaccgccguugggaaggaguucaaccaccuggaaaagagaauugagaaucuuaacaagaaaguggaugacggauuccuggauaucuggacauacaaugcugaacuccugguccugcucgagaacgaacggacccuggacuaucaugauucuaaugugaagaaccuuuacgagaaaguccgcaaccagcugaagaauaacgccaaggagauuggcaauggguguuuugaguucuaucacaaaugcgacaacacauguauggaaagcgugaagaauggcacguacgauuauccuaaauacuccgaagaggccaagcucaacagagaagagaucgacggaguuaaacuggagagcacccggaucuaucaaauucuugcuaucuacucuacaguggccuccagccugguccucgugguuucucugggcgcgauuuccuuuuggaugugcagcaaugggucccugcagugccgcaucuguauuuga

SEQ ID NO: 204948 - RNA, 1701 nt, Artificial Sequence
  derived and/or modified CDS sequence (opt5) from hemagglutinin__InfluenzaA__AJJ99255
augaaggccauccuggugguccuccuguacaccuucgcuacagccaacgcggacacgcuuugcauuggcuaucacgcuaauaacagcaccgauacaguugacaccgugcuggagaaaaaugugacagucacccauuccgugaaccuccuggaagauaaucacaacgggaaacuuuguaagcugagaggaguugcgccccuccaucugggcaagugcaauaucgccggguggauucugggaaacccugagugugaaucucucagcacagcuuccucuuggagcuacaucguggagaccuccucuagcgacaauggcacgugcuauccgggggauuuuauuaacuacgaagaacugcgggagcagcuuuccagcgucucuuccuucgaacgcuuugagaucuuccccaaaaccagcucuuggccuaaucacgacuccaacaagggagugacagccgcuugucccagagccggcgccaagagcuuuuauaaaaaucugaucuggcucguuaagaaaggcaacucuuacccuaagcuguccaaaagcuauauuaaugauaaggggaaggaagugcuugucauguggggaauccaucaccccuccaccacagccgaccaacagucucuguaccagaacgcugaugccuacguguucgugggcaccagccgguauuccaaagaguuuaagccugagauugcuauccgcccgaaagucagagaccaggaagggcggaugaacuacuauuggacgcucguugagcccggagauaagauuacauucgaagccaccggcaaucugcuggugccucgcuacgcguuugccauggagagaaacgcugggagcggaaucauuaucucugacacacccgugcacgauugcaauaccaccugucaaacaccuaaaggcgccaucaacacgucccuccccuuccagaauauucauccgaucaccauuggcaagugcccuaaauaugucaagagcacaaagcugcggcuugcuaccgggcugcgcaacgugcccucuauccagagcagaggacucuuuggcgccauugccggguucaucgaaggaggcuggacagggaugguugacggaugguacggcuaucaccaucagaaugagcaaggcuccggguacgcugcggaccugaaaucuacccagaacgccaucgauaagauuacgaauaaagugaacagcgucaucgagaagaugaauacacaguuuaccgcugugggaaaagaguucaaccaccuugagaagcggauugaaaaucugaacaagaaaguugacgauggcuuccucgacaucuggaccuacaaugccgagcugcuggugcuccuggaaaacgagcgcacacuugauuaucacgacuccaacgucaagaaucuguacgagaaagugagaaaccagcucaagaauaacgccaaagaaauugggaauggauguuuugaguucuaucauaagugcgauaacaccuguauggaaagcgucaagaauggcacauacgacuauccuaaauacucugaggaagcuaagcugaaccgggaggagaucgauggggugaaacuugaauccacgcgcaucuaucaaauucuggccaucuacagcaccguugcgucuucccucgugcuggucgugagccugggcgcuauuuccuuuuggaugugcucuaauggaagccuccagugcagaaucuguauuuga

SEQ ID NO: 204949 - RNA, 1698 nt, Artificial Sequence
  derived and/or modified CDS sequence (opt5) from hemagglutinin__InfluenzaA__AJJ99267
augaaggugaaacugcucguccugcuuugcaccuucacagccacguacgcugacaccaucuguauuggcuaucacgccaacaauagcacagauaccguugacacagugcuggagaagaacgugaccgucacacauuccgugaaucuccuggaaaacucucacaaugggaaacuuugccugcucaagggaaucgcgccccugcagcugggcaacuguagcguugcuggguggauucucggaaauccugagugcgaacugcuuaucuccaaagagucuuggagcuacauuguggaaaagccgaaccccgagaauggcaccuguuauccugggcauuuugccgauuacgaggaacugagagagcaacucuccucugucagcuccuucgaacgguuugagaucuuccccaaggagagcucuuggccuaaccacacgaucaccggaguguccgccagcugcucucauaauggcgaauccagcuuuuaucgcaaccugcuuuggcugacaggcaaaaaugggcucuaccccaaccugucuaaguccuaugcuaauaacaaagagaaggaaguucuggugcucuggggaguccaccacccuccgaacauuggcgaccagaaagcccuguaccauaccgagaaugcuuacgugagcguggucuccucucacuauagcagaaaguucacacccgaaaucgccaagcggccuaaaguucgcgaucaggaggggagaauuaacuacuauuggacccuucuggagcccggagacacgaucauuuuugaagcgaauggcaaccucaucgccccucgguacgcuuucgcccugucccgcggguuuggaagcggcauuaucaauucuaacgcucccauggauaagugugacgccaaaugccagacaccgcaaggcgcgaucaauuccagccuuccuuuccagaacgugcaucccgugaccauuggggaguguccuaaguaugucagaucugccaaacugcggauggugacaggacuccgcaauauccccagcauucaguccagaggccuguuuggggcuaucgccggauucauugaaggcggguggaccggaaugguugauggcugguacggcuaucaccaccagaacgagcaagggucuggauacgcugccgaccaaaagagcacccagaaugccaucaacggcaucacaaauaaagugaacuccgucauugaaaagaugaauacgcaguuuaccgcuguggggaaggaguucaacaaacuggagcggcgcauggaaaaccucaauaagaaaguugaugacggauucaucgauauuuggacauacaacgcggagcugcuugugcugcucgaaaaugagagaacccuggacuuucaugacagcaacgucaagaaucuuuaugaaaaagugaagucucagcugaagaacaaugccaaagagaucggcaacgggugcuucgaguuuuaccacaaguguaaugaugaaugcauggaguccgucaaaaacggcacauaugacuaccccaaguauagcgaagagucuaaacucaaucgggagaagauugauggagugaagcuggaauccaugggcguuuaccagauccuggcuaucuauagcaccguggccuccucucucguccugcuugugagccugggggccguuuccuucuggaugugcucuaacggaagccuccagugucgcgugugcauuuga

SEQ ID NO: 204950 - RNA, 1701 nt, Artificial Sequence; identical to SEQ ID NO: 199122
  derived and/or modified CDS sequence (opt5) from hemagglutinin__InfluenzaA__AJJ99278

SEQ ID NO: 204951 - RNA, 1701 nt, Artificial Sequence; identical to SEQ ID NO: 199125
  derived and/or modified CDS sequence (opt5) from hemagglutinin__InfluenzaA__AJJ99289

SEQ ID NO: 204952 - RNA, 1698 nt, Artificial Sequence
  derived and/or modified CDS sequence (opt5) from hemagglutinin__InfluenzaA__AJJ99301
augaaggugaaacugcucguccugcuuugcaccuucacagccacguacgcugacaccaucuguauuggcuaucacgccaacaauagcacagauaccguugacacagugcuggagaagaacgugaccgucacacauuccgugaaucuccuggaaaacucucacaaugggaaacuuugccugcucaagggaaucgcgccccugcagcugggcaacuguagcguugcuggguggauucucggaaauccugagugcgaaucccugaucucuaaagagagcugguccuacauuguggaaaagccgaaccccgagaauggcaccuguuauccugggcauuuugccgauuacgaggaacuuagagagcaacugucuagcgucuccagcuucgaacgguuugagaucuuccccaaggagucuuccuggccuaaccacacggugaccggaguuagcgccucuugcucccauaauggcgaaagcucuuuuuaucgcaaccuccuguggcuuacaggcaaaaaugggcuguaccccaaccucuccaagagcuaugcuaauaacaaagagaaggaagugcugguccuguggggagugcaccacccuccgaacaucggcgaccagaaagcccucuaccauaccgagaaugcuuacguguccgucguuucuagccacuauuccagaaaguucacacccgaaauugccaagcggccuaaagugcgcgaucaggaggggagaaucaacuacuauuggacccugcuugagcccggagacacgauuaucuuugaagcgaauggcaaccugauugccccucgguacgcuuucgcccucagccgcggguuuggaucuggcaucauuaauuccaacgcucccauggauaagugugacgccaaaugccagacaccgcaaggcgcgaucaauagcucucugccuuuccagaacgugcaucccgucaccaucggggaguguccuaaguaugugagaagcgccaaacuucggaugguuacaggacugcgcaauauucccuccauccagucuagaggccucuuuggggcuauugccggauucaucgaaggcggguggaccggaaugguggauggcugguacggcuaucaccaccagaacgagcaagggagcggauacgcugccgaccagaaguccacccagaaugccauuaacggcaucacaaauaaagucaacagcgugaucgaaaagaugaauacgcaguuuaccgcuguugggaaggaguucaacaaacuggagcggcgcauggaaaaccugaauaagaaaguggaugacggauucauugauaucuggacauacaacgcggagcuccugguccuucuggaaaaugagagaacccucgacuuucaugacucuaacgugaagaaucuguaugaaaaagucaagucccaacuuaagaacaaugccaaagagauuggcaacgggugcuucgaguuuuaccacaaguguaaugaugaaugcauggagagcgugaaaaacggcacauaugacuaccccaaguauucugaagaguccaaacugaaucgggagaagaucgauggaguuaagcucgaaagcaugggcguguaccagauucuggcuaucuauuccaccgucgccucuagccuggugcuccugguuucccuuggggccaucucuuucuggaugugcagcaacggaucccugcagugucgcauuugcaucuga

SEQ ID NO: 204953 - RNA, 1698 nt, Artificial Sequence
  derived and/or modified CDS sequence (opt5) from hemagglutinin__InfluenzaA__AJJ99324
augaaggugaaacugcucguccugcuuugcaccuucacagccacguacgcugacaccaucuguauuggcuaucacgccaacaauagcacagauaccguugacacagugcuggagaagaacgugaccgucacacauuccgugaaucuccuggaaaacucucacaaugggaaacuuugccugcucaagggaaucgcgccccugcagcugggcaacuguagcguugcuggguggauucucggaaauccugagugcgaacugcuuaucuccaaagagucuuggagcuacauuguggaaaagccgaaccccgagaauggcaccuguuauccugggcauuuugccgauuacgaggaacugagagagcaacucuccucugucagcuccuucgaacgguuugagaucuuccccaaggagagcucuuggccuaaccacacggugaccggaguuuccgccagcugcucucauaauggcgaaaacuccuuuuaucgcaaucugcuuuggcugacaggcaaaagcgggcucuaccccaaccugucuaaguccuaugcuaauaacaaagagaaggaagugcugguccucuggggagugcaccacccuccgaacaucgccgaccagaaaacccuguaccauacagagaaugcuuacgugagcgucguuuccucucacuauagcagaaaguucacccccgaaauugccaagcggccuaaagugcgcgaucaggagggcagaaucaacuacuauuggacgcuucuggagcccggggacacaauuaucuuugaagcgaauggaaaccucauugccccucgguacgcuuucgcccugucccgcggcuuugggagcggaaucauuaauucuaacgcucccauggauaagugugacgccaaaugccagaccccgcaaggcgcgaucaauuccagccuuccuuuccagaacgugcaucccgucacaaucggcgaguguccuaaguaugugagaucugccaaacugcggaugguuaccgggcuccgcaauauucccagcauccaguccagaggacuguuuggcgcuauugccggguucaucgaaggaggcuggaccgggaugguggauggaugguacggcuaucaccaccagaacgagcaaggcucuggguacgcugccgaccaaaagagcacacagaaugccauuaacggaaucacgaauaaagucaacuccgugaucgaaaagaugaauacccaguuuacagcuguuggcaaggaguucaacaaacuggagcggcgcauggaaaaccucaauaagaaaguggaugacggguucauugauaucuggaccuacaacgcggagcugcuuguccugcucgaaaaugagagaacacuggacuuucaugacagcaacgugaagaaucuuuaugaaaaagucaagucucagcugaagaacaaugccaaagagauuggaaacggcugcuucgaguuuuaccacaaguguaaugaugaaugcauggaguccgugaaaaacgggaccuaugacuaccccaaguauagcgaagagucuaaacucaaucgggagaagaucgauggcguuaagcuggaauccaugggaguguaccagauucuggcuaucuauagcacggucgccuccucucucgugcugcuuguuagccugggcgccaucuccuucuggaugugcucuaacgggagccuccagugucgcauuugcaucuga

SEQ ID NO: 204954 - RNA, 1701 nt, Artificial Sequence
  derived and/or modified CDS sequence (opt5) from hemagglutinin__InfluenzaA__AJJ99335
auggaggccauccuggugguccuccuguacaccuucgcuacagccaacgcggacacgcuuugcauuggcuaucacgcuaauaacagcaccgauacaguugacaccgugcuggaaaagaaugugacagucacccauuccgugaaccuccuggaggauaaacacaaugggaaacuuuguaaacugagaggaguugcgccccuccaucugggcaagugcaacaucgccggguggauucugggaaauccugaaugugagucucucagcacagcuuccucuuggagcuacaucguggaaaccuccucuagcaacaauggcacgugcuauccgggggacuuuauugauuacgaggagcugcgggaacagcuuuccagcgucucuuccuucgagcgcuuugaaaucuuccccaaaaccagcucuuggccuaaccacgacuccaauaagggagugacagccgcuuguccccaugccggcgccaagagcuuuuauaaaaaccugaucuggcucguuaagaaaggcaauucuuacccuaagcuguccaaaagcuauauuaacgauaaggggaaggaggugcuuguccuguggggaauccaccaccccuccaccucugccgaccaacagagccucuaccagaaugcugaugccuacguguucgugggcuccagcagauauucuaaaaaguuuaaaccugagauugcuauccggccgaagguccgcgaccaggaagggagaaugaacuacuauuggacacugguugagcccggagauaaaauuaccuucgaagccacgggcaaccugguggugccucgguacgcguuugccauggagcgcaaugcuggguccggaaucauuaucagcgacacacccguccaugauugcaacaccacaugucaaaccccuaauggcgccaucaacaccucucuccccuuccacaauauucauccgaucacaauuggcaagugcccuaaauauguuaagagcacgaagcugagacuugcuaccgggcugcggaacgugcccuccauccagucucgcggacucuuuggcgccauugccggguucaucgaaggaggcuggacagggaugguggacggaugguacggcuaucaccaccagaaugagcagggcagcggguacgcugcggaccugaaauccacccaaaacgccaucgaugagauuacaaauaaggucaacagcgugaucgaaaagaugaauacccaguuuacggcuguuggaaaggaguucaaccaucuugaaaagagaauugagaaucugaacaagaagguggacgauggcuuccucgacaucuggacauacaaugccgaacugcugguccuccuggagaacgagcggacccuugauuaucacgacucuaacgugaaaaaucuguacgaaaagguccgcucccagcucaaaaacaaugccaaggagauugggaacggauguuuugaguucuaucauaaaugcgauaauaccuguauggaaagcgugaagaacggcacauacgacuauccuaaguacucugaagaggcuaaacugaauagagaggaaaucgaugggguuaaacuugaguccacccggaucuaucagauucuggccaucuacagcacaguggcguccucucucguccuggugguuagccugggcgcuauuuccuuuuggaugugcucuaacggaagccuccaaugccgcaucuguauuuga

SEQ ID NO: 204955 - RNA, 1701 nt, Artificial Sequence; identical to SEQ ID NO: 196857
  derived and/or modified CDS sequence (opt5) from hemagglutinin__InfluenzaA__AJJ99357

SEQ ID NO: 204956 - RNA, 1701 nt, Artificial Sequence; identical to SEQ ID NO: 198896
  derived and/or modified CDS sequence (opt5) from hemagglutinin__InfluenzaA__AJJ99368

SEQ ID NO: 204957 - RNA, 1701 nt, Artificial Sequence; identical to SEQ ID NO: 198507
  derived and/or modified CDS sequence (opt5) from hemagglutinin__InfluenzaA__AJJ99379

SEQ ID NO: 204958 - RNA, 1701 nt, Artificial Sequence
  derived and/or modified CDS sequence (opt5) from hemagglutinin__InfluenzaA__AJJ99390
auggaggccauccuggugguccuccuguacaccuucgcuacagccaacgcggacacgcuuugcauuggcuaucacgcuaauaacagcaccgauacaguugacaccgugcuggaaaagaaugugacagucacccauuccgugaaccuccuggaggauaagcacaaugggaaacuuuguaagcugagaggaguugcgccccuccaucugggcaagugcaacaucgccggguggauucugggaaauccugaaugugagucucucagcacagcuuccucuuggagcuacaucguggaaaccuccucuagcgacaacggcacgugcuauccgggggauuuuauugacuacgaggagcugcgggaacagcuuuccagcgucucuuccuucgagcgcuuugaaaucuuccccaaaaccagcucuuggccuaaucacgauuccaacaagggagugacagccgcuuguccccaugccggcgccaagagcuuuuauaaaaaucugaucuggcucguuaagaaaggcaacucuuacccuaagcuguccaaaagcuauauuaaugacaaggggaaggaggugcuuguccuguggggaauccaccaccccuccaccucugccgaucaacagagccucuaccagaacgcugacgccuacguguucgugggcuccagcagauauucuaaaaaguuuaaaccugagauugcuauccggccgaagguccgcgaucaggaagggagaaugaauuacuauuggacacugguugagcccggagacaaaauuaccuucgaagccacgggcaaccugguggugccucgguacgcguuugccauggagcgcaacgcuggguccggaaucauuaucagcgauacacccguccaugacugcaauaccacaugucaaaccccuaagggcgccaucaacaccucucuccccuuccacaauauucauccgaucacaauuggcaaaugcccuaaguauguuaagagcacgaaacugagacuugcuaccgggcugcggaacgugcccuccauccagucucgcggacucuuuggcgccauugccggguucaucgaaggaggcuggacagggaugguggacggaugguacggcuaucaccaccagaaugagcagggcagcggguacgcugcggaucugaaguccacccaaaacgccaucgacaaaauuacaaauaaggucaacagcgugaucgagaaaaugaauacccaguuuacggcuguuggaaaggaguucaaccaucuugaaaagagaauugaaaaucugaacaaaaagguggaugacggcuuccucgauaucuggacauacaaugccgagcugcugguccuccuggaaaacgagcggacccuugacuaucacgauucuaaugugaaaaaccuguacgagaagguccgcucccagcucaaaaacaaugccaaggaaauugggaacggauguuuugaguucuaucauaagugcgacaauaccuguauggaaagcgugaaaaacggcacauacgauuauccuaaguacucugaggaagcuaaacugaauagagaggagaucgacgggguuaaacuugaauccacccggaucuaucagauucuggccaucuacagcacaguggcguccucucucguccuggugguuagccugggcgcuauuuccuuuuggaugugcucuaacggaagccuccaaugccgcaucuguauuuga

SEQ ID NO: 204959 - RNA, 1701 nt, Artificial Sequence; identical to SEQ ID NO: 196857
  derived and/or modified CDS sequence (opt5) from hemagglutinin__InfluenzaA__AJJ99401

SEQ ID NO: 204960 - RNA, 1698 nt, Artificial Sequence
  derived and/or modified CDS sequence (opt5) from hemagglutinin__InfluenzaA__AJJ99413
augaaggugaaacugcucguccugcuuugcaccuucacagccacguacgcugacaccaucuguauuggcuaucacgccaacaauagcacagauaccguugacacagugcuggagaagaacgugaccgucacacauuccgugaaucuccuggaaaacucucacaaugggaaacuuugccugcucaagggaaucgcgccccugcagcugggcaacuguagcguugcuggguggauucucggaaauccugagugcgaacugcuuaucuccaaagagucuuggagcuacauuguggaaaagccgaaccccgagaauggcaccuguuauccugggcauuuugccgauuacgaggaacugagagagcaacucuccucugucagcuccuucgaacgguuugagaucuuccccaaggagagcucuuggccuaaccacacggugaccggaguuuccgccagcugcucucauaauggcgaaaacuccuuuuaucgcaaucugcuuuggcugacaggcaaaaacgggcucuaccccaaucugagcaagucuuaugcuaacaacaaagagaaggaagugcugguccucuggggagugcaccacccuccgaauaucgccgaccagaaaacccuguaccauacagagaacgcuuacguguccgucguuagcucccacuauucuagaaaguucacccccgaaauugccaagcggccuaaagugcgcgaucaggagggcagaaucaauuacuauuggacgcuucuggagcccggggacacaauuaucuuugaagcgaacggaaaucucauugccccucgguacgcuuucgcccugagccgcggcuuuggguccggaaucauuaacagcaaugcuucuauggauaagugugacgccaaaugccagacaccccaaggcgcgaucaacuccagccuuccguuccagaaugugcauccugucaccaucggcgagugucccaaguaugugagaucugccaaacugcggaugguuaccgggcuccgcaacauuccuagcauccaguccagaggacuguuuggcgcuauugccggguucaucgaaggaggcuggaccgggaugguggauggaugguacggcuaucaccaccagaaugagcaaggcucuggguacgcugccgaccaaaagagcacacagaacgccauuaauggaaucacgaacaaagucaauuccgugaucgaaaagaugaacacccaguuuacagcuguuggcaaggaguucaacaaacuggagcggcgcauggaaaaucucaacaagaaaguggaugacggguucauugauaucuggaccuacaaugcggagcugcuuguccugcucgaaaacgagagaacacuggacuuucaugacagcaaugugaagaaccuuuaugaaaaagucaagucucagcugaagaauaacgccaaagagauuggaaauggcugcuucgaguuuuaccacaaguguaacgaugaaugcauggaguccgugaaaaaugggaccuaugacuaccccaaguauagcgaagagucuaaacucaaccgggagaagaucgauggcguuaagcuggaauccaugggaguguaccagauucuggcuaucuauagcacggucgccuccucucucgugcugcuuguuagccugggcgccaucuccuucuggaugugcucuaaugggagccuccagugucgcauuugcaucuga

SEQ ID NO: 204961 - RNA, 1698 nt, Artificial Sequence; identical to SEQ ID NO: 195698
  derived and/or modified CDS sequence (opt5) from hemagglutinin__InfluenzaA__AJJ99425

SEQ ID NO: 204962 - RNA, 1698 nt, Artificial Sequence
  derived and/or modified CDS sequence (opt5) from hemagglutinin__InfluenzaA__AJJ99437
augaaggugaaacugcucguccugcuuugcaccuucacagccacguacgcugacaccaucuguauuggcuaucacgccaacaauagcacagauaccguugacacagugcuggagaagaacgugaccgucacacauuccgugaaucuccuggaaaacucucacaaugggaaacuuugccugcucaagggaaucgcgccccugcagcugggcaacuguagcguugcuggguggauucucggaaauccugagugcgaacugcuuaucuccaaagagucuuggagcuacauuguggaaaagccgaaccccgagaauggcaccuguuauccugggcauuuugccgauuacgaggaacugagagagcaacucuccucugucagcuccuucgaacgguuugagaucuuccccaaggagagcucuuggccuaaccacacggugaccggaguuuccgccagcugcucucauaauggcgaaaacuccuuuuaucgcaaucugcuuuggcugacaggcaaaaacgggcucuaccccagccugucuaaguccuaugcuaauaacaaagagaaggaagugcugguccucuggggagugcaccacccuccgaacaucgccgaccagaaaacccuguaccauacagagaaugcuuacgugagcgucguuuccucucacuauagcagaaaguucacccccgaaauugccaagcggccuaaagugcgcgaucaggagggcagaaucaacuacuauuggacgcuucuggagcccggggacacaauuaucuuugaagcgaauggaaaccucauugccccucgguacgcuuucgcccugucccgcggcuuugggagcggaaucauuaauucuaacgcucccauggauaagugugacgccaaaugccagaccccgcaaggcgcgaucaauuccagccuuccuuuccagaacgugcaucccgucacaaucggcgaguguccuaaguaugugagaucugccaaacugcggaugguuaccgggcuccgcaauauucccagcauccaguccagaggacuguuuggcgcuauugccggguucaucgaaggaggcuggaccgggaugguggauggaugguacggcuaucaccaccagaacgagcaaggcucuggguacgcugccgaccaaaagagcacacagaaugccauuaacggaaucacgaauaaagucaacuccgugaucgaaaagaugaauacccaguuuacagcuguuggcaaggaguucaacaaacuggagcggcgcauggaaaaccucaauaagaaaguggaugacggguucauugauaucuggaccuacaacgcggagcugcuuguccugcucgaaaaugagagaacacuggacuuucaugacagcaacgugaagaaucuuuaugaaaaagucaagucucagcugaagaacaaugccaaagagauuggaaacggcugcuucgaguuuuaccacaaguguaaugaugaaugcauggaguccgugaaaaacgggaccuaugacuaccccaaguauagcgaagagucuaaacucaaucgggagaagaucgauggcguuaagcuggaauccaugggaguguaccagauucuggcuaucuauagcacggucgccuccucucucgugcugcuuguuagccugggcgccaucuccuucuggaugugcucuaacgggagccuccagugucgcauuugcaucuga

SEQ ID NO: 204963 - RNA, 1698 nt, Artificial Sequence
  derived and/or modified CDS sequence (opt5) from hemagglutinin__InfluenzaA__AJJ99449
augaaggugaaacugcucguccugcuuugcaccuucacagccacguacgcugacaccaucuguauuggcuaucacgccaacaauagcacagauaccguugacacagugcuggagaagaacgugaccgucacacauuccgugaaucuccuggaaaacucucacaaugggaaacuuugccugcucaagggaaucgcgccccugcagcugggcaacuguagcguugcuggguggauucucggaaauccugagugcgaacugcuuaucuccaaagagucuuggagcuacauuguggaaaagccgaaccccgagaauggcaccuguuauccugggcauuuugccgauuacgaggaacugagagagcaacucuccucugucagcuccuucgaacgguuugagaucuuccccaaggagagcucuuggccuaaccacacggugaccggaguuuccgccagcugcucucauaauggcgaauccagcuuuuaucgcaaccugcuuuggcugacaggcaaaaaugggcucuaccccaaccugucuaaguccuaugcuaauaacaaagagaaggaagugcugguccucuggggagugcaccacccuccgaacaucggcgaccagaaagcccuguaccauaccgagaaugcuuacgugagcgucguuuccucucacuauagcagaaaguucacacccgaaauugccaagcggccuaaagugcgcgaucaggaggggagaaucaacuacuauuggacccuucuggagcccggagacacgauuaucuuugaagcgaauggcaaccucauugccccucgguacgcuuucgcccugucccgcggguuuggaagcggcaucauuaauucuaacgcucccaugggcaagugugaugccaaaugccagacaccgcaaggggcgaucaauuccagccuuccuuuccagaacgugcaucccgucaccaucggagaguguccuaaguaugugagaucugccaaacugcggaugguuacaggccuccgcaauauucccagcauccaguccagagggcuguuuggagcuauugccggcuucaucgaagggggauggaccggcaugguggacggcugguacggguaucaccaccagaacgagcaaggaucuggcuacgcugccgaucaaaagagcacccagaaugccauuaacgggaucacaaauaaagucaacuccgugaucgaaaagaugaauacgcaguuuaccgcuguuggaaaggaguucaacaaacuggagcggcgcauggaaaaccucaauaagaaaguggacgauggcuucauugacaucuggacauacaacgcggagcugcuuguccugcucgaaaaugagagaacccuggauuuucaugacagcaacgugaagaaucuuuaugaaaaagucaagucucagcugaagaacaaugccaaagagauugggaacggcugcuucgaguuuuaccacaaguguaaugacgaaugcauggaguccgugaaaaacggaacauaugauuaccccaaguauagcaaagaaucuaagcucaaucgggagaagaucgacggcguuaaacuggaguccauggggguguaccagauucuggcuaucuauagcaccgucgccuccucucucgugcugcuuguuagccugggagccaucuccuucuggaugugcucuaacggcagccuccagugucgcauuugcaucuga

SEQ ID NO: 204964 - RNA, 1698 nt, Artificial Sequence; identical to SEQ ID NO: 194560
  derived and/or modified CDS sequence (opt5) from hemagglutinin__InfluenzaA__AJJ99461

SEQ ID NO: 204965 - RNA, 1701 nt, Artificial Sequence
  derived and/or modified CDS sequence (opt5) from hemagglutinin__InfluenzaA__AJJ99483
augaaggccauccugcucgugcugcuuuacaccuucgcuacagccaacgcggacacgcugugcauuggcuaucacgcuaauaacagcaccgauacagucgacaccguucucgagaaaaaugugacagugacccauuccgucaaccugcuugaagauaagcacaaugggaaacuguguaagcucagaggaguggcuccccugcaucugggcaaaugcaacaucgccggguggauucucggaaauccugagugugaaucucugagcacagccuccucuuggagcuacaucguugagaccuccucuagcgacaacggcacgugcuauccgggggauuuuauuaauuacgaagaacuucgggagcagcuguccagcgugucuuccuucgaacgcuuugagaucuuccccaagaccagcucuuggccuaaccacgacuccaauaagggagucacagccgcuugucccagagccggcgcgaaaucuuuuuauaagaaccucaucuggcuggugaaaaagggcaauagcuacccuaaacuuuccaagagcuauauuaacgauaaggggaaagaaguucuggugcucuggggaauccaucaccccuccaccacagccgaccaacagucucuguaccagaaugcugaugccuacgucuucgugggcaccagccgguauuccaagaaauuuaagccugagauugcuauccgcccgaaagugagagaccaggaggggcggaugaacuacuauuggacgcuggucgaacccggagauaagauuacauucgaggccaccggcaaccuccugguuccucgcuacgcguuugccauggaaagaaaugcugggagcggaaucauuaucucugacacacccgugcacgauugcaacaccaccugucaaacaccuaaaggcgccaucaauacgucccuucccuuccagaacauucauccgaucaccauuggcaagugcccuaaguaugugaaaagcacaaagcugcggcucgcuaccgggcugcgcaauguccccucuauccagagcagaggacuuuuuggcgccauugccggguucaucgagggaggcuggacagggaugguggacggaugguacggcuaucaccaucagaacgaacaaggcuccggguacgcugcggaccugaaaucuacccagaaugccaucgauaagauuacgaacaaaguuaauagcgugaucgagaagaugaacacacaguuuaccgcugucggaaaggaguucaaucaccucgaaaaacggauugagaaccugaauaagaaaguggacgauggcuuccuggacaucuggaccuacaacgccgaacuccugguucuucuggagaaugaacgcacacucgauuaucacgacuccaacgugaagaaccuguacgagaaagucagaaaucagcuuaagaacaaugccaaggagauugggaacggauguuuugaguucuaucauaaaugcgauaauaccuguauggagagcgugaagaacggcacauacgacuauccuaaauacucugaagaggcuaagcugaaucgggaagagaucgauggggucaaacucgaguccacgcgcaucuaucaaauucuggccaucuacagcaccguggcgucuucccugguucucguggucagccugggcgcuauuuccuuuuggaugugcucuaacggaagccuucagugcagaaucuguauuuga

SEQ ID NO: 204966 - RNA, 1701 nt, Artificial Sequence; identical to SEQ ID NO: 199125
  derived and/or modified CDS sequence (opt5) from hemagglutinin__InfluenzaA__AJJ99494

SEQ ID NO: 204967 - RNA, 1701 nt, Artificial Sequence
  derived and/or modified CDS sequence (opt5) from hemagglutinin__InfluenzaA__AJJ99505
augaaggccauccuggugguccuccuguacaccuucgcuacagccaacgcggacacgcuuugcauuggcuaucacgcuaauaacagcaccgauacaguugacaccgugcuggagaaaaaugugacagucacccauuccgugaaccuccuggaagauaagcacaaugggaaacuuuguaagcugagaggaguugcuccccuccaucugggcaaaugcaacaucgccggguggauucugggaaauccugagugugaaucucucagcacagccuccucuuggagcuacaucguggagaccuccucuagcgacaacggcacgugcuauccgggggauuuuauuaauuacgaggaacugcgggagcagcuuuccagcgucucuuccuucgaacgcuuugagaucuuccccaagaccagcucuuggccuaaccacgacuccaauaagggagugacagccgcuuguccccaugccggcgcgaaaucuuuuuauaagaaccugaucuggcucguuaaaaagggcaauagcuacccuaaacuguccaagagcuauauuaacgauaaggggaaagaagugcuuguccuguggggaauccaccaccccuccaccucugccgaccaacagagccucuaccagaaugcugaugccuacguguucgugggcacauccaaguauagcaaaaaguuuaaaccugagauugcugucagaccgaagguucgggaccaggaggggcgcaugaacuacuauuggacccugguggaacccggagauaaaaucacguucgaggccacaggcaaccugcucgugccuagauacgcguuugccauggaacggaaugcugggucuggaauuaucauuuccgacacccccguccaugauugcaacacaaccugucaaaccccuaagggcgccaucaauacaagccugcccuuccagaacauccacccgauuacgaucggcaagugcccuaaauaugugaagucuaccaaacuucgccuggcuacagggcucagaaauguucccagcauucagucccggggacuguuuggcgccaucgccggguucauugagggaggcuggaccgggaugguggacggaugguacggcuaucaucaccagaacgaacaaggcucuggguacgcugcggaccuuaagagcacacagaaugccaucgauaaaaucaccaacaaggucaauuccgugauugagaagaugaacacgcaguuuacagcuguuggaaaaggcuucaaucaccuggagaagcgcaucgaaaaccucaauaaaaagguggacgauggguuccuggacauuuggaccuacaacgccgagcugcucguccugcuugaaaaugagagaacccuggauuaucaugacagcaacgugaaaaaccucuacgaaaagguccggucucagcugaagaauaacgccaaagagaucggaaauggcuguuuugaguucuaucacaagugcgauaacacauguauggaauccgugaaaaaugggaccuacgacuauccuaaguacagcgaggaagcuaaacuuaaccgcgaggaaauugauggcguuaagcuggagucuacaagaaucuaucaaauccucgccauuuacuccacgguggcgagcucccugguccuggugguuucucucggagcuaucagcuuuuggaugugcuccaauggcucucugcagugccggauuuguaucuga

SEQ ID NO: 204968 - RNA, 1701 nt, Artificial Sequence; identical to SEQ ID NO: 194983
  derived and/or modified CDS sequence (opt5) from hemagglutinin__InfluenzaA__AJJ99516

SEQ ID NO: 204969 - RNA, 1701 nt, Artificial Sequence
  derived and/or modified CDS sequence (opt5) from hemagglutinin__InfluenzaA__AJJ99527
augaaggccauccugcucgugcugcuuuacaccuucgcuacagccaacgcggacacgcugugcauuggcuaucacgcuaauaacagcaccgauacagucgacaccguucucgagaaaaaugugacagugacccauuccgucaaccugcuugaagauaagcacaaugggaaacuguguaagcucagaggaguggcuccccugcaucugggcaaaugcaacaucgccggguggauucucggaaauccugagugugaaucucugagcacagccuccucuuggagcuacaucguugagaccuccucuagcgacaacggcacgugcuauccgggggauuuuauuaauuacgaagaacuucgggagcagcuguccagcgugucuuccuucgaacgcuuugagaucuuccccaagaccagcucuuggccuaaccacgacuccaauaagggagucacagccgcuugucccagagccggcgcgaaaucuuuuuauaagaaccucaucuggcuggugaaaaagggcaauagcuacccuaaacuuuccaagagcuauauuaacgauaaggggaaagaaguucuggugcucuggggaauccaucaccccuccaccacagccgaccaacagucucuguaccagaaugcugaugccuacgucuucgugggcaccagccgguauuccaagaaauuuaagccugagauugcuauccgcccgaaagugagagaccaggaggggcggaugaacuacuauuggacgcuggucgaacccggagauaagauuacauucgaggccaccggcaaccuccugguuccucgcuacgcguuugccauggaaagaaaugcugggagcggaaucauuaucucugacacacccgugcacgauugcaacaccaccugucaaacaccuaaaggcgccaucaauacgucccuucccuuccagaacauucauccgaucaccauuggcaagugcccuaaguaugugaaaagcacaaagcugcggcucgcuaccgggcugcgcaauguccccucuauccagagcagaggacuuuuuggcgccauugccggguucaucgagggaggcuggacagggaugguggacggaugguacggcuaucaccaucagaacgaacaaggcuccggguacgcugcggaccugaaaucuacccagaauguuaucgauaagauuacgaacaaagugaauagcgucaucgagaagaugaacacacaguuuaccgccgugggaaaggaguucaaucaccucgaaaaacggauugagaaccugaauaagaaaguugacgauggcuuccuggacaucuggaccuacaacgcugaacuccuggugcuucuggagaaugaacgcacacucgauuaucacgacuccaacgucaagaaccuguacgagaaagugagaaaucagcuuaagaacaaugccaaggagauugggaacggauguuuugaguucuaucauaaaugcgauaauaccuguauggagagcgucaagaacggcacauacgacuauccuaaauacucugaagaggccaagcugaaucgggaagagaucgauggggugaaacucgaguccacgcgcaucuaucaaauucuggcuaucuacagcaccguugccucuucccuggugcucgucgugagccugggcgcgauuuccuuuuggaugugcucuaacggaagccuucagugcagaaucuguauuuga

SEQ ID NO: 204970 - RNA, 1701 nt, Artificial Sequence
  derived and/or modified CDS sequence (opt5) from hemagglutinin__InfluenzaA__AJJ99538
augaaggccauccuggugguccuccuguacaccuucgcuacagccaacgcggacacgcuuugcauuggcuaucacgcuaauaacagcaccgauacaguugacaccgugcuggagaaaaaugugacagucacccauuccgugaaccuccuggaagauaagcacaaugggaaacuuuguaagcugagaggaguugcuccccuccaucugggcaaaugcaacaucgccggguggauucugggaaauccugagugugaaucucucagcacagccuccucuuggagcuacaucguggagaccuccucuagcgacaacggcacgugcuauccgggggauuuuauugacuacgaagaacugcgggagcagcuuuccagcgucucuuccuucgaacgcuuugagaucuuccccaagaccagcucuuggccuaaucacgauuccaacaagggagugacagccgcuuguccccaugccggcgcgaaaucuuuuuauaagaaucugaucuggcucguuaaaaagggcaacagcuacccuaaacuguccaagagcuauauuaaugacaaggggaaagaagugcuuguccuguggggaauccaccaccccuccaccacagccgaucaacagucucucuaccagaacgcugacaccuacguguucgugggcacgagcagauauuccaagaaauuuaagccugagauugccauccggccgaaaguccgcgaucaggaggggagaaugaauuacuauuggacacugguugaacccggagacaagauuaccuucgaggcuacaggcaaccugguggugccucgguacgccuuugcgauggaacgcaacgccgggagcggaaucauuaucucugauacccccguccaugacugcaauaccacaugucaaacgccuaaaggcgcuaucaacaccucccuccccuuccagaauauucacccgaucacaauuggcaagugcccuaaguaugugaaaagcaccaagcugagacuugccacagggcugcggaacguucccucuauccagagccgcggacucuuuggcgcuauugccggguucaucgagggaggcuggaccgggaugguggacggaugguacggcuaucaucaccagaaugaacaaggcuccggguacgccgcugaucugaaaucuacgcagaacgcgaucgacaagauuacaaauaaagucaacagcgugaucgagaagaugaauacccaguuuaccgccguuggaaaggaguucaaccaccuugaaaagagaauugagaaucugaacaagaaaguggaugacggcuuccucgauaucuggacauacaaugcugaacugcugguccuccuggagaacgaacggacccuugacuaucaugauuccaaugugaagaaccuguacgagaaaguccgcaaccagcucaagaauaacgccaaggagacagggaauggauguuuugaguucuaucacaaaugcgacaacacguguauggagagcgugaagaauggcaccuacgauuauccuaaauacucugaagaggccaagcugaacagagagaaaauugacgggguuaaacuugaauccacacggaucuaucaaauccuggcuauuuacagcaccguggccucuucccucguccuggugguuagccugggcgcgaucuccuuuuggaugugcucuaauggaagccuccagugccgcauuuguaucuga

SEQ ID NO: 204971 - RNA, 1701 nt, Artificial Sequence
  derived and/or modified CDS sequence (opt5) from hemagglutinin__InfluenzaA__AJJ99549
augaaggccauccuggugguccuccuguacaccuucgcuacagccaacgcggacacgcuuugcauuggcuaucacgcuaauaacagcaccgauacaguugacaccgugcuggagaaaaaugugacagucacccauuccgugaaccuccuggaagauaagcacaaugggaaacuuuguaagcugagaggaguugcuccccuccaucugggcaaaugcaacaucgccggguggauucugggaaauccugagugugaaucucucagcacagccuccucuuggagcuacaucguggagaccuccucuagcgacaacggcacgugcuauccgggggauuuuauugacuacgaagaacugcgggagcagcuuuccagcgucucuuccuucgaacgcuuugagaucuuccccaagaccagcucuuggccuaaucacgauuccaacaagggagugacagccgcuuguccccaugccggcgcgaaaggcuuuuauaagaaucugaucuggcucguuaaaaaggggaacagcuacccuaaacugucuaaguccuauauuaaugacaagggaaaagaagugcuuguccuguggggcauccaccaccccagcaccacagccgaucaacagucccucuaccagaacgcugacaccuacguguucguggggacgucuagauauagcaagaaauuuaagccugagauugccauccggccgaaaguccgcgaucaggagggaagaaugaauuacuauuggacacugguugaacccggcgacaagauuaccuucgaggcuacagggaaccugguggugccucgguacgccuuugcgauggaacgcaacgccggauccggcaucauuaucagcgauacccccguccaugacugcaauaccacaugucaaacgccuaaaggcgcuaucaacaccucucuccccuuccagaauauucacccgaucacaauugggaagugcccuaaguaugugaaauccaccaagcugagacuugccacaggacugcggaacguucccagcauccagucucgcggccucuuuggggcuauugccggauucaucgagggcggguggaccggaaugguggacggcugguacggcuaucaucaccagaaugaacaagggagcggauacgccgcugaucugaaauccacgcagaacgcgaucgacaagauuacaaauaaagucaacucugugaucgagaagaugaauacccaguuuaccgccguuggcaaggaguucaaccaccuugagaaaagaauugagaaucugaacaagaaaguggaugacggguuccucgauaucuggacauacaaugcugaacugcugguccuccuggagaacgaacggacccuugacuaucaugauagcaaugugaagaaccuguacgagaaaguccgcaaccagcucaagaauaacgccaaggagauuggaaauggcuguuuugaguucuaucacaaaugcgacaacauguguauggaauccgugaagaaugggacauacgauuauccuaaauacagcgaagaggccaagcugaacagagaagagaucgacggcguuaaacuugagucuacgcggaucuaucaaauucuggcuaucuacuccaccgccgcgagcucucucgugcuggucgugucccugggagcuauuagcuuuuggaugugcuccaauggcucucuccagugccgcaucuguauuuga

SEQ ID NO: 204972 - RNA, 1701 nt, Artificial Sequence; identical to SEQ ID NO: 199161
  derived and/or modified CDS sequence (opt5) from hemagglutinin__InfluenzaA__AJJ99560

SEQ ID NO: 204973 - RNA, 1701 nt, Artificial Sequence
  derived and/or modified CDS sequence (opt5) from hemagglutinin__InfluenzaA__AJJ99571
augaaggccauccuggugguccuccuguacaccuucgcuacagccaacgcggacacgcuuugcauuggcuaucacgcuaauaacagcaccgauacaguugacaccgugcuggagaaaaaugugacagucacccauuccgugaaccuccuggaagauaagcacaaugggaaacuuuguaagcugagaggaguugcuccccuccaucugggcaaaugcaacaucgccggguggauucugggaaauccugagugugaaucucucagcacagccuccucuuggagcuacaucguggagaccuccucuagcgacaacggcacgugcuauccgggggauuuuauugacuacgaagaacugcgggagcagcuuuccagcgucucuuccuucgaacgcuuugagaucuuccccaagaccagcucuuggccuaaucacgauuccaacaagggagugacagccgcuuguccccaugccggcgcgaaaucuuuuuauaagaaucugaucuggcucguuaaaaagggcaacagcuacccuaaacuguccaagagcuauauuaaugacaaggggaaagaagugcuuguccuguggggaauccaccaccccuccaccacagccgaucaacagucucucuaccagaacgcugacaccuacguguucgugggcacgagcagauauuccaagaaauuuaagccugagauugccauccggccgaaaguccgcgaucaggaggggagaaugaauuacuauuggacacugguugaacccggagacaagauuaccuucgaggcuacaggcaaccugguggugccucgguacgccuuugcgauggaacgcaacgccgggagcggaaucauuaucucugauacccccguccaugacugcaauaccacaugucaaacgccuaaaggcgcuaucaacaccucccuccccuuccagaauauucacccgaucacaauuggcaagugcccuaaguaugugaaaagcaccaagcugagacuugccacagggcugcggaacguucccucuauccagagccgcggacucuuuggcgcuauugccggguucaucgagggaggcuggaccgggaugguggacggaugguacggcuaucaucaccagaaugaacaaggcuccggguacgccgcugaucugaaaucuacgcagaacgcgaucgacaagauuacaaauaaagucaacagcgugaucgagaagaugaauauucaguuuaccgccguuggaaaggaguucaaccaccuugagaaaagaaucgagaaucugaacaagaaaguggaugacggcuuccucgauauuuggaccuacaaugcugaacugcugguccuccuggagaacgaacggacacuugacuaucaugauuccaaugugaagaaccuguacgagaaaguccgcaaccagcucaagaauaacgccaaggagaucgggaauggauguuuugaguucuaucacaaaugcgacaacaccuguauggaaagcgugaagaauggcacauacgauuauccuaaauacucugaagaggccaagcugaacagagaagagaucgacgggguuaaacuugaguccacgcggauuuaucaaauccuggcuauuuacagcaccguggccucuucccucguccuggugguuagccugggcgcgaucuccuuuuggaugugcucuaauggaagccuccagugccgcauuuguaucuga

SEQ ID NO: 204974 - RNA, 1701 nt, Artificial Sequence
  derived and/or modified CDS sequence (opt5) from hemagglutinin__InfluenzaA__AJJ99582
augaaggccauccuggugguccuccuguacaccuucgcuacagccaacgcggacacgcuuugcauuggcuaucacgcuaauaacagcaccgauacaguugacaccgugcuggagaaaaaugugacagucacccauuccgugaaccuccuggaagauaagcacaaugggaaacuuuguaagcugagaggaguugcuccccuccaucugggcaaaugcaacaucgccggguggauucugggaaauccugagugugaaucucucagcacagccuccucuuggagcuacaucguggagaccuccucuagcgacaacggcacgugcuauccgggggauuuuauugacuacgaagaacugcgggagcagcuuuccagcgucucuuccuucgaacgcuuugagaucuuccccaagaccagcucuuggccuaaucacgauuccaacaagggagugacagccgcuuguccccaugccggcgcgaaaucuuuuuauaagaaucugaucuggcucguuaaaaagggcaacagcuacccuaaacuguccaagagcuauauuaaugacaaggggaaagaagugcuuguccuguggggaauccaccaccccuccaccucugccgaucaacagagccucuaccagaacgcugacgccuacguguucgugggcacauccagauauagcaagaaauuuaagccugagauugcuauccggccgaaaguccgcgaucaggaggggagaaugaauuacuauuggacccugguugaacccggagacaagauuacguucgaggccacaggcaaccugguggugccucgguacgcguuugccauggaacgcaacgcugggucuggaaucauuaucuccgauacccccguccaugacugcaauacaaccugucaaaccccuaacggcgccaucaauacaagccuccccuuccagaacauucacccgaucacgauuggcaaaugcccuaaguaugugaagucuaccaaacugagacuugcuacagggcugcggaauguucccagcauccagucccgcggacucuuuggcgccauugccggguucaucgagggaggcuggaccgggaugguggacggaugguacggcuaucaucaccagaacgaacaaggcucuggguacgcugcggaucuuaagagcacacagaaugccaucgacaaaauuaccaacaaggucaauuccgugaucgagaaaaugaacacgcaguuuacagcuguuggaaaggaguucaaucaccuugaaaagagaauugagaaccugaauaaaaagguggaugacggcuuccucgauaucuggaccuacaacgccgaacugcugguccuccuggagaaugaacggacccuugacuaucaugauagcaacgugaaaaaccuguacgagaagguccgcucucagcucaaaaauaacgccaaggagauugggaauggauguuuugaguucuaucacaagugcgacaacacauguauggaguccgugaaaaauggcaccuacgauuauccuaaguacagcgaagaggcuaaacugaacagagaagagaucgacgggguuaagcuggagucuacacggaucuaucaaauucuggccaucuacuccacgguggcgagcucccucguccuggugguuucucugggcgcuauuagcuuuuggaugugcuccaauggaucucuccagugccgcaucuguauuuga

SEQ ID NO: 204975 - RNA, 1701 nt, Artificial Sequence; identical to SEQ ID NO: 194983
  derived and/or modified CDS sequence (opt5) from hemagglutinin__InfluenzaA__AJJ99593

SEQ ID NO: 204976 - RNA, 1701 nt, Artificial Sequence
  derived and/or modified CDS sequence (opt5) from hemagglutinin__InfluenzaA__AJJ99604
augaaggccauccuggugguccuccuguacaccuucgcuacagccaacgcggacacgcuuugcauuggcuaucacgcuaauaacagcaccgauacaguugacaccgugcuggagaaaaaugugacagucacccauuccgugaaccuccuggaagauaagcacaaugggaaacuuuguaagcugagaggaguugcuccccuccaucugggcaaaugcaacaucgccggguggauucugggaaauccugagugugaaucucucagcacagccuccucuuggagcuacaucguggagaccuccucuagcgacaacggcacgugcuauccgggggauuuuauugacuacgaagaacugcgggagcagcuuuccagcgucucuuccuucgaacgcuuugagaucuuccccaagaccagcucuuggccuaaucacgauuccaacaagggagugacagccgcuuguccccaugccggcgcgaaaucuuuuuauaagaaucugaucuggcucguuaaaaagggcaacagcuacccuaaacuguccaagagcuauauuaaugacaaggggaaagaagugcuuguccuguggggaauccaccaccccuccaccucugccgaucaacagagccucuaccagaacgcugacgccuacguguucgugggcacauccagauauagcaagaaauuuaagccugagauugcuauccggccgcgcgucagagaucaggaggggcggaugaauuacuauuggacccugguugaacccggagacaaaauuacguucgaggccacaggcaaccugguggugccucgcuacgcguuugccauggaaagagaugcugggucuggaaucauuaucuccgacacccccguccaugacugcaacacaaccugucaaaccccuaagggcgccaucaauacaagccuccccuuccagaacauucacccgaucacgauuggcaaaugcccuaaguaugugaagucuaccaaacugcggcuugcuacagggcugcgcaauguucccagcauccaguccagaggacucuuuggcgccauugccggguucaucgagggaggcuggaccgggaugguggauggaugguacggcuaucaucaccagaacgaacaaggcucuggguacgcugcggaccuuaagagcacacagaaugccaucgaugagauuaccaacaaagucaauuccgugaucgagaagaugaacacgcaguuuacagcuguuggaaaagaguucaaucaccuggagaagcggauugaaaaccugaauaagaaaaucgacgauggcuuccucgacauuuggaccuacaacgccgagcugcuggugcuccuggaaaaugagcgcacccuugauuaucaugacagcaacgucaagaaucuguacgagaaagugagaucucagcucaagaacaacgccaaagaaaucgggaauggauguuuugaguucuaucacaagugcgauaacacauguauggaauccgucaagaauggcaccuacgacuauccuaaauacagcgaggaagcuaagcugaaccgggaggagaucgauggggugaaacuugaaucuacacgcauuuaucaaauccuggccauuuacuccacgguugcgagcucccucgugcuggucgugucucugggcgcuaucagcuuuuggaugugcuccaauggaucucuccagugcagaauuuguaucuga

SEQ ID NO: 204977 - RNA, 1698 nt, Artificial Sequence
  derived and/or modified CDS sequence (opt5) from hemagglutinin__InfluenzaA__AJJ99616
augaaggugaaacugcucguccugcuuugcaccuucacagccacguacgcugacaccaucuguauuggcuaucacgccaacaauagcacagauaccguugacacagugcuggagaagaacgugaccgucacacauuccgugaaucuccuggaaaacucucacaaugggaaacuuugccugcucaagggaaucgcgccccugcagcugggcaacuguagcguugcuggguggauucucggaaauccugagugcgaacugcuuaucuccaaagagucuuggagcuacauuguggaaaagccgaaccccgagaauggcaccuguuauccugggcauuuugccgauuacgaggaacugagagagcaacucuccucugucagcuccuucgaacgguuugagaucuuccccaaggagagcucuuggccuaaccacacggugaccggaguuuccgccagcugcucucauaauggcgaaaacuccuuuuaucgcaaucugcuuuggcugacaggcaaaaacgggcucuaccccaaucugagcaagucuuaugcuaacaacaaagagaaggaagugcugguccucuggggagugcaccacccuccgaauaucgccaaccagaaaacccuguaccauacagagaaugcuuacguguccgucguuagcucccacuauucuagaaaacuuacccccgaaauugccaagcggccuaaggugcgcgaccaggagggcagaaucaacuacuauuggacgcugcucgagcccggggauacaauuaucuucgaagcgaauggaaaccugauugccccucgguacgcuuuugcccuuagccgcggcuucggguccggaaucauuaauagcaacgcucccauggacaagugugaugccaaaugccagaccccgcaaggcgcgaucaauucuucccugccuuuucagaacgugcaucccgucacaaucggcgaguguccuaaguaugugagaagcgccaaacuccggaugguuaccgggcugcgcaauauucccucuauccagagcagaggacuguucggcgcuauugccggguuuaucgaaggaggcuggaccgggaugguggacggaugguacggcuaucaccaccagaacgagcaaggcuccggguacgcugccgaucagaagucuacacagaaugccauuaacggaaucacgaauaaagucaacagcgugaucgaaaagaugaacacccaguucacagcuguuggcaaggaguuuaauaaacucgagcggcgcauggaaaaccugaauaagaaaguggacgauggguucauugacaucuggaccuacaacgcggagcuucugguccuccuggaaaaugagagaacacuugauuuccaugacuccaacgugaagaaucuguaugaaaaagucaagagccaacucaagaacaaugccaaagagauuggaaacggcugcuuugaguucuaccacaaguguaaugacgaaugcauggagucugugaaaaacgggaccuaugauuaccccaaguauuccgaagagagcaaacugaaucgggagaagaucgacggcguuaagcuggaaucuaugggaguguaccagauucucgcuaucuauuccacggucgccagcucccuggugcuucugguuucucucggcgccaucagcuuuuggaugugcuccaacgggucucugcagugucgcauuugcaucuga

SEQ ID NO: 204978 - RNA, 1698 nt, Artificial Sequence; identical to SEQ ID NO: 195698
  derived and/or modified CDS sequence (opt5) from hemagglutinin__InfluenzaA__AJJ99628

SEQ ID NO: 204979 - RNA, 1698 nt, Artificial Sequence
  derived and/or modified CDS sequence (opt5) from hemagglutinin__InfluenzaA__AJJ99640
augaaggugaaacugcucguccugcuuugcaccuucacagccacguacgcugacaccaucuguauuggcuaucacgccaacaauagcacagauaccguugacacagugcuggagaagaacgugaccgucacacauuccgugaaucuccuggaaaacucucacaaugggaaacuuugccugcucaagggaaucgcgccccugcagcugggcaacuguagcguugcuggguggauucucggaaauccugagugcgaacugcuuaucuccaaagagucuuggagcuacauuguggaaaagccgaaccccgagaauggcaccuguuauccugggcauuuugccgauuacgaggaacugagagagcaacucuccucugucagcuccuucgaacgguuugagaucuuccccaaggagagcucuuggccuaaccacacggugaccggaguuuccgccagcugcucucauaauggcgaaaacuccuuuuaucgcaaucugcuuuggcugacaggcaaaaacgggcucuaccccaaucugagcaagucuuaugcuaacaacaaagagaaggaagugcugguccucuggggagugcaccacccuccgaauaucgccaaccagaaaacccuguaccauacagagaaugcuuacguguccgucguuagcucccacuauucuagaaaguucacccccgaaauugccaagcggccuaaagugcgcgaccaggagggcagaaucaacuacuauuggacgcuucuggagcccggggauacaauuaucuuugaagcgaauggaaaccucauugccccucgguacgcuuucgcccugagccgcggcuuuggguccggaaucauuaauagcaacgcucccauggacaagugugaugccaaaugccagaccccgcaaggcgcgaucaauucuucccuuccuuuccagaacgugcaucccgucacaaucggcgaguguccuaaguaugugagaagcgccaaacugcggaugguuaccgggcuccgcaauauucccucuauccagagcagaggacuguuuggcgcuguggccggguucauugaaggaggcuggaccgggauggucgacggaugguacggcuaucaccaccagaacgagcaaggcuccggguacgcugccgaucagaagucuacacagaaugccaucaacggaauuacgaauaaagugaacagcguuaucgaaaagaugaacacccaguuuacagcugugggcaaggaguucaauaaacuggagcggcgcauggaaaaccucaauaagaaagucgacgauggguucaucgacauuuggaccuacaacgcggagcugcuugugcugcucgaaaaugagagaacacuggauuuucaugacuccaacgucaagaaucuuuaugaaaaaguuaagagccaacugaagaacaaugccaaagagaucggaaacggcugcuucgaguuuuaccacaaguguaaugacgaaugcauggagucugugaaaaacgggaccuaugauuaccccaaguauuccgaagagagcaaacucaaucgggagaagauugacggcgugaagcuggaaucuaugggagucuaccagauccuggcuauuuauuccacgguggccagcucccucguucugcuugugucucugggcgccaucagcuucuggaugugcuccaacgggucucuccagugucgcaucugcauuuga

SEQ ID NO: 204980 - RNA, 1698 nt, Artificial Sequence; identical to SEQ ID NO: 195698
  derived and/or modified CDS sequence (opt5) from hemagglutinin__InfluenzaA__AJJ99652

SEQ ID NO: 204981 - RNA, 1698 nt, Artificial Sequence
  derived and/or modified CDS sequence (opt5) from hemagglutinin__InfluenzaA__AJJ99664
augaaggccaaacugcucgugcugcuuugcaccuucacagcuacguacgccgacaccaucuguauuggcuaucacgcgaacaauagcacagauaccgucgacacaguucuggagaagaacgugaccgugacacauuccgucaaucuccuggaaaacucucacaaugggaaacuuugccugcucaagggaaucgcuccccugcagcugggcaacuguagcauugccggguggauccucggaaauccugagugcgaacugcuuauuuccaaagagucuuggagcuacaucguggaaaagccgaaccccgagaauggcaccuguuauccugggcauuuugccgauuacgaggaacugagagagcaacucuccucuguuagcuccuucgaacgguuugagaucuuccccaaggagagcucuuggccuaaccacacggugaccggagucuccgcuagcugcucucauaauggcgaauccagcuuuuaucgcaaccugcuuuggcugacaggcaaaaaugggcucuaccccaaccugucuaaguccuaugccaauaacaaagagaaggaagugcugguucucuggggagugcaccacccuccgaacauuggcgaccagaaagcucuguaccauaccgagaaugccuacgucagcgugguguccucucacuauagcagaaaguucacacccgaaaucgcgaagcggccuaaaguccgcgaucaggaggggagaauuaacuacuauuggacccuucuggagcccggagacacgaucauuuuugaagccaauggcaaccucaucgcuccucgguacgccuucgcucugucccgcggguuuggaagcggcauuaucaauucuaacgcccccauggauaagugugacgcgaaaugccagacaccgcaaggcgccaucaauuccagccuuccuuuccagaacguucaucccgugaccauuggggaguguccuaaguaugugagaucugcuaaacugcggauggucacaggacuccgcaauauccccagcauucaguccagaggccuguuuggggccaucgcuggauucauugaaggcggguggaccggaaugguggauggcugguacggcuaucaccaccagaacgagcaagggucuggauacgccgccgaccaaaagagcacccagaaugcuaucaacggcaucacaaauaaaguuaacuccgugauugaaaagaugaauacgcaguuuaccgcggucgggaaggaguucaacaaacuggagcggcgcauggaaaaccucaauaagaaaguggaugacggauucaucgauauuuggacauacaacgccgagcugcuuguucugcucgaaaaugagagaacccuggacuuucaugacagcaacgugaagaaucuuuaugaaaaagucaagucucagcugaagaacaaugcuaaagagaucggcaacgggugcuucgaguuuuaccacaaguguaaugaugaaugcauggaguccgugaaaaacggcacauaugacuaccccaaguauagcgaagagucuaaacucaaucgggagaagauugauggagucaagcuggaauccaugggcguguaccagauccuggccaucuauagcaccguugccuccucucucgugcugcuugucagccugggggcuauuuccuucuggaugugcucuaacggaagccuccagugucgcaucugcauuuga

SEQ ID NO: 204982 - RNA, 1701 nt, Artificial Sequence
  derived and/or modified CDS sequence (opt5) from hemagglutinin__InfluenzaA__AJJ99675
augaaggccauccugcucgugcugcuuuacaccuucgcuacagccaaagcggacacgcugugcauuggcuaucacgcuaacaauagcaccgauacagucgacaccguucucgagaagaacgugacagugacccauuccgucaaucugcuugaagauaaacacaacgggaagcuguguaaacucagaggaguggcgccccugcaucugggcaagugcaauaucgccggguggauucucggaaacccugagugugaaucucugagcacagcuuccucuuggagcuacaucguugagaccuccucuagcgacaauggcacgugcuauccgggggauuuuauuaacuacgaagaacuucgggagcagcuguccagcgugucuuccuucgaacgcuuugagaucuuccccaagaccagcucuuggccuaaucacgacuccaacaaaggagucacagccgcuugucccagagccggcgccaagagcuuuuauaaaaaucucaucuggcuggugaagaaaggcaacucuuacccuaaacuuuccaagagcuauauuaaugauaaggggaaggaaguucuggugcucuggggaauccaucaccccuccaccacagccgaccaacagucucuguaccagaacgcugaugccuacgucuucgugggcaccagccgguauuccaaaaaguuuaaaccugagauugcuauccgcccgaaggugagagaccaggaggggcggaugaauuacuauuggacgcuggucgaacccggagauaaaauuacauucgaggccaccggcaaccuccugguuccucgcuacgcguuugccauggaaagaaacgcugggagcggaaucauuaucucugacacacccgugcacgauugcaauaccaccugucaaacaccuaagggcgccaucaacacgucccuucccuuccagaauauucauccgaucaccauuggcaagugcccuaaauaugucaagagcacaaaacugcggcucgcuaccgggcugcgcaacgugcccucuauccagagcagaggacuuuuuggcgccauugccggguucaucgagggaggcuggacagggaugguggacggaugguacggcuaucaccaucagaaugaacaaggcuccggguacgcugcggaccugaagucuacccagaacgccaucgauaaaauuacggacaagguuaauagcgugaucgagaagaugaacacacaguuuaccgcugucggaaaagaguucaaucaccucgaaaagcggauugagaaccugaauaaaaagguggaugacggcuuccuggauaucuggaccuacaacgccgaacuccugguucuucuggagaaugaacgcacacucgacuaucacgauuccaacgugaaaaaucuguacgagaaggucagaaaccagcuuaagaacaaugccaaagagauugggaacggauguuuugaguucuaucauaagugcgacaauaccuguauggagagcgugaaaaacggcacauacgauuauccuaaguacucugaagaggcuaaacugaaucgggaagagaucgacggggucaagcucgaguccacgcgcaucuaucaaauucuggccaucuacagcaccguggcgucuucccugguucucguggucagccugggcgcuauuuccuuuuggaugugcucuaacggaagccuucagugcagaaucuguauuuga

SEQ ID NO: 204983 - RNA, 1701 nt, Artificial Sequence
  derived and/or modified CDS sequence (opt5) from hemagglutinin__InfluenzaA__AJJ99686
augaccgccauccugcucgugcugcuuuacacauucgcuacggccaacgcggacacccugugcauuggcuaucacgcuaauaacagcacagauaccgucgacacaguucucgagaagaaugugaccgugacacauuccgucaaccugcuugaagauaaacacaaugggaagcuguguaaacucagaggaguggcgccccugcaucugggcaagugcaacaucgccggguggauucucggaaauccugagugugaaucucugagcaccgcuuccucuuggagcuacaucguugagacguccucuagcgacaacgggaccugcuauccgggcgauuuuauuaauuacgaagaacuucgggagcagcuguccagcgugucuuccuucgaacgcuuugagaucuuccccaaaacaagcucuuggccuaaccacgacuccaauaagggagucaccgccgcuugucccagagccggcgccaagagcuuuuauaaaaaccucaucuggcuggugaagaaaggcaauucuuacccuaaacuuuccaagagcuauauuaacgauaaggggaaggaaguucuggugcucuggggaauccaucaccccuccacaaccgccgaccaacagucucuguaccagaaugcugaugccuacgucuucgugggcacgagccgguauuccaaaaaguuuaaaccugagauugcuauccgcccgaaggugagagaccaggaggggcggaugaacuacuauuggacacuggucgaacccggagauaaaauuaccuucgaggccacaggcaaccuccugguuccucgcuacgcguuugccauggaaagaaaugcugggagcggaaucauuaucucugacacccccgugcacgauugcaacaccacaugucaaacgccuaagggcgccaucaauaccucccuucccuuccagaacauucauccgaucacaauuggcaaaugcccuaaguaugucaagagcaccaaacugcggcucgcuacagggcugcgcaaugugcccucuauccagagcagaggacuuuuuggcgccauugccggguucaucgagggaggcuggaccgggaugguggacggaugguacggcuaucaccaucagaacgaacaaggcuccggguacgcugcggaccugaagucuacgcagaaugccaucgauaaaauuacaaacaagguuaauagcgugaucgagaaaaugaacacccaguuuaccgcugucggaaaggaguucaaucaccucgaaaagcggauugagaaccugaauaaaaagguggacgauggcuuccuggacaucuggacauacaacgccgaacuccugguucuucuggagaaugaacgcacccucgauuaucacgacuccaacgugaaaaaccuguacgagaaggucagaaaucagcuuaaaaacaaugccaaggagauugggaacggauguuuugaguucuaucauaagugcgauaauacauguauggagagcgugaaaaacggcacguacgacuauccuaaguacucugaagaggcuaaacugaaucgggaagagaucgauggggucaagcucgaguccacccgcaucuaucaaauucuggccaucuacagcacaguggcgucuucccugguucucguggucagccugggcgcuauuuccuuuuggaugugcucuaacggaagccuucagugcagaaucuguauuuga

SEQ ID NO: 204984 - RNA, 1701 nt, Artificial Sequence
  derived and/or modified CDS sequence (opt5) from hemagglutinin__InfluenzaA__AJJ99697
augaaggccauccuggugguccuccuguacaccuucgcuacagccaacgcggacacgcuuugcauuggcuaucacgcuaauaacagcaccgauacaguugacaccgugcuggagaaaaaugugacagucacccauuccgugaaccuccuggaagauaagcacaaugggaaacuuuguaagcugagaggaguugcuccccuccaucugggcaaaugcaacaucgccggguggauucugggaaauccugagugugaaucucucagcacagccuccucuuggagcuacaucguggagaccuccucuagcgacaacggcacgugcuauccgggggauuuuauugacuacgaagaacugcgggagcagcuuuccagcgucucuuccuucgaacgcuuugagaucuuccccaagaccagcucuuggccuaaucacgauuccaacaagggagugacagccgcuuguccccaugccggcgcgaaaucuuuuuauaagaaucugaucuggcucguuaaaaagggcaacagcuacccuaaacuguccaagagcuauauuaaugacaaggggaaagaagugcuuguccuguggggaauccaccaccccuccaccacagccgaucaacagucucucuaccagaacgcugacaccuacguguucgugggcacgagcagauauuccaagaaauuuaagccugagauugccauccggccgaaaguccgcgaucaggaggggagaaugaauuacuauuggacacugguugaacccggagacaagauuaccuucgaggcuacaggcaaccugguggugccucgguacgccuuugucauggaacgcaacgcggggagcggaaucauuaucucugauacccccgugcaugacugcaauaccacaugucaaacgccuaaaggcgccaucaacaccucccuccccuuccagaauauucacccgaucacaauuggcaagugcccuaaguauguuaaaagcaccaagcugagacuugcuacagggcugcggaacgugcccucuauccagagccgcggacucuuuggcgccauugcuggguucaucgagggaggcuggaccgggauggucgacggaugguacggcuaucaucaccagaaugaacaaggcuccggguacgccgccgaucugaaaucuacgcagaacgcuaucgacaagauuacaaauaaagugaacagcguuaucgagaagaugaauacccaguuuaccgcggugggaaaggaguucaaccaccuugaaaagagaauugagaaucugaacaagaaagucgaugacggcuuccucgauaucuggacauacaaugccgaacugcuggugcuccuggagaacgaacggacccuugacuaucaugauuccaaugucaagaaccuguacgagaaagugcgcaaccagcucaagaauaacgcuaaggagacagggaauggauguuuugaguucuaucacaaaugcgacaacacguguauggagagcguuaagaauggcaccuacgauuauccuaaauacucugaagaggccaagcugaacagagagaaaauugacggggugaaacuugaauccacacggaucuaucaaauccuggccauuuacagcaccgucgcuucuucccucgugcugguugugagccugggcgccaucuccuuuuggaugugcucuaauggaagccuccagugccgcauuuguaucuga

SEQ ID NO: 204985 - RNA, 1701 nt, Artificial Sequence
  derived and/or modified CDS sequence (opt5) from hemagglutinin__InfluenzaA__AJJ99708
augaaggccauccuggugguccuccuguacaccuucgcuacagccaacgcggacacgcuuugcauuggcuaucacgcuaauaacagcaccgauacaguugacaccgugcuggagaaaaaugugacagucacccauuccgugaaccuccuggaagauaagcacaaugggaaacuuuguaagcugagaggaguugcuccccuccaucugggcaaaugcaacaucgccggguggauucugggaaauccugagugugaaucucucagcacagccuccucuuggagcuacaucguggagaccuccucuagcgacaacggcacgugcuauccgggggauuuuauugacuacgaagaacugcgggagcagcuuuccagcgucucuuccuucgaacgcuuugagaucuuccccaagaccagcucuuggccugaucacgacuccaauaagggagugacagccgcuuguccccaugccggcgcgaaaucuuuuuauaagaaccugaucuggcucguuaaaaagggcaauagcuacccuaaacuguccaagagcuauauuaacgauaaggggaaagaagugcuuguccuguggggaauccaccaccccuccaccacagccgaccaacagucucucuaccagaaugcugauaccuacguguucgugggcacgagcagauauuccaagaaauuuaagccugagauugccauccggccgaaaguccgcgaccaggaggggagaaugaacuacuauuggacacugguugaacccggagauaagauuaccuucgaggcuacaggcaaucugguggugccucgguacgccuuugucauggaacgcaacgcggggagcggaaucauuaucucugacacccccgugcaugacugcaacaccacaugucaaacgccuaaaggcgccaucaauaccucccuccccuuccagaacauucacccgaucacaauuggcaagugcccuaaguauguuaaaagcaccaagcugagacuugcuacagggcugcggaaugugcccucuauccagagccgcggacucuuuggcgccauugcuggguucaucgagggaggcuggaccgggauggucgauggaugguacggcuaucaucaccagaacgaacaaggcuccggguacgccgccgaccugaaaucuacgcagaaugcuaucgauaagauuacaaacaaagugaauagcguuaucgagaagaugaacacccaguuuaccgcggugggaaaggaguucaaucaccuugaaaagagaauugagaaccugaauaagaaagucgacgauggcuuccucgacaucuggacauacaacgccgaacugcuggugcuccuggagaaugaacggacccuugauuaucaugacuccaacgucaagaaucuguacgagaaagugcgcaaccagcucaagaacaaugcuaaggagacagggaacggauguuuugaguucuaucacaaaugcgauaauacguguauggagagcguuaagaacggcaccuacgacuauccuaaauacucugaagaggccaagcugaauagagagaaaauugauggggugaaacuugaauccacacggaucuaucaaauccuggccauuuacagcaccgucgcuucuucccucgugcugguugugagccugggcgccaucuccuuuuggaugugcucuaacggaagccuccagugccgcauuuguaucuga

SEQ ID NO: 204986 - RNA, 1701 nt, Artificial Sequence
  derived and/or modified CDS sequence (opt5) from hemagglutinin__InfluenzaA__AJJ99719
augaaggccauccugguggucaugcucuacaccuucgcuacagccaacgcggacacgcugugcauuggcuaucacgcuaauaacagcaccgauacaguugacaccgugcuugagaaaaaugugacagucacccauuccgugaaccugcucgaagauaagcacaaugggaaacuguguaaacuuagaggaguugcuccccugcaucucggcaaaugcaacaucgccggguggauucugggaaauccugagugugaaucucugagcacagccuccucuuggagcuacaucguggagaccuccucuagcgacaacggcacgugcuauccgggggauuuuauugacuacgaagaacuccgggagcagcuguccagcgucucuuccuucgaacgcuuugagaucuuccccaagaccagcucuuggccuaaucacgauuccaacaagggagugacagccgcuuguccccaugccggcgcgaaaggcuuuuauaagaaucuuaucuggcugguuaaaaaggggaacagcuacccuaaacucucuaaguccuauauuaaugacaagggaaaagaagugcugguccuuuggggcauccaccaccccagcaccacagccgaucaacagucccuguaccagaacgcugacaccuacguguucguggggacgucuagauauagcaagaaauuuaagccugagauugccauccggccgaaaguccgcgaucaggagggaagaaugaauuacuauuggacacucguugaacccggcgacaagauuaccuucgaggcuacagggaaccugguggugccucgguacgccuuugcgauggaacgcaacgccggauccggcaucauuaucagcgauacccccguccaugacugcaauaccacaugucaaacgccuaaaggcgcuaucaacaccucucugcccuuccagaauauucacccgaucacaauugggaagugcccuaaguaugugaaauccaccaagcucagacuggccacaggacuucggaacguucccagcauccagucucgcggccuguuuggggcuauugccggauucaucgagggcggguggaccggaaugguggacggcugguacggcuaucaucaccagaaugaacaagggagcggauacgccgcugaucucaaauccacgcagaacgcgaucgacaagauuacaaauaaagucaacucugugaucgagaagaugaauacccaguuuaccgccguuggcaaggaguucaaccaccuggaaaagagaauugagaaucuuaacaagaaaguggaugacggguuccuggauaucuggacauacaaugcugaacuccugguccugcucgagaacgaacggacccuggacuaucaugauagcaaugugaagaaccuuuacgagaaaguccgcaaccagcugaagaauaacgccaaggagauuggaaauggcuguuuugaguucuaucacaaaugcgacaacacauguauggaguccgugaagaaugggacguacgauuauccuaaauacagcgaagaggccaagcucaacagagaagagaucgagggcguuaaacuggaaucuacccggaucuaucaaauucuugcuaucuacuccacaguggccagcucucugguccucgugguuucccugggagcgauuagcuuuuggaugugcuccaauggcucucugcagugccgcaucuguauuuga

SEQ ID NO: 204987 - RNA, 1701 nt, Artificial Sequence
  derived and/or modified CDS sequence (opt5) from hemagglutinin__InfluenzaA__AJJ99730
augaaggccauccugguggucaugcucuacaccuucgcuacagccaacgcggacacgcugugcauuggcuaucacgcuaauaacagcaccgauacaguugacaccgugcuugagaaaaaugugacagucacccauuccgugaaccugcucgaagauaagcacaaugggaaacuguguaaacuuagaggaguugcuccccugcaucucggcaaaugcaacaucgccggguggauucugggaaauccugagugugaaucucugagcacagccuccucuuggagcuacaucguggagaccuccucuagcgacaacggcacgugcuauccgggggauuuuauugacuacgaagaacuccgggagcagcuguccagcgucucuuccuucgaacgcuuugagaucuuccccaagaccagcucuuggccuaaucacgauuccaacaagggagugacagccgcuuguccccaugccggcgcgaaaggcuuuuauaagaaucuuaucuggcugguuaaaaaggggaacagcuacccuaaacucucuaaguccuauauuaaugacaagggaaaagaagugcugguccuuuggggcauccaccaccccagcaccacagccgaucaacagucccuguaccagaacgcugacaccuacguguucguggggacgucuagauauagcaagaaauuuaagccugagauugccauccggccgaaaguccgcgaucaggagggaagaaugaauuacuauuggacacucauugaacccggcgacaagaucaccuucgaggcuacagggaaccugguugugccucgguacgccuuugcgauggaacgcaacgccggauccggcauuaucaucagcgauacccccgugcaugacugcaauaccacaugucaaacgccuaaaggcgcuauuaacaccucucugcccuuccagaauauccacccgauuacaaucgggaagugcccuaaguaugucaaauccaccaagcucagacuggccacaggacuucggaacgugcccagcauucagucucgcggccuguuuggggcuaucgccggauucaucgagggcggguggaccggaaugguugacggcugguacggcuaucaucaccagaaugaacaagggagcggauacgccgcugaucucaaauccacgcagaacgcgauugacaagaucacaaauaaagugaacucugucauugagaagaugaauacccaguuuaccgccgugggcaaggaguucaaccaccuggaaaagagaaucgagaaucuuaacaagaaaguugaugacggguuccuggauauuuggacauacaaugcugaacuccuggugcugcucgagaacgaacggacccuggacuaucaugauagcaaugucaagaaccuuuacgagaaagugcgcaaccagcugaagaauaacgccaaggagaucggaaauggcuguuuugaguuccaccauaaaugcgacaacacauguauggaguccgucaagaaugggacguaugauuacccuaaauauagcgaagaggccaagcucaacagagaagagaucgacggcgugaaacuggagucuacccggauuuaccaaauccuugcuauuuauuccacaguugccagcucucuggugcucgucgugucccugggagcgaucagcuuuuggaugugcuccaauggcucucugcagugccgcauuuguaucuga

SEQ ID NO: 204988 - RNA, 1701 nt, Artificial Sequence; identical to SEQ ID NO: 199114
  derived and/or modified CDS sequence (opt5) from hemagglutinin__InfluenzaA__AJJ99741

SEQ ID NO: 204989 - RNA, 1701 nt, Artificial Sequence; identical to SEQ ID NO: 195905
  derived and/or modified CDS sequence (opt5) from hemagglutinin__InfluenzaA__AJJ99752

SEQ ID NO: 204990 - RNA, 1701 nt, Artificial Sequence; identical to SEQ ID NO: 194741
  derived and/or modified CDS sequence (opt5) from hemagglutinin__InfluenzaA__AJJ99763

SEQ ID NO: 204991 - RNA, 1698 nt, Artificial Sequence
  derived and/or modified CDS sequence (opt5) from hemagglutinin__InfluenzaA__AJJ99775
augaaggugaaacugcucguccugcuuugcaccuucacagccacguacgcugacaccaucuguauuggcuaucacgccaacaauagcacagauaccguugacacagugcuggagaagaacgugaccgucacacauuccgugaaucuccuggaaaacucucacaaugggaaacuuugccugcucaagggaaucgcgccccugcagcugggcaacuguagcguugcuggguggauucucggaaauccugagugcgaacugcuuaucuccaaagagucuuggagcuacauuguggaaaagccgaaccccgagaauggcaccuguuauccugggcauuuugccgauuacgaggaacugagagagcaacucuccucugucagcuccuucgaacgguuugagaucuuccccaaggagagcucuuggccuaaccacacggugaccggaguuuccgccagcugcucucauaauggcgaaaacuccuuuuaucgcaaucugcuuuggcugacaggcaaaaacgggcucuaccccaaucugagcaagucuuaugcuaacaacaaagagaaggaagugcugguccucuggggagugcaccacccuccgaauaucgccgaccagaaaacccuguaccauacagagaacgcuuacguguccgucguuagcucccacuauucuagaaaguucacccccgaaauugccaagcggccuaaagugcgcgaucaggagggcagaaucaauuacuauuggacgcuucuggagcccggggacacaauuaucuuugaagcgaacggaaaucucauugccccucgguacgcuuucgcccugagccgcggcuuuggguccggaaucauuaacagcaaugcucccaccgauaagugugacgccaaaugccagacaccgcaaggcgcgaucaacucuucccuuccuuuccagaaugugcaucccgucaccaucggcgaguguccuaaguaugugagaagcgccaaacugcggaugguuaccgggcuccgcaacauucccucuauccagagcagaggacuguuuggcgcuauugccggguucaucgaaggaggcuggacagggaugguggauggaugguacggcuaucaccaccagaaugagcaaggcuccggguacgcugccgaccagaagucuacgcagaacgccauuaauggaaucaccaacaaagucaauagcgugaucgaaaagaugaacacacaguuuaccgcuguuggcaaggaguucaacaaacuggagcggcgcauggaaaaucucaacaagaaaguggaugacggguucauugauaucuggacauacaaugcggagcugcuuguccugcucgaaaacgagagaacccuggacuuucaugacuccaaugugaagaaccuuuaugaaaaagucaagagccaacugaagaauaacgccaaagagauuggaaauggcugcuucgaguuuuaccacaaguguaacgaugaaugcauggagucugugaaaaaugggacguaugacuaccccaaguauuccgaagagagcaaacucaaccgggagaagaucgauggcguuaagcuggaaucuaugggaguguaccagauucuggcuaucuauuccacagucgccagcucccucgugcugcuuguuucucugggcgccaucagcuucuggaugugcuccaaugggucucuccagugucgcauuugcaucuga

SEQ ID NO: 204992 - RNA, 1701 nt, Artificial Sequence
  derived and/or modified CDS sequence (opt5) from hemagglutinin__InfluenzaA__AJJ99786
augaaggccauccuggugguccuccuguacaccuucgcuacagccaacgcggacacgcuuugcauuggcuaucacgcuaauaacagcaccgauacaguugacaccgugcuggagaagaaugugacagucacccauuccgugaaccuccuggaagauaagcacaaugggaaacuuuguaagcugagaggaguugcuccccuccaucugggcaaaugcaacaucgccggguggauucugggaaauccugagugugaaucucucagcacagccuccucuuggagcuacaucguggagaccuccucuagcgacaacggcacgugcuauccgggggauuuuauugacuacgaagaacugcgggagcagcuuuccagcgucucuuccuucgaacgcuuugagaucuuccccaagaccagcucuuggccuaaucacgauuccaacaagggagugacagccgcuuguccccaugccggcgcgaaauccuuuuauaagaaucugaucuggcucguuaaaaagggcaacucuuacccuaaacuguccaagagcuauauuaaugacaaggggaaagaagugcuuguccuguggggaauccaccaccccuccaccucugccgaucaacagagccucuaccagaacgcugacgccuacguguucgugggcacauccagauauagcaagaaauuuaagccugagauugcuauccggccgaaaguccgcgaucaggaggggagaaugaauuacuauuggacccugguugaacccggagacaagauuacguucgaggccacaggcaaccugguggugccucgguacgcguuugccauggaacgcgaugcugggucuggaaucauuaucuccgacacccccguccaugacugcaacacaaccugucaaaccccuaaaggcgccaucaauacaagccuccccuuccagaacauucacccgaucacgauuggcaagugcccuaaguaugugaaaucuaccaagcugagacuugcuacagggcugcggaauauccccagcauucagucccgcggacucuuuggcgccaucgccggguucaucgagggaggcuggaccgggaugguugauggaugguacggcuaucaucaccagaacgaacaaggcucuggguacgcugcggaccugaaaagcacacagaaugccauugaugagaucaccaacaaggugaauagcgucauugagaaaaugaacacgcaguuuacagcugugggaaaggaguucaaucaccuugagaagagaaucgaaaaccugaauaaaaagauugacgauggcuuccucgacaucuggaccuacaacgccgagcugcugguucuccuggaaaaugagcggacccuugauuaucaugacagcaacgugaaaaaucuguacgagaagguccgcucucagcucaaaaacaacgccaaggaaaucgggaauggauguuuugaguucuaucacaagugcgauaacacauguauggaauccgugaaaaauggcaccuacgacuauccuaaguacagcgaggaagcuaaacugaacagagaggagauugauggggucaaacuugaaucuacacggaucuaucaaauucuggccaucuacuccgcgguggcuagcucccucguucugguggucucucugggcgccauuagcuuuuggaugugcuccaauggaucucuccagugccgcaucuguauuuga

SEQ ID NO: 204993 - RNA, 1698 nt, Artificial Sequence
  derived and/or modified CDS sequence (opt5) from hemagglutinin__InfluenzaA__AJJ99798
augaaggugaaacugcucguccugcuuugcaccuucacagccacguacgcugacaccaucuguauuggcuaucacgccaacaauagcacagauaccguugacacagugcuggagaagaacgugaccgucacacauuccgugaaucuccuggaaaacucucacaaugggaaacuuugccugcucaagggaaucgcgccccugcagcugggcaacuguagcguugcuggguggauucucggaaauccugagugcgaacugcuuaucuccaaagagucuuggagcuacauuguggaaagaccgaaccccgagaauggcaccuguuauccugggcauuuugccgauuacgaggaacugcgggagcaacucuccucugucagcuccuucgaacgcuuugagaucuuccccaaggagagcucuuggccuaaccacacggugaccggaguuuccgccagcugcucucauaauggcgaaaacuccuuuuauagaaaucugcuuuggcugacaggcaagaacgggcucuaccccaaucugagcaaaucuuaugcuaacaacaaggagaaagaagugcugguccucuggggagugcaccacccuccgaauaucgccaaccagaagacccuguaccauacagagaaugcuuacguguccgucguuagcucccacuauucucggaaauucacccccgaaauugccaagcgcccuaaggugagagaccaggagggccggaucaacuacuauuggacgcuucuggagcccggggauacaauuauguuugaagcgaauggaaaccucaucgccccucgcuacgcuuucgcccugagcagaggcuuuggguccggaauuaucaauagcaacgcucccauggacaaaugugaugccaagugccagaccccgcaaggcgcgauuaauucuucccuuccuuuccagaacgugcaucccgucacaaucggcgaguguccuaaauaugugcggagcgccaagcugcgcaugguuaccgggcucagaaauauccccucuauucagagccggggacuguuuggcgcuaucgccggguucauugaaggaggcuggaccgggaugguggacggaugguacggcuaucaccaccagaacgagcaaggcuccggguacgcugccgaucagaaaucuacacagaaugccaucaacggaauuacgaauaaggucaacagcgugaucgaaaagaugaacacccaguuuacagcuguuggcaaagaguucaauaagcuggagcgcagaauggaaaaccucaauaaaaagguggacgauggguucaucgacauuuggaccuacaacgcggagcugcuuguccugcucgaaaaugagcggacacuggauuuucaugacuccaacgugaaaaaucuuuaugaaaaggucaaaagccaacugaagaacaaugccaaggagaucggaaacggcugcuucgaguuuuaccacaaauguaaugacgaaugcauggagucugugaagaacgggaccuaugauuaccccaaauauuccgaagagagcaagcucaaucgcgagaaaauugacggcguuaagcuggaaucuaugggaguguaccagauccuggcuauuuauuccacggucgccagcucccucgugcugcuuguuucucugggcgccaucagcuucuggaugugcuccaacgggucucuccaguguagaaucugcauuuga

SEQ ID NO: 204994 - RNA, 1698 nt, Artificial Sequence; identical to SEQ ID NO: 194560
  derived and/or modified CDS sequence (opt5) from hemagglutinin__InfluenzaA__AJJ99810

SEQ ID NO: 204995 - RNA, 1698 nt, Artificial Sequence
  derived and/or modified CDS sequence (opt5) from hemagglutinin__InfluenzaA__AJJ99822
augaaggugaaacugcucguccugcuuugcaccuucacagccacguacgcugacaccaucuguauuggcuaucacgccaacaauagcacagauaccguugacacagugcuggagaagaacgugaccgucacacauuccgugaaucuccuggaaaacucucacaaugggaaacuuugccugcucaagggaaucgcgccccugcagcugggcaacuguagcguugcuggguggauucucggaaauccugagugcgaacugcuuaucuccaaagagucuuggagcuacauuguggaaaagccgaaccccgagaauggcaccuguuauccugggcauuuugccgauuacgaggaacugagagagcaacucuccucugucagcuccuucgaacgguuugagaucuuccccaaggagagcucuuggccuaaccacacggugaccggaguuuccgccagcugcucucauaauggcgaauccagcuuuuaucgcaaccugcuuuggcugacaggcaaaaaugggcucuaccccaaccugucuaaguccuaugcuaauaacaaagagaaggaagugcugguccucuggggagugcaccacccuccgaacaucggcgaccagaaagcccuguaccauaccgagaaugcuuacgugagcgucguuuccucucacuauagcagaaaguucacacccgaaauugccaagcggccuaaagugcgcgaucaggaggggagaaucaacuacuauuggacccuucuggagcccggagacacgauuaucuuugaagcgaauggcaaccucauugccccucgguacgcuuucgcccugucccgcggguuuggaagcggcaucauuaauucuaacgcucccauggauaagugugacgccaaaugccagacaccgcaaggcgcgaucaauuccagccuuccuuuccagaacgugcaucccgucaccaucggggaguguccuaaguaugugagaucugccaaacugcggaugguuacaggacuccgcaauauucccuuuauccagagcagaggccuguucggggcuauugccggauuuaucgaaggcggguggaccggaaugguggauggcugguacggcuaucaccaccagaacgagcaaggguccggauacgcugccgaccagaagucuacccagaaugccauuaacggcaucacaaauaaagucaacagcgugaucgaaaagaugaauacgcaguucaccgcuguugggaaggaguucaacaaacuggagcggcgcauggaaaaccucaauaagaaaguggaugacggauuuauugauaucuggacauacaacgcggagcugcuuguccugcucgaaaaugagagaacccuggacuuccaugacuccaacgugaagaaucuuuaugaaaaagucaagagccaacugaagaacaaugccaaagagauuggcaacgggugcuuugaguucuaccacaaguguaaugaugaaugcauggagucugugaaaaacggcacauaugacuaccccaaguauuccgaagagagcaaacucaaucgggagaagaucgauggaguuaagcuggaaucuaugggcguguaccagauucuggcuaucuauuccaccgucgccagcucccucgugcugcuuguuucucugggggccaucagcuuuuggaugugcuccaacggaucucuccagugucgcauuugcaucuga

SEQ ID NO: 204996 - RNA, 1701 nt, Artificial Sequence
  derived and/or modified CDS sequence (opt5) from hemagglutinin__InfluenzaA__AJJ99833
augaaggccauccugcucgugcugcuuuacaccuucgcuacagccaacgcggacacgcugugcauuggcuaucacgcuaauaacagcaccgauacagucgacaccguucucgagaaaaaugugacagugacccauuccgucaaccugcuugaagauaagcacaaugggaaacuguguaagcucagaggaguggcuccccugcaucugggcaaaugcaacaucgccggguggauucucggaaauccugagugugaaucucugagcacagccuccucuuggagcuacaucguugagaccuccucuagcgacaacggcacgugcuauccgggggauuuuauuaauuacgaagaacuucgggagcagcuguccagcgugucuuccuucgaacgcuuugagaucuuccccaagaccagcucuuggccuaaccacgacuccaauaagggagucacagccgcuugucccagagccggcgcgaaaucuuuuuauaagaaccucaucuggcuggugaaaaagggcaauagcuaccuuaaacuguccaagagcuauauuaacgauaaggggaaagaaguucucgugcuguggggaauccaucacccuuccaccacagccgaccaacagucucuguaccagaaugcugaugccuacgucuucgugggcaccagccgguauuccaagaaauuuaagcccgagauugcuauccgcccuaaagugagagaccaggaggggcggaugaacuacuauuggacgcucgucgaaccgggagauaagauuacauucgaggccaccggcaaccugcuuguuccccgcuacgcguuugccauggaaagaaaugcugggagcggaaucauuaucucugacacaccugugcacgauugcaacaccaccugucaaacacccaaaggcgccaucaauacgucccugccuuuccagaacauucaucccaucaccauuggcaagugcccgaaguaugugaaaagcacaaagcuccggcuggcuaccgggcuucgcaaugucccuucuauccagagcagaggacuguuuggcgccauugccggguucaucgagggaggcuggacagggaugguggacggaugguacggcuaucaccaucagaacgaacaaggcuccggguacgcugcggaccucaaaucuacccagaaugccaucgauaagauuacgaacaaaguuaauagcgugaucgagaagaugaacacacaguuuaccgcugucggaaaggaguucaaucaccuggaaaaacggauugagaaccugaauaagaaaguggacgauggcuuccucgacaucuggaccuacaacgccgaacugcuuguucugcucgagaaugaacgcacacuggauuaucacgacuccaacgugaagaaccuuuacgagaaagucagaaaucagcugaagaacaaugccaaggagauugggaacggauguuuugaguucuaucauaaaugcgauaauaccuguauggagagcgugaagaacggcacauacgacuaucccaaauacucugaagaggcuaagcucaaucgggaagagaucgauggggucaaacuggaguccacgcgcaucuaucaaauucuggccaucuacagcaccguggcgucuucccucguucugguggucagccuuggcgcuauuuccuuuuggaugugcucuaacggaagccugcagugcagaaucuguauuuga

SEQ ID NO: 204997 - RNA, 1701 nt, Artificial Sequence; identical to SEQ ID NO: 198896
  derived and/or modified CDS sequence (opt5) from hemagglutinin__InfluenzaA__AJJ99844

SEQ ID NO: 204998 - RNA, 1701 nt, Artificial Sequence
  derived and/or modified CDS sequence (opt5) from hemagglutinin__InfluenzaA__AJJ99855
augaaggccauccuggugguccuccuguacaccuucgcuacagccaacgcggacacgcuuugcauuggcuaucacgcuaauaacagcaccgauacaguugacaccgugcuggagaaaaaugugacagucacccauuccgugaaccuccuggaagauaagcacaaugggaaacuuuguaagcugagaggaguugcuccccuccaucugggcaaaugcaacaucgccggguggauucugggaaauccugagugugaaucucucagcacagccuccucuuggagcuacaucguggagaccuccucuagcgacaacggcacgugcuauccgggggauuuuauugacuacgaagaacugcgggagcagcuuuccagcgucucuuccuucgaacgcuuugagaucuuccccaagaccagcucuuggccuaaucacgauuccaacaagggagugacagccgcuuguccccaugccggcgcgaaaucuuuuuauaagaaucugaucuggcucguuaaaaagggcaacagcuacccuaaacuguccaagagcuauauuaaugacaaggggaaagaagugcuuguccuguggggaauccaccaccccuccaccacagccgaucaacagucucucuaccagaacgcugacaccuacguguucgugggcacgagcagauauuccaagaaauuuaagccugagauugccauccggccgaaaguccgcgaucaggaggggagaaugaauuacuauuggacacugguugaacccggagacaagauuaccuucgaggcuacaggcaaccugguggugccucgguacgccuuugcgauggaacgcaacgccgggagcggaaucauuaucucugauacccccguccaugacugcaauaccacaugucaaacgccuaaaggcgcuaucaacaccucccuccccuuccagaauauucacccgaucacaauuggcaagugcccuaaguaugugaaaagcaccaagcugagacuugccacagggcugcggaacguucccucuauccagagccgcggacucuuuggcgcuauugccggguucaucgagggaggcuggaccgggaugguggacggaugguacggcuaucaucaccagaaugaacaaggcuccggguacgccgcugaucugaaaucuacgcagaacgcgaucgacaagauuacaaauaaagucaacagcgugaucgagaagaugaauacccaguuuaccgccguuggaaaggaguucaaccaccuugagaaaagaauugagaaucugaacaagaaaguggaugacggcuuccucgauaucuggacauacaaugcugaacugcugguccuccuggagaacgaacggacccuugacuaucaugauuccaaugugaagaaccuguacgagaaaguccgcaaccagcucaagaauaacgccaaggagauugggaauggauguuuugaguucuaucacaaaugcgacagcacauguauggaaucugugaagaacggcacguacgauuauccuaaauacuccgaagaggccaagcugaauagagaagagaucgacgggguuaaacuugagagcacccggaucuaucaaauucuggcuaucuacucuacaguggccuccagccucguccuggugguuucccugggcgcgauuucuuuuuggaugugcagcaacggaucccuccagugccgcaucuguauuuga

SEQ ID NO: 204999 - RNA, 1701 nt, Artificial Sequence
  derived and/or modified CDS sequence (opt5) from hemagglutinin__InfluenzaA__AJJ99866
augaaggccauccuggugguccuccuguacaccuucgcuacagccaacgcggacacgcuuugcauuggcuaucacgcuaauaacagcaccgauacaguugacaccgugcuggagaaaaaugugacagucacccauuccgugaaccuccuggaagauaagcacaaugggaaacuuuguaagcugaaaggaguugcgccccuccaucugggcaagugcaacaucgccggguggauucugggaaauccugagugugaaucucucagcacagcuuccucuuggagcuacaucguggagaccuccucuagcgacaacggcacgugcuauccgggggauuuuauugacuacgaagaacugagagagcagcuuuccagcgucucuuccuucgaacgguuugagaucuuccccaagaccagcucuuggccuaaucacgauuccaacaaaggagugacagccgcuuguccccaugccggcgccaagagcuuuuauaaaaaucugaucuggcucguuaagaaaggcaacucuuacccuaagcuguccaagagcuauauuaaugacaaagggaaggaagugcuuguccuguggggaauccaccaccccuccaccucugccgaucaacagagccucuaccagaacgcugacgccuacguguucgugggcacaucccgcuauagcaaaaaguuuaaaccugagauugcuaucagaccgaagguccgggaucaggaggggcgcaugaauuacuauuggacccugguugaacccggagacaaaauuacguucgaggccacaggcaaccugguggugccuagauacgcguuugccauggaacggaacgcugggucuggaaucauuaucuccgauacccccguccaugacugcaauacaaccugucaaaccccuaagggcgccaucaacacaagccuccccuuccagaauauucacccgaucacgauuggcaagugcccuaaauaugugaagucuaccaaacugcgccuugcuacagggcugagaaacguucccagcauccagucccggggacucuuuggcgccauugccggguucaucgagggaggcuggaccgggaugguggacggaugguacggcuaucaucaccagaaugaacaaggcucuggguacgcugcggaucuuaagagcacacagaacgccaucgacgagauuaccaauaaagucaacuccgugaucgagaagaugaauacgcaguuuacagcuguuggaaaggaguucaaccaccuggagaaacgcauugaaaaucugaacaagaaaguggaugacggcuuccucgauaucuggaccuacaaugccgagcugcugguccuccuggaaaacgagagaacccuugacuaucaugauagcaaugugaagaaccuguacgagaaaguccggucucagcucaagaacaaugccaaggaaauugggaacggauguuuugaguucuaucacaaaugcgacaauacauguauggaauccgugaagaacggcaccuacgauuauccuaaauacagcgaggaagcuaagcugaaucgcgaggagaucgacgggguuaaacuugaaucuacaagaaucuaucaaauucuggccaucuacuccacgguggcgagcucccucguccuggugguuucucugggcgcuauuagcuuuuggaugugcuccaacggaucucuccagugccggaucuguauuuga

SEQ ID NO: 205000 - RNA, 1701 nt, Artificial Sequence
  derived and/or modified CDS sequence (opt5) from hemagglutinin__InfluenzaA__AJJ99877
auggaggccauccuggugguccuccuguacaccuucgcuacagccaacgcggacacgcuuugcauuggcuaucacgcuaauaacagcaccgauacaguugacaccgugcuggaaaagaaugugacagucacccauuccgugaaccuccuggaggauaagcacaaugggaaacuuuguaagcugagaggaguugcgccccuccaucugggcaagugcaacaucgccggguggauucugggaaauccugaaugugagucucucagcacagcuuccucuuggagcuacaucguggaaaccuccucuagcgacaacggcacgugcuauccgggggauuuuauugacuacgaggagcugcgggaacagcuuuccagcgucucuuccuucgagcgcuuugaaaucuuccccaaaaccagcucuuggccuaaucacgauuccaacaagggagugacagccgcuuguccccaugccggcgccaagagcuuuuauaaaaaucugaucuggcucguuaagaaaggcaacucuuacccuaagcuguccaaaagcuauauuaaugacaaggggaaggaggugcuuguccuguggggaauccaccaccccuccaccucugccgaucaacagagccucuaccagaacgcugacgccuacguguucgugggcuccagcagauauucuaaaaaguuuaaaccugagauugcuauccggccgaagguccgcgaucaggaagggagaaugaauuacuauuggacacugguugagcccggagacaaaauuaccuucgaagccacgggcaaccugguggugccucgguacgcguuugccauggagcgcaacgcuggguccggaaucauuaucagcgauacacccguccaugacugcaauaccacaugucaaaccccuaagggcgccaucaacaccucucuccccuuccacaauauucauccgaucacaauuggcaaaugcccuaaguauguuaagagcacgaaacugagacuugcuaccgggcugcggaacgugcccuccauccagucucgcggacucuuuggcgccauugccggguucaucgaaggaggcuggacagggaugguggacggaugguacggcuaucaccaccagaaugagcagggcagcggguacgcugcggaucugaaguccacccaaaacgccaucgacgagauuacaaauaaagucaacagcgugaucgaaaagaugaauacccaguuuacggcuguuggaaaagaguucaaccaucuugaaaagagaauugagaaucugaacaagaaaguggaugacggcuuccucgauaucuggacauacaaugccgaacugcugguccuccuggagaacgagcggacccuugacuaucacgauucuaaugugcgcaaccuguacgaaaaggucagaucccagcucaaaaacaaugccaaggagauugggaacggauguuuugaguucuaucauaaaugcgacaauaccuguauggaaagcgugaagaacggcacauacgauuauccuaaguacucugaagaggcuaaacugaaucgggaggaaaucgacgggguuaaacuugaguccacccgcaucuaucagauucuggccaucuacagcacaguggcguccucucucguccuggugguuagccugggcgcuauuuccuuuuggaugugcucuaacggaagccuccaaugcagaaucuguauuuga

SEQ ID NO: 205001 - RNA, 1701 nt, Artificial Sequence
  derived and/or modified CDS sequence (opt5) from hemagglutinin__InfluenzaA__AJJ99888
augaaggccauccuggugguccuccuguacaccuucgcuacagccaacgcggacacgcuuugcauuggcuaucacgcuaauaacagcaccgauacaguugacaccgugcuggagaagaaugugacagucacccauuccgugaaccuccuggaagauaagcacaaugggaaacuuuguaagcugagaggaguugcuccccuccaucugggcaaaugcaacaucgccggguggauucugggaaauccugagugugaaucucucagcacagccuccucuuggagcuacaucguggagaccuccucuagcgacaacggcacgugcuauccgggggauuuuauugacuacgaagaacugcgggagcagcuuuccagcgucucuuccuucgaacgcuuugagaucuuccccaagaccagcucuuggccuaaucacgauuccaacaagggagugacagccgcuuguccccaugccggcgcgaaaggcuuuuauaagaaucugaucuggcucguuaaaaaggggaacagcuacccuaaacugucuaaguccuauauuaaugacaagggaaaagaagugcuuguccuguggggcauccaccaccccagcaccuccgccgaucaacagucucucuaccagaacgcugacgccuacguguucguggggacaagcagauauuccaagaaauuuaagccugagauugcuauccggccgaaaguccgcgaucaggagggaagaaugaauuacuauuggacccugguugaacccggcgacaagauuacguucgaggccacagggaaccugguggugccucgguacgcguuugccauggaacgcgaugcuggaagcggcaucauuaucucugacacccccguccaugacugcaacacaaccugucaaaccccuaaaggcgccaucaauacaucccuccccuuccagaacauucacccgaucacgauugggaagugcccuaaguaugugaaaagcaccaagcugagacuugcuacaggacugcggaauguucccucuauccagagccgcggccucuuuggggccauugccggauucaucgagggcggguggaccggaaugguggauggcugguacggcuaucaucaccagaacgaacaaggguccggauacgcugcggaccugaaaucuacacagaaugccaucgaugagauuaccaacaaggucaauagcgugaucgagaaaaugaacacgcaguuuacagcuguuggcaaggaguucaaucaccuugagaagagaauugaaaaccugaauaaaaagaucgacgauggguuccucgacauuuggaccuacaacgccgagcugcuggugcuccuggaaaaugagcggacccuugauuaucaugacuccaacgucaaaaaucuguacgagaaggugcgcagccagcucaaaaacaacgccaaggaaaucggaaauggcuguuuugaguucuaucacaagugcgauaacacauguauggaaucugucaaaaaugggaccuacgacuauccuaaguacuccgaggaagcuaaacugaacagagaggagaucgauggcgugaaacuugaaagcacacggauuuaucaaauccuggccauuuacucuacgguugcguccagccucgugcuggucgugucccugggagcuaucucuuuuuggaugugcagcaauggcucccuccagugccgcauuuguaucuga

SEQ ID NO: 205002 - RNA, 1701 nt, Artificial Sequence
  derived and/or modified CDS sequence (opt5) from hemagglutinin__InfluenzaA__AJJ99899
augaaggccauccuggugguccuccuguacaccuucgcuacagccaacgcggacacgcuuugcauuggcuaucacgcuaauaacagcaccgauacaguugacaccgugcuggagaaaaaugugacagucacccauuccgugaaccuccuggaagauaagcacaaugggaaacuuuguaagcugagaggaguugcuccccuccaucugggcaaaugcaacaucgccggguggauucugggaaauccugagugugaaucucucagcacagccuccucuuggagcuacaucguggagaccuccucuagcgacaacggcacgugcuauccgggggauuuuauuaauuacgaagaacugcgggagcagcuuuccagcgucucuuccuucgaacgcuuugagaucuuccccaagaccagcucuuggccuaaccacgacuccaauaagggagugacagccgcuugucccagagccggcgcgaaaucuuuuuauaagaaccugaucuggcucguuaaaaagggcaauagcuacccuaaccuguccaaaagcuauauuaaugauaaggggaaggaagugcuuguccuguggggaauccaucaccccuccaccacagccgaccaacagucucucuaccagaacgcugaugccuacguguucgugggcaccagccgguauuccaaaaaguuuaaaccugagauugcuauccgcccgaaggucagagaccaggaggggcggaugaacuacuauuggacgcugcuggaacccggagauaaaauuacauucgaggccaccggcaaucuccugguuccucgcuacgcguuugccauggaaagaaacgcugggagcggaaucauuaucucugacacacccgugcacgauugcaauaccaccugucaaacaccuaagggcgccaucaacacgucccuucccuuccagaauauucauccgaucaccauuggcaaaugcccuaaguaugucaagagcacaaaacugcggcucgcuaccgggcugcgcaacgugcccucuauccagagcagaggacuuuuuggcgccauugccggguucaucgagggaggcuggacagggaugguggacggaugguacggcuaucaccaucagaauggccaaggguccggauacgcugcggaccugaagucuacccagaacgccguugauaaaaucacgaauaaggugaacagcgucauugagaaaaugaauacacaguuuaccgcugugggcaaggaguucaaccaccucgagaagcggaucgaaaaucugaacaaaaagguugacgauggguuccuggacauuuggaccuacaaugccgagcuccuggugcuucuggaaaacgagcgcacacucgauuaucacgacuccaacgucaaaaaucuguacgaaaaggugagaaaccagcuuaaaaauaacgccaaggagaucggaaauggcuguuuugaguucuaucauaagugcgauaacaccuguauggaaagcgucaaaaaugggacauacgacuauccuaaguacucugaggaagcuaaacugaaccgggaggaaauugauggcgugaagcucgaguccacgcgcaucuaucaaauccuggccauuuacagcaccguugcgucuucccuggugcucgucgugagccugggagcuaucuccuuuuggaugugcucuaauggcagccuucagugcagaauuuguaucuga

SEQ ID NO: 205003 - RNA, 1701 nt, Artificial Sequence
  derived and/or modified CDS sequence (opt5) from hemagglutinin__InfluenzaA__AJJ99910
augaaggccauccuggugguccuccuguacaccuucgcuacagccaacgcggacacgcuuugcauuggcuaucacgcuaauaacagcaccgauacaguugacaccgugcuggagaaaaaugugacagucacccauuccgugaaccuccuggaagauaagcacaaugggaaacuuuguaagcugagaggaguugcuccccuccaucugggcaaaugcaacaucgccggguggauucugggaaauccugagugugaaucucucagcacagccuccucuuggagcuacaucguggagaccuccucuagcgacaacggcacgugcuauccgggggauuuuauugacuacgaagaacugcgggagcagcuuuccagcgucucuuccuucgaacgcuuugagaucuuccccaagaccagcucuuggccuaaucacgauuccgacaagggagugacagccgcuuguccccaugccggcgcgaaaucuuuuuauaagaaccugaucuggcucguuaaaaagggcaauagcuacccuaaacuguccaagagcuauauuaacgauaaggggaaagaagugcuuguccuguggggaauccaccaccccuccaccacagccgaccaacagucucucuaccagaaugcugauaccuacguguucgugggcacgagcagauauuccaagaaauuuaagccugagauugccauccggccgaaaguccgcgaccaggaggggagaaugaacuacuauuggacacugguugaacccggagauaagauuaccuucgaggcuacaggcaaucugguggugccucgguacgccuuugcgauggaacgcaacgccgggagcggaaucauuaucucugacacccccguccaugacugcaacaccacaugucaaacgccuaaaggcgcuaucaauaccucccuccccuuccagaacauucacccgaucacaauuggcaagugcccuaaguaugugaaaagcaccaagcugagacuugccacagggcugcggaauguucccucuauccagagccgcggacucuuuggcgcuauugccggguucaucgagggaggcuggaccgggaugguggauggaugguacggcuaucaucaccagaacgaacaaggcuccggguacgccgcugaccugaaaucuacgcagaaugcgaucgauaagauuacaaacaaagucaauagcgugaucgagaagaugaacacccaguuuaccgccguuggaaaggaguucaaucaccuugaaaagagaauugagaaccugaauaagaaaguggacgauggcuuccucgacaucuggacauacaacgcugaacugcugguccuccuggagaaugaacggacccuugauuaucaugacuccaacgugaagaaucuguacgagaaaguccgcaaccagcucaagaacaaugccaaggagacagggaacggauguuuugaguucuaucacaaaugcgauaauacguguauggagagcgugaagaacggcaccuacgacuauccuaaauacucugaagaggccaagcugaauagagagaaaauugaugggguuaaacuugaauccacacggaucuaucaaauccuggcuauuuacagcaccguggccucuucccucguccuggugguuagccugggcgcgaucuccuuuuggaugugcucuaacggaagccuccagugccgcauuuguaucuga

SEQ ID NO: 205004 - RNA, 1701 nt, Artificial Sequence; identical to SEQ ID NO: 198896
  derived and/or modified CDS sequence (opt5) from hemagglutinin__InfluenzaA__AJJ99921

SEQ ID NO: 205005 - RNA, 1701 nt, Artificial Sequence
  derived and/or modified CDS sequence (opt5) from hemagglutinin__InfluenzaA__AJJ99932
augaaggccauccuggugguccuccuguacaccuucgcuacagccaacgcggacacgcuuugcauuggcuaucacgcuaauaacagcaccgauacaguugacaccgugcuggagaaaaaugugacagucacccauuccgugaaccuccuggaagauaagcacaaugggaaacuuuguaagcugagaggaguugcuccccuccaucugggcaaaugcgacaucgccggguggauucugggaaacccugagugugaaucucucagcacagccuccucuuggagcuacaucguggagaccuccucuagcgauaauggcacgugcuauccgggggacuuuauugauuacgaagaacugcgggagcagcuuuccagcgucucuuccuucgaacgcuuugagaucuuccccaagaccagcucuuggccuaaccacgacuccaauaagggagugacagccgcuuguccccaugccggcgcgaaaucuuuuuauaagaaccugaucuggcucguuaaaaagggcaauagcuacccuaaacuguccaagagcuauauuaacgauaaggggaaagaagugcuuguccuguggggaauccaccaccccuccaccacagccgaccaacagucucucuaccagaaugcugaugccuacguguucgugggcaccagcagauauuccaagaaauuuaagccugagauugcuauccggccgaaaguccgcgaccaggaggggagaaugaacuacuauuggacgcugguugaacccggagauaagauuacauucgaggccaccggcaaucugguggugccucgguacgcguuugccauggaacgcaacgcugggagcggaaucauuaucucugacacacccguccaugacugcaacaccaccugucaaacaccuaaaggcgccaucaauacgucccuccccuuccagaacauucacccgaucaccauuggcaagugcccuaaguaugugaaaagcacaaagcugagacuugcuaccgggcugcggaauguucccucuauccagagccgcggacucuuuggcgccauugccggguucaucgagggaggcuggacagggaugguggauggaugguacggcuaucaucaccagaacgaacaaggcuccggguacgcugcggaccugaaaucuacccagaaugccaucgauaagauuacgaacaaagucaauagcgugaucgagaagaugaacacacaguuuaccgcuguuggaaaggaguucaaucaccuugagaaaagaauugagaaccugaauaagaaaguggacgauggcuuccucgacaucuggaccuacaacgccgaacugcugguccuccuggagaaugaacggacacuugauuaucaugacuccaacgugaagaaucuguacgagaaaguccgcaaccagcucaagaacaaugccaaggagauugggaacggauguuuugaguucuaucacaaaugcgauaauaccuguauggaaagcgugaagaacggcacauacgacuauccuaaauacucugaagaggcuaagcugaauagagaagagaucgaugggguuaaacuugaguccacgcggaucuaucaaauucuggccaucuacagcaccguggcgucuucccucguccuggugguuagccugggcgcuauuuccuuuuggaugugcucuaacggaagccuccagugccgcaucuguauuuga

SEQ ID NO: 205006 - RNA, 1701 nt, Artificial Sequence; identical to SEQ ID NO: 198526
  derived and/or modified CDS sequence (opt5) from hemagglutinin__InfluenzaA__AJJ99943

SEQ ID NO: 205007 - RNA, 1701 nt, Artificial Sequence
  derived and/or modified CDS sequence (opt5) from hemagglutinin__InfluenzaA__AJJ99954
augaaggccauccuggugguccuccuguacaccuucgcuacagccaacgcggacacgcuuugcauuggcuaucacgcuaauaacagcaccgauacaguugacaccgugcuggagaaaaaugugacagucacccauuccgugaaccuccuggaagauaagcacaaugggaaacuuuguaagcugagaggaguugcgccccuccaucugggcaaaugcaacaucgccggguggauucugggaaauccugagugugaaucucucagcacagcuuccucuuggagcuacaucguggagaccuccucuagcgacaacggcacgugcuauccgggggauuuuauugacuacgaagaacugcgggagcagcuuuccagcgucucuuccuucgaaaaguuugagaucuuccccaagaccagcucuuggccuaaucacgauuccaacaaaggagugacagccgcuuguccccaugccggcgccaagagcuuuuauaaaaaucugaucuggcucguuaagaaaggcaacucuuacccuaagcuguccaagagcuauauuaaugacaaagggaaggaagugcuuguccuguggggaauccaccaccccuccaccucugccgaucaacagagccucuaccagaacgcugacgccuacguguucgugggcacaucccgcuauagcaaaaaguuuaaaccugagauugcuaucagaccgaagguccgggaucaggaggggcgcaugaauuacuauuggacccugguugaacccggagacaaaauuacguucgaggccacaggcaaccugguggugccuagauacgcguuugccauggaacggaacgcugggucuggaaucauuaccuccgauacacccguccaugacugcaauaccaccugucaaacaccuaagggcgccaucaacacgagccuccccuuccagaauauccacccgauuaccaucggcaacugcccuaaguaugugaaaucuacaaagcugcgccuugcuaccgggcugagaaauguucccagcauucagucccggggacucuuuggcgccaucgccggguucauugagggaggcuggacagggaugguggacggaugguacggcuaucaucaccagaacgaacaaggcucuggguacgcugcggaucugaaaagcacccagaaugccaucgacaagaucacgaacaaagucaauuccgugauugagaagaugaacacacaguuuaccgcuguuggaaaggaguucaaucaccuugaaaaacgcaucgagaaccugaauaagaaaguggaugacggcuuccucgauauuuggaccuacaacgccgaacugcugguccuccuggagaaugaaagaacacuugacuaucaugauagcaacgugaagaaccuguacgagaaaguccggucucagcucaagaauaacgccaaggagaucgggaauggauguuuugaguucuaucacaaaugcgacaacaccuguauggaguccgugaagaauggcacauacgauuauccuaaauacagcgaagaggcuaagcugaaccgcgaagagauugacgggguuaaacuugagucuacgagaaucuaucaaauccuggccauuuacuccaccguggcgagcucccucguccuggugguuucucugggcgcuaucagcuuuuggaugugcuccaauggaucucuccagugccggauuuguaucuga

SEQ ID NO: 205008 - RNA, 1701 nt, Artificial Sequence; identical to SEQ ID NO: 194983
  derived and/or modified CDS sequence (opt5) from hemagglutinin__InfluenzaA__AJJ99965

SEQ ID NO: 205009 - RNA, 1698 nt, Artificial Sequence
  derived and/or modified CDS sequence (opt5) from hemagglutinin__InfluenzaA__AJJ99989
augaaggugaaacugcucguccugcuuugcaccuucacagccacguacgcugacaccaucuguauuggcuaucacgccaacaauagcacagauaccguugacacagugcuggagagaaacgugaccgucacacauuccgugaaucuccuggaaaacucucacaaugggaaacuuugccugcucaaaggaaucgcgccccugcagcugggcaacuguagcguugcuggguggauucucggaaauccugagugcgaacugcuuaucuccaaggagucuuggagcuacauuguggaaaaaccgaaccccgagaauggcaccuguuauccugggcauuuugccgauuacgaggaacugcgggagcaacucuccucugucagcuccuucgaacgcuuugagaucuuccccaaggagagcucuuggccuaaccacacggugaccggaguuuccgccagcugcucucauaauggcgaauccagcuuuuauagaaaccugcuuuggcugacaggcaagaaugggcucuaccccaaccugucuaaauccuaugcuaauaacaaggagaaagaagugcugguccucuggggagugcaccacccuccgaacaucggcgaccagaaggcccuguaccauaccgagaaugcuuacgugagcgucguuuccucucacuauagcaaaaaguucacacccgaaauugccaagcggccuaaagugcgcgaucaggaggggagaaucaacuacuauuggacccuucuggagcccggagacacgauuaucuuugaagcgaauggcaaccucauugccccucgguacgcuuucgcccugucccgcggguuuggaagcggcaucauuaauucuaacgcucccauggauaagugugacgccaaaugccagacaccgcaaggcgcgaucaauuccagccuuccuuuccagaacgugcaucccgucaccaucggggaguguccuaaguaugugagaucugccaaacugcggaugguuacaggacuccgcaauauucccagcauccaguccagaggccuguuuggggcuauugccggauucaucgaaggcggguggaccggaaugguggauggcugguacggcuaucaccaccagaacgagcaagggucuggauacgcugccgaccagcggagcacccagaaugccauuaacggcaucacaaauaaggucaacuccgugaucgaaaagaugaauacgcaguuuaccgcuguugggaaggaguucaacaagcuggagcgcagaauggaaaaccucaauaaaaagguggaugacggauucauugauaucuggacauacaacgcggagcugcuuguccugcucgaaaaugagcggacccuggacuuucaugacagcaacgugaaaaaucuuuaugaaaaggucaaaucucaacugaagaacaaugccaaggagauuggcaacgggugcuucgaguuuuaccacaaauguaaugaugaaugcauggaguccgugaagaacggcacauaugacuaccccaaauauagcgaagagucuaagcucaaucgcgagaaaaucgauggaguuaagcuggaauccaugggcguguaccagauucuggcuaucuauagcaccgucgccuccucucucgugcugcuuguuagccugggggccaucuccuucuggaugugcucuaacggaagccuccaguguagaauuugcaucuga

SEQ ID NO: 205010 - RNA, 1701 nt, Artificial Sequence
  derived and/or modified CDS sequence (opt5) from hemagglutinin__InfluenzaA__AJK00001
augaaggccauccuggugguccuccuguacaccuucgcuacagccaacgcggacacgcuuugcauuggcuaucacgcuaauaacagcaccgauacaguugacaccgugcuggagaaaaaugugacagucacccauuccgugaaccuccuggaagauaagcacaaugggaaacuuuguaagcugagaggaguugcuccccuccaucugggcaaaugcaacaucgccggguggauucugggaaauccugagugugaaucucucagcacagccuccucuuggagcuacaucguggagaccuccucuagcgacaacggcacgugcuauccgggggauuuuauuaauuacgaagaacugcgggagcagcuuuccagcgucucuuccuucgaacgcuuugagaucuuccccaagaccagcucuuggccuaaccacgacuccaauaagggagugacagccgcuugucccagagccggcgaaaagagcuuuuauaagaaccugaucuggcucguuaaaaagggcaauucuuacccuaaacuguccaagagcuauauuaacgauaaggggaaagaggugcuuguccuguggggaauccaucaccccuccaccacagcggaccaacagucucucuaccagaaugccgaugcuuacguguucgugggcaccagccgguauuccaagaaauuuaagccugagauugccauccgcccgaaagucagagaccaggaagggcggaugaacuacuauuggacgcugguugagcccggagauaagauuacauucgaagcuaccggcaaccugcucgugccucgcuacgccuuugcgauggagagaaaugccgggagcggaaucauuaucucugacacacccgugcacgauugcaacaccaccugucaaacaccuaaaggcgcuaucaauacgucccugcccuuccagaacauucauccgaucaccauuggcaagugcccuaaguaugucaaaagcacaaaacuucggcuggccaccgggcuccgcaaugugcccucuauccagagcagaggacuguuuggcgcuauugccggguucaucgaaggaggcuggacagggaugguugacggaugguacggcuaucaccaucagaacgagcaaggcuccggguacgccgcugaccuuaaaucuacccagaaugcgaucgauaagauuacgaacaaagugaauagcgucaucgagaagaugaacacacaguuuaccgccgugggaaaggaguucaaucaccuggagaaacggauugaaaaccucaauaagaaaguugacgauggcuuccuggacaucuggaccuacaacgcugagcugcucgugcugcuugaaaaugagcgcacacuggauuaucacgacuccaacgucaagaaccucuacgagaaagugagaaaucagcugaagaacaaugccaaggaaauugggaacggauguuuugaguucuaucauaaaugcgauaauaccuguauggaaagcgucaagaacggcacauacgacuauccuaaauacucugaggaagccaaacuuaaucgggagaagaucgauggggugaagcuggaguccacgcgcaucuaucaaauucucgcuaucuacagcaccguugccucuucccuggugcuggucgugagccucggcgcgauuuccuuuuggaugugcucuaacggaagccugcagugcagaaucuguauuuga

SEQ ID NO: 205011 - RNA, 1701 nt, Artificial Sequence
  derived and/or modified CDS sequence (opt5) from hemagglutinin__InfluenzaA__AJK00012
augaaggccauccuggugguccuccugugcaccuucgcuacagccaacgcggacacgcuuuguauuggcuaccacgcuaauaacagcaccgauacaguugacaccgugcuggagaaaaaugugacagucacccauuccgugaaccuccuggaagauaagcacaaugggaaacuuugcaagcugagaggaguugcuccccuccaucugggcaaauguaacaucgccggguggauucugggaaauccugagugcgaaucucucagcacagccuccucuuggagcuauaucguggagaccuccucuagcgacaacggcacguguuacccgggggauuuuauugacuaugaagaacugcgggagcagcuuuccagcgucucuuccuucgaacgcuuugagaucuuccccaagaccagcucuuggccuaaucacgauuccaacaagggagugacagccgcuugcccccaugccggcgcgaaaggcuuuuacaagaaucugaucuggcucguuaaaaaggggaacagcuauccuaaacugucuaaguccuacauuaaugacaagggaaaagaagugcuuguccuguggggcauccaccaccccagcaccacagccgaucaacagucccucuaucagaacgcugacaccuacguguucguggggacgucuagauacagcaagaaauuuaagccugagauugccauccggccgaaaguccgcgaucaggagggaagaaugaauuauuacuggacacugguugaacccggcgacaagauuaccuucgaggcuacagggaaccugguggugccucgguaugccuuugcgauggaacgcaacgccggauccggcaucauuaucagcgauaccaccguccaugacuguaauacaacgugccaaacccccaaaggcgcuaucaacacaucucucccuuuccagaauauucaccccaucaccauugggaaguguccgaaguacgugaaauccacaaagcugagacuugccaccggacugcggaacguuccuagcauccagucucgcggccucuuuggggcuauugccggauucaucgagggcggguggacgggaaugguggacggcugguauggcuaccaucaccagaaugaacaagggagcggauaugccgcugaucugaaauccacacagaacgcgaucgacaagauuaccaauaaagucaacucugugaucgagaagaugaauacccaguuuacagccguuggcaaggaguucaaccaccuugaaaagagaauugagaaucugaacaagaaaguggaugacggguuccucgauaucuggaccuacaaugcugaacugcugguccuccuggagaacgaacggacacuugacuaccaugauagcaaugugaagaaccuguaugagaaaguccgcaaccagcucaagaauaacgccaaggagauuggagacggcugcuuugaguucuaccacaaaugugauaauacgugcauggaguccgugaagaacgggaccuaugacuaccccaaauauagcgaagaggccaagcugaauagagagaaaaucgauggcguuaaacuugaaucuacacggaucuaccaaauucuggcuaucuauuccaccguggccagcucucucguccuggugguuucccugggagcgauuagcuuuuggaugugcuccaacggcucucuccagugucgcaucugcauuuga

SEQ ID NO: 205012 - RNA, 1701 nt, Artificial Sequence
  derived and/or modified CDS sequence (opt5) from hemagglutinin__InfluenzaA__AJK00023
augaaggccauccuggugguccuccuguacaccuucgcuacagccaacgcggacacgcuuugcauuggcuaucacgcuaauaacagcaccgauacaguugacaccgugcuggagaaaaaugugacagucacccauuccgugaaccuccuggaagauaagcacaaugggaaacuuuguaagcugagaggaguugcuccccuccaucugggcaaaugcaacaucgccggguggauucugggaaauccugagugugaaucucucagcacagccuccucuuggagcuacaucguggagaccuccucuagcgacaacggcacgugcuauccgggggauuuuauuaauuacgaagaacugcgggagcagcuuuccagcgucucuuccuucgaacgcuuugagaucuuccccaagaccagcucuuggccuaaccacgacuccaauaagggagugacagccgcuugucccagagccggcgcgaaaucuuuuuauaagaaccugaucuggcucguuaaaaagggcaauagcuacccuaaacuguccaagagcuauauuaacgauaaggggaaagaagugcuuguccuguggggaauccaucaccccuccaccacagccgaccaacagucucucuaccagaaugcugaugccuacguguucgugggcaccagccgguauuccaagaaauuuaagccugagauugcuauccgcccgaaagucagagaccaggaggggcggaugaacuacuauuggacgcugguugaacccggagauaagauuacauucgaggccaccggcaaccugcucgugccucgcuacgcguuugccauggaaagaaaugcugggagcggaaucauuaucucugacacacccgugcacgauugcaacaccaccugucaaacaccuaaaggcgccaucaauacgucccugcccuuccagaacauucauccgaucaccauuggcaagugcccuaaguaugucaaaagcacaaaacuucggcuggcuaccgggcuccgcaaugugcccucuauccagagcagaggacuguuuggcgccauugccggguucaucgagggaggcuggacagggaugguugacggaugguacggcuaucaccaucagaacgaacaaggcuccggguacgcugcggaccuuaagucuacccagaaugccaucgauaagauuacgaacaaagugaauagcgucaucgagaagaugaacacacaguuuaccgcugugggaaaggaguucaaucaccuggaaaaacggauugagaaccucaauaagaaaguugacgauggcuuccuggacaucuggaccuacaacgccgaacugcucgugcugcuugagaaugaacgcacacuggauuaucacgacuccaacgucaagaaccucuacgagaaagugagaaaucagcugaagaacaaugccaaggagauugggaacggauguuuugaguucuaucauaaaugcgauaauaccuguauggagagcgucaagaacggcacauacgacuauccuaaauacucugaagaggcuaaacuuaaucgggaagagaucgauggggugaagcuggaguccacgcgcaucuaucaaauucucgccaucuacagcaccguugcgucuucccuggugcuggucgugagccucggcgcuauuuccuuuuggaugugcucuaacggaagccugcagugcagaaucuguauuuga

SEQ ID NO: 205013 - RNA, 1701 nt, Artificial Sequence; identical to SEQ ID NO: 198896
  derived and/or modified CDS sequence (opt5) from hemagglutinin__InfluenzaA__AJK00034

SEQ ID NO: 205014 - RNA, 1701 nt, Artificial Sequence; identical to SEQ ID NO: 199114
  derived and/or modified CDS sequence (opt5) from hemagglutinin__InfluenzaA__AJK00045

SEQ ID NO: 205015 - RNA, 1701 nt, Artificial Sequence; identical to SEQ ID NO: 199114
  derived and/or modified CDS sequence (opt5) from hemagglutinin__InfluenzaA__AJK00056

SEQ ID NO: 205016 - RNA, 1701 nt, Artificial Sequence; identical to SEQ ID NO: 194983
  derived and/or modified CDS sequence (opt5) from hemagglutinin__InfluenzaA__AJK00067

SEQ ID NO: 205017 - RNA, 1698 nt, Artificial Sequence
  derived and/or modified CDS sequence (opt5) from hemagglutinin__InfluenzaA__AJK00079
augaaggugaaacugcucguccugcuuugcaccuucacagccacguacgcugacaccaucuguauuggcuaucacgccaacaauagcacagauaccguugacacagugcuggagaagaacgugaccgucacacauuccgugaaucuccuggaaaacucucacaaugggaaacuuugccugcucaagggaaucgcgccccugcagcugggcaacuguagcguugcuggguggauucucggaaauccugagugcgaacugcuuaucuccaaagagucuuggagcuacauuguggaaaagccgaaccccgagaauggcaccuguuauccugggcauuuugccgauuacgaggaacugagagagcaacucuccucugucagcuccuucgaacgguuugagaucuuccccaaggagagcucuuggccuaaccacacggugaccggaguuuccgccagcugcucucauaauggcgaaaacuccuuuuaucgcaaucugcuuuggcugacacggaaaaacggccucuaccccaaucugagcaagucuuaugcuaacaacaaagagaaggaagugcugguccucuggggagugcaccacccuccgaauaucgccgaccagaaaacccuguaccauacagagaacgcuuacguguccgucguuagcucccacuauucuagaaaguucacccccgaaauugccaagcgcccuaaagugagagaucaggaggggcggaucaauuacuauuggacgcuucuggagcccggcgacacaauuaucuuugaagcgaacgggaaucucauugccccucgcuacgcuuucgcccugagcagaggauuuggcuccgggaucauuaacagcaaugcucccauggauaagugugacgccaaaugccagaccccgcaaggagcgaucaacucuucccuuccuuuccagaaugugcaucccgucacaaucggcgaguguccuaaguaugugcggagcgccaaacugcgcaugguuaccggccucagaaacauucccucuauccagagccgggggcuguuuggagcuauugccggcuucaucgaagggggauggaccggcaugguggaugggugguacggauaucaccaccagaaugagcaaggcuccggcuacgcugccgaccagaagucuacacagaacgccauuaaugggaucacgaacaaagucaauagcgugaucgaaaagaugaacacccaguuuacagcuguuggaaaggaguucaacaaacuggagcgcagaauggaaaaucucaacaagaaaguggaugacggcuucauugauaucuggaccuacaaugcggagcugcuuguccugcucgaaaacgagcggacacuggacuuucaugacuccaaugugaagaaccuuuaugaaaaagucaagagccaacugaagaauaacgccaaagagauugggaauggaugcuucgaguuuuaccacaaguguaacgaugaaugcauggagucugugaaaaauggcaccuaugacuaccccaaguauuccgaagagagcaaacucaaccgcgagaagaucgaugggguuaagcuggaaucuaugggcguguaccagauucuggcuaucuauuccacggucgccagcucccucgugcugcuuguuucucugggagccaucagcuucuggaugugcuccaauggcucucuccaguguagaauuugcaucuga

SEQ ID NO: 205018 - RNA, 1698 nt, Artificial Sequence
  derived and/or modified CDS sequence (opt5) from hemagglutinin__InfluenzaA__AJK00091
augaaggugaaacugcucguccugcuuugcaccuucacagccacguacgcugacaccaucuguauuggcuaucacgccaacaauagcacagauaccguugacacagugcuggagaagaacgugaccgucacacauuccgugaaucuccuggaaaacucucacaaugggaaacuuugccugcucaagggaaucgcgccccugcagcugggcaacuguagcguugcuggguggauucucggaaauccugagugcgaacugcuuaucuccaaagagucuuggagcuacauuguggaaaagccgaaccccgagaauggcaccuguuauccugggcauuuugccgauuacgaggaacugagagagcaacucuccucugucagcuccuucgaacgguuugagaucuuccccaaggagagcucuuggccuaaccacacgaucaccggaguguccgccagcugcucucauaauggcgaauccagcuuuuaucgcaaccugcuuuggcugacaggcaaaaaugggcucuaccccaaccugucuaaguccuaugcuaauaacaaagagaaggaaguucuggugcucuggggaguccaccacccuccgaacauuggcgugcagaaagcccuguaccauaccgagaaugcuuacgugagcgucguuuccucucacuauagcagaaaguucacacccgaaaucgccaagcggccuaaagugcgcgaccaggaggggagaauuaacuacuauuggacccuucuggagcccggagauacgaucauuuuugaagcgaauggcaaccucaucgccccucgguacgcuuucgcccugucccgcggguuuggaagcggcauuaucaauucuaacgcucccauggacaagugugaugccaaaugccagacaccgcaaggcgcgaucaauuccagccuuccuuuccagaacgugcaucccgucaccauuggggaguguccuaaguaugugagaucugccaaacugcggaugguuacaggacuccgcaauauccccagcauucaguccagaggccuguuuggggcuaucgccggauucauugaaggcggguggaccggaaugguggacggcugguacggcuaucaccaccagaacgagcaagggucuggauacgcugccgaucaaaagagcacccagaaugccaucaacggcaucacaaauaaagucaacuccgugauugaaaagaugaauacgcaguuuaccgcuguugggaaggaguucaacaaacuggagcggcgcauggaaaaccucaauaagaaaguggacgauggauucaucgacauuuggacauacaacgcggagcugcuuguccugcucgaaaaugagagaacccuggauuuucaugacagcaacgugaagaaucuuuaugaaaaagucaagucucagcugaagaacaaugccaaagagaucggcaacgggugcuucgaguuuuaccacaaguguaaugacgaaugcauggaguccgugaaaaacggcacauaugauuaccccaaguauagcgaagagucuaaacucaaucgggagaagauugacggaguuaagcuggaauccaugggcguguaccagauccuggcuaucuauagcaccgucgccuccucucucgugcugcuuguuagccugggggccguguccuucuggaugugcucuaacggaagccuccagugucgcgucugcauuuga

SEQ ID NO: 205019 - RNA, 1698 nt, Artificial Sequence; identical to SEQ ID NO: 194560
  derived and/or modified CDS sequence (opt5) from hemagglutinin__InfluenzaA__AJK00103

SEQ ID NO: 205020 - RNA, 1701 nt, Artificial Sequence; identical to SEQ ID NO: 198992
  derived and/or modified CDS sequence (opt5) from hemagglutinin__InfluenzaA__AJK00114

SEQ ID NO: 205021 - RNA, 1701 nt, Artificial Sequence
  derived and/or modified CDS sequence (opt5) from hemagglutinin__InfluenzaA__AJK00125
augaaggccauccuggugguccuccuguacaccuucgcuacagccaacgcggacacgcuuugcauuggcuaucacgcuaauaacagcaccgauacaguugacaccgugcuggagaaaaaugugacagucacccauuccgugaaccuccuggaagauaagcacaaugggaaacuuuguaagcugagagagguugcuccccuccaucugggaaaaugcaacaucgccggcuggauucuggggaauccugaaugugagucucucagcacagccuccucuuggagcuacaucguggaaaccuccucuagcgacaacggaacgugcuauccgggcgauuuuauugacuacgaggagcugcgggaacagcuuuccagcgucucuuccuucgagcgcuuugaaaucuuccccaagaccaauagcuggccuaaccacgauucuaauaagggggugacagccgcuuguccccaugccggagcgaaauccuuuuauaagaaccugaucuggcucguuaaaaagggcaauagcuacccuaaacugucuaaguccuauauuaacgacaagggcaaagaggugcuuguccugugggggauccaccaccccagcaccuccgccgaucaacagucucucuaccagaaugcugacgccuacguguucgugggaacaagcagauauuccaagaaauuuaagccugagauugcuauccggccgaaaguccgcgaucaggaaggcagaaugaacuacuauuggacccugguugagcccggggacaagauuacguucgaagccacaggaaaccugguggugccucgguacgcguuugccauggagcgcaaugcuggcagcgggaucauuaucucugauacccccgucuaugacugcaacacaaccugucaaaccccuaaaggagccaucaauacaucccuccccuuccagaacauucauccgaucacgauuggcaagugcccuaaguacgugaaaagcaccaagcugagacuugcuacaggccugcggaauguucccucuauccagagccgcgggcucuuuggagccauugccggcuucaucgaagggggauggaccggcaugguggacgggugguauggauaccaccaucagaacgagcaaggcuccggcuacgcugcggaucugaaaucuacacagaaugccaucgacgagauuaccaacaaggucaauagcgugaucgaaaagaugaacacgcaguuuacagcuguugggaaagaguucaaucaccuugaaaagagaauugagaaccugaauaaaaagguggaugacggauuccucgauaucuggaccuauaacgccgaacugcugguccuccuggagaaugagcggacccuugacuaccacgauuccaacgugaaaaaccuguaugaaaagguccgcagccagcucaaaaauaacgccaaggagauuggcaauggguguuuugaguucuaccauaagugcgacaacacauguauggaaucugugaaaaauggaaccuaugauuacccuaaguauuccgaagaggcuaaacugaacagagagaagaucgacggcguuaaacuugaaagcacacggaucuaccaaauucuggccaucuacucuacgguggcguccagccucguccuggugguuucccugggggcuauuucuuuuuggaugugcagcaauggcucccuccagugccgcaucuguauuuga

SEQ ID NO: 205022 - RNA, 1701 nt, Artificial Sequence; identical to SEQ ID NO: 194741
  derived and/or modified CDS sequence (opt5) from hemagglutinin__InfluenzaA__AJK00136

SEQ ID NO: 205023 - RNA, 1704 nt, Artificial Sequence
  derived and/or modified CDS sequence (opt5) from hemagglutinin__InfluenzaA__AJK00166
auggagaagaucgugcugcuccuggccauugucagccuuguuaaauccgaccagaucugcauuggcuaccacgcuaacaauucuaccgaacaaguggauacaaucauggagaagaacgugacggucacccaugcccaggacauucuggagaaaacacacaaugggaagcucugugaucuggacggagugaaaccccuuauccugagagauugcagcguugcgggcuggcuccuggggaacccuaugugugacgaguucaucaaugugccggaaugguccuauauugucgagaaggcuaaccccgccaaugaucugugcuacccuggaaacuuuaaugacuaugaggaacucaagcaucugcuuucucggaucaaccacuucgagaaaauucagaucauucccaagagcuccuggucugaucaugaagccagcuccggcgugagcucugcuuguccuuaccaggggaaacccuccuuuuuccgcaauguuguguggcugaucaagaaaaacaauaccuauccuacaauuaagagaagcuacaacaauaccaaccaagaggaccuccugauccuuuggggaauccaccacucuaacgaugccgcugagcagacaaagcuguaucagaauccgaccacguacauuuccgucggcaccagcacacucaaccagcggcuggugcccaaaaucgccacccgcucuaaggugaauggccaauccgggagaauggacuuuuucuggacaauucugaaaccuaacgaugcgaucaauuuugaaagcaacggaaauuucauugcccccgaguacgcuuauaagaucgucaaaaagggcgacuccgccaucaugaaaucugaaguugaguacgggaacugcaauaccaagugucagacgccuauuggagcuaucaacagcuccaugcccuuucauaauauucacccgcucacaaucggcgaaugcccuaaguaugugaaaagcaacaagcuggugcuugccaccgggcugcgcaauucuccccuccgggagagacggcgcaaaagaggacuguucggcgcgauugccggcuuuaucgaagggggauggcagggcauggucgacgggugguacggauaucaucacuccaacgaacagggcagcggguacgcugccgauaaggagucuacacaaaaagcuaucgacggagugaccaauaagguuaacagcauuaucgauaagaugaacacccaguucgaagccgugggccgggaguuuaauaaccuugaacgcagaauugagaaucugaacaaaaagauggaggacggcuuccucgaugucuggacauauaaugccgaacugcuggugcucauggagaacgaacggacgcuggacuuccacgauuccaauguuaaaaaccuuuacgacaaggugcgccugcagcucagagauaaugcuaaagagcuggggaacggauguuuugaguucuaccauaagugcgacaaugaauguauggagucuguccggaacggcaccuaugauuacccucaauauagcgaagaggcgagacuuaagcgcgaagagaucuccggggugaaacuggagagcauuggaacauaccagauccucucuauuuauuccaccgucgccagcucucuggcucuggccaucaugguggccggccucucccuguggaugugcagcaaugggucccuucagugccggaucuguauuuga

SEQ ID NO: 205024 - RNA, 1707 nt, Artificial Sequence
  derived and/or modified CDS sequence (opt5) from hemagglutinin__InfluenzaA__AJK00177
auggagaagaucgugcugcuccuggccgucguuagccuugugagauccgaccagauuugcaucggcuaccacgcuaacaauucuaccgaacaaguggauacaauuauggagaaaaacgucacggugacccaugcccaggacauccuggaaaagacacacaaugggaaacucugugaucuggacggaguuaagccccuuauucugcgggauugcagcguggcgggcuggcuccuggggaacccuaugugugacgaguucaucaaugucccggaaugguccuauaucguggagaaagcuaaccccgccaaugaucugugcuacccuggaaaccucaaugacuaugaggaacugaagcaucuucugucucgcauuaaccacuuugagaagauccagauuauccccaaaagcuccuggucugaucaugaagccagccucggcguuuccagcgcuuguccuuaccaggggacccccucuuucuuuagaaauguggucuggcugauuaagaaaaacaauacauauccuaccaucaagcgguccuacaacaauacaaaccaagaggaccuucugauucucuggggaauccaccacagcaacgaugaggccgaacagaucaaacuguaucagaauccgaccacguacgugucugugggcaccuccacacugaaccagcgccucguccccaagauugcuaccagaagcaagguuaauggccaaucugggcggauggacuucuuuuggacaauccugaaaccugaugacgccauuaacuucgaguccaauggaaacuuuaucgcgcccgaauacgccuauaagauugugaaaaagggcgacagcgcuaucaugaaauccgagguggaauacgggaauugcaacaccaagugucagacgccuaucggagccauuaauucuagcaugcccuuccauaacauccacccgcuuacaauuggcgagugcccuaaauaugucaaguccaauaagcuggugcucgcuaccgggcugcgcaacagcccccuuagagagaaacggcgcagaaagcggggacuguuuggcgccaucgcgggcuucauugaagggggauggcagggcaugguugaugggugguacggauaucaucacucuaaugagcagggcuccggguacgccgcugacaaagaaagcacacaaaaggccaucgauggagugaccaacaaagucaauucuaucauugacaagaugaacacccaguuugaggcugugggccgcgaguucaacaaucucgaaagacggaucgagaaccugaauaagaaaauggaagauggcuuucuggacguuuggacauauaacgccgagcuccuggugcuuauggaaaaugagcgcacgcuggauuuccacgacagcaacgucaagaaucucuacgauaaagugagacugcagcuucgggacaacgccaaggaacuggggaauggauguuucgaguuuuaccauaaaugcgauaacgaguguauggaauccgucagaaauggcaccuaugacuacccucaauauucugaggaagcucgccucaagcgggaggagauuagcggggugaagcuggaauccaucggaauuuaccagauccugagcauuuauucuacaguugcguccagccucgcccuggcuaucaugguggccggccuuucucuguggaugugcuccaacgggagccuccagugcagaaucuguauuuga

SEQ ID NO: 205025 - RNA, 1704 nt, Artificial Sequence
  derived and/or modified CDS sequence (opt5) from hemagglutinin__InfluenzaA__AJK00188
auggagaagaucgugcugcuccuggccgucguuagccuugugagauccgaccagauuugcaucggcuaccacgcuaacaauucuaccgaacaaguggauacaauuauggagaaaaacgucacggugacccaugcccaggacauccuggaaaagacacacaaugggaaacucugugaucuggacggaguuaagccccuuauucugcgggauugcagcguggcgggcuggcuccuggggaacccuaugugugacgaguucaucaaugucccggaaugguccuauaucguggagaaagcuaaccccgccaaugaucugugcuacccuggaaaccucaaugacuaugaggaacugaagcaucuucugucucgcauuaaccacuuugagaagauccagauuauccccaaaagcuccuggucugaucaugaagccagccucggcguuuccagcgcuuguccuuaccaggggacccccucuuucuuuagaaauguggucuggcugauuaagaaaaacaauacauauccuaccaucaagcgguccuacaacaauacaaaccaagaggaccuucugauucucuggggaauccaccacagcaacgaugaggccgaacagaucaaacuguaucagaauccgaccacguacauuucugugggcaccuccacacugaaccagcgccucgugcccaagaucgcuaccagaagcaaggucaauggccaaucugggcggauggacuucuuuuggacaauucugaaaccugaugacgccaucaacuucgaguccaauggaaacuuuauugcgcccgaauacgccuauaagaucguuaaaaagggcgacagcgcuaucaugaaauccgagguggaauacgggaauugcaacaccaagugucagacgccuauuggagccaucaauucuagcaugcccuuccauaacauucacccgcuuacaaucggcgagugcccuaaauaugugaaguccaauaagcugguccucgcuaccgggcugcgcaacagcccccuuagagagaaacggcgcaagagaggacuguuuggcgccauugcgggcuucaucgaagggggauggcagggcaugguggaugggugguacggauaucaucacucuaaugagcagggcuccggguacgccgcugacaaagaaagcacacaaaaggccaucgauggaguuaccaacaaagucaauucuauuaucgacaagaugaacacccaguuugaggcugugggccgggaguucaacaaucucgaacgcagaauugagaaccugaauaagaaaauggaagauggcuuucuggacguguggacauauaacgccgagcuccugguucuuauggaaaaugagcggacgcuggauuuccacgacagcaacgugaagaaucucuacgauaaaguccgccugcagcuuagagacaacgccaaggaacuggggaauggauguuucgaguuuuaccauaaaugcgauaacgaguguauggaauccgugcggaauggcaccuaugacuacccucaauauucugaggaagcuagacucaagcgcgaggagaucagcggggucaagcuggaauccauuggaacauaccagauccugagcauuuauucuaccguggcguccagccucgcccuggcuaucaugguugccggccuuucucuguggaugugcuccaacgggagccuccagugccggaucuguauuuga

SEQ ID NO: 205026 - RNA, 1704 nt, Artificial Sequence
  derived and/or modified CDS sequence (opt5) from hemagglutinin__InfluenzaA__AJK00207
auggagaagaucgugcugcuccuggccauugucagccuuguuagauccgaccagaucugcauuggcuaccacgcuaacaauucuaccgaacaaguggauacaaucauggagaaaaacgugacggucacccaugcccaggacauucuggaaaagacacacaaugggaaacucugugaucuggacggagugaagccccuuauccugcgggauugcagcguugcgggcuggcuccuggggaacccuaugugugacgaguucaucaaugugccggaaugguccuauauugucgagaaagcuaaccccgccaaugaucugugcuacccuggaaacuuuaaugacuaugaggaacucaagcaucugcuuucucgcaucaaccacuucgagaagauucagaucauucccaaaagcuccuggucugaucaugaagccagcuccggcgugagcucugcuuguccuuaccaggggacccccuccuuuuucagaaauguuguguggcugaucaagaaaaacaauacauauccuaccauuaagcggagcuacaacaauacaucucaagaggaccuccugguccuuuggggaauccaccacuccaacgaugccaccgagcagaugaaacuguaucagaacccgacgaccuacgugagcgugggcacaucuacccucaaucagcgccugguccccaagaucgcuacaagauccaagguuaacggccaaagcgggcggauggacuuuuucuggaccauucugaaauccaaugaugccaucaacuuugaaucuaauggaaacuucauugcgccugaguacgccuauaagaucgugaaaaagggcgacagcgcuauuaugaaauccgaaguggaguacgggaauugcagcacgaagugucagacacccaucggagccaucaacucuuccaugccuuuucauaauauucacccccucaccaucggcgaaugcccgaaauaugucaagagcaacaagcuggugcuugcuacagggcugcgcaauucuccucucagagagcggcgcagaaaacggggacuguucggcgccauugcgggcuuuaucgaagggggauggcagggcaugguugacgggugguacggauaucaucacagcaacgaacagggcuccggguacgccgcugauaaggagucuacccaaaaagccauugacggagugaccaauaaggucaacagcaucaucgauaaaaugaauacacaguucgaagcugugggccgcgaguuuaacaaccuugaaagacggauugagaaucugaacaagaagauggaggacggcuuccucgauguuuggacguauaaugccgaacugcuggugcucauggagaacgaacgcacccuggacuuccacgauuccaaugucaaaaaccuuuacgacaaggugagacugcagcuccgggauaauacaaaagagcuggggaacggauguuuugaguucuaccauaagugcgacaaugaguguauggagagcgucagaaacggcaccuaugauuacccccaauauucugaagaggcccgccuuaaacgggaagagaucuccggggugaagcuggagagcauuggaacauaccagauccucucuauuuauuccaccguugcuagcucccuggcgcuggccaucaugguggcuggccucucucuguggaugugcagcaaugggucccuucagugcagaauuuguaucuga

SEQ ID NO: 205027 - RNA, 1704 nt, Artificial Sequence
  derived and/or modified CDS sequence (opt5) from hemagglutinin__InfluenzaA__AJK00218
auggagaagaucgugcuguuccucgccauugucagccugguuagauccgaccagaucugcauuggcuaccacgcuaacaauucuaccgaacaaguggauacaaucauggagaagaacgugacggucacccaugcccaggacauucuugaaaagacacacaaugggaaacugugugaucucgacggagugaagccccugauccuucgggauugcagcguugcgggcuggcugcucgggaacccuaugugugacgaguuuaucaaugugccggaaugguccuauauugucgagaaagcuaaccccgccaaugaucugugcuacccuggaaacuucaaugacuaugaggaacugaagcaucuccugucucgcaucaaccacuuugagaagauuagaaucauucccaaaagcuccuggccugaucaugaagccucuagcggcguguccagcgcuugucccuaccaggggaccccuucuuucuuucggaauaucguuuggcuuauuaagaaaaacaauacauauccgaccaucaagcgcuccuacaacaauacaagccaggaggaccugcucgugcuguggggaauccaccacucuuccgaugccaccgagcaaauuaaacuuuaucagaaccccacgaccuacgucagcgugggcacaucuacccugaaccagagacucgugccuaagaucgcuacacgguccaaggucaauggccagagcgggcgcauggacuucuuuuggaccauucugaaauccaacgaugccaucaauuucgaaucuaacggaaauuuuauugcgcccgaguacgccuauaagaucguuaaaaagggcgacagcgcuaucaugaaauccgaaguggaguacgggaacugcagcacgaagugucaaacaccuauuggagccaucaauucuuccaugcccuuccauaacauucacccgcugaccaucggcgaaugcccuaaauaugucaagagcaauaagcucgugcuggcuacagggcuuagaaacucuccccugcgggagcgcagacggaaacgcggacucuuuggcgccauugcgggcuucaucgaagggggauggcagggcaugguggacgggugguacggauaucaucacagcaaugagcagggcuccggguacgccgcugauaaggagucuacccagaaagccaucgacggaguuaccaacaaggugaauagcauuaucgauaaaaugaacacacaauuugaagcugucggcagagaguucaauaaccuggaacggcgcauugagaaccuuaauaagaagauggaggacggcuuccuggauguguggacguauaacgccgaacuccugguucugauggagaaugaaagaacccucgacuuucacgauuccaacgugaaaaaucuguacgacaagguccggcuucagcugagagauaacgccaaagagcucgggaauggauguuucgaauuuuaccauaagugcgacaacgaguguauggagagcgugcgcaauggcacauaugauuacccucaguauucugaagaggcucggcugaaaagagaagagaucuccggggucaaacuugagagcauuggaaccuaccaaauccugucuauuuauuccacagcggccagcucccucgcucuggccaucaugguggccggccugucucucuggaugugcagcaacgggucccugcagugccgcaucuguauuuga

SEQ ID NO: 205028 - RNA, 1704 nt, Artificial Sequence
  derived and/or modified CDS sequence (opt5) from hemagglutinin__InfluenzaA__AJK00239
auggagaagaucgugcugcuccuggccauugucagccuuguuagauccgaccagaucugcauuggcuaccacgcuaacaauucuaccgaacaaguggauacaaucauggagaaaaacgugacggucacccaugcccaggacauucuggaaaagacacacaaugggaaacucugugaucuggacggagugaagccccuuauccugcgggauugcagcguugcgggcuggcuccuggggaacccuaugugugacgaguucaucaaugugccggaaugguccuauauugucgagaaagcuaaccccgccaaugaucugugcuacccuggaaacuuuaaugacuaugaggaacucaagcaucugcuuucucgcaucaaccacuucgagaagauucagaucauucccaaaagcuccuggucugaucaugaagccagcuccggcgugagcucugcuuguccuuaccaggggacccccuccuuuuucagaaauguuguguggcugaucaagaaaaacaauacauauccuaccauuaagcggagcuacaacaauacaucucaagaggaccuccugguccuuuggggaauccaccacuccaacgaugccaccgagcagaugaaacuguaucagaacccgacgaccuacgugagcgugggcacaucuacccucaaucagcgccugguccccaagaucgcuacaagauccaagguuaacggccaaagcgggcggauggacuuuuucuggaccauucugaaauccaaugaugccaucaacuuugaaucuaauggaaacuucauugcgccugaguacgccuauaagaucgugaaaaagggcgacagcgcuauuaugaaauccgaaguggaguacgggaauugcagcacgaagugucagacacccaucggagccaucaacucuuccaugccuuuucauaauauucacccccucaccaucggcgaaugcccgaaauaugucaagagcaacaagcuggugcuugcuacagggcugcgcaauucuccucucagagagcggcgcagaaaacggggacuguucggcgccauugcgggcuuuaucgaagggggauggcagggcaugguugacgggugguacggauaucaucacagcaacgaacagggcuccggguacgccgcugauaaggagucuacccaaaaagccauugacggagugaccaauaaggucaacagcaucaucgauaaaaugaauacacaguucgaagcugugggccgcgaguuuaacaaccuugaaagacggauugagaaucugaacaagaagauggaggacggcuuccucgauguuuggacguauaaugccgaacugcuggugcucauggagaacgaacgcacccuggacuuccacgauuccaaugucaaaaaccuuuacgacaaggugagacugcagcuccgggauaaugccaaagagcuggggaacggauguuuugaguucuaccauaagugcgacaaugaguguauggagagcgucagaaacggcacauaugauuacccccaauauucugaagaggcucgccuuaaacgggaagagaucuccggggugaagcuggagagcauuggaaccuaccagauccucucuauuuauuccacaguugcgagcucccuggcccuggcuaucaugguggccggccucucucuguggaugugcagcaaugggucccuucagugcagaauuuguaucuga

SEQ ID NO: 205029 - RNA, 1704 nt, Artificial Sequence
  derived and/or modified CDS sequence (opt5) from hemagglutinin__InfluenzaA__AJS18468
auggagaagaucgugcugcuccuggccgucguuagccuugugaaauccgaccagauuugcaucggcuaccacgcuaacaauucuaccgaacaaguggauacaauuauggagaagaacgucacggugacccaugcccaggacauccuggagaaaacacacaaugggagacucugugaucugaacggaguuaagccccuuauucugaaagacugcagcguggcgggcuggcuccuggggaauccuaugugugaugaguucauccgggucccggaaugguccuauaucguggagcgcgcuaaccccgccaaugaccugugcuacccuggaaaccucaaugauuaugaggaacugaagcaucuucugucuagaauuaaccacuuugagaagacccucaucauucccaaaagcuccuggccuaaucaugaaacaucucugggcguuagcgccgcuugucccuaccagggggugccuuccuucuuucggaacgucguguggcuuaccaagaaaaaugacgccuauccgacaaucaagaugagcuacaacaauaccaaccgcgaggaucugcucauucuguggggaauccaccacucuaacaaugcugccgagcagacgaaccuguauaaaaaucccaccacauacguguccgucggcaccagcacacucaaccaaagacugguuccuaagauugcgacccggucucaggugaauggccagcgcgggagaauggacuucuuuuggacgauccuuaagcccaacgaugccauccauuucgaauccaauggaaacuuuauugcuccugaguacgccuauaaaaucgugaagaaaggcgacagcacaauuaugaagucugaaauggaguacgggcacugcaauaccaaaugucagacacccaucggagcuauuaacuccagcaugccguuccauaauauccacccucugaccaucggcgaaugccccaaguaugucaaauccaacaagcucgugcuggccaccgggcuucgcaauucuccucugcgggagagacggcgcaagagaggacucuuuggcgcgauugccggcuucaucgaagggggauggcaaggcaugguugaugggugguacggauaucaccauagcaacgaacagggcuccggguacgcugccgaccgggagagcacacagaaagcuauugacggagugacgaauaaggucaacucuaucauugauaaaaugaacacccaguuugaagccgugggccgcgaguucaauaaccuggaaagacggaucgagaaucugaacaagaaaauggaggacggcuuucucgauguuuggacauauaaugccgaacugcuugugcugauggagaacgaaagaacccucgacuuccacgauuccaaugucaagaaccuguacgacaaggugcgccuucaacugcgggauaaugcuaaagagcucgggaacggauguuucgaauuuuaccauaagugcgacaaugaguguauggagagcgucagaaacggcacauaugauuacccccaguauucugaagaggcgcgccugaaacgggaagagaucagcggggugaagcuggaguccauuggaaccuaccagauccucucuauuuauagcacgguugccuccagccugacacuugcuaucauuguggccggccugucucucuggaugugcuccaaugggagccugcaaugcagaaucuguauuuga

SEQ ID NO: 205030 - RNA, 1704 nt, Artificial Sequence
  derived and/or modified CDS sequence (opt5) from hemagglutinin__InfluenzaA__AJS18479
auggagaagaucgugcugcuccuggccgucguuagccuugugaaauccgaccagauuugcaucggcuaccacgcuaacaauucuaccgaacaaguggauacaauuauggagaagaacgucacggugacccaugcccaggacauccuggagaaaacacacaaugggagacucugugaucugaacggaguuaagccccuuauucugaaagacugcagcguggcgggcuggcuccuggggaauccuaugugugaugaguucauccgggucccggaaugguccuauaucguggagcgcgcuaaccccgccaaugaccugugcuacccuggaaaccucaaugauuaugaggaacugaagcaucuucugucuagaauuaaccacuuugagaagacccucaucauucccaaaagcuccuggccuaaucaugaaacaucucugggcguuagcgccgcuugucccuaccaggggaugccuuccuucuuucggaacguggucuggcuuaccaagaaaaaugacacauauccgaccaucaagaugagcuacaacaauacgaaccgcgaggaucugcucauucuguggggaauccaccacucuaacaaugccgcugagcagaccaaccuguauaaaaaucccacaaccuacguguccgugggcacagccacccucaaccaaagacuggucccuaagauugcgacgcggagccagguuaauggccagcgcgggagaauggacuucuuuuggacaauccuuaagcccaacgaugccauccauuucgaaucuaauggaaacuuuauugcuccugaguacgccuauaaaaucgugaagaaaggcgacuccaccauuaugaaguccgaaauggaguacgggcacugcaauacaaaaugucagacccccaucggagcuauuaacucuuccaugccguuccauaauauccacccucugaccaucggcgaaugccccaaguaugugaaaagcaacaagcucguccuggccacagggcuucggaauagcccucugcgcgagagacggcgcaagagaggacucuuuggcgcgauugccggcuucaucgaagggggauggcaaggcaugguggaugggugguacggauaucaccauucuaacgaacagggcagcggguacgcugccgaccgggaguccacgcagaaagcuauugacggaguuaccaauaaggugaacagcaucauugauaaaaugaacacacaguuugaagccgucggccgcgaguucaauaaccuggaaagacggaucgagaaucugaacaagaaaauggaggacggcuuucucgauguguggaccuauaaugccgaacugcuuguucugauggagaacgaaagaacacucgacuuccacgauucuaaugugaagaaccuguacgacaagguccgccuucaacugcgggauaaugcuaaagagcucgggaacggauguuucgaauuuuaccauaagugcgacaaugaguguauggaguccgugagaaacggcaccuaugauuacccccaguauagcgaagaggcgcgccugaaacgggaagagaucucuggggucaagcuggagagcauuggaacguaccagauccucuccauuuauucuacaguggccagcucccuggcucuugccaucauuguugccggccugagccucuggaugugcucuaaugggucccugcaaugcagaaucuguauuuga

SEQ ID NO: 205031 - RNA, 1704 nt, Artificial Sequence
  derived and/or modified CDS sequence (opt5) from hemagglutinin__InfluenzaA__AJY79339
auggagaagaucgugcugcuccuggccauugucagcaucguuaaauccgaccagauuugcaucggcuaccacgcuaacaauucuaccgaacaaguggauacaauuauggagaagaacgugacggucacccaugcccaggacauccuugaaaagacacacaaugggaagcuguguaaccucgauggagugaaaccccugauccuuagagacugcagcguugcgggcuggcugcucgggaauccuaugugugaugaguuccugaacgugccggaaugguccuauauugucgagaagaucaaucccgcuaacgaccugugcuacccuggaaaucucaacgauuaugaggaacugaagcaucuucugucucggauuaaucacuuugagaaaauccagauuauccccaaggacagcugguccgaucaugaagccucuggcgugagcuccgccuguccuuaccaggggcgcagcucuuucuuuagaaacguuguguggcucaccaaaaagaaugacgcuuaucccacaauuaaaaaguccuacaacaauaccaaccaagaggaucugcuuguccuguggggaauccaccacccuaacgacgccgcugagcagacacggcucuaucagaauccgaccacguacaucagcgugggcaccucuacacugaaccagcgccuggugcccaagauugccaccagauccaaagucaauggccaaagcgggcggauggaguucuuuuggacaauccucaagucuaacgaugcgauuaauuucgaauccaacggaaauuuuaucgccccugaaaacgcuuacaaaauuguuaagaaaggcgacagcaccaucaugaaguccgagcuggaauauucuaauugcaacacgaaaugucagacacccaucggggccauuaauagcuccaugccuuuccauaacauccacccccuuaccauuggagagugcccgaaguacgugaaaagcaaucgccuggugcucgcuacaggccugagaaacucuccucagggggagaaacggcgcaagaaaagaggacuuuuuggcgccaucgcgggcuucauugaagggggauggcagggcauggucgacgggugguauggauaccaucacuccaaugagcaaggcagcggguaugccgcugauaaggaaucuacccagcgggccaucgacggagugaccaacaaaguuaacagcaucauugauaagaugaauacacaguuugaggcugugggccgcgaguucaacaaucuggaaagacggaucgagaaccucaauaagaaaauggaagacggcuuucuggaugucuggacguacaacgccgagcugcucgugcugauggaaaaugagcgcacccuugacuuccacgauuccaacguuaagaaucuguaugacaaagugagacuccaacugcgggauaacgccaaggaacuugggaauggauguuucgaguuuuaccauagaugcgacaacgaguguauggaaucuguccgcaauggcacauacgauuauccccaguacagcgaggaagcucggcugaaaagagaggagauuuccggggugaagcucgaaagcaucggaaccuaucagauucugucuaucuacuccacagucgcgagcucucuggcccucgcuauuaugguggccggccugucccuuuggaugugcagcaacgggucccugcagugccgcaucuguaucuga

SEQ ID NO: 205032 - RNA, 1704 nt, Artificial Sequence
  derived and/or modified CDS sequence (opt5) from hemagglutinin__InfluenzaA__AJY79341
auggagaagaucgugcugcuccuggccauugucagcaucguuaaauccgaccagauuugcaucggcuaccacgcuaacaauucuaccgaacaaguggauacaauuauggagaagaacgugacggucacccaugcccaggacauccuugaaaagacacacaaugggaagcuguguaaccucgauggagugaaaccccugauccuuagagacugcagcguugcgggcuggcugcucgggaauccuaugugugaugaguuccugaacgugccggaaugguccuauauugucgagaagaucaaucccgcuaacgaccugugcuacccuggaaauuuuaacgauuaugaggaacucaagcaucugcuuucucggauuaaucacuucgagaaaauccagauuauccccaaggacagcugguccgaucaugaaaccucuggcgugagcuccgccuguccuuaccaggggcgcagcuccuuuuucagaaacguuguguggcugaccaaaaagaaugacgccuaucccacaauuaaaaagucuuacaacaauacaaaccaagaggaucuccugguccuuuggggaauccaccacccuaacgacgcugccgagcagacccggcuguaucagaauccgacgaccuacaucagcgugggcacaucuacccucaaccagcgccuggugcccaagauugcuacaagauccaaagucaauggccaaaacgggcggauggaauuuuucuggaccauccugaaaagcaaugaugccauuaacuuugagucuaauggaaacuucaucgcgccugaaaaugccuacaaaauuguuaagaaaggcgacuccacgaucaugcgcagcgagcucgaauauuccaacugcaauacaaagugucagacccccaucggggcuauuaacucuagcaugccuuuucauaauauccacccccugacaauuggagagugcccgaaauacgugaaguccaacagacuugugcuggccaccggccuccggaauagcccucagggggagaagcgccggaaaaagagaggacuguucggcgcuaucgccggcuuuauugaagggggauggcagggcauggucgacgggugguauggauaccaucacucuaacgagcaaggcuccggguaugcggccgauaaagaaagcacccagcgcgcuaucgacggagugacaaacaagguuaauucuaucauugauaaaaugaacacgcaguucgaggccgugggcagagaauuuaauaaccuugagcggcgcaucgagaaucugaacaagaagauggaagacggcuuccucgaugucuggaccuacaaugcugagcugcuggugcucauggaaaacgagagaacacuggacuuccacgauagcaauguuaaaaaccuuuaugacaaggugcggcugcaacucagagauaaugccaaagaacuggggaacggauguuuugaguucuaccaucgcugcgacaaugaguguauggaauccguccggaacggcaccuacgauuauccccaguacucugaggaagccagacuuaagcgcgaggagauuagcggggugaaacuggaauccaucggaacauaucagauucucagcaucuacucuaccgucgcuuccagccuggcgcuggccauuaugguggcuggccucucucuguggaugugcuccaaugggagccuucagugccggaucuguaucuga

SEQ ID NO: 205033 - RNA, 1704 nt, Artificial Sequence
  derived and/or modified CDS sequence (opt5) from hemagglutinin__InfluenzaA__AJY79342
auggagaagaucgugcugcuccuggccauugucagcaucguuaaauccgaccagauuugcaucggcuaccacgcuaacaauucuaccgaacaaguggauacaauuauggagaagaacgugacggucacccaugcccaggacauccuugaaaagacacacaaugggaagcuguguaaccucgauggagugaaaccccugauccuuagagacugcagcguugcgggcuggcugcucgggaauccuaugugugaugaguuccugaacgugccggaaugguccuauauugucgagaagaucaaucccgcuaacgaccugugcuacccuggaaauuuuaacgauuaugaggaacucaagcaucugcuuucucggauuaaucacuucgagaaaauccagauuauccccaaggacagcugguccgaucaugaagccucuggcgugagcuccgccuguccuuaccaggggcgcagcuccuuuuucagaaacguuguguggcugaccaaaaagaaugacgcuuaucccacaauuaaaaagucuuacaacaauaccaaccaagaggaucuccugguccuuuggggaauccaccacccuaacgacgccgcugagcagacacggcuguaucagaauccgaccacguacaucagcgugggcaccucuacacucaaccagcgccuggugcccaagauugccaccagauccaaagucaauggccaaagcgggcggauggaauuuuucuggacaauccugaagucuaacgaugcgauuaauuuugaguccaacggaaauuucaucgccccugaaaacgcuuacaaaauuguuaagaaaggcgacagcaccaucaugaaguccgagcucgaauauucuaauugcaacacgaaaugucagacacccaucggggccauuaauagcuccaugccuuuucauaacauccacccccugaccauuggagagugcccgaaguacgugaaaagcaaucgccuugugcuggcuacaggccucagaaacucuccucagggggagaaacggcgcaagaaaagaggacuguucggcgccaucgcgggcuuuauugaagggggauggcagggcauggucgacgggugguauggauaccaucacuccaaugagcaaggcagcggguaugccgcugauaaggaaucuacccagcgggccaucgacggagugaccaacaaaguuaacagcaucauugauaagaugaauacacaguucgaggcugugggccgcgaauuuaacaaucuugagagacggaucgagaaccugaauaagaaaauggaagacggcuuccucgaugucuggacguacaacgccgagcugcuggugcucauggaaaaugagcgcacccuggacuuccacgauuccaacguuaagaaucuuuaugacaaagugagacugcaacuccgggauaacgccaaggaacuggggaauggauguuuugaguucuaccauagaugcgacaacgaguguauggaaucuguccgcaauggcacauacgauuauccccaguacagcgaggaagcucggcuuaaaagagaggagauuuccggggugaagcuggaaagcaucggaaccuaucagauucucucuaucuacuccacagucgcgagcucucuggcccuggcuauuaugguggccggccucucccuguggaugugcagcaacgggucccuucagugccgcaucuguaucuga

SEQ ID NO: 205034 - RNA, 1704 nt, Artificial Sequence
  derived and/or modified CDS sequence (opt5) from hemagglutinin__InfluenzaA__AJY79343
auggagaagaucgugcugcuccuggccauugucagcaucguuaaauccgaccagauuugcaucggcuaccacgcuaacaauucuaccgaacaaguggauacaauuauggagaagaacgugacggucacccaugcccaggacauccuugaaaagacacacaaugggaagcuguguaaccucgauggagugaaaccccugauccuuagagacugcagcguugcgggcuggcugcucgggaauccuaugugugaugaguuccugaacgugccggaaugguccuauauugucgagaagaucaaucccgcuaacgaccugugcuacccuggaaauuuuaacgauuaugaggaacucaagcaucugcuuucucggauuaaucacuucgagaaaauccagauuauccccaaggacagcugguccgaucaugaagccucuggcgugagcuccgccuguccuuaccaggggcgcagcuccuuuuucagaaacguuguguggcugaccaaaaagaaugacgcuuaucccacaauuaaaaagucuuacaacaauaccaaccaagaggaucuccugguccuuuggggaauccaccacccuaacgacgccgcugagcagacacggcuguaucagaauccgaccacguacaucagcgugggcaccucuacacucaaccagcgccuggugcccaagauugccaccagauccaaagucaauggccaaagcgggcggauggaauuuuucuggacaauccugaagucuaacgaugcgauuaauuuugaguccaacggaaauuucaucgccccugaaaacgcuuacaaaauuguuaagaaaggcgacagcaccaucaugaaguccgagcucgaauauucuaauugcaacacgaaaugucagacacccaucggggccauuaauagcuccaugccuuuucauaacauccacccccugaccauuggagagugcccgaaguacgugaaaagcaaucgccuugugcuggcuacaggccucagaaacucuccucagggggagaaacggcgcaagaaaagaggacuguucggcgccaucgcgggcuuuauugaagggggauggcagggcauggucgacgggugguauggauaccaucacuccaaugagcaaggcagcggguaugccgcugauaaggaaucuacccagcgggccaucgacggagugaccaacaaaguuaacagcaucauugauaagaugaauacacaguucgaggcugugggccgcgaauuuaacaaucuugagagacggaucgagaaccugaauaagaaaauggaagacggcuuccucgaugucuggacguacaacgccgagcugcuggugcucauggaaaaugagcgcacccuggacuuccacgauuccaacguuaagaaucuuuaugacaaagugagacugcaacuccgggauaacgccaaggaacuggggaauggauguuuugaguucuaccauagaugcgacgaugaguguauggaaucuguccgcaacggcacauacgacuauccccaguacagcgaggaagcucggcuuaaaagagaggagauuuccggggugaagcuggaaagcaucggaaccuaucagauucucucuaucuacuccacagucgcgagcucucuggcccuggcuauuaugguggccggccucucccuguggaugugcagcaaugggucccuucagugccgcaucuguaucuga

SEQ ID NO: 205035 - RNA, 1704 nt, Artificial Sequence
  derived and/or modified CDS sequence (opt5) from hemagglutinin__InfluenzaA__AJY79345
auggagaagaucgugcugcuccuggccauugucagcaucguuaaauccgaccagauuugcaucggcuaccacgcuaacaauucuaccgaacaaguggauacaauuauggagaagaacgugacggucaccagagcccaggacauccuugaaaagacacauaaugggaagcuguguaaccucgauggagugaaaccccugauccuucgggacugcagcguugcgggcuggcugcucgggaauccuaugugugaugaguuccugaacgugccggaaugguccuauauugucgagaagaucaaucccgcuaacgaccugugcuacccuggaaauuuuaacgauuaugaggaacucaagcaucugcuuucucgcauuaaucacuucgagaaaauccagauuauccccaaggacagcugguccgaucacgaagccucuggcgugagcuccgccuguccuuaccaggggagaagcuccuuuuuccggaacguuguguggcugaccaaaaagaaugacgcuuaucccacaauuaaaaagucuuacaacaauaccaaccaagaggaucuccugguccuuuggggaauccaucacccuaacgacgccgcugagcagacacgccuguaucagaauccgaccacguacaucagcgugggcaccucuacacucaaccagagacuggugcccaagauugccacccgguccaaagucaauggccaaagcgggcgcauggaauuuuucuggacaauccugaagucuaacgaugcgauuaauuuugaguccaacggaaauuucaucgccccugaaaacgcuuacaaaauuguuaagaaaggcgacagcaccaucaugaaguccgagcucgaauauucuaauugcaacacgaaaugucagacacccaucggggccauuaauagcuccaugccuuuucacaacauccauccccugaccauuggagagugcccgaaguacgugaaaagcaauagacuugugcuggcuacaggccuccggaacucuccucagggggagaaacgcagaaagaaacggggacuguucggcgccaucgcgggcuuuauugaagggggauggcagggcauggucgacgggugguauggauaccaccauuccaaugagcaaggcagcggguaugccgcugauaaggaaucuacccagcgcgccaucgacggagugaccaacaaaguuaacagcaucauugauaagaugaauacacaguucgaggcugugggcagagaauuuaacaaucuugagcggcgcaucgagaaccugaauaagaaaauggaagacggcuuccucgaugucuggacguacaacgccgagcugcuggugcucauggaaaaugagagaacccuggacuuccacgauuccaacguuaagaaucuuuaugacaaagugcggcugcaacucagagauaacgccaaggaacuggggaauggauguuuugaguucuaccaccgcugcgacaacgaguguauggaaucuguccggaauggcacauacgauuauccccaguacagcgaggaagcuagacuuaaacgcgaggagauuuccggggugaagcuggaaagcaucggaaccuaucagauucucucuaucuacuccacagucgcgagcucucuggcccuggcuauuaugguggccggccucucccuguggaugugcagcaacgggucccuucagugccggaucuguaucuga

SEQ ID NO: 205036 - RNA, 1701 nt, Artificial Sequence; identical to SEQ ID NO: 204513
  derived and/or modified CDS sequence (opt5) from hemagglutinin__InfluenzaA__AKA54643

SEQ ID NO: 205037 - RNA, 1701 nt, Artificial Sequence
  derived and/or modified CDS sequence (opt5) from hemagglutinin__InfluenzaA__AKA54650
augaagaccaucauugcccugagcuacauccucugccugguguucacacagaaaauucccggcaacgacaauuccacggcuacccuuugucuggggcaccaugccgucccuaacggaacaaucguuaagaccauuacaaaugauagaaucgaggugaccaacgcgacagaacucgugcaaaauucuagcaucggcgagauuugcgacuccccgcaccagauccuggauggggaaaacuguacccuuauugacgcucugcucggagauccccagugcgacggcuuucagaauaaaaagugggaucuguucgucgagcggucuaaagccuauagcaacuguuacccuuaugacgugcccgauuacgccucccugcgcucucucguugcuagcuccgggacgcuggaauuuaauaacgagagcuucaauuggaccggagugacacaaaacggcaccucuuccgccugcaucagacggucuagcuccagcuuuuucucucgccuuaauuggcugacacaucucaacuauaaguacccugcucugaaugucaccaugcccaacaacgagcaguuugacaaacuuuauauuuggggcgugcaccauccugggacggauaaggaccagaucuuccuguacgcccaguccagcggaagaauuacaguuuccaccaagcggucucaacaggcggugaucccgaauaucggcagccgcccccggauuagagauaucccuucccgcauuagcaucuacuggacaauugucaaacccggggacauccuccugaucaacucuaccggaaaucugauugccccuagaggcuauuuuaagauccgguccgggaaaagcucuauuaugcgcagcgacgcucccaucggaaaguguaaguccgaaugcauuaccccgaacggcucuaucccuaaugauaaacccuuccagaacgugaauagaaucacauacggcgccuguccucgguaugugaagcacagcacgcucaaacuggcuaccgggaugcgcaacguccccgagaagcagacaagaggaauuuuuggcgccaucgcgggguucauugaaaauggaugggagggcaugguugacgggugguacggauuucggcaccaaaacuccgagggcagaggccaggccgcugaucuuaaaagcacccaggccgcuaucgaccaaauuaaugggaagcugaaccgccucaucggaaaaacaaaugaaaaguuccaucagauugagaaggaguucucugaaguggaaggccggauccaggaucuggagaaauauguggaggacaccaagaucgaucuuugguccuacaacgccgaacugcucgucgcccuggagaaucagcacacgauugaccugacagauagcgaaaugaacaaacucuuugagaagaccaaaaagcaacugagagaaaacgcugaggacauggggaauggaugcuucaagaucuaucauaaaugugauaacgcgugcauuggcucuauccgcaaugggaccuacgaccacaacguguaccgggacgaggcccuuaauaacagauuucagauuaagggcguugaacugaaauccggauauaaggauuggauccucuggaucagcuucgcuauuuccugcuuucugcuuuguguggcccugcucggcuucaucaugugggccugccagaaagggaauauucgcuguaacaucugcauuuga

SEQ ID NO: 205038 - RNA, 1701 nt, Artificial Sequence
  derived and/or modified CDS sequence (opt5) from hemagglutinin__InfluenzaA__AKA54651
augaagaccaucauugccuucagcugcauccugugucagauuuccgcucaaaaacuccccggcucugacaacagcauggccacacugugccuugggcaccaugcggugccuaauggaacgcuggucaagaccaucacagaugaccagauugagguuaccaacgcuacagaacucgugcaguccaccucuaaaggcgagaucuguagcuccccgcaccagauccuggaugggaagaauugcacacuuauugacgcccugcucggagauccccauugugacgauuuucaaaacaaaaagugggaccuguucguggaaagaucuaccgccuacagcaauugcuauccuuacuauguccccgauuacgcuucccugcggagccucguggccucuuccggcacgcuggaguuuacccaggaaucuuucaacuggacagggguugcucaggacggagccucuuauuccugucgcagagagagcgagaauagcuuuuucucccggcuuaacuggcuguacagccucaauuauaaguacccugcgcugaacgugaccaugcccaauaacgauaaauuugacaaacuuuacaucuggggcguccaccauccuggcacagauaaggaccagaccucccuguauauucaagccucugggcgcgugacgguuagcacaaaguggucccagcagaccgugaucccgaauauuggaagcagacccuggauccggggcgucucuuccauuaucagcaucuacuggacaauugugaaaccuggggacauccuccugauuaacucuaccggaaaucugaucgcuccccgcggcuauuucaagauucagagcgggaaguccucuaucaugagaagcgaugcccacaucggaaacugcaacuccgaauguauuaccccuaauggcagcauccccaacgacaaaccguuucaaaaugugaaccggauuacauacggcgcuugcccucgcuaugucaagcagaauacgcucaaacuggccaccgggaugagaaacguucccgagaagcagacacggggaaucuucggcgcgauugccggguuuaucgaaaauggaugggagggcaugguggaugggugguacggauuccgccaccaaaacucugagggcaccggccaggcugccgaccuuaaauccacacaggcugccaucaaucagauuaccgggaagcugaacagagugaucaaaaagacgaaugaaaaguuucaucaaauugagaaagaguucagcgaagucgaaggacggauccaggaucucgagcgcuauguggaggacacaaagauugaucuguggucuuacaacgccgaacuucugguugcucucgagaaucagcacaccaucgaccugaccgauuccgaaaugaacaaacuguucgagagaacacggaagcagcucagagaaaaugcggaggacaugggcaacggguguuuuaaaauuuaccauaagugcgauaacgccugcaucggaagcauccgcaauggcaccuaugaccacgacguguaccgggaugaggcugucaacaauagauuccaaauuaagggggugcagcugaaacuuggcuauaaggacuggauccuguggauuuccuuugccaucucuuguuuccuccugugcgccguucuucugggauuuauuaugugggcuugucagaaaggcaacauccgcugcaauaucuguauuuga

SEQ ID NO: 205039 - RNA, 1701 nt, Artificial Sequence
  derived and/or modified CDS sequence (opt5) from hemagglutinin__InfluenzaA__AKA59351
augaaggccauccuggugauucuccuguacaccuucgcugccgcgaacgcugacacaaucugcauuggcuaucacgccaauaacagcacggauaccgucgacacaguucuugagaaaaaugugaccgugacacauuccgucgaucugcucgaagacaagcacaacgggagacuguguaaacuucggggaguggcuccccugcaucucggcaagugcaauaucgccggguggauucugggaaacccugagugugaaucucugagcaccgccuccucuuggagcuacaucguugagacauccucuagcgauaaugggaccugcuauccgggcgacuuuaucgauuacgaggagcuccgcgagcagcuguccagcgugucuuccuucgaaagauuugagauuuuccccaaaacgagcucuuggccuaaccacgaauccaauaagggagucaccgcugccuguccccaagcgggcgccaagagcuuuuauaaaaaccuuaucuggcuggugaagaaagaaaauucuuacccuaagcucuccaaaagcuauauuaacgacaagggcaaggagguucuggugcuuugggggauccaucaccccuccacaucugcugaucagcagagccuguaccagaaugccgacgcuuacgucuucgugggaaccucccgguauagcaaaaaguuuaaaccugaaauugccauccgcccgaaggugagagaucaagagggccggaugaacuacuauuggacacucgucgaacccggggacaaaauuaccuucgaggcgacgggaaaucugguugugccucgcuacgccuuugcuauggaaagaaacgccggcucugggaucaucauuuccgauacacccgugcacgacugcaacaccacaugucagaccccuaagggagcuaucaauaccagccugcccuuccagaacauucauccgaucacaauuggcaaaugcccuaaguaugucaagucuacgaaacuccggcuggccaccggccuucgcaaugugcccagcauccaguccagagggcuguuuggagccaucgcuggcuucauugaagggggauggacaggcaugguugacgggugguacggauaucaccaucaaaacgagcagggcucuggcuacgcggccgaucucaagagcacccagaaugcuaucgacgaaauuacaaacaaagucaauuccgugaucgagaagaugaacacccaguuuacggccguggggaaagaguucaaucaccuggagaagcggauugaaaaccuuaauaagaaaguugaugacggauuccuggauaucuggacauacaacgccgagcuccuggugcugcucgagaaugaacgcacccuggacuaucacgauagcaacgucaagaaucuuuacgagaaagugagaucucaacugaagaacaacgcuaaagaaaucggcaauggguguuuugaguucuaucauaagugcgacaacaccuguauggaauccgucaagaauggaacauacgauuauccuaaauacagcgaggaggccaagcucaaccgggaagagauugacggcgugaaacuggaaucuacccgcaucuaucagauucuugcgaucuacuccacaguugcuagcucccuggugcucgucgugucucugggggccauuagcuuuuggaugugcuccaauggcucucugcagugcagaaucuguauuuga

SEQ ID NO: 205040 - RNA, 1701 nt, Artificial Sequence
  derived and/or modified CDS sequence (opt5) from hemagglutinin__InfluenzaA__AKA59353
augaaggccauccuggugguccuccuguacaccuucgcuacagccaacgcggacacgcuuugcauuggcuaucacgcuaauaacagcaccgauacaguugacaccgugcuggagaaaaaugugacagucacccauuccgugaaccuccuggaagauaagcacaaugggaaacuuuguaagcugagaggaguugcgccccuccaucugggcgagugcaacaucgccggguggauucugggaaauccugaaugugagucucucagcacagcuuccucuuggagcuacaucguggaaaccccguccucuaacaauggcacgugcuaucccggggacuuuauugauuacgaggagcugcgggaacagcuuagcuccgucagcucuuucgagcgcuuugaaaucuucccuaacaccuccagcuggcccaaucacgacucuuccaaaggagugacagccgcuuguccucaugccggcgccaagagcuuuuauaagaaccugaucuggcucguuaaaaagggcaauucuuaccccaaacuguccaagagcuauauuaacgauaaagggaaggaggugcuuguccuguggggaauccaccacccuuccaccucugccgaccaacagaagcucuaccagaaugaggaugcuuacguguucgugggcacaagcagauauuccaaaaaguuuaaaccggaaauugccauccggcccaagguccgcgaccaggaggggagaaugaacuacuauuggacccugguugaaccuggagauaaaauuacguucgaggcuacaggcaacaucguggugccccgguacgccuuugcgauggaacgcaaugccgggagcggaauuaucaucucugacaccccuguccauaacugcaauacaaccugucaaacccccaagggcgcuauuaacacaucccugccguuccagaaugugcacccuaucacgauuggcaaaugccccaaguauguuaagagcaccaaacucagacuggccacagggcuucggaacgugccuucuauccagagccgcggacuguuuggcgcuauugccggguucaucgagggaggcuggaccgggauggucgauggaugguacggcuaucaucaccagaaugagcaaggcuccggguuugccgcugaccucaagucuacacagaacgcgaucgacggaauuaccaauaaagugaacagcguuaucgaaaagaugaauacgcaguucacagccgugggcaaagaguucaaccaccuggaaaagagaauugagaaucuuaaccggaagaucgaugacggguuucuggauauuuggaccuacaaugcugaacuccugauccugcucgagaacgagcgcacccuggacuaccaugauuccaacgucagaaaucuuuaugaaaaagugcggagccagcugaagaacaaugccaaagagaucggaaacggcuguuucgaauuuuaccacaagugcgacaauacauguauggagucugucaaaaacgggaccuaugauuaccccaaguauuccgaagaggccaagcucaaucgcgaggaaauugacggcgugaaacuggagagcacaagaaucuaccaaauucuugcuaucuauucuacgguugccuccagccuggugcucauugucucccugggagcgaucucuuucuggaugugcagcaacggcucccugcagugccggauuuguaucuga

SEQ ID NO: 205041 - RNA, 1701 nt, Artificial Sequence
  derived and/or modified CDS sequence (opt5) from hemagglutinin__InfluenzaA__AKA59355
augaaggccauccuggugguccuccuguacaccuucgcuacagccaacgcggacacgcuuugcauuggcuaucacgcuaauaacagcaccgauacaguugacaccgugcuggagaaaaaugugacagucacccauuccgugaaccuccuggaagauaagcacaaugggaaacuuuguaagcugagaggaguugcuccccuccaucugggcaaaugcaacaucgccggguggauucugggaaauccugagugugaaucucucagcacagccuccucuuggagcuacaucguggagaccuccucuagcgacaacggcacgugcuauccgggggauuuuauugacuacgaagaacugcgggagcagcuuuccagcgucucuuccuucgaacgcuuugagaucuuccccaagaccagcucuuggccuaaucacgauuccaacaagggagugacagccgcuuguccccaugccggcgcgcggagcuuuuauaaaaaucugaucuggcucguuaagaaaggcaacucuuacccuaagcugaaucaauccuauauuaacgacaaagggaaggaagugcuuguccuguggggaauccaccaucccccuaccagcgccgaucagcagucccucuaccagaaugcugacgccuacguguucgugggcacaucuagauauagcaagaaauuuaagccggagauugcuauccgccccaaagucagagaucaagaggggcggaugaacuacuauuggacccugguugaaccuggagacaagauuacguucgaggccacaggcaaccugguggugccccgcuacgcguuugccauggaaagaaaugcuggguccggaaucauuaucagcgauaccccuguccacgacugcaacacaaccugucagacccccaaaggcgccaucaauacaucucucccguuccagaacauucacccuaucacgauuggcaagugccccaaauaugugaaguccaccaagcugcggcuugcuacagggcugcgcaauguuccuagcauccagucuagaggacucuuuggcgccauugccggguucaucgagggaggcuggaccgggaugguggacggaugguacggcuaucaucaccaaaacgaacagggcagcggguacgcugcggaucugaaauccacacagaaugccaucgacgagauuaccaacaaggucaaucuugugaucgagaaaaugaacacgcaguuuacagcuguuggaaaggaguucucucaccuggagaaacggauugaaaaucucaacaagaagguggaugacggcuuccuggauaucuggaccuacaaugccgagcugcucguccugcuugaaaacgagcgcacccuggacuaucaugauagcaaugugaaaaaccucuacgagaagauuagaucccaacugaaaaacaaugccaaggaaaucgggaacggauguuuugaguucuaucacaaaugcgacaauacauguauggaaagcgucaagaacggcaccuacgauuaucccaaguacucugaggaagcuaaacuuaaucgggaggagaucgacggggugaagcuggaauccacacgcguuuaucagauucucgccaucuacagcacgguggcgucuucccugguccuggugguuagccucggcgcuauuuccuuuuggaugugcucuaacggaagccugcagugcagaaucuguauuuga

SEQ ID NO: 205042 - RNA, 1701 nt, Artificial Sequence
  derived and/or modified CDS sequence (opt5) from hemagglutinin__InfluenzaA__AKE37137
augaaggccagacuggugguccuccuguacaccuucgcuacagccaacgcggacacgcuuugcaucggcuaucacgcuaauaacagcaccgauacaguugacaccgugcuggagaaaaaugugacagucacccauuccgugaaccuccuggaagauaagcacaaugggaaacuuuguaagcugcggggaguugcuccccuccaucugggcaaaugcaacauugccggguggauccugggaaauccugagugugaaucucucagcacagccuccucuuggagcuacauuguggagaccuccucuagcgacaacggcacgugcuauccgggggauuuuaucgacuacgaagaacugcgcgagcagcuuuccagcgucucuuccuucgaaagauuugagauuuuccccaagaccagcucuuggccuaaucacgaucccaacaagggagugacagccgcuuguccucaugccggcgcgaaauccuuuuauaagaaucugaucuggcucguuaaaaagggcaacagcuaccccaaacugucuaccuccuauaucaaugacaaggggaaggaagugcuuguccuguggggcauucaccacccuagcacauccgccgaucaacagucucucuaccagaacgcugacgccuacgcuuucgugggaaccagccgguauuccaaaaaguuuaaaccggagaucgccauucgccccaaggugagagaucgggaggggcgcaugaauuacuauuggacgcuggucgaaccuggagacaaaaucacauucgaggcgaccggcaaccugguugugcccagauacgccuuugcuauggaacggaacgccgggagcggaauuaucauuucugauacauccgugcaugacugcaauaccaccugucagacaccuaagggcgcuaucaacacgagccuccccuuccaaaauguccacccgaucaccauuggcaaaugcccuaaguaugugaagucuacaaaacugcgccuugccaccgggcugagaaacguucccagcauccagucccggggacucuuuggcgccauugcuggguucaucgagggaggcuggacagggaugguggacggaugguacggcuaucaucaccagaaugaacagggcucuggguacgcggccgaucuuaagagcacccaaaacgcuuuugacgagauuacgaauaaagucaacuccgugaucgagaagaugaauacacaguucaccgccguuggaaaagaguucaaccaccuggagaagcgcaucgaaaaucugaacaagaaaguggaugacggcuuucucgauauuuggaccuacaaugccgagcugcugguccuccuggaaaacgagagaacacuugacuaucaugauagcaaugugaagaaccuguacgagaaaguccggucucagcucaagaacaaugcuaaagaaaucgggaacggauguuucgaguuuuaucacaagugcgacaauaccuguauggaauccgugaagaacggcacauacgauuauccuaaauacagcgaggaagccaagcugaaucgcgaggagauugacgggguuaaacuugaaucuacgagaaucuaucagauucuggcgaucuacuccaccguggcuagcucccucguccuggugguuucucugggcgccaucagcuucuggaugugcuccaacggaucucuccaaugccggauuuguaucuga

SEQ ID NO: 205043 - RNA, 1701 nt, Artificial Sequence
  derived and/or modified CDS sequence (opt5) from hemagglutinin__InfluenzaA__AKS48035
auggagaagauggugcugcuccuggccgucguuagccuugugaaauccgaccagaucugcauuggcuaccacgcuaacaauucuaccgaacaaguggauacaaucauggagaagaacgucacggugacccaugcccaggacauucuggagaaaacacacaaugggagacucugugaucugaacggaguuaagccccuuauccugaaagacugcagcguggcgggcuggcuccuggggaauccuaugugugaugaguucauucgggucccggaaugguccuauaucguggagcgcgcuaaccccgccaaugaccugugcuacccuggaaaccucaaugauuaugaggaacugaagcaucuucugucuagaaucaaccacuuugagaagacccucauuauccccaaaagcuccuggccuaaucauacaucuagcggcguuuccgccgcuugucccuaccaggggaugccuagcuucuuucggaacguggucuggcugaccaagaaaaaugacgccuauccgacaauuaagaugucuuacaacaauaccuaucgcgaagaucuucugauccucuggggcauucaccacuccaacaacgcugccgagcagacgaaucuguacaaaaaccccaccacauacgugagcgugggaaccucuacacugaaucaaagacucgagccuaagaucgcgacccggucccaggucaacggccagcgcgggagaauggacuucuuuuggacgauucugaagcccaaugaugccauccauuucgaaagcaacggaaauuuuaucgcuccugaguaugccuacaaaauuguuaagaaaggcgacucuacaaucaugaaguccgaaauggaguaugggcacugcaacaccaaaugucagacacccauuggagcuaucaauagcuccaugccguuccauaacauucacccucuuaccaucggcgaaugccccaaguacgugaaaucuaauaagcuggugcucgccaccgggcugcggaacagcccucuucgcgagagacggcgcaagagaggacuguuuggcgcgaucgccggcuucauugaagggggauggcaaggcauggucgaugggugguauggauaccaccauuccaaugaacagggcagcggguaugcugccgaccgggagucuacacagaaagcuaucgacggagugacgaacaagguuaauuccauuaucgauaaaaugaacacccaguuugaagccgugggccgcgaguucaacaaucucgaaagacggauugagaaccugaauaagaaaauggaggacggcuuucuggaugucuggacauacaacgccgaacuccuggugcuuauggagaaugaaagaacccuggacuuccacgauagcaacguuaagaaucucuacgacaaggugcgccugcaacuucgggauaacgcuaaagagcuggggaauggauguuucgaauuuuaucauaagugcgacaacgaguguauggagucugucagaaauggcacauacgauuauccccaguacagcgaagaggcgcgccucaaacgggaagagaucuccggggugaagcuggagucuaucggaaccuaucagauucugagcaucuacuccacggucgccagcucucucgcucuggccauuaucguggccggccuuucccuguggaugugcagcaacgggucucuccaaugcagaauuuguaucuga

SEQ ID NO: 205044 - RNA, 1701 nt, Artificial Sequence
  derived and/or modified CDS sequence (opt5) from hemagglutinin__InfluenzaA__ALA08472
augaagaccaucauugcccugagcuacauccucugccugguguucgcucagaaaauucccggcaacgacaauuccacagccacgcuuugucuggggcaccaugcggucccuaacggaaccaucguuaagacaauuaccaaugauagaaucgaggugacaaacgcuaccgaacucgugcaaaauucuagcaucggcgagauuugcgacuccccgcaccagauccuggauggggaaaacuguacacuuauugacgcccugcucggagauccccagugcgacggcuuucagaauaaaaagugggaucuguucgucgagcggucuaaagccuauagcaacuguuacccuuaugacgugcccgauuacgcuucccugcgcucucucguugccagcuccgggacccuggaauuuaauaacgagagcuucaauuggacgggagugacccaaaacggcacaucuuccgcuugcaucagacggagcagcuccagcuuuuucucucgccuuaauuggcugacccaucucaacuauacauacccugcccugaaugucaccaugcccaacaacgagcaguuugacaaacuuuauguguggggcguucaccauccugggacggauaaggaccagauuuuccuguacgcgcaguccagcggaagaaucacaguguccaccaagcggucucaacaggccgucauuccgaauaucggcagccgccccagaauccgggauauuccuucccgcaucagcauuuacuggacaaucgugaagcccggggacauucuccugaucaacucuaccggaaaucugaucgcuccuagaggcuauuuuaaaauucgguccgggaagucuucuaucaugcgcagcgacgcccccauuggaaaauguaaguccgaaugcaucaccccgaacggcucuauuccuaaugauaagcccuuccagaacgugaauagaaucacauacggcgcuuguccucgguaugucaaacacagcacgcucaagcuggccaccgggaugcgcaacguucccgagaaacagacaagaggaaucuuuggcgcgauugccggguucaucgaaaauggaugggagggcaugguggacgggugguacggauuucggcaccaaaacuccgagggcagaggccaggcugccgaucuuaagagcacccaggcugccauugaccaaaucaaugggaaacugaaccgccucauuggaaagacaaaugaaaaauuccaucagaucgagaaggaguucucugaaguggaaggccggauucaggaucuggagaaguaugucgaggacaccaaaaucgaucuuugguccuacaacgccgaacugcucguggcucuggagaaucagcacacgaucgaccugacagauagcgaaaugaacaagcucuuugagaaaaccaagaaacaacugagagaaaacgcggaggacauggggaauggaugcuucaagauuuaucauaagugugauaacgccugcaucggcucuauucgcaaugggaccuacgaccacaacguuuaccgggacgaggcucuuaauaacagauuucagaucaaaggcguggaacugaaguccggauauaaagauuggauucucuggaucagcuucgccaucuccugcuuucugcuuugugucgcccugcucggcuucauuaugugggcuugccagaaggggaauauccgcuguaacauuugcaucuga

SEQ ID NO: 205045 - RNA, 1701 nt, Artificial Sequence; identical to SEQ ID NO: 204513
  derived and/or modified CDS sequence (opt5) from hemagglutinin__InfluenzaA__ALA08475

SEQ ID NO: 205046 - RNA, 1701 nt, Artificial Sequence
  derived and/or modified CDS sequence (opt5) from hemagglutinin__InfluenzaA__ALA08478
augaagaccaucauugcccugagcuacauccucugccugguguucgcucagaaacuucccggcaacgacaauuccacagccacgcugugucucgggcaccaugcggucccuaacggaaccauuguuaagacaaucaccaaugauagaauugaggugacaaacgcuaccgaacuggugcaaaauucuagcaucggcgagaucugcgacuccccgcaccagauucuugaugggaaaaacuguacacugaucgacgcccuccugggagauccccagugcgacggcuuucagaauaagcggugggaucuguucgucgaacgcucuaaagccuauagcaacuguuacccuuaugacgugcccgauuacgcuucccucagaucucugguugccagcuccgggacccuugaguuuaaugacgaauccuucaacugggcuggagugacgcaaaauggcaccucuuccgccugcauucggggcagcaacucuuccuuuuucagccgccugaauuggcucacacauucuaacuuuaaguauccugcgcugaaugucaccaugcccaacaacgagcaguucgauaaacuuuacaucuggggagugcaccauccugggacagacaaagaucagauuuuucuguaugcccaguccagcggcagaaucaccguuuccacgaagcggucucaacaggcugugauuccgaauaucgggagccgccccagaauccggaacauuccuucccgcaucagcauuuacuggacaaucgucaaacccggagacauucuccugaucaauucuaccggcaaccugaucgccccuagaggguacuucaagauucaguccggaaaaagcucuaucaugcggagcgacgcucccauuggcaaguguaaguccgagugcaucacaccgaauggcucuauuccuaacgauaaacccuuucagaaugugaaccgcaucaccuauggggccuguccuagauacgugaagcaaagcacccucaaacuggcgacaggaaugcggaauguccccgaaaagcagacgcgcggcaucuucggggccauugcuggauuuaucgagaacggcugggaagggaugaaagacggaugguauggcuucagacaccagaauagcgagggccgggggcaagccgcugaucuuaagagcacccaggccgccauugaccagaucaacggaaaacugaauagacucauuggcaagacaaacgagaaguuccaccagaucgaaaaagaguuuucugaaguugaggggcgcauucaagaucuggaaaaguacguggaggacaccaaaaucgaucuuugguccuauaaugcugagcugcucguggcgcuggaaaaccagcauacaaucgaccugaccgauagcgagaugaacaaacucuucgaaaagacgaagaagcagcugcgggagaaugccgaagacaugggaaacggcugcuuuaagauuuaccacaagugugauaaugcuugcaucgggucuauuagaaacggcacauaugaccaugacgucuaccgcgaugaggcccuuaauaaccgguuccagaucaaaggaguggagcugaaguccggcuacaaagacuggauucucuggaucagcuuugccaucuccugcuuccugcuuuguguugcucugcucggguuuauuaugugggccugccaaaagggaaauaucagauguaacauuugcaucuga

SEQ ID NO: 205047 - RNA, 1701 nt, Artificial Sequence; identical to SEQ ID NO: 202066
  derived and/or modified CDS sequence (opt5) from hemagglutinin__InfluenzaA__ALA08479

SEQ ID NO: 205048 - RNA, 1701 nt, Artificial Sequence
  derived and/or modified CDS sequence (opt5) from hemagglutinin__InfluenzaA__ALA08481
augaagaccaucauugcccugagcuacauccucugccugguguucgcucagaaacuucccggcaacgacaauuccacagccacgcugugucucgggcaccaugcggucccuaacggaaccauuguuaagacaaucaccaaugauagaauugaggugacaaacgcuaccgaacuggugcaaaauucuagcaucggcgagaucugcgacuccccgcaccagauucuugauggggaaaacuguacacugaucgacgcccuccugggagauccccagugcgacggcuuucagaauaaaaagugggaucuguucgucgagcggucuaaagcccauagcaacuguuauccuuacgacgugcccgauuaugcuucccuccgcucucugguugccagcuccgggacccuugaauuuaauaacgagagcuucaauugggcuggagugacgcaaaacggcaccucuuccagcugcauuagaggcucuaauuccagcuuuuucucucggcugaacuggcucacacaccuuaauuccaaguacccugcccugaacgucaccaugcccaacaaugagcaguuugacaagcuguauaucuggggagugcaucacccugggacagauaaagaccagauuuuccucuacgcgcagagcuccggccgcaucaccguuucuacgaagagaagccaacaggccgugauuccgaacaucgggucccggccccgcaucagagauauuccuagccggaucucuauuuauuggacaaucgucaaacccggagacauucugcugaucaauuccaccggcaaccucaucgcuccucgcggguacuuuaagauuagaagcggaaaaucuagcaucaugcgguccgacgcccccauuggcaaguguaagucugaaugcaucacaccgaauggcagcauuccuaacgauaaacccuuccagaaugugaaccgcaucaccuacggggcuuguccuagauaugugaagcaguccacccugaaacuugccacaggaaugcggaauguccccgagcgccaaacgagaggcaucuuuggggcgauugccggauucaucgaaaacggcugggaggggaugguugacggaugguacggcuuucggcaccagaauagcgagggcagagggcaggcugccgaucugaagucuacccaagcugccauugaccagaucaacggaaaacucaaucgccugauuggcaagacaaacgaaaaauuccaucagaucgagaaggaguucuccgaaguggaagggcggauucaggaucuugagaaguauguggaggacaccaaaaucgaucuguggagcuacaaugccgaacuccuggucgcucuggagaaccaacacacaaucgaccucaccgauucugaaaugaacaagcuguuugagaaaacgaagaaacagcuuagagaaaaugcggaggacaugggaaacggcugcuucaagauuuaucauaagugugauaaugccugcaucggguccauucgcaacggcacauacgaccacgacguguaucgggaugaggcucugaauaacagauuucagaucaaaggaguugaacucaagagcggcuacaaagacuggauucuguggaucuccuucgccaucucuugcuuucuucuguguguggcccuccugggguucauuaugugggcuugccagaagggaaauauccgcuguaacauuugcaucuga

SEQ ID NO: 205049 - RNA, 1701 nt, Artificial Sequence; identical to SEQ ID NO: 205048
  derived and/or modified CDS sequence (opt5) from hemagglutinin__InfluenzaA__ALA08482

SEQ ID NO: 205050 - RNA, 1701 nt, Artificial Sequence
  derived and/or modified CDS sequence (opt5) from hemagglutinin__InfluenzaA__ALA08483
augaagaccaucauuggccugagcuacauccucugccugguguucgcccagaaacuucccgggaacgacaauuccacagcuacgcugugucucggacaccaugccgucccuaacggcaccauuguuaagacaaucaccaaugauagaauugaggugacaaacgcgaccgaacuggugcaaaauucuagcaucggggagaucugcgacuccccgcaccagauucuugauggagaaaacuguacacugaucgacgcucuccugggcgauccccagugcgacggguuucagaauaaaaagugggaucuguucgucgagcggucuaaagccuauagcaacuguuacccuuaugacgugcccgauuacgccucccuccgcucucugguugcuagcuccggaacccuugaauuuaauaacgagagcuucaauugggccggcgugacgcaaaacggcaccucuuccagcugcauuagagggucuaauuccagcuuuuucucucggcugaacuggcucacacaucuuaauuccaaguauccugcucugaacgucaccaugcccaacaaugagcaguuugacaagcuguacaucuggggagugcaccauccuggcacagauaaagaccagauuuuccucuaugcccagagcuccgggcgcaucaccguuucuacgaagagaagccaacaggcggugauuccgaacaucggaucccggccccgcaucagagauauuccuagccggaucucuauuuacuggacaaucgucaaacccggcgacauucugcugaucaauuccaccgggaaccucaucgccccucgcggauacuuuaagauuagaagcggcaaaucuagcaucaugcgguccgacgcucccauuggcaaguguaagucugaaugcaucacaccgaaugggagcauuccuaacgauaaacccuuccagaaugugaaccgcaucaccuauggagccuguccuagauacgugaagcaguccacccugaaacuugcuacaggcaugcggaauguccccgagcgccaaacgagagggaucuuuggagccauugcgggcuucaucgaaaacgggugggagggaaugguugacggcugguauggcuuucggcaccagaauagcgaggggagaggacaggccgcugaucugaagucuacccaagccgcuauugaccagaucaacggcaaacucaaucgccugauugggaagacaaacgaaaaauuccaccagaucgagaaggaguucuccgaaguggaaggacggauucaggaucuugagaaguacguggaggacaccaaaaucgaucuguggagcuauaaugccgaacuccuggucgcccuggagaaccaacauacaaucgaccucaccgauucugaaaugaacaagcuguuugagaaaacgaagaaacagcuuagagaaaaugcugaggacaugggcaacgggugcuucaagauuuaccacaagugugauaaugcgugcaucggcuccauucgcaacggaacauaugaccaugacguguaccgggaugaggcccugaauaacagauuucagaucaaaggcguugaacucaagagcggguacaaagacuggauucuguggaucuccuucgcuaucucuugcuuucuucuguguguggcccuccugggauucauuaugugggccugccagaagggcaauauccgcuguaacauuugcaucuga

SEQ ID NO: 205051 - RNA, 1701 nt, Artificial Sequence
  derived and/or modified CDS sequence (opt5) from hemagglutinin__InfluenzaA__ALA08484
augaagaccaucauugcccugagcuacauccucugccugguguucgcucagaaaauucccggcaacgacaauuccacagccacgcuuugucuggggcaccaugcggucccuaacggaaccaucguuaagacaauuaccaaugauagaaucgaggugacaaacgcuaccgaacucgugcaaaauucuagcaucggcgagauuugcgacuccccgcaccagauccuggauggggaaaacuguacacuuauugacgcccugcucggagauccccagugcgacggcuuucagaauaaaaagugggaucuguucgucgagcggucuaaagccuauagcaacuguuacccuuaugacgugcccgauuacgcuucccugcgcucucucguugccagcuccgggacccuggaauuuaauaacgagagcuucaauuggacgggagugacccaaaacggcacaucuuccgcuugcaucagacggagcagcuccagcuuuuucucucgccuuaauuggcugacccaucucaacuauacauacccugcccugaaugucaccaugcccaacaacgagcaguuugacaaacuuuauauuuggggcgugcaccauccugggacggauaaggaccagaucuuccuguacgcgcaguccagcggaagaauuacaaucuccaccaagcggucucaacaggccguuaucccgaauauuggcagccgccccagaauccgggauauuccuucccgcaucagcauuuacuggacaaucgugaagcccggggacauccuccugauuaacucuaccggaaaucugaucgcuccuagaggcuauuuuaaaauucgguccgggaagucuucuaucaugcgcagcgacgcccccauuggaaaauguaaguccgaaugcaucaccccgaacggcucuaucccuaaugauaagcccuuccagaacgucaauagaauuacauacggcgcuuguccucgguaugugaaacacagcacgcucaagcuggccaccgggaugcgcaacgugcccgagaaacagacaagaggaaucuuuggcgcgauugccggguucaucgaaaauggaugggagggcauggucgacgggugguacggauuucggcaccaaaacuccgagggcagaggccaggcugccgaucuuaagagcacccaggcugccauugaccaaaucaaugggaaacugaaccgccucauuggaaagacaaaugaaaaauuccaucagaucgagaaggaguucucugaaguugaaggccggauccaggaucuggagaaguauguggaggacaccaaaauugaucuuugguccuacaacgccgaacugcucguggcucuggagaaucagcacacgaucgaccugacagauagcgaaaugaacaagcucuuugagaaaaccaagaaacaacugagagaaaacgcggaggacauggggaauggaugcuucaagauuuaucauaagugugauaacgccugcaucggcucuauucgcaaugggaccuacgaccacaacgucuaccgggacgaggcucuuaauaacagauuucagaucaaaggcguggaacugaaguccggauauaaagauuggauccucuggauuagcuucgccaucuccugcuuucugcuuuguguugcccugcucggcuucauuaugugggcuugccagaaggggaauauccgcuguaacauuugcaucuga

SEQ ID NO: 205052 - RNA, 1701 nt, Artificial Sequence
  derived and/or modified CDS sequence (opt5) from hemagglutinin__InfluenzaA__ALA08488
augaagaccaucauugcccugagcuacauccucugccugguguucgcucagaaaauucccggcaacgggaauagcacagccacgcuuugucugggacaccaugcggucccuaacggcaccaucguuaagacaauuaccaaugacagaaucgaggugacaaacgcuaccgaacucgugcaaaauucuagcaucggggagauuugcgauuccccgcaccagauccuggacggagaaaacuguacacuuauugaugcccugcucggcgacccccagugcgauggguuucagaauaaaaagugggaccuguucgucgagcggucuaaagccuauagcaacuguuacccuuaugaugugcccgacuacgcuucccugcgcucucucguugccagcuccggaacccuggaauuuaauaacgagagcuucaauuggacgggcgugacccaaaacggcacaucuuccgcuugcaucagacgguccucuuccagcuuuuucucucgccuuaauuggcugacccaucucaacuauacauacccugcccugaaugucaccaugcccaacaacgagcaguuugauaaacuuuauauuuggggagugcaccauccugggacggacaaggaucagaucuuccuguacgcgcaguccagcggcagaauuacaguuuccaccaagcggucucaacaggccgugaucccgaauaucgggagccgcccccggauuagagacaucccuucccgcauuagcaucuacuggacaauugucaagcccggagauauccuccugaucaacucuaccggcaaucugauugcuccuagaggguauuuuaaaauccgguccggaaagagcucuauuaugcgcagcgacgcccccaucggcaaauguaaguccgaaugcauuaccccgaacggcucuaucccuaaugacaagcccuuccagaacgugaauagaaucacauacggggcuuguccucgguaugugaaacacagcacgcucaagcuggccaccggaaugcgcaacguccccgagaaacagacaagaggcauuuuuggggcgaucgccggauucauugaaaauggcugggaggggaugguugauggaugguacggcuuucggcaccaaaacuccgagggcagagggcaggcugccgaccuuaagagcacccaggcugccaucgaucaaauuaauggaaaacugaaccgccucaucggcaagacaaaugaaaaauuccaucagauugagaaggaguucucugaaguggaagggcggauccaggaccuggagaaguauguggaggauaccaaaaucgaccuuugguccuacaacgccgaacugcucgucgcucuggagaaucagcacacgauugaucugacagacagcgaaaugaacaagcucuuugagaaaaccaagaaacaacugagagaaaacgcggaggauaugggaaauggcugcuucaagaucuaucauaagugugacaacgccugcauugggucuauccgcaauggcaccuacgaucacaacguguaccgggacgaggcucuuaauaacagauuucagauuaaaggaguugaacugaaguccggcuauaaagacuggauccucuggaucagcuucgccauuuccugcuuucugcuuuguguggcccugcucggguucaucaugugggcuugccagaagggaaauauucgcuguaacaucugcauuuga

SEQ ID NO: 205053 - RNA, 1701 nt, Artificial Sequence
  derived and/or modified CDS sequence (opt5) from hemagglutinin__InfluenzaA__ALA08490
augaagaccaucauugcccugagcuacauccucugccugguguucgcucagaaaauucccggcaacgacaauuccacagccacgcuuugucuggggcaccaugcggucccuaacggaaccaucguuaagacaauuaccaaugauagaaucgaggugacaaacgcuaccgaacucgugcaaaauucuagcaucggcgagauuugcgacuccccgcaccagauccuggauggggaaaacuguacacuuauugacgcccugcucggagauccccagugcgacggcuuucagaauaaaaagugggaucuguucgucgagcggucuaaagccuauagcaacuguuacccuuaugacgugcccgauuacgcuucccugcgcucucucguugccagcuccgggacccuggaauuuaauaacgagagcuucaauuggacgggagugacccaaaacggcacaucuuccgcuugcaucagacggagcagcuccagcuuuuucucucgccuuaauuggcugacccaucucaacuauacauacccugcccugaaugucaccaugcccaacaacgagcaguuugacaaacuuuauauuuggggcgugcaccauccugggacggauaaggaccagaucuuccuguacgcgcaguccagcggaagaauuacaguuuccaccaagcggucucaacaggccgugaucccgaauaucggcagccgcccccggauuagagauaucccuucccgcauuagcaucuacuggacaauugucaagcccggggacauccuccugaucaacucuaccggaaaucugauugcuccuagaggcuauuuuaaaauccgguccgggaagucuucuauuaugcgcagcgacgcccccaucggaaaauguaaguccgaaugcauuaccccgaacggcucuaucccuaaugauaagcccuuccagaacgugaauagaaucacauacggcgcuuguccucgguaugugaaacacagcacgcucaagcuggccaccgggaugcgcaacguccccgagaaacagacaagaggaauuuuuggcgcgaucgccggguucauugaaaauggaugggagggcaugguugacgggugguacggauuucggcaccaaaacuccgagggcagaggccaggcugccgaucuuaagagcacccaggcugccaucgaccaaauuaaugggaaacugaaccgccucaucggaaagacaaaugaaaaauuccaucagauugagaaggaguucucugaaguggaaggccggauccaggaucuggagaaguauguggaggacaccaaaaucgaucuuugguccuacaacgccgaacugcucgucgcucuggagaaucagcacacgauugaccugacagauagcgaaaugaacaagcucuuugagaaaaccaagaaacaacugagagaaaacgcggaggacauggggaauggaugcuucaagaucuaucauaagugugauaacgccugcauuggcucuauccgcaaugggaccuacgaccacaacguguaccgggacgaggcucuuaauaacagauuucagauuaaaggcaucgaacugaaguccggauauaaagauuggauccucuggauuagcuucgccaucuccugcuuucugcuuuguguugcccugcucggcuucauuaugugggcuugccagaaggggaauauccgcuguaacauuugcaucuga

SEQ ID NO: 205054 - RNA, 1701 nt, Artificial Sequence
  derived and/or modified CDS sequence (opt5) from hemagglutinin__InfluenzaA__ALA08491
augaagaccaucauugcccugagcuacauccucugccugguguucgcucagaaacuucccggcaacgacaauuccacagccacgcugugucucgggcaccaugcggucccuaacggaaccauuguuaagacaaucaccaaugauagaauugaggugacaaacgcuaccgaacuggugcaaaauucuagcaucggcgagaucugcgacuccccgcaccagauucuugauggggaaaacuguacacugaucgacgcccuccugggagauccccagugcgacggcuuucagaauaaaaagugggaucuguucgucgagcggucuaaagccuauagcaacuguuacccuuaugacgugcccgauuacgcuucccuccgcucucugguugccagcuccgggacccuugaauuuaauaacgagagcuucaauugggcuggagugacgcaaaacggcaccucuuccgccugcauuagaggcagcaauucuuccuuuuucagccggcugaacuggcucacacaucugaauuuuaaguauccugcgcuuaacaugaccaugcccaacaaugagcaguucgacaagcuguacaucuggggaguccaccauccugggacagauaaagaccagauuuuucucuaugcccagucuuccggccgcaucaccgugagcacgaagagaucccaacaggcuguuauuccgaacaucgggucucggccccgcaucagaaauauuccuagccggaucuccauuuacuggacaaucgugaaacccggagauauucugcugaucaacagcaccggcaaucucaucgccccucgcggguacuucaagauuagaucuggaaaauccagcaucaugcggucugacgcucccauuggcaaguguaagagcgaaugcaucacaccgaacggcuccauuccuaaugacaaacccuuucagaacgucaaucgcaucaccuauggggccuguccuagauacgugaagcagucuacccugaaacuugcgacaggaaugcggaacgugcccgagaagcaaacgcgcggcaucuucggggccauugcuggauuuaucgaaaauggcugggaggggaugaaagauggaugguauggcuucagacaccagaacagcgagggccgggggcaggccgcugaccugaaguccacccaagccgccauugaucagaucaauggaaaacucaacagacugauuggcaagacaaaugaaaaguuccaccagaucgagaaagaauuuagcgaggucgaagggcgcauucaggaccuugagaaguacguugaggauaccaaaaucgaccuguggucuuauaacgcugaacuccugguggcgcuggagaaccaacauacaaucgaucucaccgacuccgaaaugaauaagcuguucgagaaaacgaagaagcagcuucgggaaaacgccgaggauaugggaaauggcugcuuuaaaauuuaccacaagugugacaacgcuugcaucgggagcauuagaaauggcacauaugaucaugacguguaccgcgacgaggcccugaacaaucgguuccagaucaaaggagucgaacucaagucuggcuacaaagauuggauucuguggaucuccuuugccaucagcugcuuccuucuguguguggcucuccugggguuuauuaugugggccugccagaagggaaacaucagauguaauauuugcaucuga

SEQ ID NO: 205055 - RNA, 1701 nt, Artificial Sequence; identical to SEQ ID NO: 205053
  derived and/or modified CDS sequence (opt5) from hemagglutinin__InfluenzaA__ALA08492

SEQ ID NO: 205056 - RNA, 1701 nt, Artificial Sequence
  derived and/or modified CDS sequence (opt5) from hemagglutinin__InfluenzaA__ALA08493
augaagaccaucauugcccugagcuacauccucugccugguguucgcucagaaaauucccggcaacgacaauuccacagccacgcuuugucuggggcaccaugcggucccuaacggaaccaucguuaagacaauuaccaaugauagaaucgaggugacaaacgcuaccgaacucgugcaaaauucuagcaucggcgagauuugcgacuccccgcaccagauccuggauggggaaaacuguacacuuauugacgcccugcucggagauccccagugcgacggcuuucagaauaaaaagugggaucuguucgucgagcggucuaaagccuauagcaacuguuacccuuaugacgugcccgauuacgcuucccugcgcucucucguugccagcuccgggacccuggaauuuaauaacgagagcuucaauuggacgggagugacccaaaacggcacaucuuccgcuugcaucagacggagcagcuccagcuuuuucucucgccuuaauuggcugacccaucucaacuauacauacccugcccugaaugucaccaugcccaacaacgagcaguuugacaaacuuuauauuuggggcgugcaccauccugggacggauaaggaccagaucuuccuguacgcgcaguccagcggaagaauuacaguuuccaccaagcggucucaacaggccgugaucccgaauaucggcagccgcccccggauuagagauaucccuucccgcauuagcaucuacuggacaauugucaagcccggggacauccuccugaucaacucuaccggaaaucugauugcuccuagaggcuauuuuaaaauccgguccgggaagucuucuauuaugcgcagcgacgcccccaucggaaaauguagauccgaaugcauuaccccgaacggcucuaucccuaaugauaagcccuuccagaacgugaaucggaucacauacggcgcuuguccucgcuaugugaagcacagcacgcucaaacuggccaccgggaugagaaacguccccgagaagcagacacggggaauuuuuggcgcgaucgccggguucauugaaaauggaugggagggcaugguugacgggugguacggauuuagacaccaaaacuccgagggccgcggccaggcugccgaucuuaaaagcacccaggcugccaucgaccaaauuaaugggaagcugaaccggcucaucggaaaaacaaaugaaaaguuccaucagauugagaaagaguucucugaaguggaaggcagaauccaggaucuggagaaguauguggaggacaccaagaucgaucuuugguccuacaacgccgaacugcucgucgcucuggagaaucagcacacgauugaccugacagauagcgaaaugaacaaacucuuugagaagaccaaaaagcaacugcgcgaaaacgcggaggacauggggaauggaugcuucaaaaucuaucauaagugugauaacgccugcauuggcucuauccggaaugggaccuacgaccacaacguguacagagacgaggcucuuaauaaccgcuuucagauuaagggcaucgaacugaaauccggauauaaggauuggauccucuggauuagcuucgccaucuccugcuuucugcuuuguguugcccugcucggcuucauuaugugggcuugccagaaagggaauauccgguguaacauuugcaucuga

SEQ ID NO: 205057 - RNA, 1701 nt, Artificial Sequence
  derived and/or modified CDS sequence (opt5) from hemagglutinin__InfluenzaA__ALA08494
augaagaccaucauugcccugagcuacauccucugccugguguucgcucagaaaauucccggcaacgacaauuccacagccacgcuuugucuggggcaccaugcggucccuaacggaaccaucguuaagacaauuaccaaugauagaaucgaggugacaaacgcuaccgaacucgugcaaaauucuagcaucggcgagauuugcgacuccccgcaccagauccuggauggggaaaacuguacacuuauugacgcccugcucggagauccccagugcgacggcuuucagaauaaaaagugggaucuguucgucgagcggucuaaagccuauagcaacuguuacccuuaugacgugcccgauuacgcuucccugcgcucucucguugccagcuccgggacccuggaauuuaauaacgagagcuucaauuggacgggagugacccaaaacggcacaucuuccgcuugcaucagacggucuagcuccagcuuuuucucucgccuuaauuggcugacccaucucaacuauacauacccugcccugaaugucaccaugcccaacaacgagcaguuugacaaacuuuauauuuggggcgugcaccauccugggacggauaaggaccagaucuuccuguacgcgcaguccagcggaagaauuacaguuuccaccaagggcucucaacaggccgugaucccgaauaucgggagccggccccgcauuagagauaucccuucccggauuagcaucuacuggacaauugucaagcccggagacauccuccugaucaacucuaccggcaaucugauugcuccucgcggguauuuuaaaaucagauccggaaagagcucuauuaugcggagcgacgcccccaucggcaaauguaaguccgaaugcauuaccccgaacggcucuaucccuaaugauaagcccuuccagaacgugaaucgcaucacauacggggcuuguccuagauaugugaaacacagcacgcucaagcuggccaccggaaugcggaacguccccgagaaacagacacgcggcauuuuuggggcgaucgccggauucauugaaaauggcugggaggggaugguugacggaugguacggcuuuagacaccaaaacuccgagggccgggggcaggcugccgaucuuaagagcacccaggcugccaucgaccaaauuaauggaaaacugaacagacucaucggcaagacaaaugaaaaauuccaucagauugagaaggaguucucugaaguggaagggcgcauccaggaucuggagaaguauguggaggacaccaaaaucgaucuuugguccuacaacgccgaacugcucgucgcucuggagaaucagcacacgauugaccugacagauagcgaaaugaacaagcucuuugagaaaaccaagaaacaacugcgggaaaacgcggaggacaugggaaauggcugcuucaagaucuaucauaagugugauaacgccugcauugggucuaucagaaauggcaccuacgaccacaacguguaccgcgacgaggcucuuaauaaccgguuucagauuaaaggaguugaacugaaguccggcuauaaagauuggauccucuggaucagcuucgccauuuccugcuuucugcuuuguguggcccugcucggguucaucaugugggcuugccagaagggaaauauuagauguaacaucugcauuuga

SEQ ID NO: 205058 - RNA, 1701 nt, Artificial Sequence; identical to SEQ ID NO: 205057
  derived and/or modified CDS sequence (opt5) from hemagglutinin__InfluenzaA__ALA08495

SEQ ID NO: 205059 - RNA, 1701 nt, Artificial Sequence; identical to SEQ ID NO: 205057
  derived and/or modified CDS sequence (opt5) from hemagglutinin__InfluenzaA__ALA08496

SEQ ID NO: 205060 - RNA, 1701 nt, Artificial Sequence; identical to SEQ ID NO: 204513
  derived and/or modified CDS sequence (opt5) from hemagglutinin__InfluenzaA__ALA08497

SEQ ID NO: 205061 - RNA, 1701 nt, Artificial Sequence; identical to SEQ ID NO: 204513
  derived and/or modified CDS sequence (opt5) from hemagglutinin__InfluenzaA__ALA08498

SEQ ID NO: 205062 - RNA, 1701 nt, Artificial Sequence
  derived and/or modified CDS sequence (opt5) from hemagglutinin__InfluenzaA__ALA08499
augaagaccaucauugcccugagcuacauccucugccugguguucgcucagaaacuucccgagaacgacaauuccacagccacgcugugucucggccaccaugcggucccuaacgggaccauuguuaagacaaucaccucugauagaauugaagugacaaaugcuaccgagcuggugcaaaacagcuccaucggagaaaucugcgacucuccgcaccagauucuugauggcaaaaauuguacacugaucgacgcccuccugggggauccccagugcgacggauuucagaacaagaaaugggaucuguucgucgagcggagcaaggccuauuccaauuguuacccuuaugacgugcccgauuacgcuucucuccgcagccugguugccuccagcggcacccuugaauuuaacgacgagucuuucaauugggcuggggugacgcaaaacggaaccuccagcgccugcauuagaggcucuaauuccagcuuuuucucucggcugaacuggcucacacauuccaauuuuaaguauccugcgcugaacgucaccaugcccaauaacgagcaguucgauaaacuuuacaucuggggcgugcaccauccugggacagacaaggaucagauuuuucuguaugcccagagcuccggacgcaucaccguuucuacgaaaagaagccaacaggcugugauuccgaacaucggcucccggccccgcaucagagacauuccuagccggaucucuauuuacuggacaaucgucaagcccggggacauucuccugaucaauuccaccggaaaccugaucgccccucgcggcuacuucaaaauuagaagcgggaagucuagcaucaugcgguccgaugcucccauuggaaaguguaaaucugaaugcaucacaccgaauggcagcauuccuaacgacaagcccuuucagaaugugaaccgcaucaccuauggcgccuguccuagauacgugaaacaguccacccucaagcuggcgacagggaugcggaauguccccgagaaacaaacgcgcggaaucuucggcgccauugcuggguuuaucgaaaacggaugggagggcaugaaggaugggugguauggauucagacaccagaauagcgagggccggggccaggccgcugaccuuaaaucuacccaagccgccauugaucagaucaacgggaagcugaauagacucauuggaaagacaaacgaaaaauuccaccagaucgagaaggaauuuuccgagguugaaggccgcauucaggaccuggagaaauacguggaggauaccaagguggaccuuuggagcuauaaugcugaacugcucgucgcgcuggagaaccaacauacaaucgaucugaccgacucugaaaugaauaaacucuucgagaagacgaagaaacagcugcgggaaaacgccgaggauauggggaacggaugcuuuaagaucuaccacaaaugugacaaugcuugcauuggcuccaucagaaacgggacauaugaccaugauguguaccgcgacgaggcccuuaauaaccgguuccagauuaagggcguugaacugaaaagcggauacaaggauuggauccucuggauuuccuuugccaucucuugcuuccugcuuuguguggcucugcucggcuuuaucaugugggccugccagaaggggaauauuagauguaacaucugcauuuga

SEQ ID NO: 205063 - RNA, 1701 nt, Artificial Sequence; identical to SEQ ID NO: 205046
  derived and/or modified CDS sequence (opt5) from hemagglutinin__InfluenzaA__ALA08501

SEQ ID NO: 205064 - RNA, 1701 nt, Artificial Sequence
  derived and/or modified CDS sequence (opt5) from hemagglutinin__InfluenzaA__ALA08502
augaagaccaucauugcccugagcuacauccucugccugguguucgcucagaaacuucccgagaacgacaauuccacagccacgcugugucucggccaccaugcggucccuaacgggaccauuguuaagacaaucaccucugauagaauugaagugacaaaugcuaccgagcuggugcaaaacagcuccaucggagaaaucugcgacucuccgcaccagauucuugauggcaaaaauuguacacugaucgacgcccuccugggggauccccagugcgacggauuucagaacaagaaaugggaucuguucgucgagcggagcaaggccuauuccaauuguuacccuuaugacgugcccgauuacgcuucucuccgcagccugguugccuccagcggcacccuugaauuuaacgacgagucuuucaauugggcuggggugacgcaaaacggaaccuccagcgccugcauuagaggcucuaauuccagcuuuuucucucggcugaacuggcucacacauuccaauuuuaaguauccugcgcugaacgucaccaugcccaauaacgagcaguucgauaaacuuuacaucuggggcgugcaccauccugggacagacaaggaucagauuuuucuguaugcccagagcuccggacgcaucaccguuucuacgaaaagaagccaacaggcugugauuccgaacaucggcucccggccccgcaucagaaauauuccuagccggaucucuauuuacuggacaaucgucaagcccggggacauucuccugaucaacuccaccggaaaucugaucgccccucgcggcuacuucaaaauuagaagcgggaagucuagcaucaugcgguccgacgcucccauuggaaaguguaaaucugaaugcaucacaccgaacggcagcauuccuaaugauaagcccuuucagaacgugaaucgcaucaccuauggcgccuguccuagauacgugaaacaguccacccucaagcuggcgacagggaugcggaacguccccgagaaacaaacgcgcggaaucuucggcgccauugcuggguuuaucgaaaauggaugggagggcaugaaggacgggugguauggauucagacaccagaacagcgagggccggggccaggccgcugaucuuaaaucuacccaagccgccauugaccagaucaaugggaagcugaacagacucauuggaaagacaaaugaaaaauuccaccagaucgagaaggaauuuuccgagguugaaggccgcauucaggaucuggagaaauacguggaggacaccaagguggaucuuuggagcuauaacgcugaacugcucgucgcgcuggagaaucaacauacaaucgaccugaccgauucugaaaugaacaaacucuucgagaagacgaagaaacagcugcgggaaaacgccgaggacauggggaauggaugcuuuaagaucuaccacaaaugugauaacgcuugcauuggcuccaucagaaaugggacauaugaccaugacguguaccgcgaugaggcccuuaacaaucgguuccagauuaagggcguugaacugaaaagcggauacaaggacuggauccucuggauuuccuuugccaucucuugcuuccugcuuuguguggcucugcucggcuuuaucaugugggccugccagaaggggaacauuagauguaauaucugcauuuga

SEQ ID NO: 205065 - RNA, 1701 nt, Artificial Sequence; identical to SEQ ID NO: 205064
  derived and/or modified CDS sequence (opt5) from hemagglutinin__InfluenzaA__ALA08503

SEQ ID NO: 205066 - RNA, 1701 nt, Artificial Sequence; identical to SEQ ID NO: 204513
  derived and/or modified CDS sequence (opt5) from hemagglutinin__InfluenzaA__ALA08504

SEQ ID NO: 205067 - RNA, 1701 nt, Artificial Sequence; identical to SEQ ID NO: 204513
  derived and/or modified CDS sequence (opt5) from hemagglutinin__InfluenzaA__ALA08505

SEQ ID NO: 205068 - RNA, 1701 nt, Artificial Sequence; identical to SEQ ID NO: 204513
  derived and/or modified CDS sequence (opt5) from hemagglutinin__InfluenzaA__ALA08506

SEQ ID NO: 205069 - RNA, 1701 nt, Artificial Sequence; identical to SEQ ID NO: 204513
  derived and/or modified CDS sequence (opt5) from hemagglutinin__InfluenzaA__ALA08507

SEQ ID NO: 205070 - RNA, 1701 nt, Artificial Sequence
  derived and/or modified CDS sequence (opt5) from hemagglutinin__InfluenzaA__ALA08508
augaagaccaucauugcccugagcuacauccucugccugguguucgcucagaaacuucccgagaacgacaauuccacagccacgcugugucucggccaccaugcggucccuaacgggaccauuguuaagacaaucaccucugauagaauugaagugacaaaugcuaccgagcuggugcaaaacagcuccaucggagaaaucugcgacucuccgcaccagauucuugauggcaaaaauuguacacugaucgacgcccuccugggggauccccagugcgacggauuucagaacaagaaaugggaucuguucgucgagcggagcaaggccuauuccaauuguuacccuuaugacgugcccgauuacgcuucucuccgcagccugguugccuccagcggcacccuugaauuuaacgacgagucuuucaauugggcuggggugacgcaaaacggaaccuccagcgccugcauuagaggcucuaauuccagcuuuuucucucggcugaacuggcucacacauuccaauuuuaaguauccugcgcugaacgucaccaugcccaauaacgagcaguucgauaaacuuuacaucuggggcgugcaccauccugggacagacaaggaucagauuuuucuguaugcccagagcuccggacgcaucaccguuucuacgaaaagaagccaacaggcugugauuccgaacaucggcucccggccccgcaucagaaauauuccuagccggaucucuauuuacuggacaaucgucaagcccggggacauucuccugaucaacuccaccggaaaucugaucgccccucgcggcuacuucaaaauuagaagcgggaagucuagcaucaugcgguccgacgcucccauuggaaaguguaaaucugaaugcaucacaccgaacggcagcauuccuaaugauaagcccuuucagaacgugaaucgcaucaccuauggcgccuguccuagauacgugaaacaguccacccucaagcuggcgacagggaugcggaacguccccgagaaacaaacgcgcggaaucuucggcgccauugcuggguuuaucgaaaauggaugggagggcaugaaggacgggugguauggauucagacaccagaacagcgagggccggggccaggccgcugaucuuaaaucuacccaagccgccauugaccagaucaaugggaagcugaacagacucauuggaaagacaaaugaaaaauuccaccagaucgagaaggaauuuuccgagguugaaggccgcauucaggaucuggagaaauacguggaggacaccaagaucgaucuuuggagcuauaacgcugaacugcucguggcgcuggagaaucaacauacaaucgaccugaccgauucugaaaugaacaaacucuucgagaagacgaagaaacagcugcgggaaaacgccgaggacauggggaauggaugcuuuaagauuuaccacaaaugugauaacgcuugcaucggcuccauuagaaaugggacauaugaccaugacgucuaccgcgaugaggcccuuaacaaucgguuccagaucaagggcguggaacugaaaagcggauacaaggacuggauucucuggaucuccuuugccaucucuugcuuccugcuuuguguugcucugcucggcuuuauuaugugggccugccagaaggggaacaucagauguaauauuugcaucuga

SEQ ID NO: 205071 - RNA, 1701 nt, Artificial Sequence; identical to SEQ ID NO: 204513
  derived and/or modified CDS sequence (opt5) from hemagglutinin__InfluenzaA__ALA08509

SEQ ID NO: 205072 - RNA, 1701 nt, Artificial Sequence; identical to SEQ ID NO: 204513
  derived and/or modified CDS sequence (opt5) from hemagglutinin__InfluenzaA__ALA08510

SEQ ID NO: 205073 - RNA, 1701 nt, Artificial Sequence
  derived and/or modified CDS sequence (opt5) from hemagglutinin__InfluenzaA__ALA08511
augaagaccaucauugcccugagcuacauccucugccugguguucgcucagaaaauucccggcaacgacaauuccacagccacgcuuugucuggggcaccaugcggucccuaacggaaccaucguuaagacaauuaccaaugauagaaucgaggugacaaacgcuaccgaacucgugcaaaauucuagcaucggcgagauuugcgacuccccgcaccagauccuggauggggaaaacuguacacuuauugacgcccugcucggagauccccagugcgacggcuuucagaauaaaaagugggaucuguucgucgagcggucuaaagccuauagcaacuguuacccuuaugacgugcccgauuacgcuucccugcgcucucucguugccagcuccgggacccuggaauuuaauaacgagagcuucaauuggacgggagugacccaaaacggcacaucuuccagcugcaucagacggucuuccagcucuuucuucucccgccuuaauuggcugacccaucucaacuauacauacccugcucugaaugucaccaugcccaacaacgagcaguuugacaaacuuuauauuuggggcgugcaccauccuagcacggauaaggaccagaucuuccuguacgcccaguccucugggagaauuacaguuagcaccaagcggucccaacaggcggugaucccgaauaucggaagccgcccccggauuagagauaucccuucucgcauuuccaucuacuggacaauugucaagcccggcgacauccuccugaucaacagcaccgggaaucugauugccccuagaggauauuuuaaaauccggucuggcaagagcuccauuaugcgcucugacgcucccaucgggaaauguaagagcgaaugcauuaccccgaacggauccaucccuaaugauaagcccuuccagaacgugaauagaaucacauacggcgccuguccucgguaugugaaacacagcacgcucaagcuggcuaccggcaugcgcaacguccccgagaaacagacaagagggauuuuuggagccaucgcgggcuucauugaaaaugggugggagggaaugguugacggcugguacggguuucggcaccaaaacucugagggaagaggccaggccgcugaucuuaaguccacccaggccgcuaucgaccaaauuaauggcaaacugaaccgccucaucgggaagacaaaugaaaaauuccaucagauugagaaggaauuuagcgagguggaaggacggauccaggaucuggagaaguauguggaggacaccaaaaucgaucuuuggucuuacaacgccgaacugcucgucgcccuggagaaucagcacacgauugaccugacagauuccgaaaugaacaagcucuuugagaaaaccaagaaacaacugagagaaaacgcugaggacaugggcaaugggugcuucaagaucuaucauaagugugauaacgcgugcauuggaagcauccgcaauggcaccuacgaccacaacguguaccgggacgaggcccuuaauaacagauuucagauuaaagggguugaacugaaguccggcuauaaagauuggauccucuggaucucuuucgcuauuagcugcuuucugcuuuguguggcccugcucggauucaucaugugggccugccagaagggcaauauucgcuguaacaucugcauuuga

SEQ ID NO: 205074 - RNA, 1701 nt, Artificial Sequence; identical to SEQ ID NO: 204513
  derived and/or modified CDS sequence (opt5) from hemagglutinin__InfluenzaA__ALA08512

SEQ ID NO: 205075 - RNA, 1701 nt, Artificial Sequence; identical to SEQ ID NO: 204513
  derived and/or modified CDS sequence (opt5) from hemagglutinin__InfluenzaA__ALA08514

SEQ ID NO: 205076 - RNA, 1701 nt, Artificial Sequence; identical to SEQ ID NO: 204513
  derived and/or modified CDS sequence (opt5) from hemagglutinin__InfluenzaA__ALA08515

SEQ ID NO: 205077 - RNA, 1701 nt, Artificial Sequence; identical to SEQ ID NO: 204513
  derived and/or modified CDS sequence (opt5) from hemagglutinin__InfluenzaA__ALA08516

SEQ ID NO: 205078 - RNA, 1701 nt, Artificial Sequence; identical to SEQ ID NO: 205070
  derived and/or modified CDS sequence (opt5) from hemagglutinin__InfluenzaA__ALA08517

SEQ ID NO: 205079 - RNA, 1701 nt, Artificial Sequence; identical to SEQ ID NO: 204513
  derived and/or modified CDS sequence (opt5) from hemagglutinin__InfluenzaA__ALA08519

SEQ ID NO: 205080 - RNA, 1701 nt, Artificial Sequence
  derived and/or modified CDS sequence (opt5) from hemagglutinin__InfluenzaA__ALA08520
augaagaccaucauugcccugagcuacauccucugccugguguucgcucagaaaauucccggcaacgacaauuccacagccacgcuuugucuggggcaccaugcggucccuaacggaaccaucguuaagacaauuaccaaugauagaaucgaggugacaaacgcuaccgaacucgugcaaaauucuagcaucggcgagauuugcgacuccccgcaccagauccuggauggggaaaacuguacacuuauugacgcccugcucggagauccccagugcgacggcuuucagaauaaaaagugggaucuguucgucgagcggucuaaagccuauagcaacuguuacccuuaugacgugcccgauuacgcuucccugcgcucucucguugccagcuccgggacccuggaauuuaauaacgagagcuucaauuggacgggagugacccaaaacggcacaucuuccgcuugcaucagacggucuagcuccagcuuuuucucucgccuuaauuggcugacccaucucaacuauacauacccugcccugaaugucaccaugcccaacaacgagcaguuugacaagcuguauauuuggggcgugcaccauccugggacggauaaggaccagaucuuccuguacgcgcagccguccggaagaauuacaguuagcaccaaacggucccaacaggccgugauccccaauaucggcucucgcccucggauuagagauauccccagccgcauuuccaucuacuggacaauugucaagccuggggacauccuccugaucaacagcaccggaaaucugauugcucccagaggcuauuuuaaaauccggaacgggaagucuuccauuaugcgcagcgacgccccgaucggaaaauguaagucugaaugcauuaccccuaauggcagcauccccaacgauaagccuuuccagaaugugaacagaaucacauacggcgcuuguccccgguaugugaaacacuccacgcucaagcuggccaccgggaugcgcaauguccccgagaaacagacaagaggaauuuuuggcgcgaucgccggguucauugaaaacggaugggagggcaugguugacgggugguacggauuucggcaccaaaauucugagggcagaggccaggcugccgaucuuaagagcacccaggcugccaucgaccaaauuaacgggaaacugaaucgccucaucggaaagacaaacgaaaaauuccaucagauugagaaggaguucuccgaaguggaaggccggauccaggaucuggagaaguauguggaggacaccaaaaucgaucuuuggagcuacaaugccgaacugcucgucgcucuggagaaccagcacacgauugaccugacagauucugaaaugaacaagcucuuugagaaaaccaagaaacaacugagagaaaaugcggaggacauggggaacggaugcuucaagaucuaucauaagugugauaaugccugcauuggcuccauccgcaacgggaccuacgaccacaauguguaccgggacgaggcucuuaacaauagauuucagauuaaaggcguugaacuuaagagcggauauaaagauuggauccucuggaucucuuucgccauuuccugcuuucugcuuuguguggcccugcucggcuucaucaugugggcuugccagaaggggaacauucgcuguaauaucugcauuuga

SEQ ID NO: 205081 - RNA, 1701 nt, Artificial Sequence; identical to SEQ ID NO: 202210
  derived and/or modified CDS sequence (opt5) from hemagglutinin__InfluenzaA__ALA08522

SEQ ID NO: 205082 - RNA, 1701 nt, Artificial Sequence
  derived and/or modified CDS sequence (opt5) from hemagglutinin__InfluenzaA__ALA08523
augaagaccaucauugcccugagcuacauccucugccugguguucgcucagaaaauucccggcaacgacaauuccacagccacgcuuugucuggggcaccaugcggucccuaacggaaccaucguuaagacaauuaccaaugauagaaucgaggugacaaacgcuaccgaacucgugcaaaauucuagcaucggcgagauuugcgacuccccgcaccagauccuggauggggaaaacuguacacuuauugacgcccugcucggagauccccagugcgacggcuuucagaauaaaaagugggaucuguucgucgagcggucuaaagccuauagcaacuguuacccuuaugacgugcccgauuacgcuucccugcgcucucucguugccagcuccgggacccuggaauuuaauaacgagagcuucaauuggacgggagugacccaaaacggcacaucuuccgcuugcaucagacggagcagcuccagcuuuuucucucgccuuaauuggcugacccaucucaacuauacauacccugcccugaaugucaccaugcccaacaacgagcaguuugacaaacuuuauauuuggggcgugcaccauccugggacggauaaggaccagaucuuccuguacgcgcaguccagcggaagaauuacaguuuccaccaagcggucucaacaggccgugaucccgaauaucggcagccgcccccggauuagagauaucccuucccgcauuagcaucuacuggacaauugucaagcccggggacauccuccugaucaacucuauuggaaaucugaucgcuccuagaggcuauuuuaaaauucgguccgggaagucuucuaucaugcgcagcgacgcccccauuggaaaauguaaguccgaaugcaucaccccgaacggcucuaucccuaaugauaagcccuuccagaacgugaauagaauuaccuacggcgcuuguccucgguaugugaaacacagcacacucaagcuggccacggggaugcgcaacguccccgagaaacagaccagaggaaucuuuggcgcgauugccggguucaucgaaaauggaugggagggcaugguugacgggugguacggauuucggcaccaaaacuccgagggcagaggccaggcugccgaucuuaagagcacacaggcugccauugaccaaaucaaugggaaacugaaccgccucauuggaaagaccaaugaaaaauuccaucagaucgagaaggaguucucugaaguggaaggccggauccaggaucuggagaaguauguggaggacacaaaaauugaucuuugguccuacaacgccgaacugcucgucgcucuggagaaucagcacaccaucgaccugacggauagcgaaaugaacaagcucuuugagaaaacaaagaaacaacugagagaaaacgcggaggacauggggaauggaugcuucaagauuuaucauaagugugauaacgccugcaucggcucuauucgcaaugggaccuacgaccacaacguguaccgggacgaggcucuuaauaacagauuucagaucaaaggcguugaacugaaguccggauauaaagauuggauccucuggauuagcuucgccaucuccugcuuucugcuuuguguggcccugcucggcuucauuaugugggcuugccagaaggggaauauccgcuguaacauuugcaucuga

SEQ ID NO: 205083 - RNA, 1701 nt, Artificial Sequence
  derived and/or modified CDS sequence (opt5) from hemagglutinin__InfluenzaA__ALA08524
augaagaccaucauugcccugagcuacauccucugcaugguguucgcucagaaaauucccggcaacgacaauuccacagccacgcugugucuugggcaccaugcggucccuaacggaaccaucguuaagacaauuaccaaugauagaaucgaggugacaaacgcuaccgaacuggugcaaaauucuagcaucggcgagauuugcgacuccccgcaccagauccucgauggggaaaacuguacacugauugacgcccuucugggagauccccagugcgacggcuuucagaauaaaaagugggaucucuucgucgagcggucuaaagccuauagcaacuguuacccuuaugacgugcccgauuacgcuucccugcgcucucugguugccagcuccgggacccucgaauuuaauaacgagagcuucaauuggacgggagugacccaaaacggcacaucuuccgcuugcaucagacggagcagcuccagcuuuuucucucgccugaauuggcuuacccaucugaacuauacauacccugcccucaaugucaccaugcccaacaacgagcaguuugacaagcuguauauuuggggcgugcaccauccugggacggauaaggaccagaucuuccuuuacgcgcaguccagcggaagaauuacaguuuccaccaaacggucucaacaggccgugaucccgaauaucggcagccgccugcggauuagagauauccccucccgcauuagcaucuacuggacaauugucaagccuggggacauccuccugaucaacucuaccggaaaucugauugcucccagaggcuauuuuaaaauccgguccgggaagucuucuauuaugcgcagcgacgccccuaucggaaaauguaaguccgaaugcauuacccccaacggcucuaucccgaaugauaagccuuuccagaacgugaauagaaucacauacggcgcuuguccccgguaugugaaacacagcacgcucaagcuggccaccgggaugcgcaacgucccugagaaacagacaagaggaauuuuuggcgcgaucgccggguucauugaaaauggaugggagggcaugguugacgggugguacggauuucggcaccaaaacuccgagggcagaggccaggcugccgaucuuaagagcacccaggcugccaucgaccaaauuaaugggaaacugaaccgccucaucggaaagacaaaugaaaaauuccaucagauugagaaggaguucucugaaguggaaggccggauccaggaucuggagaaguauguggaggacaccaaaaucgaucuuugguccuacaacgccgaacugcucgucgcucuggagaaucagcacacgauugaccugacagauagcgaaaugaacaagcucuuugagaaaaccaagaaacaacugagagaaaacgcggaggacauggggaauggaugcuucaagaucuaucauaagugugauaacgccugcauuggcucuauccgcaaugggaccuacgaccacaacguguaccgggacgaggcucuuaauaacagauuucagauuaaaggcguugaacugaaguccggauauaaagauuggauccucuggaucagcuucgccauuuccugcuuucugcuuuguguggcccugcucggcuucaucaugugggcuugccagaaggggaauauucgcuguaacaucugcauuuga

SEQ ID NO: 205084 - RNA, 1701 nt, Artificial Sequence; identical to SEQ ID NO: 204513
  derived and/or modified CDS sequence (opt5) from hemagglutinin__InfluenzaA__ALA08525

SEQ ID NO: 205085 - RNA, 1701 nt, Artificial Sequence; identical to SEQ ID NO: 204513
  derived and/or modified CDS sequence (opt5) from hemagglutinin__InfluenzaA__ALA08526

SEQ ID NO: 205086 - RNA, 1701 nt, Artificial Sequence; identical to SEQ ID NO: 205070
  derived and/or modified CDS sequence (opt5) from hemagglutinin__InfluenzaA__ALA08527

SEQ ID NO: 205087 - RNA, 1701 nt, Artificial Sequence
  derived and/or modified CDS sequence (opt5) from hemagglutinin__InfluenzaA__ALA08528
augaagaccaucauugcccugagcuacauccucugccugguguucgcucagaaacuucccgagaacgacaauuccacagccacgcugugucucggccaccaugcggucccuaacgggaccauuguuaagacaaucaccucugauagaauugaagugacaaaugcuaccgagcuggugcaaaacagcuccaucggagaaaucugcgacucuccgcaccagauucuugauggcaaaaauuguacacugaucgacgcccuccugggggauccccagugcgacggauuucagaacaagaaaugggaucuguucgucgagcggagcaaggccuauuccaauuguuacccuuaugacgugcccgauuacgcuucucuccgcagccugguugccuccagcggcacccuugaauuuaacgacgagucuuucaauugggcuggggugacgcaaaacggaaccuccagcgccugcauuagaggcucuaauuccagcuuuuucucucggcugaacuggcucacacauuccaauuuuaaguauccugcgcugaacgucaccaugcccaauaacgagcaguucgauaaacuuuacaucuggggcgugcaccauccugggacagacaaggaucagauuuaucuguacgcccagagcuccggacgcaucaccguuucuacgaaaagaagccaacaggcugugauuccgaacaucggcucccggccccgcaucagaaauauuccuagccggaucucuauuuacuggacaaucgucaagcccggggacauucuccugaucaacuccaccggaaaucugaucgccccucgcggcuauuuuaaaauuagaagcgggaagucuagcaucaugcgguccgacgcucccauuggaaaguguaaaucugaaugcaucacaccgaacggcagcauuccuaaugauaagcccuuccagaacgugaaucgcaucaccuacggcgccuguccuagauaugugaaacaguccacccucaagcuggcgacagggaugcggaacguccccgagaaacaaacgcgcggaaucuuuggcgccauugcuggguucaucgaaaauggaugggagggcaugaaggacgggugguacggauuuagacaccagaacagcgagggccggggccaggccgcugaucuuaaaucuacccaagccgccauugaccagaucaaugggaagcugaacagacucauuggaaagacaaaugaaaaauuccaccagaucgagaaggaguucuccgaaguugaaggccgcauucaggaucuggagaaauauguggaggacaccaagaucgaucuuuggagcuacaacgcugaacugcucguggcgcuggagaaucaacauacaaucgaccugaccgauucugaaaugaacaaacucuuugagaagacgaagaaacagaugcgggaaaacgccgaggacauggggaauggaugcuucaagauuuaucacaaaugugauaacgcuugcaucggcuccauuagaaaugggacauacgaccaugacgucuaccgcgaugaggcccugaacaaucgguuucagaucaagggcguggaacuuaaaagcggauauaaggacuggauucuguggaucuccuucgccaucucuugcuuucuccuguguguugcccuucugggcuucauuaugugggcuugccagaaggggaacaucagauguaauauuugcaucuga

SEQ ID NO: 205088 - RNA, 1701 nt, Artificial Sequence; identical to SEQ ID NO: 204513
  derived and/or modified CDS sequence (opt5) from hemagglutinin__InfluenzaA__ALA08529

SEQ ID NO: 205089 - RNA, 1701 nt, Artificial Sequence; identical to SEQ ID NO: 204513
  derived and/or modified CDS sequence (opt5) from hemagglutinin__InfluenzaA__ALA08530

SEQ ID NO: 205090 - RNA, 1701 nt, Artificial Sequence
  derived and/or modified CDS sequence (opt5) from hemagglutinin__InfluenzaA__ALA08531
augaagaccaucauugcccugagcuacauccucugccugguguucgcucagaaacuucccgagaacgacaauuccacagccacgcugugucucggccaccaugcggucccuaacgggaccauuguuaagacaaucaccucugauagaauugaagugacaaaugcuaccgagcuggugcaaaacagcuccaucggagaaaucugcgacucuccgcaccagauucuugauggcaaaaauuguacacugaucgacgcccuccugggggauccccagugcgacggauuucagaacaagaaaugggaucuguucgucgagcggagcaaggccuauuccaauuguuacccuuaugacgugcccgauuacgcuucucuccgcagccugguugccuccagcggcacccuugaauuuaacgacgagucuuucaauugggcuggggugacgcaaaacggaaccuccagcgccugcauuagaggcucuaauuccagcuuuuucucucggcugaacuggcucacacauuccaauuuuaaguauccugcgcugaacgucaccaugcccaauaacgagcaguucgauaaacuuuacaucuggggcgugcaccauccugggacagacaaggaucagauuuuucuguaugcccagagcuccggacgcaucaccguuucuacgaaaagaagccaacaggcugugauuccgaacaucggcucccggccccgcaucagaaauauuccuagccggaucucuauuuacuggacaaucgucaagcccggggacauucuccugaucaacuccaccggaaaucugaucgccccucgcggcuacuucaaaauuagaagcgggaagucuagcaucaugcgguccgacgcucccauuggaaaguguaaaucugaaugcaucacaccgaacggcagcauuccuaaugauaagcccuuucagaacgugaaucgcaucaccuauggcgccuguccuagauacgugaaacaguccacccucaagcuggcgacagggaugcggaacguccccgagaaacaaacgcgcggaaucuucggcgccauugcuggguuuaucgaaaauggaugggagggcaugaaggacgggugguauggauucagacaccagaacagcgagggccggggccaggccgcugaucuuaaaucuacccaagccgccauugaccagaucaaugggaagcugaacagacucauuggaaagacaaaugaaaaauuccaccagaucgagaaggaauuuuccgagguugaaggccgcauucaggaucuggagaaauacguggaggacaccaagaucgaucuuuggagcuauaacgcugaacugcucguggcgcuggagaaucaacauacaaucgaccugaccgauucugaaaugaacaaacucuucgagaagacgaagaaacagcugcgggaaaacgccgaggacauggggaauggaugcuuuaagauuuaccacaaaugugauaacgcuugcaucggcuccauuagaaaugggacauauaaccaugacgucuaccgcgacgaggcccuuaauaaccgguuccagaucaagggcguggaacugaaaagcggauacaaggauuggauucucuggaucuccuuugccaucucuugcuuccugcuuuguguugcucugcucggcuuuauuaugugggccugccagaaggggaauaucagauguaacauuugcaucuga

SEQ ID NO: 205091 - RNA, 1701 nt, Artificial Sequence; identical to SEQ ID NO: 204513
  derived and/or modified CDS sequence (opt5) from hemagglutinin__InfluenzaA__ALA08532

SEQ ID NO: 205092 - RNA, 1701 nt, Artificial Sequence; identical to SEQ ID NO: 204513
  derived and/or modified CDS sequence (opt5) from hemagglutinin__InfluenzaA__ALA08533

SEQ ID NO: 205093 - RNA, 1701 nt, Artificial Sequence; identical to SEQ ID NO: 204513
  derived and/or modified CDS sequence (opt5) from hemagglutinin__InfluenzaA__ALA08534

SEQ ID NO: 205094 - RNA, 1701 nt, Artificial Sequence; identical to SEQ ID NO: 204513
  derived and/or modified CDS sequence (opt5) from hemagglutinin__InfluenzaA__ALA08535

SEQ ID NO: 205095 - RNA, 1701 nt, Artificial Sequence; identical to SEQ ID NO: 205070
  derived and/or modified CDS sequence (opt5) from hemagglutinin__InfluenzaA__ALA08536

SEQ ID NO: 205096 - RNA, 1701 nt, Artificial Sequence; identical to SEQ ID NO: 205070
  derived and/or modified CDS sequence (opt5) from hemagglutinin__InfluenzaA__ALA08537

SEQ ID NO: 205097 - RNA, 1701 nt, Artificial Sequence; identical to SEQ ID NO: 205070
  derived and/or modified CDS sequence (opt5) from hemagglutinin__InfluenzaA__ALA08538

SEQ ID NO: 205098 - RNA, 1701 nt, Artificial Sequence; identical to SEQ ID NO: 204513
  derived and/or modified CDS sequence (opt5) from hemagglutinin__InfluenzaA__ALA08539

SEQ ID NO: 205099 - RNA, 1701 nt, Artificial Sequence; identical to SEQ ID NO: 205070
  derived and/or modified CDS sequence (opt5) from hemagglutinin__InfluenzaA__ALA08540

SEQ ID NO: 205100 - RNA, 1701 nt, Artificial Sequence; identical to SEQ ID NO: 205070
  derived and/or modified CDS sequence (opt5) from hemagglutinin__InfluenzaA__ALA08541

SEQ ID NO: 205101 - RNA, 1701 nt, Artificial Sequence; identical to SEQ ID NO: 205070
  derived and/or modified CDS sequence (opt5) from hemagglutinin__InfluenzaA__ALA08542

SEQ ID NO: 205102 - RNA, 1701 nt, Artificial Sequence
  derived and/or modified CDS sequence (opt5) from hemagglutinin__InfluenzaA__ALA08543
augaagaccaucauugcccugagcuacauccucugccugguguucgcucagaaaauucccggcaacgacaauuccacagccacgcuuugucuggggcaccaugcggucccuaacggaaccaucguuaagacaauuaccaaugauagaaucgaggugacaaacgcuaccgaacucgugcaaaauucuagcaucggcgagauuugcgacuccccgcaccagauccuggauggggaaaacuguacacuuauugacgcccugcucggagauccccagugcgacggcuuucagaauaaaaagugggaucuguucgucgagcggucuaaagccuauagcaacuguuacccuuaugacgugcccgauuacgcuucccugcgcucucucguugccagcuccgggacccuggaauuuaauaacgagagcuucaauuggacgggagugacccaaaacggcacaucuuccgcuugcaucagacggagcagcuccagcuuuuucucucgccuuaauuggcugacccaucucaacuauacauacccugcccugaaugucaccaugcccaacaacgagcaguuugacaaacuuuauauuuggggcgugcaccauccugggacggauaaggaccagaucuuccuguacgcgcaguccagcggaagaauuacaguuuccaccaagcggucucaacaggccgcuaucccgaauaucggcagccgcccccggauuagagauaucccuucccgcauuagcaucuacuggacaauugugaagcccggggacauccuccugaucaacucuaccggaaaucugauugccccuagaggcuauuuuaaaauccgguccgggaagucuucuauuaugcgcagcgacgcucccaucggaaaauguaaguccgaaugcauuaccccgaacggcucuaucccuaaugauaagcccuuccagaacgucaauagaaucacauacggcgccuguccucgguaugugaaacacagcacgcucaagcuggcgaccgggaugcgcaacgugcccgagaaacagacaagaggaauuuuuggcgccaucgcuggguucauugaaaauggaugggagggcauggucgacgggugguacggauuucggcaccaaaacuccgagggcagaggccaggccgcugaucuuaagagcacccaggccgccaucgaccaaauuaaugggaaacugaaccgccucaucggaaagacaaaugaaaaauuccaucagauugagaaggaguucucugaaguugaaggccggauccaggaucuggagaaguauguggaggacaccaaaaucgaucuuugguccuacaacgcugaacugcucguggcgcuggagaaucagcacacgauugaccugacagauagcgaaaugaacaagcucuuugagaaaaccaagaaacaacugagagaaaacgccgaggacauggggaauggaugcuucaagaucuaucauaagugugauaacgcuugcauuggcucuauccgcaaugggaccuacgaccacaacgucuaccgggacgaggcccuuaauaacagauuucagauuaaaggcguggaacugaaguccggauauaaagauuggauccucuggaucagcuucgccauuuccugcuuucugcuuuguguugcucugcucggcuucaucaugugggccugccagaaggggaauauucgcuguaacaucugcauuuga

SEQ ID NO: 205103 - RNA, 1701 nt, Artificial Sequence; identical to SEQ ID NO: 204513
  derived and/or modified CDS sequence (opt5) from hemagglutinin__InfluenzaA__ALA08545

SEQ ID NO: 205104 - RNA, 1701 nt, Artificial Sequence; identical to SEQ ID NO: 204513
  derived and/or modified CDS sequence (opt5) from hemagglutinin__InfluenzaA__ALA08546

SEQ ID NO: 205105 - RNA, 1701 nt, Artificial Sequence
  derived and/or modified CDS sequence (opt5) from hemagglutinin__InfluenzaA__ALA08548
augaagaccaucauugcccugagcuacauccucugccugguguucgcucagaaacuucccgagaacgacaauuccacagccacgcugugucucggccaccaugcggucccuaacgggaccauuguuaagacaaucaccucugauagaauugaagugacaaaugcuaccgagcuggugcaaaacagcuccaucggagaaaucugcgacucuccgcaccagauucuugauggcaaaaauuguacacugaucgacgcccuccugggggauccccagugcgacggauuucagaacaagaaaugggaucuguucgucgagcggagcaaggccuauuccaauuguuacccuuaugacgugcccgauuacgcuucucuccgcagccugguugccuccagcggcacccuugaauuuaacgacgagucuuucaauugggcugggguggcccaaaacggaacguccagcgcgugcauuagaggcucuaauuccagcuuuuucucucggcugaacuggcucacccauuccaauuuuaaguauccugcccugaacgucacaaugcccaauaacgagcaguucgauaaacuuuacaucuggggcgugcaccauccugggaccgacaaggaucagauuuuucuguaugcucagagcuccggacgcaucacaguuucuaccaaaagaagccaacaggccgugauuccgaacaucggcucccggccccgcaucagaaauauuccuagccggaucucuauuuacuggacgaucgucaagcccggggacauucuccugaucaacuccacaggaaaucugaucgcuccucgcggcuacuucaaaauuagaagcgggaagucuagcaucaugcgguccgacgcccccauuggaaaguguaaaucugaaugcaucaccccgaacggcagcauuccuaaugauaagcccuuucagaacgugaaucgcaucacauauggcgcguguccuagauacgugaaacaguccacccucaagcuggccaccgggaugcggaacguccccgagaaacaaacacgcggaaucuucggcgcuauugccggguuuaucgaaaauggaugggagggcaugaaggacgggugguauggauucagacaccagaacagcgagggccggggccaggcugccgaucuuaaaucuacgcaagccgcuauugaccagaucaaugggaagcugaacagacucauuggaaagaccaaugaaaaauuccaccagaucgagaaggaauuuuccgagguugaaggccgcauucaggaucuggagaaauacguggaggacacaaagaucgaucuuuggagcuauaacgcggaacugcucguggcccuggagaaucaacauaccaucgaccugacagauucugaaaugaacaaacucuucgagaagaccaagaaacagcugcgggaaaacgcugaggacauggggaauggaugcuuuaagauuuaccacaaaugugauaacgccugcaucggcuccauuagaaaugggacguaugaccaugacgucuaccgcgaugaggcccuuaacaaucgguuccagaucaagggcguggaacugaaaagcggauacaaggacuggauucucuggaucuccuuugcuaucucuugcuuccugcuuuguguugcccugcucggcuuuauuaugugggcgugccagaaggggaacaucagauguaauauuugcaucuga

SEQ ID NO: 205106 - RNA, 1701 nt, Artificial Sequence
  derived and/or modified CDS sequence (opt5) from hemagglutinin__InfluenzaA__ALA08549
augaagaccaucauugcccugagcuacauccucugccugguguucgcucagaaaauucccggcaacgacaauuccacagccacgcuuugucuggggcaccaugcggucccuaacggaaccaucguuaagacaauuaccaaugauagaaucgaggugacaaacgcuaccgaacucgugcaaaauucuagcacaggcgucaucugcgacuccccgcaccagauucuggauggggagaacuguacccuuaucgacgcccugcucggagauccccagugcgacggcuuucagaauaaaaagugggaucuguucguggaacggucuaaagccuauagcaacuguuacccuuaugacguucccgauuacgcuucccugcgcucucucguggccagcuccgggacgcuggaguuuaauaacgaaucuuucaauuggaccggagucacacaaaacggcaccucuuccgcuugcauuagacggagcagcuccagcuuuuucucucgccuuaauuggcugacacaucucaacuauaccuacccugcccugaaugugacgaugcccaacaacgagcaguuugacaaacuuuauaucuggggcguucaccauccugggacagauaaggaccagauuuuccuguacgcgcaguccagcggaagaaucaccguguccacaaaaggcucucaacaggccgucauuccgaauaucgggagccggccccgcaucagagauauuccuucccggaucagcauuuacuggaccaucgugaagcccggagacauucuccugaucaacucuaccggcaaucugaucgcuccucgcggguauuuuaaaauuagauccggaaagagcucuaucaugcggagcgacgcccccauuggcaaauguaaguccgagugcaucacaccgaacggcucuauuccuaaugauaagcccuuccagaacgugaaucgcaucacguacggggcuuguccuagauaugucaaacacagcacccucaagcuggccacaggaaugcggaacguucccgaaaaacagacccgcggcaucuuuggggcgauugccggauucaucgagaauggcugggaagggaugguggacggaugguacggcuuuagacaccaaaacuccgagggccgggggcaggcugccgaucuuaagagcacacaggcugccauugaccaaaucaauggaaaacugaacagacucauuggcaagaccaaugagaaauuccaucagaucgaaaaggaguucucugaaguggaggggcgcauucaggaucuggaaaaguaugucgaggacacgaaaaucgaucuuugguccuacaacgccgagcugcucguggcucuggaaaaucagcacacaaucgaccugaccgauagcgagaugaacaagcucuuugaaaagacccggaagcaacugagagagaacgcggaagacaugggaaauggcugcuucaaaauuuaucauaagugugauaacgccugcaucgggucuauucgcaauggcacauacgaccacaacguuuaccgggacgaggcucuuaauaacagauuucagaucaagggaguggagcugaaauccggcuauaaggauuggauucucuggaucagcuucgccaucuccugcuuucugcuuugugucgcccugcucggguucauuaugugggcuugccagaaaggaaauauccgcuguaacauuugcaucuga

SEQ ID NO: 205107 - RNA, 1701 nt, Artificial Sequence; identical to SEQ ID NO: 205070
  derived and/or modified CDS sequence (opt5) from hemagglutinin__InfluenzaA__ALA08550

SEQ ID NO: 205108 - RNA, 1701 nt, Artificial Sequence
  derived and/or modified CDS sequence (opt5) from hemagglutinin__InfluenzaA__ALA08551
augaagaccaucauugcccugagcuacauccucugccugguguucgcucagaaacuucuggagaacgacaauuccacagccacgcucugucugggccaccaugcgguccccaacgggaccauuguuaagacaaucaccucugauagaauugaagugacaaaugcuaccgagcuugugcaaaacagcuccaucggagaaaucugcgacucuccucaccagauucuggauggcaaaaauuguacacucaucgacgcccugcugggggauccgcagugcgacggauuucagaacaagaaaugggaucucuucgucgagcggagcaaggccuauuccaauuguuaccccuaugacgugccugauuacgcuucucugcgcagccuuguugccuccagcggcacccuggaauuuaacgacgagucuuucaauugggcuggggugacgcaaaacggaaccuccagcgccugcauuagaggcucuaauuccagcuuuuucucucggcucaacuggcugacacauuccaauuuuaaguaucccgcgcuuaacgucaccaugccuaauaacgagcaguucgauaaacuguacaucuggggcgugcaccaucccgggacagacaaggaucagauuuuucucuaugcccagagcuccggacgcaucaccguuucuacgaaaagaagccaacaggcugugauuccuaacaucggcucccggccgcgcaucagaaauauucccagccggaucucuauuuacuggacaaucgucaagccuggggacauucugcugaucaacuccaccggaaaucucaucgcuccccgcggcuacuucaaaauuagaagcgggaagucuagcaucaugcgguccgacgccccuauuggaaaguguaaaucugaaugcaucacacccaacggcagcauuccgaaugauaagccuuuucagaacgugaaucgcaucaccuauggcgccugucccagauacgugaaacaguccacccugaaacuugcgacagggaugcggaacgucccugagaagcaaacgcgcggaaucuucggcgccauugcuggguuuaucgaaaauggaugggagggcaugaaggacgggugguauggauucagacaccagaacagcgagggccggggccaggccgcugaucugaaaucuacccaagccgccauugaccagaucaaugggaagcucaacagacugauuggaaagacaaaugaaaaauuccaccagaucgagaaggaauuuuccgagguugaaggccgcauucaggaucuugagaaauacguggaggacaccaagaucgaucuguggagcuauaacgcugaacuccugguggcgcuggagaaucaacauacaaucgaccucaccgauucugaaaugaacaaacuguucgagaagacgaagaaacagcuucgggaaaacgccgaggacauggggaauggaugcuuuaagauuuaccacaaaugugauaacgcuugcaucggcuccauuagaaaugggacauaugaccauaacgucuaccgcgacgaggcccugaauaaccgguuccagaucaagggcguggaacucaaaagcggauacaaggauuggauucuguggaucuccuuugccaucucuugcuuccuucuguguguugcucuccugggcuuuauuaugugggccugccagaaggggaauaucagauguaacauuugcaucuga

SEQ ID NO: 205109 - RNA, 1701 nt, Artificial Sequence; identical to SEQ ID NO: 205070
  derived and/or modified CDS sequence (opt5) from hemagglutinin__InfluenzaA__ALA08552

SEQ ID NO: 205110 - RNA, 1701 nt, Artificial Sequence; identical to SEQ ID NO: 205070
  derived and/or modified CDS sequence (opt5) from hemagglutinin__InfluenzaA__ALA08553

SEQ ID NO: 205111 - RNA, 1701 nt, Artificial Sequence
  derived and/or modified CDS sequence (opt5) from hemagglutinin__InfluenzaA__ALA08554
augaagaccaucauugcccugagcuacauccucugccugguguucgcucagaaaauucccggcaacgacaauuccacagccacgcuuugucuggggcaccaugcggucccuaacggaaccaucguuaagacaauuaccaaugauagaaucgaggugacaaacgcuaccgaacucgugcaaaauucuagcaucggcgagauuugcgacuccccgcaccagauccuggauggggaaaacuguacacuuauugacgcccugcucggagauccccagugcgacggcuuucagaauaaaaagugggaucuguucgucgagcggucuaaagccuauagcaacuguuacccuuaugacgugcccgauuacgcuucccugcgcucucucguugccagcuccgggacccuggaauuuaauaacgagagcuucaauuggacgggagugacccaaaacggcacaucuuccgcuugcaucagacggagcagcuccagcuuuuucucucgccuuaauuggcugacccaucucaacuauacauacccugcccugaaugucaccaugcccaacaacgagcaguuugacaaacuuuauauuuggggcgugcaccauccugggacggauaaggaccagaucuuccuguacgcgcaguccagcggaagaauuacaguuuccaccaagcggucucaacaggccgugaucccgaauaucggcagccgcccccggauuagagauaucccuucccgcauuagcaucuacuggacaauugucaagcccggggacauccuccugaucaacucuaccggaaaucugauugcuccuagaggcuauuuuaaaauccgguccgggaagucuucuauuaugcgcagcgacgcccccaucggaaaauguaaguccgaaugcauuaccccgaacggcucuaucccuaaugauaagcccuuccagaacgugaauagaaucacauacggcgcuuguccucgguaugugaaacacagcacgcucaagcuggccaccgggaugcgcaacguccccgagaaacagacaagaggaauuuuuggcgcgaucgccggguucauugaaaauggaugggagggcaugguugacgggugguacggauuucggcaccaaaacuccgagggcagaggccaggcugccgaucuuaagagcacccaggcugccaucgaccaaauuaaugggaaacugaaccgccucaucggaaagacaaaugaaaaauuccaucagauugagaaggaguucucugaaguggaaggccggauccaggaucuggagaaguauguggaggacaccaaaaucgaucuuugguccuacaacgccgaacugcucgucgcucuggagaaucagcacacgauugaccugacagauagcgaaaugaacaagcucuuugagaaaaccaagaaacaacugagagaaaacgcggaggacauggggaauggaugcuucaagaucuaucauaagugugauaacgccugcauuggcucuauccgcaaugggaccuacgaccacaacguguaccgggacgaggcucuuaauaacagauuucagauuaaaggcguugaacugauguccggauauaaggauuggauccucuggaucagcuucgccauuuccugcuuucugcuuuguguggcccugcucggcuucaucaugugggcuugccagaaagggaauauucgcuguaacaucugcauuuga

SEQ ID NO: 205112 - RNA, 1701 nt, Artificial Sequence
  derived and/or modified CDS sequence (opt5) from hemagglutinin__InfluenzaA__ALA08555
augaagaccaucauugcccugagcuacauccucugccugguguucgcucagaaacuucccgagaacgacaauuccacagccacgcugugucucggccaccaugcggucccuaacgggaccauuguuaagacaaucaccucugaucaaauugaagugacaaaugcuaccgagcuggugcagaacagcuccaucggagaaaucugcgacucuccgcaccagauucuugauggcaaaaauuguacacugaucgacgcccuccugggggauccccagugcgacggauuucaaaacaagaaaugggaucuguucgucgagagaagcaaggccuauuccaauuguuacccuuaugacgugcccgauuacgcuucucuccggagccugguugccuccagcggcacccuugaauuuaacgacgagucuuucaauugggcuggggugacgcagaacggaaccuccagcgccugcauucgcggcucuaauuccagcuuuuucucuagacugaacuggcucacacauuccaauuuuaaguauccugcgcugaacgucaccaugcccaauaacgagcaguucgauaaacuuuacaucuggggcgugcaccauccugggacagacaaggaucagauuuuucuguaugcccaaagcuccggacggaucaccguuucuacgaaacgcagccagcaggcugugauuccguccaucggcagcagaccccggauccgcaacauuccuucuagaaucuccauuuacuggacaaucgucaagcccggggacauucuccugaucaauagcaccggaaaccugaucgccccucggggcuacuucaaaauucgcucugggaagucuuccaucaugagaucugacgcucccauuggaaaguguaaaagcgaaugcaucacaccgaauggcuccauuccuaacgauaagcccuuucagaaugugaaccggaucaccuauggcgccuguccucgcuacgugaaacaaagcacccucaagcuggcgacagggaugagaaauguccccgagaaacagacgcggggaaucuucggcgccauugcuggguuuaucgaaaacggaugggagggcaugaaggacgggugguauggauuccgccaccagaauagcgagggcagaggccaagccgcugaucuuaaauccacccaggccgccauugaccagaucaacgggaagcugaaucggcucauuggaaagacaaacgaaaaauuccaccagaucgagaaggaauuuagcgagguugaaggccgcauucaagaucuggagaaauacguggaggacaccaagaucgaucuuuggucuuauaaugcugaacugcucguggcgcuggagaaccagcauacaaucgaccugaccgauuccgaaaugaauaaacucuucgagaagacgaagaaacagcugagagaaaacgccgaggacauggggaacggaugcuuuaagauuuaccacaaaugugauaaugcuugcaucggcagcauucggaacgggacauaugaccauaaugucuacagagacgaggcccuuaacaaucgcuuccagaucaagggcguggaacugaaauccggauacaaggauuggauucucuggaucucuuuugccaucagcugcuuccugcuuuguguugcucugcucggcuuuauuaugugggccugccaaaaggggaacauccgguguaauauuugcaucuga

SEQ ID NO: 205113 - RNA, 1701 nt, Artificial Sequence
  derived and/or modified CDS sequence (opt5) from hemagglutinin__InfluenzaA__ALA08556
augaagaccaucauugcccugagcuacauccucugccugguguucgcucagaaaauucccggcaacgacaauuccacagccacgcuuugucuggggcaccaugcggucccuaacggaaccaucguuaagacaauuaccaaugauagaaucgaggugacaaacgcuaccgaacucgugcaaaauucuagcaucggcgagauuugcgacuccccgcaccagauccuggauggggaaaacuguacacuuauugacgcccugcucggagauccccagugcgacggcuuucagaauaaaaagugggaucuguucgucgagcggucuaaagccuauagcaacuguuacccuuaugacgugcccgauuacgcuucccugcgcucucucguugccagcuccgggacccuggaauuuaauaacgagagcuucaauuggacgggaaucacccaaaacggcacaucuuccgcuugcauuagacggagcagcuccagcuuuuucucucgccuuaauuggcugacccaucucaacuauacauacccugcccugaaugugaccaugcccaacaacgagcaguuugacaaacuuuauaucuggggcguccaccauccugggacggauaaggaccagauuuuccuguacgcgcaguccagcggaagaaucacaguguccaccaagcggucucaacaggccguuaucccgaauauuggcagccgccccagaauccgggauauuccuucccgcaucagcauuuacuggacaaucgugaagcccggggacauccuccugauuaacucuaccggaaaucugaucgcuccuagaggcuauuuuaaaauucgguccgggaagucuucuaucaugcgcagcgacgcccccauuggaaaauguaaguccgaaugcaucaccccgaacggcucuaucccuaaugauaagcccuuccagaacgucaauagaauuacauacggcgcuuguccucgguaugugaaacacagcacgcucaagcuggccaccgggaugcgcaacgugcccgagaaacagacaagaggaaucuuuggcgcgauugccggguucaucgaaaauggaugggagggcauggucgacgggugguacggauuucggcaccaaaacuccgagggcagaggccaggcugccgaucuuaagagcacccaggcugccauugaccaaaucaaugggaaacugaaccgccucauuggaaagacaaaugaaaaauuccaucagaucgagaaggaguucucugaaguugaaggccggauccaggaucuggagaaguauguggaggacaccaaaauugaucuuugguccuacaacgccgaacugcucguggcucuggagaaucagcacacgaucgaccugacagauagcgaaaugaacaagcucuuugagaaaaccaagaaacaacugagagaaaacgcggaggacauggggaauggaugcuucaagauuuaucauaagugugauaacgccugcaucggcucuauucgcaaugggaccuacgaccacaacgucuaccgggacgaggcucuuaauaacagauuucagaucaaaggcguggaacugaaguccggauauaaagauuggauccucuggauuagcuucgccaucuccugcuuucugcuuuguguugcccugcucggcuucauuaugugggcuugccagaaggggaauauccgcuguaacauuugcaucuga

SEQ ID NO: 205114 - RNA, 1701 nt, Artificial Sequence; identical to SEQ ID NO: 205070
  derived and/or modified CDS sequence (opt5) from hemagglutinin__InfluenzaA__ALA08557

SEQ ID NO: 205115 - RNA, 1701 nt, Artificial Sequence; identical to SEQ ID NO: 205070
  derived and/or modified CDS sequence (opt5) from hemagglutinin__InfluenzaA__ALA08558

SEQ ID NO: 205116 - RNA, 1701 nt, Artificial Sequence
  derived and/or modified CDS sequence (opt5) from hemagglutinin__InfluenzaA__ALA08559
augaagaccaucauugcccugagcuacauccucugccugguguucgcucagaaaauucccggcaacgacaauuccacagccacgcuuugucuggggcaccaugcggucccuaacggaaccaucguuaagacaauuaccaaugauagaaucgaggugacaaacgcuaccgaacucgugcaaaauucuagcaucggcgagauuugcgacuccccgcaccagauccuggauggggaaaacuguacacuuauugacgcccugcucggagauccccagugcgacggcuuucagaauaaaaagugggaucuguucgucgagcggucuaaagccuauagcaacuguuacccuuaugacgugcccgauuacgcuucccugcgcucucucguugccagcuccgggacccuggaauuuaauaacgagagcuucaauuggacgggagugacccaaaacggcacaucuuccgcuugcaucagacggucuagcuccagcuuuuucucucgccuuaauuggcugacccaucucaacuauacauacccugcccugaaugucaccaugcccaacaacgagcaguuugacaaacuuuauauuuggggcgugcaccauccugggacggauaaggaccagaucuuccuguacgcgagauccagcggacggauuacaguuuccaccaagggcucucagcaagccgugaucccgaauaucgggagccgcccccggauuagagauaucccuucccgcauuagcaucuacuggacaauugucaagcccggagacauccuccugaucaacucugcuggcaaucugauugccccuagaggguauuuuaaaauccgguccggaaagagcucuauuaugcgcagcgacgcucccaucggcaaauguaaguccgaaugcauuaccccgaacggcucuaucccuaaugauaagcccuuccagaacgugaauagaaucaccuacggggccuguccucgguaugugaaacacagcacacucaagcuggcgacgggaaugcgcaacguccccgagaaacagaccagaggcauuuuuggggccaucgcuggauucauugaaaauggcugggaggggaugguugacggaugguacggcuuucggcaccagaacuccgagggcagagggcaagccgcugaucuuaagagcacacaggccgccaucgaccagauuaauggaaaacugaaccgccucaucggcaagaccaaugaaaaauuccaucaaauugagaaggaguucucugaaguggaagggcggauccaggaucuggagaaguauguggaggacacaaaaaucgaucuuugguccuacaacgcugaacugcucgucgcgcuggagaaucagcacaccauugaccugacggauagcgaaaugaacaagcucuuugagaaaacaaagaaacagcugagagaaaacgccgaggacaugggaaauggcugcuucaagaucuaucauaagugugauaacgcuugcauugggucuauccgcaauggcaccuacgaccacaacguguaccgggacgaggcccuuaauaacagauuucaaauuaaaggaguugaacugaaguccggcuauaaagauuggauccucuggaucagcuucgccauuuccugcuuucugcuuuguguggcucugcucggguucaucaugugggccugccagaagggaaauauucgcuguaacaucugcauuuga

SEQ ID NO: 205117 - RNA, 1701 nt, Artificial Sequence; identical to SEQ ID NO: 204513
  derived and/or modified CDS sequence (opt5) from hemagglutinin__InfluenzaA__ALA08560

SEQ ID NO: 205118 - RNA, 1701 nt, Artificial Sequence
  derived and/or modified CDS sequence (opt5) from hemagglutinin__InfluenzaA__ALA08561
augaagaccaucauugcccugagcuacauccucugccugguguucgcucagaaaauucccggcaacgacaauuccacagccacgcuuugucuggggcaccaugcggucccuaacggaaccaucguuaagacaauuaccaaugauagaaucgaggugacaaacgcuaccgaacucgugcaaaauucuagcaucggcgagauuugcgacuccccgcaccagauccuggauggggaaaacuguacacuuauugacgcccugcucggagauccccagugcgacggcuuucagaauaaaaagugggaucuguucgucgagcggucuaaagccuauagcaacuguuacccuuaugacgugcccgauuacgcuucccugcgcucucucguugccagcuccgggacccuggaauuuaauaacgagagcuucaauuggacgggagugacccaaaacggcacaucuuccgcuugcaucagacggagcagcuccagcuuuuucucucgccuuaauuggcugacccaucucaacuauaaguacccugcccugaaugucacaaugcccaacaaggagcaguuugacaaacuuuauauuuggggcgugcaccauccugggaccgauaaggaccagaucuuccuguacgcgcaguccagcggaagaauuacgguuuccacaaaacggucucaacaggccgugaucccgaacaucggcagccgcccccggauuagagauaucccuucccgcauuagcaucuacuggaccauugucaagcccggggacauccuccugaucaauucuacaggaaaccugauugcuccuagaggcuauuuuaaaauccgguccgggaagucuucuauuaugcgcagcgacgcccccaucggaaaguguaaauccgaaugcauuaccccgaauggcucuaucccuaacgauaagcccuuccagaaugugaacagaaucaccuacggcgcuuguccucgguaugugaaacacagcacacucaagcuggccacggggaugcgcaauguccccgagaaacagaccagaggaauuuuuggcgcgaucgccggguucauugaaaacggaugggagggcaugguugacgggugguacggauuucggcaccaaaauuccgagggcagaggccaggcugccgaucuuaagagcacacaggcugccaucgaccaaauuaacgggaaacugaaucgccucaucggaaagaccaacgaaaaguuccaucagauugagaaagaguucucugaaguggaaggccggauccaggaucuggagaaguauguggaggacacaaaaaucgaucuuugguccuacaaugccgaacugcucgucgcucuggagaaccagcacaccauugaccugacggauagcgaaaugaauaagcucuuugagaaaacaaagaagcaacugagagaaaacgcggaggacauggggaacggaugcuucaaaaucuaucauaagugugauaaugccugcauuggcucuauccgcaacgggaccuacgaccacaauguguaccgggacgaggcucuuaacaauagauuucagauuaaaggcguugaacugaaguccggauauaaagauuggauccucuggaucagcuucgccauuuccugcuuucugcuuuguguggcccugcucggcuucaucaugugggcuugccagaaggggaacauucgcuguaauaucugcauuuga

SEQ ID NO: 205119 - RNA, 1701 nt, Artificial Sequence
  derived and/or modified CDS sequence (opt5) from hemagglutinin__InfluenzaA__ALA08563
augaagaccaucauugcccugagcuacauccucugccugguguucgcucagaaaauucccggcaacgacaauuccacagccacgcuuugucuggggcaccaugcggucccuaacggaaccaucguuaagacaauuaccaaugauagaaucgaggugacaaacgcuaccgaacucgugcaaaauucuagcaucggcgagauuugcgacuccccgcaccagauccuggauggggaaaacuguacacuuauugacgcccugcucggagauccccagugcgacggcuuucagaauaaaaagugggaucuguucgucgagcggucuaaagccuauagcaacuguuacccuuaugacgugcccgauuacgcuucccugcgcucucucguugccagcuccgggacccuggaauuuaauaacgagagcuucaauuggacgggagugacccaaaacggcacaucuuccgcuugcaucagacggagcagcuccagcuuuuucucucgccuuaauuggcugacccaucucaacuauacauacccugcccugaaugucaccaugcccaacaacgagcaguuugacaagcuguauauuuggggcgugcaccauccugggacggauaaggaccagaucuuccuguacgcgcaguccagcggaagaauuacaguuuccaccaaacggucucaacaggccgugaucccgaauaucggcagccgcccccggauuagagauaucccuucccgcauuagcaucuacuggacaauugucaagcccggggacauccuccugaucaacucuaccggaaaucugauugcuccuagaggcuauuuuaaaauccucuccgggaagucuucuauuaugcggagcgacgcccccaucggaaaauguaaguccgaaugcauuaccccgaacggcucuaucccuaaugauaagcccuuccagaacgugaaucgcaucacauacggcgcuuguccuagauaugugaaacacagcacgcugaaacuugccaccgggaugcggaacguccccgagaagcagacacgcggaauuuuuggcgcgaucgccggguucauugaaaauggaugggagggcaugguugacgggugguacggauuuagacaccaaaacuccgagggccggggccaggcugccgaucuuaagagcacccaggcugccaucgaccaaauuaaugggaaacucaacagacugaucggaaagacaaaugaaaaauuccaucagauugagaaggaguucucugaaguggaaggccgcauccaggaucuugagaaguauguggaggacaccaaaaucgaucugugguccuacaacgccgaacuccuggucgcucuggagaaucagcacacgauugaccucacagauagcgaaaugaacaagcuguuugagaaaaccaagaaacaacuucgggaaaacgcggaggacauggggaauggaugcuucaagaucuaucauaagugugauaacgccugcauuggcucuaucagaaaugggaccuacgaccacaacguguaccgcgacgaggcucugaauaaccgguuucagauuaaaggcguugaacucaaguccggauauaaagauuggauccuguggaucagcuucgccauuuccugcuuucuucuguguguggcccuccugggcuucaucaugugggcuugccagaaggggaauauuagauguaacaucugcauuuga

SEQ ID NO: 205120 - RNA, 1701 nt, Artificial Sequence
  derived and/or modified CDS sequence (opt5) from hemagglutinin__InfluenzaA__ALA08571
augaagaccaucauugcccugagcuacauccucugccugguguucgcucagaaaauucccggcaacgacaauuccacagccacgcuuugucuggggcaccaugcggucccuaacggaaccaucguuaagacaauuaccaaugauagaaucgaggugacaaacgcuaccgaacucgugcaaaauucuagcaucggcgagauuugcgacuccccgcaccagauccuggauggggaaaacuguacacuuauugacgcccugcucggagauccccagugcgacggcuuucagaauaaaaagugggaucuguucgucgagcggucuaaagccuauagcaacuguuacccuuaugacgugcccgauuacgcuucccugcgcucucucguugccagcuccgggacccuggaauuuaauaacgagagcuucaauuggacgggagugacccaaaacggcacaucuuccgcuugcaucagacggagcagcuccagcuuuuucucucgccuuaauuggcugacccaucucaacuauacauacccugcccugaaugucaccaugcccaacaacgagcaguuugacaaacuuuauauuuggggcgugcaccauccugggacggauaaggaccagaucuuccuguacgcgcaguccagcggaagaauuacaguuuccaccaagcggucucaacaggccgugaucccgaauaucggcagccgcccccggauuagagauaucccuucccgcauuagcaucuacuggacaauugucaagcccggggacauccuccugaucaacucuaccggaaaucugauugcuccuagaggcuauuuuaaaauccgguccgggaagucuucuauuaugcgcagcgacgcccccaucggaaaauguaaguccgaaugcauuaccccgaacggcucuaucccuaaugauaagcccuuccagaacgugaauagaaucacauacggcgcuuguccucgguaugugaaacacagcacgcucaagcuggccaccgggaugcgcaacguccccgagaaacagacaagaggaauuuuuggcgcgaucgccggguucauugaaaauggaugggagggcaugguugacgggugguacggauuucggcaccaaaacuccgagggcagaggccaggcugccgaucuuaagagcacccaggcugccaucgaccaaauuaaugggaaacugaaccgccucaucggaaagacaaaugaaaaauuccaucagauugagaaggaguucucugaaguggaaggccggauccaggaucuggagaaguauguggaggacaccaaaaucgaucuuugguccuacaacgccgaacugcucgucgcucuggagaaucagcacacgauugaccugacagauagcgaaaugaacaagcucuuugagaaaaccaagaaacaacugagagaaaacgcggaggacauggggaauggaugcuucaagaucuaucauaagugugauaacgccugcauuggcucuauccgcaaugggaccuacgaccacaacguguaccgggacgaggcucuuaauaacagauuucagauuaaaggcguugaacugaaguccggauauaaagauuggauccucuggaucagcuucgccacauccugcuuucugcuuuguguggcccugcucggcuucauuaugugggcuugccagaaggggaauauccgcuguaacauuugcaucuga

SEQ ID NO: 205121 - RNA, 1701 nt, Artificial Sequence; identical to SEQ ID NO: 205056
  derived and/or modified CDS sequence (opt5) from hemagglutinin__InfluenzaA__ALA08572

SEQ ID NO: 205122 - RNA, 1701 nt, Artificial Sequence; identical to SEQ ID NO: 205053
  derived and/or modified CDS sequence (opt5) from hemagglutinin__InfluenzaA__ALA08573

SEQ ID NO: 205123 - RNA, 1701 nt, Artificial Sequence
  derived and/or modified CDS sequence (opt5) from hemagglutinin__InfluenzaA__ALA08574
augaagaccaucauugcccugagcuacauccucugccugguguucgcucagaaaauucccggcaacgacaauuccacagccacgcuuugucuggggcaccaugcggucccuaacggaaccaucguuaagacaauuaccaaugauagaaucgaggugacaaacgcuaccgaacucgugcaaaauucuagcaucggcgagauuugcgacuccccgcaccagauccuggauggggaaaacuguacacuuauugacgcccugcucggagauccccagugcgacggcuuucagaauaaaaagugggaucuguucgucgagcggucuaaagccuauagcaacuguuacccuuaugacgugcccgauuacgcuucccugcgcucucucguugccagcuccgggacccuggaauuuaauaacgagagcuucaauuggacgggagugacccaaaacggcacaucuuccgcuugcaucagacggagcagcuccagcuuuuucucucgccuuaauuggcugacccaucucaacuauacauacccugcccugaaugucaccaugcccaacaacgagcaguuugacaagcuguauauuuggggcgugcaccauccugggacggauaaggaccagaucuuccuguacgcgcaguccagcggaagaauuacaguuuccaccaaacggucucaacaggccgugaucccgaauaucggcagccgcccccggauuagagauaucccuucccgcauuagcaucuacuggacaauugucaagcccggggacauccuccugaucaacucuaccggaaaucugauugcuccuagaggcuauuuuaaaauccgguccgggaagucuucuauuaugcgcagcgacgcccccaucggaaaauguaaguccgaaugcauuaccccgaacggcucuaucccuaaugauaagcccuuccagaacgugaauagaaucacauacggcgcuuguccucgguaugugaaacacagcacgcucaagcuggccaccgggaugcgcaacguccccgagaaacagacaagaggaauuuuuggcgcgaucgccggguucauugaaaauggaugggagggcaugguugacgggugguacggauuucggcaccaaaacuccgagggcagaggccaggcugccgaucuuaagagcacccaggcugccaucgaccaaauuucugggaaacugaaucgccucaucggaaagacaaacgaaaaauuccaucagauugagaaggaguucuccgaaguggaaggccggauccaggaucuggagaaguauguggaggacaccaaaaucgaucuuuggagcuacaaugccgaacugcucgucgcucuggagaaccagcacacgauugaccugacagauucugaaaugaauaagcucuuugagaaaaccaagaaacaacugagagaaaacgcggaggacauggggaacggaugcuucaagaucuaucauaagugugauaaugccugcauuggcuccauccgcaacgggaccuacgaccacaauguguaccgggacgaggcucuuaacaauagauuucagauuaaaggcguugaacuuaagagcggauauaaagauuggauccucuggaucuccuucgccauuucuugcuuucugcuuuguguggcccugcucggcuucaucaugugggcuugccagaaggggaacauucgcuguaauaucugcauuuga

SEQ ID NO: 205124 - RNA, 1701 nt, Artificial Sequence
  derived and/or modified CDS sequence (opt5) from hemagglutinin__InfluenzaA__ALA08575
augaagaccaucauugcccugagcuacauccucugccugguguucgcucagaaaauucccggcaacgacaauuccacagccacgcuuugucuggggcaccaugcggucccuaacggaaccaucguuaagacaauuaccaaugauagaaucgaggugacaaacgcuaccgaacucgugcaaaauucuagcaucggcgagauuugcgacuccccgcaccagauccuggauggggaaaacuguacacuuauugacgcccugcucggagauccccagugcgacggcuuucagaauaaaaagugggaucuguucgucgagcggucuaaagccuauagcaacuguuacccuuaugacgugcccgauuacgcuucccugcgcucucucguugccagcuccgggacccuggaauuuaauaacgagagcuucaauuggacgggagugacccaaaacggcacaucuuccgcuugcaucagacggagcagcuccagcuuuuucucucgccuuaauuggcugacccaucucaacuauacauacccugcccugaaugucaccaugcccaacaacgagcaguuugacaaacuuuauauuuggggcgugcaccauccugggacggauaaggaccagaucuuccuguacgcgcaguccagcggaagaauuacaguuuccaccaagcggucucaacaggccgugaucccgaauaucggcagccgcccccggauuagagauaucccuucccgcauuagcaucuacuggacaauugucaagcccggggacauccuccugaucaacucuaccggaaaucugauugcuccuagaggcuauuuuaaaauccgguccgggaagucuucuauuaugcgcagcgacgcccccaucggaaaauguaaguccgaaugcauuaccccgaacggcucuaucccuaaugauaagcccuuccagaacgugaauagaaucacauacggcgcuuguccucgguaugugaaacagagcacgcucaagcuggccaccgggaugcgcaacguccccgagaaacaaacaagaggaauuuuuggcgcgaucgccggguucauugaaaauggaugggagggcaugguugacgggugguacggauuucggcaccagaacuccgagggcagaggccaggcugccgaucuuaagagcacccaagcugccaucgaccagauuaaugggaaacugaaccgccucaucggaaagacaaaugaaaaauuccaccagauugagaaggaguucucugaaguggaaggccggauccaggaucuggagaaguauguggaggacaccaaaaucgaucuuugguccuacaacgccgaacugcucgucgcucuggagaaucaacauacgauugaccugacagauagcgaaaugaacaagcucuuugagaaaaccaagaaacagcugagagaaaacgcggaggacauggggaauggaugcuucaagaucuaucacaagugugauaacgccugcauuggcucuauccgcaaugggaccuacgaccauaacguguaccgggacgaggcucuuaauaacagauuucagauuaaaggcguugaacugaaguccggauauaaagauuggauccucuggaucagcuucgccauuuccugcuuucugcuuuguguggcccugcucggcuucaucaugugggcuugccagaaggggaauauucgcuguaacaucugcauuuga

SEQ ID NO: 205125 - RNA, 1701 nt, Artificial Sequence; identical to SEQ ID NO: 204513
  derived and/or modified CDS sequence (opt5) from hemagglutinin__InfluenzaA__ALA08576

SEQ ID NO: 205126 - RNA, 1701 nt, Artificial Sequence; identical to SEQ ID NO: 204513
  derived and/or modified CDS sequence (opt5) from hemagglutinin__InfluenzaA__ALA08577

SEQ ID NO: 205127 - RNA, 1701 nt, Artificial Sequence
  derived and/or modified CDS sequence (opt5) from hemagglutinin__InfluenzaA__ALA08579
augaagaccaucauugcccugagcuacauccucugccugauuuucgcucagaaaauccccggcaacgacaauuccacagccacgcuuugucuggggcaccaugcggugccuaacggaaccauugucaagacaaucaccaaugauagaaucgagguuacaaacgcuaccgaacucgugcaaaauucuagcauuggcgagaucugcgacuccccgcaccagauucuggauggggaaaacuguacacuuaucgacgcccugcucggagauccccagugcgacggcuuucagaauaaaaagugggaucuguucguggagcggucuaaagccuauagcaacuguuacccuuaugacguccccgauuacgcuucccugcgcucucucguggccagcuccgggacccuggaauuuaauaacgagagcuucaauuggacgggaguuacccaaaacggcacaucuuccgcuugcauuagaaagucuagcuccagcuuuuucucucggcuuaauuggcugacccaucucaacuauacauacccugcccugaaugugaccaugcccaacaacgagcaguuugacaaacuuuauaucuggggcguccaccauccugggacggauaaggaccagauuuuccuguacgcgcgcuccagcggaagaaucacaguguccaccaagcggucucagcaagccguuaucccgaauauuggcagccgccccagaauccgggauauuccuucccgcaucagcauuuacuggacaaucgugaaacccggggacauccuccugauuaacucuaccggaaaucugaucgcuccuagaggcuauuuuaagauucgguccgggaaaagcucuaucaugcgcagcgacgcccccauuggaaaguguaaguccgaaugcaucaccccgaacggcucuaucccuaaugauaaacccuuccagaacgucaauagaauuacauacggcgcuuguccucgguaugugaagcacagcacgcucaaacuggccaccgggaugcgcaacgugcccgagaagcagacaagaggaaucuuuggcgcgauugccggguucaucgaaaauggaugggagggcauggucgacgggugguacggauuucggcaccagaacuccgagggcagaggccaagcugccgaucuuaaaagcacccaggcugccauugaccagaucaaugggaagcugaaccgccucauuggaaaaacaaaugaaaaguuccaucaaaucgagaaggaguucucugaaguugaaggccggauccaggaucuggagaaauauguggaggacaccaagauugaucuuugguccuacaacgccgaacugcucguggcucuggagaaucagcacacgaucgaccugacagauagcgaaaugaacaaacucuuugagaagaccaaaaagcagcugagagaaaacgcggaggacauggggaauggaugcuucaagauuuaucauaaaugugauaacgccugcaucggcucuauucgcaaugggaccuacgaccacaacgucuaccgggacgaggcucuuaauaacagauuucaaaucaagggcguggaacugaaauccggauauaaggauuggauccucuggauuagcuucgccaucuccugcuuucugcuuuguguugcccugcucggcuucauuaugugggcuugccagaaagggaauauccgcuguaacauuugcaucuga

SEQ ID NO: 205128 - RNA, 1701 nt, Artificial Sequence
  derived and/or modified CDS sequence (opt5) from hemagglutinin__InfluenzaA__ALA08580
augaagaccaucauugcccugagcuacauccucugccugguguucgcucagaaaauucccggcaacgacaauuccacagccacgcuuugucuggggcaccaugcggucccuaacggaaccaucguuaagacaauuaccaaugauagaaucgaggugacaaacgcuaccgaacucgugcaaaauucuagcaucggcgagauuugcgacuccccgcaccagauccuggauggggaaaacuguacacuuauugacgcccugcucggagauccccagugcgacggcuuucagaauaaaaagugggaucuguucgucgagcggucuaaagccuauagcaacuguuacccuuaugacgugcccgauuacgcuucccugcgcucucucguugccagcuccgggacccuggaauuuaauaacgagagcuucaauuggacgggagugacccaaaacggcacaucuuccgcuugcaucagacggucuagcuccagcuuuuucucucgccuuaauuggcugacccaucucaacuauacauacccugcccugaaugucaccaugcccaacaacgagcaguuugacaaacuuuauauuuggggcgugcaccauccugggacggauaaggaccagaucuuccuguacgcgagauccagcggacggauuacaguuuccaccaagggcucucagcaagccgugaucccgaauaucgggagccgcccccggauuagagauaucccuucccgcauuagcaucuacuggacaauugucaagcccggagacauccuccugaucaacucuaccggcaaucugauugcuccuagaggguauuuuaaaauccgguccggaaagagcucuauuaugcgcagcgacgcccccaucggcaaauguaaguccgaaugcauuaccccgaacggcucuaucccuaaugauaagcccuuccagaacgugaauagaaucacauacggggcuuguccucgguaugugaaacacagcacgcucaagcuggccaccggaaugcgcaacguccccgagaaacagacaagaggcauuuuuggggcgaucgccggauucauugaaaauggcugggaggggaugguugacggaugguacggcuuucggcaccagaacuccgagggcagagggcaagcugccgaucuuaagagcacccaggcugccaucgaccagauuaauggaaaacugaaccgccucaucggcaagacaaaugaaaaauuccaucaaauugagaaggaguucucugaaguggaagggcggauccaggaucuggagaaguauguggaggacaccaaaaucgaucuuugguccuacaacgccgaacugcucgucgcucuggagaaucagcacacgauugaccugacagauagcgaaaugaacaagcucuuugagaaaaccaagaaacagcugagagaaaacgcggaggacaugggaaauggcugcuucaagaucuaucauaagugugauaacgccugcauugggucuauccgcaauggcaccuacgaccacaacguguaccgggacgaggcucuuaauaacagauuucaaauuaaaggaguugaacugaaguccggcuauaaagauuggauccucuggaucagcuucgccauuuccugcuuucugcuuuguguggcccugcucggguucaucaugugggcuugccagaagggaaauauucgcuguaacaucugcauuuga

SEQ ID NO: 205129 - RNA, 1701 nt, Artificial Sequence
  derived and/or modified CDS sequence (opt5) from hemagglutinin__InfluenzaA__ALA08582
augaagaccaucauugcccugagcuacauccucugccugguguucgcucagaaacuucccgagaacgacaauuccacagccacgcugugucucggccaccaugcggucccuaacgggaccauuguuaagacaaucaccaaugauagaauugaagugacaaacgcuaccgagcuggugcaaaauucuagcaucggagaaaucugcgacuccccgcaccagauucuugauggcaaaaacuguacacugaucgacgcccuccugggggauccccagugcgacggauuucagaauaagaaaugggaucuguucgucgagcggucuaaggccuauagcaacuguuacccuuaugacgugcccgauuacgcuucccuccgcucucugguugccagcuccggcacccuugaauuuaaugacgagagcuucaacugggcuggggugacgcaaaauggaaccucuuccgccugcauuagaggcagcaacucuuccuuuuucagccggcugaauuggcucacacauucuaacuuuaaguauccugcgcugaaugucaccaugcccaacaacgagcaguucgauaaacuuuacaucuggggcgugcaccauccugggacagacaaggaucagauuuuucuguaugcccaguccagcggacgcaucaccguuuccacgaaaagaucucaacaggcugugauuccgaauaucggcagccggccccgcaucagaaacauuccuucccggaucagcauuuacuggacaaucgucaagcccggggacauucuccugaucaauucuaccggaaaccugaucgccccucgcggcuacuucaaaauuagauccgggaaguccucuaucaugcggagcgacgcucccauuggaaaguguaaauccgaaugcaucacaccgaauggcucuauuccuaacgauaagcccuuucagaaugugaaccgcaucaccuauggcgccuguccuagauacgugaaacagagcacccucaagcuggcgacagggaugcggaauguccccgagaaacaaacgcgcggaaucuucggcgccauugcuggguuuaucgaaaacggaugggagggcaugaaggacgggugguauggauucagacaccagaauagcgagggccggggccaggccgcugaucuuaaaagcacccaagccgccauugaccagaucaacgggaagcugaauagacucauuggaaagacaaacgaaaaauuccaccagaucgagaaggaauuuucugagguugaaggccgcauucaggaucuggagaaauacguggaggacaccaagaucgaucuuugguccuauaaugcugaacugcucguggcgcuggagaaccaacauacaaucgaccugaccgauagcgaaaugaacaaacucuucgagaagacgaagaaacagcugcgggaaaaugccgaggacauggggaacggaugcuuuaagauuuaccacaaaugugauaaugcuugcaucggcucuauuagaaacgggacauaugaccaugacgucuaccgcgaugaggcccuuaauaaccgguuccagaucaagggcguggaacugaaauccggauacaaggacuggauucucuggaucagcuuugccaucuccugcuuccugcuuuguguugcucugcucggcuuuauuaugugggccugccagaaggggaauaucagauguaacauuugcaucuga

SEQ ID NO: 205130 - RNA, 1701 nt, Artificial Sequence; identical to SEQ ID NO: 205129
  derived and/or modified CDS sequence (opt5) from hemagglutinin__InfluenzaA__ALA08583

SEQ ID NO: 205131 - RNA, 1701 nt, Artificial Sequence; identical to SEQ ID NO: 205129
  derived and/or modified CDS sequence (opt5) from hemagglutinin__InfluenzaA__ALA08584

SEQ ID NO: 205132 - RNA, 1701 nt, Artificial Sequence; identical to SEQ ID NO: 205129
  derived and/or modified CDS sequence (opt5) from hemagglutinin__InfluenzaA__ALA08585

SEQ ID NO: 205133 - RNA, 1701 nt, Artificial Sequence; identical to SEQ ID NO: 204513
  derived and/or modified CDS sequence (opt5) from hemagglutinin__InfluenzaA__ALA08586

SEQ ID NO: 205134 - RNA, 1701 nt, Artificial Sequence; identical to SEQ ID NO: 205129
  derived and/or modified CDS sequence (opt5) from hemagglutinin__InfluenzaA__ALA08587

SEQ ID NO: 205135 - RNA, 1701 nt, Artificial Sequence; identical to SEQ ID NO: 204513
  derived and/or modified CDS sequence (opt5) from hemagglutinin__InfluenzaA__ALA08588

SEQ ID NO: 205136 - RNA, 1701 nt, Artificial Sequence; identical to SEQ ID NO: 204513
  derived and/or modified CDS sequence (opt5) from hemagglutinin__InfluenzaA__ALA08589

SEQ ID NO: 205137 - RNA, 1701 nt, Artificial Sequence; identical to SEQ ID NO: 205129
  derived and/or modified CDS sequence (opt5) from hemagglutinin__InfluenzaA__ALA08590

SEQ ID NO: 205138 - RNA, 1701 nt, Artificial Sequence; identical to SEQ ID NO: 204513
  derived and/or modified CDS sequence (opt5) from hemagglutinin__InfluenzaA__ALA08591

SEQ ID NO: 205139 - RNA, 1701 nt, Artificial Sequence; identical to SEQ ID NO: 205070
  derived and/or modified CDS sequence (opt5) from hemagglutinin__InfluenzaA__ALA08592

SEQ ID NO: 205140 - RNA, 1701 nt, Artificial Sequence
  derived and/or modified CDS sequence (opt5) from hemagglutinin__InfluenzaA__ALA08594
augaagaccaucauugcccugagcuacauccucugccugguguucgcucagaaacuucccgagaacgacaauuccacagccacgcugugucucggccaccaugcggucccuaacgggaccauuguuaagacaaucaccucugauagaauugaagugacaaaugcuaccgagcuggugcaaaacagcuccaucggagaaaucugcgacucuccgcaccagauucuugauggcaaaaauuguacacugaucgacgcccuccugggggauccccagugcgacggauuucagaacaagaaaugggaucuguucgucgagcggagcaaggccuauuccaauuguuacccuuaugacgugcccgauuacgcuucucuccgcagccugguugccuccagcggcacccuugaauuuaacgacgagucuuucaauugggcuggggugacgcaaaacggaaccuccagcgccugcauuagaggcucuaauuccagcuuuuucucucggcugaacuggcucacacauuccaauuuuaaguauccugcgcugaacgucaccaugcccaauaacgagcaguucgauaaacuuuacaucuggggcgugcaccauccugggacagacaaggaucagauuuuucuguaugcccagagcuccggacgcaucaccguuucuacgaaaagaagccaacaggcugugauuccgaacaucggcucccggccccgcaucagaaauauuccuagccggaucucuauuuacuggacaaucgucaagcccggggacauucuccugaucaacuccaccggaaaucugaucgccccucgcggcuacuucaaaauuagaagcgggaagucuagcaucaugcgguccgacgcucccauuggaaaguguaaaucugaaugcaucacaccgaacggcagcauuccuaaugauaagcccuuucagaacgugaaucgcaucaccuauggcgccuguccuagauacgugaaacaguccacccucaagcuggcgacagggaugcggaacguccccgagaaacaaacgcgcggaaucuucggcgccauugcuggguuuaucgaaaauggaugggagggcaugaaggacgggugguauggauucagacaccagaacagcgagggccggggccaggccgcugaucuuaaaucuacccaagccgccauugaccagaucaaugggaagcugaacagacucauuggaaagacaaaugaaaaauuccaccagaucgagaaggaauuuuccgagguugaaggccgcauucaggaucuggagaaauacguggaggacaccaagaucgaucuuuggagcuauaacgcugaacugcucguggcgcuggagaaucaacauacaaucgaccugaccgauucugaaaugaacaaacucuucgagaagacgaagaaacagcugcgggaaaacgccgaggacauggggaauggaugcuuuaagauuuaccacaaaugugauaacgcuugcaucggcuccauuagaaaugggacauaugaccaugacgucuaccgcgaugaggcccuuaacaaucgguuccagaucaagggcguggaacugaaaagcggauacaaggacuggauucucuggaucuccuuugccaugucuugcuuccugcuuuguguugcucugcucggcuuuaucaugugggccugccagaaggggaacauuagauguaauaucugcauuuga

SEQ ID NO: 205141 - RNA, 1701 nt, Artificial Sequence; identical to SEQ ID NO: 204513
  derived and/or modified CDS sequence (opt5) from hemagglutinin__InfluenzaA__ALA08595

SEQ ID NO: 205142 - RNA, 1701 nt, Artificial Sequence; identical to SEQ ID NO: 204513
  derived and/or modified CDS sequence (opt5) from hemagglutinin__InfluenzaA__ALA08596

SEQ ID NO: 205143 - RNA, 1701 nt, Artificial Sequence
  derived and/or modified CDS sequence (opt5) from hemagglutinin__InfluenzaA__ALA08597
augaagaccaucauugcccugagcuacauccucugccugguguucgcucagaaaauucccggcaacgacaauuccacagccacgcuuugucuggggcaccaugcggucccuaacggaaccaucguuaagacaauuaccaaugauagaaucgaggugacaaacgcuaccgaacucgugcaaaauucuagcaucggcgagauuugcgacuccccgcaccagauccuggauggggaaaacuguacacuuauugacgcccugcucggagauccccagugcgacggcuuucagaauaaaaagugggaucuguucgucgagcggucuaaagccuauagcaacuguuacccuuaugacgugcccgauuacgcuucccugcgcucucucguugccagcuccgggacccuggaauuuaauaacgagagcuucaauuggacgggagugacccaaaacggcacaucuuccgcuugcaucagacggagcagcuccagcuuuuucucucgccuuaauuggcugacccaucucaacuauacauacccugcccugaaugucaccaugcccaacaacgagcaguuugacaaacuuuauauuuggggcgugcaccauccugggacggauaaggaccagaucuuccuguacgcgcaguccagcggaagaauuacaguuuccaccaagcggucucaacaggccgugaucccgaauaucggcagccgcccccggauuagagauaucccuucccgcauuagcaucuacuggacaauugucaagcccggggacauccuccugaucaacucuaccggaaaucugauugcuccuagaggcuauuuuaaaauccgguccgggaagucuucuauuaugcgcagcgacgcccccaucggaaaauguaaguccgaaugcauuaccccgaacggcucuaucccuaaugauaagcccuuccagaacgugaauagaaucacauacggcgcuuguccucgguaugugaaacacagcacgcucaagcuggccaccgggaugcgcaacguccccgagaaacagacaagaggaauuuuuggcgcgaucgccggguucauugaaaauggaugggagggcaugguugacgggugguacggauuucggcaccaaaacuccgagggcagaggccaggcugccgaucuuaagagcacccaggcugccaucgaccaaauuaaugggaaacugaaccgccucaucggaaagacaaaugaaaaauuccaucagauugagaaggaguucucugaaguggaaggccggauccaggaucuggagaaguauguggaggacaccaaaaucgaucuuugguccuacaacgccgaacugcucgucgcucuggagaaucagcacacgauugaccugacagauagcgaaaugaacaagcucuuugagaaaaccaagaaacaacugagagaaaacgcggaggacauggggaauggaugcuucaagaucuaucauaagugugauaacgccugcauuggcucuauccgcaaugggaccuacgaccacaacguguaccgggacgaggcucuuaauaacagauuucagauuaaaggcguugaacugaaguccggauauaaagauuggauccucuggaucagcuucgccauuuccugcuuucugcuuuguguggcccugcucggcuucaucaugugggcuugccagaaugggaacauucgcuguaauaucugcauuuga

SEQ ID NO: 205144 - RNA, 1701 nt, Artificial Sequence
  derived and/or modified CDS sequence (opt5) from hemagglutinin__InfluenzaA__ALA08598
augaagaccaucauugccagcuccuacauccugugccucguguucgcucagaaaauucccggcaacgacaauucuacagccacgcugugucuugggcaccaugcggucccuaacggaaccaucguuaagacaauuaccaaugauagaaucgaggugacaaacgcuaccgaacuggugcaaaauagcuccaucggcgagauuugcgacucuccgcaccagauccucgauggggaaaacuguacacugauugacgcccuucugggagauccccagugcgacggcuuucagaauaaaaagugggaucucuucgucgagcggagcaaagccuauuccaacuguuacccuuaugacgugcccgauuacgcuucucugcgcagccugguugccuccagcgggacccucgaauuuaauaacgagucuuucaauuggacgggagugacccaaaacggcacauccagcgcuugcaucagacggucuuccagcucuuucuucucccgccugaauuggcuuacccaucugaacuauacauacccugcccucaaugucaccaugcccaacaacgagcaguuugacaagcuguauauuuggggcgugcaccauccugggacggauaaggaccagaucuuccuuuacgcgcagagcuccggaagaauuacaguuucuaccaaacggagccaacaggccgugaucccgaauaucggcucccgcccccggauuagagauaucccuagccgcauuucuaucuacuggacaauugucaagcccggggacauccugcucaucaacuccaccggaaaucugauugcuccuagaggcuauuuuaaaauccggagcgggaagucuagcauuaugcgcuccgacgcccccaucggaaaauguaagucugaaugcauuaccccgaacggcagcaucccuaaugauaagcccuuccagaacgugaauagaaucacauacggcgcuuguccucgguaugugaaacacuccacgcugaagcucgccaccgggaugcgcaacguccccgagaaacagacaagaggaauuuuuggcgcgaucgccggguucauugaaaauggaugggagggcaugguugacgggugguacggauuucggcaccaaaacagcgagggcagaggccaggcugccgaucugaagucuacccaggcugccaucgaccaaauuaaugggaaacuuaaccgccugaucggaaagacaaaugaaaaauuccaucagauugagaaggaauuuuccgagguggaaggccggauccaggaucucgagaaguauguggaggacaccaaaaucgaucuguggagcuacaacgccgaacuucuggucgcucucgagaaucagcacacgauugaccugacagauucugaaaugaacaagcuguuugagaaaaccaagaaacaacucagagaaaacgcggaggacauggggaauggaugcuucaagaucuaucauaagugugauaacgccugcauuggcuccauccgcaaugggaccuacgaccacaacguguaccgggacgaggcucugaauaacagauuucagauuaaaggcguugaacuuaagagcggauauaaagauuggauccuguggaucuccuucgccauuucuugcuuucuccuguguguggcccuucugggcuucaucaugugggcuugccagaaggggaauauucgcuguaacaucugcauuuga

SEQ ID NO: 205145 - RNA, 1701 nt, Artificial Sequence; identical to SEQ ID NO: 204513
  derived and/or modified CDS sequence (opt5) from hemagglutinin__InfluenzaA__ALA08599

SEQ ID NO: 205146 - RNA, 1701 nt, Artificial Sequence
  derived and/or modified CDS sequence (opt5) from hemagglutinin__InfluenzaA__ALA08600
augaagaccaucauugcccugagcuacauccucugccugguguucgcucagaaaauucccggcaacgacaauuccacagccacgcuuugucuggggcaccaugcggucccuaacggaaccaucguuaagacaauuaccaaugauagaaucgaggugacaaacgcuaccgaacucgugcaaaauucuagcaucggcgagauuugcgacuccccgcaccagauccuggauggggaaaacuguacacuuauugacgcccugcucggagauccccagugcgacggcuuucagaauaaaaagugggaucuguucgucgagcggucuaaagccuauagcaacuguuacccuuaugacgugcccgauuacgcuucccugcgcucucucguugccagcuccgggacccuggaauuuaauaacgagagcuucaauuggacgggagugacccaaaacggcacaucuuccgcuugcaucagacggucuagcuccagcuuuuucucucgccuuaauuggcugacccaucucaacuauagauacccugcccugaaugucacaaugcccaacaacgagcaguuugacaagcuguauauuuggggcgugcaccauccugggaccgauaaggaccagaucucccuguacgcgcagagcuccggacggauuacgguuucuacaaaacgcagccaacaggccgugaucccgaauaucggcuccagaccccggauucgcgauaucccuagcagaauuucuaucuacuggaccauugucaagcccggggacauccuccugaucaacuccacaggaaaucugauugcuccucggggcuauuucaaaauccgcagcgggaagucuagcauuaugagauccgacgcccccaucggaaaauguaagucugaaugcauuaccccgaacggcagcaucccuaaugauaagcccuuucagaacgugaaucggaucaccuacggcgcuuguccucgcuaugugaaacacuccacacucaagcuggccacggggaugagaaacguccccgagaaacagacccggggaauuuucggcgcgaucgccggguuuauugaaaauggaugggagggcaugguugacgggugguacggauucagacaccaaaacagcgagggccgcggccaggcugccgaucuuaagucuacacaggcugccaucgaccaaauuaaugggaaacugaaccggcucaucggaaagaccaaugaaaaauuucaucagauugagaaggaguucuccgaaguggaaggcagaauccaggaucuggagaaguauguggaggacacaaaaaucgaucuuuggagcuacaacgccgaacugcucgucgcucuggagaaucagcacaccauugaccugacggauucugaaaugaacaaacucuucgagaagacaaagaaacaacugcgcgaaaacgcggaggacauggggaauggaugcuuuaagaucuaucauaagugugauaacgccugcauuggcuccauccggaaugggaccuacgaccacaacguguacagagacgaggcucuuaauaaccgcuuccagauuaaaggcguugaacuuaagagcggauauaaagauuggauccucuggaucuccuuugccauuucuugcuuccugcuuuguguggcccugcucggcuuuaucaugugggcuugccagaaggggaauauucgguguaacaucugcauuuga

SEQ ID NO: 205147 - RNA, 1701 nt, Artificial Sequence; identical to SEQ ID NO: 204513
  derived and/or modified CDS sequence (opt5) from hemagglutinin__InfluenzaA__ALA08601

SEQ ID NO: 205148 - RNA, 1701 nt, Artificial Sequence
  derived and/or modified CDS sequence (opt5) from hemagglutinin__InfluenzaA__ALA08602
augaagaccaucauugcccugagcuacauccucugccugguguucgcucagaaaauucccggcaacgacaauuccacagccacgcuuugucuggggcaccaugcggucccuaacggaaccaucguuaagacaauuaccaaugauagaaucgaggugacaaacgcuaccgaacucgugcaaaauucuagcaucggcgagauuugcgacuccccgcaccagauccuggauggggaaaacuguacacuuauugacgcccugcucggagauccccagugcgacgauuuucagaauaaaaagugggaccuguucgucgagcggucuaaagccuauagcaacuguuacccuuaugaugugcccgacuacgcuucccugcgcucucucguugccagcuccggcacccuggaauuuaauaacgagagcuucaauuggacgggggugacccaaaacggaacaucuuccgcuugcaucagacggucuagcuccagcuuuuucucucgccuuaauuggcugacccaucucaacuauacauacccugcccugaaugucaccaugcccaacaacgagcaguuugauaagcuguauauuuggggcgugcaccauccuggcacggacaaggaucagaucucccuguacgcgcagagcuccgggagaauuacaguuucuaccaaacggagccaacaggccgugaucccgaauaucggaucccgcccccggauuagagacaucccuagccgcauuucuaucuacuggacaauugucaagcccggcgacauccuccugaucaacuccaccgggaaucugauugcuccuagaggauauuucaaaauccggagcggcaagucuagcauuaugcgcuccgaugcccccaucgggaaauguaagucugaaugcauuaccccgaacggaagcaucccuaaugacaagcccuuucagaacgugaauagaaucacauacggcgcuuguccucgguaugugaaacacuccacgcucaagcuggccaccggcaugcgcaacguccccgagaaacagacaagagggauuuucggagcgaucgccggcuuuauugaaaaugggugggagggaaugguugauggcugguacggguuccggcaccaaaacagcgagggaagaggccaggcugccgaccuuaagucuacccaggcugccaucgaucaaauuaauggcaaacugaaccgccucaucgggaagacaaaugaaaaauuucaucagauugagaaggaguucuccgaaguggaaggacggauccaggaccuggagaaguauguggaggauaccaaaaucgaccuuuggagcuacaacgccgaacugcucgucgcucuggagaaucagcacacgauugaucugacagacucugaaaugaacaaacucuucgagaagaccaagaaacaacugagagaaaacgcggaggauaugggcaaugggugcuuuaagaucuaucauaagugugacaacgccugcauuggauccauccgcaauggcaccuacgaccacaacguguaccgggaugaggcucuuaauaacagauuccagauuaaagggguugaacuuaagagcggcuauaaagacuggauccucuggaucuccuuugccauuucuugcuuccugcuuuguguggcccugcucggauuuaucaugugggcuugccagaagggcaauauucgcuguaacaucugcauuuga

SEQ ID NO: 205149 - RNA, 1701 nt, Artificial Sequence
  derived and/or modified CDS sequence (opt5) from hemagglutinin__InfluenzaA__ALA08603
augaagaccaucauugcccugagcuacauccucugccugguguucgcucagaaaauucccggcaacgacaauuccacagccacgcuuugucuggggcaccaugcggucccuaacggaaccaucguuaagacaauuaccaaugauagaaucgaggugacaaacgcuaccgaacucgugcaaaauucuagcaucggcgagauuugcgacuccccgcaccagauccuggauggggaaaacuguacacuuauugacgcccugcucggagauccccagugcgacggcuuucagaauaaaaagugggaucuguucgucgagcggucuaaagccuauagcaacuguuacccuuaugacgugcccgauuacgcuucccugcgcucucucguugccagcuccgggacccuggaauuuaauaacgagagcuucaauuggacgggagugacccaaaacggcacaucuuccgcuugcaucagacggagcagcuccagcuuuuucucucgccuuaauuggcugacccaucucaacuauauuuacccugcccugaaugucacaaugcccaacaacgagcaguuugacaaacuuuauaucuggggcgugcaccauccugggaccgauaaggaccagauuuuccuguacgcgcaguccagcggaagaaucacgguuuccacaaagcggucucaacaggccgugaucccgaauauuggcagccgccccagaauccgggauauuccuucccgcaucagcauuuacuggaccaucgucaagcccggggacauccuccugauuaacucuacaggaaaucugaucgcuccuagaggcuauuuuaaaauucgguccgggaagucuucuaucaugcgcagcgacgcccccauuggaaaauguaaguccgaaugcaucaccccgaacggcucuaucccuaaugauaagcccuuccagaacgugaauagaauuaccuacggcgcuuguccucgguaugugaaacacagcacacucaagcuggccacggggaugcgcaacguccccgagaaacagaccagaggaaucuuuggcgcgauugccggguucaucgaaaauggaugggagggcaugguugacgggugguacggauuucggcaccaaaacuccgagggcagaggccaggcugccgaucuuaagagcacacaggcugccauugaccaaaucaaugggaaacugaaccgccucauuggaaagaccaaugaaaaauuccaucagaucgagaaggaguucucugaaguggaaggccggauccaggaucuggagaaguauguggaggacacaaaaauugaucuuugguccuacaacgccgaacugcucgucgcucuggagaaucagcacaccaucgaccugacggauagcgaaaugaacaagcucuuugagaaaacaaagaaacaacugagagaaaacgcggaggacauggggaauggaugcuucaagauuuaucauaagugugauaacgccugcaucggcucuauucgcaaugggaccuacgaccacaacguguaccgggacgaggcucuuaauaacagauuucagaucaaaggcguugaacugaaguccggauauaaagauuggauccucuggauuagcuucgccaucuccugcuuucugcuuuguguggcccugcucggcuucauuaugugggcuugccagaaggggaauauccgcuguaacauuugcaucuga

SEQ ID NO: 205150 - RNA, 1701 nt, Artificial Sequence; identical to SEQ ID NO: 204513
  derived and/or modified CDS sequence (opt5) from hemagglutinin__InfluenzaA__ALA08605

SEQ ID NO: 205151 - RNA, 1701 nt, Artificial Sequence; identical to SEQ ID NO: 204513
  derived and/or modified CDS sequence (opt5) from hemagglutinin__InfluenzaA__ALA08606

SEQ ID NO: 205152 - RNA, 1701 nt, Artificial Sequence; identical to SEQ ID NO: 205128
  derived and/or modified CDS sequence (opt5) from hemagglutinin__InfluenzaA__ALA08607

SEQ ID NO: 205153 - RNA, 1701 nt, Artificial Sequence
  derived and/or modified CDS sequence (opt5) from hemagglutinin__InfluenzaA__ALA08609
augaagaccaucauugcccugggcuacauccucugccugguguucgcucagaaaauucccgggaacgacaauagcacagccacgcuuugucugggacaccaugcggucccuaacggcaccaucguuaagacaauuaccaaugauagaaucgaggugacaaacgcuaccgaacucgugcaaaauuccucuaucggggagauuugcgacagcccgcacaaaauccuggauggagaaaacuguacacuuauugacgcccugcucggcgauccccagugcgacggguuucagaauaagaaaugggaucuguucgucgagcgguccaaggccuauucuaacuguuacccuuaugacgugcccgauuacgcuagccugcgcucccucguugccucuagcggaacccuggaauuuaauaacgaguccuucaauuggacgggcgugacccagaacggcacaagcucugcuugcaucagacgguccucuagcuccuuuuucagccgccuuaauuggcugacccaucucaacuauacauacccugcccugaaugucaccaugcccaacaacgagcaauuugacaaacuuuauauuuggggagugcaccauccugggacggauaaggaccagaucuuccuguacgcgcagucuuccggcagaauuacaguuagcaccaagcggucccagcaagccgugaucccgaauaucgggucucgcccccggauuagagauaucccuagccgcauuuccaucuacuggacaauugucaaacccggagacauccuccugaucaacagcaccggcaaucugauugcuccuagaggguauuuuaagauccggucuggaaaauccagcauuaugcgcucugacgcccccaucggcaaguguaagagcgaaugcauuaccccgaacggcuccaucccuaaugauaaacccuuccagaacgugaauagaaucacauacggggcuuguccucgguaugugaagcacucuacgcucaaacuggccaccggaaugcgcaacguccccgagaagcagacaagaggcauuuuuggggcgaucgccggauucauugaaaauggcugggaggggaugguugacggaugguacggcuuucggcaccagaacagcgagggcagagggcaagcugccgaucuuaaauccacccaggcugccaucgaccagauuaauggaaagcugaaccgccucaucggcaaaacaaaugaaaaguuccaucaaauugagaaggaguucagcgaaguggaagggcggauccaggaucuggacaaauauguggaggauaccaagaucgaccuuuggucuuacaacgccgagcugcucgucgcucuggaaaaucagcacacgauugaucugacagacuccgagaugaacaaacucuuugaaaagaccaaaaagcagcugagagagaacgcggaagauaugggaaauggcugcuucaagaucuaucauaaaugugacaacgccugcauugggagcauccgcaauggcaccuacgaccacaacguguaccgggaugaggcucuuaauaacagauuucaaauuaagggaguugagcugaaaucuggcuauaaggacuggauccucuggaucuccuucgccauuagcugcuuucugcuuuguguggcccugcucggguucaucaugugggcuugccagaaaggaaauauucgcuguaacaucugcauuuga

SEQ ID NO: 205154 - RNA, 1701 nt, Artificial Sequence; identical to SEQ ID NO: 205070
  derived and/or modified CDS sequence (opt5) from hemagglutinin__InfluenzaA__ALA08610

SEQ ID NO: 205155 - RNA, 1701 nt, Artificial Sequence
  derived and/or modified CDS sequence (opt5) from hemagglutinin__InfluenzaA__ALA08611
augaagaucauuaucgcccugagcuacauucucugccugguguucgcucagaaaauccccggcaacgacaauuccaccgccacacuuugucuggggcaccaugcggucccuaacggaacgauuguuaagaccaucacaaaugauagaaucgaggugaccaacgcuacagaacucgugcaaaauucuagcauuggcgagaucugcgacuccccgcaccggauucuggauggggaaaacuguacccuuaucgacgcccugcucggagauccccagugcgacggcuuucagaauaaaaagugggaucuguucgucgagcgcucuaaagccuauagcaacuguuacccuuaugacgugcccgauuacgcuucccugagaucucucguugccagcuccgggacacuggaauuuaauaacgagagcuucaauuggaccggagugacgcagaacggcaccucuuccgcuugcauucggcgcagcagcuccagcuuuuucucuagacuuaauuggcugacacaucucaacuauaccuacccugcccugaaugucacaaugcccaacaacgagcaauuugacaaacuuuauaucuggggcgugcaccauccugggaccgauaaggaccagauuuuccuguacgcgcaguccagcggacggaucacgguuuccacaaagcgcucucagcaagccgugaucccgaauauuggcagcagaccccggauccgcgauauuccuuccagaaucagcauuuacuggaccaucgucaagcccggggacauccuccugauuaacucuacaggaaaucugaucgcuccucggggcuauuuuaaaauucgcuccgggaagucuucuaucaugagaagcgacgcccccauuggaaaauguaaguccgaaugcaucaccccgaacggcucuaucccuaaugauaagcccuuccagaacgugaaucggauuaccuacggcgcuuguccucgcuaugugaaacacagcacacucaagcuggccacggggaugagaaacguccccgagaaacagacccggggaaucuuuggcgcgauugccggguucaucgaaaauggaugggagggcaugguugacgggugguacggauuuagacaccagaacuccgagggccgcggccaagcugccgaucuuaagagcacacaggcugccauugaccagaucaaugggaaacugaaccggcucauuggaaagaccaaugaaaaauuccaucaaaucgagaaggaguucucugaaguggaaggcagaauccaggaucuggagaaguauguggaggacacaaaaauugaucuuugguccuacaacgccgaacugcucgucgcucuggagaaucagcacaccaucgaccugacggauagcgaaaugaacaagcucuuugagaaaacaaagaaacagcugcgcgaaaacgcggaggacauggggaauggaugcuucaagauuuaucauaagugugauaacgccugcaucggcucuauucggaaugggaccuacgaccacaacguguacagagacgaggcucuuaauaaccgcuuucaaaucaaaggcguugaacugaaguccggauauaaagauuggauccucuggauuagcuucgccaucuccugcuuucugcuuuguguggcccugcucggcuucauuaugugggcuugccagaaggggaauauccgguguaacauuugcaucuga

SEQ ID NO: 205156 - RNA, 1701 nt, Artificial Sequence; identical to SEQ ID NO: 205128
  derived and/or modified CDS sequence (opt5) from hemagglutinin__InfluenzaA__ALA08612

SEQ ID NO: 205157 - RNA, 1701 nt, Artificial Sequence; identical to SEQ ID NO: 204513
  derived and/or modified CDS sequence (opt5) from hemagglutinin__InfluenzaA__ALA08614

SEQ ID NO: 205158 - RNA, 1701 nt, Artificial Sequence; identical to SEQ ID NO: 204513
  derived and/or modified CDS sequence (opt5) from hemagglutinin__InfluenzaA__ALA08615

SEQ ID NO: 205159 - RNA, 1701 nt, Artificial Sequence; identical to SEQ ID NO: 204513
  derived and/or modified CDS sequence (opt5) from hemagglutinin__InfluenzaA__ALA08616

SEQ ID NO: 205160 - RNA, 1701 nt, Artificial Sequence; identical to SEQ ID NO: 205053
  derived and/or modified CDS sequence (opt5) from hemagglutinin__InfluenzaA__ALA08617

SEQ ID NO: 205161 - RNA, 1701 nt, Artificial Sequence
  derived and/or modified CDS sequence (opt5) from hemagglutinin__InfluenzaA__ALA08619
augaagaccgugaucgcccugagcuacauucucugccuggucuucgcucagaaaauccccggcaacgacaauuccacagccacgcuuugucuggggcaccaugcgguuccuaacggaaccauugugaagacaaucaccaaugauagaauugaggugacaaacgcuaccgaacucguccaaaauucuagcaucggcgagaucugcgacuccccgcaccagauucuggauggggaaaacuguacacuuaucgacgcccugcucggagauccccagugcgacggcuuucagaauaaaaagugggaucuguucguggagcggucuaaagccuauagcaacuguuacccuuaugacguucccgauuacgcuucccugcgcucucucauugccagcuccgggacccuggaauuuaauaacgagagcuucaauuggacgggagugacccaaaacggcacaucuuccgcuugcaucagaaagucuagcuccagcuuuuucucucggcuuaauuggcugacccaucucaacuauacauacccugcccugaaugucaccaugcccaacaacgagcaguuugacaaacuuuauauuuggggcgugcaccauccugggacggauaaggaccagaucuuccuguacgcgcgcuccagcggaagaauuacaguuuccaccaagcggucucagcaagccgugaucccgaauaucggcagccgcccccggauuagagauaucccuucccgcauuagcaucuacuggacaauugucaaacccggggacauccuccugaucaacucuaccggaaaucugauugcuccuagaggcuauuuuaagauccgguccgggaaaagcucuauuaugcgcagcgacgcccccaucggaaaguguaaguccgaaugcauuaccccgaacggcucuaucccuaaugagaaacccuuccagaacgugaauagaaucacauacggcgcuuguccucgguaugugaagcacagcacgcucaaacuggccaccgggaugcgcaacguccccgaaaagcagacaagaggaauuuuuggcgcgaucgccggguucauugagaauggaugggagggcaugguugaugggugguacggauuucggcaccagaacuccgaaggcagaggccaagcugccgaccuuaaaagcacccaggcugccaucgaucagauuaaugggaagcugaaccgccucaucggaaaaacaaaugagaaguuccaucaaauugaaaaggaguucucugaaguggagggccggauccaggaccuggagaaauauguggaagauaccaagaucgaccuuugguccuacaacgccgagcugcucgucgcucuggaaaaucagcacacgauugaucugacagacagcgagaugaacaaacucuuugaaaagaccaaaaagcagcugagagagaacgcggaggauauggggaauggaugcuucaagaucuaucauaaaugugacaacgccugcauuggcucuauccgcaaugggauuuacgaucacaacguguaccgggacgaagcucuuaauaacagauuucaaaucaagggcguugagcugaaauccggauauaaggacuggauccucuggauuagcuucgccaucuccugcuuucugcuuuguguggcccugcucggcuucauuaugugggcuugccagaaagggaauauccgcuguaacauuugcaucuga

SEQ ID NO: 205162 - RNA, 1701 nt, Artificial Sequence; identical to SEQ ID NO: 205128
  derived and/or modified CDS sequence (opt5) from hemagglutinin__InfluenzaA__ALA08620

SEQ ID NO: 205163 - RNA, 1701 nt, Artificial Sequence; identical to SEQ ID NO: 205119
  derived and/or modified CDS sequence (opt5) from hemagglutinin__InfluenzaA__ALA08621

SEQ ID NO: 205164 - RNA, 1701 nt, Artificial Sequence
  derived and/or modified CDS sequence (opt5) from hemagglutinin__InfluenzaA__ALA08622
augaagaccaucauugcccugagcuacauccucugccugguguucgcucagaaaauucccggcaacgacaauuccacagccacgcuuugucuggggcaccaugcggucccuaacggaaccaucguuaagacaauuaccaaugauagaaucgaggugacaaacgcuaccgaacucgugcaaaauucuagcaucggcgagauuugcgacuccccgcaccagauccuggauggggaaaacuguacacuuauugacgcccugcucggagauccccagugcgacggcuuucagaauaaaaagugggaucuguucgucgagcggucuaaagccuauagcaacuguuacccuuaugacgugcccgauuacgcuucccugcgcucucucguugccagcuccgggacccuggaauuuaauaacgagagcuucaauuggacgggagugacccaaaacggcacaucuuccgcuugcaucagacggucuagcuccagcuuuuucucucgccuuaauuggcugacccaucucaacuauaaguacccugcccugaaugucacaaugcccaacaacgagcaguuugacaaacuuuauauuuggggcgugcaccauccugggaccgauaaagaccagaucuuccuguacgcgcaguccagcggaagaauuacgguuuccacaaagcggucucaacaggccgugaucccgaauaucggcagccgcccccggauuagagauaucccuucccgcauuagcaucuacuggaccauugucaaacccggggacauccuccugaucaacucuacaggaaaucugauugcuccuagaggcuauuuuaagauccgguccgggaaaagcucuauuaugcgcagcgacgcccccaucggaaaguguaaguccgaaugcauuaccccgaacggcucuaucccuaaugauaaacccuuccagaacgugaauagaaucaccuacggcgcuuguccucgguaugugaagcacagcacacucaaacuggccacggggaugcgcaacguccccgagaagcagaccagaggaauuuuuggcgcgaucgccggguucauugaaaauggaugggagggcaugguugacgggugguacggauuucggcaccaaaacuccgagggcagaggccaggcugccgaucuuaaaagcacacaggcugccaucgaccaaauuaaugggaagcugaaccgccucaucggaaaaaccaaugaaaaguuccaucagauugagaaggaguucucugaaguggaaggccggauccaggaucuggagaaauauguggaggacacaaagaucgaucuuugguccuacaacgccgaacugcucgucgcucuggagaaucagcacaccauugaccugacggauagcgaaaugaacaaacucuuugagaagacaaagaagcaacugagagaaaacgcggaggacauggggaauggaugcuucaagaucuaucauaaaugugauaacgccugcauuggcucuauccgcaaugggaccuacgaccacaacguguaccgggacgaggcucuuaauaacagauuucagauuaagggcguugaacugaaauccggauauaaggauuggauccucuggaucagcuucgccauuuccugcuuucugcuuuguguggcccugcucggcuucaucaugugggcuugccagaaagggaauauucgcuguaacaucugcauuuga

SEQ ID NO: 205165 - RNA, 1701 nt, Artificial Sequence; identical to SEQ ID NO: 204513
  derived and/or modified CDS sequence (opt5) from hemagglutinin__InfluenzaA__ALA08623

SEQ ID NO: 205166 - RNA, 1701 nt, Artificial Sequence; identical to SEQ ID NO: 205119
  derived and/or modified CDS sequence (opt5) from hemagglutinin__InfluenzaA__ALA08624

SEQ ID NO: 205167 - RNA, 1701 nt, Artificial Sequence; identical to SEQ ID NO: 204513
  derived and/or modified CDS sequence (opt5) from hemagglutinin__InfluenzaA__ALA08625

SEQ ID NO: 205168 - RNA, 1701 nt, Artificial Sequence; identical to SEQ ID NO: 204513
  derived and/or modified CDS sequence (opt5) from hemagglutinin__InfluenzaA__ALA08626

SEQ ID NO: 205169 - RNA, 1701 nt, Artificial Sequence; identical to SEQ ID NO: 204513
  derived and/or modified CDS sequence (opt5) from hemagglutinin__InfluenzaA__ALA08627

SEQ ID NO: 205170 - RNA, 1701 nt, Artificial Sequence; identical to SEQ ID NO: 205057
  derived and/or modified CDS sequence (opt5) from hemagglutinin__InfluenzaA__ALA08629

SEQ ID NO: 205171 - RNA, 1701 nt, Artificial Sequence
  derived and/or modified CDS sequence (opt5) from hemagglutinin__InfluenzaA__ALA08630
augaagaccaucauugcccugagcuacauccucugccugguguucgcucagaaaauucccggcaacgacaauuccacagccacgcuuugucuggggcaccaugcggucccuaacggaaccaucguuaagacaauuaccaaugauagaaucgaggugacaaacgcuaccgaacucgugcaaaauucuagcaucggcgagauuugcgacuccccgcaccagauccuggauggggaaaacuguacacuuauugacgcccugcucggagauccccagugcgacggcuuucagaauaaaaagugggaucuguucgucgagcggucuaaagccuauagcaacuguuacccuuaugacgugcccgauuacgcuucccugcgcucucucguugccagcuccgggacccuggaauuuaauaacgagagcuucaauuggacgggagugacccaaaacggcacaucuuccgcuugcaucagaaagucuagcuccagcuuuuucucucggcuuaauuggcugacccaucucaacuauacauacccugcccugaaugucaccaugcccaacaacgagcaguuugacaaacuuuauauuuggggcgugcaccauccugggacggauaaggaccagaucuuccuguacgcgcgcuccagcggaagaauuacaguuuccaccaagcggucucagcaagccgugaucccgaauaucggcagccgcccccggauuagagauaucccuucccgcauuagcaucuacuggacaauugucaaacccggggacauccuccugaucaacucuaccggaaaucugauugcuccuagaggcuauuuuaagauccgguccgggaaaagcucuauuaugcgcagcgacgcccccaucggaaaguguaaguccgaaugcauuaccccgaacggcucuaucccuaaugauaaacccuuccagaacgugaauagaaucacauacggcgcuuguccucgguaugugaagcacagcacgcucaaacuggccaccgggaugcgcaacguccccgagaagcagacaagaggaauuuuuggcgcgaucgccggguucauugaaaauggaugggagggcaugguugacgggugguacggauuucggcaccagaacuccgagggcagaggccaagcugccgaucuuaaaagcacccaggcugccaucgaccagauuaaugggaagcugaaccgccucaucggaaaaacaaaugaaaaguuccaucaaauugagaaggaguucucugaaguggaaggccggauccaggaucuggagaaauauguggaggacaccaagaucgaucuuugguccuacaacgccgaacugcucgucgcucuggagaaucagcacacgauugaccugacagauagcgaaaugaacaaacucuuugagaagaccaaaaagcagcugagagaaaacgcggaggacauggggaauggaugcuucaagaucuaucauaaaugugauaacgccugcauuggcucuauccgcaaugggaccuacgaccacaacguguaccgggacgaggcucuuaauaacagauuucaaauuaagggcguugaacugaaauccggauauaaggauuggauccucuggaucagcuucgccauuuccugcuuucugcuuuguguggcccugcucggcuucaucaugugggcuugccagaaagggaauauucgcuguaacaucugcauuuga

SEQ ID NO: 205172 - RNA, 1701 nt, Artificial Sequence
  derived and/or modified CDS sequence (opt5) from hemagglutinin__InfluenzaA__ALA08631
augaagaccaucauugcccugagcuacauccucugccugguguucgcucagaaaauucccggcaacgacaauuccacagccacgcuuugucuggggcaccaugcggucccuaacggaaccaucguuaagacaauuaccaaugauagaaucgaggugacaaacgcuaccgaacucgugcaaaauucuagcaucggcgagauuugcgacuccccgcaccagauccuggauggggaaaacuguacacuuauugacgcccugcucggagauccccagugcgacggcuuucagaauaaaaagugggaucuguucgucgagcggucuaaagccuauagcaacuguuacccuuaugacgugcccgauuacgcuucccugcgcucucucguugccagcuccgggacccuggaauuuaauaacgagagcuucaauuggacgggagugacccaaaacggcacaucuuccgcuugcaucagacggucuagcuccagcuuuuucucucgccuuaauuggcugacccaucucaacuauacauacccugcccugaaugucaccaugcccaacaaggagcaguuugacaaacuuuauauuuggggcgugcaccauccugggacggauaaggaccagaucuuccuguacgcgcaguccagcggaagaauuacaguuuccaccaagcggucucaacaggccgugaucccgaacaucggcagccgcccccggauuagagauaucccuucccgcauuagcaucuacuggacaauugucaaacccggggacauccuccugaucaauucuaccggaaaccugauugcuccuagaggcuauuuuaagauccgguccgggaaaagcucuauuaugcgcagcgacgcccccaucggaaaguguaaguccgaaugcauuaccccgaauggcucuaucccuaacgauaaacccuuccagaaugugaacagaaucacauacggcgcuuguccucgguaugugaagcacagcacgcucaaacuggccaccgggaugcgcaauguccccgagaagcagacaagaggaauuuuuggcgcgaucgccggguucauugaaaacggaugggagggcaugguugacgggugguacggauuucggcaccaaaauuccgagggcagaggccaggcugccgaucuuaaaagcacccaggcugccaucgaccaaauuaacgggaagcugaaucgccucaucggaaaaacaaacgaaaaguuccaucagauugagaaggaguucucugaaguggaaggccggauccaggaucuggagaaauauguggaggacaccaagaucgaucuuugguccuacaaugccgaacugcucgucgcucuggagaaccagcacacgauugaccugacagauagcgaaaugaauaaacucuuugagaagaccaaaaagcaacugagagaaaacgcggaggacauggggaacggaugcuucaagaucuaucauaaaugugauaaugccugcauuggcucuauccgcaacgggaccuacgaccacaauguguaccgggacgaggcucuuaacaauagauuucagauuaagggcguugaacugaaauccggauauaaggauuggauccucuggaucagcuucgccauuuccugcuuucugcuuuguguggcccugcucggcuucaucaugugggcuugccagaaagggaacauucgcuguaauaucugcauuuga

SEQ ID NO: 205173 - RNA, 1701 nt, Artificial Sequence
  derived and/or modified CDS sequence (opt5) from hemagglutinin__InfluenzaA__ALA08632
augaagaccaucauugcccugagcuacauccucugccugguguucgcucagaaaauucccggcaacgacaauuccacagccacgcuuugucuggggcaccaugcggucccuaacggaaccaucguuaagacaauuaccaaugauagaaucgaggugacaaacgcuaccgaacucgugcaaaauucuagcaucggcgagauuugcgacuccccgcaccagauccuggauggggaaaacuguacacuuauugacgcccugcucggagauccccagugcgacggcuuucagaauaaaaagugggaucuguucgucgagcggucuaaagccuauagcaacuguuacccuuaugacgugcccgauuacgcuucccugcgcucucucguugccagcuccgggacccuggaauuuaauaacgagagcuucaauuggacgggagugacccaaaacggcacaucuuccgcuugcaucagacggucuagcuccagcuuuuucucucgccuuaauuggcugacccaucucaacuauacauacccugcccugaaugucaccaugcccaacaacgagcaguuugacaaacuuuauauuuggggcgugcaccauccugggacggauaaggaccagaucuuccuguacgcgcaguccagcggaagaauuacaguuuccaccaagggcucucaacaggccgugaucccgaaugucgggagccggccccgcaucagagauauuccuucccggaucagcauuuacuggacaaucgugaagcccggagacauucuccugaucaacucuaccggcaaucugaucgcuccucgcggguauuuuaaaauuagauccggaaagagcucuaucaugcggagcgacgcccccauuggcaaauguaaguccgaaugcaucaccccgaacggcucuauuccuaaugauaagcccuuccagaacgugaaucgcaucacauacggggcuuguccuagauaugucaaacacagcacgcucaagcuggccaccggaaugcggaacguucccgagaaacagacacgcggcaucuuuggggcgauugccggauucaucgaaaauggcugggaggggaugguggacggaugguacggcuuuagacaccaaaacuccgagggccgggggcaggcugccgaucuuaagagcacccaggcugccauugaccaaaucaauggaaaacugaacagacucauuggcaagacaaaugaaaaauuccaucagaucgagaaggaguucucugaaguggaagggcgcauucaggaucuggagaaguaugucgaggacaccaaaaucgaucuuugguccuacaacgccgaacugcucguggcucuggagaaucagcacacgaucgaccugacagauagcgaaaugaacaagcucuuugagaaaaccaagaaacaacugcgggaaaacgcggaggacaugggaaauggcugcuucaagauuuaucauaagugugauaacgccugcaucgggucuauuagaaauggcaccuacgaccacaacguuuaccgcgacgaggcucuuaauaaccgguuucagaucaaaggaguggaacugaaguccggcuauaaagauuggauucucuggaucagcuucgccaucuccugcuuucugcuuugugucgcccugcucggguucauuaugugggcuugccagaagggaaauaucagauguaacauuugcaucuga

SEQ ID NO: 205174 - RNA, 1701 nt, Artificial Sequence; identical to SEQ ID NO: 205070
  derived and/or modified CDS sequence (opt5) from hemagglutinin__InfluenzaA__ALA08634

SEQ ID NO: 205175 - RNA, 1701 nt, Artificial Sequence; identical to SEQ ID NO: 204513
  derived and/or modified CDS sequence (opt5) from hemagglutinin__InfluenzaA__ALA08635

SEQ ID NO: 205176 - RNA, 1701 nt, Artificial Sequence
  derived and/or modified CDS sequence (opt5) from hemagglutinin__InfluenzaA__ALA08636
augaagaccaucauugcccugagcuacauccucugccugguguucgcucagaaaauucccggcaacgacaauuccacagccacgcuuugucuggggcaccaugcggucccuaacggaaccaucguuaagacaauuaccaaugauagaaucgaggugacaaacgcuaccgaacucgugcaaaauucuagcaucggcgagauuugcgacuccccgcaccagauccuggauggggaaaacuguacacuuauugacgcccugcucggagauccccagugcgacggcuuucagaauaaaaagugggaucuguucgucgagcggucuaaagccuauagcaacuguuacccuuaugacgugcccgauuacgcuucccugcgcucucucguugccagcuccgggacccuggaauuuaauaacgagagcuucaauuggacgggagugacccaaaacggcacaucuuccgcuugcaucagacggagcagcuccagcuuuuucucucgccuuaauuggcugacccaucucaacuauacauacccugcccugaaugucaccaugcccaacaacgagcaguuugacaaacuuuauauuuggggcauccaccauccugggacggauaaggaccagauuuuccuguacgcgcaguccagcggaagaaucacaguguccaccaagcggucucaacaggccguuaucccgaauauuggcagccgccccagaauccgggauauuccuucccgcaucagcauuuacuggacaaucgugaagcccggggacauccuccugauuaacucuaccggaaaucugaucgcuccuagaggcuauuuuaaaauucgguccgggaagucuucuaucaugcgcagcgacgcccccauuggaaaauguaaguccgaaugcaucaccccgaacggcucuaucccuaaugauaagcccuuccagaacgucaauagaauuacauacggcgcuuguccucgguaugugaaacacagcacgcucaagcuggccaccgggaugcgcaacgugcccgagaaacagacaagaggaaucuuuggcgcgauugccggguucaucgaaaauggaugggagggcauggucgacgggugguacggauuucggcaccaaaacuccgagggcagaggccaggcugccgaucuuaagagcacccaggcugccauugaccaaaucaaugggaaacugaaccgccucauuggaaagacaaaugaaaaauuccaucagaucgagaaggaguucucugaaguugaaggccggauccaggaucuggagaaguauguggaggacaccaaaauugaucuuugguccuacaacgccgaacugcucguggcucuggagaaucagcacacgaucgaccugacagauagcgaaaugaacaagcucuuugagaaaaccaagaaacaacugagagaaaacgcggaggacauggggaauggaugcuucaagauuuaucauaagugugauaacgccugcaucggcucuauucgcaaugggaccuacgaccacaacgucuaccgggacgaggcucuuaauaacagauuucagaucaaaggcguggaacugaaguccggauauaaagauuggauccucuggauuagcuucgccaucuccugcuuucugcuuuguguugcccugcucggcuucauuaugugggcuugccagaaggggaauauccgcuguaacauuugcaucuga

SEQ ID NO: 205177 - RNA, 1701 nt, Artificial Sequence; identical to SEQ ID NO: 205070
  derived and/or modified CDS sequence (opt5) from hemagglutinin__InfluenzaA__ALA08637

SEQ ID NO: 205178 - RNA, 1701 nt, Artificial Sequence
  derived and/or modified CDS sequence (opt5) from hemagglutinin__InfluenzaA__ALA08638
augaagaccaucauugcccugagcuacauccucugccugguguucgcucagaaaauucccggcaacgacaauuccacagccacgcuuugucuggggcaccaugcggucccuaacggaaccaucguuaagacaauuaccaaugauagaaucgaggugacaaacgcuaccgaacucgugcaaaauucuagcaucggcgagauuugcgacuccccgcaccagauccuggauggggaaaacuguacacuuauugacgcccugcucggagauccccagugcgacggcuuucagaauaaaaagugggaucuguucgucgagcggucuaaagccuauagcaacuguuacccuuaugacgugcccgauuacgcuucccugcgcucucucguugccagcuccgggacccuggaauuuaauaacgagagcuucaauuggacgggagugacccaaaacggcacaucuuccgcuugcaucagaggcagcaauucuuccuuuuucagccggcuuaacuggcugacccauucuaauuuuaaguauccugcccucaacgucacaaugcccaacaaugagcaguucgacaagcuguacauuuggggagugcaccauccugggaccgauaaagaccagaucuuucuuuaugcgcaguccagcggccgcauuacgguuuccacaaagagaucucaacaggccgugaucccgaacaucgggagccggccccgcauuagagauaucccuucccggauuagcaucuacuggaccauugucaaacccggagacauccugcucaucaauucuacaggcaaccugauugcuccucgcggguacuucaagaucagauccggaaaaagcucuauuaugcggagcgacgcccccaucggcaaguguaaguccgaaugcauuaccccgaauggcucuaucccuaacgauaaacccuuucagaaugugaaccgcaucaccuauggggcuuguccuagauacgugaagcacagcacacugaaacucgccacgggaaugcggaauguccccgagaagcagacccgcggcauuuucggggcgaucgccggauuuauugaaaacggcugggaggggaugguugacggaugguauggcuucagacaccaaaauuccgagggccgggggcaggcugccgaucugaaaagcacacaggcugccaucgaccaaauuaacggaaaacuuaauagacugaucggcaaaaccaacgaaaaguuccaucagauugagaaggaauuuucugagguggaagggcgcauccaggaucucgagaaauacguggaggacacaaagaucgaucugugguccuauaaugccgaacuucuggucgcucucgagaaccagcacaccauugaccugacggauagcgaaaugaacaaacuguucgagaagacaaagaagcaacuccgggaaaaugcggaggacaugggaaacggcugcuuuaagaucuaccauaaaugugauaaugccugcauugggucuaucagaaacggcaccuaugaccacaauguguaccgcgacgaggcucugaacaaucgguuccagauuaagggaguugaacuuaaauccggcuacaaggauuggauccuguggaucagcuuugccauuuccugcuuccuccuguguguggcccuucugggguuuaucaugugggcuugccagaaaggaaacauuagauguaauaucugcauuuga

SEQ ID NO: 205179 - RNA, 1701 nt, Artificial Sequence; identical to SEQ ID NO: 205070
  derived and/or modified CDS sequence (opt5) from hemagglutinin__InfluenzaA__ALA08639

SEQ ID NO: 205180 - RNA, 1701 nt, Artificial Sequence; identical to SEQ ID NO: 205070
  derived and/or modified CDS sequence (opt5) from hemagglutinin__InfluenzaA__ALA08640

SEQ ID NO: 205181 - RNA, 1701 nt, Artificial Sequence; identical to SEQ ID NO: 205070
  derived and/or modified CDS sequence (opt5) from hemagglutinin__InfluenzaA__ALA08641

SEQ ID NO: 205182 - RNA, 1701 nt, Artificial Sequence; identical to SEQ ID NO: 205070
  derived and/or modified CDS sequence (opt5) from hemagglutinin__InfluenzaA__ALA08642

SEQ ID NO: 205183 - RNA, 1701 nt, Artificial Sequence; identical to SEQ ID NO: 205070
  derived and/or modified CDS sequence (opt5) from hemagglutinin__InfluenzaA__ALA08643

SEQ ID NO: 205184 - RNA, 1701 nt, Artificial Sequence; identical to SEQ ID NO: 204513
  derived and/or modified CDS sequence (opt5) from hemagglutinin__InfluenzaA__ALA08644

SEQ ID NO: 205185 - RNA, 1701 nt, Artificial Sequence
  derived and/or modified CDS sequence (opt5) from hemagglutinin__InfluenzaA__ALA08645
augaagaccaucauugcccugagcuacauccucugccugguguucgcucagaaacuucccgagaacgacaauuccacagccacgcugugucucggccaccaugcggucccuaacgggaccauuguuaagacaaucaccucugauagaauugaagugacaaaugcuaccgagcuggugcaaaacagcuccaucggagaaaucugcgacucuccgcaccagauucuugauggcaaaaauuguacacugaucgacgcccuccugggggauccccagugcgacggauuucagaacaagaaaugggaucuguucgucgagcggagcaaggccuauuccaauuguuacccuuaugacgugcccgauuacgcuucucuccgcagccugguugccuccagcggcacccuugaauuuaacgacgagucuuucaauugggcuggggugacgcaaaacggaaccuccagcgccugcauuagaggcucuaauuccagcuuuuucucucggcugaacuggcucacacauuccaauuuuaaguauccugcgcugaacgucaccaugcccaauaacgagcaguucgauaaacuuuacaucuggggcgugcaccauccugggacagacaaggaucagauuuuucuguaugcccagagcuccggacgcaucaccguuucuacgaaaagaagccaacaggcugugauuccgaacaucggcucccggccccgcaucagaaauauuccuagccggaucucuauuuacuggacaaucgucaagcccggggacauucuccugaucaacuccaccggaaaucugaucgccccucgcggcuacuucaaaauuagaagcgggaagucuagcaucaugcgguccgacgcucccauuggaaaguguaaaucugaaugcaucacaccgaacggcagcauuccuaaugauaagcccuuucagaacgugaaucgcaucaccuauggcgccuguccuagauacgugaaacaguccacccucaagcuggcgacagggaugcggaacguccccgagaaacaaacgcgcggaaucuucggcgccauugcuggguuuaucgaaaauggaugggagggcaugaaggacgggugguauggauucagacaccagaacagcgagggccggggccaggccgcugaucuuaaaucuacccaagccgccauugaccagaucaaugggaagcugaacagacucauuggaaagacaaaugaaaaauuccaccagaucgagaaggaauuuuccgagguugaaggccgcauucaggaucuggagaaauacguggaggacaccaagaucgauaucuggagcuauaacgcugaacuucugguggcgcucgagaaucaacauacaauugaccugaccgauucugaaaugaacaaacuguucgagaagacgaagaaacagcuccgggaaaacgccgaggacauggggaauggaugcuuuaagaucuaccacaaaugugauaacgcuugcauuggcuccaucagaaaugggacauaugaccaugacgucuaccgcgaugaggcccugaacaaucgguuccagauuaagggcguggaacuuaaaagcggauacaaggacuggauccuguggaucuccuuugccauuucuugcuuccuccuguguguugcccuucugggcuuuaucaugugggcuugccagaaggggaacauuagauguaauaucugcauuuga

SEQ ID NO: 205186 - RNA, 1701 nt, Artificial Sequence; identical to SEQ ID NO: 204513
  derived and/or modified CDS sequence (opt5) from hemagglutinin__InfluenzaA__ALA08646

SEQ ID NO: 205187 - RNA, 1701 nt, Artificial Sequence; identical to SEQ ID NO: 204513
  derived and/or modified CDS sequence (opt5) from hemagglutinin__InfluenzaA__ALA08647

SEQ ID NO: 205188 - RNA, 1701 nt, Artificial Sequence; identical to SEQ ID NO: 205070
  derived and/or modified CDS sequence (opt5) from hemagglutinin__InfluenzaA__ALA08648

SEQ ID NO: 205189 - RNA, 1701 nt, Artificial Sequence
  derived and/or modified CDS sequence (opt5) from hemagglutinin__InfluenzaA__ALA08650
augaagaccaucauugcccugagcuacauccucugccugguguucgcucagaaaauucccggcaacgacaauuccacagccacgcuuugucuggggcaccaugcggucccuaacggaaccaucguuaagacaauuaccaaugagagaaucgaagugacaaacgcuaccgagcucgugcaaaauucuagcaucggcgaaauuugcgauuccccgcaccagauccuggacggggagaacuguacacuuauugaugcccugcucggagacccccagugcgauggcuuucagaauaaaaagugggaccuguucgucgaacggucuaaagccuauagcaacuguuacccuuaugaugugcccgacuacgcuucccugcgcucucucguugccagcuccgggacccuggaguuuaauaacgagagcuucaauuggacgggagugacccaaaacggcacaucuuccgcuugcaucagacggagcagcuccagcuuuuucucucgccuuaauuggcugacccaucucaacuauacauacccugcccugaaugucaccaugcccaacaacgaacaguuugauaaacuuuauauuuggggcgugcaccauccugggacggacaaggaucagaucuuccuguacgcgcaguccagcggaagaauuacaguuuccaccaaacggucucaacaggccgugaucccgaauaucggcagccgcccccggauuagagacaucccuucccgcauuagcaucuacuggacaauugucaagcccggggauauccuccugaucaacucuaccggaaaucugauugcuccuagaggcuauuuuaaaauccgguccgggaagucuucuauuaugcgcagcgacgcccccaucggaaaauguaaguccgagugcauuaccccgaacggcucuaucccuaaugacaagcccuuccagaacgugaauagaaucacauacggcgcuuguccucgguaugugaaacacagcacgcucaagcuggccaccgggaugcgcaacguccccgaaaaacagacaagaggaauuuuuggcgcgaucgccggguucauugagaauggaugggagggcaugguugaugggugguacggauuucggcaccaaaacuccgaaggcagaggccaggcugccgaccuuaagagcacccaggcugccaucgaucaaauuaaugggaaacugaaccgccucaucggaaagacaaaugagaaauuccaucagauugaaaaggaguucucugaaguggagggccggauccaggaccuggagaaguauguggaagauaccaaaaucgaccuuugguccuacaacgccgagcugcucgucgcucuggaaaaucagcacacgauugaucugacagacagcgagaugaacaagcucuuugaaaagaccaagaaacaacugagagagaacgcggaggauauggggaauggaugcuucaagaucuaucauaagugugacaacgccugcauuggcucuauccgcaaugggaccuacgaucacaacguguaccgggacgaagcucuuaauaacagauuucagauuaaaggcguugagcugaaguccggauauaaagacuggauccucuggaucagcuucgccauuuccugcuuucugcuuuguguggcccugcucggcuucaucaugugggcuugccagaaggggaauauucgcuguaacaucugcauuuga

SEQ ID NO: 205190 - RNA, 1701 nt, Artificial Sequence; identical to SEQ ID NO: 205070
  derived and/or modified CDS sequence (opt5) from hemagglutinin__InfluenzaA__ALA08652

SEQ ID NO: 205191 - RNA, 1701 nt, Artificial Sequence; identical to SEQ ID NO: 204513
  derived and/or modified CDS sequence (opt5) from hemagglutinin__InfluenzaA__ALA08653

SEQ ID NO: 205192 - RNA, 1701 nt, Artificial Sequence
  derived and/or modified CDS sequence (opt5) from hemagglutinin__InfluenzaA__ALA08654
augaagaccaucauugcccugagcuacauccucugccugguguucgcucagaaaauucccggcaacgacaauuccacagccacgcuuugucuggggcaccaugcggucccuaacggaaccaucguuaagacaauuaccaaugauagaaucgaggugacaaacgcuaccgaacucgugcaaaauucuagcaucggcgagauuugcgacuccccgcaccagauccuggauggggaaaacuguacacuuauugacgcccugcucggagauccccagugcgacggcuuucagaauaaaaagugggaucuguucgucgagcggucuaaagccuauagcaacuguuacccuuaugacgugcccgauuacgcuucccugcgcucucucguugccagcuccgggacccuggaauuuaauaacgagagcuucaauuggacgggagugacccaaaacggcacaucuuccgcuugcaucagacggagcagcuccagcuuuuucucucgccuuaauuggcugacccaucucaacuauacauacccugcccugaaugucaccaugcccaacaacgagcaguuugacaaacuuuauauuuggggcgugcaccauccugggacggauaaggaccagaucuuccuguacgcgcaguccagcggaagaauuacaguuuccaccaagcggucucaacaggccgugaucccgaauaucggcagccgcccccggauuagagauaucccuucccgcauuagcaucuacuggacaauugucaagcccggggacauccuccugaucaacucuaccggaaaucugauugcuccuagaggcuauuuuaaaauccgguccgggaagucuucuauuaugcgcagcgacgcccccaucggaaaauguaaguccgaaugcauuaccccgaacggcucuaucccuaaugauaagcccuuccagaacgugaauagaaucacauacggcgcuuguccucgguaugugaaacacagcacgcucaagcuggccaccgggaugcgcaacguccccgagaaacagacaagaggaauuuuuggcgcgaucgccggguucauugaaaauggaugggagggcaugguugacgggugguacggauuucggcaccaaaacuccgagggcagaggccaggcugccgaucuuaagagcacccaggcugccaucgaccaaauuaaugggaaacugaaccgccucaucggaaagacaaaugaaaaauuccaucagauugagaaggaguucucugaaguggaaggccggauccaggaucuggagaaguauguggaggacaccaaaaucgaucuuugguccuacaacgccgaacugcucgucgcucuggagaaucagcacacgauugaccugacagauagcgaaaugaacaagcucuuugagaaaaccaagaaacaacugagagaaaacgcggaggacauggggaauggaugcuucaagaucuaucauaagugugauaacgccugcauuggcucuauccgcaaugggaccuacgaccacaacguguaccgggacgaggcucuuaauaacagauuucagauuaaaggcguugaacugaaguccggauauaaagauuggauccucuggaucagcuucgccaaguccugcuuucugcuuuguguggcccugcucggcuucauuaugugggcuugccagaaagggaauauccgcuguaacauuugcaucuga

SEQ ID NO: 205193 - RNA, 1701 nt, Artificial Sequence; identical to SEQ ID NO: 205070
  derived and/or modified CDS sequence (opt5) from hemagglutinin__InfluenzaA__ALA08655

SEQ ID NO: 205194 - RNA, 1701 nt, Artificial Sequence; identical to SEQ ID NO: 205070
  derived and/or modified CDS sequence (opt5) from hemagglutinin__InfluenzaA__ALA08656

SEQ ID NO: 205195 - RNA, 1701 nt, Artificial Sequence
  derived and/or modified CDS sequence (opt5) from hemagglutinin__InfluenzaA__ALA08657
augaagaccaucauugcccugagcuacauccucugccugguguucgcucagaaacuucccgagaacgacaauuccacagccacgcugugucucggccaccaugcggucccuaacgggaccauuguuaagacaaucaccucugauagaauugaagugacaaaugcuaccgagcuggugcaaaacagcuccaucggagaaaucugcgacucuccgcaccagauucuugauggcaaaaauuguacacugaucgacgcccuccugggggauccccagugcgacggauuucagaacaagaaaugggaucuguucauugagcggagcaaggccuauuccaauuguuacccuuaugacguccccgauuacgcuucucuccgcagccugguggccuccagcggcacccuugaauuuaacgacgagucuuucaauugggcugggguuacgcaaaacggaaccuccagcgccugcaucagaggcucuaauuccagcuuuuucucucggcugaacuggcucacacauuccaauuuuaaguauccugcgcugaacgugaccaugcccaauaacgagcaguucgauaaacuuuacauuuggggcguccaccauccugggacagacaaggaucagaucuuucuguaugcccagagcuccggacgcauuaccgugucuacgaaaagaagccaacaggcuguuaucccgaacaucggcucccggccccgcauuagaaauaucccuagccggauuucuaucuacuggacaauugugaagcccggggacauccuccugaucaacuccaccggaaaucugauugccccucgcggcuacuucaaaaucagaagcgggaagucuagcauuaugcgguccgacgcucccaucggaaaguguaaaucugaaugcauuacaccgaacggcagcaucccuaaugauaagcccuuucagaacgucaaucgcaucaccuauggcgccuguccuagauacgugaaacaguccacccucaagcuggcgacagggaugcggaacgugcccgagaaacaaacgcgcggaauuuucggcgccaucgcuggguuuauugaaaauggaugggagggcaugaaggacgggugguauggauucagacaccagaacagcgagggccggggccaggccgcugaucuuaaaucuacccaagccgccaucgaccagauuaaugggaagcugaacagacucaucggaaagacaaaugaaaaauuccaccagauugagaaggaauuuuccgaggucgaaggccgcauccaggaucuggagaaauacguugaggacaccaagaucgaucuuuggagcuauaacgcugaacugcucguggcgcuggagaaucaacauacaauugaccugaccgauucugaaaugaacaaacucuucgagaagacgaagaaacagcugcgggaaaacgccgaggacauggggaauggaugcuuuaagaucuaccacaaaugugauaacgcuugcauuggcuccaucagaaaugggacauaugaccaugacguguaccgcgaugaggcccuuaacaaucgguuccagauuaagggcgucgaacugaaaagcggauacaaggacuggauccucuggaucuccuuugccauuucuugcuuccugcuuuguguggcucugcucggcuuuaucaugugggccugccagaaggggaacauuagauguaauaucugcauuuga

SEQ ID NO: 205196 - RNA, 1701 nt, Artificial Sequence; identical to SEQ ID NO: 205070
  derived and/or modified CDS sequence (opt5) from hemagglutinin__InfluenzaA__ALA08658

SEQ ID NO: 205197 - RNA, 1701 nt, Artificial Sequence; identical to SEQ ID NO: 205057
  derived and/or modified CDS sequence (opt5) from hemagglutinin__InfluenzaA__ALA08659

SEQ ID NO: 205198 - RNA, 1701 nt, Artificial Sequence
  derived and/or modified CDS sequence (opt5) from hemagglutinin__InfluenzaA__ALA08660
augaagaccaucauugcccugagcuacauccucugccugguguucgcucagaaaauucccggcaacgacaauuccacagccacgcuuugucuggggcaccaugcggucccuaacggaaccaucguuaagacaauuaccaaugauagaaucgaggugacaaacgcuaccgaacucgugcaaaauucuagcaucggcgagauuugcgacuccccgcaccagauccuggauggggaaaacuguacacuuauugacgcccugcucggagauccccagugcgacggcuuucagaauaaaaagugggaucuguucgucgagcggucuaaagccuauagcaacuguuacccuuaugacgugcccgauuacgcuucccugcgcucucucguugccagcuccgggacccuggaauuuaauaacgagagcuucaauuggacgggagugacccaaaacggcacaucuuccgcuugcaucagacggagcagcuccagcuuuuucucucgccuuaauuggcugacccaucucaacuauacauacccugcccugaaugucaccaugcccaacaacgagcaguuugacaaacuuuauauuuggggcgugcaccauccugggacggauaaggaccagaucuuccuguacgcgcaguccagcggaagaauuacaguuuccaccaagcggucucaacaggccgugaucccgaauaucggcagccgcccccggauuagagauaucccuucccgcauuagcaucuacuggacaauugucaagcccggggacauccuccugaucaacucuaccggaaaucugauugcuccuagaggcuauuuuaaaauccgguccgggaagucuucuauuaugcgcagcgacgcccccaucggaaaauguaaguccgaaugcauuaccccgaacggcucuaucccuaaugauaagcccuuccagaacgugaauagaaucacauacggcgcuuguccucgguaugugaaacacgggacgcucaagcuggccaccggaaugcgcaacguccccgagaaacagacaagaggcauuuuuggggcgaucgccggauucauugaaaauggcugggaggggaugguugacggaugguacggcuuucggcaccaaaacagcgagggcagagggcaggcugccgaucuuaaguccacccaggcugccaucgaccaaauuaauggaaaacugaaccgccucaucggcaagacaaaugaaaaauuccaucagauugagaaggaguucagcgaaguggaagggcggauccaggaucuggagaaguauguggaggacaccaaaaucgaucuuuggucuuacaacgccgaacugcucgucgcucuggagaaucagcacacgauugaccugacagauuccgaaaugaacaagcucuuugagaaaaccaagaaacaacugagagaaaacgcggaggacaugggaaauggcugcuucaagaucuaucauaagugugauaacgccugcauugggagcauccgcaauggcaccuacgaccacaacguguaccgggacgaggcucuuaauaacagauuucagauuaaaggaguugaacugaagucuggcuauaaagauuggauccucuggaucuccuucgccauuagcugcuuucugcuuuguguggcccugcucggguucaucaugugggcuugccagaagggaaauauucgcuguaacaucugcauuuga

SEQ ID NO: 205199 - RNA, 1701 nt, Artificial Sequence
  derived and/or modified CDS sequence (opt5) from hemagglutinin__InfluenzaA__ALA08662
augaagaccaucauugcccugagcuacauccucugccugguguucgcucagaaaauucccggcaacgacaauuccacagccacgcuuugucuggggcaccaugcggucccuaacggaaccaucguuaagacaauuaccaaugauagaaucgaggugacaaacgcuaccgaacucgugcaaaauucuagcaucggcgagauuugcgacuccccgcaccagauccuggauggggaaaacuguacacuuauugacgcccugcucggagauccccagugcgacggcuuucagaauaaaaagugggaucuguucgucgagcggucuaaagccuauagcaacuguuacccuuaugacgugcccgauuacgcuucccugcgcucucucguugccagcuccgggacccuggaauuuaauaacgagagcuucaauuggacgggagugacccaaaacggcacaucuuccgcuugcaucagacggagcagcuccagcuuuuucucucgccuuaauuggcugacccaucucaacuauacauacccugcccugaaugucaccaugcccaacaacgagcaguuugacaagcuguauauuuggggcgugcaccauccugggacggauaaggaccagaucuuccuguacgcgcaguccagcggaagaauuacaguuuccaccaaacggucucaacaggccgugaucccgaauaucggcagccgcccccggauuagagauaucccuucccgcauuagcaucuacuggacaauugucaagcccggggacauccuccugaucaacucuaccggaaaucugauugcuccuagaggcuauuuuaaaauccucuccgggaagucuucuauuaugcggagcgacgcccccaucggaaaauguaaguccgaaugcauuaccccgaacggcucuaucccuaaugauaagcccuuccagaacgugaaucgcaucacauacggcgcuuguccuagauaugugaaacacagcacgcugaaacuugccaccgggaugcggaacguccccgagaagcagacacgcggaauuuuuggcgcgaucgccggguucauugaaaauggaugggagggcaugguugacgggugguacggauuuagacaccaaaacuccgagggccggggccaggcugccgaucuuaagagcacccaggcugccaucgaccaaauuaaugggaaacucaacagacugaucggaaagacaaaugaaaaauuccaucagauugagaaggaguucucugaaguggaaggccgcauccaggaucuugagaaguauguggaggacuccaaaaucgaucuguggagcuacaacgccgaacuccuggucgcucuggagaaucagcacaccauugaccucacggauucugaaaugaacaagcuguuugagaaaacaaagaaacaacuucgggaaaacgcggaggacauggggaauggaugcuucaagaucuaucauaagugugauaacgccugcauuggcuccaucagaaaugggaccuacgaccacaacguguaccgcgacgaggcucugaauaaccgguuucagauuaaaggcguugaacucaagagcggauauaaagauuggauccuguggaucuccuucgccauuucuugcuuucuucuguguguggcccuccugggcuucaucaugugggcuugccagaaggggaauauuagauguaacaucugcauuuga

SEQ ID NO: 205200 - RNA, 1701 nt, Artificial Sequence; identical to SEQ ID NO: 205171
  derived and/or modified CDS sequence (opt5) from hemagglutinin__InfluenzaA__ALA08663

SEQ ID NO: 205201 - RNA, 1701 nt, Artificial Sequence; identical to SEQ ID NO: 205199
  derived and/or modified CDS sequence (opt5) from hemagglutinin__InfluenzaA__ALA08665

SEQ ID NO: 205202 - RNA, 1701 nt, Artificial Sequence
  derived and/or modified CDS sequence (opt5) from hemagglutinin__InfluenzaA__ALA08666
augaagaccaucauugcccugagcuacauccucugccugguguucgcucagaaacuucccggcaacgacaauuccacagccacgcugugucucgggcaccaugcggucccuaacggaaccauuguuaagacaaucaccaaugauagaauugaggugacaaacgcuaccgaacuggugcaaaauucuagcaucggcgagaucugcgacuccccgcaccagauucuugauggggaaaacuguacacugaucgacgcccuccugggagauccccagugcgacggcuuucagaauaaaaagugggaucuguucgucgagcggucuaaagccuauagcaacuguuacccuuaugacgugcccgauuacgcuucccuccgcucucugguugccagcuccgggacccuugaauuuaauaacgagagcuucaauugggcuggagugacgcaaaacggcaccucuuccgccugcauuagaggcagcaauucuuccuuuuucagccggcugaacuggcucacacaucugaauuuuaaguauccugcgcuuaacgucaccaugcccaacaaugagcaguucgacaagcuguacaucuggggagugcaccauccugggacagauaaagaccagauuuuucucuaugcccagucuuccggccgcaucaccguuagcacgaagagaucccaacaggcugugauuccgaacaucgggucucggccccgcaucagaaauauuccuagccggaucuccauuuacuggacaaucgucaaacccggagauauucugcugaucaacagcaccggcaaucucaucgccccucgcggguacuucaagauuagaucuggaaaauccagcaucaugcggucugacgcucccauuggcaaguguaagagcgaaugcaucacaccgaacggcuccauuccuaaugacaaacccuuucagaacgugaaucgcaucaccuauggggccuguccuagauacgugaagcagucuacccugaaacuugcgacaggaaugcggaacguccccgagaagcaaacgcgcggcaucuucggggccauugcuggauuuaucgaaaauggcugggaggggaugguugauggaugguauggcuucagacaccagaacagcgagggccgggggcaggccgcugaccugaaauccacccaagccgccauugaucagaucaauggaaagcucaacagacugauuggcaaaacaaaugaaaaguuccaccagaucgagaaggaauuuagcgagguggaagggcgcauucaggaccuugagaaauacguggaggauaccaagaucgaccuguggucuuauaacgcugaacuccuggucgcgcuggagaaccaacauacaaucgaucucaccgacuccgaaaugaauaaacuguucgagaagacgaaaaagcagcuucgggaaaacgccgaggauaugggaaauggcugcuuuaagauuuaccacaaaugugacaacgcuugcaucgggagcauuagaaauggcacauaugaucaugacguguaccgcgacgaggcccugaacaaucgguuccagaucaagggaguugaacucaaaucuggcuacaaggauuggauucuguggaucuccuuugccaugagcugcuuccuucuguguguggcucuccugggguuuaucaugugggccugccagaaaggaaacauuagauguaauaucugcauuuga

SEQ ID NO: 205203 - RNA, 1701 nt, Artificial Sequence
  derived and/or modified CDS sequence (opt5) from hemagglutinin__InfluenzaA__ALA08667
augaagaccaucauugcccugagcuacauccucugccugguguucgcucagaaaauucccggcaacgacaauuccacagccacgcuuugucuggggcaccaugcggucccuaacggaaccaucguuaagacaauuaccaaugauagaaucgaggugacaaacgcuaccgaacucgugcaaaauucuagcaucggcgagauuugcgacuccccgcaccagauccuggauggggaaaacuguacacuuauugacgcccugcucggagauccccagugcgacggcuuucagaauaaaaagugggaucuguucgucgagcggucuaaagccuauagcaacuguuacccuuaugacgugcccgauuacgcuucccugcgcucucucguugccagcuccgggacccuggaauuuaauaacgagagcuucaauuggacgggagugacccaaaacggcacaucuuccgcuugcaucagaaagagcagcuccagcuuuuucucucggcuuaauuggcugacccaucucaacuauaaguacccugcccugaaugucacaaugcccaacaacgagcaguuugacaaacuuuauauuuggggcgugcaccauccugggaccgauaaggaccagaucuuccuguacgcgcgcuccagcggaagaauuacgguuuccacaaaacggucucagcaagccgugaucccgaauaucggcagccgcccccggauuagagauaucccuucccgcauuagcaucuacuggaccauugucaagcccggggacauccuccugaucaacucuacaggaaaucugauugcuccuagaggcuauuuuaaaauccgguccgggaagucuucuauuaugcgcagcgacgcccccaucggaaaguguaaauccgaaugcauuaccccgaacggcucuaucccuaaugauaagcccuuccagaacgugaauagaaucaccuacggcgcuuguccucgguaugugaaacacagcacacucaagcuggccacggggaugcgcaacguccccgagaaacagaccagaggaauuuuuggcgcgaucgccggguucauugaaaauggaugggagggcaugguugacgggugguacggauuucggcaccagaacuccgagggcagaggccaagcugccgaucuuaagagcacacaggcugccaucgaccagauuaaugggaaacugaaccgccucaucggaaagaccaaugaaaaguuccaucaaauugagaaagaguucucugaaguggaaggccggauccaggaucuggagaaguauguggaggacacaaaaaucgaucuuugguccuacaacgccgaacugcucgucgcucuggagaaucagcacaccauugaccugacggauagcgaaaugaacaagcucuuugagaaaacaaagaagcagcugagagaaaacgcggaggacauggggaauggaugcuucaaaaucuaucauaagugugauaacgccugcauuggcucuauccgcaaugggaccuacgaccacaacguguaccgggacgaggcucuuaauaacagauuucaaauuaaaggcguugaacugaaguccggauauaaagauuggauccucuggaucagcuucgccauuuccugcuuucugcuuuguguggcccugcucggcuucaucaugugggcuugccagaaggggaauauucgcuguaacaucugcauuuga

SEQ ID NO: 205204 - RNA, 1701 nt, Artificial Sequence
  derived and/or modified CDS sequence (opt5) from hemagglutinin__InfluenzaA__ALA08668
augaagaccaucauugcccugagcuacauccucugccugguguucgcucagaaaauucccggcaacgacaauuccacagccacgcuuugucuggggcaccaugcggucccuaacggaaccaucguuaagacaauuaccaaugauagaaucgaggugacaaacgcuaccgaacucgugcaaaauucuagcaucggcgagauuugcgacuccccgcaccagauccuggauggggaaaacuguacacuuauugacgcccugcucggagauccccagugcgacggcuuucagaauaaaaagugggaucuguucgucgagcggucuaaagccuauagcaacuguuacccuuaugacgugcccgauuacgcuucccugcgcucucucguugccagcuccgggacccuggaauuuaauaacgagagcuucaauuggacgggagugacccaaaacggcacaucuuccgcuugcaucagacggagcagcuccagcuuuuucucucgccuuaauuggcugacccaucucaacuauacauacccugcccugaaugucaccaugcccaacaacgagcaguuugacaaacuuuauauuuggggcgugcaccauccugggacggauaaggaccagaucuuccuguacgcgcaguccagcggaagaauuacaguuuccaccaagcggucucaacaggccgugaucccgaauaucggcagccgcccccggauuagagauaucccuucccgcauuagcaucuacuggacaauugucaagcccggggacauccuccugaucaacucuaccggaaaucugauugcuccuagaggcuauuuuaaaauccgguccgggaagucuucuauuaugcgcagcgacgcccccaucggaaaauguaaguccgaaugcauuaccccgaacggcucuaucccuaaugauaagcccuuccagaacgugaauagaaucacauacggcgcuuguccucgguaugugaaacacagcacgcucaagcuggccaccgggaugcgcaacguccccgagaaacagacaagaggaauuuuuggcgcgaucgccggguucauugaaaauggaugggagggcaugguugacgggugguacggauuucggcaccaaaacuccgagggcagaggccaggcugccgaucuuaagagcacccaggcugccaucgaccaaauuaaugggaaacugaaccgccucaucggaaagacaaaugaaaaauuccaucagauugagaaggaguucucugaaguggaaggccggauccaggaucuggagaaguauguggaggacaccaaaaucgaucuuugguccuacaacgccgaacugcucgucgcucuggagaaucagcacacgauugaccugacagauagcgaaaugaacaagcucuuugagaaaaccaagaaacaacugagagaaaacgcggaggacauggggaauggaugcuucaagaucuaucauaagugugauaacgccugcauuggcucuauccgcaaugggaccuacgaccacaacguguaccgggacgaggcuauuaauaacagauuucagaucaaaggcguugaacuuaaguccggauauaaagauuggauccuguggauuagcuucgccaucuccugcuuucuccuguguguggcccuucugggcuucauuaugugggcuugccagaaggggaauauccgcuguaacauuugcaucuga

SEQ ID NO: 205205 - RNA, 1701 nt, Artificial Sequence; identical to SEQ ID NO: 205171
  derived and/or modified CDS sequence (opt5) from hemagglutinin__InfluenzaA__ALA08669

SEQ ID NO: 205206 - RNA, 1701 nt, Artificial Sequence; identical to SEQ ID NO: 205064
  derived and/or modified CDS sequence (opt5) from hemagglutinin__InfluenzaA__ALA08670

SEQ ID NO: 205207 - RNA, 1701 nt, Artificial Sequence; identical to SEQ ID NO: 205171
  derived and/or modified CDS sequence (opt5) from hemagglutinin__InfluenzaA__ALA08671

SEQ ID NO: 205208 - RNA, 1701 nt, Artificial Sequence; identical to SEQ ID NO: 205171
  derived and/or modified CDS sequence (opt5) from hemagglutinin__InfluenzaA__ALA08672

SEQ ID NO: 205209 - RNA, 1701 nt, Artificial Sequence; identical to SEQ ID NO: 205064
  derived and/or modified CDS sequence (opt5) from hemagglutinin__InfluenzaA__ALA08673

SEQ ID NO: 205210 - RNA, 1701 nt, Artificial Sequence; identical to SEQ ID NO: 205171
  derived and/or modified CDS sequence (opt5) from hemagglutinin__InfluenzaA__ALA08674

SEQ ID NO: 205211 - RNA, 1701 nt, Artificial Sequence; identical to SEQ ID NO: 204513
  derived and/or modified CDS sequence (opt5) from hemagglutinin__InfluenzaA__ALA08675

SEQ ID NO: 205212 - RNA, 1701 nt, Artificial Sequence; identical to SEQ ID NO: 205171
  derived and/or modified CDS sequence (opt5) from hemagglutinin__InfluenzaA__ALA08676

SEQ ID NO: 205213 - RNA, 1701 nt, Artificial Sequence; identical to SEQ ID NO: 205171
  derived and/or modified CDS sequence (opt5) from hemagglutinin__InfluenzaA__ALA08677

SEQ ID NO: 205214 - RNA, 1701 nt, Artificial Sequence; identical to SEQ ID NO: 205171
  derived and/or modified CDS sequence (opt5) from hemagglutinin__InfluenzaA__ALA08678

SEQ ID NO: 205215 - RNA, 1701 nt, Artificial Sequence; identical to SEQ ID NO: 205171
  derived and/or modified CDS sequence (opt5) from hemagglutinin__InfluenzaA__ALA08679

SEQ ID NO: 205216 - RNA, 1701 nt, Artificial Sequence; identical to SEQ ID NO: 205171
  derived and/or modified CDS sequence (opt5) from hemagglutinin__InfluenzaA__ALA08680

SEQ ID NO: 205217 - RNA, 1701 nt, Artificial Sequence; identical to SEQ ID NO: 205070
  derived and/or modified CDS sequence (opt5) from hemagglutinin__InfluenzaA__ALA08681

SEQ ID NO: 205218 - RNA, 1701 nt, Artificial Sequence; identical to SEQ ID NO: 205149
  derived and/or modified CDS sequence (opt5) from hemagglutinin__InfluenzaA__ALA08682

SEQ ID NO: 205219 - RNA, 1701 nt, Artificial Sequence; identical to SEQ ID NO: 205070
  derived and/or modified CDS sequence (opt5) from hemagglutinin__InfluenzaA__ALA08683

SEQ ID NO: 205220 - RNA, 1701 nt, Artificial Sequence
  derived and/or modified CDS sequence (opt5) from hemagglutinin__InfluenzaA__ALA08684
augaagaccaucauugcccugagccacauccucugccugguguucgcucagaaaauucccggcaacgacaauuccacagccacgcuuugucuggggcaucacgcggucccuaacggaaccaucguuaagacaauuaccaaugauagaaucgaggugacaaacgcuaccgaacucgugcaaaauucuagcaucggcgagauuugcgacuccccgcaucagauccuggauggggaaaacuguacacuuauugacgcccugcucggagauccccagugcgacggcuuucagaauaaaaagugggaucuguucgucgagcggucuaaagccuacagcaacuguuauccuuacgacgugcccgauuaugcuucccugcgcucucucguugccagcuccgggacccuggaauuuaauaacgagagcuucaauuggacgggagugacccaaaacggcacaucuuccgcuugcaucagacggucuagcuccagcuuuuucucucgccuuaauuggcugacccaccucaacuacaaguauccugcccugaaugucacaaugcccaacaacgagcaguuugacaaacuuuacauuuggggcgugcaucacccugggaccgauaaagaccagaucuuccuguaugcgcaguccagcggaagaauuacgguuuccacaaagggcucucaacaggccgugaucccgaauaucgggagccggccccgcauuagagauaucccuucccggauuagcaucuacuggaccauugucaaacccggagacauccuccugaucaacucuacaggcaaucugauugcuccucgcggguacuuuaagaucagauccggaaaaagcucuauuaugcggagcgacgcccccaucggcaaguguaaguccgaaugcauuaccccgaacggcucuaucccuaaugauaaacccuuccagaacgugaaucgcaucaccuauggggcuuguccuagauacgugaagcacagcacacucaaacuggccacgggaaugcggaacguccccgagaagcagacccgcggcauuuuuggggcgaucgccggauucauugaaaauggcugggaggggaugguugacggaugguauggcuuuagacaucaaaacuccgagggccgggggcaggcugccgaucuuaaaagcacacaggcugccaucgaccaaauuaauggaaagcugaacagacucaucggcaaaaccaaugaaaaguuccaccagauugagaaggaguucucugaaguggaagggcgcauccaggaucuggagaaauacguggaggacacaaagaucgaucuuugguccuauaacgccgaacugcucgucgcucuggagaaucagcauaccauugaccugacggauagcgaaaugaacaaacucuuugagaagacaaagaagcaacugcgggaaaacgcggaggacaugggaaauggcugcuucaagaucuaccacaaaugugauaacgccugcauugggucuaucagaaauggcaccuaugaccacaacguguaccgcgacgaggcucuuaauaaccgguuucagauuaagggaaucgaacugaaauccggcuacaaggauuggauccucuggauuagcuucgccaucuccugcuuucugcuuuguguugcccugcucggguucauuaugugggcuugccagaaaggaaauaucagauguaacauuugcaucuga

SEQ ID NO: 205221 - RNA, 1701 nt, Artificial Sequence; identical to SEQ ID NO: 204513
  derived and/or modified CDS sequence (opt5) from hemagglutinin__InfluenzaA__ALA08686

SEQ ID NO: 205222 - RNA, 1701 nt, Artificial Sequence
  derived and/or modified CDS sequence (opt5) from hemagglutinin__InfluenzaA__ALA08687
augaagaccaucauugcccugagcuacauccucugccugguguucgcucagaaaauucccggcaacgacaauuccacagccacgcuuugucuggggcaccaugcggucccuaacggaaccaucguuaagacaauuaccaaugauagaaucgaggugacaaacgcuaccgaacucgugcaaaauucuagcaucggcgagauuugcgacuccccgcaccagauccuggauggggaaaacuguacacuuauugacgcccugcucggagauccccagugcgacggcuuucagaauaaaaagugggaucuguucgucgagcggucuaaagccuauagcaacuguuacccuuaugacgugcccgauuacgcuucccugcgcucucucaucgccagcuccgggacccuggaauuuaauaacgagagcuucaauuggacgggaguuacccaaaacggcacaucuuccgcuugcauuagacggagcagcuccagcuuuuucucucgccuuaauuggcugacccaucucaacuauacauacccugcccugaaugugaccaugcccaacaacgagcaguuugacaaacuuuauaucuggggcguccaccauccugggacggauaaggaccagauuuuccuguacgcgcaguccagcggaagaaucacaguguccaccaagcggucucaacaggccguuaucccgaauauuggcagccgccccagaauccgggauauuccuucccgcaucagcauuuacuggacaaucgugaagcccggggacauccuccugauuaacucuaccggaaaucugaucgcuccuagaggcuauuuuaaaauucgguccgggaagucuucuaucaugcgcagcgacgcccccauuggaaaauguaaguccgaaugcaucaccccgaacggcucuaucccuaaugauaagcccuuccagaacgucaauagaauuacauacggcgcuuguccucgguaugugaaacacagcacgcucaagcuggccaccgggaugcgcaacgugcccgagaaacagacaagaggaaucuuuggcgcgauugccggguucaucgaaaauggaugggagggcauggucgacgggugguacggauuucggcaccaaaacuccgagggcagaggccaggcugccgaucuuaagagcacccaggcugccauugaccaaaucaaugggaaacugaaccgccucauuggaaagacaaaugaaaaauuccaucagaucgagaaggaguucucugaaguugaaggccggauccaggaucuggagaaguauguggaggacaccaaaauugaucuuugguccuacaacgccgaacugcucguggcucuggagaaucagcacacgaucgaccugacagauagcgaaaugaacaagcucuuugagaaaaccaagaaacaacugagagaaaacgcggaggacauggggaauggaugcuucaagauuuaucauaagugugauaacgccugcaucggcucuauucgcaaugggaccuacgaccacaacgucuaccgggacgaggcucuuaauaacagauuucagaucaaaggcguggaacugaaguccggauauaaagauuggauccucuggauuagcuucgccaucuccugcuuucugcuuuguguugcccugcucggcuucauuaugugggcuugccagaaggggaauauccgcuguaacauuugcaucuga

SEQ ID NO: 205223 - RNA, 1701 nt, Artificial Sequence; identical to SEQ ID NO: 205164
  derived and/or modified CDS sequence (opt5) from hemagglutinin__InfluenzaA__ALA08688

SEQ ID NO: 205224 - RNA, 1701 nt, Artificial Sequence; identical to SEQ ID NO: 204513
  derived and/or modified CDS sequence (opt5) from hemagglutinin__InfluenzaA__ALE31612

SEQ ID NO: 205225 - RNA, 1701 nt, Artificial Sequence
  derived and/or modified CDS sequence (opt5) from hemagglutinin__InfluenzaA__ALE31613
augaagaccaucauugcccugagcuacauccucugccugguguucgcucagaaaauucccggcaacgacaauuccacagccacgcuuugucuggggcaccaugcggucccuaacggaaccaucguuaagacaauuaccaaugauagaaucgaggugacaaacgcuaccgaacucgugcaaaauucuagcaucggcgagauuugcgacuccccgcaccagauccuggauggggaaaacuguacacuuauugacgcccugcucggagauccccagugcgacggcuuucagaauaaaaagugggaucuguucgucgagcggucuaaagccuauagcaacuguuacccuuaugacgugcccgauuacgcuucccugcgcucucucguugccagcuccgggacccuggaauuuaauaacgagagcuucaauuggacgggagugacccaaaacggcacaucuuccgcuugcaucagacggucuagcuccagcuuuuucucucgccuuaauuggcugacccaucucaacuauacauacccugcccugaaugucaccaugcccaacaacgagcaguuugacaagcuguauauuuggggcgugcaccauccugggacggauaaggaccagaucuuccuguacgcgcaguccagcggaagaauuacaguuuccaccaaaggcucucaacaggccgugaucccgaauaucgggagccggccccgcauuagagauaucccuucccggauuagcaucuacuggacaauugucaagcccggagacauccuccugaucucuuccaccggcaaccugauugcuccucgcggguauuuuaaaaucagaagcggaaagucuagcauuaugcgguccgacgcccccaucggcaaauguaagucugaaugcauuaccccgaauggcagcaucccuaacgauaagcccuuccagaaugugaaccgcaucacauacggggcuuguccuagauaugugaaacacuccacgcucaagcuggccaccggaaugcggaauguccccgagaaacagacacgcggcauuuuuggggcgaucgccggauucauugaaaacggcugggaggggaugguugacggaugguacggcuuuagacaccaaaauagcgagggccgggggcaggcugccgaucuuaagucuacccaggcugccaucgaccaaauuaacggaaaacugaauagacucaucggcaagacaaacgaaaaauuccaucagauugagaaggaguucuccgaaguggaagggcgcauccaggaucuggagaaguauguggaggacaccaaaaucgaucuuuggagcuacaaugccgaacugcucgucgcucuggagaaccagcacacgauugaccugacagauucugaaaugaauaagcucuuugagaaaaccaagaaacaacugcgggaaaacgcggaggacaugggaaacggcugcuucaagaucuaucauaagugugauaaugccugcauuggguccaucagaaacggcaccuacgaccacaauguguaccgcgacgaggcucuuaacaaucgguuucagauuaaaggaguugaacuuaagagcggcuauaaagauuggauccucuggaucuccuucgccauuucuugccugcuucuguguguggcccuccugggguuuaucaugugggcuugccagaagggaaacauuagauguaauaucugcauuuga

SEQ ID NO: 205226 - RNA, 1701 nt, Artificial Sequence
  derived and/or modified CDS sequence (opt5) from hemagglutinin__InfluenzaA__ALE31614
augaagaccaucauugcccugagcuacauccucugccugguguucgcucagaaaauucccggcaacgacaauuccacagccacgcuuugucuggggcaccaugcggucccuaacggaaccaucguuaagacaauuaccaaugauagaaucgaggugacaaacgcuaccgaacucgugcaaaauucuagcaucggcaaaauuugcgacuccccgcaccagauccuggauggggagaacuguacacuuauugacgcccugcucggagauccccagugcgacggcuuucagaauaagaaaugggaucuguucgucgaacggucuaaggccuauagcaacuguuacccuuaugacgugcccgauuacgcuucccugcgcucucucguugccagcuccgggacccuggaguuuaauaacgaaucuuucaauuggacgggagugacccaaaacggcacaucuuccgcuugcaucagacggagcagcuccagcuuuuucucucgccuuaauuggcugacccaucucaacuauacauacccugcccugaaugucaccaugcccaacaacgagcaguuugacaaacuuuauauuuggggcgugcaccauccugggacggauaaggaccagaucuuccuguacgcgcaguccagcggaagaauuacaguuuccaccaagcggucucaacaggccgugaucccgaauaucggcagccgcccccggauuagagauaucccuucccgcauuagcaucuacuggacaauugucaaacccggggacauccuccugaucaacucuaccggaaaucugauugcuccuagaggcuauuuuaagauccgguccgggaaaagcucuauuaugcgcagcgacgcccccaucggaaaguguaaguccgagugcauuaccccgaacggcucuaucccuaaugauaaacccuuccagaacgugaauagaaucacauacggcgcuuguccucgguaugugaagcacagcacgcucaaacuggccaccgggaugcgcaacguccccgaaaagcagacaagaggaauuuuuggcgcgaucgccggguucauugagaauggaugggaaggcaugguugacgggugguacggauuucggcaccaaaacuccgagggcagaggccaggcugccgaucuuaaaagcacccaggcugccaucgaccaaauuaaugggaagcugaaccgccucaucggaaaaacaaaugagaaguuccaucagauugaaaaggaguucucugaaguggagggccggauccaggaucuggaaaaauauguggaggacaccaagaucgaucuuugguccuacaacgccgagcugcucgucgcucuggaaaaucagcacacgauugaccugacagauagcgagaugaacaaacucuuugaaaagaccaaaaagcaacugagagagaacgcggaagacauggggaauggaugcuucaagaucuaucauaaaugugauaacgccugcauuggcucuauccgcaaugggaccuacgaccacaacguguaccgggacgaggcucuuaauaacagauuucagauuaagggcguugagcugaaauccggauauaaggauuggauccucuggaucagcuucgccauuuccugcuuucugcuuuguguggcccugcucggcuucaucaugugggcuugccagaaagggaauauucgcuguaacaucugcauuuga

SEQ ID NO: 205227 - RNA, 1701 nt, Artificial Sequence
  derived and/or modified CDS sequence (opt5) from hemagglutinin__InfluenzaA__ALE31615
augaagaccaucauugcccugagcuacauccucugccugguguucgcucagaaacuucccggcaacgacaauuccacagccacgcugugucucgggcaccaugcggucccuaacggaaccauuguuaagacaaucaccaaugauagaauugaggugacaaacgcuaccgaacuggugcaaaauucuagcaucggcgagaucugcgacuccccgcaccagauucuugauggggaaaacuguacacugaucgacgcccuccugggagauccccagugcgacggcuuucagaauaaaaagugggaucuguucgucgagcggucuaaagccuauagcaacuguuacccuuaugacgugcccgauuacgcuucccuccgcucucugguugccagcuccgggacccuugaauuuaauaacgagagcuucaauugggcuggagugacgcaaaacggcaccucuuccgccugcauuagaggcagcaauucuuccuuuuucagccggcugaacuggcucacacaucugaauuuuaaguauccugcgcuuaacgucaccaugcccaacaaugagcaguucgacaagcuguacaucuggggagugcaccauccugggacagauaaagaccagauuuuucucuaugcccagucuuccggccgcaucaccguuagcacgaagagaucccaacaggcugugauuccgaacaucgggucucggccccgcaucagaaauauuccuagccggaucuccauuuacuggacaaucgucaaacccggagauauucugcugaucaacagcaccggcaaucucaucgccccucgcggguacuucaagauuagaucuggaaaauccagcaucaugcggucugacgcucccauuggcaaguguaagagcgaaugcaucacaccgaacggcuccauuccuaaugacaaacccuuucagaacgugaaucgcaucaccuauggggccuguccuagauacgugaagcagucuacccugaaacuugcgacaggaaugcggaacguccccgagaagcaaacgcgcggcaucuucggggccauugcuggauuuaucgaaaauggcugggaggggaugguugauggaugguauggcuucagacaccagaacagcgagggccgggggcaggccgcugaccugaaauccacccaagccgccauugaucagaucaauggaaagcucaacagacugauuggcaaaacaaaugaaaaguuccaccagaucgagaaggaauuuagcgagguggaagggcgcauucaggaccuugagaaauacguggaggauaccaagaucgaccuguggucuuauaacgcugaacuccuggucgcgcuggagaaccaacauacaaucgaucucaccgacuccgaaaugaauaaacuguucgagaagacgaaaaagcagcuucgggaaaacgccgaggauaugggaaauggcugcuuuaagauuuaccacaaaugugacaacgcuugcaucgagagcauuagaaaugggacauaugaucaugacguguaccgcgacgaagcccugaacaaucgguuccagaucaagggcguugagcucaaaucuggauacaaggauuggauucuguggaucuccuuugccaucagcugcuuccuucuguguguggcucuccugggcuuuauuaugugggccugccagaaagggaacaucagauguaauauuugcaucuga

SEQ ID NO: 205228 - RNA, 1701 nt, Artificial Sequence; identical to SEQ ID NO: 204513
  derived and/or modified CDS sequence (opt5) from hemagglutinin__InfluenzaA__ALE31616

SEQ ID NO: 205229 - RNA, 1701 nt, Artificial Sequence; identical to SEQ ID NO: 204513
  derived and/or modified CDS sequence (opt5) from hemagglutinin__InfluenzaA__ALE31617

SEQ ID NO: 205230 - RNA, 1701 nt, Artificial Sequence; identical to SEQ ID NO: 204513
  derived and/or modified CDS sequence (opt5) from hemagglutinin__InfluenzaA__ALE31618

SEQ ID NO: 205231 - RNA, 1701 nt, Artificial Sequence; identical to SEQ ID NO: 205171
  derived and/or modified CDS sequence (opt5) from hemagglutinin__InfluenzaA__ALE31619

SEQ ID NO: 205232 - RNA, 1701 nt, Artificial Sequence; identical to SEQ ID NO: 204513
  derived and/or modified CDS sequence (opt5) from hemagglutinin__InfluenzaA__ALE31620

SEQ ID NO: 205233 - RNA, 1701 nt, Artificial Sequence
  derived and/or modified CDS sequence (opt5) from hemagglutinin__InfluenzaA__ALE31622
augaagaccaucauugcccugagcuacauccucugccugguguucgcucagaaaauucccggcaacgacaauuccacagccacgcuuugucuggggcaccaugcggucccuaacggaaccaucguuaagacaauuaccaaugauagaaucgaggugacaaacgcuaccgaacucgugcaaaauucuagcaucggcgagauuugcgacuccccgcaccagauccuggauggggaaaacuguacacuuauugacgcccugcucggagauccccagugcgacggcuuucagaauaaaaagugggaucuguucgucgagcggucuaaagccuauagcaacuguuacccuuaugacgugcccgauuacgcuucccugcgcucucucguugccagcuccgggacccuggaauuuaauaacgagagcuucaauuggacgggagugacccaaaacggcacaucuuccgcuugcaucagacggagcagcuccagcuuuuucucucgccuuaauuggcugacccaucucaacuauacauacccugcccugaaugucaccaugcccaacaacgagcaguuugacaaacuuuauauuuggggcgugcaccauccugggacggauaaggaccagaucuuccuguacgcgcaguccagcggaagaauuacaguuuccaccaagcggucucaacaggccgugaucccgaauaucggcagccgcccccggauuagagauaucccuucccgcauuagcaucuacuggacaauugucaagcccggggacauccuccugaucaacucuaccggaaaucugauugcuccuagaggcuauuuuaaaauccgguccgggaagucuucuauuaugcgcagcgacgugcccaucggaaaauguaaguccgaaugcauuaccccgaacggcucuaucccuaaugauaagcccuuccagaacgugaauagaaucacauacggcgccuguccucgguaugucaaacacagcacgcucaagcuggcuaccgggaugcgcaacguucccgagaaacagacaagaggaauuuuuggcgccaucgcgggguucauugaaaauggaugggagggcaugguggacgggugguacggauuucggcaccaaaacuccgagggcagaggccaggccgcugaucuuaagagcacccaggccgcuaucgaccaaauuaaugggaaacugaaccgccucaucggaaagacaaaugaaaaauuccaucagauugagaaggaguucucugaaguggaaggccggauccaggaucuggagaaguaugucgaggacaccaaaaucgaucuuugguccuacaacgccgaacugcucguggcccuggagaaucagcacacgauugaccugacagauagcgaaaugaacaagcucuuugagaaaaccaagaaacaacugagagaaaacgcugaggacauggggaauggaugcuucaagaucuaucauaagugugauaacgcgugcauuggcucuauccgcaaugggaccuacgaccacaacguuuaccgggacgaggcccuuaauaacagauuucagauuaaaggcguggaacugaaguccggauauaaagauuggauccucuggaucagcuucgcuauuuccugcuuucugcuuugugucgcccugcucggcuucaucaugugggccugccagaaggggaauauucgcuguaacaucugcauuuga

SEQ ID NO: 205234 - RNA, 1701 nt, Artificial Sequence; identical to SEQ ID NO: 204513
  derived and/or modified CDS sequence (opt5) from hemagglutinin__InfluenzaA__ALE31623

SEQ ID NO: 205235 - RNA, 1701 nt, Artificial Sequence; identical to SEQ ID NO: 204513
  derived and/or modified CDS sequence (opt5) from hemagglutinin__InfluenzaA__ALE31625

SEQ ID NO: 205236 - RNA, 1701 nt, Artificial Sequence; identical to SEQ ID NO: 204513
  derived and/or modified CDS sequence (opt5) from hemagglutinin__InfluenzaA__ALE31626

SEQ ID NO: 205237 - RNA, 1701 nt, Artificial Sequence; identical to SEQ ID NO: 204513
  derived and/or modified CDS sequence (opt5) from hemagglutinin__InfluenzaA__ALE31627

SEQ ID NO: 205238 - RNA, 1701 nt, Artificial Sequence; identical to SEQ ID NO: 204513
  derived and/or modified CDS sequence (opt5) from hemagglutinin__InfluenzaA__ALE31628

SEQ ID NO: 205239 - RNA, 1701 nt, Artificial Sequence; identical to SEQ ID NO: 204513
  derived and/or modified CDS sequence (opt5) from hemagglutinin__InfluenzaA__ALE31629

SEQ ID NO: 205240 - RNA, 1701 nt, Artificial Sequence; identical to SEQ ID NO: 204513
  derived and/or modified CDS sequence (opt5) from hemagglutinin__InfluenzaA__ALE31632

SEQ ID NO: 205241 - RNA, 1701 nt, Artificial Sequence
  derived and/or modified CDS sequence (opt5) from hemagglutinin__InfluenzaA__ALE31634
augaagaccaucauugcccugagcuacauccucugccuggugcuugcucagaaaauucccggcaacgacaauuccacagccacgcugugucucgggcaccaugcggucccuaacggaaccaucguuaagacaauuaccaaugauagaaucgaggugacaaacgcuaccgaacuggugcaaaauucuagcaucggcgagauuugcgacuccccgcaccagauccuugauggggaaaacuguacacugauugacgcccuccugggagauccccagugcgacggcuuccagaauaaaaagugggaucuguuugucgagcggucuaaagccuauagcaacuguuacccuuaugacgugcccgauuacgcuucccuccgcucucugguugccagcuccgggacccuugaauuuaauaacgagagcuucaauuggacgggagugacccaaaacggcacaucuuccgcuugcaucagacggagcagcuccagcuucuuuucucgccugaauuggcucacccaucugaacuauacauacccugcccuuaaugucaccaugcccaacaacgagcaguucgacaagcuguauauuuggggcgugcaccauccugggacggauaaggaccagaucuuucucuacgcgcaguccagcggaagaauuacaguuuccaccaaacggucucaacaggccgugaucccgaauaucggcagccgcccccggauuagagauaucccuucccgcauuagcaucuacuggacaauugucaagcccggggacauccugcugaucaacucuaccggaaaucucauugcuccuagaggcuauuucaaaauccgguccgggaagucuucuauuaugcgcagcgacgcccccaucggaaaauguaaguccgaaugcauuaccccgaacggcucuaucccuaaugauaagcccuuucagaacgugaauagaaucacauacggcgcuuguccucgguaugugaaacacagcacgcugaagcuggccaccgggaugcgcaacguccccgagaaacagacaagaggaauuuucggcgcgaucgccggguuuauugaaaauggaugggagggcaugguugacgggugguacggauuccggcaccaaaacuccgagggcagaggccaggcugccgaucuuaagagcacccaggcugccaucgaccaaauuaaugggaaacucaaccgccugaucggaaagacaaaugaaaaauuucaucagauugagaaggaguucucugaaguggaaggccggauccaggaucuugagaaguauguggaggacaccaaaaucgaucugugguccuacaacgccgaacuccuggucgcucuggagaaucagcacacgauugaccucacagauagcgaaaugaacaagcuguucgagaaaaccaagaaacaacuuagagaaaacgcggaggacauggggaauggaugcuuuaagaucuaucauaagugugauaacgccugcauuggcucuauccgcaaugggaccuacgaccacaacguguaccgggacgaggcucugaauaacagauuccagauuaaaggcguugaacucaaguccggauauaaagauuggauccuguggaucagcuuugccauuuccugcuuccuucuguguguggcccuccugggcuuuaucaugugggcuugccagaaggggaauauucgcuguaacaucugcauuuga

SEQ ID NO: 205242 - RNA, 1701 nt, Artificial Sequence; identical to SEQ ID NO: 204513
  derived and/or modified CDS sequence (opt5) from hemagglutinin__InfluenzaA__ALE31635

SEQ ID NO: 205243 - RNA, 1701 nt, Artificial Sequence; identical to SEQ ID NO: 204513
  derived and/or modified CDS sequence (opt5) from hemagglutinin__InfluenzaA__ALE31636

SEQ ID NO: 205244 - RNA, 1701 nt, Artificial Sequence
  derived and/or modified CDS sequence (opt5) from hemagglutinin__InfluenzaA__ALE31638
augaagaccaucauugcccugagcuacauccucugccugguguucgcucagaaaauucccggcaacgacaauuccacagccacgcuuugucuggggcaccaugcggucccuaacggaaccaucguuaagacaauuaccaaugauagaaucgaggugacaaacgcuaccgaacucgugcaaaauucuagcaucggcgagauuugcgacuccccgcaccagauccuggauggggaaaacuguacacuuauugacgcccugcucggagauccccagugcgacggcuuucagaauaaaaagugggaucuguucgucgagcggucuaaagccuauagcaacuguuacccuuaugacgugcccgauuacgcuucccugcgcucucucguugccagcuccgggacccuggaauuuaauaacgagagcuucaauuggacgggagugacccaaaacggcacaucuuccgcuugcaucagacggagcagcuccagcuuuuucucucgccuuaauuggcugacccaucucaacuauacauacccugcccugaaugucaccaugcccaacaacgagcaguuugacaaacuuuauauuuggggcgugcaccauccugggacggauaaggaccagaucuuccuguacgcgcaguccagcggaagaauuacaguuuccaccaagcggucucaacaggccgugaucccgaauaucggcagccgcccccggauuagagauaucccuucccgcauuagcaucuacuggacaauugucaagcccggggacauccuccugaucaacucuaccggaaaucugauugcuccuagaggcuauuuuaaaauccgguccgggaagucuucuauuaugcgcagcgacgcccccaucggaaaauguaaguccgaaugcauuaccccgaacggcucuaucccuaauggcaagcccuuccagaacgugaauagaaucacauacggggcuuguccucgguaugugaaacacagcacgcucaagcuggccaccggaaugcgcaacguccccgagaaacagacaagaggcauuuuuggggcgaucgccggauucauugaaaauggcugggaggggaugguugauggaugguacggcuuucggcaccaaaacuccgagggcagagggcaggcugccgaccuuaagagcacccaggcugccaucgaucaaauuaauggaaaacugaaccgccucaucggcaagacaaaugaaaaauuccaucagauugagaaggaguucucugaaguggaagggcggauccaggaccuggagaaguauguggaggauaccaaaaucgaccuuugguccuacaacgccgaacugcucgucgcucuggagaaucagcacacgauugaucugacagacagcgaaaugaacaagcucuuugagaaaaccaagaaacaacugagagaaaacgcggaggauaugggaaauggcugcuucaagaucuaucauaagugugacaacgccugcauugggucuauccgcaauggcaccuacgaucacaacguguaccgggacgaggcucuuaauaacagauuucagauuaaaggaguugaacugaaguccggcuauaaagacuggauccucuggaucagcuucgccauuuccugcuuucugcuuuguguggcccugcucggguucaucaugugggcuugccagaagggaaauauucgcuguaacaucugcauuuga

SEQ ID NO: 205245 - RNA, 1701 nt, Artificial Sequence; identical to SEQ ID NO: 204513
  derived and/or modified CDS sequence (opt5) from hemagglutinin__InfluenzaA__ALE31639

SEQ ID NO: 205246 - RNA, 1701 nt, Artificial Sequence; identical to SEQ ID NO: 205064
  derived and/or modified CDS sequence (opt5) from hemagglutinin__InfluenzaA__ALE31640

SEQ ID NO: 205247 - RNA, 1701 nt, Artificial Sequence; identical to SEQ ID NO: 205070
  derived and/or modified CDS sequence (opt5) from hemagglutinin__InfluenzaA__ALE31641

SEQ ID NO: 205248 - RNA, 1701 nt, Artificial Sequence; identical to SEQ ID NO: 205070
  derived and/or modified CDS sequence (opt5) from hemagglutinin__InfluenzaA__ALE31642

SEQ ID NO: 205249 - RNA, 1701 nt, Artificial Sequence
  derived and/or modified CDS sequence (opt5) from hemagglutinin__InfluenzaA__ALE31643
augaagaccaucauugcccugagcuacauccucugccugguguucgcucagaaacuucccgagaacgacaauuccacagccacgcugugucucggccaccaugcggucccuaacgggaccauuguuaagacaaucaccucugauagaauugaagugacaaaugcuaccgagcuggugcaaaacagcuccaucggagaaaucugcgacucuccgcaccagauucuugauggcaaaaauuguacacugaucgacgcccuccugggggauccccagugcgacggauuucagaacaagaaaugggaucuguucgucgagcggagcaccgccuauuccaauuguuacccuuaugacgugcccgauuacgcuucucuccgcagccugguugccuccagcggcacgcuugaauuuaacgacgagucuuucaauugggcuggggugacccaaaacggaacauccagcgccugcauuagaggcucuaauuccagcuuuuucucucggcugaacuggcucacccauuccaauuuuaaguauccugcgcugaacgucacaaugcccaauaacgagcaguucgauaagcuguacaucuggggcgugcaccauccugggaccgacaaagaucagauuuuucuguaugcccagagcuccggacgcaucacgguuucuacaaagagaagccaacaggcugugauuccgaacaucggcucccggccccgcaucagaaauauuccuagccggaucucuauuuacuggaccaucgucaaacccggggacauucuccugaucaacuccacaggaaaucugaucgccccucgcggcuacuucaagauuagaagcgggaaaucuagcaucaugcgguccgacgcucccauuggaaaguguaagucugaaugcaucaccccgaacggcagcauuccuaaugauaaacccuuucagaacgugaaucgcaucaccuauggcgccuguccuagauacgugaagcaguccacacucaaacuggcgacggggaugcggaacguccccgagaagcaaacccgcggaaucuucggcgccauugcuggguuuaucgaaaauggaugggagggcaugaaagacgggugguauggauucagacaccagaacagcgagggccggggccaggccgcugaucuuaagucuacacaagccgccauugaccagaucaaugggaaacugaacagacucauuggaaagaccaaugaaaaguuccaccagaucgagaaagaauuuuccgagguugaaggccgcauucaggaucuggagaaguacguggaggacacaaaaaucgaucuuuggagcuauaacgcugaacugcucguggcgcuggagaaucaacauaccaucgaccugacggauucugaaaugaacaaacucuucgagaagacaaagaagcagcugcgggaaaacgccgaggacauggggaauggaugcuuuaaaauuuaccacaagugugauaacgcuugcaucggcuccauuagaaaugggaccuaugaccaugacgucuaccgcgaugaggcccuuaacaaucgguuccagaucaaaggcguggaacuuaagagcggauacaaagacuggauucucuggaucuccuuugccaucucuugcuuccugcuuuguguugcucugcucggcuuuauuaugugggccugccagaaggggaacaucagauguaauauuugcaucuga

SEQ ID NO: 205250 - RNA, 1701 nt, Artificial Sequence; identical to SEQ ID NO: 204513
  derived and/or modified CDS sequence (opt5) from hemagglutinin__InfluenzaA__ALE31644

SEQ ID NO: 205251 - RNA, 1701 nt, Artificial Sequence; identical to SEQ ID NO: 204513
  derived and/or modified CDS sequence (opt5) from hemagglutinin__InfluenzaA__ALE31645

SEQ ID NO: 205252 - RNA, 1701 nt, Artificial Sequence; identical to SEQ ID NO: 204513
  derived and/or modified CDS sequence (opt5) from hemagglutinin__InfluenzaA__ALE31646

SEQ ID NO: 205253 - RNA, 1701 nt, Artificial Sequence; identical to SEQ ID NO: 205070
  derived and/or modified CDS sequence (opt5) from hemagglutinin__InfluenzaA__ALE31647

SEQ ID NO: 205254 - RNA, 1701 nt, Artificial Sequence
  derived and/or modified CDS sequence (opt5) from hemagglutinin__InfluenzaA__ALE31648
augaagaccaucauugcccugagcuacauccucugccugguguucgcucagaaaauucccggcaacgacaauuccacagccacgcuuugucuggggcaccaugcggucccuaacggaaccaucguuaagacaauuaccaaugauagaaucgaggugacaaacgcuaccgaacucgugcaaaauucuagcaucggcgagauuugcgacuccccgcaccagauccuggauggggaaaacuguacacuuauugacgcccugcucggagauccccagugcgacggcuuucagaauaaaaagugggaucuguucgucgagcggucuaaagccuauagcaacuguuacccuuaugacgugcccgauuacgcuucccugcgcucucucguugccagcuccgggacccuggaauuuaauaacgagagcuucaauuggacgggagugacccaaaacggcacaucuuccgcuugcaucagacggucuagcuccagcuuuuucucucgccuuaauuggcugacccaucucaacuauacauacccugcccugaaugucaccaugcccaacaacgagcaguuugacaaacuuuauauuuggggcgugcaccauccugggacggauaaggaccagaucuuccuguacgcgcagccguccggaagaauuacaguuagcaccaagcggucccaacaggccgugauccccaauaucggcucucgcccucggauuagagauauccccagccgcauuuccaucuacuggacaauugucaagccuggggacauccuccugaucaacagcaccggaaaucugauugcucccagaggcuauuuuaaaauccggucugggaaguccagcauuaugcgcucugacgccccgaucggaaaauguaagagcgaaugcauuaccccuaacggcuccauccccaaugauaagccuuuccagaacgugaauagaaucacauacggcgcuuguccccgguaugugaaacacucuacgcucaagcuggccaccgggaugcgcaacguccccgagaaacagacaagaggaauuuuuggcgcgaucgccggguucauugaaaauggaugggagggcaugguugacgggugguacggauuucggcaccaaaacagcgagggcagaggccaggcugccgaucuuaaguccacccaggcugccacagaccaaaucaaugggaaacugaaccgccucauuggaaagaccaaugaaaaauuccaucagaucgagaaggaguucagcgaaguggaaggccggauucaggaucuggagaaguauguggaggacacgaaaaucgaucuuuggucuuacaacgccgaacugcucgucgcucuggagaaucagcacacaaucgaccugaccgauuccgaaaugaacaagcucuuugagaaaaccaagaaacaacugagagaaaacgcggaggacauggggaauggaugcuucaagauuuaucauaagugugauaacgccugcaucggcagcauucgcaaugggacauacgaccacaacguguaccgggacgaggcucuuaauaacagauuucagaucaaaggcguugaacugaagucuggauauaaagauuggauucucuggaucuccuucgccaucagcugcuuucugcuuuguguggcccugcucggcuucauuaugugggcuugccagaaggggaauauccgcuguaacauuugcaucuga

SEQ ID NO: 205255 - RNA, 1701 nt, Artificial Sequence; identical to SEQ ID NO: 204513
  derived and/or modified CDS sequence (opt5) from hemagglutinin__InfluenzaA__ALE31649

SEQ ID NO: 205256 - RNA, 1701 nt, Artificial Sequence; identical to SEQ ID NO: 205070
  derived and/or modified CDS sequence (opt5) from hemagglutinin__InfluenzaA__ALE31650

SEQ ID NO: 205257 - RNA, 1701 nt, Artificial Sequence
  derived and/or modified CDS sequence (opt5) from hemagglutinin__InfluenzaA__ALE31652
augaagaccaucauugcccugagcuacauccucugccugguguucgcucagaaaauucccggcaacgacaauuccacagccacgcuuugucuggggcaccaugcggucccuaacggaaccaucguuaagacaauuaccaaugauagaaucgaggugacaaacgcuaccgaacucgugcaaaauucuagcaucggcgagauuugcgacuccccgcaccagauccuggauggggaaaacuguacacuuauugacgcccugcucggagauccccagugcgacggcuuucagaauaaaaagugggaucuguucgucgagcggucuaaagccuauagcaacuguuacccuuaugacgugcccgauuacgcuucccugcgcucucucguugccagcuccgggacccuggaauuuaauaacgagagcuucaauuggacgggagugacccaaaacggcacaucuuccgcuugcaucagacggucuagcuccagcuuuuucucucgccuuaauuggcugacccaucucaacuauaaguacccugcccugaaugucacaaugcccaacaacgagcaguuugacaaacuuuauauuuggggcgugcaccauccugggaccgauaaagaccagaucucccuguacgcgcagagcuccggaagaauuacgguuucuacaaagcggagccaacaggccgugaucccgaauaucggcucccgcccccggauuagagauaucccuagccgcauuucuaucuacuggaccauugucaaacccggggacauccuccugaucaacuccacaggaaaucugauugcuccuagaggcuauuucaagauccggagcgggaaaucuagcauuaugcgcuccgacgcccccaucggaaaguguaagucugaaugcauuaccccgaacggcagcaucccuaaugauaaacccuuucagaacgugaauagaaucaccuacggcgcuuguccucgguaugugaagcacuccacacucaaacuggccacggggaugcgcaacguccccgagaagcagaccagaggaauuuucggcgcgaucgccggguuuauugaaaauggaugggagggcaugguugacgggugguacggauuccggcaccaaaacagcgagggcagaggccaggcugccgaucuuaaaucuacacaggcugccaucgaccaaauuaaugggaagcugaaccgccucaucggaaaaaccaaugaaaaguuucaucagauugagaaggaguucuccgaaguggaaggccggauccaggaucuggagaaauauguggaggacacaaagaucgaucuuuggagcuacaacgccgaacugcucgucgcucuggagaaucagcacaccauugaccugacggauucugaaaugaacaaacucuucgagaagacaaagaagcaacugagagaaaacgcggaggacauggggaauggaugcuuuaagaucuaucauaaaugugauaacgccugcauuggcuccauccgcaaugggaccuacgaccacaacguguaccgggacgaggcucuuaauaacagauuccagauuaagggcguugaacugaaaagcggauauaaggauuggauccucuggaucuccuuugccauuucuugcuuccugcuuuguguggcccugcucggcuuuaucaugugggcuugccagaaagggaauauucgcuguaacaucugcauuuga

SEQ ID NO: 205258 - RNA, 1701 nt, Artificial Sequence; identical to SEQ ID NO: 205164
  derived and/or modified CDS sequence (opt5) from hemagglutinin__InfluenzaA__ALE31653

SEQ ID NO: 205259 - RNA, 1701 nt, Artificial Sequence; identical to SEQ ID NO: 204513
  derived and/or modified CDS sequence (opt5) from hemagglutinin__InfluenzaA__ALE31654

SEQ ID NO: 205260 - RNA, 1701 nt, Artificial Sequence; identical to SEQ ID NO: 204513
  derived and/or modified CDS sequence (opt5) from hemagglutinin__InfluenzaA__ALE31655

SEQ ID NO: 205261 - RNA, 1701 nt, Artificial Sequence
  derived and/or modified CDS sequence (opt5) from hemagglutinin__InfluenzaA__ALE31656
augaagaccaucauugcccugagcuacauccucugccugguguucgcucagaaaauucccggcaacgacaauuccacagccacgcuuugucuggggcaccaugcggucccuaacggaaccaucguuaagacaauuaccaaugauagaaucgaggugacaaacgcuaccgaacucgugcaaaauucuagcaucggcgagauuugcgacuccccgcaccagauccuggauggggaaaacuguacacuuauugacgcccugcucggagauccccagugcgacggcuuucagaauaaaaagugggauaucuucgucgagcggucuaaagccuauagcaacuguuacccuuaugacgugcccgauuacgcuucccugcgcucucugguugccagcuccgggacccucgaauuuaauaacgagagcuucaauuggacgggagugacccaaaacggcacaucuuccgcuugcauuagacggagcagcuccagcuuuuucucucgccugaauuggcuuacccaucugaacuauacauacccugcccucaaugucaccaugcccaacaacgagcaguuugacaagcuguauaucuggggcgugcaccauccugggacggauaaggaccagauuuuccuuuacgcgcaguccagcggaagaaucacaguuuccaccaaacggucucaacaggccgugaucccgaauauuggcagccgccccagaauccgggauauuccuucccgcaucagcauuuacuggacaaucgucaagcccggggacauccugcucauuaacucuaccggaaaucugaucgcuccuagaggcuauuuuaaaauucgguccgggaagucuucuaucaugcgcagcgacgcccccauuggaaaauguaaguccgaaugcaucaccccgaacggcucuaucccuaaugauaagcccuuccagaacgugaauagaauuacauacggcgcuuguccucgguaugugaaacacagcacgcugaagcucgccaccgggaugcgcaacguccccgagaaacagacaagaggaaucuuuggcgcgauugccggguucaucgaaaauggaugggagggcaugauggacgggugguacggauuucggcaccaaaacuccgagggcagaggccaggcugccgaucuuaagagcacccaggcugccauugaccaaaucaaugggaaacugaaccgccugauuggaaagacaaaugaaaaauuccaucagaucgagaaggaguucucugaaguugaaggccggauccaggaucucgagaaguauguggaggacaccaaaauugaucugugguccuacaacgccgaacuucugguggcucucgagaaucagcacacgaucgaccugacagauagcgaaaugaacaagcuguuugagaaaaccaagaaacaacucagagaaaacgcggaggacauggggaauggaugcuucaagauuuaucauaagugugauaacgccugcaucggcucuauucgcaaugggaccuacgaccacaacgucuaccgggacgaggcucugaauaacagauuucagaucaaaggcguggaacuuaaguccggauauaaagauuggauccuguggauuagcuucgccaucuccugcuuucuccuguguguugcccuucugggcuucauuaugugggcuugccagaaggggaauauccgcuguaacauuugcaucuga

SEQ ID NO: 205262 - RNA, 1701 nt, Artificial Sequence
  derived and/or modified CDS sequence (opt5) from hemagglutinin__InfluenzaA__ALE31657
augaagaccaucauugcccugagcuacauccucugccugguguccgcucagaaaauucccggcaacgacaauucuacagccacgcuuugucuggggcaccaugcggucccuaacggaaccaucguuaagacaauuaccaaugauagaaucgaggugacaaacgcuaccgaacucgugcaaaauagcuccaucggcgagauuugcgacucuccgcaccagauccuggauggggaaaacuguacacuuauugacgcccugcucggagauccccagugcgacggcuuccagaauaaaaagugggaucuguuugucgagcggagcaaagccuauuccaacuguuacccuuaugacgugcccgauuacgcuucucugcgcagccucguugccuccagcgggacccuggaguucaauaacgaaucuuuuaauuggacgggagugacccaaaacggcacauccagcgcuugcaucagacggucuuccagcucuuucuuuucccgccuuaauuggcugacccaucucaacuauacauacccugcccugaaugucaccaugcccaacaacgagcaguucgacaagcuguauauuuggggcgugcaccauccugggacggauaaggaccagaucuuucuguacgcgcagagcuccggaagaauuacaguuucuaccaaacggagccaacaggccgugaucccgaauaucggcucccgcccccggauuagagauaucccuagccgcauuucuaucuacuggacaauugucaagcccggggacauccuccugaucaacuccaccggaaaucugauugcuccuagaggcuauuucaaaauccggagcgggaagucuagcauuaugcgcuccgacgcccccaucggaaaauguaagucugaaugcauuaccccgaacggcagcaucccuaaugauaagcccuuucagaacgugaauagaaucacauacggcgcuuguccucgguaugugaaacacuccacgcucaagcuggccaccgggaugcgcaacguccccgagaaacagacaagaggaauuuucggcgcgaucgccggguuuauugaaaauggaugggagggcaugguugacgggugguacggauuccggcaccaaaacagcgagggcagaggccaggcugccgaucuuaagucuacccaggcugccaucgaccaaauuaaugggaaacugaaccgccucaucggaaagacaaaugaaaaauuucaucagauugagaaggaguucuccgaaguggaaggccggauccaggaucuggagaaguauguggaggacaccaaaaucgaucuuuggagcuacaacgccgaacugcucgucgcucuggagaaucagcacacgauugaccugacagauucugaaaugaacaaacucuucgagaagaccaagaaacaacugagagaaaacgcggaggacauggggaauggaugcuuuaagaucuaucauaagugugauaacgccugcauuggcuccauccgcaaugggaccuacgaccacaacguguaccgggacgaggcucuuaauaacagauuccagauuaaaggcguugaacuuaagagcggauauaaagauuggauccucuggaucuccuuugccauuucuugcuuccugcuuuguguggcccugcucggcuuuaucaugugggcuugccagaaggggaauauucgcuguaacaucugcauuuga

SEQ ID NO: 205263 - RNA, 1701 nt, Artificial Sequence; identical to SEQ ID NO: 204513
  derived and/or modified CDS sequence (opt5) from hemagglutinin__InfluenzaA__ALE31658

SEQ ID NO: 205264 - RNA, 1701 nt, Artificial Sequence; identical to SEQ ID NO: 205128
  derived and/or modified CDS sequence (opt5) from hemagglutinin__InfluenzaA__ALE31659

SEQ ID NO: 205265 - RNA, 1701 nt, Artificial Sequence; identical to SEQ ID NO: 205057
  derived and/or modified CDS sequence (opt5) from hemagglutinin__InfluenzaA__ALE31660

SEQ ID NO: 205266 - RNA, 1701 nt, Artificial Sequence
  derived and/or modified CDS sequence (opt5) from hemagglutinin__InfluenzaA__ALE31661
augaagaccaucauugcccugagcuacauccucugccugguguucgcucagaaaauucccggcaacgacaauuccacagccacgcuuugucuggggcaccaugcggucccuaacggaaccaucguuaagacaauuaccaaugauagaaucgaggugacaaacgcuaccgaacucgugcaaaauucuagcaucggcgagauuugcgacuccccgcaccagauccuggauggggaaaacuguacacuuauugacgcccugcucggagauccccagugcgacggcuuucagaauaaaaagugggaucuguucgucgagcggucuaaagccuauagcaacuguuacccuuaugacgugcccgauuacgcuucccugcgcucucucguugccagcuccgggacccuggaauuuaauaacgagagcuucaauuggacgggagugacccaaaacggcacaucuuccgcuugcaucagacggucuagcuccagcuuuuucucucgccuuaauuggcugacccaucucaacuauacauacccugcccugaaugucaccaugcccaacaacgagcaguuugacaaacuuuauauuuggggcgugcaccauccugggacggauaaggaccagaucuuccuguacgcgcaguccagcggaagaauuacaguuuccaccaagaagucucaacaggccgugaucccgaauaucggcagccggccccgcauuagagauaucccuucccggauuagcaucuacuggacaauugucaaacccggggacauccuccugaucaacucuaccggaaaucugauugcuccucgcggcuauuuuaagaucagauccgggaaaagcucuauuaugcggagcgacgcccccaucggaaaguguaaguccgaaugcauuaccccgaacggcucuaucccuaaugauaaacccuuccagaacgugaaucgcaucacauacggcgcuuguccuagauaugugaagcacagcacgcucaaacuggccaccgggaugcggaacguccccgagaagcagacacgcggaauuuuuggcgcgaucgccggguucauugaaaauggaugggagggcaugguugacgggugguacggauuuagacaccaaaacuccgagggccggggccaggcugccgaucuuaaaagcacccaggcugccaucgaccaaauuaaugggaagcugaacagacucaucggaaaaacaaaugaaaaguuccaucagauugagaaggaguucucugaaguggaaggccgcauccaggaucuggagaaauauguggaggacaccaagaucgaucuuugguccuacaacgccgaacugcucgucgcucuggagaaucagcacacgauugaccugacagauagcgaaaugaacaaacucuuugagaagaccaaaaagcaacugcgggaaaacgcggaggacauggggaauggaugcuucaagaucuaucauaaaugugauaacgccugcauuggcucuaucagaaaugggaccuacgaccacaacguguaccgcgacgaggcucuuaauaaccgguuucagauuaagggcguugaacugaaauccggauauaaggauuggauccucuggaucagcuucgccauuuccugcuuucugcuuuguguggcccugcucggcuucaucaugugggcuugccagaaagggaauauuagauguaacaucugcauuuga

SEQ ID NO: 205267 - RNA, 1701 nt, Artificial Sequence
  derived and/or modified CDS sequence (opt5) from hemagglutinin__InfluenzaA__ALE31662
augaagaccaucauugcccugagcuacauccucugccugguguucgcucagaaaauucccggcaacgacaauuccacagccacgcuuugucuggggcaccaugcggucccuaacggaaccaucguuaagacaauugcuaaugauagaaucgaggugaccaacgccacagaacucgugcaaaauucuagcaucggcgagauuugcgacuccccgcaccagauccuggauggggaaaacuguacccuuauugacgcccugcucggagauccccagugcgacggcuuucagaauaaaaagugggaucuguucgucgagcggucuaaggcuuauagcaacuguuacccuuaugacgugcccgauuacgccucccugcgcucucucguugcuagcuccgggacacuggaauuuaauaacgagagcuucaauuggaccggagugacgcaaaacggcaccucuuccgccugcaucagacggucuagcuccagcuuuuucucucgccuuaauuggcugacacaucucaacuauaccuacccugcgcugaaugucacaaugcccaacaacgagcaguuugacaaacuuuauauuuggggcgugcaccauccugggaccgauaaggaccagaucuuccuguacgcccaguccagcggaagaauuacgguuuccacaaaaggcucucaacaggcugugaucccgaauaucgggagccggccccgcauuagagauaucccuucccggauuagcaucuacuggaccauugucaagcccggagacauccuccugaucaacucuacaggcaaucugauugccccucgcggguauuuuaaaaucagauccggaaagagcucuauuaugcggagcgacgcucccaucggcaaauguaaguccgaaugcauuaccccgaacggcucuaucccuaaugauaagcccuuccagaacgugaaucgcaucaccuacggggccuguccuagauaugugaaacacagcacacucaagcuggcgacgggaaugcggaacguccccgagaaacagacccgcggcauuuuuggggccaucgcuggauucauugaaaauggcugggaggggaugguugacggaugguacggcuuuagacaccaaaacuccgagggccgggggcaggccgcugaucuuaagagcacacaggccgccaucgaccaaauuaauggaaaacugaacagacucaucggcaagaccaaugaaaaauuccaucagauugagaaggaguucucugaaguggaagggcgcauccaggaucuggagaaguauguggaggacacaaaaaucgaucuuugguccuacaacgcugaacugcucgucgcgcuggagaaucagcacaccauugaccugacggauagcgaaaugaacaagcucuuugagaaaacaaagaaacaacugcgggaaaacgccgaggacaugggaaauggcugcuucaagaucuaucauaagugugauaacgcuugcauugggucuaucagaaauggcaccuacgaccacaacguguaccgcgacgaggcccuuaauaaccgguuucagauuaaaggaguugaacugaaguccggcuauaaagauuggauccucuggaucagcuucgccauuuccugccugcuucuguguguggcucuccugggguuuaucaugugggccugccagaagggaaauauuagauguaacaucugcauuuga

SEQ ID NO: 205268 - RNA, 1701 nt, Artificial Sequence; identical to SEQ ID NO: 204499
  derived and/or modified CDS sequence (opt5) from hemagglutinin__InfluenzaA__ALE31663

SEQ ID NO: 205269 - RNA, 1701 nt, Artificial Sequence
  derived and/or modified CDS sequence (opt5) from hemagglutinin__InfluenzaA__ALE31666
augaagaccaucauugcccugagcuacauccucugccugguguucgcucagaaaauucccggcaacgacaauuccacagccacgcuuugucuggggcaccaugcggucccuaacggaaccaucguuaagacaauuaccaaugauagaaucgaggugacaaacgcuaccgaacucgugcaaaauucuagcaucggcgagauuugcgacuccccgcaccagauccuggauggggaaaacuguacacuuauugacgcccugcucggagauccccagugcgacggcuuucagaauaaaaagugggaucuguucgucgagcggucuaaagccuauagcaacuguuacccuuaugacgugcccgauuacgcuucccugcgcucucucguugccagcuccgggacccuggaauuuaauaacgagagcuucaauuggacgggagugacccaaaacggcacaucuuccgcuugcaucagaaaguccucuuccagcuuuuucucucggcuuaauuggcugacccaucucaaguauacauacccugcccugaacgucaccaugcccaauaacgagcaguuugacaaacuuuauauuuggggcgugcaccauccugggacggauaaggaccagaucuuccuguacgcgcgcuccagcggaagaauuacaguuuccaccaaacggucucagcaagccgugaucccgaacaucggcagccgcccccggauuagagauaucccuucccgcauuagcaucuacuggacaauugucaagcccggggacauccuccugaucaauucuaccggaaaccugauugcuccuagaggcuauuuuaaaauccgguccggaaagagcucuauuaugcgcagcgacgcccccaucgggaaguguaaauccgaaugcauuaccccgaauggcucuaucccuaacgauaagcccuuccagaaugugaacagaaucacauacggcgcuuguccucgguaugugaaacacagcacgcucaagcuggccaccgggaugcgcaauguccccgagaaacagacaagaggaauuuuuggcgcgaucgccggguucauugaaaacggaugggagggcaugguugacgggugguacggauuucggcaccagaauagcgagggcagaggccaagcugccgaucuuaagagcacccaggcugccaucgaccagauuaacgggaaacugaaucgccucaucggaaagacaaacgaaaaguuccaucaaauugagaaagaguucucugaaguggaaggccggauccaggaucuggagaaguauguggaggacaccaaaaucgaucuuugguccuacaaugccgaacugcucgucgcucuggagaaccagcacacgauugaccugacagauagcgaaaugaauaagcucuuugagaaaaccaagaagcagcugagagaaaacgcggaggacauggggaacggaugcuucaaaaucuaucauaagugugauaaugccugcauuggcucuauccgcaacgggaccuacgaccacaauguguaccgggacgaggcucuuaacaauagauuucaaauuaaaggcguugaacugaaguccggauauaaagauuggauccucuggaucagcuucgccauuuccugcuuucugcuuuguguggcccugcucggcuucaucaugugggcuugccagaaggggaacauucgcuguaauaucugcauuuga

SEQ ID NO: 205270 - RNA, 1701 nt, Artificial Sequence
  derived and/or modified CDS sequence (opt5) from hemagglutinin__InfluenzaA__ALE31667
augaagaccaucauugcccugagcuacauccucugccugguguucgcucagaaaauucccggcaacgacaauuccacagccacgcuuugucuggggcaccaugcgguccucaacggaaccaucguuaagacaauuaccaaugauagaaucgaggugacaaacgcuaccgaacuggugcaaaauucuagcaucggcgagauuugcgacuccccucaccagauccuugauggggaaaacuguacacugauugacgcccuccugggagauccgcagugcgacggcuuucagaauaaaaagugggaucuguucgucgagcggucuaaagccuauagcaacuguuaccccuaugacgugccugauuacgcuucccuccgcucucugguugccagcuccgggacccuugaauuuaauaacgagagcuucaauuggacgggagugacccaaaacggcacaucuuccgcuugcaucagaaagucuagcuccagcuuuuucucucggcugaauuggcucacccaucugaacuauacauaccccgcccuuaaugucaccaugccuaacaacgagcaguuugacaagcuguauauuuggggcgugcaccaucccgggacggauaaagaccagaucuuccucuacgcgcgcuccagcggaagaauuacaguuuccaccaagcggucucagcaagccgugaucccuaauaucggcagccgcccgcggauuagagauauccccucccgcauuagcaucuacuggacaauugucaaaccuggggacauccugcugaucaacucuaccggaaaucucauugcucccagaggcuauuuuaagauccgguccgggaaaagcucuauuaugcgcagcgacgccccuaucggaaaguguaaguccgaaugcauuacccccaacggcucuaucccgaaugauaaaccuuuccagaacgugaauagaaucacauacggcgcuuguccccgguaugugaagcacagcacgcugaaacuugccaccgggaugcgcaacgucccugagaagcagacaagaggaauuuuuggcgcgaucgccggguucauugaaaauggaugggagggcaugguugacgggugguacggauuucggcaccagaacuccgagggcagaggccaagcugccgaucugaaaagcacccaggcugccaucgaccagauuaaugggaagcucaaccgccugaucggaaaaacaaaugaaaaguuccaucaaauugagaaggaguucucugaaguggaaggccggauccaggaucuugagaaauauguggaggacaccaagaucgaucugugguccuacaacgccgaacuccuggucgcucuggagaaucagcacacgauugaccucacagauagcgaaaugaacaaacuguuugagaagaccaaaaagcagcuuagagaaaacgcggaggacauggggaauggaugcuucaagaucuaucauaaaugugauaacgccugcauuggcucuauccgcaaugggaccuacgaccacaacguguaccgggacgaggcucugaauaacagauuucaaauuaagggcguugaacucaaauccggauauaaggauuggauccuguggaucagcuucgccauuuccugcuuucuucuguguguggcccuccugggcuucaucaugugggcuugccagaaagggaauauucgcuguaacaucugcauuuga

SEQ ID NO: 205271 - RNA, 1701 nt, Artificial Sequence; identical to SEQ ID NO: 204513
  derived and/or modified CDS sequence (opt5) from hemagglutinin__InfluenzaA__ALE31668

SEQ ID NO: 205272 - RNA, 1701 nt, Artificial Sequence; identical to SEQ ID NO: 204513
  derived and/or modified CDS sequence (opt5) from hemagglutinin__InfluenzaA__ALE31669

SEQ ID NO: 205273 - RNA, 1701 nt, Artificial Sequence
  derived and/or modified CDS sequence (opt5) from hemagglutinin__InfluenzaA__ALE31670
augaagaccaucauugcccugagcuacauccucugccugguguucgcucagaaacuucccgagaacgacaauuccacagccacgcugugucucggccaccaugcggucccuaacgggaccauuguuaagacaaucaccucugauagaauugaagugacaaaugcuaccgagcuggugcaaaacagcuccaucggagaaaucugcgacucuccgcaccagauucuugauggcaaaaauuguacacugaucgacgcccuccugggggauccccagugcgacggauuucagaacaagaaaugggaucuguucgucgagcggagcaaggccuauuccaauuguuacccuuaugacgugcccgauuacgcuucucuccgcagccugguugccuccagcggcacccuugaauuuaacgacgagucuuucaauugggcuggggugacgcaaaacggaaccuccagcgccugcauuagaggcucuaauuccagcuuuuucucucggcugaacuggcucacacauuccaauuuuaaguauccugcgcugaacgucaccaugcccaauaacgagcaguucgauaaacuuuacaucuggggcgugcaccauccugggacagacaaggaucagauuuuucuguaugcccagagcuccggacgcaucaccguuucuacgaaaagaagccaacaggcugugauuccgaacaucggcucccggccccgcaucagaaauauuccuagccggaucucuauuuacuggacaaucgucaagcccggggacauucuccugaucaacuccaccggaaaucugaucgccccucgcggcuacuucaaaauuagaagcgggaagucuagcaucaugcgguccgacgcucccauuggaaaguguaaaucugaaugcaucacaccgaacggcagcauuccuaaugauaagcccuuucagaacgugaaucgcaucaccuauggcgccuguccuagauacgugaaacaguccacccucaagcuggcgacagggaugcggaacguccccgagaaacaaacgcgcggaaucuucggcgccauugcuggguuuaucgaaaauggaugggagggcaugaaggacgggugguauggauucagacaccagaacagcgagggccggggccaggccgcugaucuuaaaucuacccaagccgccauugaccagaucaaugggaagcugaacagacucauuggaaagacaaaugaaaaauuccaccagaucgagaaggaauuuuccgagguugaaggccgcauucaggaucuggagaaauacguggaggacaccaagaucgaucuuuggagcuauaacgcugaacugcucguggcgcuggagaaucaacauacaaucgaccugaccgauucugaaaugaacaaacucuucgagaagacgaagaaacagaugcgggaaaacgccgaggacauggggaauggaugcuuuaagauuuaccacaaaugugauaacgcuugcaucggcuccauuagaaaugggacauaugaccaugacgucuaccgcgaugaggcccugaacaaucgguuccagaucaagggcguggaacuuaaaagcggauacaaggacuggauucuguggaucuccuuugccaucucuugcuuccuccuguguguugcccuucugggcuuuauuaugugggcuugccagaaggggaacaucagauguaauauuugcaucuga

SEQ ID NO: 205274 - RNA, 1701 nt, Artificial Sequence; identical to SEQ ID NO: 204513
  derived and/or modified CDS sequence (opt5) from hemagglutinin__InfluenzaA__ALE31671

SEQ ID NO: 205275 - RNA, 1701 nt, Artificial Sequence; identical to SEQ ID NO: 204513
  derived and/or modified CDS sequence (opt5) from hemagglutinin__InfluenzaA__ALE31672

SEQ ID NO: 205276 - RNA, 1701 nt, Artificial Sequence; identical to SEQ ID NO: 205070
  derived and/or modified CDS sequence (opt5) from hemagglutinin__InfluenzaA__ALE31673

SEQ ID NO: 205277 - RNA, 1701 nt, Artificial Sequence
  derived and/or modified CDS sequence (opt5) from hemagglutinin__InfluenzaA__ALE31674
augaagaccaucauugcccugagcuacauccucugccugguguucgcucagaaaauucccggcaacgacaauuccacagccacgcuuugucuggggcaccaugcggucccuaacggaaccaucguuaagacaauuaccaaugauagaaucgaggugacaaacgcuaccgaacucgugcaaaauucuagcaucggcgagauuugcgacuccccgcaccagauccuggauggggaaaacuguacacuuauugacgcccugcucggagauccccagugcgacggcuuucagaauaaaaagugggaucuguucgucgagcggucuaaagccuauagcaacuguuacccuuaugacgugcccgauuacgcuucccugcgcucucucguugccagcuccgggacccuggaauuuaauaacgagagcuucaauuggacgggagugacccaaaacggcacaucuuccgcuugcaucagacggagcagcuccagcuuuuucucucgccuuaauuggcugacccaucucaacuauacauacccugcccugaaugucaccaugcccaacaacgagcaguuugacaaacuuuauauuuggggcgugcaccauccugggacggauaaggaccagaucuuccuguacgcgcacuccagcggaagaauuacaguuuccaccaagcggucucagcaagccgugaucccgaauaucggcagccgcccccggauuagagauaucccuucccgcauuagcaucuacuggacaauugucaagcccggggacauccuccugaucaacucuaccggaaaucugauugcuccuagaggcuauuuuaaaauccgguccgggaagucuucuauuaugcgcagcgacgcccccaucggaaaauguaaguccgaaugcauuaccccgaacggcucuaucccuaaugauaagcccuuccagaacgugaauagaaucacauacggcgcuuguccucgguaugugaaacacagcacgcucaagcuggccaccgggaugcgcaacguccccgagaaacagacaagaggaauuuuuggcgcgaucgccggguucauugaaaauggaugggagggcaugguugacgggugguacggauuucggcaucagaacuccgagggcagaggccaagcugccgaucuuaagagcacccaggcugccaucgaccagauuaaugggaaacugaaccgccucaucggaaagacaaaugaaaaauuccaccaaauugagaaggaguucucugaaguggaaggccggauccaggaucuggagaaguauguggaggacaccaaaaucgaucuuugguccuacaacgccgaacugcucgucgcucuggagaaucagcauacgauugaccugacagauagcgaaaugaacaagcucuuugagaaaaccaagaaacagcugagagaaaacgcggaggacauggggaauggaugcuucaagaucuaucacaagugugauaacgccugcauuggcucuauccgcaaugggaccuacgaccacaacguguaccgggacgaggcucuuaauaacagauuucaaauuaaaggcguugaacugaaguccggauauaaagauuggauccucuggaucagcuucgccauuuccugcuuucugcuuuguguggcccugcucggcuucaucaugugggcuugccagaaggggaauauucgcuguaacaucugcauuuga

SEQ ID NO: 205278 - RNA, 1701 nt, Artificial Sequence
  derived and/or modified CDS sequence (opt5) from hemagglutinin__InfluenzaA__ALE31675
augaagaccaucauugcccugagcuacauccucugccugguguucgcucagaaaauucccggcaacgacaauuccacagccacgcuuugucuggggcaccaugcggucccuaacggaaccaucguuaagacaauuaccaaugauagaaucgaggugacaaacgcuaccgaacucgugcaaaauucuagcaucggcgagauuugcaacuccccgcaccagauccuggacggggaaaauuguacacuuauugaugcccugcucggagacccccagugcgauggcuuucagaacaaaaagugggaccuguucgucgagcggucuaaagccuauagcaauuguuacccuuaugaugugcccgacuacgcuucccugcgcucucucguugccagcuccgggacccuggaauuuaacaaugagagcuucaacuggacgggagugacccaaaauggcacaucuuccgcuugcaucagacggucuagcuccagcuuuuucucucgccuuaacuggcugacccaucucaauuauacauacccugcccugaacgucaccaugcccaacaaugagcaguuugauaaacuuuauauuuggggcgugcaccauccugggacggacaaggaucagaucuuccuguacgcgcaguccagcggaagaauuacaguuuccaccaagggcucucaacaggccgugaucccgaacaucgggagccggccccgcauuagagacaucccuucccggauuagcaucuacuggacaauugucaagcccggagauauccuccugaucaauucuaccggcaaccugauugcuccucgcggguauuuuaaaaucagauccggaaagagcucuauuaugcggagcgacgcccccaucggcaaauguaaguccgaaugcauuaccccgaauggcucuaucccuaacgacaagcccuuccagaaugugaaccgcaucacauacggggcuuguccuagauaugugaaacacagcacgcucaagcuggccaccggaaugcggaauguccccgagaaacagacacgcggcauuuuuggggcgaucgccggauucauugaaaacggcugggaggggaugguugauggaugguacggcuuuagacaccaaaauuccgagggccgggggcaggcugccgaccuuaagagcacccaggcugccaucgaucaaauuaacggaaaacugaauagacucaucggcaagacaaacgaaaaauuccaucagauugagaaggaguucucugaaguggaagggcgcauccaggaccuggagaaguauguggaggauaccaaaaucgaccuuugguccuacaaugccgaacugcucgucgcucuggagaaccagcacacgauugaucugacagacagcgaaaugaacaagcucuuugagaaaaccaagaaacaacugcgggaaaaugcggaggauaugggaaacggcugcuucaagaucuaucauaagugugacaaugccugcauugggucuaucagaaacggcaccuacgaucacaauguguaccgcgacgaggcucuuaacaaucgguuucagauuaaaggaguugaacugaaguccggcuauaaagacuggauccucuggaucagcuucgccauuuccugcuuucugcuuuguguggcccugcucggguucaucaugugggcuugccagaagggaaacauuagauguaauaucugcauuuga

SEQ ID NO: 205279 - RNA, 1701 nt, Artificial Sequence
  derived and/or modified CDS sequence (opt5) from hemagglutinin__InfluenzaA__ALE31676
augaagaccaucauugcccugagcuacauccucugccugguguucgcucagaaaauucccggcaacgacaauuccacagccacgcuuugucuggggcaccaugcggucccuaacggaaccaucguuaagacaauuaccaaugauagaaucgaggugacaaacgcuaccgaacucgugcaaaauucuagcaucggcgagauuugcgacuccccgcaccagauccuggauggggaaaacuguacacuuauugacgcccugcucggagauccccagugcgacggcuuucagaauaaaaagugggaucuguucgucgagcggucuaaagccuauagcaacuguuacccuuaugacgugcccgauuacgcuucccugcgcucucucguugccagcuccgggacccuggaauuuaauaacgagagcuucaauuggacgggagugacccaaaacggcacaucuuccgcuugcaucagacggucuagcuccagcuuuuucucucgccuuaauuggcugacccaucucaacuauacauacccugcccugaaugucaccaugcccaacaacgagcaguuugacaaacuuuauauuuggggcgugcaccauccugggacggauaaggaccagaucuuccuguacgcgcaguccagcggaagaauuacaguuuccaccaaacggucucaacaggccgugaucccgaauaucggcagccgccccaagauuagagauaucccuucccggauuagcaucuacuggacaauugucaaacccggggacauccuccugaucaacucuaccggaaaucugauugcuccucgcggcuauuuuaagauccucuccgggaaaagcucuauuaugagaagcgacgcccccaucggaaaguguaaguccgaaugcauuaccccgaacggcucuaucccuaaugauaaacccuuccagaacgugaaucggaucacauacggcgcuuguccucgcuaugugaagcacagcacgcugaaacuugccaccgggaugagaaacguccccgagaagcagacacggggaauuuuuggcgcgaucgccggguucauugaaaauggaugggagggcaugguugacgggugguacggauuucgccaccaaaacuccgagggcagaggccaggcugccgaucugaaaagcacccaggcugccaucgaccaaauuaaugggaagcucaaccggcugaucggaaaaacaaaugaaaaguuccaucagauugagaaggaguucucugaaguggaaggcagaauccaggaucuugagaaauauguggaggacuccaagaucgaucuguggagcuacaacgccgaacuccuggucgcucuggagaaucagcacaccauugaccucacggauucugaaaugaacaaacuguuugagaagacaaagaagcaacuucgcgaaaacgcggaggacauggggaauggaugcuucaagaucuaucauaaaugugauaacgccugcauuggcuccauccggaaugggaccuacgaccacaacguguacagagacgaggcucugaauaaccgcuuucagauuaagggcguugaacucaaaagcggauauaaggauuggauccuguggaucuccuucgccauuucuugcuuucuucuguguguggcccuccugggcuucaucaugugggcuugccagaaagggaauauucgguguaacaucugcauuuga

SEQ ID NO: 205280 - RNA, 1701 nt, Artificial Sequence; identical to SEQ ID NO: 205171
  derived and/or modified CDS sequence (opt5) from hemagglutinin__InfluenzaA__ALE31677

SEQ ID NO: 205281 - RNA, 1701 nt, Artificial Sequence; identical to SEQ ID NO: 204513
  derived and/or modified CDS sequence (opt5) from hemagglutinin__InfluenzaA__ALE31678

SEQ ID NO: 205282 - RNA, 1701 nt, Artificial Sequence; identical to SEQ ID NO: 204513
  derived and/or modified CDS sequence (opt5) from hemagglutinin__InfluenzaA__ALE31679

SEQ ID NO: 205283 - RNA, 1701 nt, Artificial Sequence; identical to SEQ ID NO: 205129
  derived and/or modified CDS sequence (opt5) from hemagglutinin__InfluenzaA__ALE31680

SEQ ID NO: 205284 - RNA, 1701 nt, Artificial Sequence; identical to SEQ ID NO: 205128
  derived and/or modified CDS sequence (opt5) from hemagglutinin__InfluenzaA__ALE31681

SEQ ID NO: 205285 - RNA, 1701 nt, Artificial Sequence; identical to SEQ ID NO: 204513
  derived and/or modified CDS sequence (opt5) from hemagglutinin__InfluenzaA__ALE31682

SEQ ID NO: 205286 - RNA, 1701 nt, Artificial Sequence; identical to SEQ ID NO: 204513
  derived and/or modified CDS sequence (opt5) from hemagglutinin__InfluenzaA__ALE31683

SEQ ID NO: 205287 - RNA, 1701 nt, Artificial Sequence; identical to SEQ ID NO: 204513
  derived and/or modified CDS sequence (opt5) from hemagglutinin__InfluenzaA__ALE31684

SEQ ID NO: 205288 - RNA, 1701 nt, Artificial Sequence; identical to SEQ ID NO: 204513
  derived and/or modified CDS sequence (opt5) from hemagglutinin__InfluenzaA__ALE31685

SEQ ID NO: 205289 - RNA, 1701 nt, Artificial Sequence; identical to SEQ ID NO: 204513
  derived and/or modified CDS sequence (opt5) from hemagglutinin__InfluenzaA__ALE31686

SEQ ID NO: 205290 - RNA, 1701 nt, Artificial Sequence
  derived and/or modified CDS sequence (opt5) from hemagglutinin__InfluenzaA__ALE31687
augaagaccaucauugcccugagcuacauccucugccugguguucgcucagaaaauucccggcaacgacaauuccacagccacgcuuugucuggggcaccaugcggucccuaacggaaccaucguuaagacaauuaccaaugauagaaucgaggugacaaacgcuaccgaacucgugcaaaauucuagcaucggcgagauuugcgacuccccgcaccagauccuggauggggaaaacuguacacuuauugacgcccugcucggagauccccagugcgacggcuuucagaauaaaaagugggaucuguucgucgagcggucuaaagccuauagcaacuguuacccuuaugacgugcccgauuacgcuucccugcgcucucucguugccagcuccgggacccuggaauuuaauaacgagagcuucaauuggacgggagugacccaaaacggcacaucuuccgcuugcaucagacggagcagcuccagcuuuuucucucgccuuaauuggcugacccaucucaacuauacauacccugcccugaaugucaccaugcccaacaacgagcaguuugacaaacuuuauauuuggggcgugcaccauccugggacggauaaggaccagaucuuccuguacgcgcaguccagcggaagaauuacaguuuccaccaagcggucucaacaggccgugaucccgaauaucggcagccgcccccggauuagagauaucccuucccgcauuagcaucuacuggacaauugucaagcccggggacauccuccugaucaacucuaccggaaaucugauugcuccuagaggcuauuuuaaaauccgguccgggaagucuucuauuaugcgcagcgacgcccccaucggaaaauguaaguccgaaugcauuaccccgaacggcucuaucccuaaugauaagcccuuccagaacgugaauagaaucacauacggcgcuuguccucgguaugugaaacacagcacgcucaagcuggccaccgggaugcgcaacguccccgagaaacagacaagaggaauuuuuggcgcgaucgccggguucauugaaaauggaugggagggcaugguugacgggugguacggauuucggcaccaaaacuccgagggcagaggccaggcugccgaucuuaagagcacccaggcugccaucgaccaaauuaaugggaaacugaaccgccucaucggaaagacaaaugaaaaauuccaucagauugagaaggaguucucugaaguggaaggccggauccaggaucuggagaaguauguggaggacaccaaaaucgaucuuugguccuacaacgccgaacugcucgucgcucuggagaaucagcacacgauugaccugacagauagcgaaaugaacaagcucuuugagaaaaccaagaaacaacugagagaaaacgcggaggacauggggaauggaugcuucaagaucuaucauaagugugauaacgccugcauugagucuauccgcaauggcaccuacgaccacaacguguaccgggacgaagcucuuaauaacagauuucagauuaaagggguugagcugaaguccggcuauaaagauuggauccucuggaucagcuucgccauuuccugcuuucugcuuuguguggcccugcucggauucaucaugugggcuugccagaagggcaauauucgcuguaacaucugcauuuga

SEQ ID NO: 205291 - RNA, 1701 nt, Artificial Sequence
  derived and/or modified CDS sequence (opt5) from hemagglutinin__InfluenzaA__ALE31688
augaagaccacaaucgcccugagcuacauucucugccugguguucgcucagaaacuucccgagaacgacaauuccacggccacccugugucucggccaccaugcggucccuaacgggacaaucguuaagaccauuacaucugauagaaucgaagugaccaaugcuacagagcuggugcaaaacagcuccauuggagaaaucugcgacucuccgcaccagauccuugauggcaaaaauuguacccugauugacgcccuccugggggauccccagugcgacggauuucagaacaagaaaugggaucuguucgucgagcggagcaaggccuauuccaauuguuacccuuaugacgugcccgauuacgcuucucuccgcagccugguugccuccagcggcacgcuugaauuuaacgacgagucuuucaauugggcuggggugacccaaaacggaacauccagcgccugcaucagaggcucuaauuccagcuuuuucucucggcugaacuggcucacccauuccaauuuuaaguauccugcgcugaacgucacaaugcccaauaacgagcaguucgauaaacuuuacauuuggggcgugcaccauccugggaccgacaaggaucagaucuuucuguaugcccagagcuccggacgcauuacgguuucuacaaaaagaagccaacaggcugugaucccgaacauuggcucccggccccgcaucagaaauaucccuagccggauuucuaucuacuggaccauugucaagcccggggacauccuccugauuaacuccacaggaaaucugaucgccccucgcggcuacuucaaaaucagaagcgggaagucuagcauuaugcgguccgacgcucccaucggaaaguguaaaucugaaugcauuaccccgaacggcagcaucccuaaugauaagcccuuucagaacgugaaucgcauuaccuauggcgccuguccuagauacgugaaacaguccacacucaagcuggcgacggggaugcggaacguccccgagaaacaaacccgcggaaucuucggcgccaucgcuggguuuauugaaaauggaugggagggcaugaaggacgggugguauggauucagacaccagaacagcgagggccggggccaggccgcugaucuuaaaucuacacaagccgccaucgaccagauuaaugggaagcugaacagacucaucggaaagaccaaugaaaaauuccaccagauugagaaggaauuuuccgagguugaaggccgcauccaggaucuggagaaauacguggaggacacaaagauugaucuuuggagcuauaacgcugaacugcucguggcgcuggagaaucaacauaccaucgaccugacggauucugaaaugaacaaacucuucgagaagacaaagaaacagcugcgggaaaacgccgaggacauggggaauggaugcuuuaagaucuaccacaaaugugauaacgcuugcauuggcuccaucagaaaugggaccuaugaccaugacgucuaccgcgaugaggcccuuaacaaucgguuccagauuaagggcguggaacugaaaagcggauacaaggacuggauccucuggauuuccuuugccaucucuugcuuccugcuuuguguugcucugcucggcuuuaucaugugggccugccagaaggggaacauuagauguaauaucugcauuuga

SEQ ID NO: 205292 - RNA, 1701 nt, Artificial Sequence; identical to SEQ ID NO: 204513
  derived and/or modified CDS sequence (opt5) from hemagglutinin__InfluenzaA__ALE31689

SEQ ID NO: 205293 - RNA, 1701 nt, Artificial Sequence
  derived and/or modified CDS sequence (opt5) from hemagglutinin__InfluenzaA__ALE31690
augaagaccaucauugcccugagcugcauccucugucugguguucgcucagaaacuucccggcaacgacaauuccacagccacgcugugccucgggcaccaugcggucccuaacggaaccauuguuaagacaaucaccaaugauagaauugaggugacaaacgcuaccgaacuggugcaaaauucuagcaucggcgagaucugugacuccccgcaccagauucuugauggggaaaacugcacacugaucgacgcccuccugggagauccccagugugacggcuuucagaauaaaaagugggaucuguucgucgagcggucuaaagccuacagcaacugcuauccuuacgacgugcccgauuaugcuucccuccgcucucugguugccagcuccgggacccuugaauuuaauaacgagagcuucaauugggcuggagugacgcaaaacggcaccucuuccagcuguauuagaggcucuaauuccagcuuuuucucucggcugaacuggcucacacaucuuaauuccaaguacccugcccugaacgucaccaugcccaacaaugagcaguuugacaagcuguauaucuggggagugcaccauccugggacagauaaagaccagauuuuccucuacgcgcagagcuccggccgcaucaccguuucuacgaagagaagccaacaggccgugauuccgaacaucgggucccggccccgcaucagagauauuccuagccggaucucuauuuauuggacaaucgucaaacccggagacauucugcugaucaauuccaccggcaaccucaucgcuccucgcggguacuuuaagauuagaagcggaaaaucuagcaucaugcgguccgacgcccccauuggcaagugcaagucugaauguaucacaccgaauggcagcauuccuaacgauaaacccuuccagaaugugaaccgcaucaccuacggggcuugcccuagauaugugaagcaguccacccugaaacuugccacaggaaugcggaauguccccgagcgccaaacgagaggcaucuuuggggcgauugccggauucaucgaaaacggcugggaggggaugguugacggaugguacggcuuucggcaccagaauagcgagggcagagggcaggcugccgaucugaagucuacccaagcugccauugaccagaucaacggaaaacucaaucgccugauuggcaagacaaacgaaaaauuccaccagaucgagaaggaguucuccgaaguggaagggcggauucaggaucuugagaaguauguggaggacaccaaaaucgaucuguggagcuacaaugccgaacuccuggucgcucuggagaaccaacauacaaucgaccucaccgauucugaaaugaacaagcuguuugagaaaacgaagaaacagcuuagagaaaaugcggaggacaugggaaacggcuguuucaagauuuaucacaagugcgauaaugccugcaucggguccauucgcaacggcacauacgaccauaauguguaucgggacgaggcucugaacaauagauuucagaucaaaggaguugaacucaagagcggcuacaaagauuggauucuguggaucuccuucgccaucucuuguuuucuucugugcguggcccuccugggguucauuaugugggcuugucagaagggaaacauccgcugcaauauuuguaucuga

SEQ ID NO: 205294 - RNA, 1701 nt, Artificial Sequence; identical to SEQ ID NO: 202066
  derived and/or modified CDS sequence (opt5) from hemagglutinin__InfluenzaA__ALE31691

SEQ ID NO: 205295 - RNA, 1701 nt, Artificial Sequence
  derived and/or modified CDS sequence (opt5) from hemagglutinin__InfluenzaA__ALE31692
augaagaccaucauugcccugagcuacauccucugccugguguucgcucagaaaauucccggcaacgacaauuccacagccacgcuuugucuggggcaccaugcggucccuaacggaaccaucguuaagacaauuaccaaugauagaaucgaggugacaaacgcuaccgaacucgugcaaaauucuagcaucggcgagauuugcgacuccccgcaccagauccuggauggggaaaacuguacacuuauugacgcccugcucggagauccccagugcgacggcuuucagaauaaaaagugggaucuguucgucgagcggucuaaagccuauagcaacuguuacccuuaugacgugcccgauuacgcuucccugcgcucucucguugccagcuccgggacccuggaauuuaauaacgagagcuucaauuggacgggagugacccaaaacggcacaucuuccgcuugcaucagaaagucuagcuccagcuuuuucucucggcuuaauuggcugacccaucucaacuauacauacccugcccugaaugucaccaugcccaacaacgagcaguuugacaaacuuuauauuuggggcgugcaccauccugggacggauaaggaccagaucuuccuguacgcgcgcuccagcggaagaauuacaguuuccaccaagcggucucagcaagccgugaucccgaauaucggcuaccgcccccggauuagagauaucccuagccgcauuuccaucuauuggacaauugucaaacccggggacauccuccugaucaacagcaccggaaaucugauugcuccuagaggcuacuuuaagauccggucugggaaauccagcauuaugcgcucugacgcccccaucggaaaguguaagagcgaaugcauuaccccgaacggcuccaucccuaaugauaaacccuuccagaacgugaauagaaucacauauggcgcuuguccucgguacgugaagcacucuacgcucaaacuggccaccgggaugcgcaacguccccgagaagcagacaagaggaauuuuuggcgcgaucgccggguucauugaaaauggaugggagggcaugguugacgggugguauggauuucggcaccagaacagcgagggcagaggccaagcugccgaucuuaaauccacccaggcugccaucgaccagauuaaugggaagcugaaccgccucaucggaaaaacaaaugaaaaguuccaucaaauugagaaggaguucagcgaaguggaaggccggauccaggaucuggagaaauacguggaggacaccaagaucgaucuuuggucuuauaacgccgaacugcucgucgcucuggagaaucagcacacgauugaccugacagauuccgaaaugaacaaacucuuugagaagaccaaaaagcagcugagagaaaacgcggaggacauggggaauggaugcuucaagaucuaccauaaaugugauaacgccugcauuggcagcauccgcaaugggaccuacgaccacaacguguaucgggacgaggcucuuaauaacagauuucaaauuaagggcguugaacugaaaucuggauacaaggauuggauccucuggaucuccuucgccauuagcugcuuucugcuuuguguggcccugcucggcuucaucaugugggcuugccagaaagggaauauucgcuguaacaucugcauuuga

SEQ ID NO: 205296 - RNA, 1701 nt, Artificial Sequence; identical to SEQ ID NO: 205295
  derived and/or modified CDS sequence (opt5) from hemagglutinin__InfluenzaA__ALE31693

SEQ ID NO: 205297 - RNA, 1701 nt, Artificial Sequence; identical to SEQ ID NO: 204513
  derived and/or modified CDS sequence (opt5) from hemagglutinin__InfluenzaA__ALE31694

SEQ ID NO: 205298 - RNA, 1701 nt, Artificial Sequence; identical to SEQ ID NO: 205295
  derived and/or modified CDS sequence (opt5) from hemagglutinin__InfluenzaA__ALE31695

SEQ ID NO: 205299 - RNA, 1701 nt, Artificial Sequence; identical to SEQ ID NO: 205171
  derived and/or modified CDS sequence (opt5) from hemagglutinin__InfluenzaA__ALE31696

SEQ ID NO: 205300 - RNA, 1701 nt, Artificial Sequence; identical to SEQ ID NO: 205295
  derived and/or modified CDS sequence (opt5) from hemagglutinin__InfluenzaA__ALE31697

SEQ ID NO: 205301 - RNA, 1701 nt, Artificial Sequence
  derived and/or modified CDS sequence (opt5) from hemagglutinin__InfluenzaA__ALE31698
augaagaccaucauugcccugagcuacauccucugcaugguguucgcucagaaaauucccggcaacgacaauuccacagccacgcugugucuugggcaccaugcggucccuaacggaaccaucguuaagacaauuaccaaugauagaaucgaggugacaaacgcuaccgaacuggugcaaaauucuagcaucggcgagauuugcgacuccccgcaccagauccucgauggggaaaacuguacacugauugacgcccuucugggagauccccagugcgacggcuuucagaauaaaaagugggaucucuucgucgagcggucuaaagccuauagcaacuguuacccuuaugacgugcccgauuacgcuucccugcgcucucugguugccagcuccgggacccucgaauuuaauaacgagagcuucaauuggacgggagugacccaaaacggcacaucuuccgcuugcaucagacggagcagcuccagcuuuuucucucgccugaauuggcuuacccaucugaacuauacauacccugcccucaaugucaccaugcccaacaacgagcaguuugacaagcuguauauuuggggcgugcaccauccugggacggauaaggaccagaucuuccuuuacgcgcaguccagcggaagaauuacaguuuccaccaaacggucucaacaggccgugaucccgaauaucggcagccgcccccggauuagagauaucccuucccgcauuagcaucuacuggacaauugucaagcccggggacauccugcucaucaacucuaccggaaaucugauugcuccuagaggcuauuuuaaaauccgguccgggaagucuucuauuaugcgcagcgacgcccccaucggaaaauguaaguccgaaugcauuaccccgaacggcucuaucccuaaugauaagcccuuccagaacgugaauagaaucacauacggcgcuuguccucgguaugugaaacacagcacgcugaagcucgccaccgggaugcgcaacguccccgagaaacagacaagaggaauuuuuggcgcgaucgccggguucauugaaaauggaugggagggcaugguugacgggugguacggauuucggcaccaaaacuccgagggcagaggccaggcugccgaucuuaagagcacccaggcugccaucgaccaaauuaaugggaaacugaaccgccugaucggaaagacaaaugaaaaauuccaucagauugagaaggaguucucugaaguggaaggccggauccaggaucucgagaaguauguggaggacaccaaaaucgaucugugguccuacaacgccgaacuucuggucgcucucgagaaucagcacacgauugaccugacagauagcgaaaugaacaagcuguuugagaaaaccaagaaacaacucagagaaaacgcggaggacauggggaauggaugcuucaagaucuaucauaagugugauaacgccugcauuggcucuauccgcaaugggaccuacgaccacaacguguaccgggacgaggcucugaauaacagauuucagauuaaaggcguugaacuuaaguccggauauaaagauuggauccuguggaucagcuucgccauuuccugcuuucuccuguguguggcccuucugggcuucaucaugugggcuugccagaaggggaauauucgcuguaacaucugcauuuga

SEQ ID NO: 205302 - RNA, 1701 nt, Artificial Sequence
  derived and/or modified CDS sequence (opt5) from hemagglutinin__InfluenzaA__ALE31699
augaagaccaucauugcccugagcuacauccucugccugguguucgcucagaaaauucccggcaacgacaauuccacagccacgcuuugucuggggcaccaugcggucccuaacggaaccaucguuaagacaauuaccaaugauagaaucgaggugacaaacgcuaccgaacucgugcaaaauucuagcaucggcgagauuugcgacuccccgcaccagauccuggauggggaaaacuguacacuuauugacgcccugcucggagauccccagugcgacggcuuucagaauaaaaagugggaucuguucgucgagcggucuaaagccuauagcaacuguuacccuuaugacgugcccaauuacgcuucccugcgcucucucguugccagcuccgggacccuggaauuuaacaaugagagcuucaacuggacgggagugacccaaaauggcacaucuuccgcuugcaucagacggagcagcuccagcuuuuucucucgccuuaacuggcugacccaucucaauuaugccuacccugcgcugaacgucacaaugcccaacaaugagcaguuugauaaacuuuauauuuggggcgugcaccauccugggaccgacaaggaucagaucuuccuguacgcccaguccagcggaagaauuacgguuuccacaaagcggucucaacaggcugugaucccgaacaucggcagccgcccccggauuagagacaucccuucccgcauuagcaucuacuggaccauugucaagcccggggauauccuccugaucaauucuacaggaaaccugauugccccuagaggcuauuuuaaaauccgguccgggaagucuucuauuaugcgcagcgacgcucccaucggaaaauguaaguccgaaugcauuaccccgaauggcucuaucccuaacgacaagcccuuccagaaugugaacagaaucaccuacggcgccuguccucgguaugugaaacacagcacacucaagcuggcgacggggaugcgcaauguccccgagaaacagaccagaggaauuuuuggcgccaucgcuggguucauugaaaacggaugggagggcaugguugaugggugguacggauuucggcaccaaaauuccgagggcagaggccaggccgcugaccuuaagagcacacaggccgccaucgaucaaauuaacgggaaacugaaucgccucaucggaaagaccaacgaaaaauuccaucagauugagaaggaguucucugaaguggaaggccggauccaggaccuggagaaguauguggaggauacaaaaaucgaccuuugguccuacaaugcugaacugcucgucgcgcuggagaaccagcacaccauugaucugacggacagcgaaaugaacaagcucuuugagaaaacaaagaaacaacugagagaaaaugccgaggauauggggaacggaugcuucaagaucuaucauaagugugacaaugcuugcauuggcucuauccgcaacgggaccuacgaucacaauguguaccgggacgaggcccuuaacaauagauuucagauuaaaggcguugaacugaaguccggauauaaagacuggauccucuggaucagcuucgccauuuccugcuuucugcuuuguguggcucugcucggcuucaucaugugggccugccagaaggggaacauucgcuguaauaucugcauuuga

SEQ ID NO: 205303 - RNA, 1701 nt, Artificial Sequence; identical to SEQ ID NO: 204513
  derived and/or modified CDS sequence (opt5) from hemagglutinin__InfluenzaA__ALE31700

SEQ ID NO: 205304 - RNA, 1701 nt, Artificial Sequence; identical to SEQ ID NO: 204513
  derived and/or modified CDS sequence (opt5) from hemagglutinin__InfluenzaA__ALE31701

SEQ ID NO: 205305 - RNA, 1701 nt, Artificial Sequence; identical to SEQ ID NO: 205070
  derived and/or modified CDS sequence (opt5) from hemagglutinin__InfluenzaA__ALE31702

SEQ ID NO: 205306 - RNA, 1701 nt, Artificial Sequence; identical to SEQ ID NO: 204513
  derived and/or modified CDS sequence (opt5) from hemagglutinin__InfluenzaA__ALE31703

SEQ ID NO: 205307 - RNA, 1701 nt, Artificial Sequence; identical to SEQ ID NO: 204513
  derived and/or modified CDS sequence (opt5) from hemagglutinin__InfluenzaA__ALE31704

SEQ ID NO: 205308 - RNA, 1701 nt, Artificial Sequence; identical to SEQ ID NO: 205070
  derived and/or modified CDS sequence (opt5) from hemagglutinin__InfluenzaA__ALE31705

SEQ ID NO: 205309 - RNA, 1701 nt, Artificial Sequence
  derived and/or modified CDS sequence (opt5) from hemagglutinin__InfluenzaA__ALE31706
augaagaccaucauugcccugagcuacauccucugccugguguucgcucagaaaauucccggcaacgacaauuccacagccacgcuuugucuggggcaccaugcggucccuaacggaaccaucguuaagacaauuaccaaugauagaaucgaggugacaaacgcuaccgaacucgugcaaaauucuagcaucggcgagauuugcgacuccccgcaccagauccuggauggggaaaacuguacacuuauugacgcccugcucggagauccccagugcgacggcuuucagaauaaaaagugggaucuguucgucgagcggucuaaagccuauagcaacuguuacccuuaugacgugcccgauuacgcuucccugcgcucucucguugccagcuccgggacccuggaauuuaauaacgagagcuucaauuggacgggagugacccaaaacggcacaucuuccgcuugcaucagacggucuagcuccagcuuuuucucucgccuuaauuggcugacccaucucaacuauacauacccugcccugaaugucaccaugcccaacaacgagcaguuugacaaacuuuauauuuggggcgugcaccauccugggacggauaaggaccagaucuuccuguacgcgcaguccagcggaagaauuacaguuuccaccaagggcucucaacaggccgugaucccgaauaucgggagccggccccgcauuagagauaucccuucccggauuagcaucuacuggacaauugucaagcccggagacauccuccugaucaacucuaccggcaaucugauugcuccucgcggguauuuuaaaaucagauccggaaagagcucuauuaugcggagcgacgcccccaucggcaaauguaaguccgaaugcauuaccccgaacggcucuaucccuaaugauaagcccuuccagaacgugaaucgcaucacauacggggcuuguccuagauaugugaaacacagcacgcucaagcuggccaccggaaugcggaacguccccgagaaacagacacgcggcauuuuuggggcgaucgccggauucauugaaaauggcugggaggggaugguugacggaugguacggcuuuagacaccaaaacuccgagggccgggggcaggcugccgaucuuaagagcacccaggcugccaucgaccaaauuaauggaaaacugaacagacucaucggcaagacaaaugaaaaauuccaucagauugagaaggaguucucugaaguggaagggcgcauccaggaucuggagaaguauguggaggacaccaaaaucgaucuuugguccuacaacgccgaacugcucgucgcucuggagaaucagcacacgauugaccugacagauagcgaaaugaacaagcucuuugagaaaaccaagaaacaacugcgggaaaacgcggaggacaugggaaauggcugcuucaagaucuaucauaagugugauaacgccugcauugggucuaucagaaauggcaccuacgaccacaacguguaccgcgacgaggcucuuaauaaccgguuucagauuaaaggaguugaacugaaguccggcuauaaagauuggauccucuggaucagcuucgccauuuccugccugcuucuguguguggcccuccugggguuuaucaugugggcuugccagaagggaaauauuagauguaacaucugcauuuga

SEQ ID NO: 205310 - RNA, 1701 nt, Artificial Sequence; identical to SEQ ID NO: 205199
  derived and/or modified CDS sequence (opt5) from hemagglutinin__InfluenzaA__ALE31707

SEQ ID NO: 205311 - RNA, 1701 nt, Artificial Sequence; identical to SEQ ID NO: 205199
  derived and/or modified CDS sequence (opt5) from hemagglutinin__InfluenzaA__ALE31708

SEQ ID NO: 205312 - RNA, 1701 nt, Artificial Sequence; identical to SEQ ID NO: 204499
  derived and/or modified CDS sequence (opt5) from hemagglutinin__InfluenzaA__ALE31709

SEQ ID NO: 205313 - RNA, 1701 nt, Artificial Sequence
  derived and/or modified CDS sequence (opt5) from hemagglutinin__InfluenzaA__ALE31710
augaagaccaucauugcccugagcuacauccucugccugguguucgcucagaaaauucccggcaacgacaauuccacagccacgcuuugucuggggcaccaugcggucccuaacggaaccaucguuaagacaauuaccaaugauagaaucgaggugacaaacgcuaccgaacucgugcaaaauucuagcaucggcgagauuugcgacuccccgcaccagauccuggauggggaaaacuguacacuuauugacgcccugcucggagauccccagugcgacggcuuucagaauaaaaagugggaucuguucgucgagcggucuaaagccuauagcaacuguuacccuuaugacgugcccgauuacgcuucccugcgcucucucguugccagcuccgggacccuggaauuuaauaacgagagcuucaauuggacgggagugacccaaaacggcacaucuuccgcuugcaucagacggagcagcuccagcuuuuucucucgccuuaauuggcugacccaucucaacuauacauacccugcccugaaugucaccaugcccaacaacgagcaguuugacaagcuguauauuuggggcgugcaccauccugggacggauaaggaccagaucuuccuguacgcgcaguccagcggaagaauuacaguuuccaccaaacggucucaacaggccgugaucccgaauaucggcagccgccuccggauuagagauauccccucccgcauuagcaucuacuggacaauugucaagccuggggacauccugcugaucaacucuaccggaaaucucauugcucccagaggcuauuuuaaaauccuguccgggaagucuucuauuaugcggagcgacgccccuaucggaaaauguaaguccgaaugcauuacccccaacggcucuaucccgaaugauaagccuuuccagaacgugaaucgcaucacauacggcgcuugucccagauaugugaaacacagcacgcuuaagcuggccaccgggaugcggaacgucccugagaaacagacacgcggaauuuuuggcgcgaucgccggguucauugaaaauggaugggagggcaugguugacgggugguacggauuuagacaccaaaacuccgagggccggggccaggcugccgaucucaagagcacccaggcugccaucgaccaaauuaaugggaaacugaacagacuuaucggaaagacaaaugaaaaauuccaucagauugagaaggaguucucugaaguggaaggccgcauccaggaucuggagaaguauguggaggacuccaaaaucgaucucuggagcuacaacgccgaacugcuggucgcucucgagaaucagcacaccauugaccugacggauucugaaaugaacaaacuuuuugagaagacaaagaaacaacugcgggaaaacgcggaggacauggggaauggaugcuucaagaucuaucauaagugugauaacgccugcauuggcuccaucagaaaugggaccuacgaccacaacguguaccgcgacgaggcucucaauaaccgguuucagauuaaaggcguugaacuuaagagcggauauaaagauuggauccuuuggaucuccuucgccauuucuugcuuucugcucuguguggcccugcugggcuucaucaugugggcuugccagaaggggaauauuagauguaacaucugcauuuga

SEQ ID NO: 205314 - RNA, 1701 nt, Artificial Sequence; identical to SEQ ID NO: 205199
  derived and/or modified CDS sequence (opt5) from hemagglutinin__InfluenzaA__ALE31711

SEQ ID NO: 205315 - RNA, 1701 nt, Artificial Sequence; identical to SEQ ID NO: 205057
  derived and/or modified CDS sequence (opt5) from hemagglutinin__InfluenzaA__ALE31712

SEQ ID NO: 205316 - RNA, 1701 nt, Artificial Sequence
  derived and/or modified CDS sequence (opt5) from hemagglutinin__InfluenzaA__ALE31713
augaagaccaucauugcccugagcuacauccucugccugguguucgcucagaaaauucccggcaacgacaauuccacagccacgcuuugucuggggcaccaugcggucccuaacggaaccaucguuaagacaauuaccaaugauagaaucgaggugacaaacgcuaccgaacucgugcaaaauucuagcaucggcgagauuugcgacuccccgcaccagauccuggauggggaaaacuguacacuuauugacgcccugcucggagauccccagugcgacggcuuucagaauaaaaagugggaucuguucgucgagcggucuaaagccuauagcaacuguuacccuuaugacgugcccgauuacgcuucccugcgcucucucguugccagcuccgggacccuggaauuuaauaacgagagcuucaauuggacgggagugacccaaaacggcacaucuuccgcuugcaucagaaagucuagcuccagcuuuuucucucggcuuaauuggcugacccaucucaacuauacauacccugcccugaaugucaccaugcccaacaacgagcaguuugacaaacuuuauauuuggggcauccaccauccugggacggauaaggaccagauuuuccuguacgcgcgcuccagcggaagaaucacaguguccaccaagcggucucagcaagccguuaucccgaauauuggcagccgccccagaauccgggauauuccuucccgcaucagcauuuacuggacaaucgugaaacccggggacauccuccugauuaacucuaccggaaaucugaucgcuccuagaggcuauuuuaagauucgguccgggaaaagcucuaucaugcgcagcgacgcccccauuggaaaguguaaguccgaaugcaucaccccgaacggcucuaucccuaaugauaaacccuuccagaacgucaauagaauuacauacggcgcuuguccucgguaugugaagcacagcacgcucaaacuggccaccgggaugcgcaacauccccgagaagcagacaaaaggaauuuuuggcgcgaucgccggguucauugaaaauggaugggagggcaugguggacgggugguacggauuuagacaccagaacuccgagggccggggccaagcugccgaucuuaagagcacccaggcugccaucgaccagauuaaugggaaacugaacagacucaucggaaagacaaaugaaaaguuccaucaaaucgagaaagaguucucugaagucgaaggccgcauucaggaucuggagaaguauguugaggacaccaaaaucgaucuuugguccuacaacgccgaacugcucguggcucuggagaaucagcacacgauugaccugacagauagcgaaaugaacaagcucuuugagaaaaccaagaagcagcugcgggaaaacgcggaggacauggggaauggaugcuucaaaaucuaucauaagugugauaacgccugcauuggcucuaucagaaaugggaccuacgaccacaacguguaccgcgacgaggcucuuaauaaccgguuucaaaucaaaggcgucgaacugaaguccggauauaaagauuggauucucuggaucagcuucgccacauccugcuuucugcuuuguguggcccugcucggcuucauuaugugggcuugccagaaggggaauaucagauguaacauuugcaucuga

SEQ ID NO: 205317 - RNA, 1701 nt, Artificial Sequence; identical to SEQ ID NO: 205171
  derived and/or modified CDS sequence (opt5) from hemagglutinin__InfluenzaA__ALE31714

SEQ ID NO: 205318 - RNA, 1701 nt, Artificial Sequence; identical to SEQ ID NO: 205171
  derived and/or modified CDS sequence (opt5) from hemagglutinin__InfluenzaA__ALE31715

SEQ ID NO: 205319 - RNA, 1701 nt, Artificial Sequence; identical to SEQ ID NO: 205199
  derived and/or modified CDS sequence (opt5) from hemagglutinin__InfluenzaA__ALE31716

SEQ ID NO: 205320 - RNA, 1701 nt, Artificial Sequence
  derived and/or modified CDS sequence (opt5) from hemagglutinin__InfluenzaA__ALE31717
augaagaccaucauugcccugagcuacauccucugccugguguucgcucagaaaauucccggcaacgacaauuccacagccacgcuuugucuggggcaccaugcggucccuaacggaaccaucguuaagacaauuaccaaugauagaaucgaggugacaaacgcuaccgaacucgugcaaaauucuagcaucggcgagauuugcgacuccccgcaccagauccuggauggggaaaacuguacacuuauugacgcccugcucggagauccccagugcgacggcuuucagaauaaaaagugggaucuguucgucgagcggucuaaagccuauagcaacuguuacccuuaugacgugcccgauuacgcuucccugcgcucucucguugccagcuccgggacccuggaauuuaauaacgagagcuucaauuggacgggagugacccaaaacggcacaucuuccgcuugcaucagaaagagcagcuccagcuuuuucucucggcuuaauuggcugacccaucucaacuauaaguacccugcccugaaugucacaaugcccaacaacgagcaguuugacaaacuuuauauuuggggcgugcaccauccugggaccgauaaggaccagaucuuccuguacgcgcgcuccagcggaagaauuacgguuuccacaaaaaccucucagcaagccgugaucccgaauaucggcagccggccccgcauuagagauaucccuucccggauuagcaucuacuggacaauugucaagcccggggacauccuccugaucaacucuaccggaaaucugauugcuccucgcggcuauuuuaaaaucagauccgggaagucuucuauuaugcggagcgacgcccccaucggaaaguguaaauccgaaugcauuaccccgaacggcucuaucccuaaugauaagcccuuccagaacgugaaucgcacaacguacggcgcuuguccuagauaugugaaacacagcacccucaagcuggccacagggaugcggaacguccccgagaaacagacccgcggaaucuuuggcgcgauugccggguucaucgaaaauggaugggagggcaugguugacgggugguacggauuuagacaccagaacuccgagggccggggccaagcugccgaucuuaagagcacacaggcugccauugaccagaucaaugggaaacugaacagacucauuggaaagaccaaugaaaaguuccaucaaaucgagaaagaguucucugaaguggaaggccgcauucaggaucuggagaaguauguggaggacacgaaaaucgaucuuugguccuacaacgccgaacugcucgucgcucuggagaaucagcacacaaucgaccugaccgauagcgaaaugaacaagcucuuugagaaaaccaagaagcagcugcgggaaaacgcggaggacauggggaauggaugcuucaaaauuuaucauaagugugauaacgccugcaucggcucuauuagaaaugggacauacgaccacaacguguaccgcgacgaggcucuuaauaaccgguuucaaaucaaaggcguugaacugaaguccggauauaaagauuggauucucuggaucagcuucgccaucuccugcuuucugcuuuguguggcccugcucggcuucauuaugugggcuugccagaaggggaauaucagauguaacauuugcaucuga

SEQ ID NO: 205321 - RNA, 1701 nt, Artificial Sequence; identical to SEQ ID NO: 205171
  derived and/or modified CDS sequence (opt5) from hemagglutinin__InfluenzaA__ALE31718

SEQ ID NO: 205322 - RNA, 1701 nt, Artificial Sequence
  derived and/or modified CDS sequence (opt5) from hemagglutinin__InfluenzaA__ALE31719
augaagaccaucauugcccugagcuacauccucugccugguguucgcucagaaaauucccggcaacgacaauuccacagccacgcuuugucuggggcaccaugcggucccuaacggaaccaucguuaagacaauuaccaaugauagaaucgaggugacaaacgcuaccgaacucgugcaaaauucuagcaucggcgagauuugcgacuccccgcaccagauccuggauggggaaaacuguacacuuauugacgcccugcucggagauccccagugcgacggcuuucagaauaaaaagugggaucuguucgucgagcggucuaaagccuauagcaacuguuacccuuaugacgugcccgauuacgcuucccugcgcucucucguugccagcuccgggacccuggaauuuaauaacgagagcuucaauuggacgggagugacccaaaacggcacaucuuccgcuugcaucagaaagucuagcuccagcuuuuucucucggcuuaauuggcugacccaucucaacuauacauacccugcccugaaugucaccaugcccaacaacgagcaguuugacaaacuuuauauuuggggcgugcaccauccugggacggauaaggaccagaucuuccuguacgcgcgcuccagcggaagaauuacaguuuccaccaagcggucucagcaagccgugaucccgaauaucggcagccgcccccggauuagagauaucccuucccgcauuagcaucuacuggacaauugucaaacccggggacauccuccugaucaacucuaccggaaaucugauugcuccuagaggcuauuuuaagauccgguccgggaaaagcucuauuaugcgcagcgacgcccccaucggaaaguguaaguccgaaugcauuaccccgaacggcucuaucccuaaugauaaacccuuccagaacgugaauagaaucacauacggcgcuuguccucgguaugugaagcacagcacgcucaaacuggccaccgggaugcgcaacauucccgagaagcagacaagaggaaucuuuggcgcgauugccggguucaucgaaaauggaugggagggcauggucgacgggugguacggauuucggcaccagaacuccgagggcagaggccaagcugccgaucuuaaaagcacccaggcugccauugaccagaucaaugggaagcugaaccgccucauuggaaaaacaaaugaaaaguuccaucaaaucgagaaggaguucucugaaguugaaggccggauccaggaucuggagaaauauguggaggacaccaagauugaucuuugguccuacaacgccgaacugcucguggcucuggagaaucagcacacgaucgaccugacagauagcgaaaugaacaaacucuuugagaagaccaaaaagcagcugagagaaaacgcggaggacauggggaauggaugcuucaagauuuaucauaaaugugauaacgccugcaucggcucuauucgcaaugggaccuacgaccacaacgucuaccgggacgaggcucuuaauaacagauuucaaaucaagggcguggaacugaaauccggauauaaggauuggauccucuggauuagcuucgccaucuccugcuuucugcuuuguguugcccugcucggcuucauuaugugggcuugccagaaagggaauauccgcuguaacauuugcaucuga

SEQ ID NO: 205323 - RNA, 1701 nt, Artificial Sequence; identical to SEQ ID NO: 205057
  derived and/or modified CDS sequence (opt5) from hemagglutinin__InfluenzaA__ALE31720

SEQ ID NO: 205324 - RNA, 1701 nt, Artificial Sequence; identical to SEQ ID NO: 205070
  derived and/or modified CDS sequence (opt5) from hemagglutinin__InfluenzaA__ALE31721

SEQ ID NO: 205325 - RNA, 1701 nt, Artificial Sequence; identical to SEQ ID NO: 205293
  derived and/or modified CDS sequence (opt5) from hemagglutinin__InfluenzaA__ALE31722

SEQ ID NO: 205326 - RNA, 1701 nt, Artificial Sequence
  derived and/or modified CDS sequence (opt5) from hemagglutinin__InfluenzaA__ALE31723
augaagaccaucauugcccugagcuacauccucugccugguguucgcucagaaaauucccggcaacgacaauuccacagccacgcuuugucuggggcaccaugcggucccuaacggaaccaucguuaagacaauuaccaaugauagaaucgaggugacaaacgcuaccgaacucgugcaaaauucuagcaucggcgagauuugcgacuccccgcaccagauccuggauggggaaaacuguacacuuauugacgcccugcucggagauccccagugcgacggcuuucagaauaaaaagugggaucuguucgucgagcggucuaaagccuauagcaacuguuacccuuaugacgugcccgauuacgcuucccugcgcucucucguugccagcuccgggacccuggaauuuaauaacgagagcuucaauuggacgggagugacccaaaacggcacaucuuccgcuugcaucagaaagucuagcuccagcuuuuucucucggcuuaauuggcugacccaucucaacuauacauacccugcccugaaugucaccaugcccaacaacgagcaguuugacaaacuuuauauuuggggcgugcaccauccugggacggauaaggaccagaucuuccuguacgcgcgcuccagcggaagaauuacaguuuccaccaagcggucucagcaagccgugaucccgaauaucggcagccgcccccggauuagagauaucccuucccgcauuagcaucuacuggacaauugucaaacccggggacauccuccugaucaacucuaccggaaaucugauugcuccuagaggcuauuuuaagauccgguccgggaaaagcucuauuaugcgcagcgacgcccccaucggaaaguguaaguccgaaugcaccacaccgaacggcucuauuccuaaugauaaacccuuccagaacgugaauagaaucacguacggcgcuuguccucgguaugugaagcacagcacccucaaacuggccacagggaugcgcaacguccccgagaagcagaccagaggaaucuuuggcgcgauugccggguucaucgaaaauggaugggagggcaugguugacgggugguacggauuucggcaccagaacuccgagggcagaggccaagcugccgaucuuaaaagcacacaggcugccauugaccagaucaaugggaagcugaaccgccucauuggaaaaaccaaugaaaaguuccaucaaaucgagaaggaguucucugaaguggaaggccggauucaggaucuggagaaauauguggaggacacgaagaucgaucuuugguccuacaacgccgaacugcucgucgcucuggagaaucagcacacaaucgaccugaccgauagcgaaaugaacaaacucuuugagaagaccaaaaagcagcugagagaaaacgcggaggacauggggaauggaugcuucaagauuuaucauaaaugugauaacgccugcaucggcucuauucgcaaugggacauacgaccacaacguguaccgggacgaggcucuuaauaacagauuucaaaucaagggcguugaacugaaauccggauauaaggauuggauucucuggaucagcuucgccaucuccugcuuucugcuuuguguggcccugcucggcuucauuaugugggcuugccagaaagggaauauccgcuguaacauuugcaucuga

SEQ ID NO: 205327 - RNA, 1701 nt, Artificial Sequence; identical to SEQ ID NO: 204513
  derived and/or modified CDS sequence (opt5) from hemagglutinin__InfluenzaA__ALE31724

SEQ ID NO: 205328 - RNA, 1701 nt, Artificial Sequence; identical to SEQ ID NO: 204513
  derived and/or modified CDS sequence (opt5) from hemagglutinin__InfluenzaA__ALE31725

SEQ ID NO: 205329 - RNA, 1701 nt, Artificial Sequence; identical to SEQ ID NO: 204513
  derived and/or modified CDS sequence (opt5) from hemagglutinin__InfluenzaA__ALE31726

SEQ ID NO: 205330 - RNA, 1701 nt, Artificial Sequence; identical to SEQ ID NO: 204513
  derived and/or modified CDS sequence (opt5) from hemagglutinin__InfluenzaA__ALE31727

SEQ ID NO: 205331 - RNA, 1701 nt, Artificial Sequence
  derived and/or modified CDS sequence (opt5) from hemagglutinin__InfluenzaA__ALE31728
augaagaccaucauugcccugagcuacauccucugccugguguucgcucagaaaauucccggcaacgacaauuccacagccacgcuuugucuggggcaccaugcggucccuaacggaaccaucguuaagacaauuaccaaugauagaaucgaggugacaaacgcuaccgaacucgugcaaaauucuagcaucggcgagauuugcgacuccccgcaccagauccuggauggggaaaacuguacacuuauugacgcccugcucggagauccccagugcgacggcuuucagaauaaaaagugggaucuguucgucgagcggucuaaagccuauagcaacuguuacccuuaugacgugcccgauuacgcuucccugcgcucucucguugccagcuccgggacccuggaauuuaauaacgagagcuucaauuggacgggagugacccaaaacggcacaucuuccgcuugcaucagacggagcagcuccagcuuuuucucucgccuuaauuggcugacccaucucaacuauacauacccugcccugaaugucaccauucccaacaacgagcaguuugacaaacuuuauaucuggggcgugcaccauccugggacggauaaggaccagauuuuccuguacgcgcaguccagcggaagaaucacaguuuccaccaagcggucucaacaggccgugaucccgaauauuggcagccgccccagaauccgggauauuccuucccgcaucagcauuuacuggacaaucgucaagcccggggacauccuccugauuaacucuaccggaaaucugaucgcuccuagaggcuauuuuaaaauucgguccgggaagucuucuaucaugcgcagcgacgcccccauuggaaaauguaaguccgaaugcaucaccccgaacggcucuaucccuaaugauaagcccuuccagaacgugaauagaauuacauacggcgcuuguccucgguaugugaaacacagcacgcucaagcuggccaccgggaugcgcaacguccccgagaaacagacaagaggaaucuuuggcgcgauugccggguucaucgaaaauggaugggagggcaugguugacgggugguacggauuucggcaccaaaacuccgagggcagaggccaggcugccgaucuuaagagcacccaggcugccauugaccaaaucaaugggaaacugaaccgccucauuggaaagacaaaugaaaaauuccaucagaucgagaaggaguucucugaaguggaaggccggauccaggaucuggagaaguauguggaggacaccaaaauugaucuuugguccuacaacgccgaacugcucgucgcucuggagaaucagcacacgaucgaccugacagauagcgaaaugaacaagcucuuugagaaaaccaagaaacaacugagagaaaacgcggaggacauggggaauggaugcuucaagauuuaucauaagugugauaacgccugcaucggcucuauucgcaaugggaccuacgaccacaacguguaccgggacgaggcucuuaauaacagauuucagaucaaaggcguugaacugaaguccggauauaaagauuggauccucuggauuagcuucgccaucuccugcuuucugcuuuguguggcccugcucggcuucauuaugugggcuugccagaaggggaauauccgcuguaacauuugcaucuga

SEQ ID NO: 205332 - RNA, 1701 nt, Artificial Sequence
  derived and/or modified CDS sequence (opt5) from hemagglutinin__InfluenzaA__ALE31729
augaagaccaucauugcccugagcuacauccucugccugguguucgcucagaaaauucccggcaacgacaauuccacagccacgcuuugucuggggcaccaugcggucccuaacggaaccaucguuaagacaauuaccaaugauagaaucgaggugacaaacgcuaccgaacucgugcaaaauucuagcaucggcgagauuugcgacuccccgcaccagaucauugauggggaaaacuguacacugaucgacgcccuucugggagauccccagugcgacggcuuucagaauaaaaagugggaucucuucgucgagcggucuaaagccuauagcaacuguuacccuuaugacgugcccgauuacgcuucccugcgcucucugguugccagcuccgggacccucgaauuuaauaacgagagcuucaauuggacgggagugacccaaaacggcacaucuuccgcuugcauuagacggagcagcuccagcuuuuucucucgccugaauuggcuuacccaucugaacuauacauacccugcccucaaugucaccaugcccaacaacgagcaguuugacaagcuguauaucuggggcgugcaccauccugggacggauaaggaccagauuuuccuuuacgcgcaguccagcggaagaaucacaguuuccaccaaacggucucaacaggccgugaucccgaauauuggcagccgccccagaauccgggauauuccuucccgcaucagcauuuacuggacaaucgucaagcccggggacauccugcucauuaacucuaccggaaaucugaucgcuccuagaggcuauuuuaaaauucgguccgggaagucuucuaucaugcgcagcgacgcccccauuggaaaauguaaguccgaaugcaucaccccgaacggcucuaucccuaaugauaagcccuuccagaacgugaauagaauuacauacggcgcuuguccucgguaugugaaacacagcacgcugaagcucgccaccgggaugcgcaacguccccgagaaacagacaagaggaaucuuuggcgcgauugccggguucaucgaaaauggaugggagggcaugguugacgggugguacggauuucggcaccaaaacuccgagggcagaggccaggcugccgaucuuaagagcacccaggcugccauugaccaaaucaaugggaaacugaaccgccugauuggaaagacaaaugaaaaauuccaucagaucgagaaggaguucucugaaguggaaggccggauccaggaucucgagaaguauguggaggacaccaaaauugaucugugguccuacaacgccgaacuucuggucgcucucgagaaucagcacacgaucgaccugacagauagcgaaaugaacaagcuguuugagaaaaccaagaaacaacucagagaaaacgcggaggacauggggaauggaugcuucaagauuuaucauaagugugauaacgccugcaucggcucuauucgcaaugggaccuacgaccacaacguguaccgggacgaggcucugaauaacagauuucagaucaaaggcguugaacuuaaguccggauauaaagauuggauccuguggauuagcuucgccaucuccugcuuucuccuguguguggcccuucugggcuucauuaugugggcuugccagaaggggaauauccgcuguaacauuugcaucuga

SEQ ID NO: 205333 - RNA, 1701 nt, Artificial Sequence; identical to SEQ ID NO: 204513
  derived and/or modified CDS sequence (opt5) from hemagglutinin__InfluenzaA__ALE31730

SEQ ID NO: 205334 - RNA, 1701 nt, Artificial Sequence
  derived and/or modified CDS sequence (opt5) from hemagglutinin__InfluenzaA__ALE31731
augaagaccaucauugcccugagcuacauccucugccagguguucgcucaaaagauucccggcaacgacaauuccacagccacgcugugucuugggcaccaugcggucccuaacggaaccaucguuaagacaauuaccaaugauagaaucgaggugacaaacgcuaccgaacuggugcagaauagcagcaucggcgagauuugcgacuccccgcaccagauccucgauggggaaaacuguacacugauugacgcccuucugggagauccccagugcgacggcuuucaaaauaaaaagugggaucucuucgucgagcggucuaaagccuauagcaacuguuacccuuaugacgugcccgauuacgcuucccugcgcucucugguugccagcuccgggacccucgaauuuaauaacgagagcuucaauuggacgggagugacccagaacggcacaucuuccgcuugcaucagaaagucuucuuccagcuuuuucucucggcugaauuggcuuacccaucugaacuauacauacccugcccucaaugucaccaugcccaacaacgagcaguuugacaagcuguauauuuggggcgugcaccauccugggacggauaaagaccagaucuuccuuuacgcgcgcuccagcggaagaauuacaguuuccaccaagcggucucaacaggccgugaucccgaauaucggcagccgcccccggauuagagauaucccuucccgcauuagcaucuacuggacaauugucaaacccggggacauccugcucaucaacucuaccggaaaucugauugcuccuagaggcuauuuuaagauccgguccgggaaaagcucuauuaugcgcagcgacgcccccaucggaaaguguaaguccgaaugcauuaccccgaacggcucuaucccuaaugauaaacccuuccagaacgugaauagaaucacauacggcgcuuguccucgguaugugaagcacagcacgcugaaacucgccaccgggaugcgcaacguccccgagaagcagacaagaggaauuuuuggcgcgaucgccggguucauugaaaauggaugggagggcaugguugacgggugguacggauuucggcaccaaaacuccgagggcagaggccaggcugccgaucugaaaagcacccaggcugccaucgaccaaauuaaugggaaacuuaaccgccugaucggaaaaacaaaugaaaaguuccaucagauugagaaggaguucucugaaguggaaggccggauccaggaucucgagaaauauguggaggacaccaagaucgaucugugguccuacaacgccgaacuucuggucgcucucgagaaucagcacacgauugaccugacagauagcgaaaugaacaaacuguuugagaagaccaaaaagcaacucagagaaaacgcggaggacauggggaauggaugcuucaagaucuaucauaaaugugauaacgccugcauuggcucuauccgcaaugggaccuacgaccacaacguguaccgggacgaggcucugaauaacagauuucagauuaagggcguugaacuuaaauccggauauaaggauuggauccuguggaucagcuucgccauuuccugcuuucuccuguguguggcccuucugggcuucaucaugugggcuugccagaaagggaauauucgcuguaacaucugcauuuga

SEQ ID NO: 205335 - RNA, 1701 nt, Artificial Sequence; identical to SEQ ID NO: 205171
  derived and/or modified CDS sequence (opt5) from hemagglutinin__InfluenzaA__ALE31732

SEQ ID NO: 205336 - RNA, 1701 nt, Artificial Sequence; identical to SEQ ID NO: 205171
  derived and/or modified CDS sequence (opt5) from hemagglutinin__InfluenzaA__ALE31733

SEQ ID NO: 205337 - RNA, 1701 nt, Artificial Sequence
  derived and/or modified CDS sequence (opt5) from hemagglutinin__InfluenzaA__ALE31734
augaagaccaucauugcccugagcuacauccucugccugguguucgcucagaaaauucccggcaacgacaauuccacagccacgcuuugucuggggcaccaugcggucccuaacggaaccaucguuaagacaauuaccaaugauagaaucgaggugacaaacgcuaccgaacucgugcaaaauucuagcaucggcgagauuugcgacuccccgcaccagauccuggauggggaaaacuguacacuuauugacgcccugcucggagauccccagugcgacggcuuucagaauaaaaagugggaucuguucgucgagcggucuaaagccuauagcaacuguuacccuuaugacgugcccgauuacgcuucccugcgcucucucguugccagcuccgggacccuggaauuuaauaacgagagcuucaauuggacgggagugacccaaaacggcacaucuuccgcuugcaucagaaagucuagcuccagcuuuuucucucggcuuaauuggcugacccaucucaaguauacauacccugcccugaacgucaccaugcccaauaacgagcaguuugacaaacuuuauauuuggggcgugcaccauccugggacggauaaggaccagaucuuccuguacgcgcgcuccagcggaagaauuacaguuuccaccaaacggucucagcaagccgugaucccgaacaucggcuuucgcccccggauuagagauaucccuagccgcauuuccaucuacuggacaauugucaagcccggggacauccuccugaucaauagcaccggaaaccugauugcuccuagaggcuauuucaaaauccggucugggaaguccagcauuaugcgcucugacgcccccaucggaaaguguaaaagcgaaugcauuaccccgaauggcuccaucccuaacgauaagcccuuucagaaugugaacagaaucacauacggcgcuuguccucgguaugugaaacacucuacgcucaagcuggccaccgggaugcgcaauguccccgagaaacagacaagaggaauuuucggcgcgaucgccggguuuauugaaaacggaugggagggcaugguugacgggugguacggauuccggcaccagaauagcgagggcagaggccaagcugccgaucuuaaguccacccaggcugccaucgaccagauuaacgggaaacugaaucgccucaucggaaagacaaacgaaaaguuccaucaaauugagaaagaauuuagcgagguggaaggccggauccaggaucuggagaaguauguggaggacaccaaaaucgaucuuuggucuuacaaugccgaacugcucgucgcucuggagaaccagcacacgauugaccugacagauuccgaaaugaauaaacucuucgagaagaccaagaagcagcugagagaaaacgcggaggacauggggaacggaugcuuuaaaaucuaucauaagugugauaaugccugcauuggcagcauccgcaacgggaccuacgaccacaauguguaccgggacgaggcucuuaacaauagauuccaaauuaaaggcguugaacugaagucuggauauaaagauuggauccucuggaucuccuuugccauuagcugcuuccugcuuuguguggcccugcucggcuuuaucaugugggcuugccagaaggggaacauucgcuguaauaucugcauuuga

SEQ ID NO: 205338 - RNA, 1701 nt, Artificial Sequence; identical to SEQ ID NO: 205171
  derived and/or modified CDS sequence (opt5) from hemagglutinin__InfluenzaA__ALE31735

SEQ ID NO: 205339 - RNA, 1701 nt, Artificial Sequence; identical to SEQ ID NO: 205070
  derived and/or modified CDS sequence (opt5) from hemagglutinin__InfluenzaA__ALE31736

SEQ ID NO: 205340 - RNA, 1701 nt, Artificial Sequence; identical to SEQ ID NO: 205070
  derived and/or modified CDS sequence (opt5) from hemagglutinin__InfluenzaA__ALE31737

SEQ ID NO: 205341 - RNA, 1701 nt, Artificial Sequence
  derived and/or modified CDS sequence (opt5) from hemagglutinin__InfluenzaA__ALE31738
augaagaccaucauugcccugagcuacauccucugccugguguucgcucagaaaauucccggcaacgacaauuccacagccacgcuuugucuggggcaccaugcggucccuaacggaaccaucguuaagacaauuaccaaugauagaaucgaggugacaaacgcuaccgaacucgugcaaaauucuagcaucggcgagauuugcgacuccccgcaccagauccuggauggggaaaacuguacacuuauugacgcccugcucggagauccccagugcgacggcuuucagaauaaaaagugggaucuguucgucgagcggucuaaagccuauagcaacuguuacccuuaugacgugcccgauuacgcuucccugcgcucucucguugccagcuccgggacccuggaauuuaauaacgagagcuucaauuggacgggagugacccaaaacggcacaucuuccgcuugcaucagacggucuagcuccagcuuuuucucucgccuuaauuggcugacccaucucaacuauaaguacccugcccugaaugucacaaugcccaacaacgagcaguuugacaaacuuuauauuuggggcgugcaccauccugggaccgauaaagaccagaucuuccuguacgcgcaguccagcggaagaauuacgguuuccacaaagggcucucaacaggccgugaucccgaauaucgggagccggccccgcauuagagauaucccuucccggauuagcaucuacuggaccauugucaaacccggagacauccuccugaucaacucuacaggcaaucugauugcuccucgcggguauuuuaagaucagauccggaaaaagcucuauuaugcggagcgacgcccccaucggcaaguguaaguccgaaugcauuaccccgaacggcucuaucccuaaugauaaacccuuccagaacgugaaucgcaucaccuacggggcuuguccuagauaugugaagcacagcacacucaaacuggccacgggaaugcggaacguccccgagaagcagacccgcggcauuuuuggggcgaucgccggauucauugaaaauggcugggaggggaugguugacggaugguacggcuuuagacaccaaaacuccgagggccgggggcaggcugccgaucuuaaaagcacacaggcugccaucgaccaaauuaauggaaagcugaacagacucaucggcaaaaccaaugaaaaguuccaucagauugagaaggaguucucugaaguggaagggcgcauccaggaucuggagaaauauguggaggacacaaagaucgaucuuugguccuacaacgccgaacugcucgucgcucuggagaaucagcacaccauugaccugacggauagcgaaaugaacaaacucuuugagaagacaaagaagcaacugcgggaaaacgcggaggacaugggaaauggcugcuucaagaucuaucauaaaugugauaacgccugcauugggucuaucagaaauggcaccuacgaccacaacguguaccgcgacgaggcucuuaauaaccgguuucagauuaagggaguugaacugaaauccggcuauaaggauuggauccucuggaucagcuucgccauuuccugcuuucugcuuuguguggcccugcucggguucaucaugugggcuugccagaaaggaaauauuagauguaacaucugcauuuga

SEQ ID NO: 205342 - RNA, 1701 nt, Artificial Sequence; identical to SEQ ID NO: 204513
  derived and/or modified CDS sequence (opt5) from hemagglutinin__InfluenzaA__ALE31739

SEQ ID NO: 205343 - RNA, 1701 nt, Artificial Sequence
  derived and/or modified CDS sequence (opt5) from hemagglutinin__InfluenzaA__ALE31741
augaagaccaucauugcccugagcuacauccucugccugguguucgcucagaaacuucccgagaacgacaauuccacagccacgcugugucucggccaccaugcggucccuaacgggaccauuguuaagacaaucaccucugauagaauugaagugacaaaugcuaccgagcuggugcaaaacagcuccaucucugaaaucugcgacagcccgcaccagauucuugauggcaaaaauuguacacugaucgacgcccuccugggagauccccagugcgacggguuucagaacaagaaaugggaucuguucgucgagcgguccaaggccuauucuaauuguuacccuuaugacgugcccgauuacgcuagccuccgcucccugguugccagcucuggaacccuugaauuuaacgacgaguccuucaauugggcuggcgugacgcaaaacgggaccagcucugccugcauuagaggauccaauagcuccuuuuucucucggcugaacuggcucacacauagcaauuuuaaguauccugcgcugaacgucaccaugcccaauaacgagcaguucgauaaacuuuacaucuggggcgugcaccauccuggcacagacaaggaucagauuuuucuguaugcccaguccucugggcgcaucaccguuagcacgaaaagaucccaacaggcugugauuccgaacaucggaagccggccccgcaucagaaauauuccuucucggaucuccauuuacuggacaaucgucaagcccggcgacauucuccugaucaacagcaccgggaaucugaucgccccucgcggauacuucaaaauuagaucuggcaagagcuccaucaugcggucugacgcucccauugggaaguguaaaagcgaaugcaucacaccgaacggauccauuccuaaugauaagcccuuucagaacgugaaucgcaucaccuauggcgccuguccuagauacgugaaacagagcacccucaagcuggcgacaggcaugcggaacguccccgagaaacaaacgcgcgggaucuucggagccauugcuggcuuuaucgaaaaugggugggagggaaugaaggacggcugguauggguucagacaccagaacucugagggacggggccaggccgcugaucuuaaauccacccaagccgccauugaccagaucaauggcaagcugaacagacucauugggaagacaaaugaaaaauuccaccagaucgagaaggaauuuagcgagguugaaggacgcauucaggaucuggagaaauacguggaggacaccaagaucgaucuuuggucuuauaacgcugaacugcucguggcgcuggagaaucaacauacaaucgaccugaccgauuccgaaaugaacaaacucuucgagaagacgaagaaacagcugcgggaaaacgccgaggacaugggcaaugggugcuuuaagauuuaccacaaaugugauaacgcuugcaucggaagcauuagaaauggcacauaugaccaugacgucuaccgcgaugaggcccuuaacaaucgguuccagaucaaggggguggaacugaaauccggcuacaaggacuggauucucuggaucucuuuugccaucagcugcuuccugcuuuguguugcucugcucggauuuauuaugugggccugccagaagggcaacaucagauguaauauuugcaucuga

SEQ ID NO: 205344 - RNA, 1701 nt, Artificial Sequence
  derived and/or modified CDS sequence (opt5) from hemagglutinin__InfluenzaA__ALE31742
augaagaccaucauugcccugagcuacauccucugccugggcuucgcucagaaaauucccgggaacgacaauuccacagccacgcuuugucugggacaccaugcggugccuaacggcaccaucgucaagacaauuaccaaugauagaaucgagguuacaaacgcuaccgaacucgugcaaaauucuagcaucggggagauuugcgacuccccgcaccagauccuggauggagaaaacuguacacuuauugacgcccugcucggcgauccccagugcgacggguuucagaauaaaaagugggaucuguucguggagcggucuaaagccuauagcaacuguuacccuuaugacguccccgauuacgcuucccugcgcucucucguggccagcuccggaacccuggaauuuaauaacgagagcuucaauuggacgggcguuacccaaaacggcacaucuuccgcuugcaucagacggucuagcuccagcuuuuucucucgccuuaauuggcugacccaucucaacuauacauacccugcccugaaugugaccaugcccaacaacgagcaguuugacaaacuuuauauuuggggaguccaccauccugggacggauaaggaccagaucuuccuguacgcgcaguccagcggcagaauuacaguguccaccaagcggucucaacaggccguuaucccgaauaucgggagccgcccccggauuagagauaucccuucccgcauuagcaucuacuggacaauugugaagcccggagacauccuccugaucaacucuaccggcaaucugauugcuccuagaggguauuuuaaaauccgguccggaaagagcucuauuaugcgcagcgacgcccccaucggcaaauguaaguccgaaugcauuaccccgaacggcucuaucccuaaugauaagcccuuccagaacgucaauagagugacauacggggcuuguccucgguaugugaaacacagcacgcucaagcuggccaccggaaugcgcaacguccccgagaaacagacaagaggcaucuuuggggcgauugccggauucaucgaaaauggcugggaggggaugguugacggaugguacggcuuucggcaccaaaacuccgagggcagagggcaggcugccgaucuuaagagcacccaggcugccauugaccaaaucaauggaaaacugaaccgccucauuggcaagacaaaugaaaaauuccaucagaucgagaaggaguucucugaaguggaagggcggauucaggaucuggagaaguauguggaggacaccaaaaucgaucuuugguccuacaacgccgaacugcucgucgcucuggagaaucagcacacgaucgaccugacagauagcgaaaugaacaagcucuuugagaaaaccaagaaacaacugagagaaaacgcggaggacaugggaaauggcugcuucaagauuuaucauaagugugauaacgccugcaucgggucuauucgcaauggcaccuacgaccacaacguguaccgggacgaggcucuuaauaacagauuucagaucaaaggaguugaacugaaguccggcuauaaagauuggauucucuggaucagcuucgccaucuccugcuuucugcuuuguguggcccugcucggguucauuaugugggcuugccagaagggaaauauccgcuguaacauuugcaucuga

SEQ ID NO: 205345 - RNA, 1701 nt, Artificial Sequence; identical to SEQ ID NO: 205070
  derived and/or modified CDS sequence (opt5) from hemagglutinin__InfluenzaA__ALE31743

SEQ ID NO: 205346 - RNA, 1701 nt, Artificial Sequence; identical to SEQ ID NO: 204513
  derived and/or modified CDS sequence (opt5) from hemagglutinin__InfluenzaA__ALE31744

SEQ ID NO: 205347 - RNA, 1701 nt, Artificial Sequence
  derived and/or modified CDS sequence (opt5) from hemagglutinin__InfluenzaA__ALE31745
augaagaccaucauugcccugagcuacauccucugccugguguucgcucagaaacuucccggcaacgacaauuccacagccacgcugugucucgggcaccaugcggucccuaacggaaccauuguuaagacaaucaccaaugauagaauugaggugacaaacgcuaccgaacuggugcaaaauucuagcaucggcgagaucugcgacuccccgcaccagauucuugaugggaaaaacuguacacugaucgacgcccuccugggagauccccagugcgacggcuuucagaauaagcggugggaucuguucgucgaacgcucuaaagccuauagcaacuguuacccuuaugacgugcccgauuacgcuucccucagaucucugguugccagcuccgggacccuugaguuuaaugacgaauccuucaacugggcuggagugacgcaaaauggcaccucuuccgccugcauucggggcagcaacucuuccuuuuucagccgccugaauuggcucacacauucuaacuuuaaguauccugcgcugaaugucaccaugcccaacaacgagcaguucgauaaacuuuacaucuggggagugcaccauccugggacagacaaggaucagauuuuucuguaugcccaguccagcggcagaaucaccguuuccacgaagcggucucaacaggcugugauuccgaauaucgggagccgccucagaauccggaacauucccucccgcaucagcauuuacuggacaaucgucaaaccuggagacauucugcugaucaauucuaccggcaaccucaucgcccccagaggguacuucaagauucaguccggaaaaagcucuaucaugcggagcgacgcuccuauuggcaaguguaaguccgagugcaucacacccaauggcucuauuccgaacgauaaaccuuuucagaaugugaacaagaucaccuauggggccuguccccgcuacgugaaacaaagcacccugaaacuugcgacaggaaugagaaaugucccugaaaagcagacgcggggcaucuucggggccauugcuggauuuaucgagaacggcugggaagggaugaaggacggaugguauggcuuccgccaccagaauagcgagggcagagggcaagccgcugaucugaaaagcacccaggccgccauugaccagaucaacggaaagcucaaucggcugauuggcaagacaaacgagaaauuccaccagaucgaaaaggaguuuucugaaguugaggggcgcauucaagaucuugaaaaauacguggaggacaccaagaucgaucugugguccuauaaugcugagcuccugguggcgcuggaaaaccagcauacaaucgaccucaccgauagcgagaugaacaaacuguucgaaaagacgaagaaacagcuuagagagaaugccgaagacaugggaaacggcugcuuuaagauuuaccacaaaugugauaaugcuugcaucgggucuauucggaacggcacauaugaccaugacgucuacagagaugaggcccugaauaaccgcuuccagaucaagggaguggagcucaaauccggcuacaaggacuggauucuguggaucagcuuugccaucuccugcuuccuucuguguguugcucuccugggguuuauuaugugggccugccaaaagggaaauauccgguguaacauuugcaucuga

SEQ ID NO: 205348 - RNA, 1701 nt, Artificial Sequence
  derived and/or modified CDS sequence (opt5) from hemagglutinin__InfluenzaA__ALE31747
augaagaccaucauugcccugagcuacauccucugccugguguucgcucagaaacuucccggcaacgacaauuccacagccacgcugugucucgggcaccaugcggucccuaacggaaccauuguuaagacaaucaccaaugauagaauugaggugacaaacgcuaccgaacuggugcaaaauucuagcaucggcgagaucugcgacuccccgcaccagauucuugaugggaaaaacuguacacugaucgacgcccuccugggagauccccagugcgacggcuuucagaauaagcggugggaucuguucgucgaacgcucuaaagccuauagcaacuguuacccuuaugacgugcccgauuacgcuucccucagaucucugguugccagcuccgggacccuugaguuuaaugacgaauccuucaacugggcuggagugacgcaaaauggcaccucuuccgccugcauucggggcagcaacucuuccuuuuucagccgccugaauuggcucacacauucuaacuuuaaguauccugcgcugaaugucaccaugcccaacaacgagcaguucgauaaacuuuacaucuggggagugcaccauccugggacagacaaagaucagauuuuucuguaugcccaguccagcggcagaaucaccguuuccacgaagcggucucaacaggcugugauuccgaauaucgggagccgccccagaauccggaacauuccuucccgcaucagcauuuacuggacaaucgucaaacccggagacauucuccugaucaauucuaccggcaaccugaucgccccuagaggguacuucaagauucaguccggaaaaagcucuaucaugcggagcgacgcucccauuggcaaguguaaguccgagugcaucacaccgaauggcucuauuccuaacgauaaacccuuucagaaugugaaccgcaucaccuauggggccuguccuagauacgugaagcaaagcacccucaaacuggcgacaggaaugcggaauguccccgaaaagcagacgcgcggcaucuucggggccauugcuggauuuaucgagaacggcugggaagggaugaaagacggaugguauggcuucagacaccagaauagcgagggccgggggcaagccgcugaucuuaagagcacccaggccgccauugaccagaucaacggaaaacugaauagacucauuggcaagacaaacgagaaguuccaccagaucgaaaaagaguuuucugaaguugaggggcgcgugcaagaucuggaaaaguacguggaggacaccaaaauugaucuuugguccuauaaugcugagcugcucgucgcgcuggaaaaccagcauacaaucgaccugaccgauagcgagaugaacaaacucuucgaaaagacgaagaagcagcugcgggagaaugccgaagacaugggaaacggcugcuuuaagaucuaccacaagugugauaaugcuugcauugggucuaucagaaacggcacauaugaccaugacguguaccgcgaugaggcccuuaauaaccgguuccagauuaaaggaguugagcugaaguccggcuacaaagacuggauccucuggauuagcuuugccaucuccugcuuccugcuuuguguggcucugcucggguuuaucaugugggccugccaaaagggaaauauuagauguaacaucugcauuuga

SEQ ID NO: 205349 - RNA, 1701 nt, Artificial Sequence; identical to SEQ ID NO: 205070
  derived and/or modified CDS sequence (opt5) from hemagglutinin__InfluenzaA__ALE31748

SEQ ID NO: 205350 - RNA, 1701 nt, Artificial Sequence; identical to SEQ ID NO: 204513
  derived and/or modified CDS sequence (opt5) from hemagglutinin__InfluenzaA__ALE31749

SEQ ID NO: 205351 - RNA, 1701 nt, Artificial Sequence; identical to SEQ ID NO: 205057
  derived and/or modified CDS sequence (opt5) from hemagglutinin__InfluenzaA__ALE31750

SEQ ID NO: 205352 - RNA, 1701 nt, Artificial Sequence
  derived and/or modified CDS sequence (opt5) from hemagglutinin__InfluenzaA__ALE31751
augaagaccaucauugcccugagcuacauccucugccugguguucgcucagaaaauucccggcaacgacaauuccacagccacgcuuugucuggggcaccaugcggucccuaacggaaccaucguuaagacaauuaccaaugauagaaucgaggugacaaacgcuaccgaacucgugcaaaauucuagcaucggcgagauuugcgacuccccgcaccagauccuggauggggaaaacuguacacuuauugacgcccugcucggagauccccagugcgacggcuuucagaauaaaaagugggaucuguucgucgagcggucuaaagccuauagcaacuguuacccuuaugacgugcccgauuacgcuucccugcgcucucucguugccagcuccgggacccuggaauuuaauaacgagagcuucaauuggacgggagugacccaaaacggcacaucuuccgcuugcaucagacggagcagcuccagcuuuuucucucgccuuaauuggcugacccaucucgacuauacauacccugcccugaacgucaccaugcccaauaacgagcaguuugauaaacuuuauauuuggggcgugcaccauccugggacggacaaggaucagaucuuccuguacgcgcaguccagcggaagaauuacaguuuccaccaagcggucucaacaggccgugaucccgaacaucggcagccgcccccggauuagagacaucccuucccgcauuagcaucuacuggacaauugucaagcccggggacauccuccugaucaauucuaccggaaaccugauugcuccuagaggcuauuuuaaaauccgguccgggaagucuucuauuaugcgcagcgaugcccccaucggaaaauguaaguccgaaugcauuaccccgaauggcucuaucccuaacgacaagcccuuccagaaugugaacagaaucacauacggcgcuuguccucgguaugugaaacacagcacgcucaagcuggccaccgggaugcgcaauguccccgagaaacagacaagaggaauuuuuggcgcgaucgccggguucauugaaaacggaugggagggcaugguugaugggugguacggauuucggcaccaaaauuccgagggcagaggccaggcugccgaccuuaagagcacccaggcugccaucgaucaaauuaacgggaaacugaaucgccucaucggaaagacaaacgaaaaauuccaucagauugagaaggaguucucugaaguggaaggccggauccaggaccuggagaaguauguggaggauaccaaaaucgaccuuugguccuacaaugccgaacugcucgucgcucuggagaaccagcacacgauugaucugacagacagcgaaaugaauaagcucuuugagaaaaccaagaaacaacugagagaaaacgcggaggauauggggaacggaugcuucaagaucuaucauaagugugacaaugccugcauuggcucuauccgcaacgggaccuacgaccacaauguguaccgggaugaggcucuuaacaauagauuucagauuaaaggcguugaacugaaguccggauauaaagacuggauccucuggaucagcuucgccauuuccugcuuucugcuuuguguggcccugcucggcuucaucaugugggcuugccagaaggggaacauucgcuguaauaucugcauuuga

SEQ ID NO: 205353 - RNA, 1701 nt, Artificial Sequence; identical to SEQ ID NO: 204513
  derived and/or modified CDS sequence (opt5) from hemagglutinin__InfluenzaA__ALE31752

SEQ ID NO: 205354 - RNA, 1701 nt, Artificial Sequence; identical to SEQ ID NO: 205057
  derived and/or modified CDS sequence (opt5) from hemagglutinin__InfluenzaA__ALE31753

SEQ ID NO: 205355 - RNA, 1701 nt, Artificial Sequence; identical to SEQ ID NO: 204513
  derived and/or modified CDS sequence (opt5) from hemagglutinin__InfluenzaA__ALE31754

SEQ ID NO: 205356 - RNA, 1701 nt, Artificial Sequence
  derived and/or modified CDS sequence (opt5) from hemagglutinin__InfluenzaA__ALE31755
augaagaccaucauugcccugagcuacauccucugccugguguucgcucagaaacuucccgagaacgacaauuccacagccacgcugugucucggccaccaugcggucccuaacgggaccauuguuaagacaaucaccucugaucaaauugaagugacaaaugcuaccgagcuggugcagaacagcuccaucggagaaaucugcgacucuccgcaccagauucuugauggcaaaaauuguacacugaucgacgcccuccugggggauccccagugcgacggauuucaaaacaagaaaugggaucuguucgucgagagaagcaaggccuauuccaauuguuacccuuaugacgugcccgauuacgcuucucuccggagccugguugccuccagcggcacccuugaauuuaacgacgagucuuucaauugggcuggggugacgcagaacggaaccuccagcgccugcauucgcggcucuaauuccagcuuuuucucuagacugaacuggcucacacauuccaauuuuaaguauccugcgcugaacgucaccaugcccaauaacgagcaguucgauaaacuuuacaucuggggcgugcaccauccugggacagacaaggaucagauuuuucuguaugcccaaagcuccggacggaucaccguuucuacgaaacgcagccagcaggcugugauuccgaacaucggcuccagaccccggauccgcaauauuccuagcagaaucucuauuuacuggacaaucgucaagcccggggacauucuccugaucaacuccaccggaaaucugaucgccccucggggcuacuucaaaauucgcagcgggaagucuagcaucaugagauccgacgcucccauuggaaaguguaaaucugaaugcaucacaccgaacggcagcauuccuaaugauaagcccuuucagaacgugaaucggaucaccuauggcgccuguccucgcuacgugaaacaauccacccucaagcuggcgacagggaugagaaacguccccgagaaacagacgcggggaaucuucggcgccauugcuggguuuaucgaaaauggaugggagggcaugaaggacgggugguauggauuccgccaccagaacagcgagggcagaggccaagccgcugaucuuaaaucuacccaggccgccauugaccagaucaaugggaagcugaaccggcucauuggaaagacaaaugaaaaauuccaccagaucgagaaggaauuuuccgagguugaaggccgcauucaagaucuggagaaauacguggaggacaccaagaucgaucuuuggagcuauaacgcugaacugcucguggcgcuggagaaucagcauacaaucgaccugaccgauucugaaaugaacaaacucuucgagaagacgaagaaacagcugagagaaaacgccgaggacauggggaauggaugcuuuaagauuuaccacaaaugugauaacgcuugcaucggcuccauucggaaugggacauaugaccauaacgucuacagagacgaggcccuuaauaaccgcuuccagaucaagggcguggaacugaaaagcggauacaaggauuggauucucuggaucuccuuugccaucucuugcuuccugcuuuguguugcucugcucggcuuuauuaugugggccugccaaaaggggaauauccgguguaacauuugcaucuga

SEQ ID NO: 205357 - RNA, 1701 nt, Artificial Sequence; identical to SEQ ID NO: 205057
  derived and/or modified CDS sequence (opt5) from hemagglutinin__InfluenzaA__ALE31756

SEQ ID NO: 205358 - RNA, 1701 nt, Artificial Sequence; identical to SEQ ID NO: 204513
  derived and/or modified CDS sequence (opt5) from hemagglutinin__InfluenzaA__ALE31757

SEQ ID NO: 205359 - RNA, 1701 nt, Artificial Sequence
  derived and/or modified CDS sequence (opt5) from hemagglutinin__InfluenzaA__ALE31758
augaagaccaucauugcccugagcuacauccucugccugguguucgcucagaaaauucccggcaacgacaauuccacagccacgcuuugucuggggcaccaugcggucccuaacggaaccaucguuaagacaauuaccaaugauagaaucgaggugacaaacgcuaccgaacucgugcaaaauucuagcaucggcgagauuugcgacuccccgcaccagauccuggauggggaaaacuguacacuuauugacgcccugcucggagauccccagugcgacggcuuucagaauaaaaagugggaucuguucgucgagcggucuaaagccuauagcaacuguuacccuuaugacgugcccgauuacgcuucccugcgcucucucguugccagcuccgggacccuggaauuuaauaacgagagcuucaauuggacgggagugacccaaaacggcacaucuuccgcuugcaucagacggagcagcuccagcuuuuucucucgccuuaauuggcugacccaucucaacuauacauacccugcccugaaugucaccaugcccaacaacgagcaguuugacaaacuuuauauuuggggcgugcaccauccugggacggauaaggaccagaucuuccuguacgcgcaguccagcggaagaauuacaguuuccaccaagcggucucaacaggccgugaucccgaauaucggcagccgcccccggauuagagauaucccuucccgcauuagcaucuacuggacaauugucaagcccggggacauccuccugaucaacucuaccggaaaucugguggcuccuagaggcuauuuuaaaauucgguccgggaagucuucuaucaugcgcagcgacgcccccauuggaaaauguaaguccgaaugcaucaccccgaacggcucuauuccuaaugauaagcccuuccagaacgugaauagaaucacauacggcgcuuguccucgguaugucaaacacagcacgcucaagcuggccaccgggaugcgcaacguucccgagaaacagacaagaggaaucuuuggcgcgauugccggguucaucgaaaauggaugggagggcaugguggacgggugguacggauuucggcaccaaaacuccgagggcagaggccaggcugccgaucuuaagagcacccaggcugccauugaccaaaucaaugggaaacugaaccgccucauuggaaagacaaaugaaaaauuccaucagaucgagaaggaguucucugaaguggaaggccggauucaggaucuggagaaguaugucgaggacaccaaaaucgaucuuugguccuacaacgccgaacugcucguggcucuggagaaucagcacacgaucgaccugacagauagcgaaaugaacaagcucuuugagaaaaccaagaaacaacugagagaaaacgcggaggacauggggaauggaugcuucaagauuuaucauaagugugauaacgccugcaucggcucuauucgcaaugggaccuacgaccacaacguuuaccgggacgaggcucuuaauaacagauuucagaucaaaggcguggaacugaaguccggauauaaagauuggauucucuggaucagcuucgccaucuccugcuuucugcuuugugucgcccugcucggcuucauuaugugggcuugccagaaggggaauauccgcuguaacauuugcaucuga

SEQ ID NO: 205360 - RNA, 1701 nt, Artificial Sequence
  derived and/or modified CDS sequence (opt5) from hemagglutinin__InfluenzaA__ALE31759
augaagaccaucauugcccugagcuacauccucugccugguguucgcucagaaacuucccggcaacgacaauuccacagccacgcugugucucgggcaccaugcggucccuaacggaaccauuguuaagacaaucaccaaugauagaauugaggugacaaacgcuaccgaacuggugcaaaauucuagcaucggcgagaucugcgacuccccgcaccagauucuugaugggaaaaacuguacacugaucgacgcccuccugggagauccccagugcgacggcuuucagaauaagcggugggaucuguucgucgaacgcucuaaagccuauagcaacuguuacccuuaugacgugcccgauuacgcuucccucagaucucugguugccagcuccgggacccuugaguuuaaugacgagagcuucaacugggcuggagugacgcaaaauggcaccucuuccgccugcauucggggcagcaacucuuccuuuuucagccgccugaauuggcucacacauucuaacuuuaaguauccugcgcugaaugucaccaugcccaacaacgaacaguucgauaaacuuuacaucuggggagugcaccauccugggacagacaaagaucagauuuuucuguaugcccaguccagcggcagaguuaccguguccacgaagcggucucaacaggcugucaucccgaauauugggagccgccccagaauccggaacaucccuucccgcauuagcaucuacuggacaauugugaaacccggagacauccuccugauuaauucuaccggcaaccugaucgccccuagaggguacuucaagauccaguccggaaaaagcucuauuaugcggagcgacgcucccaucggcaaguguaaguccgagugcauuacaccgaauggcucuaucccuaacaauaaacccuuucagaacgugaaucgcauuaccuauggggccuguccuagauacgucaagcaaagcacccucaaacuggcgacaggaaugcggaacguucccgaaaagcagacgcgcggcaucuucggggccaucgcuggauuuauugagaauggcugggaagggaugaaagauggaugguauggcuucagacaccagaacuccgagggccgggggcaagccgcugaccuuaagagcacccaggccgccaucgaucagauuaauggaaaacugaacagacucaucggcaagacaaaugagaaguuccaccagauugaaaaagaguuuucugaaguggaggggcgcauccaagaccuggaaaaguacguggaggauaccaaaauugaccuuugguccuauaacgcugagcugcucgucgcgcuggaaaaccagcauacaaucgaucugaccgacagcgagaugaauaaacucuucgaaaagacgaagaagcagcugcgggagaacgccgaagauaugggaaauggcugcuuuaagaucuaccacaagugugacaacgcuugcauugggucuaucagaaauggcacauaugaucaugacguguaccgcgacgaggcccuuaacaaucgguuccagauuaaaggaguugagcugaaguccggcuacaaagauuggauccucuggauuagcuuugccaucuccugcuuccugcuuuguguggcucugcucggguuuaucaugugggccugccaaaagggaaacauuagauguaauaucugcauuuga

SEQ ID NO: 205361 - RNA, 1701 nt, Artificial Sequence
  derived and/or modified CDS sequence (opt5) from hemagglutinin__InfluenzaA__ALE31760
augaagaccaucauugcccugagcuacauccucugccugguguucgcucagaaaauucccggcaacgacaauuccacagccacgcuuugucuggggcaccaugcggucccuaacggaaccaucguuaagacaauuaccaaugauagaaucgaggugacaaacgcuaccgaacucgugcaaaauucuagcaucggcgagauuugcgacuccccgcaccagauccuggauggggaaaacuguacacuuauugacgcccugcucggagauccccagugcgacggcuuucagaauaaaaagugggaucuguucgucgagcggucuaaagccuauagcaacuguuacccuuaugacgugcccgauuacgcuucccugcgcucucucguugccagcuccgggacccuggaauuuaauaacgagagcuucaauuggacgggagugacccaaaacggcacaucuuccgcuugcaucagacggucuagcuccagcuuuuucucucgccuuaauuggcugacccaucucaacuauacauacccugcccugaaugucaccaugcccaacaacgagcaguuugacaaacuuuauauuuggggcgugcaccauccugggacggauaaggaccagaucuuccuguacgcgcaguccagcggaagaauuacaguuuccaccaagcggucucaacaggccgugaucccgaauaucggcuaccgcccccggauuagagauaucccuagccgcauuuccaucuauuggacaauugucaagcccggggacauccuccugaucaacagcaccggaaaucugauugcuccuagaggcuacuuuaaaauccggucugggaaguccagcauuaugcgcucugacgcccccaucggaaaauguaagagcgaaugcauuaccccgaacggcuccaucccuaaugauaagcccuuccagaacgugaauagaaucacauauggcgcuuguccucgguacgugaaacacucuacgcucaagcuggccaccgggaugcgcaacguccccgagaaacagacaagaggaauuuuuggcgcgaucgccggguucauugaaaauggaugggagggcaugguugacgggugguauggauuucggcaccaaaacagcgagggcagaggccaggcugccgaucuuaaguccacccaggcugccaucgaccaaauuaaugggaaacugaaccgccucaucggaaagacaaaugaaaaauuccaucagauugagaaggaguucagcgaaguggaaggccggauccaggaucuggagaaguacguggaggacgccaaaaucgaucuuuggucuuauaacgcugaacugcucgucgcgcuggagaaucagcacaccauugaccugacggauuccgaaaugaacaagcucuuugagaaaacaaagaaacaacugagagaaaacgccgaggacauggggaauggaugcuucaagaucuaccauaagugugauaacgcuugcauuggcagcauccgcaaugggaccuacgaccacaacguguaucgggacgaggcccuuaauaacagauuucagauuaaaggcguugaacugaagucuggauacaaagauuggauccucuggaucuccuucgccauuagcugcuuucugcuuuguguggcucugcucggcuucaucaugugggccugccagaaggggaauauucgcuguaacaucugcauuuga

SEQ ID NO: 205362 - RNA, 1701 nt, Artificial Sequence; identical to SEQ ID NO: 205057
  derived and/or modified CDS sequence (opt5) from hemagglutinin__InfluenzaA__ALE31761

SEQ ID NO: 205363 - RNA, 1701 nt, Artificial Sequence; identical to SEQ ID NO: 204513
  derived and/or modified CDS sequence (opt5) from hemagglutinin__InfluenzaA__ALE31762

SEQ ID NO: 205364 - RNA, 1701 nt, Artificial Sequence; identical to SEQ ID NO: 205119
  derived and/or modified CDS sequence (opt5) from hemagglutinin__InfluenzaA__ALE31763

SEQ ID NO: 205365 - RNA, 1701 nt, Artificial Sequence; identical to SEQ ID NO: 205171
  derived and/or modified CDS sequence (opt5) from hemagglutinin__InfluenzaA__ALE31764

SEQ ID NO: 205366 - RNA, 1701 nt, Artificial Sequence; identical to SEQ ID NO: 204513
  derived and/or modified CDS sequence (opt5) from hemagglutinin__InfluenzaA__ALE31765

SEQ ID NO: 205367 - RNA, 1701 nt, Artificial Sequence
  derived and/or modified CDS sequence (opt5) from hemagglutinin__InfluenzaA__ALE31774
augaagaccaucauugcccugagcuacauccucugccugguguucgcucagaaaauucccggcaacgacaauuccacagccacgcuuugucuggggcaccaugcggucccuaacggaaccaucguuaagacaauuaccaaugauagaaucgaggugacaaacgcuaccgaacucgugcaaaauucuagcaucggcgagauuugcgacuccccgcaccagauccuggauggggaaaacuguacacuuauugacgcccugcucggagauccccagugcgacggcuuucagaauaaaaagugggaucuguucgucgagcggucuaaagccuauagcaacuguuacccuuaugacgugcccgauuacgcuucccugcgcucucucguugccagcuccgggacccuggaauuuaauaacgagagcuucaauuggacgggagugacccaaaacggcacaucuuccgcuugcaucagacggagcagcuccagcuuuuucucucgccuuaauuggcugacccaucucaacuauacauacccugcccugaaugucaccaugcccaacaacgagcaguuugacaaacuuuauauuuggggcgugcaccauccugggacggauaaggaccagguuuuccuguacgcgcaguccagcggaagaaucacaguguccaccaagcggucucaacaggccgucauuccgaauaucggcagccgccccagaauccgggauauuccuucccgcaucagcauuuacuggacaaucgugaagcccggggacauucuccugaucaacucuaccggaaaucugaucgcuccuagaggcuauuuuaaaauucgguccgggaagucuucuaucaugcgcagcgacgcccccauuggaaaauguaaguccgaaugcaucaccccgaacggcucuauuccuaaugauaagcccuuccagaacgugaauagaaucacauacggcgcuuguccucgguaugucaaacacagcacgcucaagcuggccaccgggaugcgcaacguucccgagaaacagacaagaggaaucuuuggcgcgauugccggguucaucgaaaauggaugggagggcaugguggacgggugguacggauuucggcaccaaaacuccgagggcagaggccaggcugccgaucuuaagagcacccaggcugccauugaccaaaucaaugggaaacugaaccgccucauuggaaagacaaaugaaaaauuccaucagaucgagaaggaguucucugaaguggaaggccggauucaggaucuggagaaguaugucgaggacaccaaaaucgaucuuugguccuacaacgccgaacugcucguggcucuggagaaucagcacacgaucgaccugacagauagcgaaaugaacaagcucuuugagaaaaccaagaaacaacugagagaaaacgcggaggacauggggaauggaugcuucaagauuuaucauaagugugauaacgccugcaucggcucuauucgcaaugggaccuacgaccacaacguuuaccgggacgaggcucuuaauaacagauuucagaucaaaggcguggaacugaaguccggauauaaagauuggauucucuggaucagcuucgccaucuccugcuuucugcuuugugucgcccugcucggcuucauuaugugggcuugccagaaggggaauauccgcuguaacauuugcaucuga

SEQ ID NO: 205368 - RNA, 1701 nt, Artificial Sequence
  derived and/or modified CDS sequence (opt5) from hemagglutinin__InfluenzaA__ALE31775
augaagaccaucauugcccugagcuacauccucugccugguguucgcucagaaaauucccggcaacgacaauuccacagccacgcuuugucuggggcaccaugcggucccuaacggaaccaucguuaagacaauuaccaaugauagaaucgaggugacaaacgcuaccgaacucgugcaaaauucuagcaucggcgagauuugcgacuccccgcaccagauccuggauggggaaaacuguacacuuauugacgcccugcucggagauccccagugcgacggcuuucagaauaaaaagugggaucuguucgucgagcggucuaaagccuauagcaacuguuacccuuaugacgugcccgauuacgcuucccugcgcucucucguugccagcuccgggacccuggaauuuaauaacgagagcuucaauuggacgggagugacccaaaacggcacaucuuccgcuugcaucagaaagucuagcuccagcuuuuucucucggcuuaauuggcugacccaucucaacuauacauacccugcccugaaugucaccaugcccaacaacgagcaguuugacaaacuuuauauuuggggcgugcaccauccugggacggauaaggaccagaucuuccuguacgcgcgcuccagcggaagaauuacaguuuccaccaagcggucucagcaagccgugaucccgaauaucggcagccgcccccggauuagagauaucccuucccgcauuagcaucuacuggacaauugucaaacccggggacauccuccugaucaacucuaccggaaaucugauugcuccuagaggcuauuuuaagauccgguccgggaaaagcucuauuaugcgcagcgacgcccccaucggaaaguguaaguccgaaugcauuaccccgaacggcucuaucccuaaugauaaacccuuccagaacgugaauagaaucacauacggcgcuuguccucgguaugugaagcacagcacgcucaaacuggccaccgggaugcgcaacguccccgagaagcagacaagaggaauuuuuggcgcgaucgccggguucauugaaaauggaugggagggcaugguugacgggugguacggauuucggcaccagaacuccgagggcagaggccaagcugccgaucuuaaaagcacccaggcugccaucgaccagauuaaugggaagcugaaccgccucaucggaaaaacaaaugaaaaguuccaucaaauugagaaggaguucucugaaguggaaggccggauccaggaucuggagaaauauguggaggacaccaagaucgaucuuugguccuacaacgccgaauuucuggucgcucucgagaaucagcacacgauugaccugacagauagcgaaaugaacaaacuguucgagaagaccaaaaagcagcucagagaaaacgcggaggacauggggaauggaugcuuuaagaucuaucauaaaugugauaacgccugcauuggcucuauccgcaaugggaccuacgaccacaacguguaccgggacgaggcucugaauaacagauuccaaauuaagggcguugaacuuaaauccggauauaaggauuggauccuguggaucagcuuugccauuuccugcuuccuccuguguguggcccuucugggcuuuaucaugugggcuugccagaaagggaauauucgcuguaacaucugcauuuga

SEQ ID NO: 205369 - RNA, 1701 nt, Artificial Sequence
  derived and/or modified CDS sequence (opt5) from hemagglutinin__InfluenzaA__ALE31776
augaagaccaucauugcccugagcuacauccucugccugguguucgcucagaaacuucccgagaacgacaauuccacagccacgcugugucucggccaccaugcggucccuaacgggaccauuguuaagacaaucaccucugauagaauugaagugacaaaugcuaccgagcuggugcaaaacagcuccaucggagaaaucugcgacucuccgcaccagauucuugauggcaaaaauuguacacugaucgacgcccuccugggggauccccagugcgacggauuucagaacaagaaaugggaucuguucgucgagcggagcaaggccuauuccaauuguuacccuuaugacgugcccgauuacgcuucucuccgcagccugguugccuccagcggcacccuugaauuuaacgacgagucuuucaauugggcuggggugacgcaaaacggaaccuccagcgccugcauuagaggcucuaauuccagcuuuuucucucggcugaacuggcucacacauuccaauuuuaaguauccugcgcugaacgucaccaugcccaauaacgagcaguucgauaaacuuuacaucuggggcgugcaccauccugggacagacaaggaucagauuuuucuguaugcccagagcuccggacgcaucaccguuucuacgaaaagaagccaacaggcugugauuccgaacaucggcucccggccccgcaucagaaauauuccuagccggaucucuauuuacuggacaaucgucaagcccggggacauucuccugaucaacuccaccggaaaucugaucgccccucgcggcuacuucaaaauuagaagcgggaagucuagcaucaugcgguccgacgcuucuauuggaaaguguaaaagcgaaugcaucacacccaacggcuccauuccgaaugauaagccuuuucagaacgugaaucgcaucaccuauggcgccugucccagauacgugaaacagagcacccucaagcuggcgacagggaugcggaacgucccugagaaacaaacgcgcggaaucuucggcgccauugcuggguuuaucgaaaauggaugggagggcaugaaggacgggugguauggauucagacaccagaacucugagggccggggccaggccgcugaucuuaaauccacccaagccgccauugaccagaucaaugggaagcugaacagacucauuggaaagacaaaugaaaaauuccaccagaucgagaaggaauuuagcgagguugaaggccgcauucaggaucuggagaaauacguggaggacaccaagaucgaucuuuggucuuauaacgcugaacugcucguggcgcuggagaaucaacauacaaucgaccugaccgauuccgaaaugaacaaacucuucgagaagacgaagaaacagcugcgggaaaacgccgaggacauggggaauggaugcuuuaagauuuaccacaaaugugauaacgcuugcaucggcagcauuagaaaugggacauaugaccaugacgucuaccgcgaugaggcccuuaacaaucgguuccagaucaagggcguggaacugaaauccggauacaaggacuggauucucuggaucucuuuugccaucagcugcuuccugcuuuguguugcucugcucggcuuuauuaugugggccugccagaaggggaacaucagauguaauauuugcaucuga

SEQ ID NO: 205370 - RNA, 1701 nt, Artificial Sequence
  derived and/or modified CDS sequence (opt5) from hemagglutinin__InfluenzaA__ALE31777
augaagaccaucauugcccugagcuacauccucugccugguguucgcucagaaaauucccggcaacgacaauuccacagccacgcuuugucuggggcaccaugcggucccuaacggaaccaucguuaagacaauuaccaaugauagaaucgaggugacaaacgcuaccgaacucgugcaaaauucuagcaucggcgagauuugcgacuccccgcaccagauccuggauggggaaaacuguacacuuauugacgcccugcucggagauccccagugcgacggcuuucagaauaaaaagugggaucuguucgucgagcggucuaaagccuauagcaacuguuacccuuaugacgugcccgauuacgcuucccugcgcucucucguugccagcuccgggacccuggaauuuaauaacgagagcuucaauuggacgggagugacccaaaacggcacaucuuccgcuugcaucagacggagcagcuccagcuuuuucucucgccuuaauuggcugacccaucucaacuauacauacccugcccugaaugucaccaugcccaacaacgagcaguuugacaaacuuuauauuuggggcgugcaccauccugggacggauaaggaccagaucuuccuguacgcgcaguccagcggaagaauuacaguuuccaccaagcggucucaacaggccguggucccgaauaucggcagccgccccagaauccgggauauuccuucccgcaucagcauuuacuggacaaucgugaagcccggggacauucuccugaucaacucuaccggaaaucugaucgcuccuagaggcuauuuuaaaauucgguccgggaagucuucuaucaugcgcagcgacgcccccauuggaaaauguaaguccgaaugcaucaccccgaacggcucuauuccuaaugauaagcccuuccagaacgugaauagaaucacauacggcgcuuguccucgguaugucaaacacagcacgcucaagcuggccaccgggaugcgcaacguucccgagaaacagacaagaggaaucuuuggcgcgauugccggguucaucgaaaauggaugggagggcaugguggacgggugguacggauuucggcaccaaaacuccgagggcagaggccaggcugccgaucuuaagagcacccaggcugccauugaccaaaucaaugggaaacugaaccgccucauuggaaagacaaaugaaaaauuccaucagaucgagaaggaguucucugaaguggaaggccggauucaggaucuggagaaguaugucgaggacaccaaaaucgaucuuugguccuacaacgccgaacugcucguggcucuggagaaucagcacacgaucgaccugacagauagcgaaaugaacaagcucuuugagaaaaccaagaaacaacugagagaaaacgcggaggacauggggaauggaugcuucaagauuuaucauaagugugauaacgccugcaucggcucuauucgcaaugggaccuacgaccacaacguuuaccgggacgaggcucuuaauaacagauuucagaucaaaggcguggaacugaaguccggauauaaagauuggauucucuggaucagcuucgccaucuccugcuuucugcuuugugucgcccugcucggcuucauuaugugggcuugccagaaggggaauauccgcuguaacauuugcaucuga

SEQ ID NO: 205371 - RNA, 1701 nt, Artificial Sequence; identical to SEQ ID NO: 205119
  derived and/or modified CDS sequence (opt5) from hemagglutinin__InfluenzaA__ALE31778

SEQ ID NO: 205372 - RNA, 1701 nt, Artificial Sequence; identical to SEQ ID NO: 204513
  derived and/or modified CDS sequence (opt5) from hemagglutinin__InfluenzaA__ALE31779

SEQ ID NO: 205373 - RNA, 1701 nt, Artificial Sequence
  derived and/or modified CDS sequence (opt5) from hemagglutinin__InfluenzaA__ALE31780
augaagaccaucauugcccugagcuacauccucugccugguguucgcucagaaaauucccggcaacgacaauuccacagccacgcuuugucuggggcaccaugcggucccuaacggaaccaucguuaagacaauuaccaaugauagaaucgaggugacaaacgcuaccgaacucgugcaaaauucuagcaucggcgagauuugcgacuccccgcaccagauccuggauggggaaaacuguacacuuauugacgcccugcucggagauccccagugcgacggcuuucagaauaaaaagugggaucuguucgucgagcggucuaaagcccauagcaacuguuauccuuacgacgugcccgauuaugcuucccugcgcucucucguugccagcuccgggacccuggaauuuaauaacgagagcuucaauuggacgggagugacccaaaacggcacaucuuccgcuugcaucagacggagcagcuccagcuuuuucucucgccuuaauuggcugacccaccucaacuacacauauccugcccugaaugucaccaugcccaacaacgagcaguuugacaaacuuuacauuuggggcgugcaucacccugggacggauaaggaccagaucuuccuguaugcgcaguccagcggaagaauuacaguuuccaccaagcggucucaacaggccgugaucccgaauaucggcagccgcccccggauuagagauaucccuucccgcauuagcaucuacuggacaauugucaagcccggggacauccuccugaucaacucuaccggaaaucugauugcuccuagaggcuacuuuaaaauccgguccgggaagucuucuauuaugcgcaccgacgcccccaucggaaaauguaagagcgaaugcauuacaccgaacggcuccaucccuaaugauaagcccuuccagaacgugaauagaaucacguauggcgcuuguccucgguacgugaaacacucuacccucaagcuggccacagggaugcgcaacguccccgagaaacagaccagaggaauuuuuggcgcgaucgccggguucauugaaaauggaugggagggcaugguugacgggugguauggauuucggcaucaaaacagcgagggcagaggccaggcugccgaucuuaaguccacacaggcugccaucgaccaaauuaaugggaaacugaaccgccucaucggaaagaccaaugaaaaauuccaccagauugagaaggaguucagcgaaguggaaggccggauccaggaucuggagaaguacguggaggacacgaaaaucgaucuuuggucuuauaacgccgaacugcucgucgcucuggagaaucagcauacaauugaccugaccgauuccgaaaugaacaagcucuuugagaaaaccaagaaacaacugagagaaaacgcggaggacauggggaauggaugcuucaagaucuaccacaagugugauaacgccugcauuggcagcauccgcaaugggacauaugaccacaacguguaccgggacgaggcucuuaauaacagauuucagauuaaaggcguugaacugaagucuggauacaaagauuggauccucuggaucuccuucgccauuagcugcuuucugcuuuguguggcccugcucggcuucaucaugugggcuugccagaaggggaauauucgcuguaacaucugcauuuga

SEQ ID NO: 205374 - RNA, 1701 nt, Artificial Sequence
  derived and/or modified CDS sequence (opt5) from hemagglutinin__InfluenzaA__ALE31781
augaagaccaucauugcccugagcuacauccucugccugguguucgcucagaaaauucccggcaacgacaauuccacagccacgcuuugucuggggcaccaugcggucccuaacggaaccaucguuaagacaauuaccaaugauagaaucgaggugacaaacgcuaccgaacucgugcaaaauucuagcaucggcgagauuugcggguccccgcaccagauccuggacggagaaaacuguacacuuauugaugcccugcucggcgacccccagugcgauggguuucagaauaaaaagugggaccuguucgucgagcggucuaaagccuauagcaacuguuacccuuaugaugugcccgacuacgcuucccugcgcucucucguugccagcuccggaacccuggaauuuaauaacgagagcuucaauuggacgggcgugacccaaaacggcacaucuuccgcuugcaucagaaagucuagcuccagcuuuuucucuaagcugaauuggcuuacccaucucaacuauacauacccugcccugaaugucaccaugcccaacaacgagcaguuugauaaacuuuauauuuggggagugcaccauccugggacggacaaggaucagaucuuccuguacgcgcgguccagcggccgcauuacaguuuccaccaaaagaucucagcaagccgugaucccgaauaucgggagccggccccgcauuagagacaucccuucccggauuagcaucuacuggacaauugucaagcccggagauauccuccugaucaacucuaccggcaaucugauugcuccucgcggguauuuuaaaaucagauccggaaagagcucuauuaugcggagcgacgcccccaucggcaaguguaaauccgaaugcauuaccccgaacggcucuaucccuaaugacaagcccuuccagaacgugaaucgcaucacauacggggcuuguccuagauaugugaaacacagcacgcucaagcuggccaccggaaugcggaacguccccgagaaacagacacgcggcauuuuuggggcgaucgccggauucauugaaaauggcugggaggggaugguugauggaugguacggcuuuagacaccagaacuccgagggccgggggcaagcugccgaccuuaagagcacccaggcugccaucgaucagauuaauggaaaacugaacagacucaucggcaagacaaaugaaaaguuccaucaaauugagaaagaguucucugaaguggaagggcgcauccaggaccuggagaaguauguggaggauaccaaaaucgaccuuugguccuacaacgccgaacugcucgucgcucuggagaaucagcacacgauugaucugacagacagcgaaaugaacaagcucuuugagaaaaccaagaagcagcugcgggaaaacgcggaggauaugggaaauggcugcuucaaaaucuaucauaagugugacaacgccugcauugggucuaucagaaauggcaccuacgaucacaacguguaccgcgacgaggcucuuaauaaccgguuucaaauuaaaggaguugaacugaaguccggcuauaaagacuggauccucuggaucagcuucgccauuuccugcuuucugcuuuguguggcccugcucggguucaucaugugggcuugccagaagggaaauauuagauguaacaucugcauuuga

SEQ ID NO: 205375 - RNA, 1701 nt, Artificial Sequence
  derived and/or modified CDS sequence (opt5) from hemagglutinin__InfluenzaA__ALE31782
augaagaccaucauugcccugagcuacauccucugccugguguucgcucagaaaauucccggcaacgacaauuccacagccacgcuuugucuggggcaccaugcggucccuaacggaaccaucguuaagacaauuaccaaugauagaaucgaggugacaaacgcuaccgaacucgugcaaaauucuagcaucggcgagauuugcgacuccccgcaccagauccuggauggggaaaacuguacacuuauugacgcccugcucggagauccccagugcgacggcuuucagaauaaaaagugggaucuguucgucgagcggucuaaagccuauagcaacuguuacccuuaugacgugcccgauuacguuucccugcgcucucucguggcuagcuccgggacccuggaauuuaauaacgagagcuucaauuggacgggagucacccaaaacggcacaucuuccgccugcaucagacggagcagcuccagcuuuuucucucgccuuaauuggcugacccaucucaacuauacauacccugcucugaaugugaccaugcccaacaacgagcaguuugacaaacuuuauauuuggggcguucaccauccugggacggauaaggaccagaucuuccuguacgcccaguccagcggaagaauuacaguguccaccaagcggucucaacaggcggucaucccgaauaucggcagccgcccccggauuagagauaucccuucccgcauuagcaucuacuggacaauugugaagcccggggacauccuccugaucaacucuaccggaaaucugauugccccuagaggcuauuuuaaaauccgguccgggaagucuucuauuaugcgcagcgacgcucccaucggaaaauguaaguccgaaugcauuaccccgaacggcucuaucccuaaugauaagcccuuccagaacgugaauagaaucacauacggcgccuguccucgguaugucaaacagagcacgcucaagcuggcuaccgggaugcgcaacguucccgagaaacaaacaagaggaauuuuuggcgccaucgcgggguucauugaaaauggaugggagggcaugguggacgggugguacggauuucggcaccagaacuccgagggcagaggccaggccgcugaucuuaagagcacccaagccgcuaucgaccagauuaaugggaaacugaaccgccucaucggaaagacaaaugaaaaauuccaccagauugagaaggaguucucugaaguggaaggccggauccaggaucuggagaaguaugucgaggacaccaaaaucgaucuuugguccuacaacgccgaacugcucguggcccuggagaaucaacauacgauugaccugacagauagcgaaaugaacaagcucuuugagaaaaccaagaaacagcugagagaaaacgcugaggacauggggaauggaugcuucaagaucuaucacaagugugauaacgcgugcauuggcucuauccgcaaugggaccuacgaccauaacguuuaccgggacgaggcccuuaauaacagauuucagauuaaaggcguggaacugaaguccggauauaaagauuggauccucuggaucagcuucgcuauuuccugcuuucugcuuugugucgcccugcucggcuucaucaugugggccugccagaaggggaauauucgcuguaacaucugcauuuga

SEQ ID NO: 205376 - RNA, 1701 nt, Artificial Sequence
  derived and/or modified CDS sequence (opt5) from hemagglutinin__InfluenzaA__ALE31783
augaagaccaucauugcccugagcuacauccucugccugguguucgcucagaaaauucccggcaacgacaauuccacagccacgcuuugucuggggcaccaugcggucccuaacggaaccaucguuaagacaauuaccaaugauagaaucgaggugacaaacgcuaccgaacucgugcaaaauucuagcaucggcgagauuugcgacuccccgcaccagauccuggauggggaaaacuguacacuuauugacgcccugcucggagauccccagugcgacggcuuucagaauaaaaagugggaucuguucgucgagcggucuaaagccuauagcaacuguuacccuuaugacgugcccgauuacgcuucccugcgcucucucguugccagcuccgggacccuggaauuuaauaacgagagcuucaauuggacgggagugacccaaaacggcacaucuuccgcuugcaucagacggagcagcuccagcuuuuucucucgccuuaauuggcugacccaucucaacuauacauacccugcccugaaugucaccgugcccaacaacgagcaguuugacaaacuuuauauuuggggcguucaccauccugggacggauaaggaccagaucuuccuguacgcgcaguccagcggaagaauuacaguguccaccaagcggucucaacaggccgucaucccgaauaucggcagccgcccccggauuagagauaucccuucccgcauuagcaucuacuggacaauugugaagcccggggacauccuccugaucaacucuaccggaaaucugauugcuccuagaggcuauuuuaaaauccgguccgggaagucuucuauuaugcgcagcgacgcccccaucggaaaauguaaguccgaaugcauuaccccgaacggcucuaucccuaaugauaagcccuuccagaacgugaauagaaucacauacggcgcuuguccucgguaugucaaacacagcacgcucaagcuggccaccgggaugcgcaacguucccgagaaacagacaagaggaauuuuuggcgcgaucgccggguucauugaaaauggaugggagggcaugguggacgggugguacggauuucggcaccaaaacuccgagggcagaggccaggcugccgaucuuaagagcacccaggcugccaucgaccaaauuaaugggaaacugaaccgccucaucggaaagacaaaugaaaaauuccaucagauugagaaggaguucucugaaguggaaggccggauccaggaucuggagaaguaugucgaggacaccaaaaucgaucuuugguccuacaacgccgaacugcucguggcucuggagaaucagcacacgauugaccugacagauagcgaaaugaacaagcucuuugagaaaaccaagaaacaacugagagaaaacgcggaggacauggggaauggaugcuucaagaucuaucauaagugugauaacgccugcauuggcucuauccgcaaugggaccuacgaccacaacguuuaccgggacgaggcucuuaauaacagauuucagauuaaaggcguggaacugaaguccggauauaaagauuggauccucuggaucagcuucgccauuuccugcuuucugcuuugugucgcccugcucggcuucaucaugugggcuugccagaaggggaauauucgcuguaacaucugcauuuga

SEQ ID NO: 205377 - RNA, 1701 nt, Artificial Sequence; identical to SEQ ID NO: 205129
  derived and/or modified CDS sequence (opt5) from hemagglutinin__InfluenzaA__ALE31784

SEQ ID NO: 205378 - RNA, 1701 nt, Artificial Sequence; identical to SEQ ID NO: 204513
  derived and/or modified CDS sequence (opt5) from hemagglutinin__InfluenzaA__ALE31785

SEQ ID NO: 205379 - RNA, 1701 nt, Artificial Sequence; identical to SEQ ID NO: 205119
  derived and/or modified CDS sequence (opt5) from hemagglutinin__InfluenzaA__ALE31786

SEQ ID NO: 205380 - RNA, 1701 nt, Artificial Sequence; identical to SEQ ID NO: 205171
  derived and/or modified CDS sequence (opt5) from hemagglutinin__InfluenzaA__ALE31787

SEQ ID NO: 205381 - RNA, 1701 nt, Artificial Sequence; identical to SEQ ID NO: 204613
  derived and/or modified CDS sequence (opt5) from hemagglutinin__InfluenzaA__ALE31788

SEQ ID NO: 205382 - RNA, 1701 nt, Artificial Sequence; identical to SEQ ID NO: 204513
  derived and/or modified CDS sequence (opt5) from hemagglutinin__InfluenzaA__ALE31789

SEQ ID NO: 205383 - RNA, 1701 nt, Artificial Sequence; identical to SEQ ID NO: 205128
  derived and/or modified CDS sequence (opt5) from hemagglutinin__InfluenzaA__ALE31790

SEQ ID NO: 205384 - RNA, 1701 nt, Artificial Sequence; identical to SEQ ID NO: 205249
  derived and/or modified CDS sequence (opt5) from hemagglutinin__InfluenzaA__ALE31791

SEQ ID NO: 205385 - RNA, 1701 nt, Artificial Sequence; identical to SEQ ID NO: 205149
  derived and/or modified CDS sequence (opt5) from hemagglutinin__InfluenzaA__ALE31792

SEQ ID NO: 205386 - RNA, 1701 nt, Artificial Sequence
  derived and/or modified CDS sequence (opt5) from hemagglutinin__InfluenzaA__ALE31793
augaagaccaucauugcccugagcuacauccucugccugguguucgcucagaaaauucccggcaacgacaauuccacagccacgcuuugucuggggcaccaugcggucccuaacggaaccaucguuaagacaauuaccaaugauagaaucgaggugacaaacgcuaccgaacucgugcaaaauucuagcaucggcgagauuugcgacuccccgcaccagauccuggauggggaaaacuguacacuuauugacgcccugcucggagauccccagugcgacggcuuucagaauaaaaagugggaucuguucgucgagcggucuaaagccuauagcaacuguuacccuuaugacgugcccgauuacgcuucccugcgcucucucguugccagcuccgggacccuggaauuuaauaacgagagcuucaauuggacgggagugacccaaaacggcacaucuuccgcuugcaucagacggucuagcuccagcuuuuucucucgccuuaauuggcugacccaucucaacuauacauacccugcccugaaugucaccaugcccaacaacgagcaguuugacaagcuguauauuuggggcgugcaccauccugggacggauaaggaccagaucucccuguacgcgcagagcuccggaagaauuacaguuucuaccaaacggagccaacaggccgugaucccgaauaucggcucccgcccccggauuagagauaucccuagccgcauuucuaucuacuggacaauugucaagcccggggacauccuccugaucaacuccaccggaaaucugauugcuccuagaggcuauuucaaaauccggagcgggaagucuagcauuaugcgcuccgacgcccccaucggaaaauguaagucugaaugcauuaccccgaacggcagcaucccuaaugauaagcccuuucagaacgugaauagaaucacauacggcgcuuguccucgguaugugaaacacuccacgcucaagcuggccaccgggaugcgcaacguccccgagaaacagacaagaggaauuuucggcgcgaucgccggguuuauugaaaauggaugggagggcaugguugacgggugguacggauuccggcaccaaaacagcgagggcagaggccaggcugccgaucuuaagucuacccaggcugccaucgaccaaauuaaugggaaacugaaccgccucaucggaaagacaaaugaaaaauuucaucagauugagaaggaguucuccgaaguggaaggccggauccaggaucuggagaaguauguggaggacaccaaaaucgaucuuuggagcuacaacgccgaacugcucgucgcucuggagaaucagcacacgauugaccugacagauucugaaaugaacaaacucuucgagaagaccaagaaacaacugagagaaaacgcggaggacauggggaauggaugcuuuaagaucuaucauaagugugauaacgccugcauuggcuccauccgcaaugggaccuacgaccacaacguguaccgggacgaggcucuuaauaacagauuccagauuaaaggcguugaacuuaagagcggauauaaagauuggauccucuggaucuccuuugccauuucuugcuuccugcuuuguguggcccugcucggcuuuaucaugugggcuugccagaaggggaauauucgcuguaacaucugcauuuga

SEQ ID NO: 205387 - RNA, 1701 nt, Artificial Sequence; identical to SEQ ID NO: 204513
  derived and/or modified CDS sequence (opt5) from hemagglutinin__InfluenzaA__ALE31794

SEQ ID NO: 205388 - RNA, 1701 nt, Artificial Sequence; identical to SEQ ID NO: 204513
  derived and/or modified CDS sequence (opt5) from hemagglutinin__InfluenzaA__ALE31795

SEQ ID NO: 205389 - RNA, 1701 nt, Artificial Sequence; identical to SEQ ID NO: 204513
  derived and/or modified CDS sequence (opt5) from hemagglutinin__InfluenzaA__ALE31796

SEQ ID NO: 205390 - RNA, 1701 nt, Artificial Sequence; identical to SEQ ID NO: 205171
  derived and/or modified CDS sequence (opt5) from hemagglutinin__InfluenzaA__ALE31797

SEQ ID NO: 205391 - RNA, 1701 nt, Artificial Sequence; identical to SEQ ID NO: 205171
  derived and/or modified CDS sequence (opt5) from hemagglutinin__InfluenzaA__ALE31798

SEQ ID NO: 205392 - RNA, 1701 nt, Artificial Sequence; identical to SEQ ID NO: 204513
  derived and/or modified CDS sequence (opt5) from hemagglutinin__InfluenzaA__ALE31799

SEQ ID NO: 205393 - RNA, 1701 nt, Artificial Sequence; identical to SEQ ID NO: 205119
  derived and/or modified CDS sequence (opt5) from hemagglutinin__InfluenzaA__ALE31800

SEQ ID NO: 205394 - RNA, 1701 nt, Artificial Sequence; identical to SEQ ID NO: 204513
  derived and/or modified CDS sequence (opt5) from hemagglutinin__InfluenzaA__ALE31801

SEQ ID NO: 205395 - RNA, 1701 nt, Artificial Sequence; identical to SEQ ID NO: 204513
  derived and/or modified CDS sequence (opt5) from hemagglutinin__InfluenzaA__ALE31802

SEQ ID NO: 205396 - RNA, 1701 nt, Artificial Sequence; identical to SEQ ID NO: 205119
  derived and/or modified CDS sequence (opt5) from hemagglutinin__InfluenzaA__ALE31803

SEQ ID NO: 205397 - RNA, 1701 nt, Artificial Sequence; identical to SEQ ID NO: 205070
  derived and/or modified CDS sequence (opt5) from hemagglutinin__InfluenzaA__ALE31805

SEQ ID NO: 205398 - RNA, 1701 nt, Artificial Sequence
  derived and/or modified CDS sequence (opt5) from hemagglutinin__InfluenzaA__ALE31806
augaagaccaucauugcccugagcuacauccucugccugguguucgcucagaaaauucccggcaacgacaauuccacagccacgcuuugucuggggcaccaugcggucccuaacggaaccaucguuaagacaauuaccaaugauagaaucgaggugacaaacgcuaccgaacucgugcaaaauucuagcaucggcgagauuugcgacuccccgcaccagauccuggauggggaaaacuguacacuuauugacgcccugcucggagauccccagugcgacggcuuucagaauaaaaagugggaucuguucgucgagcggucuaaagccuauagcaacuguuacccuuaugacgugcccgauuacgcuucccugcgcucucucguugccagcuccgggacccuggaauuuaauaacgagagcuucaauuggacgggagugacccaaaacggcacaucuuccgcuugcaucagacggagcagcuccagcuuuuucucucgccuuaauuggcugacccaucucaacuauacauacccugcccugaaugucaccaugcccaacaacgagcaguuugacaaacuuuauauuuggggcgugcaccauccugggacggauaaggaccagaucuuccuguacgcgcaguccagcggaagaauuacaguuuccaccaagcggucucaacaggccgugaucccgaauaucggcagccgcccccggauuagagauaucccuucccgcauuagcaucuacuggacaauugucaagcccggggacacccuccugaucaacucuaccggaaaucugaucgcuccuagaggcuauuuuaaaauucgguccgggaagucuucuaucaugcgcagcgacgcccccauuggaaaauguaaguccgaaugcaucacaccgaacggcucuauuccuaaugauaagcccuuccagaacgugaauagaaucacguacggcgcuuguccucgguaugugaaacacagcacccucaagcuggccacagggaugcgcaacguccccgagaaacagaccagaggaaucuuuggcgcgauugccggguucaucgaaaauggaugggagggcaugguugacgggugguacggauuucggcaccaaaacuccgagggcagaggccaggcugccgaucuuaagagcacacaggcugccauugaccaaaucaaugggaaacugaaccgccucauuggaaagaccaaugaaaaauuccaucagaucgagaaggaguucucugaaguggaaggccggauucaggaucuggagaaguauguggaggacacgaaaaucgaucuuugguccuacaacgccgaacugcucgucgcucuggagaaucagcacacaaucgaccugaccgauagcgaaaugaacaagcucuuugagaaaaccaagaaacaacugagagaaaacgcggaggacauggggaauggaugcuucaagauuuaucauaagugugauaacgccugcaucggcucuauucgcaaugggacauacgaccacaacguguaccgggacgaggcucuuaauaacagauuucagaucaaaggcguugaacugaaguccggauauaaagauuggauucucuggaucagcuucgccaucuccugcuuucugcuuuguguggcccugcucggcuucauuaugugggcuugccagaaggggaauauccgcuguaacauuugcaucuga

SEQ ID NO: 205399 - RNA, 1701 nt, Artificial Sequence
  derived and/or modified CDS sequence (opt5) from hemagglutinin__InfluenzaA__ALE31807
augaagaccaucauugcccugagcuacauccucugccugguguucgcucagaaacuucccggcaacgacaauuccacagccacgcugugucucgggcaccaugcggucccuaacggaaccauuguuaagacaaucaccaaugauagaauugaggugacaaacgcuaccgaacuggugcaaaauucuagcaucggcgagaucugcgacuccccgcaccagauucuugauggggaaaacuguacacugaucgacgcccuccugggagauccccagugcgacggcuuucagaauaaaaagugggaucuguucgucgagcggucuaaagccuauagcaacuguuacccuuaugacgugcccgauuacgcuucccuccgcucucugguugccagcuccgggacccuugaauuuaauaacgagagcuucaauuggacgggagugacccaaaacggcacaucuuccgcuugcauuagacggagcagcuccagcuuuuucucucgccugaauuggcucacccaucugaacuuuacauauccugcccuuaaugucaccaugcccaacaacgagcaguucgacaagcuguacguguggggcguucaccauccugggacggauaaggaccagaucuuucucuaugcgcaguccagcggaagaauuacaguguccaccaaacggucucaacaggccgucaucccgaauauuggcagccgccccagaauccggaacaucccuucccgcauuagcaucuacuggacaauugugaagcccggggauauccugcugauuaauucuaccggaaaccucaucgcuccuagaggcuacuucaaaauccgguccgggaagucuucuauuaugcgcagcgacgcccccaucggaaaauguaaguccgaaugcauuaccccgaauggcucuaucccuaacgacaagcccuuucagaaugugaacagaauuacauauggcgcuuguccucgguacgucaaacacagcacgcugaagcuggccaccgggaugcgcaauguucccgagaaacagacaagaggaaucuucggcgcgaucgccggguuuauugaaaacggaugggagggcaugguggaugggugguauggauuccggcaccaaaauuccgagggcagaggccaggcugccgaccuuaagagcacccaggcugccaucgaucaaauuaacgggaaacucaaucgccugaucggaaagacaaacgaaaaauuccaucagauugagaaggaauuuucugagguggaaggccggauccaggaccuugagaaguacgucgaggauaccaaaauugaccugugguccuauaaugccgaacuccugguggcucuggagaaccagcacacgaucgaucucacagacagcgaaaugaacaagcuguucgagaaaaccaagaaacaacuuagagaaaaugcggaggauauggggaacggaugcuuuaagaucuaccauaagugugacaaugccugcauuggcucuauccgcaacgggaccuaugaucacaauguuuaccgggacgaggcucugaacaauagauuccagauuaaaggcguggaacucaaguccggauacaaagacuggauccuguggauuagcuuugccaucuccugcuuccuucugugugucgcccuccugggcuuuaucaugugggcuugccagaaggggaacauucgcuguaauaucugcauuuga

SEQ ID NO: 205400 - RNA, 1701 nt, Artificial Sequence
  derived and/or modified CDS sequence (opt5) from hemagglutinin__InfluenzaA__ALE31808
augaagaccaucauugcccugggcuacauccucugccugguguucgcucagaaaauucccgggaacgacaauagcacagccacgcuuugucugggacaccaugcggucccuaacggcaccaucguuaagacaauuaccaaugauagaaucgaggugacaaacgcuaccgaacucgugcaaaauuccucuaucggggagauuugcgacagcccgcacaaaauccuggauggagaaaacuguacacuuauugacgcccugcucggcgauccccagugcgacggguuucagaauaagaaaugggaucuguucgucgagcgguccaaggccuauucuaacuguuacccuuaugacgugcccgauuacgcuagccugcgcucccucguugccucuagcggaacccuggaauuuaauaacgaguccuucaauuggacgggcgugacccagaacggcacaagcucugcuugcaucagacgguccucuagcuccuuuuucagccgccuuaauuggcugacccaucucaacuauacauacccugcccugaaugucaccaugcccaacaacgagcaauuugacaaacuuuauauuuggggagugcaccauccugggacggauaaggaccagaucuuccuguacgcgcagucuuccggcagaauuacaguuagcaccaagcggucccagcaagccgugaucccgaauaucgggucucgcccccggauuagagauaucccuagccgcauuuccaucuacuggacaauugucaaacccggagacauccuccugaucaacagcaccggcaaucugauugcuccuagaggguauuuuaagauccggucuggaaaauccagcauuaugcgcucugacgcccccaucggcaaguguaagagcgaaugcauuaccccgaacggcuccaucccuaaugauaaacccuuccagaacgugaauagaaucacauacggggcuuguccucgguaugugaagcacucuacgcucaaacuggccaccggaaugcgcaacguccccgagaagcagacaagaggcauuuuuggggcgaucgccggauucauugaaaauggcugggaggggaugguugacggaugguacggcuuucggcaccagaacagcgagggcagagggcaagcugccgaucuuaaauccacccaggcugccaucgaccagauuaauggaaagcugaaccgccucaucggcaaaacaaaugaaaaguuccaucaaauugagaaggaguucagcgaaguggaagggcggauccaggaucuggagaaauauguggaggacaccaagaucgaucuuuggucuuacaacgccgaacugcucgucgcucuggagaaucagcacacgauugaccugacagauuccgaaaugaacaaacucuuugagaagaccaaaaagcagcugagagaaaacgcggaggacaugggaaauggcugcuucaagaucuaucauaaaugugauaacgccugcauugggagcauccgcaauggcaccuacgaccacaacguguaccgggacgaggcucuuaauaacagauuucaaauuaagggaguugaacugaaaucuggcuauaaggauuggauccucuggaucuccuucgccauuagcugcuuucugcuuuguguggcccugcucggguucaucaugugggcuugccagaaaggaaauauucgcuguaacaucugcauuuga

SEQ ID NO: 205401 - RNA, 1701 nt, Artificial Sequence; identical to SEQ ID NO: 204513
  derived and/or modified CDS sequence (opt5) from hemagglutinin__InfluenzaA__ALE31810

SEQ ID NO: 205402 - RNA, 1701 nt, Artificial Sequence; identical to SEQ ID NO: 204513
  derived and/or modified CDS sequence (opt5) from hemagglutinin__InfluenzaA__ALE31812

SEQ ID NO: 205403 - RNA, 1701 nt, Artificial Sequence
  derived and/or modified CDS sequence (opt5) from hemagglutinin__InfluenzaA__ALE31814
augaagaccaucauugcccugagcuacauccucugccugguguucgcucagaaacuucccggcaacgacaauuccacagccacgcugugucucgggcaccaugcggucccuaacggaaccauuguuaagacaaucaccaaugauagaauugaggugacaaacgcuaccgaacuggugcaaaauucuagcaucggcgagaucugcgacuccccgcaccagauucuugaugggaaaaacuguacacugaucgacgcccuccugggagauccccagugcgacggcuuucagaauaagaaaugggaucuguucgucgaacggucuaaggcccauagcaacuguuauccuuacgacgugcccgauuaugcuucccuccgcucucugguugccagcuccgggacccuugaguuuaauaacgaauccuucaauugggcuggagugacgcaaaacggcaccucuuccagcugcauuagaggcucuaauuccagcuuuuucucucggcugaacuggcucacacaccuuaauuccaaguacccugcccuuaacgucaccaugcccaacaaugagcaguuugacaaacuguauaucuggggagugcaucacccugggacagauaaggaccagauuuuccucuacgcgcagccgagcggccgcaucaccguuuccacgaaaagaucucaacaggccgugauucccaacaucgggagccggccucgcaucagagauauucccucccggaucagcauuuauuggacaaucgucaagccuggagacauucugcugaucaauucuaccggcaaccucaucgcuccccgcggguacuuuaaaauuagauccggaaagagcucuaucaugcggagcgacgccccgauuggcaaguguaaauccgagugcaucacaccuaauggcucuauucccaacgauaagccuuuccagaaugugaaccgcaucaccuacggggcuugucccagauaugugaaacagagcacccugaagcuggccacaggaaugcggaauguccccgaacgccaaacgagaggcaucuuuggggcgauugccggauucaucgagaacggcugggaagggaugguugacggaugguacggcuuucggcaccagaauagcgagggcagagggcaggcugccgaucugaaaagcacccaagcugccauugaccagaucaacggaaagcucaaucgccugauuggcaaaacaaacgagaaguuccaucagaucgaaaaggaguucucugaaguggaggggcggauucaggaucuugaaaaauauguggaggacaccaagaucgaucugugguccuacaaugccgagcuccuggucgcucuggaaaaccaacacacaaucgaccucaccgauagcgagaugaacaaacuguuugaaaagacgaaaaagcagcuuagagagaaugcggaagacaugggaaacggcugcuucaagauuuaucauaaaugugauaaugccugcaucgggucuauucgcaacggcacauacgaccacgacguguaucgggaugaggcucugaauaacagauuucagaucaagggaguugagcucaaauccggcuacaaggacuggauucuguggaucagcuucgccaucuccugcuuucuucuguguguggcccuccugggguucauuaugugggcuugccagaaaggaaauauccgcuguaacauuugcaucuga

SEQ ID NO: 205404 - RNA, 1701 nt, Artificial Sequence; identical to SEQ ID NO: 205403
  derived and/or modified CDS sequence (opt5) from hemagglutinin__InfluenzaA__ALE31815

SEQ ID NO: 205405 - RNA, 1701 nt, Artificial Sequence; identical to SEQ ID NO: 204513
  derived and/or modified CDS sequence (opt5) from hemagglutinin__InfluenzaA__ALE31818

SEQ ID NO: 205406 - RNA, 1701 nt, Artificial Sequence
  derived and/or modified CDS sequence (opt5) from hemagglutinin__InfluenzaA__ALE31819
augaagaccaucauugcccugagcuacauccucugccugguguucgcucagaaaauucccggcaacgacaauuccacagccacgcuuugucuggggcaccaugcggucccuaacggaaccaucguuaagacaauuaccaaugauagaaucgaggugacaaacgcuaccgaacucgugcaaaauucuagcaucggcgagauuugcgacuccccgcaccagauccuggauggggaaaacuguacacuuauugacgcccugcucggagauccccagugcgacggcuuucagaauaaaaagugggaucuguucgucgagcggucuaaagccuauagcaacuguuacccuuaugacgugcccgauuacgcuucccugcgcucucucguugccagcuccgggacccuggaauuuaauaacgagagcuucaauuggacgggagugacccaaaacggcacaucuuccgcuugcaucagaggcucuagcuccagcuuuuucucucggcuuaauuggcugacccaucucaacuauacauacccugcccugaaugucaccaugcccaacaaggagcaguuugacaaacuuuauauuuggggagugcaccauccugggacggauaaggaccagaucuuccuguacgcgcaguccagcggccgcauuacaguuuccaccaagagaucucaacaggccgugaucccgaacaucgggagccggccccgcauuagagauaucccuucccggauuagcaucuacuggacaauugucaaacccggagacauccuccugaucaauucuaccggcaaccugauugcuccucgcggguauuuuaagaucagauccggaaaaagcucuauuaugcggagcgacgcccccaucggcaaguguaaguccgaaugcauuaccccgaauggcucuaucccuaacgauaaacccuuccagaaugugaaccgcaucacauacggggcuuguccuagauaugugaagcacagcacgcucaaacuggccaccggaaugcggaauguccccgagaagcagacacgcggcauuuuuggggcgaucgccggauucauugaaaacggcugggaggggaugguugacggaugguacggcuuuagacaccaaaauuccgagggccgggggcaggcugccgaucuuaaaagcacccaggcugccaucgaccaaauuaacggaaagcugaauagacucaucggcaaaacaaacgaaaaguuccaucagauugagaaggaguucucugaaguggaagggcgcauccaggaucuggagaaauauguggaggacaccaagaucgaucuuugguccuacaaugccgaacugcucgucgcucuggagaaccagcacacgauugaccugacagauagcgaaaugaauaaacucuuugagaagaccaaaaagcaacugcgggaaaacgcggaggacaugggaaacggcugcuucaagaucuaucauaaaugugauaaugccugcauugggucuaucagaaacggcaccuacgaccacaauguguaccgcgacgaggcucuuaacaaucgguuucagauuaagggaguugaacugaaauccggcuauaaggauuggauccucuggaucagcuucgccauuuccugcuuucugcuuuguguggcccugcucggguucaucaugugggcuugccagaaaggaaacauuagauguaauaucugcauuuga

SEQ ID NO: 205407 - RNA, 1701 nt, Artificial Sequence; identical to SEQ ID NO: 205057
  derived and/or modified CDS sequence (opt5) from hemagglutinin__InfluenzaA__ALE31820

SEQ ID NO: 205408 - RNA, 1701 nt, Artificial Sequence
  derived and/or modified CDS sequence (opt5) from hemagglutinin__InfluenzaA__ALE31821
augaagaccaucauugcccugagcuacacacucugccugguguucgcucagaaaauccccggcaacgacaauuccacggccacccuuugucuggggcaccaugcggucccuaacggaacaauuguuaagaccaucacaaaugauagaauugaggugaccaacgcuacagaacucgugcaaaauucuagcaucggcgagaucugcgacuccccgcaccagauucuggauggggaaaacuguacccuuaucgacgcccugcucggagauccccagugcgacggcuuucagaauaaaaagugggaucuguucgucgagcggucuaaagcccauagcaacuguuauccuuacgacgugcccgauuaugcuucccugcgcucucucguugccagcuccgggacgcuggaauuuaauaacgagagcuucaauuggaccggagugacacaaaacggcaccucuuccgcuugcauuagacggagcagcuccagcuuuuucucucgccuuaauuggcugacacaccucaacuacaccuauccugcccugaaugucacgaugcccaacaacgagcaguuugacaaacuuuacaucuggggcgugcaucacccugggacagauaaggaccagauuuuccuguaugcgcaguccagcggaagaaucaccguuuccacaaagcggucucaacaggccgugauuccgaauaucggcagccgccccagaauccgggauauuccuucccgcaucagcauuuacuggaccaucgucaagcccggggacauucuccugaucaacucuaccggaaaucugaucgcuccuagaggcuacuuuaaaauucgguccgggaagucuucuaucaugcgcagcgacgcccccauuggaaaauguaaguccgaaugcaucacaccgaacggcucuauuccuaaugauaagcccuuccagaacgugaauagaaucacguauggcgcuuguccucgguacgugaaacacagcacccucaagcuggccacagggaugcgcaacguccccgagaaacagaccagaggaaucuuuggcgcgauugccggguucaucgaaaauggaugggagggcaugguugacgggugguauggauuucggcaucaaaacuccgagggcagaggccaggcugccgaucuuaagagcacacaggcugccauugaccaaaucaaugggaaacugaaccgccucauuggaaagaccaaugaaaaauuccaccagaucgagaaggaguucucugaaguggaaggccggauucaggaucuggagaaguacguggaggacacgaaaaucgaucuuugguccuauaacgccgaacugcucgucgcucuggagaaucagcauacaaucgaccugaccgauagcgaaaugaacaagcucuuugagaaaaccaagaaacaacugagagaaaacgcggaggacauggggaauggaugcuucaagauuuaccacaagugugauaacgccugcaucggcucuauucgcaaugggacauaugaccacaacguguaccgggacgaggcucuuaauaacagauuucagaucaaaggcguugaacugaaguccggauacaaagauuggauucucuggaucagcuucgccaucuccugcuuucugcuuuguguggcccugcucggcuucauuaugugggcuugccagaaggggaauauccgcuguaacauuugcaucuga

SEQ ID NO: 205409 - RNA, 1701 nt, Artificial Sequence; identical to SEQ ID NO: 205149
  derived and/or modified CDS sequence (opt5) from hemagglutinin__InfluenzaA__ALE31822

SEQ ID NO: 205410 - RNA, 1701 nt, Artificial Sequence; identical to SEQ ID NO: 205057
  derived and/or modified CDS sequence (opt5) from hemagglutinin__InfluenzaA__ALE31823

SEQ ID NO: 205411 - RNA, 1701 nt, Artificial Sequence; identical to SEQ ID NO: 204513
  derived and/or modified CDS sequence (opt5) from hemagglutinin__InfluenzaA__ALE31824

SEQ ID NO: 205412 - RNA, 1701 nt, Artificial Sequence
  derived and/or modified CDS sequence (opt5) from hemagglutinin__InfluenzaA__ALE31825
augaagaccaucauugcccugagcuacauccucugccugguguucgcucagaaaauucccggcaacgacaauuccacagccacgcuuugucuggggcaccaugcggucccuaacggaaccaucguuaagacaauuaccaaugauagaaucgaggugacaaacgcuaccgaacucgugcaaaauucuagcaucggcgagauuugcgacuccccgcaccagauccuggauggggaaaacuguacacuuauugacgcccugcucggagauccccagugcgacggcuuucagaauaaaaagugggaucuguucgucgagcggucuaaagccuauagcaacuguuacccuuaugacgugcccgauuacgcuucccugcgcucucucguugccagcuccgggacccuggaauuuaauaacgagagcuucaauuggacgggagugacccaaaacggcacaucuuccgcuugcaucagacggagcagcuccagcuuuuucucucgccuuaauuggcugacccaucucaacuauagauacccugcccugaaugucacaaugcccaacaacgagcaguuugacaaacuuuauauuuggggcgugcaccauccugggaccgauaaggaccagaucuuccuguacgcgcaguccagcggacggauuacgguuuccacaaagcgcucucaacaggccgugaucccgaauaucggcagcagaccccggauucgcgauaucccuuccagaauuagcaucuacuggaccauugucaagcccggggacauccuccugaucaacucuacaggaaaucugauugcuccucggggcuauuuuaaaauccgcuccgggaagucuucuauuaugagaagcgacgcccccaucggaaaauguaaguccgaaugcauuaccccgaacggcucuaucccuaaugauaagcccuuccagaacgugaaucggaucaccuacggcgcuuguccucgcuaugugaaacacagcacacucaagcuggccacggggaugagaaacguccccgagaaacagacccggggaauuuuuggcgcgaucgccggguucauugaaaauggaugggagggcaugguugacgggugguacggauuuagacaccaaaacuccgagggccgcggccaggcugccgaucuuaagagcacacaggcugccaucgaccaaauuaaugggaaacugaaccggcucaucggaaagaccaaugaaaaauuccaucagauugagaaggaguucucugaaguggaaggcagaauccaggaucuggagaaguauguggaggacacaaaaaucgaucuuugguccuacaacgccgaacugcucgucgcucuggagaaucagcacaccauugaccugacggauagcgaaaugaacaagcucuuugagaaaacaaagaaacaacugcgcgaaaacgcggaggacauggggaauggaugcuucaagaucuaucauaagugugauaacgccugcauuggcucuauccggaaugggaccuacgaccacaacguguacagagacgaggcucuuaauaaccgcuuucagauuaaaggcguugaacugaaguccggauauaaagauuggauccucuggaucagcuucgccauuuccugcuuucugcuuuguguggcccugcucggcuucaucaugugggcuugccagaaggggaauauucgguguaacaucugcauuuga

SEQ ID NO: 205413 - RNA, 1701 nt, Artificial Sequence; identical to SEQ ID NO: 204513
  derived and/or modified CDS sequence (opt5) from hemagglutinin__InfluenzaA__ALE31826

SEQ ID NO: 205414 - RNA, 1701 nt, Artificial Sequence; identical to SEQ ID NO: 204513
  derived and/or modified CDS sequence (opt5) from hemagglutinin__InfluenzaA__ALE31827

SEQ ID NO: 205415 - RNA, 1701 nt, Artificial Sequence; identical to SEQ ID NO: 204513
  derived and/or modified CDS sequence (opt5) from hemagglutinin__InfluenzaA__ALE31828

SEQ ID NO: 205416 - RNA, 1701 nt, Artificial Sequence; identical to SEQ ID NO: 205070
  derived and/or modified CDS sequence (opt5) from hemagglutinin__InfluenzaA__ALE31829

SEQ ID NO: 205417 - RNA, 1701 nt, Artificial Sequence
  derived and/or modified CDS sequence (opt5) from hemagglutinin__InfluenzaA__ALE31830
augaagaccaucauugcccugagcuacauccucugccugguguucgcucagaaaauucccggcaacgacaauuccacagccacgcuuugucuggggcaccaugcggucccuaacggaaccaucguuaagacaauuaccaaugauagaaucgaggugacaaacgcuaccgaacucgugcaaaauucuagcaucggcgagauuugcgacuccccgcaccagauccuggauggggaaaacuguacacuuauugacgcccugcucggagauccccagugcgacggcuuucagaauaaaaagugggaucuguucgucgagcggucuaaagccuauagcaacuguuacccuuaugacgugcccgauuacgcuucccugcgcucucucguugccagcuccgggacccuggaauuuaauaacgagagcuucaauuggacgggagugacccaaaacggcacaucuuccgcuugcaucagacggagcagcuccagcuuuuucucucgccuuaauuggcugacccaucucaacuauacauacccugcccugaaugucaccaugcccaacaacgagcaguuugacaaacuuuauauuuggggcgugcaccauccugggacggauaaggaccagaucuuccuguacgcgcaguccagcggaagaauuacaguuuccaccaagcggucucaacaggccgugaucccgaauaucggcagccgcccccggauuagagauaucccuucccgcauuagcaucuacuggacaauugucaagcccggggacauccuccugaucaacucuaccggaaaucugauugcuccuagaggcuauuuuaaaauccgguccgggaagucuucuauuaugcgcagcgacgcccccaucggaaaauguaaguccgaaugcauuaccccgaacggcucuaucccuaaugauaagcccuuccagaacgugaauagaaucacauacggcgcuuguccucgguaugugaaacacagcacgcucaagcuggccaccgggaugcgcaacguccccgagaaacagacaagaggaauuuuuggcgcgaucgccggguucauugaaaauggaugggagggcaugguugacgggugguacggauuucggcaccaaaacuccgagggcagaggccaggcugccgaucuuaagagcacccaggcugccaucgaccaaauuaaugggaaacugaaccgccucaucggaaagacaaaugaaaaauuccaucagauugagaaggaguucucugaaguggaaggccggauccaggaucuggagaaguauguggaggacaccaaaaucgaucuuugguccuacaacgccgaacugcucgucgcucuggagaaucagcacacgauugacaucacagauagcgaaaugaacaagcuguuugagaaaaccaagaaacaacucagagaaaacgcggaggacauggggaauggaugcuucaagauuuaucauaagugugauaacgccugcaucggcucuauucgcaaugggaccuacgaccacaacguguaccgggacgaggcucugaauaacagauuucagaucaaaggcguugaacuuaaguccggauauaaagauuggauccuguggauuagcuucgccaucuccugcuuucuccuguguguggcccuucugggcuucauuaugugggcuugccagaaggggaauauccgcuguaacauuugcaucuga

SEQ ID NO: 205418 - RNA, 1701 nt, Artificial Sequence
  derived and/or modified CDS sequence (opt5) from hemagglutinin__InfluenzaA__ALE31832
augaagaacaucauugcccugagcuacauccucugccugguguucgcucagaaaauucccggcaaugacaacuccaccgccacacuuugucuggggcaccaugcggucccuaauggaacgaucguuaagaccauuacaaacgauagaaucgaggugaccaaugcuacagaacucgugcaaaacucuagcaucggcgagauuugcgacuccccgcaccagauccuggauggggaaaauuguacccuuauugacgcccugcucggagauccccagugcgacggcuuucagaacaaaaagugggaucuguucgucgagcggucuaaagccuauagcaauuguuacccuuaugacgugcccgauuacgcuucccugcgcucucucguugccagcuccgggacacuggaauuuaacaaugagagcuucaacuggaccggagugacgcaaaauggcaccucuuccgcuugcaucagacggagcaacucuuccuuuuucagccgccuuaauuggcugacacaucucaacuauaccuacccugcccugaacgucacaaugcccaauaacgagcaguuugacaaacuuuauauuuggggcgugcaccauccugggaccgauaaggaccagaucuuccuguacgcgcagucuuccggaagaauuacgguuagcacaaagcggucccaacaggccgugaucccgaauaucggcucucgcccccggauuagagauaucccuagccgcauuuccaucuacuggaccauugucaagcccggggacauccuccugaucaacagcacaggaaaucugauugcuccuagaggcuauuuuaaaauccggucugggaaguccagcauuaugcgcucugacgcccccaucggaaaauguaagagcgaaugcauuaccccgaacggcuccaucccuaaugauaagcccuuccagaacgugaauagaaucaccuacggcgcuuguccucgguaugugaaacacucuacacucaagcuggccacggggaugcgcaacguccccgagaaacagaccagaggaauuuuuggcgcgaucgccggguucauugaaaauggaugggagggcaugguugacgggugguacggauuucggcaccaaaacagcgagggcagaggccaggcugccgaucuuaaguccacacaggcugccaucgaccaaauuaaugggaaacugaaccgccucaucggaaagaccaaugaaaaauuccaucagauugagaaggaguucagcgaaguggaaggccggauccaggaucuggagaaguauguggaggacacaaaaaucgaucuuuggucuuacaacgccgaacugcucgucgcucuggagaaccagcacaccauugaccugacggauuccgaaaugaauaagcucuuugagaaaacaaagaaacaacugagagaaaacgcggaggacauggggaauggaugcuucaagaucuaucauaagugugauaacgccugcauuggcagcauccgcaaugggaccuacgaccacaacguguaccgggacgaggcucuuaauaacagauuucagauuaaaggcguugaacugaagucuggauauaaagauuggauccucuggaucuccuucgccauuagcugcuuucugcuuuguguggcccugcucggcuucaucaugugggcuugccagaaggggaauauucgcuguaacaucugcauuuga

SEQ ID NO: 205419 - RNA, 1701 nt, Artificial Sequence
  derived and/or modified CDS sequence (opt5) from hemagglutinin__InfluenzaA__ALE31833
augaagaccaucauugcccugagcuacauccucugccugguguccgcucagaaaauucccggcaacgacaauucuacagccacgcuuugucuggggcaccaugcggucccuaacggaaccaucguuaagacaauuaccaaugauagaaucgaggugacaaacgcuaccgaacucgugcaaaauagcuccaucggcgagauuugcaacucuccgcaccagauccuggacggggaaaauuguacacuuauugaugcccugcucggagacccccagugcgauggcuuccagaacaaaaagugggaccuguuugucgagcggagcaaagccuauuccaauuguuacccuuaugaugugcccgacuacgcuucucugcgcagccucguugccuccagcgggacccuggaguucaacaaugaaucuuuuaacuggacgggagugacccaaaauggcacauccagcgcuugcaucagacggucuuccagcucuuucuuuucccgccuuaacuggcugacccaucucaauuauacauacccugcccugaacgucaccaugcccaacaaugagcaguucgauaagcuguauauuuggggcgugcaccauccugggacggacaaggaucagaucuuucuguacgcgcagagcuccggaagaauuacaguuucuaccaaacggagccaacaggccgugaucccgaacaucggcucccgcccccggauuagagacaucccuagccgcauuucuaucuacuggacaauugucaagcccggggauauccuccugaucaauuccaccggaaaccugauugcuccuagaggcuauuucaaaauccggagcgggaagucuagcauuaugcgcuccgacgcccccaucggaaaauguaagucugaaugcauuaccccgaauggcagcaucccuaacgacaagcccuuucagaaugugaacagaaucacauacggcgcuuguccucgguaugugaaacacuccacgcucaagcuggccaccgggaugcgcaauguccccgagaaacagacaagaggaauuuucggcgcgaucgccggguuuauugaaaacggaugggagggcaugguugaugggugguacggauuccggcaccaaaauagcgagggcagaggccaggcugccgaccuuaagucuacccaggcugccaucgaucaaauuaacgggaaacugaaucgccucaucggaaagacaaacgaaaaauuucaucagauugagaaggaguucuccgaaguggaaggccggauccaggaccuggagaaguauguggaggauaccaaaaucgaccuuuggagcuacaaugccgaacugcucgucgcucuggagaaccagcacacgauugaucugacagacucugaaaugaacaaacucuucgagaagaccaagaaacaacugagagaaaaugcggaggauauggggaacggaugcuuuaagaucuaucauaagugugacaaugccugcauuggcuccauccgcaacgggaccuacgaucacaauguguaccgggacgaggcucuuaacaauagauuccagauuaaaggcguugaacuuaagagcggauauaaagacuggauccucuggaucuccuuugccauuucuugcuuccugcuuuguguggcccugcucggcuuuaucaugugggcuugccagaaggggaacauucgcuguaauaucugcauuuga

SEQ ID NO: 205420 - RNA, 1701 nt, Artificial Sequence
  derived and/or modified CDS sequence (opt5) from hemagglutinin__InfluenzaA__ALE31834
augaagaccaucauugcccugagcuacauccucugccugguguucgcucagaaacuucccggcaacgacaauuccacagccacgcugugucucgggcaccaugcggucccuaacggaaccauuguuaagacaaucaccaaugauagaauugaggugacaaacgcuaccgaacuggugcaaaauucuagcaucggcgagaucugcgacuccccgcaccagauucuugauggggaaaacuguacacugaucgacgcccuccugggagauccccagugcgacggcuuucagaauaaaaagugggaucuguucgucgagcggucuaaagcccauagcaacuguuauccuuacgacgugcccgauuaugcuucccuccgcucucugguugccagcuccgggacccuugaauuuaauaacgagagcuucaauugggcuggagugacgcaaaacggcaccucuuccagcugcauuagaggcucuaauuccagcuuuuucucucggcugaacuggcucacacaccuuaauuccaaguacccugcccugaacgucaccaugcccaacaaugagcaguuugacaagcuguauaucuggggagugcaucacccugggacagauaaagaccagauuuuccucuacgcgcagagcuccggccgcaucaccguuucuacgaagagaagccaacaggccgugauuccgaacaucgggucccggccccgcaucagagauauuccuagccggaucucuauuuauuggacaaucgucaaacccggagacauucugcugaucaauuccaccggcaaccucaucgcuccucgcggguacuuuaagauuagaagcggaaaaucuagcaucaugcgguccgacgcccccauuggcaaguguaagucugaaugcaucacaccgaauggcagcauuccuaacgauaaacccuuccagaaugugaaccgcaucaccuacggggcuuguccuagauaugugaagcaguccacccugaaacuugccacaggaaugcggaauguccccgagaagcaaacgcgcggcaucuuuggggcgauugccggauucaucgaaaacggcugggaggggaugguugacggaugguacggcuuuagacaccagaauagcgagggccgggggcaggcugccgaucugaaaucuacccaagcugccauugaccagaucaacggaaagcucaauagacugauuggcaaaacaaacgaaaaguuccaucagaucgagaaggaguucuccgaaguggaagggcgcauucaggaucuugagaaauauguggaggacaccaagaucgaucuguggagcuacaaugccgaacuccuggucgcucuggagaaccaacacacaaucgaccucaccgauucugaaaugaacaaacuguuugagaagacgaaaaagcagcuucgggaaaaugcggaggacaugggaaacggcugcuucaagauuuaucauaaaugugauaaugccugcaucggguccauuagaaacggcacauacgaccacgacguguaucgcgaugaggcucugaauaaccgguuucagaucaagggaguugaacucaaaagcggcuacaaggacuggauucuguggaucuccuucgccaucucuugcuuucuucuguguguggcccuccugggguucauuaugugggcuugccagaaaggaaauaucagauguaacauuugcaucuga

SEQ ID NO: 205421 - RNA, 1701 nt, Artificial Sequence; identical to SEQ ID NO: 205171
  derived and/or modified CDS sequence (opt5) from hemagglutinin__InfluenzaA__ALE31835

SEQ ID NO: 205422 - RNA, 1701 nt, Artificial Sequence; identical to SEQ ID NO: 204513
  derived and/or modified CDS sequence (opt5) from hemagglutinin__InfluenzaA__ALE31836

SEQ ID NO: 205423 - RNA, 1701 nt, Artificial Sequence
  derived and/or modified CDS sequence (opt5) from hemagglutinin__InfluenzaA__ALE31837
augaagaccaucauugcccugagcuacauccucugccugguguaugcucagaaaauucccggcaacgacaauuccacagccacgcuuugucuggggcaccaugcggucccuaacggaaccaucguuaagacaauuaccaaugauagaaucgaggugacaaacgcuaccgaacucgugcaaaauucuagcaucggcgagauuugcgacuccccgcaccagauccuggauggggaaaacuguacacuuauugacgcccugcucggagauccccagugcgacggcuuccagaauaaaaagugggaucuguuugucgagcggucuaaagccuacagcaacuguuauccuuacgacgugcccgauuaugcuucccugcgcucucucguugccagcuccgggacccuggaauuuaauaacgagagcuucaauuggacgggagugacccaaaacggcacaucuuccgcuugcaucagacggagcagcuccagcuucuuuucucgccuuaauuggcugacccaucucaacuacacauauccugcccugaaugucaccaugcccaacaacgagcaguucgacaaacuuuacauuuggggcgugcaccauccugggacggauaaggaccagaucuuucuguacgcgcaguccagcggaagaauuacaguuuccaccaagcggucucaacaggccgugaucccgaauaucggcagccgcccccggauuagagauaucccuucccgcauuagcaucuauuggacaauugucaagcccggggacauccuccugaucaacucuaccggaaaucugauugcuccuagaggcuacuucaaaauccgguccgggaagucuucuauuaugcgcagcgacgcccccaucggaaaauguaaguccgaaugcauuaccccgaacggcucuaucccuaaugauaagcccuuucagaacgugaauagaaucacauauggcgcuuguccucgguacgugaaacacagcacgcucaagcuggccaccgggaugcgcaacguccccgagaaacagacaagaggaauuuucggcgcgaucgccggguuuauugaaaauggaugggagggcaugguugacgggugguauggauuccggcaccaaaacuccgagggcagaggccaggcugccgaucuuaagagcacccaggcugccaucgaccaaauuaaugggaaacugaaccgccucaucggaaagacaaaugaaaaauuucaucagauugagaaggaguucucugaaguggaaggccggauccaggaucuggagaaguacguggaggacaccaaaaucgaucuuugguccuauaacgccgaacugcucgucgcucuggagaaucagcacacgauugaccugacagauagcgaaaugaacaaacucuucgagaagaccaagaaacaacugagagaaaacgcggaggacauggggaauggaugcuuuaagaucuaccauaagugugauaacgccugcauuggcucuauccgcaaugggaccuacgaccacaacguguaucgggacgaggcucuuaauaacagauuccagauuaaaggcguugaacugaaguccggauacaaagauuggauccucuggaucagcuuugccauuuccugcuuccugcuuuguguggcccugcucggcuuuaucaugugggcuugccagaaggggaauauucgcuguaacaucugcauuuga

SEQ ID NO: 205424 - RNA, 1701 nt, Artificial Sequence; identical to SEQ ID NO: 204513
  derived and/or modified CDS sequence (opt5) from hemagglutinin__InfluenzaA__ALE31838

SEQ ID NO: 205425 - RNA, 1701 nt, Artificial Sequence; identical to SEQ ID NO: 204513
  derived and/or modified CDS sequence (opt5) from hemagglutinin__InfluenzaA__ALE31839

SEQ ID NO: 205426 - RNA, 1701 nt, Artificial Sequence
  derived and/or modified CDS sequence (opt5) from hemagglutinin__InfluenzaA__ALE31840
augaagaccaucauugcccugagcuacauccucugccugguguucgcucagaaaauucccggcaacgacaauuccacagccacgcuuugucuggggcaccaugcggucccuaacggaaccaucguuaagacaauuaccaaugauagaaucgaggugacaaacgcuaccgaacucgugcaaaauucuagcaucggcgagauuugcgacuccccgcaccagauccuggauggggaaaacuguacacuuauugacgcccugcucggagauccccagugcgacggcuuucagaauaaaaagugggaucuguucgucgagcggucuaaagccuauagcaacuguuacccuuaugacgugcccgauuacgcuucccugcgcucucucguugccagcuccgggacccuggaauuuaauaacgagagcuucaauuggacgggagugacccaaaacggcacaucuuccgcuugcaucagacggagcagcuccagcuuuuucucucgccuuaauuggcugacccaucucaacuauacauacccugcccugaaugucaccaugcccaacaacgagcaguuugacaagcuguauauuuggggcgugcaccauccugggacggauaaggaccagaucuuccuguacgcgcaguccagcggaagaauuacaguuuccaccaaacggucucaacaggccgugaucccgaauaucggcagccgccuccggauuagagauauccccucccgcauuagcaucuacuggacaauugucaagccuggggacauccugcugaucaacucuaccggaaaucucauugcucccagaggcuauuuuaaaauccgguccgggaagucuucuauuaugcgcagcgacgccccuaucggaaaauguaaguccgaaugcauuacccccaacggcucuaucccgaaugauaagccuuuccagaacgugaauagaaucacauacggcgcuuguccccgguaugugaaacacagcacgcugaaacuugccaccgggaugcgcaacgucccugagaagcagacaagaggaauuuuuggcgcgaucgccggguucauugaaaauggaugggagggcaugguugacgggugguacggauuucggcaccaaaacuccgagggcagaggccaggcugccgaucuuaagagcacccaggcugccaucgaccaaauuaaugggaaacucaaccgccugaucggaaagacaaaugaaaaauuccaucagauugagaaggaguucucugaaguggaaggccggauccaggaucuugagaaguauguggaggacaccaaaaucgaucugugguccuacaacgccgaacuccuggucgcucuggagaaucagcacacgauugaccucacagauagcgaaaugaacaagcuguuugagaaaaccaagaaacaacuuagagaaaacgcggaggacauggggaauggaugcuucaagaucuaucauaagugugauaacgccugcauuggcucuauccgcaaugggaccuacgaccacaacguguaccgggacgaggcucugaauaacagauuucagauuaaaggcguugaacucaaguccggauauaaagauuggauccuguggaucagcuucgccauuuccugcuuucuucuguguguggcccuccugggcuucaucaugugggcuugccagaaggggaauauucgcuguaacaucugcauuuga

SEQ ID NO: 205427 - RNA, 1701 nt, Artificial Sequence; identical to SEQ ID NO: 204513
  derived and/or modified CDS sequence (opt5) from hemagglutinin__InfluenzaA__ALE31842

SEQ ID NO: 205428 - RNA, 1701 nt, Artificial Sequence
  derived and/or modified CDS sequence (opt5) from hemagglutinin__InfluenzaA__ALE31843
augcagaccaucauugcccugagcuacauccucugccugguguucgcucaaaagauucccggcaacgacaauuccacagccacgcuuugucuggggcaccaugcggucccuaacggaaccaucguuaaaacaauuaccaaugauagaaucgaggugacaaacgcuaccgaacucgugcagaauagcagcaucggcgagauuugcgacuccccgcaccagauccuggauggggaaaacuguacacuuauugacgcccugcucggagauccccagugcgacggcuuucaaaauaagaaaugggaucuguucgucgagcggucuaaggccuauagcaacuguuacccuuaugacgugcccgauuacgcuucccugcgcucucucguugccagcuccgggacccuggaauuuaauaacgagagcuucaauuggacgggagugacccagaacggcacaucuuccgcuugcaucagaaaaucuucuuccagcuuuuucucucggcuuaauuggcugacccaucucaacuauacauacccugcccugaaugucaccaugcccaacaacgagcaguuugacaagcuguauauuuggggcgugcaccauccugggacggauaaggaccagaucuuccuguacgcgcaauccagcggacgcauuacaguuuccaccaaaagaucucagcaggccgugaucccgaauaucggcagccggccccgcauuagagauaucccuucccggauuagcaucuacuggacaauugucaagcccggggacauccuccugaucaacucuaccggaaaucugauugcuccucgcggcuauuuuaaaauccucuccggaaagagcucuauuaugagaagcgacgcccccaucgggaaauguaaguccgaaugcauuaccccgaacggcucuaucccuaaugauaagcccuuccagaacgugaaucggaucacauacggcgcuuguccucgcuaugugaaacacagcacgcugaaacuugccaccgggaugagaaacguccccgagaagcaaacacggggaauuuuuggcgcgaucgccggguucauugaaaauggaugggagggcaugguugacgggugguacggauuucgccaccagaacuccgagggcagaggccaggcugccgaucuuaagagcacccaagcugccaucgaccagauuaaugggaaacucaaccggcugaucggaaagacaaaugaaaaauuccaucagauugagaaggaguucucugaaguggaaggcagaauccaggaucuugagaaguauguggaggacaccaaaaucgaucugugguccuacaacgccgaacuccuggucgcucuggagaaucaacacacgauugaccucacagauagcgaaaugaacaagcuguuugagaaaaccaagaaacagcuucgcgaaaacgcggaggacauggggaauggaugcuucaagaucuaucauaagugugauaacgccugcauuggcucuauccggaaugggaccuacgaccacaacguguacagagacgaggcucugaauaaccgcuuucagauuaaaggcguugaacucaaguccggauauaaagauuggauccuguggaucagcuucgccauuuccugcuuucuucuguguguggcccuccugggcuucaucaugugggcuugccagaaggggaauauucgguguaacaucugcauuuga

SEQ ID NO: 205429 - RNA, 1701 nt, Artificial Sequence; identical to SEQ ID NO: 205070
  derived and/or modified CDS sequence (opt5) from hemagglutinin__InfluenzaA__ALE31844

SEQ ID NO: 205430 - RNA, 1701 nt, Artificial Sequence; identical to SEQ ID NO: 205046
  derived and/or modified CDS sequence (opt5) from hemagglutinin__InfluenzaA__ALE31846

SEQ ID NO: 205431 - RNA, 1701 nt, Artificial Sequence; identical to SEQ ID NO: 204513
  derived and/or modified CDS sequence (opt5) from hemagglutinin__InfluenzaA__ALE31847

SEQ ID NO: 205432 - RNA, 1701 nt, Artificial Sequence; identical to SEQ ID NO: 204513
  derived and/or modified CDS sequence (opt5) from hemagglutinin__InfluenzaA__ALE31848

SEQ ID NO: 205433 - RNA, 1701 nt, Artificial Sequence
  derived and/or modified CDS sequence (opt5) from hemagglutinin__InfluenzaA__ALE31850
augaagaccaucauugcccugagcuacauccucugccugguguucgcucagaaacuucccggcaacgacaauuccacagccacgcugugucucgggcaccaugcggucccuaacggaaccauuguuaagacaaucaccaaugauagaauugaggugacaaacgcuaccgaacuggugcaaaauucuagcaucggcgagaucugcgacuccccgcaccagauucuugauggggaaaacuguacacugaucgacgcccuccugggagauccccagugcgacggcuuucagaauaaaaagugggaucuguucgucgagcggucuaaagccuauagcaacuguuacccuuaugacgugcccgauuacgcuucccuccgcucucugguugccagcuccgggacccuugaauuuaauaacgagagcuucaauugggcuggagugacgcaaaacggcaccucuuccagcugcauuagaggcucuaauuccagcuuuuucucucggcugaacuggcucacacaucugaauagcaaguauccugcccuuaacgucaccaugcccaacaaugagcaguuugacaagcuguacaucuggggagugcaccauccugggacagauaaagaccagauuuuccucuaugcgcagccgagcggccgcaucaccguuuccacgaagagaucucaacaggccgugauucccaacaucgggagccggccucgcaucagagauauucccucccggaucagcauuuacuggacaaucgucaaaccuggagacauucugcugaucaauucuaccggcaaccucaucgcuccccgcggguacuuuaagauuagauccggaaaaagcucuaucaugcggagcgacgccccgauuggcaaguguaaguccgaaugcaucacaccuaauggcucuauucccaacgauaaaccuuuccagaaugugaaccgcgugaccuauggggcuugucccagauacgucaagcagagcacccugaaacuugccacaggaaugcggaauguucccgagcgccaaacgagaggcaucuuuggggcgaucgccggauucauugaaaacggcugggaggggaugguggacggaugguauggcuuucggcaccaaaauuccgagggcagagggcaggcugccgaucugaaguccacccaggcugccaucgaccagauuaacggaaaacucaaucgccugaucggcaagacaaacgaaaaauuccaccagauugagaaggaguucucugaaguggaagggcggauccaggaucuugagaaguacgucgaggacaccaaaauugaucugugguccuauaaugccgaacuccugguggcucuggagaaccaacauacaaucgaccucaccgauagcgaaaugaacaagcuguuugagaaaacgaagaaacagcuuagagaaaaugcggaggacaugggaaacggcugcuucaagaucuaccacaagugugauaaugccugcauugggucuauccgcaacggcacauaugaccaugacguuuaccgggaugaggcucugaauaacagauuucagauuaaaggaguggaacucaaguccggcuacaaagacuggauccuguggauuagcuucgccaucuccugcuuucuucugugugucgcccuccugggguucaucaugugggcuugccagaagggaaauauucgcuguaacaucugcauuuga

SEQ ID NO: 205434 - RNA, 1701 nt, Artificial Sequence
  derived and/or modified CDS sequence (opt5) from hemagglutinin__InfluenzaA__ALE31851
augaagaccaucauugcccugagcuacauccucugccugguguucgcucagaaaauucccggcaacgacaauuccacagccacgcuuugucuggggcaccaugcggucccuaacggaaccaucguuaagacaauuaccaaugauagaaucgaggugacaaacgcuaccgaacucgugcaaaauucuagcaucggcgagauuugcgacuccccgcaccagauccuggauggggaaaacuguacacuuauugacgcccugcucggagauccccagugcgacggcuuucagaauaaaaagugggaucuguucgucgagcggucuaaagccuauagcaacuguuacccuuaugacgugcccgauuacgcuucccugcgcucucucguugccagcuccgggacccuggaauuuaauaacgagagcuucaauuggacgggagugacccaaaacggcacaucuuccgcuugcaucagaaagucuagcuccagcuuuuucucucggcuuaauuggcugacccaucucaacuauacauacccugcccugaaugucaccaugcccaacaacgagcaguuugacaaacuuuauauuuggggcgugcaccauccugggacggauaaagaccagaucuuccuguacgcgcgcuccagcggaagaauuacaguuuccaccaagcggucucagcaagccgugaucccgaauaucggcagccgcccccggauuagagauaucccuucccgcauuagcaucuacuggacaauugucaaacccggggacauccuccugaucaacucuauuggaaaucugaucgcuccuagaggcuauuuuaagauucgguccgggaaaagcucuaucaugcgcagcgacgcccccauuggaaaguguaaguccgaaugcaucaccccgaacggcucuaucccuaaugauaaacccuuccagaacgugaauagaauuaccuacggcgcuuguccucgguaugugaagcacagcacacucaaacuggccacggggaugcgcaacguccccgagaagcagaccagaggaaucuuuggcgcgauugccggguucaucgaaaauggaugggagggcaugguugacgggugguacggauuucggcaccagaacuccgagggcagaggccaagcugccgaucuuaaaagcacacaggcugccauugaccagaucaaugggaagcugaaccgccucauuggaaaaaccaaugaaaaguuccaucaaaucgagaaggaguucucugaaguggaaggccggauccaggaucuggagaaauauguggaggacacaaagauugaucuuugguccuacaacgccgaacugcucgucgcucuggagaaucagcacaccaucgaccugacggauagcgaaaugaacaaacucuuugagaagacaaagaagcagcugagagaaaacgcggaggacauggggaauggaugcuucaagauuuaucauaaaugugauaacgccugcaucggcucuauucgcaaugggaccuacgaccacaacguguaccgggacgaggcucuuaauaacagauuucaaaucaagggcguugaacugaaauccggauauaaggauuggauccucuggauuagcuucgccaucuccugcuuucugcuuuguguggcccugcucggcuucauuaugugggcuugccagaaagggaauauccgcuguaacauuugcaucuga

SEQ ID NO: 205435 - RNA, 1701 nt, Artificial Sequence; identical to SEQ ID NO: 205057
  derived and/or modified CDS sequence (opt5) from hemagglutinin__InfluenzaA__ALE31852

SEQ ID NO: 205436 - RNA, 1701 nt, Artificial Sequence
  derived and/or modified CDS sequence (opt5) from hemagglutinin__InfluenzaA__ALE31853
augaagaccaucauugcccugagcuacauccucugccugguguucacacagaaaauucccggcaacgacaauuccacggcuacccuuugucuggggcaccaugccgucccuaacggaacaaucguuaagaccauuacaaaugauagaaucgaggugaccaacgcgacagaacucgugcaaaauucuagcaucggcgagauuugcgacuccccgcaccagauccuggauggggaaaacuguacccuuauugacgcucugcucggagauccccagugcgacggcuuucagaauaaaaagugggaucuguucgucgagcggucuaaagccuauagcaacuguuacccuuaugacgugcccgauuacgccucccugcgcucucucguugcuagcuccgggacgcuggaauuuaauaacgagagcuucaauuggaccggagugacacaaaacggcaccucuuccgccugcaucagacggagcagcuccagcuuuuucucucgccuuaauuggcugacacaucucaacuauaccuacccugcucugaaugucacgaugcccaacaacgagcaguuugacaaacuuuauauuuggggcgugcaccauccugggacagauaaggaccagaucuuccuguacgcccaguccagcggaagaauuaccguuuccacaaagcggucucaacaggcggugaucccgaauaucggcagccgcccccggauuagagauaucccuucccgcauuagcaucuacuggaccauugucaagcccggggacauccuccugaucaacucuaccggaaaucugauugccccuagaggcuauuuuaaaauccgguccgggaagucuucuauuaugcgcagcgacgcucccaucggaaaauguaaguccgaaugcauuacaccgaacggcucuaucccuaaugauaagcccuuccagaacgugaauagaaucacguacggcgccuguccucgguaugugaaacacagcacccucaagcuggcuacagggaugcgcaacguccccgagaaacagaccagaggaauuuuuggcgccaucgcgggguucauugaaaauggaugggagggcaugguugacgggugguacggauuucggcaccaaaacuccgagggcagaggccaggccgcugaucuuaagagcacacaggccgcuaucgaccaaauuaaugggaaacugaaccgccucaucggaaagaccaaugaaaaauuccaucagauugagaaggaguucucugaaguggaaggccggauccaggaucuggagaaguauguggaggacacgaaaaucgaucuuugguccuacaacgccgaacugcucgucgcccuggagaaucagcacacaauugaccugaccgauagcgaaaugaacaagcucuuugagaaaaccaagaaacaacugagagaaaacgcugaggacauggggaauggaugcuucaagaucuaucauaagugugauaacgcgugcauuggcucuauccgcaaugggacauacgaccacaacguguaccgggacgaggcccuuaauaacagauuucagauuaaaggcguugaacugaaguccggauauaaagauuggauccucuggaucagcuucgcuauuuccugcuuucugcuuuguguggcccugcucggcuucaucaugugggccugccagaaggggaauauucgcuguaacaucugcauuuga

SEQ ID NO: 205437 - RNA, 1701 nt, Artificial Sequence
  derived and/or modified CDS sequence (opt5) from hemagglutinin__InfluenzaA__ALE31854
augaagaccaucauugcccugagcuacauccucugccugguguucgcucagaaaauucccggcaacgacaauuccacagccacgcuuugucuggggcaccaugcggucccuaacggaaccaucguuaagacaauuaccaaugauagaaucgaggugacaaacgcuaccgaacucgugcaaaauucuagcaucggcgagauuugcgacuccccgcaccagauccuggauggggaaaacuguacacuuauugacgcccugcucggagauccccagugcgacggcuuucagaauaaaaagugggaucuguucgucgagcggucuaaagccuauagcaacuguuacccuuaugacgugcccgauuacgcuucccugcgcucucucguugccagcuccgggacccuggaauuuaauaacgagagcuucaauuggacgggagugacccaaaacggcacaucuuccgcuugcaucagacggucuagcuccagcuuuuucucucgccuuaauuggcugacccaucucaacuauacauacccugcccugaaugucaccaugcccaacaacgagcaguuugacaaacuuuauauuuggggcgugcaccauccugggacggauaaggaccagaucuuccuguacgcgagauccagcggacggauuacaguuuccaccaagggcucucagcaagccgugaucccgaauaucgggagccgcccccggauuagagauaucccuucccgcauuagcaucuacuggacaauugucaagcccggagacauccuccugaucaacucuaccggcaaucugauugcuccuagaggguauuuuaaaauccgguccggaaagagcucuauuaugcgcagcgacgcccccaucggcagauguaaauccgaaugcauuaccccgaacggcucuaucccuaaugauaagcccuuccagaacgugaaucggaucacauacggggcuuguccucgcuaugugaagcacagcacgcucaaacuggccaccggaaugagaaacguccccgagaagcagacacggggcauuuuuggggcgaucgccggauucauugaaaauggcugggaggggaugguugacggaugguacggcuuuagacaccagaacuccgagggccgcgggcaagcugccgaucuuaaaagcacccaggcugccaucgaccagauuaauggaaagcugaaccggcucaucggcaaaacaaaugaaaaguuccaucaaauugagaaagaguucucugaaguggaagggagaauccaggaucuggagaaguauguggaggacaccaagaucgaucuuugguccuacaacgccgaacugcucgucgcucuggagaaucagcacacgauugaccugacagauagcgaaaugaacaaacucuuugagaagaccaaaaagcagcugcgcgaaaacgcggaggacaugggaaauggcugcuucaaaaucuaucauaagugugauaacgccugcauugggucuauccggaauggcaccuacgaccacaacguguacagagacgaggcucuuaauaaccgcuuucaaauuaagggaguugaacugaaauccggcuauaaggauuggauccucuggaucagcuucgccauuuccugcuuucugcuuuguguggcccugcucggguucaucaugugggcuugccagaaaggaaauauucgguguaacaucugcauuuga

SEQ ID NO: 205438 - RNA, 1701 nt, Artificial Sequence; identical to SEQ ID NO: 205199
  derived and/or modified CDS sequence (opt5) from hemagglutinin__InfluenzaA__ALE31855

SEQ ID NO: 205439 - RNA, 1701 nt, Artificial Sequence; identical to SEQ ID NO: 204513
  derived and/or modified CDS sequence (opt5) from hemagglutinin__InfluenzaA__ALE31856

SEQ ID NO: 205440 - RNA, 1701 nt, Artificial Sequence; identical to SEQ ID NO: 204513
  derived and/or modified CDS sequence (opt5) from hemagglutinin__InfluenzaA__ALE31857

SEQ ID NO: 205441 - RNA, 1701 nt, Artificial Sequence
  derived and/or modified CDS sequence (opt5) from hemagglutinin__InfluenzaA__ALE31858
augaagaccaucauugcccugagcuacauccucugccugguguucgcucagaaaauucccggcaacgacaauuccacagccacgcuuugucuggggcaccaugcggucccuaacggaaccaucguuaagacaauuaccaaugauagaaucgaggugacaaacgcuaccgaacucgugcaaaauucuagcaucggcgagauuugcgacuccccgcaccagauccuggauggggaaaacuguacacuuauugacgcccugcucggagauccccagugcgacggcuuucagaauaaaaagugggaucuguucgucgagcggucuaaagccuauagcaacuguuacccuuaugacgugcccgauuacgcuucccugcgcucucucguugccagcuccgggacccuggaauuuaauaacgagagcuucaauuggacgggagugacccaaaacggcacaucuuccgcuugcaucagacggucuagcuccagcuuuuucucucgccuuaauuggcugacccaucucaaguauacauacccugcccugaacgucaccaugcccaauaacgagcaguuugacaaacuuuauauuuggggcgugcaccauccugggacggauaaggaccagaucuuccuguacgcgcaguccagcggaagaauuacaguuuccaccaagcggucucaacaggccgugaucccgaacaucggcagccgcccccggauuagagauaucccuucccgcauuagcaucuacuggacaauugucaaacccggggacauccuccugaucaauucuaccggaaaccugauugcuccuagaggcuauuuuaagauccgguccgggaaaagcucuauuaugcgcagcgacgcccccaucggaaaguguaaguccgaaugcauuaccccgaauggcucuaucccuaacgauaaacccuuccagaaugugaacagaaucacauacggcgcuuguccucgguaugugaagcacagcacgcucaaacuggccaccgggaugcgcaauguccccgagaagcagacaagaggaauuuuuggcgcgaucgccggguucauugaaaacggaugggagggcaugguugacgggugguacggauuucggcaccaaaauuccgagggcagaggccaggcugccgaucuuaaaagcacccaggcugccaucgaccaaauuaacgggaagcugaaucgccucaucggaaaaacaaacgaaaaguuccaucagauugagaaggaguucucugaaguggaaggccggauccaggaucuggagaaauauguggaggacaccaagaucgaucuuugguccuacaaugccgaacugcucgucgcucuggagaaccagcacacgauugaccugacagauagcgaaaugaauaaacucuuugagaagaccaaaaagcaacugagagaaaacgcggaggacauggggaacggaugcuucaagaucuaucauaaaugugauaaugccugcauuggcucuauccgcaacgggaccuacgaccacaauguguaccgggacgaggcucuuaacaauagauuucagauuaagggcguugaacugaaauccggauauaaggauuggauccucuggaucagcuucgccauuuccugcuuucugcuuuguguggcccugcucggcuucaucaugugggcuugccagaaagggaacauucgcuguaauaucugcauuuga

SEQ ID NO: 205442 - RNA, 1701 nt, Artificial Sequence
  derived and/or modified CDS sequence (opt5) from hemagglutinin__InfluenzaA__ALE31859
augaagaccaucauugcccugagcuacauccucugccugguguucgcucagaaaauucccggcaacgacaauuccacagccacgcuuugucuggggcaccaugcggucccuaacggaaccaucguuaagacaauuaccaaugauagaaucgaggugacaaacgcuaccgaacucgugcaaaauucuagcaucggcgagauuugcgacuccccgcaccagauccuggauggggaaaacuguacacuuauugacgcccugcucggagauccccagugcgacggcuuucagaauaaaaagugggaucuguucgucgagcggucuaaagccuauagcaacuguuacccuuaugacgugcccgauuacgcuucccugcgcucucucguugccagcuccgggacccuggaauuuaauaacgagagcuucaauuggacgggagugacccaaaacggcacaucuuccgcuugcaccagacggagcagcuccagcuuuuucucucgccuuaauuggcugacacaucucaacuauaccuacccugcccugaaugucacgaugcccaacaacgagcaguuugacaaacuuuauaucuggggcgugcaccauccugggacagauaaggaccagauuuuccuguacgcgcaguccagcggaagaaucaccguuuccacaaagcggucucaacaggccgugauuccgaauaucggcagccgccccagaauccgggauauuccuucccgcaucagcauuuacuggaccaucgucaagcccggggacaugcuccugauuaacucuaccggaaaucugaucgcuccuagaggcuauuuuaaaauccgguccgggaagucuucuauuaugcgcagcgacgcccccaucggaaaauguaaguccgaaugcauuacaccgaacggcucuaucccuaaugauaagcccuuccagaacgugaauagaauuacguacggcgcuuguccucgguaugugaaacacagcacccucaagcuggccacagggaugcgcaacguccccgagaaacagaccagaggaaucuuuggcgcgaucgccggguucauugaaaauggaugggagggcaugguugacgggugguacggauuucggcaccaaaacuccgagggcagaggccaggcugccgaucuuaagagcacacaggcugccaucgaccaaauuaaugggaaacugaaccgccucaucggaaagaccaaugaaaaauuccaucagauugagaaggaguucucugaaguggaaggccggauccaggaucuggagaaguauguggaggacacgaaaauugaucuuugguccuacaacgccgaacugcucgucgcucuggagaaucagcacacaaucgaccugaccgauagcgaaaugaacaagcucuuugagaaaaccaagaaacaacugagagaaaacgcggaggacauggggaauggaugcuucaagaucuaucauaagugugauaacgccugcauuggcucuauccgcaaugggacauacgaccacaacguguaccgggacgaggcucuuaauaacagauuucagauuaaaggcguugaacugaaguccggauauaaagauuggauccucuggauuagcuucgccaucuccugcuuucugcuuuguguggcccugcucggcuucaucaugugggcuugccagaaggggaauauucgcuguaacaucugcauuuga

SEQ ID NO: 205443 - RNA, 1701 nt, Artificial Sequence
  derived and/or modified CDS sequence (opt5) from hemagglutinin__InfluenzaA__ALE31860
augaagaccaucauugcccugagcuacauccucugccugguguucgcucagaaaauucccggcaacgacaauuccacagccacgcuuugucuggggcaccaugcggucccuaacggaaccaucguuaagacaauuaccaaugauagaaucgaggugacaaacgcuaccgaacucgugcaaaauucuagcaucggcaaaauuugcgacuccccgcaccagauccuggauggggagaacuguacacuuauugacgcccugcucggagauccccagugcgacggcuuucagaauaagaaaugggaucuguucgucgaacggucuaaggccuauagcaacuguuacccuuaugacgugcccgauuacgcuucccugcgcucucucguugccagcuccgggacccuggaguuuaauaacgaaucuuucaauuggacgggagugacccaaaacggcacaucuuccgcuugcaucagacggagcagcuccagcuuuuucucucgccuuaauuggcugacccaucucaacuauacauacccugcccugaaugucaccaugcccaacaacgagcaguuugacaaacuuuauauuuggggcgugcaccauccugggacggauaaggaccagaucuuccuguacgcgcaguccagcggaagaauuacaguuuccaccaagcggucucaacaggccgugaucccgaauaucggcagccgcccccggauuagagauaucccuucccgcauuagcaucuacuggacaauugucaaacccggggacauccuccugaucaacucuaccggaaaucugauugcuccuagaggcuauuuuaagauccgguccggggagagcucuauuaugcgcagcgacgcccccaucggaaaauguaaguccgaaugcauuaccccgaacggcucuaucccuaaugauaagcccuuccagaacgugaauagaaucacauacggcgcuuguccucgguaugugaaacacagcacgcucaagcuggccaccgggaugcgcaacguccccgagaaacagacaagaggaauuuuuggcgcgaucgccggguucauugaaaauggaugggagggcaugguugacgggugguacggauuucggcaccaaaacuccgagggcagaggccaggcugccgaucuuaagagcacccaggcugccaucgaccaaauuaaugggaaacugaaccgccucaucggaaagacaaaugaaaaauuccaucagauugagaaggaguucucugaaguggaaggccggauccaggaucuggagaaguauguggaggacaccaaaaucgaucuuugguccuacaacgccgaacugcucgucgcucuggagaaucagcacacgauugaccugacagauagcgaaaugaacaagcucuuugagaaaaccaagaaacaacugagagaaaacgcggaggacauggggaauggaugcuucaagaucuaucauaagugugauaacgccugcauuggcucuauccgcaaugggaccuacgaccacaacguguaccgggacgaggcucuuaauaacagauuucagauuaaaggcguugaacugaaguccggauauaaagauuggauccucuggaucagcuucgccauuuccugcuuucugcuuuguguggcccugcucggcuucaucaugugggcuugccagaaggggaauauucgcuguaacaucugcauuuga

SEQ ID NO: 205444 - RNA, 1701 nt, Artificial Sequence; identical to SEQ ID NO: 204513
  derived and/or modified CDS sequence (opt5) from hemagglutinin__InfluenzaA__ALE31861

SEQ ID NO: 205445 - RNA, 1701 nt, Artificial Sequence
  derived and/or modified CDS sequence (opt5) from hemagglutinin__InfluenzaA__ALE31862
augaagaugaucauugcccugagcuacauccucugccugguguucgcucagaaaauucccggcaacgacaauuccaccgccacacuuugucuggggcaccaugcggucccuaacggaacgaucguuaagaccauuacaaaugauagaaucgaggugaccaacgcuacagaacucgugcaaaauucuagcaucggcgagauuugcgacuccccgcaccagauccuggauggggaaaacuguacccuuauugacgcccugcucggagauccccagugcgacggcuuucagaauaaaaagugggaucuguucgucgagcggucuaaagccuauagcaacuguuacccuuaugacgugcccgauuacgcuucccugcgcucucucguugccagcuccgggacacuggaauuuaauaacgagagcuucaauuggaccggagugacgcaaaacggcaccucuuccgcuugcaucagaaagucuagcuccagcuuuuucucucggcuuaauuggcugacacaucucaacuauaccuacccugcccugaaugucacaaugcccaacaacgagcaguuugacaaacuuuauauuuggggcgugcaccauccugggaccgauaaagaccagaucuuccuguacgcgcgcuccagcggaagaauuacgguuuccacaaagcggucucagcaagccgugaucccgaauaucggcagccgcccccggauuagagauaucccuucccgcauuagcaucuacuggaccauugucaaacccggggacauccuccugaucaacucuacaggaaaucugauugcuccuagaggcuauuuuaagauccgguccgggaaaagcucuauuaugcgcagcgacgcccccaucggaaaguguaaguccgaaugcauuaccccgaacggcucuaucccuaaugauaaacccuuccagaacgugaauagaaucaccuacggcgcuuguccucgguaugugaagcacagcacacucaaacuggccacggggaugcgcaacguccccgagaagcagaccagaggaauuuuuggcgcgaucgccggguucauugaaaauggaugggagggcaugguugacgggugguacggauuucggcaccagaacuccgagggcagaggccaagcugccgaucuuaaaagcacacaggcugccaucgaccagauuaaugggaagcugaaccgccucaucggaaaaaccaaugaaaaguuccaucaaauugagaaggaguucucugaaguggaaggccggauccaggaucuggagaaauauguggaggacacaaagaucgaucuuugguccuacaacgccgaauuucuggucgcucucgagaaucagcacaccauugaccugacggauagcgaaaugaacaaacuguucgagaagacaaagaagcagcucagagaaaacgcggaggacauggggaauggaugcuuuaagaucuaucauaaaugugauaacgccugcauuggcucuauccgcaaugggaccuacgaccacaacguguaccgggacgaggcucugaauaacagauuccaaauuaagggcguugaacuuaaauccggauauaaggauuggauccuguggaucagcuuugccauuuccugcuuccuccuguguguggcccuucugggcuuuaucaugugggcuugccagaaagggaauauucgcuguaacaucugcauuuga

SEQ ID NO: 205446 - RNA, 1701 nt, Artificial Sequence; identical to SEQ ID NO: 205171
  derived and/or modified CDS sequence (opt5) from hemagglutinin__InfluenzaA__ALE31863

SEQ ID NO: 205447 - RNA, 1701 nt, Artificial Sequence; identical to SEQ ID NO: 205171
  derived and/or modified CDS sequence (opt5) from hemagglutinin__InfluenzaA__ALE31865

SEQ ID NO: 205448 - RNA, 1701 nt, Artificial Sequence; identical to SEQ ID NO: 205171
  derived and/or modified CDS sequence (opt5) from hemagglutinin__InfluenzaA__ALE31866

SEQ ID NO: 205449 - RNA, 1701 nt, Artificial Sequence
  derived and/or modified CDS sequence (opt5) from hemagglutinin__InfluenzaA__ALE31867
augaagaccaucauugcccugagcuacauccucugccugguguucgcucagaaaauucccggcaacgacaauuccacagccacgcuuugucuggggcaccaugcggucccuaacggaaccaucguuaagacaauuaccaaugauagaaucgaggugacaaacgcuaccgaacucgugcaaaauucuagcaucggcgagauuugcgacuccccgcaccagauccuggauggggaaaacuguacacuuauugacgcccugcucggagauccccagugcgacggcuuucagaauaaaaagugggaucuguucgucgagcggucuaaagccuauagcaacuguuacccuuaugacgugcccgauuacgcuucccugcgcucucucguugccagcuccgggacccuggaauuuaauaacgagagcuucaauuggacgggagugacccaaaacggcacaucuuccgcuugcaucagaaagucuagcuccagcuuuuucucucggcuuaauuggcugacccaucucaacuauacauacccugcccugaaugucaccaugcccaacaacgagcaguuugacaaacuuuauauuuggggcgugcaccauccugggacggauaaggaccagaucuuccuguacgcgcgcuccagcggaagaauuacaguuuccaccaagcggucucagcaagccgugaucccgaauaucggcagccgcccccggauuagagauaucccuucccgcauuagcaucuacuggacaauugucaaacccggggacauccuccugaucaacucuaccggaaaucugauugcuccuagaggcuauuuuaagauccgguccgggaaaagcucuauuaugcgcagcgacgcccccaucggaaaguguaaguccgaaugcauuaccccgaacggcucuaucccuaaugauaaacccuuccagaacgugaauagaaucacauacggcgcuuguccucgguaugugaagcacagcacgcucaaacuggccaccgggaugcgcaacguccccgagaagcagacaagaggaauuuuuggcgcgaucgccggguucauugaaaauggaugggagggcaugguugacgggugguacggauuucggcaccagaacuccgagggcagaggccaagcugccgaucuuaaaagcacccaggcugccaucgaccagauuaaugggaagcugaaccgccucaucggaaaaacaaaugaaaaguuccaucaaauugagaaggaguucucugaaguggaaggccggauccaggaucuggagaaauauguggaggacaccaagaucgaucuuugguccuacaacgccgaacugcucgucgcucuggagaaucagcacacgauugaccugacagauagcgaaaugaacaaacucuuugagaagaccaaaaagcagcugagagaaaacgcggaggacauggggaauggaugcuucaagaucuaucauaaaugugauaacgccugcauuggcucuauccgcaaugggaccuacgaccacaacguguaccgggacgaggcucuuaauaacagauuucaaauuaagggcguugaacugaaauccggauauaaggauuggauccucuggaucagcuucgccauuuccugcuuucugcuuuguguggcccugcucggcuucaucaugugggcuugccagaaugggaacauucgcuguaauaucugcauuuga

SEQ ID NO: 205450 - RNA, 1701 nt, Artificial Sequence; identical to SEQ ID NO: 204513
  derived and/or modified CDS sequence (opt5) from hemagglutinin__InfluenzaA__ALE31868

SEQ ID NO: 205451 - RNA, 1701 nt, Artificial Sequence; identical to SEQ ID NO: 205449
  derived and/or modified CDS sequence (opt5) from hemagglutinin__InfluenzaA__ALE31869

SEQ ID NO: 205452 - RNA, 1701 nt, Artificial Sequence; identical to SEQ ID NO: 205449
  derived and/or modified CDS sequence (opt5) from hemagglutinin__InfluenzaA__ALE31870

SEQ ID NO: 205453 - RNA, 1701 nt, Artificial Sequence
  derived and/or modified CDS sequence (opt5) from hemagglutinin__InfluenzaA__ALE31871
augaagaccaucauugcccugagcuacauccucugccugguguucgcucagaaaauucccggcaacgacaauuccacagccacgcuuugucuggggcaccaugcggucccuaacggaaccaucguuaagacaauuaccaaugauagaaucgaggugacaaacgcuaccgaacucgugcaaaauucuagcaucggcgagauuugcaacuccccgcaccagauccuggacggggaaaauuguacacuuauugaugcccugcucggagacccccagugcgauggcuuucagaacaaaaagugggaccuguucgucgagcggucuaaagccuauagcaauuguuacccuuaugaugugcccgacuacgcuucccugcgcucucucguugccagcuccgggacccuggaauuuaacaaugagagcuucaacuggacgggagugacccaaaauggcacaucuuccgcuugcaucagaaaguccucuuccagcuuuuucucucggcuuaacuggcugacccaucucaauuauacauacccugcccugaacgucaccaugcccaacaaugagcaguuugauaaacuuuauauuuggggcgugcaccauccugggacggacaaggaucagaucuuccuguacgcgcgcuccagcggaagaauuacaguuuccaccaagcggucucagcaagccgugaucccgaacaucggcagccgcccccggauuagagacaucccuucccgcauuagcaucuacuggacaauugucaaacccggggauauccuccugaucaauucuaccggaaaccugauugcuccuagaggcuauuuuaagauccgguccgggaaaagcucuauuaugcgcagcgacgcccccaucggaaaguguaaguccgaaugcauuaccccgaauggcucuaucccuaacgacaaacccuuccagaaugugaacagaaucacauacggcgcuuguccucgguaugugaagcacagcacgcucaaacuggccaccgggaugcgcaauguccccgagaagcagacaagaggaauuuuuggcgcgaucgccggguucauugaaaacggaugggagggcaugguugaugggugguacggauuucggcaccagaauagcgagggcagaggccaagcugccgaccuuaaaagcacccaggcugccaucgaucagauuaacgggaagcugaaucgccucaucggaaaaacaaacgaaaaguuccaucaaauugagaaggaguucucugaaguggaaggccggauccaggaccuggagaaauauguggaggauaccaagaucgaccuuugguccuacaaugccgaacugcucgucgcucuggagaaccagcacacgauugaucugacagacagcgaaaugaacaaacucuuugagaagaccaaaaagcagcugagagaaaaugcggaggauauggggaacggaugcuucaagaucuaucauaaaugugacaaugccugcauuggcucuauccgcaacgggaccuacgaucacaauguguaccgggacgaggcucuuaacaauagauuucaaauuaagggcguugaacugaaauccggauauaaggacuggauccucuggaucagcuucgccauuuccugcuuucugcuuuguguggcccugcucggcuucaucaugugggcuugccagaaagggaacauucgcuguaauaucugcauuuga

SEQ ID NO: 205454 - RNA, 1701 nt, Artificial Sequence; identical to SEQ ID NO: 204499
  derived and/or modified CDS sequence (opt5) from hemagglutinin__InfluenzaA__ALE31872

SEQ ID NO: 205455 - RNA, 1701 nt, Artificial Sequence; identical to SEQ ID NO: 204513
  derived and/or modified CDS sequence (opt5) from hemagglutinin__InfluenzaA__ALE31873

SEQ ID NO: 205456 - RNA, 1701 nt, Artificial Sequence
  derived and/or modified CDS sequence (opt5) from hemagglutinin__InfluenzaA__ALE31874
augaagaccaucauugcccugagcuacauccucugccugguguucgcucagaaacuucccggcaacgacaauuccgccgcgacacugugucucgggcaccaugcugucccuaacggaacgauuguuaagaccaucacaaaugauagaauugaggugaccaacgccacagaacuggugcaaaauucuagcaucggcgagaucugcgacuccccgcaccagauucuugauggggaaaacuguacccugaucgacgcccuccugggagauccccagugcgacggcuuucagaauaaaaagugggaucuguucgucgagcggucuaaagcucauagcaacuguuauccuuacgacgugcccgauuaugccucccuccgcucucugguugcuagcuccgggacacuugaauuuaauaacgagagcuucaauugggccggagugacccaaaacggcacgucuuccagcugcauuagaggcucuaauuccagcuuuuucucucggcugaacuggcucacccaccuuaauuccaaguacccugcgcugaacgucacaaugcccaacaaugagcaguuugacaagcuguauaucuggggagugcaucacccugggaccgauaaagaccagauuuuccucuacgcccagagcuccggccgcaucacaguuucuaccaagagaagccaacaggcugugauuccgaacaucgggucccggccccgcaucagagauauuccuagccggaucucuauuuauuggacgaucgucaaacccggagacauucugcugaucaauuccacaggcaaccucaucgccccucgcggguacuuuaagauuagaagcggaaaaucuagcaucaugcgguccgacgcucccauuggcaaguguaagucugaaugcaucaccccgaauggcagcauuccuaacgauaaacccuuccagaaugugaaccgcaucacauacggggccuguccuagauaugugaagcaguccacccugaaacuugcgaccggaaugcggaauguccccgagaagcaaacacgcggcaucuuuggggccauugcuggauucaucgaaaacggcugggaggggaugguugacggaugguacggcuuuagacaccagaauagcgagggccgggggcaggccgcugaucugaaaucuacgcaagccgccauugaccagaucaacggaaagcucaauagacugauuggcaaaaccaacgaaaaguuccaucagaucgagaaggaguucuccgaaguggaagggcgcauucaggaucuugagaaauauguggaggacacaaagaucgaucuguggagcuacaaugcugaacuccuggucgcgcuggagaaccaacacaccaucgaccucacagauucugaaaugaacaaacuguuugagaagaccaaaaagcagcuucgggaaaaugccgaggacaugggaaacggcugcuucaagauuuaucauaaaugugauaaugcuugcaucggguccauuagaaacggcacguacgaccacgacguguaucgcgaugaggcccugaauaaccgguuucagaucaagggaguugaacucaaaagcggcuacaaggacuggauucuguggaucuccuucgccaucucuugcuuucuucuguguguggcucuccugggguucauuaugugggccugccagaaaggaaauaucagauguaacauuugcaucuga

SEQ ID NO: 205457 - RNA, 1701 nt, Artificial Sequence; identical to SEQ ID NO: 205456
  derived and/or modified CDS sequence (opt5) from hemagglutinin__InfluenzaA__ALE31875

SEQ ID NO: 205458 - RNA, 1701 nt, Artificial Sequence; identical to SEQ ID NO: 205456
  derived and/or modified CDS sequence (opt5) from hemagglutinin__InfluenzaA__ALE31876

SEQ ID NO: 205459 - RNA, 1701 nt, Artificial Sequence
  derived and/or modified CDS sequence (opt5) from hemagglutinin__InfluenzaA__ALE31877
augaagaccaucauugcccugagcuacauccucugccugguguucgcucagaaacuucccgagaacgacaauuccacagccacgcugugucucggccaccaugcggucccuaacgggaccauuguuaagacaaucaccucugauagaauugaagugacaaaugcuaccgagcuggugcaaaacagcuccaucggagaaaucugcgacucuccgcaccagauucuugauggcaaaaauuguacacugaucgacgcccuccugggggauccccagugcgacggauuucagaacaagaaaugggaucuguucgucgagcggagcaaggccuauuccaauuguuacccuuaugacgugcccgauuacgcuucucuccgcagccugguugccuccagcggcacccuugaauuuaacgacgagucuuucaauugggcuggggugacgcaaaacggaaccuccagcgccugcauuagaggcucuaauuccagcuuuuucucucggcugaacuggcucacacauuccaauuuuaaguauccugcgcugaacgucaccaugcccaauaacgagcaguucgauaaacuuuacaucuggggcgugcaccauccugggacagacaaggaucagauuuuucuguaugcccagagcuccggacgcaucaccguuucuacgaaaagaagccaacaggcugugauuccgaacaucggcucccggccccgcaucagaaauauuccuagccggaucucuauuuacuggacaaucgucaagcccggggacauucuccugaucaacuccaccggaaaucugaucgccccucgcggcuacuucaaaauuagaagcgggaagucuagcaucaugcgguccgacgcucccauuggaaaguguaaaucugaaugcaucacaccgaacggcagcauuccuaaugauaagcccuuucagaacgugaaucgcaucaccuauggcgccuguccuagauacgugaaacaguccacccucaagcuggcgacagggaugcggaacguccccgagaaacaaacgcgcggaaucuucggcgccauugcuggguuuaucgaaaauggaugggagggcaugaaggacgggugguauggauucagacaccagaacagcgagggccggggccaggccgcugaucuuaaaucuacccaagccgccauugaccagaucaaugggaagcugaacagacucauuggaaagacaaaugaaaaauuccaccagaucgagaaggaauuuuccgagguugaaggccgcauucaggaucuggagaaauacguggaggacaccaagaucgaucuuuggagcuauaacgcugaacugcucguggcgcuggagaaucaacauacaaucgaccugaccgauucugaaauuaacaaacucuucgagaagacgaagaaacagcugcgggaaaacgccgaggacauggggaauggaugcuuuaagaucuaccacaaaugugauaacgcuugcauuggcuccaucagaaaugggacauaugaccaugacgucuaccgcgaugaggcccuuaacaaucgguuccagauuaagggcguggaacugaaaagcggauacaaggacuggauccucuggaucuccuuugccauuucuugcuuccugcuuuguguugcucugcucggcuuuaucaugugggccugccagaaggggaacauuagauguaauaucugcauuuga

SEQ ID NO: 205460 - RNA, 1701 nt, Artificial Sequence; identical to SEQ ID NO: 204513
  derived and/or modified CDS sequence (opt5) from hemagglutinin__InfluenzaA__ALE31878

SEQ ID NO: 205461 - RNA, 1701 nt, Artificial Sequence; identical to SEQ ID NO: 204513
  derived and/or modified CDS sequence (opt5) from hemagglutinin__InfluenzaA__ALE31879

SEQ ID NO: 205462 - RNA, 1701 nt, Artificial Sequence; identical to SEQ ID NO: 204513
  derived and/or modified CDS sequence (opt5) from hemagglutinin__InfluenzaA__ALE31880

SEQ ID NO: 205463 - RNA, 1701 nt, Artificial Sequence
  derived and/or modified CDS sequence (opt5) from hemagglutinin__InfluenzaA__ALE31881
augaagaccaucauugcccugagccacauccucugccugguguucgcucagaaaauucccggcaacgacaauuccacagccacgcuuugucuggggcaucacgcggucccuaacggaaccaucguuaagacaauuaccaaugauagaaucgaggugacaaacgcuaccgaacucgugcaaaauucuagcaucggcgagauuugcgacuccccgcaucagauccuggauggggaaaacuguacacuuauugacgcccugcucggagauccccagugcgacggcuuucagaauaaaaagugggaucuguucgucgagcggucuaaagccuacagcaacuguuauccuuacgacgugcccgauuaugcuucccugcgcucucucguugccagcuccgggacccuggaauuuaauaacgagagcuucaauuggacgggagugacccaaaacggcacaucuuccgcuugcaucagacggagcagcuccagcuuuuucucucgccuuaauuggcugacccaccucaacuacacauauccugcccugaaugucaccaugcccaacaacgagcaguuugacaaacuuuacauuuggggcgugcaucacccugggacggauaaggaccagaucuuccuguaugcgcaguccagcggaagaauuacaguuuccaccaagcggucucaacaggccgugaucccgaauaucggcagccgcccccggauuagagauaucccuucccgcauuagcaucuacuggacaauugucaagcccggggacauccuccugaucaacucuaccggaaaucugguggcuccuagaggcuacuuuaaaauucgguccgggaagucuucuaucaugcgcagcgacgcccccauuggaaaauguaaguccgaaugcaucaccccgaacggcucuauuccuaaugauaagcccuuccagaacgugaauagaaucacauauggcgcuuguccucgguacgucaaacacagcacgcucaagcuggccaccgggaugcgcaacguucccgagaaacagacaagaggaaucuuuggcgcgauugccggguucaucgaaaauggaugggagggcaugguggacgggugguauggauuucggcaucaaaacuccgagggcagaggccaggcugccgaucuuaagagcacccaggcugccauugaccaaaucaaugggaaacugaaccgccucauuggaaagacaaaugaaaaauuccaccagaucgagaaggaguucucugaaguggaaggccggauucaggaucuggagaaguacgucgaggacaccaaaaucgaucuuugguccuauaacgccgaacugcucguggcucuggagaaucagcauacgaucgaccugacagauagcgaaaugaacaagcucuuugagaaaaccaagaaacaacugagagaaaacgcggaggacauggggaauggaugcuucaagauuuaccacaagugugauaacgccugcaucggcucuauucgcaaugggaccuaugaccacaacguuuaccgggacgaggcucuuaauaacagauuucagaucaaaggcauugaacugaaguccggauacaaagauuggauccucuggaucagcuucgccauuuccugcuuucugcuuuguguggcccugcucggcuucaucaugugggcuugccagaaggggaauauucgcuguaacaucugcauuuga

SEQ ID NO: 205464 - RNA, 1701 nt, Artificial Sequence; identical to SEQ ID NO: 204513
  derived and/or modified CDS sequence (opt5) from hemagglutinin__InfluenzaA__ALE31882

SEQ ID NO: 205465 - RNA, 1701 nt, Artificial Sequence; identical to SEQ ID NO: 204513
  derived and/or modified CDS sequence (opt5) from hemagglutinin__InfluenzaA__ALE31888

SEQ ID NO: 205466 - RNA, 1701 nt, Artificial Sequence; identical to SEQ ID NO: 204513
  derived and/or modified CDS sequence (opt5) from hemagglutinin__InfluenzaA__ALE31889

SEQ ID NO: 205467 - RNA, 1701 nt, Artificial Sequence; identical to SEQ ID NO: 205171
  derived and/or modified CDS sequence (opt5) from hemagglutinin__InfluenzaA__ALE31890

SEQ ID NO: 205468 - RNA, 1701 nt, Artificial Sequence; identical to SEQ ID NO: 205171
  derived and/or modified CDS sequence (opt5) from hemagglutinin__InfluenzaA__ALE31891

SEQ ID NO: 205469 - RNA, 1701 nt, Artificial Sequence; identical to SEQ ID NO: 204513
  derived and/or modified CDS sequence (opt5) from hemagglutinin__InfluenzaA__ALE31892

SEQ ID NO: 205470 - RNA, 1701 nt, Artificial Sequence; identical to SEQ ID NO: 204513
  derived and/or modified CDS sequence (opt5) from hemagglutinin__InfluenzaA__ALE31893

SEQ ID NO: 205471 - RNA, 1701 nt, Artificial Sequence; identical to SEQ ID NO: 205119
  derived and/or modified CDS sequence (opt5) from hemagglutinin__InfluenzaA__ALE31894

SEQ ID NO: 205472 - RNA, 1701 nt, Artificial Sequence; identical to SEQ ID NO: 204499
  derived and/or modified CDS sequence (opt5) from hemagglutinin__InfluenzaA__ALE31895

SEQ ID NO: 205473 - RNA, 1701 nt, Artificial Sequence; identical to SEQ ID NO: 204513
  derived and/or modified CDS sequence (opt5) from hemagglutinin__InfluenzaA__ALE31896

SEQ ID NO: 205474 - RNA, 1701 nt, Artificial Sequence; identical to SEQ ID NO: 204513
  derived and/or modified CDS sequence (opt5) from hemagglutinin__InfluenzaA__ALE31897

SEQ ID NO: 205475 - RNA, 1701 nt, Artificial Sequence; identical to SEQ ID NO: 204513
  derived and/or modified CDS sequence (opt5) from hemagglutinin__InfluenzaA__ALE31898

SEQ ID NO: 205476 - RNA, 1701 nt, Artificial Sequence
  derived and/or modified CDS sequence (opt5) from hemagglutinin__InfluenzaA__ALE31899
augaagaccaucauugcccugagcuacauccucugccugguguucgcucagaaaauucccggcaacgacaauuccacagccacgcuuugucuggggcaccaugcggucccuaacggaaccaucguuaagacaauuaccaaugauagaaucgaggugacaaacgcuaccgaacucgugcaaaauucuagcaucggcgagauuugcgacuccccgcaccagauccuggauggggaaaacuguacacuuauugacgcccugcucggagauccccagugcgacggcuuucagaauaaaaagugggaucuguucgucgagcggucuaaagccuauagcaacuguuacccuuaugacgugcccgauuacgcuucccugcgcucucucguugccagcuccgggacccuggaauuuaauaacgagagcuucaauuggacgggagugacccaaaacggcacaucuuccgcuugcaucagaaagucuagcuccagcuuuuucucucggcuuaauuggcugacccaucucaacuauacauacccugcccugaaugucaccaugcccaacaacgagcaguuugacaaacuuuauauuuggggcgugcaccauccugggacggauaaggaccagaucuuccuguacgcgcgcuccagcggaagaauuacaguuuccaccaagcggucucagcaagccgugaucccgaauaucggcagccgcccccggauuagagauaucccuucccgcauuagcaucuacuggacaauugucaaacccggggacauccuccugaucaacucuaccggaaaucugauugcuccuagaggcuauuuuaagauccgguccgggaaaagcucuaugaugcgcagcgacgcccccauuggaaaguguaaguccgaaugcaucaccccgaacggcucuauuccuaaugauaaacccuuccagaacgugaauagaaucacauacggcgcuuguccucgguaugugaagcacagcacgcucaaacuggccaccgggaugcgcaacguccccgagaagcagacaagaggaaucuuuggcgcgauugccggguucaucgaaaauggaugggagggcaugguugacgggugguacggauuucggcaccagaacuccgagggcagaggccaagcugccgaucuuaaaagcacccaggcugccauugaccagaucaaugggaagcugaaccgccucauuggaaaaacaaaugaaaaguuccaucaaaucgagaaggaguucucugaaguggaaggccggauucaggaucuggagaaauauguggaggacaccaagaucgaucuuugguccuacaacgccgaacugcucgucgcucuggagaaucagcacacgaucgaccugacagauagcgaaaugaacaaacucuuugagaagaccaaaaagcagcugagagaaaacgcggaggacauggggaauggaugcuucaagauuuaucauaaaugugauaacgccugcaucggcucuauucgcaaugggaccuacgaccacaacguguaccgggacgaggcucuuaauaacagauuucaaaucaagggcguugaacugaaauccggauauaaggauuggauucucuggaucagcuucgccaucuccugcuuucugcuuuguguggcccugcucggcuucauuaugugggcuugccagaaagggaauauccgcuguaacauuugcaucuga

SEQ ID NO: 205477 - RNA, 1701 nt, Artificial Sequence; identical to SEQ ID NO: 205119
  derived and/or modified CDS sequence (opt5) from hemagglutinin__InfluenzaA__ALE31901

SEQ ID NO: 205478 - RNA, 1701 nt, Artificial Sequence
  derived and/or modified CDS sequence (opt5) from hemagglutinin__InfluenzaA__ALE31902
augaagaccaucauugcccugagcuacauccucugccugguguucgcucagaaaauucccggcaacgacaauuccacagccacgcuuugucuggggcaccaugcggucccuaacggaaccaucguuaagacaauuaccaaugauagaaucgaggugacaaacgcuaccgaacucgugcaaaauucuagcaucggcgagauuugcgacuccccgcaccagauccuggauggggaaaacuguacacuuauugacgcccugcucggagauccccagugcgacggcuuucagaauaaaaagugggaucuguucgucgagcggucuaaagccuauagcaacuguuacccuuaugacgugcccgauuacgcuucccugcgcucucucguugccagcuccgggacccuggaauuuaauaacgagagcuucaauuggacgggagugacccaaaacggcacaucuuccgcuugcaucagacggagcagcuccagcuuuuucucucgccuuaauuggcugacccaucucaacuauacauacccugcccugaaugucaccaugcccaacaacgagcaguuugacaaacuuuauauuuggggcgugcaccauccugggacggauaaggaccagaucuuccuguacgcgcaguccagcggaagaauuacaguuuccaccaagcggucucaacaggccgugaucccgaauaucggcagccgcccccggauuagagauaucccuucccgcauuagcaucuacuggacaauugucaagcccggggacauccuccugaucaacucuaccggaaaucugauugcuccuagaggcuauuuuaaaauccgguccgggaagucuucuauuaugcgcagcgacgcccccaucggaaaauguaaguccgaaugcauuaccccgaacggcucuaucccuaaugauaagcccuuccagaacgugaauagaaucacauacggcgcuuguccucgguaugugaaacacagcacgcucaagcuggccaccgggaugcgcaacguccccgagaaacagacaagaggaauuuuuggcgcgaucgccggguucauugaaaauggaugggagggcaugguugacgggugguacggauuucggcaccaaaacuccgagggcagaggccaggcugccgaucuuaagagcacccaggcugccaucgaccaaauuaaugggaaacugaaccgccucaucggaaagacaaaugaaaaauuccaucagauugagaaggaguucucugaaguggaaggccggauccaggaucuggagaaguauguggaggacaccaaaaucgaucuuugguccuacaacgccgaacugcucgucgcucuggagaaucagcacacgauugaccugacagauagcgaaaugaacaagcucuuugagagaaccaaaaagcaacugcgcgaaaacgcggaggacauggggaauggaugcuucaaaaucuaucauaagugugauaacgccugcauuggcucuauccggaaugggaccuacgaccacaacguguacagagacgaggcucuuaauaaccgcuuucagauuaagggcguugaacugaaauccggauauaaggauuggauccucuggaucagcuucgccauuuccugcuuucugcuuuguguggcccugcucggcuucaucaugugggcuugccagaaagggaauauucgguguaacaucugcauuuga

SEQ ID NO: 205479 - RNA, 1701 nt, Artificial Sequence; identical to SEQ ID NO: 204513
  derived and/or modified CDS sequence (opt5) from hemagglutinin__InfluenzaA__ALE31903

SEQ ID NO: 205480 - RNA, 1701 nt, Artificial Sequence; identical to SEQ ID NO: 204513
  derived and/or modified CDS sequence (opt5) from hemagglutinin__InfluenzaA__ALE31904

SEQ ID NO: 205481 - RNA, 1701 nt, Artificial Sequence
  derived and/or modified CDS sequence (opt5) from hemagglutinin__InfluenzaA__ALE31905
augaagaccaucauugcccugggcuacauccucugccugggguucgcucagaaaauucccggaaacgacaauagcacagccacgcuuugucugggccaccaugcggugccuaacgggaccaucgucaagacaauuaccaaugauagaaucgagguuacaaacgcuaccgaacucgugcaaaauuccucuaucggagagauuugcgacagcccgcacaaaauccuggauggcgaaaacuguacacuuauugacgcccugcucggggauccccagugcgacggauuucagaauaagaaaugggaucuguucguggagcgguccaaggccuauucuaacuguuacccuuaugacguccccgauuacgcuagccugcgcucccucguggccucuagcggcacccuggaauuuaauaacgaguccuucaauuggacgggcguuacccagaacgggacaagcucugcuugcaucagacgguccucuagcuccuuuuucagccgccuuaauuggcugacccaucucaacuauacauacccugcccugaaugugaccaugcccaacaacgagcaauuugacaaacuuuauauuuggggaguccaccauccuggcacggauaaggaccagaucuuccuguacgcgcagucuuccgggagaauuacagugagcaccaagcggucccagcaagccguuaucccgaauaucggaucucgcccccggauuagagauaucccuagccgcauuuccaucuacuggacaauugugaaacccggcgacauccuccugaucaacagcaccgggaaucugauugcuccuagaggauauuuuaagauccggucuggcaaauccagcauuaugcgcucugacgcccccaucggcaaguguaagagcgaaugcauuaccccgaacggguccaucccuaaugauaaacccuuccagaacgucaauagaaucacauacggagcuuguccucgguaugugaagcacucuacgcucaaacuggccaccggcaugcgcaacgugcccgagaagcagacaagagggauuuuuggagcgaucgccggcuucauugaaaaugggugggagggaauggucgacggcugguacggcuuucggcaccagaacagcgaggggagaggacaagcugccgaucuuaaauccacccaggcugccaucgaccagauuaauggcaagcugaaccgccucaucgggaaaacaaaugaaaaguuccaucaaauugagaaggaguucagcgaaguugaaggacggauccaggaucuggagaaauauguggaggacaccaagaucgaucuuuggucuuacaacgccgaacugcucguggcucuggagaaucagcacacgauugaccugacagauuccgaaaugaacaaacucuuugagaagaccaaaaagcagcugagagaaaacgcggaggacaugggcaaugggugcuucaagaucuaucauaaaugugauaacgccugcauuggcagcauccgcaauggaaccuacgaccacaacgucuaccgggacgaggcucuuaauaacagauuucaaauuaagggcguggaacugaaaucuggguauaaggauuggauccucuggaucuccuucgccauuagcugcuuucugcuuuguguugcccugcucggauucaucaugugggcuugccagaaaggcaauauucgcuguaacaucugcauuuga

SEQ ID NO: 205482 - RNA, 1701 nt, Artificial Sequence; identical to SEQ ID NO: 204513
  derived and/or modified CDS sequence (opt5) from hemagglutinin__InfluenzaA__ALE31906

SEQ ID NO: 205483 - RNA, 1701 nt, Artificial Sequence
  derived and/or modified CDS sequence (opt5) from hemagglutinin__InfluenzaA__ALE31907
augaagaccaucauugcccugagcuacauccucugccugguguucgcucagaaaauucccggcaacgacaauuccacagccacgcuuugucuggggcaccaugcggucccuaacggaaccaucguuaagacaauuaccaaugauagaaucgaggugacaaacgcuaccgaacucgugcaaaauucuagcaucggcgagauuugcgacuccccgcaccagauccuggauggggaaaacuguacacuuauugacgcccugcucggagauccccagugcgacggcuuucagaauaaaaagugggaucuguucgucgagcggucuaaagccuauagcaacuguuacccuuaugacgugcccgauuacgcuucccugcgcucucucguugccagcuccgggacccuggaauuuaauaacgagagcuucaauuggacgggagugacccaaaacggcacaucuuccgcuugcaucagacggucuagcuccagcuuuuucucucgccuuaauuggcugacccaucucaacuauaaguacccugcccugaaugucacaaugcccaacaacgagcaguuugacaaacuuuauauuuggggcgugcaccauccugggaccgauaaagaccagaucuuccuguacgcgcaguccagcggaagaauuacgguuuccacaaagcggucucaacaggccgugaucccgaauaucggcagccgcccccggauuagagauaucccuucccgcauuagcaucuacuggaccauugucaaaucuggggacauccuccugaucaacuccacaggaaaucugauugcucccagaggcuauuuuaagauccggagcgggaaaucuagcauuaugcgcuccgacgccccuaucggaaaguguaagucugaaugcauuacccccaacggcagcaucccgaaugauaaaccuuuccagaacgugaauagaaucaccuacggcgcuuguccccgguaugugaagcacuccacacucaaacuggccacggggaugcgcaacgucccugagaagcagaccagaggaauuuuuggcgcgaucgccggguucauugaaaauggaugggagggcaugguugacgggugguacggauuucggcaccaaaacagcgagggcagaggccaggcugccgaucuuaaaucuacacaggcugccaucgaccaaauuaaugggaagcugaaccgccucaucggaaaaaccaaugaaaaguuccaucagauugagaaggaguucuccgaaguggaaggccggauccaggaucuggagaaauauguggaggacacaaagaucgaucuuuggagcuacaacgccgaacugcucgucgcucuggagaaucagcacaccauugaccugacggauucugaaaugaacaaacucuuugagaagacaaagaagcaacugagagaaaacgcggaggacauggggaauggaugcuucaagaucuaucauaaaugugauaacgccugcauuggcuccauccgcaaugggaccuacgaccacaacguguaccgggacgaggcucuuaauaacagauuucagauuaagggcguugaacugaaaagcggauauaaggauuggauccucuggaucuccuucgccauuucuugcuuucugcuuuguguggcccugcucggcuucaucaugugggcuugccagaaagggaauauucgcuguaacaucugcauuuga

SEQ ID NO: 205484 - RNA, 1701 nt, Artificial Sequence; identical to SEQ ID NO: 204513
  derived and/or modified CDS sequence (opt5) from hemagglutinin__InfluenzaA__ALE31908

SEQ ID NO: 205485 - RNA, 1701 nt, Artificial Sequence
  derived and/or modified CDS sequence (opt5) from hemagglutinin__InfluenzaA__ALE31909
augaagaccaucauugcccugagcuacauccucugccugguguucgcucagaaaauucccggcaacgacaauuccacagccacgcuuugucuggggcaccaugcggucccuaacggaaccaucguuaagacaauuaccaaugauagaaucgaggugacaaacgcuaccgaacucgugcaaaauucuagcaucggcgagauuugcgacuccccgcaccagauccuggauggggaaaacuguacacuuauugacgcccugcucggagauccccagugcgacggcuuucagaauaaaaagugggaucuguucgucgagcggucuaaagccuauagcaacuguuacccuuaugacgugcccgauuacgcuucccugcgcucucucguugccagcuccgggacccuggaauuuaauaacgagagcuucaauuggacgggagugacccaaaacggcacaucuuccgcuugcaucagacggucuagcuccagcuuuuucucucgccuuaauuggcugacccaucucaacuauacauacccugcccugaaugucaccaugcccaacaacgagcaguuugacaagcuguauauuuggggcgugcaccauccugggacggauaaggaccagaucuuccuguacgcgcaguccagcggaagaauuacaguuuccaccaaacggucucaacaggccgugaucccgaauaucggcagccgcccccggauuagagauaucccuucccgcauuagcaucuacuggacaauugucaagucuggggacauccuccugaucaacuccaccggaaaucugauugcucccagaggcuauuuuaaaauccggagcgggaagucuagcauuaugcgcuccgacgccccuaucggaaaauguaagucugaaugcauuacccccaacggcagcaucccgaaugauaagccuuuccagaacgugaauagaaucacauacggcgcuuguccccgguaugugaaacacuccacgcucaagcuggccaccgggaugcgcaacgucccugagaaacagacaagaggaauuuuuggcgcgaucgccggguucauugaaaauggaugggagggcaugguugacgggugguacggauuucggcaccaaaacagcgagggcagaggccaggcugccgaucuuaagucuacccaggcugccaucgaccaaauuaaugggaaacugaaccgccucaucggaaagacaaaugaaaaauuccaucagauugagaaggaguucuccgaaguggaaggccggauccaggaucuggagaaguauguggaggacaccaaaaucgaucuuuggagcuacaacgccgaacugcucgucgcucuggagaaucagcacacgauugaccugacagauucugaaaugaacaagcucuuugagaaaaccaagaaacaacugagagaaaacgcggaggacauggggaauggaugcuucaagaucuaucauaagugugauaacgccugcauuggcuccauccgcaaugggaccuacgaccacaacguguaccgggacgaggcucuuaauaacagauuucagauuaaaggcguugaacuuaagagcggauauaaagauuggauccucuggaucuccuucgccauuucuugcuuucugcuuuguguggcccugcucggcuucaucaugugggcuugccagaaggggaauauucgcuguaacaucugcauuuga

SEQ ID NO: 205486 - RNA, 1701 nt, Artificial Sequence; identical to SEQ ID NO: 204513
  derived and/or modified CDS sequence (opt5) from hemagglutinin__InfluenzaA__ALE31910

SEQ ID NO: 205487 - RNA, 1701 nt, Artificial Sequence; identical to SEQ ID NO: 205436
  derived and/or modified CDS sequence (opt5) from hemagglutinin__InfluenzaA__ALE31912

SEQ ID NO: 205488 - RNA, 1701 nt, Artificial Sequence
  derived and/or modified CDS sequence (opt5) from hemagglutinin__InfluenzaA__ALE31913
augaagaccaucauugcccugggcuacauccucugccugguguucgcucagaaaauucccgggaacgacaauagcacagccacgcuuugucugggacaccaugcggucccuaacggcaccaucguuaagacaauuaccaaugauagaaucgaggugacaaacgcuaccgaacucgugcaaaauuccucuaucggggagauuugcgacagcccgcacaaaauccuggauggagaaaacuguacacuuauugacgcccugcucggcgauccccagugcgacggguuucagaauaagaaaugggaucuguucgucgagcgguccaaggccuauucuaacuguuacccuuaugacgugcccgauuacgcuagccugcgcucccucguugccucuagcggaacccuggaauuuaauaacgaguccuucaauuggacgggcgugacccagaacggcacaagcucugcuugcaucagacgguccucuagcuccuuuuucagccgccuuaauuggcugacccaucucaacuauacauacccugcccugaaugucaccaugcccaacaacgagcaauuugacaaacuuuauauuuggggagugcaccauccugggacggauaaggaccagaucuuccuguacgcgcagucuuccggcagaauuacaguuagcaccaagcggucccagcaagccgugaucccgaauaucgggucucgcccccggauuagagauaucccuagccgcauuuccaucuacuggacaauugucaaacccggagacauccuccugaucaacagcaccggcaaucugauugcuccuagaggguauuuuaagauccggucuggaaaauccagcauuaugcgcucugacgcccccaucggcaaguguaagagcgaaugcauuaccccgaacggcuccaucccuaaugauaaacccuuccagaacgugaauagaaucacauacggggcuuguccucgguaugugaagcacucuacgcucaaacuggccaccggaaugcgcaacguccccgagaagcagacaagaggcauuuuuggggcgaucgccggauucauugaaaauggcugggaggggaugguugacggaugguacggcuuucggcaccagaacagcgagggcagagggcaagcugccgaucuuaaauccacccaggcugccaucgaccagauuaauggaaagcugaaccgccucaucggcaaaacaaaugaaaaguuccaucaaauugagaaggaguucagcgaaguggaagggcggauccaggaucuggagaaauauguggaggacaccaagaucgaucuuuggucuuacaacgccgaacugcucgucgcucuggagaaucagcacacgauugaccugacagauuccgaaaugaacaaacucuuugagaagaccaaaaagcagcugagagaaaacgcggaggacaugggaaauggcugcuucaagaucuaucauaaaugugauaacgccugcauugagagcauccgcaaugggaccuacgaccacaacguguaccgggacgaagcucuuaauaacagauuucaaauuaagggcguugagcugaaaucuggauauaaggauuggauccucuggaucuccuucgccauuagcugcuuucugcuuuguguggcccugcucggcuucaucaugugggcuugccagaaagggaauauucgcuguaacaucugcauuuga

SEQ ID NO: 205489 - RNA, 1701 nt, Artificial Sequence; identical to SEQ ID NO: 204513
  derived and/or modified CDS sequence (opt5) from hemagglutinin__InfluenzaA__ALE31914

SEQ ID NO: 205490 - RNA, 1701 nt, Artificial Sequence
  derived and/or modified CDS sequence (opt5) from hemagglutinin__InfluenzaA__ALE31915
augaagaccaucauugcccugagcuacauccucugccugguguucgcucagaaaauucccggcaacgacaauuccacagccacgcuuugucuggggcaccaugcggucccuaacggaaccaucguuaagacaauuaccaaugauagaaucgaggugacaaacgcuaccgaacucgugcaaaauucuagcaucggcgagauuugcgacuccccgcaccagauccuggauggggaaaacuguacacuuauugacgcccugcucggagauccccagugcgacggcuuucagaauaaaaagugggaucuguucgucgagcggucuaaagccuauagcaacuguuacccuuaugacgugcccgaauacgcuucccugcgcucucucguugccagcuccgggacccuggaguuuaauaacgagagcuucaauuggacgggagugacccaaaacggcacaucuuccgcuugcaucagacggagcagcuccagcuuuuucucucgccuuaauuggcugacccaucucaacuauacauacccugcccugaaugucaccaugcccaacaacgaacaguuugauaaacuuuauauuuggggcgugcaccauccugggacggacaaggaucagaucuuccuguacgcgcaguccagcggaagaauuacaguuuccaccaaacggucucaacaggccgugaucccgaauaucggcagccgcccccggauuagagacaucccuucccgcauuagcaucuacuggacaauugucaagcccggggauauccuccugaucaacucuaccggaaaucugauugcuccuagaggcuauuuuaaaauccgguccgggaagucuucuauuaugcgcagcgacgcccccaucggaaaauguaaguccgagugcauuaccccgaacggcucuaucccuaaugacaagcccuuccagaacgugaauagaaucacauacggcgcuuguccucgguaugugaaacacagcacgcucaagcuggccaccgggaugcgcaacguccccgaaaaacagacaagaggaauuuuuggcgcgaucgccggguucauugagaauggaugggagggcaugguugaugggugguacggauuucggcaccaaaacuccgaaggcagaggccaggcugccgaccuuaagagcacccaggcugccaucgaucaaauuaaugggaaacugaaccgccucaucggaaagacaaaugagaaauuccaucagauugaaaaggaguucucugaaguggagggccggauccaggaccuggagaaguauguggaagauaccaaaaucgaccuuugguccuacaacgccgagcugcucgucgcucuggaaaaucagcacacgauugaucugacagacagcgagaugaacaagcucuuugaaaagaccaagaaacaacugagagagaacgcggaggauauggggaauggaugcuucaagaucuaucauaagugugacaacgccugcauuggcucuauccgcaaugggaccuacgaucacaacguguaccgggacgaagcucuuaauaacagauuucagauuaaaggcguugagcugaaguccggauauaaagacuggauccucuggaucagcuucgccauuuccugcuuucugcuuuguguggcccugcucggcuucaucaugugggcuugccagaaggggaauauucgcuguaacaucugcauuuga

SEQ ID NO: 205491 - RNA, 1701 nt, Artificial Sequence; identical to SEQ ID NO: 204513
  derived and/or modified CDS sequence (opt5) from hemagglutinin__InfluenzaA__ALE31916

SEQ ID NO: 205492 - RNA, 1701 nt, Artificial Sequence; identical to SEQ ID NO: 204513
  derived and/or modified CDS sequence (opt5) from hemagglutinin__InfluenzaA__ALE31917

SEQ ID NO: 205493 - RNA, 1701 nt, Artificial Sequence; identical to SEQ ID NO: 205046
  derived and/or modified CDS sequence (opt5) from hemagglutinin__InfluenzaA__ALE31918

SEQ ID NO: 205494 - RNA, 1701 nt, Artificial Sequence; identical to SEQ ID NO: 205171
  derived and/or modified CDS sequence (opt5) from hemagglutinin__InfluenzaA__ALE31920

SEQ ID NO: 205495 - RNA, 1701 nt, Artificial Sequence; identical to SEQ ID NO: 204513
  derived and/or modified CDS sequence (opt5) from hemagglutinin__InfluenzaA__ALE31921

SEQ ID NO: 205496 - RNA, 1701 nt, Artificial Sequence; identical to SEQ ID NO: 204513
  derived and/or modified CDS sequence (opt5) from hemagglutinin__InfluenzaA__ALE31922

SEQ ID NO: 205497 - RNA, 1701 nt, Artificial Sequence; identical to SEQ ID NO: 205057
  derived and/or modified CDS sequence (opt5) from hemagglutinin__InfluenzaA__ALE31923

SEQ ID NO: 205498 - RNA, 1701 nt, Artificial Sequence; identical to SEQ ID NO: 204513
  derived and/or modified CDS sequence (opt5) from hemagglutinin__InfluenzaA__ALE31924

SEQ ID NO: 205499 - RNA, 1701 nt, Artificial Sequence; identical to SEQ ID NO: 204513
  derived and/or modified CDS sequence (opt5) from hemagglutinin__InfluenzaA__ALE31925

SEQ ID NO: 205500 - RNA, 1701 nt, Artificial Sequence
  derived and/or modified CDS sequence (opt5) from hemagglutinin__InfluenzaA__ALE31926
augaagaccaucauugcccugagcuacauccucugccugguguucgcucagaaaauucccggcaacgacaauuccacagccacgcuuugucuggggcaccaugcggucccuaacggaaccaucguuaagacaauuaccaaugauagaaucgaggugacaaacgcuaccgaacucgugcaaaauucuagcaucggcgagauuugcgacuccccgcaccagauccuggauggggaaaacuguacacuuauugacgcccugcucggagauccccagugcgacggcuuucagaauaaaaagugggaucuguucgucgagcggucuaaagccuauagcaacuguuacccuuaugacgugcccgauuacgcuucccugcgcucucucguugccagcuccgggacccuggaauuuaauaacgagggauucaauuggacgggcgugacccaaaacggcacaagcucugcuugcaucagacgguccucuagcuccuuuuucagccgccuuaauuggcugacccaucucaacuauaaguacccugcccugaaugucacaaugcccaacaacgagcaguuugacaaacuuuauauuuggggagugcaccauccugggaccgauaaagaccagaucuuccuguacgcgcagucuuccggcagaauuacgguuagcacaaagcggucccaacaggccgugaucccgaauaucgggucucgcccccggauuagagauaucccuagccgcauuuccaucuacuggaccauugucaaacccggagacauccuccugaucaacagcacaggcaaucugauugcuccuagaggguauuuuaagauccggucuggaaaauccagcauuaugcgcucugacgcccccaucggcaaguguaagagcgaaugcauuaccccgaacggcuccaucccuaaugauaaacccuuccagaacgugaauagaaucaccuacggggcuuguccucgguaugugaagcacucuacacucaaacuggccacgggaaugcgcaacguccccgagaagcagaccagaggcauuuuuggggcgaucgccggauucauugaaaauggcugggaggggaugguugacggaugguacggcuuucggcaccaaaacagcgagggcagagggcaggcugccgaucuuaaauccacacaggcugccaucgaccaaauuaauggaaagcugaaccgccucaucggcaaaaccaaugaaaaguuccaucagauugagaaggaguucagcgaaguggaagggcggauccaggaucuggagaaauauguggaggacacaaagaucgaucuuuggucuuacaacgccgaacugcucgucgcucuggagaaucagcacaccauugaccugacggauuccgaaaugaacaaacucuuugagaagacaaagaagcaacugagagaaaacgcggaggacaugggaaauggcugcuucaagaucuaucauaaaugugauaacgccugcauugggagcauccgcaauggcaccuacgaccacaacguguaccgggacgaggcucuuaauaacagauuucagauuaagggaguugaacugaaaucuggcuauaaggauuggauccucuggaucuccuucgccauuagcugcuuucugcuuuguguggcccugcucggguucaucaugugggcuugccagaaaggaaauauucgcuguaacaucugcauuuga

SEQ ID NO: 205501 - RNA, 1701 nt, Artificial Sequence; identical to SEQ ID NO: 204513
  derived and/or modified CDS sequence (opt5) from hemagglutinin__InfluenzaA__ALE31927

SEQ ID NO: 205502 - RNA, 1701 nt, Artificial Sequence
  derived and/or modified CDS sequence (opt5) from hemagglutinin__InfluenzaA__ALE31928
augaagaccaucauugcccugagcuacauccucugccugguguucgcucagaaacuucccggcaacgacaauuccacagccacgcugugucucgggcaccaugcggucccuaacggaaccauuguuaagacaaucaccaaugauagaauugaggugacaaacgcuaccgaacuggugcaaaauucuagcaucggcgagaucugcgacuccccgcaccagauucuugauggggaaaacuguacacugaucgacgcccuccugggagauccccagugcgacggcuuucagaauaaaaagugggaucuguucgucgagcggucuaaagccuauagcaacuguuacccuuaugacgugcccgauuacgcuucccuccgcucucugguugccagcuccgggacccuugaauuuaauaacgagagcuucaauugggcuggagugacgcaaaacggcaccucuuccgccugcauuagaggcagcaauucuuccuuuuucagccggcugaacuggcucacacauucuaauuuuaaguauccugcgcugaacgucaccaugcccaacaaugagcaguucgacaaacuuuacaucuggggagugcaccauccugggacagauaaggaccagauuuuucuguaugcccaguccagcggccgcaucaccguuuccacgaagagaucucaacaggcugugauuccgaacaucgggagccggccccgcaucagagauauuccuucccggaucagcauuuacuggacaaucgucaaacccggagacauucuccugaucaauucuaccggcaaccugaucgccccucgcggguacuucaagauuagauccggaaaaagcucuaucaugcggagcgacgcucccauuggcaaguguaaguccgaaugcaucacaccgaauggcucuauuccuaacgauaaacccuuucagaaugugaaccgcaucaccuauggggccuguccuagauacgugaagcagagcacccucaaacuggcgacaggaaugcggaauguccccgagaagcaaacgcgcggcaucuucggggccauugcuggauuuaucgaaaacggcugggaggggaugguugacggaugguauggcuucagacaccaaaauuccgagggccgggggcaggccgcugaucuuaaaagcacccaggccgccauugaccagaucaacggaaagcugaauagacucauuggcaaaacaaacgaaaaguuccaccagaucgagaaggaauuuucugagguggaagggcgcauucaggaucuggagaaauacguggaggacaccaagaucgaucuuugguccuauaaugcugaacugcucgucgcgcuggagaaccaacauacaaucgaccugaccgauagcgaaaugaacaaacucuucgagaagacgaaaaagcagcugcgggaaaaugccgaggacaugggaaacggcugcuuuaagauuuaccacaaaugugauaaugcuugcaucgggucuauuagaaacggcacauaugaccaugacguguaccgcgaugaggcccuuaauaaccgguuccagaucaagggaguugaacugaaauccggcuacaaggacuggauucucuggaucagcuuugccaucuccugcuuccugcuuuguguggcucugcucggguuuauuaugugggccugccagaaaggaaauaucagauguaacauuugcaucuga

SEQ ID NO: 205503 - RNA, 1701 nt, Artificial Sequence; identical to SEQ ID NO: 205149
  derived and/or modified CDS sequence (opt5) from hemagglutinin__InfluenzaA__ALE31930

SEQ ID NO: 205504 - RNA, 1701 nt, Artificial Sequence; identical to SEQ ID NO: 204513
  derived and/or modified CDS sequence (opt5) from hemagglutinin__InfluenzaA__ALE31931

SEQ ID NO: 205505 - RNA, 1701 nt, Artificial Sequence; identical to SEQ ID NO: 204513
  derived and/or modified CDS sequence (opt5) from hemagglutinin__InfluenzaA__ALE31932

SEQ ID NO: 205506 - RNA, 1701 nt, Artificial Sequence
  derived and/or modified CDS sequence (opt5) from hemagglutinin__InfluenzaA__ALE31933
augaagaccaucauugcccugagcuacauccucugccugguguaugcucagaaaauucccggcaacgacaauuccacagccacgcuuugucuggggcaccaugcggucccuaacggaaccaucguuaagacaauuaccaaugauagaaucgaggugacaaacgcuaccgaacucgugcaaaauucuagcaucggcgagauuugcgacuccccgcaccagauccuggauggggaaaacuguacacuuauugacgcccugcucggagauccccagugcgacggcuuccagaauaaaaagugggaucuguuugucgagcggucuaaagccuacagcaacuguuauccuuacgacgugcccgauuaugcuucccugcgcucucucguugccagcuccgggacccuggaauuuaauaacgagagcuucaauuggacgggagugacccaaaacggcacaucuuccgcuugcaucagacggucuagcuccagcuucuuuucucgccuuaauuggcugacccaucucaaguacacauauccugcccugaacgucaccaugcccaauaacgagcaguucgacaaacuuuacauuuggggcgugcaccauccugggacggauaaggaccagaucuuucuguacgcgcaguccagcggaagaauuacaguuuccaccaagcggucucaacaggccgugaucccgaacaucggcagccgcccccggauuagagauaucccuucccgcauuagcaucuauuggacaauugucaaacccggggacauccuccugaucaauucuaccggaaaccugauugcuccuagaggcuacuucaagauccgguccgggaaaagcucuauuaugcgcagcgacgcccccaucggaaaguguaaguccgaaugcauuaccccgaauggcucuaucccuaacgauaaacccuuucagaaugugaacagaaucacauauggcgcuuguccucgguacgugaagcacagcacgcucaaacuggccaccgggaugcgcaauguccccgagaagcagacaagaggaauuuucggcgcgaucgccggguuuauugaaaacggaugggagggcaugguugacgggugguauggauuccggcaccaaaauuccgagggcagaggccaggcugccgaucuuaaaagcacccaggcugccaucgaccaaauuaacgggaagcugaaucgccucaucggaaaaacaaacgaaaaguuucaucagauugagaaggaguucucugaaguggaaggccggauccaggaucuggagaaauacguggaggacaccaagaucgaucuuugguccuauaaugccgaacugcucgucgcucuggagaaccagcacacgauugaccugacagauagcgaaaugaauaaacucuucgagaagaccaaaaagcaacugagagaaaacgcggaggacauggggaacggaugcuuuaagaucuaccauaaaugugauaaugccugcauuggcucuauccgcaacgggaccuacgaccacaauguguaucgggacgaggcucuuaacaauagauuccagauuaagggcguugaacugaaauccggauacaaggauuggauccucuggaucagcuuugccauuuccugcuuccugcuuuguguggcccugcucggcuuuaucaugugggcuugccagaaagggaacauucgcuguaauaucugcauuuga

SEQ ID NO: 205507 - RNA, 1701 nt, Artificial Sequence
  derived and/or modified CDS sequence (opt5) from hemagglutinin__InfluenzaA__ALE31934
augaagaccaucauugcccugagcuacauccucugccugguguucgcucagaaaauucccggcaacgacaauuccacagccacgcuuugucuggggcaccaugcggucccuaacggaaccaucguuaagacaauuaccaaugauagaaucgaggugacaaacgcuaccgaacucgugcaaaauucuagcaucggcgagauuugcgacuccccgcaccagauccuggauggggaaaacuguacacuuauugacgcccugcucggagauccccagugcgacggcuuucagaauaaaaagugggaucuguucgucgagcggucuaaagccuauagcaacuguuacccuuaugacgugcccgauuacgcuucccugcgcucucucguugccagcuccgggacccuggaauuuaauaacgagagcuucaauuggacgggagugacccaaaacggcacaucuuccgcuugcaucagaaagucuagcuccagcuuuuucucucggcuuaauuggcugacccaucucaacuauacauaccaggcccugaaugucaccaugccuaacaacgagcaguuugacaaacuuuauauuuggggcgugcaccaucccgggacggauaaggaccagaucuuccuguacgcgcgcuccagcggaagaauuacaguuuccaccaagcggucucaacaggccgugaucccuaauaucggcagccgcccgcggauuagagauauccccucccgcauuagcaucuacuggacaauugucaaaccuggggacauccuccugaucaacucuaccggaaaucugauugcucccagaggcuauuuuaagauccgguccgggaaaagcucuauuaugcgcagcgacgccccuaucggaaaguguaaguccgaaugcauuacccccaacggcucuaucccgaaugauaaaccuuuccagaacgugaauagaaucacauacggcgcuuguccccgguaugugaagcacagcacgcucaaacuggccaccgggaugcgcaacauuccugagaagcagacaagaggaaucuuuggcgcgauugccggguucaucgaaaauggaugggagggcauggucgacgggugguacggauuucggcaccaaaacuccgagggcagaggccaggcugccgaucuuaaaagcacccaggcugccauugaccaaaucaaugggaagcugaaccgccucauuggaaaaacaaaugaaaaguuccaucagaucgagaaggaguucucugaaguugaaggccggauccaggaucuggagaaauauguggaggacaccaagauugaucuuugguccuacaacgccgaacugcucguggcucuggagaaucagcacacgaucgaccugacagauagcgaaaugaacaaacucuuugagaagaccaaaaagcaacugagagaaaacgcggaggacauggggaauggaugcuucaagauuuaucauaaaugugauaacgccugcaucggcucuauucgcaaugggaccuacgaccacaacgucuaccgggacgaggcucuuaauaacagauuucagaucaagggcguggaacugaaauccggauauaaggauuggauccucuggauuagcuucgccaucuccugcuuucugcuuuguguugcccugcucggcuucauuaugugggcuugccagaaagggaauauccgcuguaacauuugcaucuga

SEQ ID NO: 205508 - RNA, 1701 nt, Artificial Sequence; identical to SEQ ID NO: 204513
  derived and/or modified CDS sequence (opt5) from hemagglutinin__InfluenzaA__ALE31935

SEQ ID NO: 205509 - RNA, 1701 nt, Artificial Sequence; identical to SEQ ID NO: 205295
  derived and/or modified CDS sequence (opt5) from hemagglutinin__InfluenzaA__ALE31936

SEQ ID NO: 205510 - RNA, 1701 nt, Artificial Sequence
  derived and/or modified CDS sequence (opt5) from hemagglutinin__InfluenzaA__ALE31937
augaagaccaucauugcccugagcuacauccucugccugguguucgcucagaaacuucccgagaacgacaauuccacagccacgcugugucucggccaccaugcggucccuaacgggaccauuguuaagacaaucaccaaugauagaauugaagugacaaacgcuaccgagcuggugcaaaauucuagcaucggagaaaucugcgacuccccgcaccagauucuugauggcgagaacuguacacugaucgacgcccuccugggggauccccagugcgacggauuucagaauaaaaagugggaucuguucgucgaacggucuaaagccuauagcaacuguuacccuuaugacgugcccgauuacgcuucccuccgcucucugguugccagcuccggcacccuugaguuuaauaacgagagcuucaauugggcuggggugacgcaaaacggaaccucuuccagcugcauuagaggcucuaauuccagcuuuuucucucggcugaacuggcucacacaucuuaauuccaaguauccugcccugaacgucaccaugcccaacaaugaacaguuugacaagcuguacaucuggggcgugcaccauccugggacagauaaagaccagauuuuccucuaugcgcagccgagcggacgcaucaccguuuccacgaagagaucucaacaggccgugauucccaacaucggcagccggccucgcaucagagauauucccucccggaucagcauuuacuggacaaucgucaaaccuggggacauucugcugaucaauucuaccggaaaccucaucgcuccccgcggcuacuuuaagauuagauccgggaaaagcucuaucaugcggagcgacgccccgauuggaaaguguaaguccgagugcaucacaccuaauggcucuauucccaacgauaaaccuuuccagaaugugaaccgcaucaccuauggcgcuugucccagauacgugaagcagagcacccugaaacuugccacagggaugcggaauguccccgaacgccaaacgagaggaaucuuuggcgcgauugccggguucaucgagaacggaugggagggcaugguugacgggugguauggauuucggcaccaaaauuccgaaggcagaggccaggcugccgaucugaaaagcacccaggcugccauugaccagaucaacgggaaacucaaucgccugauuggaaagacaaacgagaaauuccaccagaucgaaaaggaguucucugaaguggagggccggauucaggaucuugagaaguacguggaagacaccaaaaucgaucugugguccuauaaugccgagcuccuggucgcucuggaaaaccaacauacaaucgaccucaccgauagcgagaugaacaagcuguuugaaaagacgaagaaacagcuuagagagaaugcggaggacauggggaacggaugcuucaagauuuaccacaagugugauaaugccugcaucggcucuauucgcaacgggacauaugaccaugacguguaccgggaugaagcucugaauaacagauuucagaucaaaggcguugagcucaaguccggauacaaagacuggauucuguggaucagcuucgccaucuccugcuuucuucuguguguggcccuccugggcuucauuaugugggcuugccagaaggggaauauccgcuguaacauuugcaucuga

SEQ ID NO: 205511 - RNA, 1701 nt, Artificial Sequence; identical to SEQ ID NO: 204513
  derived and/or modified CDS sequence (opt5) from hemagglutinin__InfluenzaA__ALE31938

SEQ ID NO: 205512 - RNA, 1701 nt, Artificial Sequence; identical to SEQ ID NO: 205119
  derived and/or modified CDS sequence (opt5) from hemagglutinin__InfluenzaA__ALE31939

SEQ ID NO: 205513 - RNA, 1701 nt, Artificial Sequence; identical to SEQ ID NO: 204513
  derived and/or modified CDS sequence (opt5) from hemagglutinin__InfluenzaA__ALE31941

SEQ ID NO: 205514 - RNA, 1701 nt, Artificial Sequence; identical to SEQ ID NO: 205070
  derived and/or modified CDS sequence (opt5) from hemagglutinin__InfluenzaA__ALE31943

SEQ ID NO: 205515 - RNA, 1701 nt, Artificial Sequence
  derived and/or modified CDS sequence (opt5) from hemagglutinin__InfluenzaA__ALE31944
augaagaccaucauugcccugagcuacauccucugccugguguucgcucagaaacuucccgagaacgacaauuccacagccacgcugugucucggccaccaugcggucccuaacgggaccauuguuaagacaaucaccucugauagaauugaagugacaaaugcuaccgagcuggugcaaaacagcuccaucggagaaaucugcgacucuccgcaccagauucuugauggcaaaaauuguacacugaucgacgcccuccugggggauccccagugcgacggauuucagaacaagaaaugggaucuguucgucgagcggagcaaggccuauuccaauuguuacccuuaugacgugcccgauuacgcuucucuccgcagccugguugccuccagcggcacccuugaauuuaacgacgagucuuucaauugggcuggggugacgcaaaacggaaccuccagcgccugcauuagaggcucuaauuccagcuuuuucucucggcugaacuggcucacacauuccaauuuuaaguauccugcgcugaacgucaccaugcccaauaacgagcaguucgauaaacuuuacaucuggggcgugcaccauccugggacagacaaggaucagauuuuucuguaugcccagagcuccggacgcaucaccguuucuacgaaaagaagccaacaggcugugauuccgaacaucggcucccggccccgcaucagagacauuccuagccggaucucuauuuacuggacaaucgucaagcccggggacauucuccugaucaauuccaccggaaaccugaucgccccucgcggcuacuucaaaauuagaagcgggaagucuagcaucaugcgguccgaugcucccauuggaaaguguaaaucugaaugcaucacaccgaauggcagcauuccuaacgacaagcccuuucagaaugugaaccgcaucaccuauggcgccuguccuagauacgugaaacaguccacccucaagcuggcgacagggaugcggaauguccccgagaaacaaacgcgcggaaucuucggcgccauugcuggguuuaucgaaaacggaugggagggcaugaaggaugggugguauggauucagacaccagaauagcgagggccggggccaggccgcugaccuuaaaucuacccaagccgccauugaucagaucaacgggaagcugaauagacucauuggaaagacaaacgaaaaauuccaccagaucgagaaggaauuuuccgagguugaaggccgcauucaggaccuggagaaauacguggaggauaccaagaucgaccuuuggagcuauaaugcugaacugcucguggcgcuggagaaccaacauacaaucgaucugaccgacucugaaaugaauaaacucuucgagaagacgaagaaacagcugcgggaaaacgccgaggauauggggaacggaugcuuuaagauuuaccacaaaugugacaaugcuugcaucggcuccauuagaaacgggacauaugaccaugaugucuaccgcgacgaggcccuuaauaaccgguuccagaucaagggcguggaacugaaaagcggauacaaggauuggauucucuggaucuccuuugccaucucuugcuuccugcuuuguguugcucugcucggcuuuauuaugugggccugccagaaggggaauaucagauguaacauuugcaucuga

SEQ ID NO: 205516 - RNA, 1701 nt, Artificial Sequence
  derived and/or modified CDS sequence (opt5) from hemagglutinin__InfluenzaA__ALE31945
augaagaccaucauugcccugagcuacauccucugccugguguucgcucagaaaauucccggcaacgacaauuccacagccacgcuuugucuggggcaccaugcggucccuaacggaaccaucguuaagacaauuaccaaugauagaaucgaggugacaaacgcuaccgaacucgugcaaaauucuagcaucggcgagauuugcgacuccccgcaccagauccuggauggggaaaacuguacacuuauugacgcccugcucggagauccccagugcgacggcuuucagaauaaaaagugggaucuguucgucgagcggucuaaagccuauagcaacuguuacccuuaugacgugcccgauuacgcuucccugcgcucucucguugccagcuccgggacccuggaauuuaauaacgagagcuucaauuggacgggagugacccaaaacggcacaucuuccgcuugcaucagacggucuagcuccagcuuuuucucucgccuuaauuggcugacccaucucaacuauacauacccugcccugaaugucaccaugcccaacaacgagcaguuugacaaacuuuauauuuggggcgugcaccauccugggacggauaaggaccagaucuuccuguacgcgcaguccagcggaagaauuacaguuuccaccaagggcucucaacaggccgugaucccgaaugucgggagccggccccgcaucagagauauuccuucccggaucagcauuuacuggacaaucgugaagcccggagacauucuccugaucaacucuaccggcaaucugaucgcuccucgcggguauuuuaaaauuagauccggaaagagcucuaucaugcggagcgacgcccccauuggcaaauguaaguccgaaugcaucaccccgaacggcucuauuccuaaugauaagcccuuccagaacgugaaucgcaucacauacggggcuuguccuagauaugucaaacacagcacgcucaagcuggccaccggaaugcggaacguucccgagaaacagacacgcggcaucuuuggggcgauugccggauucaucgaaaauggcugggaggggaugguggacggaugguacggcuuuagacaccaaaacuccgagggccgggggcaggcugccgaucuuaagagcacccaggcugccauugaccaaaucaauggaaaacugaacagacucauuggcaagacaaaugaaaaauuccaucagaucgagaaggaguucucugaaguggaagggcgcauucaggauaucgagaaguaugucgaggacaccaaaaucgaucugugguccuacaacgccgaacuucugguggcucucgagaaucagcacacgauugaccugacagauagcgaaaugaacaagcuguuugagaaaaccaagaaacaacuccgggaaaacgcggaggacaugggaaauggcugcuucaagaucuaucauaagugugauaacgccugcauugggucuaucagaaauggcaccuacgaccacaacguuuaccgcgacgaggcucugaauaaccgguuucagauuaaaggaguggaacuuaaguccggcuauaaagauuggauccuguggaucagcuucgccauuuccugcuuucuccugugugucgcccuucugggguucaucaugugggcuugccagaagggaaauauuagauguaacaucugcauuuga

SEQ ID NO: 205517 - RNA, 1701 nt, Artificial Sequence; identical to SEQ ID NO: 205171
  derived and/or modified CDS sequence (opt5) from hemagglutinin__InfluenzaA__ALE31946

SEQ ID NO: 205518 - RNA, 1701 nt, Artificial Sequence; identical to SEQ ID NO: 205171
  derived and/or modified CDS sequence (opt5) from hemagglutinin__InfluenzaA__ALE31947

SEQ ID NO: 205519 - RNA, 1701 nt, Artificial Sequence
  derived and/or modified CDS sequence (opt5) from hemagglutinin__InfluenzaA__ALE31948
augaagaccaucauugcccugagcuacauccucugccugguguucgcucagaaaauucccggcaacgacaauuccacagccacgcuuugucuggggcaccaugcggucccuaacggaaccaucguuaagacaauuaccaaugauagaaucgaggugacaaacgcuaccgaacucgugcaaaauucuagcaucggcgagauuugcgacuccccgcaccagauccuggauggggaaaacuguacacuuauugacgcccugcucggagauccccagugcgacggcuuucagaauaaaaagugggaucuguucgucgagcggucuaaagccuauagcaacuguuacccuuaugacgugcccgauuacgcuucccugcgcucucucguugccagcuccgggacccuggaauuuaauaacgagagcuucaauuggacgggagugacccaaaacggcacaucuuccgcuugcaucagaaagucuagcuccagcuuuuucucucggcuuaauuggcugacccaucucaacuauacauacccugcccugaaugucaccaugcccaacaacgagcaguuugacaaacuuuauauuuggggcgugcaccauccugggacggauaaggaccagaucuuccuguacgcgcgcuccagcggaagaauuacaguuuccaccaagcggucucagcaagccgugaucccgaauaucggcagccgcccccggauuagagauaucccuucccgcauuagcaucuacuggacaauugucaaacccggggacauccuccugaucaacucuaccggaaaucugauugcuccuagaggcuauuuuaagauccgguccgggaaaagcucuauuaugcgcagcgacgcccccaucggaaaguguaaguccgaaugcauuaccccgaacggcucuaucccuaaugauaaacccuuccagaacgugaauagaaucacauacggcgcuuguccucgguaugugaagcacagcacgcucaaacuggccaccgggaugcgcaacguccccgagaagcagacaagaggaauuuuuggcgcgaucgccggguucauugaaaauggaugggagggcaugguugacgggugguacggauuucggcaccagaacuccgagggcagaggccaagcugccgaucuuaaaagcacccaggcugccaucgaccagauuaaugggaagcugaaccgccucgugggaaaaacaaaugaaaaguuccaucaaaucgagaaggaguucucugaaguggaaggccggauucaggaucuggagaaauaugucgaggacaccaagaucgaucuuugguccuacaacgccgaauuucugguggcucucgagaaucagcacacgaucgaccugacagauagcgaaaugaacaaacuguucgagaagaccaaaaagcagcucagagaaaacgcggaggacauggggaauggaugcuuuaagauuuaucauaaaugugauaacgccugcaucggcucuauucgcaaugggaccuacgaccacaacguuuaccgggacgaggcucugaauaacagauuccaaaucaagggcguggaacuuaaauccggauauaaggauuggauucuguggaucagcuuugccaucuccugcuuccuccugugugucgcccuucugggcuuuauuaugugggcuugccagaaagggaauauccgcuguaacauuugcaucuga

SEQ ID NO: 205520 - RNA, 1701 nt, Artificial Sequence; identical to SEQ ID NO: 205171
  derived and/or modified CDS sequence (opt5) from hemagglutinin__InfluenzaA__ALE31949

SEQ ID NO: 205521 - RNA, 1701 nt, Artificial Sequence; identical to SEQ ID NO: 204513
  derived and/or modified CDS sequence (opt5) from hemagglutinin__InfluenzaA__ALE31950

SEQ ID NO: 205522 - RNA, 1701 nt, Artificial Sequence; identical to SEQ ID NO: 205057
  derived and/or modified CDS sequence (opt5) from hemagglutinin__InfluenzaA__ALE31951

SEQ ID NO: 205523 - RNA, 1701 nt, Artificial Sequence; identical to SEQ ID NO: 204513
  derived and/or modified CDS sequence (opt5) from hemagglutinin__InfluenzaA__ALE31952

SEQ ID NO: 205524 - RNA, 1701 nt, Artificial Sequence
  derived and/or modified CDS sequence (opt5) from hemagglutinin__InfluenzaA__ALE31953
augaagaccaucauugcccugagcuacauccucugccugguguucgcucagaaaauucccggcaacgacaauuccacagccacgcuuugucuggggcaccaugcggucccuaacggaaccaucguuaagacaauuaccaaugauagaaucgaggugacaaacgcuaccgaacucgugcaaaauucuagcaucggcgagauuugcgacuccccgcaccagauccuggauggggaaaacuguacacuuauugacgcccugcucggagauccccagugcgacggcuuucagaauaaaaagugggaucuguucgucgagcggucuaaagccuauagcaacuguuacccuuaugacgugcccgauuacgcuucccugcgcucucucguugccagcuccgggacccuggaauuuaauaacgagagcuucaauuggacgggagugacccaaaacggcacaucuuccgcuugcaucagaaagucuagcuccagcuuuuucucucggcuuaauuggcugacccaucucaacuauacauacccugcccugaaugucaccaugcccaacaacgagcaguuugacaaacuuuauauuuggggcgugcaccauccugggacggauaaggaccagaucuuccuguuugcgcgcuccagcggaagaauuacaguuuccaccaagcggucucagcaagccgugaucccgaauaucggcagccgcccccggauuagagauaucccuucccgcauuagcaucuacuggacaauugucaaacccggggacauccuccugaucaacucuaccggaaaucugauugcuccuagaggcuacuucaagauccgguccgggaaaagcucuauuaugcgcagcgacgcccccaucggaaaguguaaguccgaaugcauuaccccgaacggcucuaucccuaaugauaaacccuuucagaacgugaauagaaucacauauggcgcuuguccucgguacgugaagcacagcacgcucaaacuggccaccgggaugcgcaacguccccgagaagcagacaagaggaauuuucggcgcgaucgccggguuuauugaaaauggaugggagggcaugguugacgggugguauggauuccggcaccagaacuccgagggcagaggccaagcugccgaucuuaaaagcacccaggcugccaucgaccagauuaaugggaagcugaaccgccucaucggaaaaacaaaugaaaaguuccaucaaauugagaaggaauuuucugagguggaaggccggauccaggaucuggagaaauacguggaggacaccaagaucgaucuuugguccuauaacgccgaacugcucgucgcucuggagaaucagcacacgauugaccugacagauagcgaaaugaacaaacucuucgagaagaccaaaaagcagcugagagaaaacgcggaggacauggggaauggaugcuuuaagaucuaccauaaaugugauaacgccugcauuggcucuauccgcaaugggaccuaugaccacaacguguaccgggacgaggcucuuaauaacagauuccaaauuaagggcguugaacugaaauccggauacaaggauuggauccucuggaucagcuuugccauuuccugcuuccugcuuuguguggcccugcucggcuuuaucaugugggcuugccagaaagggaauauucgcuguaacaucugcauuuga

SEQ ID NO: 205525 - RNA, 1701 nt, Artificial Sequence
  derived and/or modified CDS sequence (opt5) from hemagglutinin__InfluenzaA__ALE31954
augaagaccaucauugcccugagcuacauccucugccugguguucgcucagaaacuucccggcaacgacaauuccacagccacgcugugucucgggcaccaugcggucccuaacggaaccauuguuaagacaaucaccaaugauagaauugaggugacaaacgcuaccgaacuggugcaaaauucuagcaucggcgagaucugcgacuccccgcaccagauucuugaugggaaaaacuguacacugaucgacgcccuccugggagauccccagugcgacggcuuucagaauaagcggugggaucuguucgucgaacgcucuaaagccuauagcaacuguuacccuuaugacgugcccgauuacgcuucccucagaucucugguugccagcuccgggacccuugaguuuaaugacgaauccuucaacugggcuggagugacgcaaaauggcaccucuuccgccugcauucggggcagcaacucuuccuuuuucagccgccugaauuggcucacacauucuaacuuuaaguauccugcgcugaaugucaccaugcccaacaacgagcaguucgauaaacuuuacaucuggggagugcaccauccugggacagacaaagaucagauuuuucuguaugcccacuccagcggcagaaucaccguuuccacgaagcggucucagcaagcugugauuccgaaugucgggagccgccccagaauccggaacaucccuucccgcauuagcaucuacuggacaauugugaaacccggagacauccuccugauuaauucuaccggcaaccugaucgccccuagaggguacuucaagauccaguccggaaaaagcucuauuaugcggagcgacgcucccaucggcaaguguaaguccgagugcauuacaccgaauggcucuaucccuaacgauaaacccuuucagaaugugaaccgcauuaccuauggggccuguccuagauacgucaagcagagcacccucaaacuggcgacaggaaugcggaauguucccgaaaagcaaacgcgcggcaucuucggggccaucgcuggauuuauugagaacggcugggaagggaugaaagacggaugguauggcuucagacaccagaauagcgagggccgggggcaggccgcugaucuuaagagcacccaagccgccaucgaccagauuaacggaaaacugaauagacucgugggcaagacaaacgagaaguuccaucagaucgaaaaagaguuuucugaaguggaggggcgcauucaggaucuggaaaaguacgucgaggacaccaaaaucgaucuuugguccuauaaugcugagcugcucguggcgcuggaaaaccaacacacaauugaccugaccgauagcgagaugaacaaacucuucgaaaagacgaagaagcagcugcgggagaaugccgaagacaugggaaacggcugcuuuaagaucuaccauaagugugauaaugcuugcaucgggucuauuagaaacggcacauaugaccacuacguuuaccgcgacgaggcccuuaauaaccgguuccagaucaaaggaguggagcugaaguccggcuauaaagauuggauucucuggaucagcuuugccauuuccugcuuccugcuuugugucgcucugcucggguuuaucaugugggccugccagaagggaaauaucagauguaacauuugcaucuga

SEQ ID NO: 205526 - RNA, 1701 nt, Artificial Sequence; identical to SEQ ID NO: 204513
  derived and/or modified CDS sequence (opt5) from hemagglutinin__InfluenzaA__ALE31955

SEQ ID NO: 205527 - RNA, 1701 nt, Artificial Sequence
  derived and/or modified CDS sequence (opt5) from hemagglutinin__InfluenzaA__ALE31956
augaagaccaucauugcccugagcuacauccucugccugguguucgcucagaaaauucccggcaacgacaauuccacagccacgcuuugucuggggcaccaugcggucccuaacggaaccaucguuaagacaauuaccaaugauagaaucgaggugacaaacgcuaccgaacucgugcaaaauucuagcaucggcgagauuugcaacuccccgcaccagauccuggacggggaaaauuguacacuuauugaugcccugcucggagacccccagugcgauggcuuucagaacaaaaagugggaccuguucgucgagcggucuaaagccuauagcaauuguuacccuuaugaugugcccgacuacgcuucccugcgcucucucguugccagcuccgggacccuggaauuuaacaaugagagcuucaacuggacgggagugacccaaaauggcacaucuuccgcuugcaucagacggagcagcuccagcuuuuucucucgccuuaacuggcugacccaucucaauuauacauacccugcccugaacgucaccaugcccaacaaugagcaguuugauaaacuuuauauuuggggcgugcaccauccugggacggacaaggaucagaucuuccuguacgcgcaguccagcggaagaauuacaguuuccaccaagcggucucaacaggccgugaucccgaacaucggcagccgcccccggauuagagacaucccuucccgcauuagcaucuacuggacaauugucaagcccggggauauccuccugaucaauucuaccggaaaccugauugcuccuagaggcuauuuuaaaauccgguccgggaagucuucuauuaugcgcagcgacgcccccaucggaaaauguaaguccgaaugcauuaccccgaauggcucuaucccuaacgacaagcccuuccagaaugugaacagaaucacauacggcgcuuguccucgguaugugaaacacagcacgcucaagcuggccaccgggaugcgcaauguccccgagaaacagacaagaggaauuuuuggcgcgaucgccggguucauugaaaacggaugggagggcaugguugaugggugguacggauuucggcaccaaaauuccgagggcagaggccaggcugccgaccuuaagagcacccaggcugccaucgaucaaauuaacgggaaacugaaucgccucaucggaaagacaaacgaaaaauuccaucagauugagaaggaguucucugaaguggaaggccggauccaggaccuggagaaguauguggaggauaccaaaaucgaccuuugguccuacaaugccgaacugcucgucgcucuggagaaccagcacacgauugaucugacagacagcgaaaugaacaagcucuuugagaaaaccaagaaacaacugagagaaaaugcggaggauauggggaacggaugcuucaagaucuaucauaagugugacaaugccugcauuggcucuauccgcaacgggaccuacgaucacaauguguaccgggacgaggcucuuaacaauagauuucagauuaaaggcguugaacugaaguccggauauaaagacuggauccucuggaucagcuucgccauuuccugcuuucugcuuuguguggcccugcucggcuucaucaugugggcuugccagaaggggaacauucgcuguaauaucugcauuuga

SEQ ID NO: 205528 - RNA, 1701 nt, Artificial Sequence; identical to SEQ ID NO: 205119
  derived and/or modified CDS sequence (opt5) from hemagglutinin__InfluenzaA__ALE31957

SEQ ID NO: 205529 - RNA, 1701 nt, Artificial Sequence
  derived and/or modified CDS sequence (opt5) from hemagglutinin__InfluenzaA__ALE31958
augaagaccaucauugcccugagcuacauccucugccugguguucgcucagaaaauucccggcaacgacaauuccacagccacgcuuugucuggggcaccaugcggucccuaacggaaccaucguuaagacaauuaccaaugauagaaucgaggugacaaacgcuaccgaacucgugcaaaauucuagcaucggcgagauuugcgacuccccgcaccagauccuggauggggaaaacuguacacuuauugacgcccugcucggagauccccagugcgacggcuuucagaauaaaaagugggaucuguucgucgagcggucuaaagccuauagcaacuguuacccuuaugacgugcccgauuacgcuucccugcgcucucucguugccagcuccgggacccuggaauuuaauaacgagagcuucaauuggacgggagugacccaaaacggcacaucuuccgcuugcaucagacggucuagcuccagcuuuuucucucgccuuaauuggcugacccaucucaacuauacauacccugcccugaaugucaccaugcccaacaacgagcaguuugacaaacuuuauauuuggggcgugcaccauccugggacggauaaggaccagaucuuccuguacgcgcaguccagcggaagaauuacaguuuccaccaagcggucucaacaggccgugaucccgaauaucggcagcaagccccgcauuagagauaucccuucccggauuagcaucuacuggacaauugucaaacccggggacauccuccugaucaacucuaccggaaaucugauugcuccucgcggcuauuuuaagaucagauccgggaaaagcucuauuaugcggagcgacgcccccaucggaaaguguaaguccgaaugcauuaccccgaacggcucuaucccuaaugauaaacccuuccagaacgugaaucgcaucacauacggcgcuuguccuagauaugugaagcacagcacgcucaaacuggccaccgggaugcggaacguccccgagaagcagacacgcggaauuuuuggcgcgaucgccggguucauugaaaauggaugggagggcaugguugacgggugguacggauuuagacaccaaaacuccgagggccggggccaggcugccgaucuuaaaagcacccaggcugccaucgaccaaauuaaugggaagcugaacagacucaucggaaaaacaaaugaaaaguuccaucagauugagaaggaguucucugaaguggaaggccgcauccaggaucuggagaaauauguggaggacaccaagaucgaucuuugguccuacaacgccgaacugcucgucgcucuggagaaucagcacacgauugaccugacagauagcgaaaugaacaaacucuuugagaagaccaaaaagcaacugcgggaaaacgcggaggacauggggaauggaugcuucaagaucuaucauaaaugugauaacgccugcauuggcucuaucagaaaugggaccuacgaccacaacguguaccgcgacgaggcucuuaauaaccgguuucagauuaagggcguugaacugaaauccggauauaaggauuggauccucuggaucagcuucgccauuuccugcuuucugcuuuguguggcccugcucggcuucaucaugugggcuugccagaaagggaauauuagauguaacaucugcauuuga

SEQ ID NO: 205530 - RNA, 1701 nt, Artificial Sequence
  derived and/or modified CDS sequence (opt5) from hemagglutinin__InfluenzaA__ALE31959
augaagaccaucauugcccugagcuacauccucugccugguguucgcucagaaaauucccggcaacgacaauuccacagccacgcuuugucuggggcaccaugcggucccuaacggaaccaucguuaagacaauuaccaaugauagaaucgaggugacaaacgcuaccgaacucgugcaaaauucuagcaucggcgagauuugcgacuccccgcaccagauccuggauggggaaaacuguacacuuauugacgcccugcucggagauccccagugcgacggcuuucagaauaaaaagugggaucuguucgucgagcggucuaaagccuauagcaacuguuacccuuaugacgugcccgauuacgcuucccugcgcucucucguugccagcuccgggacccuggaauuuaauaacgagagcuucaauuggacgggagugacccaaaacggcacaucuuccgcuugcaucagaaagucuagcuccagcuuuuucucucggcuuaauuggcugacccaucucaacuaugccuacccugcgcugaaugucacaaugcccaacaacgagcaguuugacaaacuuuauauuuggggcgugcaccauccugggaccgauaaagaccagaucuuccuguacgcccgcuccagcggaagaauuacgguuuccacaaagcggucucagcaagcugugaucccgaauaucggcagccgcccccggauuagagauaucccuucccgcauuagcaucuacuggaccauugucaaacccggggacauccuccugaucaacucuacaggaaaucugauugccccuagaggcuauuuuaagauccgguccgggaaaagcucuauuaugcgcagcgacgcucccaucggaaaguguaaguccgaaugcauuaccccgaacggcucuaucccuaaugauaaacccuuccagaacgugaauagaaucaccuacggcgccuguccucgguaugugaagcacagcacacucaaacuggcgacggggaugcgcaacguccccgagaagcagaccagaggaauuuuuggcgccaucgcuggguucauugaaaauggaugggagggcaugguugacgggugguacggauuucggcaccagaacuccgagggcagaggccaagccgcugaucuuaaaagcacacaggccgccaucgaccagauuaaugggaagcugaaccgccucaucggaaaaaccaaugaaaaguuccaucaaauugagaaggaguucucugaaguggaaggccggauccaggaucuggagaaauauguggaggacacaaagaucgaucuuugguccuacaacgcugaacugcucgucgcgcuggagaaucagcacaccauugaccugacggauagcgaaaugaacaaacucuuugagaagacaaagaagcagcugagagaaaacgccgaggacauggggaauggaugcuucaagaucuaucauaaaugugauaacgcuugcauuggcucuauccgcaaugggaccuacgaccacaacguguaccgggacgaggcccuuaauaacagauuucaaauuaagggcguugaacugaaauccggauauaaggauuggauccucuggaucagcuucgccauuuccugcuuucugcuuuguguggcucugcucggcuucaucaugugggccugccagaaagggaauauucgcuguaacaucugcauuuga

SEQ ID NO: 205531 - RNA, 1701 nt, Artificial Sequence; identical to SEQ ID NO: 204513
  derived and/or modified CDS sequence (opt5) from hemagglutinin__InfluenzaA__ALE31960

SEQ ID NO: 205532 - RNA, 1701 nt, Artificial Sequence; identical to SEQ ID NO: 204702
  derived and/or modified CDS sequence (opt5) from hemagglutinin__InfluenzaA__ALE31961

SEQ ID NO: 205533 - RNA, 1701 nt, Artificial Sequence
  derived and/or modified CDS sequence (opt5) from hemagglutinin__InfluenzaA__ALE31962
augaagaccaucauugcccugagcuacauccucugccugguguucgcucagaaaauucccggcaacgacaauuccacagccacgcuuugucuggggcaccaugcggucccuaacggaaccaucguuaagacaauuaccaaugauagaaucgaggugacaaacgcuaccgaacucgugcaaaauucuagcaucggcgagauuugcgacuccccgcaccagauccuggauggggaaaacuguacacuuauugacgcccugcucggagauccccagugcgacggcuuucagaauaaaaagugggaucuguucgucgagcggucuaaagccuauagcaacuguuacccuuaugacgugcccgauuacgcuucccugcgcucucucguugccagcuccgggacccuggaauuuaauaacgagagcuucaauuggacgggagugacccaaaacggcacaucuuccgcuugcaucagacggagcagcuccagcuuuuucucucgccuuaauuggcugacccaucucaacuauacauacccugcccugaaugucaccaugcccaacaacgagcaguuugacaaacuuuauauuuggggcgugcaccauccugggacggauaaggaccagaucuuccuguacgcgcaguccagcggaagaauuacaguuuccaccaagcggucucaacaggccgugaucccgaauaucggcagccgcccccggauuagagauaucccuucccgcaugagcauuuacuggacaaucgucaagcccggggacauucuccugaucaacucuaccggaaaucugaucgcuccuagaggcuauuuuaaaauucgguccgggaagucuucuaucaugcgcagcgacgcccccauuggaaaauguaaguccgaaugcaucaccccgaacggcucuauuccuaaugauaagcccuuccagaacgugaauagaaucacauacggcgcuuguccucgguaugugaaacacagcacgcucaagcuggccaccgggaugcgcaacguccccgagaaacagacaagaggaaucuuuggcgcgauugccggguucaucgaaaauggaugggagggcaugguugacgggugguacggauuucggcaccaaaacuccgagggcagaggccaggcugccgaucuuaagagcacccaggcugccauugaccaaaucaaugggaaacugaaccgccucauuggaaagacaaaugaaaaauuccaucagaucgagaaggaguucucugaaguggaaggccggauucaggaucuggagaaguauguggaggacaccaaaaucgaucuuugguccuacaacgccgaacugcucgucgcucuggagaaucagcacacgaucgaccugacagauagcgaaaugaacaagcucuuugagaaaaccaagaaacaacugagagaaaacgcggaggacauggggaauggaugcuucaagauuuaucauaagugugauaacgccugcaucggcucuauucgcaaugggaccuacgaccacaacguguaccgggacgaggcucuuaauaacagauuucagaucaaaggcguugaacugaaguccggauauaaagauuggauucucuggaucagcuucgccaucuccugcuuucugcuuuguguggcccugcucggcuucauuaugugggcuugccagaaggggaauauccgcuguaacauuugcaucuga

SEQ ID NO: 205534 - RNA, 1701 nt, Artificial Sequence
  derived and/or modified CDS sequence (opt5) from hemagglutinin__InfluenzaA__ALE31963
augaagaccaucauugcccugagcuacauccucugccugguguucgcucagaaaauucccggcaacgacaauuccacagccacgcuuugucuggggcaccaugcggucccuaacggaaccaucguuaagacaauuaccaaugauagaaucgaggugacaaacgcuaccgaacucgugcaaaauucuagcaucggcgagauuugcgacuccccgcaccagauccuggauggggaaaacuguacacuuauugacgcccugcucggagauccccagugcgacggcuuucagaauaaaaagugggaucuguucgucgagcggucuaaagccuauagcaacuguuacccuuaugacgugcccgauuacgcuucccugcgcucucucguugccagcuccgggacccuggaauuuaauaacgagagcuucaauuggacgggagugacccaaaacggcacaucuuccgcuugcaucagacggagcagcuccagcuuuuucucucgccuuaauuggcugacccaucucaacuauacauacccugcccugaaugucaccaugcccaacaacgagcaguuugacaaacuuuauauuuggggcgugcaccauccugggacggauaaggaccagacauuccuguacgcgcaguccagcggaagaaucaccguuuccacaaagcggucucaacaggccgugauuccgaauaucggcagccgccccagaauccgggauauuccuucccgcaucagcauuuacuggaccaucgucaagcccggggacauucuccugaucaacucuaccggaaaucugaucgcuccuagaggcuauuuuaaaauucgguccgggaagucuucuaucaugcgcagcgacgcccccauuggaaaauguaaguccgaaugcaucacaccgaacggcucuauuccuaaugauaagcccuuccagaacgugaauagaaucacguacggcgcuuguccucgguaugugaaacacagcacccucaagcuggccacagggaugcgcaacguccccgagaaacagaccagaggaaucuuuggcgcgauugccggguucaucgaaaauggaugggagggcaugguugacgggugguacggauuucggcaccaaaacuccgagggcagaggccaggcugccgaucuuaagagcacacaggcugccauugaccaaaucaaugggaaacugaaccgccucauuggaaagaccaaugaaaaauuccaucagaucgagaaggaguucucugaaguggaaggccggauucaggaucuggagaaguauguggaggacacgaaaaucgaucuuugguccuacaacgccgaacugcucgucgcucuggagaaucagcacacaaucgaccugaccgauagcgaaaugaacaagcucuuugagaaaaccaagaaacaacugagagaaaacgcggaggacauggggaauggaugcuucaagauuuaucauaagugugauaacgccugcaucggcucuauucgcaaugggacauacaaccacaauguguaccgggacgaggcucuuaacaauagauuucagaucaaaggcguugaacugaaguccggauauaaagacuggauucucuggaucagcuucgccaucuccugcuuucugcuuuguguggcccugcucggcuucauuaugugggcuugccagaaggggaacauccgcuguaauauuugcaucuga

SEQ ID NO: 205535 - RNA, 1701 nt, Artificial Sequence
  derived and/or modified CDS sequence (opt5) from hemagglutinin__InfluenzaA__ALE31964
augaagaccaucauugcccugagcuacauccucugccugguguucgcucagaaaauucccggcaacgacaauuccacagccacgcuuugucuggggcaccaugcggucccuaacggaaccaucguuaagacaauuaccaaugauagaaucgaggugacaaacgcuaccgaacucgugcaaaauucuagcaucggcgagauuugcgacuccccgcaccagauccuggauggggaaaacuguacacuuauugacgcccugcucggagauccccagugcgacggcuuucagaauaaaaagugggaucuguucgucgagcggucuaaagccuauagcaacuguuacccuuauuacgugcccgacuaugcuucccugcgcucucucguugccagcuccgggacccuggaauuuaauaacgagagcuucaauuggacgggagugacccaaaacggcacaucuuccgcuugcaucagacggagcagcuccagcuuuuucucucgccuuaauuggcugacccaucucaacuacacauauccugcccugaaugucaccaugcccaacaacgagcaguuugauaaacuuuacauuuggggcgugcaccauccugggacggacaaggaucagaucuuccuguacgcgcaguccagcggaagaauuacaguuuccaccaagcggucucaacaggccgugaucccgaauaucggcagccgcccccggauuagagacaucccuucccgcauuagcaucuauuggacaauugucaagcccggggauauccuccugaucaacucuaccggaaaucugauugcuccuagaggcuacuuuaaaauccaguccgggaagucuucuauuaugcggagcgacgcccccaucggaaaauguaaguccgaaugcauuaccccgaacggcucuaucccuaaugacaagcccuuccagaacgugaaucgcaucacauauggcgcuuguccuagauacgugaaacacagcacgcucaagcuggccaccgggaugcggaacguccccgagaaacaaacacgcggaauuuuuggcgcgaucgccggguucauugaaaauggaugggagggcaugguugaugggugguauggauuuagacaccagaacuccgagggccggggccaggcugccgaccuuaagagcacccaagcugccaucgaucagauuaaugggaaacugaacagacucaucggaaagacaaaugaaaaauuccaucagauugagaaggaguucucugaaguggaaggccgcauccaggaccuggagaaguacguggaggauaccaaaaucgaccuuugguccuauaacgccgaacugcucgucgcucuggagaaucaacacacgauugaucugacagacagcgaaaugaacaagcucuuugagaaaaccaagaaacagcugcgggaaaacgcggaggauauggggaauggaugcuucaagaucuaccauaagugugacaacgccugcauuggcucuaucagaaaugggaccuacgaucacaacguguaucgcgacgaggcucuuaauaaccgguuucagauuaaaggcguugaacugaaguccggauacaaagacuggauccucuggaucagcuucgccauuuccugcuuucugcuuuguguggcccugcucggcuucaucaugugggcuugccagaaggggaauauuagauguaacaucugcauuuga

SEQ ID NO: 205536 - RNA, 1701 nt, Artificial Sequence; identical to SEQ ID NO: 204513
  derived and/or modified CDS sequence (opt5) from hemagglutinin__InfluenzaA__ALE31965

SEQ ID NO: 205537 - RNA, 1701 nt, Artificial Sequence; identical to SEQ ID NO: 205171
  derived and/or modified CDS sequence (opt5) from hemagglutinin__InfluenzaA__ALE31966

SEQ ID NO: 205538 - RNA, 1701 nt, Artificial Sequence; identical to SEQ ID NO: 205441
  derived and/or modified CDS sequence (opt5) from hemagglutinin__InfluenzaA__ALE31967

SEQ ID NO: 205539 - RNA, 1701 nt, Artificial Sequence; identical to SEQ ID NO: 205057
  derived and/or modified CDS sequence (opt5) from hemagglutinin__InfluenzaA__ALE31968

SEQ ID NO: 205540 - RNA, 1701 nt, Artificial Sequence; identical to SEQ ID NO: 205164
  derived and/or modified CDS sequence (opt5) from hemagglutinin__InfluenzaA__ALE31969

SEQ ID NO: 205541 - RNA, 1701 nt, Artificial Sequence; identical to SEQ ID NO: 204513
  derived and/or modified CDS sequence (opt5) from hemagglutinin__InfluenzaA__ALE31970

SEQ ID NO: 205542 - RNA, 1701 nt, Artificial Sequence
  derived and/or modified CDS sequence (opt5) from hemagglutinin__InfluenzaA__ALE31971
augaagaccaucauugcccugagcuacauccucugccugguguucgcucagaaaauucccggcaacgacaauuccacagccacgcuuugucuggggcaccaugcggucccuaacggaaccaucguuaagacaauuaccaaugauagaaucgaggugacaaacgcuaccgaacucgugcaaaauucuagcaucggcgagauuugcgacuccccgcaccagauccuggauggggaaaacuguacacuuauugacgcccugcucggagauccccagugcgacggcuuucagaauaaaaagugggaucuguucgucgagcggucuaaagccuauagcaacuguuacccuuaugacgugcccgauuacgcuucccugcgcucucucguugccagcuccgggacccuggaauuuaauaacgagagcuucaauuggacgggagugacccaaaacggcacaucuuccgcuugcaucagacggucuagcuccagcuuuuucucucgccuuaauuggcugacccaucucaacuaugccuacccugcgcugaaugucacaaugcccaacaacgagcaguuugacaaacuuuauauuuggggcgugcaccauccugggaccgauaaggaccagaucuuccuguacgcccaguccagcggaagaauuacgguuuccacaaagggcucucaacaggcugugaucccgaauaucgggagccggccccgcauuagagauaucccuucccggauuagcaucuacuggaccauugucaagcccggagacauccuccugaucaacucuacaggcaaucugauugccccucgcggguauuuuaaaaucagauccggaaagagcucuauuaugcggagcgacgcucccaucggcaaauguaaguccgaaugcauuaccccgaacggcucuaucccuaaugauaagcccuuccagaacgugaaucgcaucaccuacggggccuguccuagauaugugaaacacagcacacucaagcuggcgacgggaaugcggaacguccccgagaaacagacccgcggcauuuuuggggccaucgcuggauucauugaaaauggcugggaggggaugguugacggaugguacggcuuuagacaccaaaacuccgagggccgggggcaggccgcugaucuuaagagcacacaggccgccaucgaccaaauuaauggaaaacugaacagacucaucggcaagaccaaugaaaaauuccaucagauugagaaggaguucucugaaguggaagggcgcauccaggaucuggagaaguauguggaggacacaaaaaucgaucuuugguccuacaacgcugaacugcucgucgcgcuggagaaucagcacaccauugaccugacggauagcgaaaugaacaagcucuuugagaaaacaaagaaacaacugcgggaaaacgccgaggacaugggaaauggcugcuucaagaucuaucauaagugugauaacgcuugcauugggucuaucagaaauggcaccuacgaccacaacguguaccgcgacgaggcccuuaauaaccgguuucagauuaaaggaguugaacugaaguccggcuauaaagauuggauccucuggaucagcuucgccauuuccugcuuucugcuuuguguggcucugcucggguucaucaugugggccugccagaagggaaauauuagauguaacaucugcauuuga

SEQ ID NO: 205543 - RNA, 1701 nt, Artificial Sequence; identical to SEQ ID NO: 205057
  derived and/or modified CDS sequence (opt5) from hemagglutinin__InfluenzaA__ALE31972

SEQ ID NO: 205544 - RNA, 1701 nt, Artificial Sequence; identical to SEQ ID NO: 205057
  derived and/or modified CDS sequence (opt5) from hemagglutinin__InfluenzaA__ALE31973

SEQ ID NO: 205545 - RNA, 1701 nt, Artificial Sequence; identical to SEQ ID NO: 204702
  derived and/or modified CDS sequence (opt5) from hemagglutinin__InfluenzaA__ALE31974

SEQ ID NO: 205546 - RNA, 1701 nt, Artificial Sequence; identical to SEQ ID NO: 205057
  derived and/or modified CDS sequence (opt5) from hemagglutinin__InfluenzaA__ALE31975

SEQ ID NO: 205547 - RNA, 1701 nt, Artificial Sequence; identical to SEQ ID NO: 204513
  derived and/or modified CDS sequence (opt5) from hemagglutinin__InfluenzaA__ALE31976

SEQ ID NO: 205548 - RNA, 1701 nt, Artificial Sequence; identical to SEQ ID NO: 204513
  derived and/or modified CDS sequence (opt5) from hemagglutinin__InfluenzaA__ALE31977

SEQ ID NO: 205549 - RNA, 1701 nt, Artificial Sequence
  derived and/or modified CDS sequence (opt5) from hemagglutinin__InfluenzaA__ALE31978
augaagaccaucauugcccugagcuacauccucugccugguguucgcucagaaaauucccggcaacgacaauuccacagccacgcuuugucuggggcaccaugcggucccuaacggaaccaucguuaagacaauuaccaaugauagaaucgaggugacaaacgcuaccgaacucgugcaaaauucuagcaucggcgagauuugcgacuccccgcaccagauccuggauggggaaaacuguacacuuauugacgcccugcucggagauccccagugcgacggcuuucagaauaaaaagugggaucuguucgucgagcggucuaaagccuauagcaacuguuacccuuaugacgugcccgauuacgcuucccugcgcucucucguugccagcuccgggacccuggaauuuaauaacgagagcuucaauuggacgggagugacccaaaacggcacaucuuccgcuugcaucagaaaguccucuuccagcuuuuucucucggcuuaauuggcugacccaucucaacuauacauacccugcccugaaugucaccaugcccaacaacgagcaguuugacaaacuuuauauuuggggcgugcaccauccugggacggauaaggaccagaucuuccuguacgcgcgcuccagcggaagaauuacaguuuccaccaagcggucucagcaagccgugaucccgaauaucggcagccgcccccggauuagagauaucccuucccgcauuagcaucuacuggacaauugucaaacccggggacauccuccugauccacucuaccggaaaccugauugcuccuagaggcuauuuuaagauccgguccgggaaaagcucuauuaugcgcagcgacgcccccaucggaaaguguaaguccgaaugcauuaccccgaauggcucuaucccuaacgauaaacccuuccagaaugugaacagaaucacauacggcgcuuguccucgguaugugaagcacagcacgcucaaacuggccaccgggaugcgcaauguccccgagaagcagacaagaggaauuuuuggcgcgaucgccggguucauugaaaacggaugggagggcaugguugacgggugguacggauuucggcaucagaauagcgagggcagaggccaagcugccgaucuuaaaagcacccaggcugccaucgaccagauuaacgggaagcugaaucgccucaucggaaaaacaaacgaaaaguuccaccaaauugagaaggaguucucugaaguggaaggccggauccaggaucuggagaaauauguggaggacaccaagaucgaucuuugguccuacaaugccgaacugcucgucgcucuggagaaccagcauacgauugaccugacagauagcgaaaugaauaaacucuuugagaagaccaaaaagcagcugagagaaaacgcggaggacauggggaacggaugcuucaagaucuaucacaaaugugauaaugccugcauuggcucuauccgcaacgggaccuacgaccacaauguguaccgggacgaggcucuuaacaauagauuucaaauuaagggcguugaacugaaauccggauauaaggauuggauccucuggaucagcuucgccauuuccugcuuucugcuuuguguggcccugcucggcuucaucaugugggcuugccagaaagggaacauucgcuguaauaucugcauuuga

SEQ ID NO: 205550 - RNA, 1701 nt, Artificial Sequence; identical to SEQ ID NO: 204513
  derived and/or modified CDS sequence (opt5) from hemagglutinin__InfluenzaA__ALE31979

SEQ ID NO: 205551 - RNA, 1701 nt, Artificial Sequence
  derived and/or modified CDS sequence (opt5) from hemagglutinin__InfluenzaA__ALE31980
augaagaccaucauugcccugagcuacauccucugccugguguucgcucagaaaauucccggcaacgacaauuccacagccacgcuuugucuggggcaccaugcggucccuaacggaaccaucguuaagacaauuaccaaugauagaaucgaggugacaaacgcuaccgaacucgugcaaaauucuagcaucggcgagauuugcgacuccccgcaccagauccuggauggggaaaacuguacacuuauugacgcccugcucggagauccccagugcgacggcuuucagaauaaaaagugggaucuguucgucgagcggucuaaagccuauagcaacuguuacccuuaugacgugcccgauuacgcuucccugcgcucucucguugccagcuccgggacccuggaauuuaauaacgagagcuucaauuggacgggagugacccaaaacggcacaucuuccgcuugcaucagacggagcagcuccagcuuuuucucucgccuuaauuggcugacccaucucaacuauacauacccugcccugaaugucaccaugcccaacaacgagcaguuugacaaacuuuauauuuggggcgugcaccauccugggacggauaaggaccagaucuuccuguacgcgcaguccagcggaagaauuacaguuuccaccaagcggucucaacaggccgugaucccgaauaucggcagccgcccccggauuagagauaucccuucccgcauuagcaucuacuggacaauugucaagcccggggacauccuccugaucaacucuaccggaaaucugauugcuccuagaggcuauuuuaaaauccgguccgggaagucuucuauuaugcgcagcgacgcccccaucggaaaauguaaguccgaaugcauuaccccgaacggcucuaucccuaaugauaagcccuuccagaacgugaauagaaucacauacggcgcuuguccucgguaugugaaacacagcacgcucaagcuggccaccgggaugcgcaacguccccgagaaacagacaagaggaauuuuuggcgcgaucgccggguucauugaaaauggaugggagggcaugguugacgggugguacggauuucggcaccaaaacuccgagggcagaggccaggcugccgaucuuaagagcacccaggcugccaucgaccaaauuaaugggaaacugaaccgccucaucggaaagacaaaugaaaaauuccaucagauugagaaggaguucucugaaguggaaggccggauccaggaucuggagaaguauguggaggacaccaaaaucgaucuuugguccuacaacgccgaacugcucgucgcucuggagaaucagcacacgauugaccugacagauagcgaaaugaacaagcucuuugagaaaaccaagaaacaacugagagaaaacgcggaggacauggggaauggaugcuucaagaucuaucauaagugugauaacgccugcauuggcucuauccgcaaugggaccuacgaccacaacguguaccgggacgaggcucuuaauaacagauuucagauuaaaggcguugaacugaaguccgaguauaaagauuggauccucuggaucagcuucgccauuuccugcuuucugcuuuguguggcccugcucggauucaucaugugggcuugccagaagggcaauauucgcuguaacaucugcauuuga

SEQ ID NO: 205552 - RNA, 1701 nt, Artificial Sequence; identical to SEQ ID NO: 204513
  derived and/or modified CDS sequence (opt5) from hemagglutinin__InfluenzaA__ALE31981

SEQ ID NO: 205553 - RNA, 1701 nt, Artificial Sequence; identical to SEQ ID NO: 205053
  derived and/or modified CDS sequence (opt5) from hemagglutinin__InfluenzaA__ALE31995

SEQ ID NO: 205554 - RNA, 1701 nt, Artificial Sequence
  derived and/or modified CDS sequence (opt5) from hemagglutinin__InfluenzaA__ALE31996
augaagaccaucauugcccugagcuacauccucugccugguguucgcucagaaaauucccggcaacgacaauuccacagccacgcuuugucuggggcaccaugcggucccuaacggaaccaucguuaagacaauuaccaaugauagaaucgaggugacaaacgcuaccgaacucgugcaaaauucuagcaucggcgagauuugcgacuccccgcaccagauccuggauggggaaaacuguacacuuauugacgcccugcucggagauccccagugcgacggcuuucagaauaaaaagugggaucuguucgucgagcggucuaaagccuauagcaacuguuacccuuaugacgugcccgauuacgcuucccugcgcucucucguugccagcuccgggacccuggaauuuaauaacgagagcuucaauuggacgggagugacccaaaacggcacaucuuccgcuugcaucagacggagcagcuccagcuuuuucucucgccuuaauuggcugacccaucucaacuauacauacccugcccugaaugucaccaugcccaacaacgagcaguuugacaaacuuuauauuuggggcgugcaccauccugggacggauaaggaccagaucuuccuguacgcgcaguccagcggaagaauuacaguuuccaccaagcggucucaacaggccgugaucccgaauaucggcagccgcccccggauuagagauaucccuucccgcauuagcaucuacuggacaauugucaagcccggggacauccuccugaucaacucuaccggaaaucugauugcuccuagaggcuauuuuaaaauccgguccgggaagucuucuauuaugcgcagcgacgcccccaucggaaaauguaaguccgaaugcauuaccccgaacggcucuaucccuaaugauaagcccuuccagaacgugaauagagugacauacggcgcuuguccucgguaugucaaacacagcacgcucaagcuggccaccgggaugcgcaacguucccgagaaacagacaagaggaaucuuuggcgcgauugccggguucaucgaaaauggaugggagggcaugguggacgggugguacggauuucggcaccaaaacuccgagggcagaggccaggcugccgaucuuaagagcacccaggcugccauugaccaaaucaaugggaaacugaaccgccucauuggaaagacaaaugaaaaauuccaucagaucgagaaggaguucucugaaguggaaggccggauucaggaucuggagaaguaugucgaggacaccaaaaucgaucuuugguccuacaacgccgaacugcucguggcucuggagaaucagcacacgaucgaccugacagauagcgaaaugaacaagcucuuugagaaaaccaagaaacaacugagagaaaacgcggaggacauggggaauggaugcuucaagauuuaucauaagugugauaacgccugcaucggcucuauucgcaaugggaccuacgaccacaacguuuaccgggacgaggcucuuaauaacagauuucagaucaaaggcguggaacugaaguccggauauaaagauuggauucucuggaucagcuucgccaucuccugcuuucugcuuugugucgcccugcucggcuucauuaugugggcuugccagaaggggaauauccgcuguaacauuugcaucuga

SEQ ID NO: 205555 - RNA, 1701 nt, Artificial Sequence
  derived and/or modified CDS sequence (opt5) from hemagglutinin__InfluenzaA__ALE31997
augaagaccaucauugcccugagcuacauccucugccugguguucgcucagaaaauucccggcaacgacaauuccacagccacgcuuugucuggggcaccaugcggucccuaacggaaccaucguuaagacaauuaccaaugauagaaucgaggugacaaacgcuaccgaacucgugcaaaauucuagcaucggcgagauuugcgacuccccgcaccagauccuggauggggaaaacuguacacuuauugacgcccugcucggagauccccagugcgacggcuuucagaauaaaaagugggaucuguucaucgagcggucuaaagccuauagcaacuguuacccuuaugacguccccgauuacgcuucccugcgcucucucguggccagcuccgggacccuggaauuuaauaacgagagcuucaauuggacgggaguuacccaaaacggcacaucuuccgcuugcauuagacggagcagcuccagcuuuuucucucgccuuaauuggcugacccaucucaacuauacauacccugcccugaaugugaccaugcccaacaacgagcaguuugacaaacuuuauaucuggggcguccaccauccugggacggauaaggaccagauuuuccuguacgcgcaguccagcggaagaaucacaguguccaccaagcggucucaacaggccguuaucccgaauauuggcagccgccccagaauccgggauauuccuucccgcaucagcauuuacuggacaaucgugaagcccggggacauccuccugauuaacucuaccggaaaucugaucgcuccuagaggcuauuuuaaaauucgguccgggaagucuucuaucaugcgcagcgacgcccccauuggaaaauguaaguccgaaugcaucaccccgaacggcucuaucccuaaugauaagcccuuccagaacgucaauagaauuacauacggcgcuuguccucgguaugugaaacacagcacgcucaagcuggccaccgggaugcgcaacgugcccgagaaacagacaagaggaaucuuuggcgcgauugccggguucaucgaaaauggaugggagggcauggucgacgggugguacggauuucggcaccaaaacuccgagggcagaggccaggcugccgaucuuaagagcacccaggcugccauugaccaaaucaaugggaaacugaaccgccucauuggaaagacaaaugaaaaauuccaucagaucgagaaggaguucucugaaguugaaggccggauccaggaucuggagaaguauguggaggacaccaaaauugaucuuugguccuacaacgccgaacugcucguggcucuggagaaucagcacacgaucgaccugacagauagcgaaaugaacaagcucuuugagaaaaccaagaaacaacugagagaaaacgcggaggacauggggaauggaugcuucaagauuuaucauaagugugauaacgccugcaucggcucuauucgcaaugggaccuacgaccacaacgucuaccgggacgaggcucuuaauaacagauuucagaucaaaggcguggaacugaaguccggauauaaagauuggauccucuggauuagcuucgccaucuccugcuuucugcuuuguguugcccugcucggcuucauuaugugggcuugccagaaggggaauauccgcuguaacauuugcaucuga

SEQ ID NO: 205556 - RNA, 1701 nt, Artificial Sequence; identical to SEQ ID NO: 204513
  derived and/or modified CDS sequence (opt5) from hemagglutinin__InfluenzaA__ALE31998

SEQ ID NO: 205557 - RNA, 1701 nt, Artificial Sequence
  derived and/or modified CDS sequence (opt5) from hemagglutinin__InfluenzaA__ALE31999
augaagaccaucauugcccugagcuacauccucugccugguguucgcucagaaaauucccggcaacgacaauuccacagccacgcuuugucuggggcaccaugcggucccuaacggaaccaucguuaagacaauuaccaaugauagaaucgaggugacaaacgcuaccgaacucgugcaaaauucuagcaucggcgagauuugcgacuccccgcaccagauccuggauggggaaaacuguacacuuauugacgcccugcucggagauccccagugcgacggcuuucagaauaaaaagugggaucuguucgucgagcggucuaaagccuauagcaacuguuacccuuaugacgugcccgauuacgcuucccugcgcucucucguugccagcuccgggacccuggaauuuaauaacgagagcuucaauuggacgggagugacccaaaacggcacaucuuccgcuugcaucagacggagcagcuccagcuuuuucucucgccuuaauuggcugacccaucuccacuauacauacccugcccugaacgucaccaugcccaauaacgagcaguuugacaaacuuuauauuuggggcgugcaucacccugggacggauaaggaccagaucuuccuguacgcgcaguccagcggaagaauuacaguuuccaccaagcggucucaacaggccgugaucccgaacaucggcagccgcccccggauuagagauaucccuucccgcauuagcaucuacuggacaauugucaagcccggggacauccuccugaucaauucuaccggaaaccugauugcuccuagaggcuauuuuaaaauccgguccgggaagucuucuauuaugcgcagcgacgcccccaucggaaaauguaaguccgaaugcauuaccccgaauggcucuaucccuaacgauaagcccuuccagaaugugaacagaaucacauacggcgcuuguccucgguaugugaaacacagcacgcucaagcuggccaccgggaugcgcaauguccccgagaaacagacaagaggaauuuuuggcgcgaucgccggguucauugaaaacggaugggagggcaugguugacgggugguacggauuucggcaucaaaauuccgagggcagaggccaggcugccgaucuuaagagcacccaggcugccaucgaccaaauuaacgggaaacugaaucgccucaucggaaagacaaacgaaaaauuccaccagauugagaaggaguucucugaaguggaaggccggauccaggaucuggagaaguauguggaggacaccaaaaucgaucuuugguccuacaaugccgaacugcucgucgcucuggagaaccagcauacgauugaccugacagauagcgaaaugaauaagcucuuugagaaaaccaagaaacaacugagagaaaacgcggaggacauggggaacggaugcuucaagaucuaucacaagugugauaaugccugcauuggcucuauccgcaacgggaccuacgaccacaauguguaccgggacgaggcucuuaacaauagauuucagauuaaaggcguugaacugaaguccggauauaaagauuggauccucuggaucagcuucgccauuuccugcuuucugcuuuguguggcccugcucggcuucaucaugugggcuugccagaaggggaacauucgcuguaauaucugcauuuga

SEQ ID NO: 205558 - RNA, 1701 nt, Artificial Sequence
  derived and/or modified CDS sequence (opt5) from hemagglutinin__InfluenzaA__ALE32000
augaagaccaucauugcccugagccacauccucugccugguguucgcucagaaacuucccgagaacgacaauuccacagccacgcugugucucggccaucacgcggucccuaacgggaccauuguuaagacaaucaccucugauagaauugaagugacaaaugcuaccgagcuggugcaaaacagcuccaucggagaaaucugcgacucuccgcaucagauucuugauggcaaaaauuguacacugaucgacgcccuccugggggauccccagugcgacggauuucagaacaagaaaugggaucuguucgucgagcggagcaaggccuacuccaauuguuauccuuacgacgugcccgauuaugcuucucuccgcagccugguugccuccagcggcacccuugaauuuaacgacgagucuuucaauugggcuggggugacgcaaaacggaaccuccagcgccugcauuagaggcucuaauuccagcuuuuucucucggcugaacuggcucacacacuccaauuuuaaguacccugcgcugaacgucaccaugcccaauaacgagcaguucgauaaacuuuauaucuggggcgugcaucacccugggacagacaaggaucagauuuuucuguacgcccagagcuccggacgcaucaccguuucuacgaaaagaagccaacaggcugugauuccgaacaucggcucccggccccgcaucagaaauauuccuagccggaucucuauuuauuggacaaucgucaagcccggggacauucuccugaucaacuccaccggaaaucugaucgccccucgcggcuacuucaaaauuagaagcgggaagucuagcaucaugcgguccgacgcucccauuggaaaguguaaaucugaaugcaucacaccgaacggcagcauuccuaaugauaagcccuuucagaacgugaaucgcaucaccuacggcgccuguccuagauaugugaaacaguccacccucaagcuggcgacagggaugcggaacguccccgagaaacaaacgcgcggaaucuucggcgccauugcuggguuuaucgaaaauggaugggagggcaugaaggacgggugguacggauucagacaccagaacagcgagggccggggccaggccgcugaucuuaaaucuacccaagccgccauugaccagaucaaugggaagcugaacagacucauuggaaagacaaaugaaaaauuccaucagaucgagaaggaauuuuccgagguugaaggccgcauucaggaucuggagaaauauguggaggacaccaagaucgaucuuuggagcuacaacgcugaacugcucguggcgcuggagaaucaacacacaaucgaccugaccgauucugaaaugaacaaacucuucgagaagacgaagaaacagcugcgggaaaacgccgaggacauggggaauggaugcuuuaagauuuaucauaaaugugauaacgcuugcaucggcuccauuagaaaugggacauacgaccacgacgucuaucgcgaugaggcccuuaacaaucgguuccagaucaagggcguggaacugaaaagcggauacaaggacuggauucucuggaucuccuuugccaucucuugcuuccugcuuuguguugcucugcucggcuuuauuaugugggccugccagaaggggaacaucagauguaauauuugcaucuga

SEQ ID NO: 205559 - RNA, 1701 nt, Artificial Sequence; identical to SEQ ID NO: 204513
  derived and/or modified CDS sequence (opt5) from hemagglutinin__InfluenzaA__ALE32001

SEQ ID NO: 205560 - RNA, 1701 nt, Artificial Sequence; identical to SEQ ID NO: 204513
  derived and/or modified CDS sequence (opt5) from hemagglutinin__InfluenzaA__ALE32002

SEQ ID NO: 205561 - RNA, 1701 nt, Artificial Sequence; identical to SEQ ID NO: 204613
  derived and/or modified CDS sequence (opt5) from hemagglutinin__InfluenzaA__ALE32003

SEQ ID NO: 205562 - RNA, 1701 nt, Artificial Sequence; identical to SEQ ID NO: 204513
  derived and/or modified CDS sequence (opt5) from hemagglutinin__InfluenzaA__ALE32004

SEQ ID NO: 205563 - RNA, 1701 nt, Artificial Sequence; identical to SEQ ID NO: 204513
  derived and/or modified CDS sequence (opt5) from hemagglutinin__InfluenzaA__ALE32005

SEQ ID NO: 205564 - RNA, 1701 nt, Artificial Sequence; identical to SEQ ID NO: 205057
  derived and/or modified CDS sequence (opt5) from hemagglutinin__InfluenzaA__ALE32006

SEQ ID NO: 205565 - RNA, 1701 nt, Artificial Sequence; identical to SEQ ID NO: 204513
  derived and/or modified CDS sequence (opt5) from hemagglutinin__InfluenzaA__ALE32007

SEQ ID NO: 205566 - RNA, 1701 nt, Artificial Sequence; identical to SEQ ID NO: 205064
  derived and/or modified CDS sequence (opt5) from hemagglutinin__InfluenzaA__ALE32008

SEQ ID NO: 205567 - RNA, 1701 nt, Artificial Sequence
  derived and/or modified CDS sequence (opt5) from hemagglutinin__InfluenzaA__ALE32009
augaagaccaucauugcccugagcuacauccucugccugguguucgcucagaaacuucccgagaacgacaauuccacagccacgcugugucucggccaccaugcggucccuaacgggaccauuguuaagacaaucaccucugauagaauugaagugacaaaugcuaccgagcuggugcaaaacagcuccaucggagaaaucugcgacucuccgcaccagauucuugauggcaaaaauuguacacugaucgacgcccuccugggggauccccagugcgacggauuucagaacaagaaaugggaucuguucgucgagcggagcaaggccuauuccaauuguuacccuuaugacgugcccgauuacgcuucucuccgcagccugguugccuccagcggcacccuugaauuuaacgacgagucuuucaauugggcuggggugacgcaaaacggaaccuccagcgccugcauuagaggcucuaauuccagcuuuuucucucggcugaacuggcucacacauuccaauuuuaaguauccugcgcugaacgucaccaugcccaauaacgagcaguucgauaaacuuuacaucuggggcgugcaccauccugggacagacaaggaucagauuuuucuguaugcccagagcuccggacgcaucaccguuucuacgaaaagaagccaacaggcugugauuccgaacaucggcucccggccccgcaucagaaauauuccuagccggaucucuauuuacuggacaaucgucaagcccggggacauucuccugaucaacuccaccggaaaucugaucgccccucgcggcuacuucaaaauuagaagcgggaagucuagcaucaugcgguccgacgcucccauuggaaaguguaaaucugaaugcaucacaccgaacggcagcauuccuaaugauaagcccuuucagaacgugaaucgcaucaccuauggcgccuguccuagauacgugaaacaguccacccucaagcuggcgacagggaugcggaacguccccgagaaacaaacgcgcggaaucuucggcgccauugcuggguuuaucgaaaauggaugggagggcaugaaggacgggugguauggauucagacaccagaacagcgagggccggggccaggccgcugaucuuaaaucuacccaagccgccauugaccagaucaaugggaagcugaacagacucauuggaaagacaaaugaaaaauuccaccagaucgagaaggaauuuuccgagguugaaggccgcauucaggaucuggagaaauacguggaggacaccaagaucgaucuuuggagcuauaacgcugaacugcucguggcgcuggagaaucaacauacaaucguccugaccgacucugaaaugaacaaacucuucgagaagacgaagaaacagcugcgggaaaacgccgaggauauggggaauggaugcuuuaagauuuaccacaaaugugacaacgcuugcaucggcuccauuagaaaugggacauaugaucaugacguguaccgcgacgaggcccuuaacaaucgguuccagaucaagggcguugaacugaaaagcggauacaaggauuggauucucuggaucuccuuugccaucucuugcuuccugcuuuguguggcucugcucggcuuuauuaugugggccugccaggaggggaacaucagauguaauauuugcaucuga

SEQ ID NO: 205568 - RNA, 1701 nt, Artificial Sequence
  derived and/or modified CDS sequence (opt5) from hemagglutinin__InfluenzaA__ALE32010
augaagaccaucauugcccugagcuacauccucugccuggcuuucgcccagaaaauucccggcaacgacaauuccacagcgacgcuuugucuggggcaccaugcugugccuaacggaaccaucgucaagacaauuaccaaugauagaaucgagguuacaaacgccaccgaacucgugcaaaauucuagcaucggcgagauuugcgacuccccgcaccagauccuggauggggaaaacuguacacuuauugacgcccugcucggagauccccagugcgacggcuuucagaauaaaaagugggaucuguucguggagcggucuaaggcuuauagcaacuguuacccuuaugacguccccgauuacgccucccugcgcucucucguggcuagcuccgggacccuggaauuuaauaacgagagcuucaauuggacgggaguuacccaaaacggcacaucuuccgccugcaucagacggagcagcuccagcuuuuucucucgccuuaauuggcugacccaucuccacuauacauacccugcgcugaacgugaccaugcccaauaacgagcaguuugacaaacuuuauauuuggggcguccaucacccugggacggauaaggaccagaucuuccuguacgcccaguccagcggaagaauuacaguguccaccaaacggucucaacaggcuguuaucccgaacaucggcagccgcccccggauuagagauaucccuucccgcauuagcaucuacuggacaauugugaagcccggggacauccuccugaucaauucuaccggaaaccugauugccccuagaggcuauuuuaaaauccgguccgggaagucuucuauuaugcgcagcgacgcucccaucggaaaauguaaguccgaaugcauuaccccgaauggcucuaucccuaacgauaagcccuuccagaaugucaacagaaucacauacggcgccuguccucgguaugugaaacacagcacgcucaagcuggcgaccgggaugcgcaaugugcccgagaaacagacaagaggaauuuuuggcgccaucgcuggguucauugaaaacggaugggagggcauggucgacgggugguacggauuucggcaucaaaauuccgagggcagaggccaggccgcugaucuuaagagcacccaggccgccaucgaccaaauuaacgggaaacugaaucgccucaucggaaagacaaacgaaaaauuccaccagauugagaaggaguucucugaaguugaaggccggauccaggaucuggagaaguauguggaggacaccaaaaucgaucuuugguccuacaaugcugaacugcucguggcgcuggagaaccagcauacgauugaccugacagauagcgaaaugaauaagcucuuugagaaaaccaagaaacaacugagagaaaacgccgaggacauggggaacggaugcuucaagaucuaucacaagugugauaaugcuugcauuggcucuauccgcaacgggaccuacgaccacaaugucuaccgggacgaggcccuuaacaauagauuucagauuaaaggcguggaacugaaguccggauauaaagauuggauccucuggaucagcuucgccauuuccugcuuucugcuuuguguugcucugcucggcuucaucaugugggccugccagaaggggaacauucgcuguaauaucugcauuuga

SEQ ID NO: 205569 - RNA, 1701 nt, Artificial Sequence; identical to SEQ ID NO: 205527
  derived and/or modified CDS sequence (opt5) from hemagglutinin__InfluenzaA__ALE32011

SEQ ID NO: 205570 - RNA, 1701 nt, Artificial Sequence; identical to SEQ ID NO: 205070
  derived and/or modified CDS sequence (opt5) from hemagglutinin__InfluenzaA__ALE32012

SEQ ID NO: 205571 - RNA, 1701 nt, Artificial Sequence; identical to SEQ ID NO: 204513
  derived and/or modified CDS sequence (opt5) from hemagglutinin__InfluenzaA__ALE32013

SEQ ID NO: 205572 - RNA, 1701 nt, Artificial Sequence
  derived and/or modified CDS sequence (opt5) from hemagglutinin__InfluenzaA__ALE32014
augaagaccaucauugcccugagcuacauccucugccugguguucgcucagaaaauucccggcaacgacaauuccacagccacgcuuugucuggggcaccaugcggucccuaacggaaccaucguuaagacaauuaccaaugauagaaucgaggugacaaacgcuaccgaacucgugcaaaauucuagcaucggcgagauuugcgacuccccgcaccagauccuggauggggaaaacuguacacuuauugacgcccugcucggagauccccagugcgacggcuuucagaauaaaaagugggaucuguucgucgagcggucuaaagccuauagcaacuguuacccuuaugacgugcccgauuacgcuucccugcgcucucucguugccagcuccgggacccuggaauuuaauaacgagagcuucaauuggacgggagugacccaaaacggcacaucuuccgcuugcaucagaaagucuagcuccagcuuuuucucucggcuuaauuggcugacccagcucaacuauacauacccugcccugaaugucaccaugcccaacaacgagcaguuugacaaacuuuauauuuggggcgugcaucacccugggacggauaaggaccagaucuuccuguacgcgcaauccagcggacgcauuacaguuuccaccaagagaucucagcaggccgugaucccgaauaucggcagccggccccgcauuagagauaucccuucccggauuagcaucuacuggacaauugucaaacccggggacauccuccugaucaacucuaccggaaaucugauugcuccucgcggcuauuuuaagaucagauccgggaaaagcucuauuaugcggagcgacgcccccaucggaaaguguaaguccgaaugcauuaccccgaacggcucuaucccuaaugauaaacccuuccagaacgugaaucgcaucacauacggcgcuuguccuagauaugugaagcauagcacgcucaaacuggccaccgggaugcggaacguccccgagaagcaaacacgcggaauuuuuggcgcgaucgccggguucauugaaaauggaugggagggcaugguugacgggugguacggauuuagacaccagaacuccgagggccggggccaggcugccgaucuuaaaagcacccaagcugccaucgaccagauuaaugggaagcugaacagacucaucggaaaaacaaaugaaaaguuccaccagauugagaaggaguucucugaaguggaaggccgcauccaggaucuggagaaauauguggaggacaccaagaucgaucuuugguccuacaacgccgaacugcucgucgcucuggagaaucaacauacgauugaccugacagauagcgaaaugaacaaacucuuugagaagaccaaaaagcagcugcgggaaaacgcggaggacauggggaauggaugcuucaagaucuaucacaaaugugauaacgccugcauuggcucuaucagaaaugggaccuacgaccauaacguguaccgcgacgaggcucuuaauaaccgguuucagauuaagggcguugaacugaaauccggauauaaggauuggauccucuggaucagcuucgccauuuccugcuuucugcuuuguguggcccugcucggcuucaucaugugggcuugccagaaagggaauauuagauguaacaucugcauuuga

SEQ ID NO: 205573 - RNA, 1701 nt, Artificial Sequence; identical to SEQ ID NO: 205398
  derived and/or modified CDS sequence (opt5) from hemagglutinin__InfluenzaA__ALE32015

SEQ ID NO: 205574 - RNA, 1701 nt, Artificial Sequence; identical to SEQ ID NO: 204513
  derived and/or modified CDS sequence (opt5) from hemagglutinin__InfluenzaA__ALE32016

SEQ ID NO: 205575 - RNA, 1701 nt, Artificial Sequence; identical to SEQ ID NO: 204513
  derived and/or modified CDS sequence (opt5) from hemagglutinin__InfluenzaA__ALE32017

SEQ ID NO: 205576 - RNA, 1701 nt, Artificial Sequence; identical to SEQ ID NO: 204513
  derived and/or modified CDS sequence (opt5) from hemagglutinin__InfluenzaA__ALE32018

SEQ ID NO: 205577 - RNA, 1701 nt, Artificial Sequence; identical to SEQ ID NO: 205057
  derived and/or modified CDS sequence (opt5) from hemagglutinin__InfluenzaA__ALE32020

SEQ ID NO: 205578 - RNA, 1701 nt, Artificial Sequence; identical to SEQ ID NO: 205164
  derived and/or modified CDS sequence (opt5) from hemagglutinin__InfluenzaA__ALE32021

SEQ ID NO: 205579 - RNA, 1701 nt, Artificial Sequence; identical to SEQ ID NO: 205244
  derived and/or modified CDS sequence (opt5) from hemagglutinin__InfluenzaA__ALE32022

SEQ ID NO: 205580 - RNA, 1701 nt, Artificial Sequence; identical to SEQ ID NO: 204513
  derived and/or modified CDS sequence (opt5) from hemagglutinin__InfluenzaA__ALE32023

SEQ ID NO: 205581 - RNA, 1701 nt, Artificial Sequence
  derived and/or modified CDS sequence (opt5) from hemagglutinin__InfluenzaA__ALE32024
augaagaccaucauugcccugagcuacauccucugccugguguucgcucagaaacuucccggcaacgacaauuccacagccacgcugugucucgggcaccaugcggucccuaacggaaccauuguuaagacaaucaccaaugauagaauugaggugacaaacgcuaccgaacuggugcaaaauucuagcaucggcgagaucugcgacuccccgcaccagauucuugaugggaaaaacuguacacugaucgacgcccuccugggagauccccagugcgacggcuuucagaauaagcggugggaucuguucgucgaacgcucuaaagccuauagcaacuguuacccuuaugacgugcccgauuacgcuucccucagaucucugguugccagcuccgggacccuugaguuuaaugacgaauccuucaacugggcuggagugacgcaaaauggcaagucuuccgccugcauucggggcagcaacucuuccuuuuucagccgccugaauuggcucacccauucuaacuuuaaguauccugcgcugaaugucacaaugcccaacaacgagcaguucgauaaacuuuacaucuggggagugcaccauccugggaccgacaaggaucagauuuuucuguaugcccacuccagcggcagaaucacaguuuccaccaaacggucucagcaagcugugauuccgaauaucgggagccgccccagaauccggaacauuccuucccgcaucagcauuuacuggacgaucgucaagcccggagacauucuccugaucaauucuacaggcaaccugaucgccccuagaggguacuucaaaauucaguccggaaagagcucuaucaugcggagcgacgcucccauuggcaaguguaaauccgagugcaucaccccgaauggcucuauuccuaacgauaagcccuuucagaaugugaaccgcaucacauaugggaccuguccuagauacgugaaacagagcacccucaagcuggccacaggaaugcggaauguccccgaaaaacaaacgcgcggcaucuucggggcgauugccggauuuaucgagaacggcugggaagggaugaaggacggaugguauggcuucagacaccagaauagcgagggccgggggcaggcugccgaucuuaaaagcacccaagcugccauugaccagaucaacggaaagcugaauagacucauuggcaagacaaacgagaaauuccaucagaucgaaaaggaguuuucugaaguugaggggcgcauucaggaucuggaaaaauacguggaggacaccaagaucgaucuuugguccuauaaugccgagcugcucguggcucuggaaaaccaacacacaaucgaccugaccgauagcgagaugaacaaacucuucgaaaagacgaagaaacagcugcgggagaaugcggaagacaugggaaacggcugcuuuaagauuuaccauaaaugugauaaugccugcaucgggucuauuagaaacggcacauaugaccacuacgucuaccgcgacgaggcucuuaauaaccgguuccagaucaagggaguggagcugaaauccggcuauaaggauuggauucucuggaucagcuuugccaucuccugcuuccugcuuuguguugcccugcucggguuuauuaugugggcuugccagaagggaaauaucagauguaacauuugcaucuga

SEQ ID NO: 205582 - RNA, 1701 nt, Artificial Sequence
  derived and/or modified CDS sequence (opt5) from hemagglutinin__InfluenzaA__ALE32025
augaagaccaucauugcccugagcuacauccucugccugguguucgcucagaaaauucccggcaacgacaauuccacagccacgcuuugucuggggcaccaugcggucccuaacggaaccaucguuaagacaauuaccaaugauagaaucgaggugacaaacgcuaccgaacucgugcaaaauucuagcaucggcgagauuugcgacuccccgcaccagauccuggauggggaaaacuguacacuuauugacgcccugcucggagauccccagugcgacggcuuucagaauaaaaagugggaucuguucgucgagcggucuaaagccuauagcaacuguuacccuuaugacgugcccgauuacgcuucccugcgcucucucguugccagcuccgggacccuggaauuuaauaacgagagcuucaauuggacgggagugacccaaaacggcacaucuuccgcuugcaucagaaagucuagcuccagcuuuuucucucggcuuaauuggcugacccaucucaacuauacauacccugcccugaaugucaccaugcccaacaacgagcaguuugacaaacuuuauauuuggggcgugcaccauccugggacggauaaggaccagaucuuccuguacgcgcgcuccagcggaagaauuacaguuuccaccaagcggucucagcaagccgugaucccgaauaucggcagccgcccccggauuagagauaucccuucccgcauuagcaucuacuggacaauugucaaaucuggggacauccuccugaucaacuccaccggaaaucugauugcucccagaggcuauuuuaagauccggagcgggaaaucuagcauuaugcgcuccgacgccccuaucggaaaguguaagucugaaugcauuacccccaacggcagcaucccgaaugauaaaccuuuccagaacgugaauagaaucacauacggcgcuuguccccgguaugugaagcacuccacgcucaaacuggccaccgggaugcgcaacgucccugagaagcagacaagaggaauuuuuggcgcgaucgccggguucauugaaaauggaugggagggcaugguugacgggugguacggauuucggcaccagaacagcgagggcagaggccaagcugccgaucuuaaaucuacccaggcugccaucgaccagauuaaugggaagcugaaccgccucaucggaaaaacaaaugaaaaguuccaucaaauugagaaggaguucuccgaaguggaaggccggauccaggaucuggagaaauauguggaggacaccaagaucgaucuuuggagcuacaacgccgaacugcucgucgcucuggagaaucagcacacgauugaccugacagauucugaaauguccaaacucuuugagaagaccaaaaagcagcugagagaaaacgcggaggacauggggaacggaugcuucaagaucuaucauaaaugugauaaugccugcauuggcagcauccgcaacgggaccuacgaccacaauguguaccgggacgaggcucuuaacaauagauuucaaauuaagggcguugaacugaaauccggauauaaggauuggauccucuggaucucuuucgccauuagcugcuuucugcuuuguguggcccugcucggcuucaucaugugggcuugccagaaagggaacauucgcuguaauaucugcauuuga

SEQ ID NO: 205583 - RNA, 1701 nt, Artificial Sequence; identical to SEQ ID NO: 204513
  derived and/or modified CDS sequence (opt5) from hemagglutinin__InfluenzaA__ALE32026

SEQ ID NO: 205584 - RNA, 1701 nt, Artificial Sequence; identical to SEQ ID NO: 205057
  derived and/or modified CDS sequence (opt5) from hemagglutinin__InfluenzaA__ALE32027

SEQ ID NO: 205585 - RNA, 1701 nt, Artificial Sequence
  derived and/or modified CDS sequence (opt5) from hemagglutinin__InfluenzaA__ALE32028
augaagaccaucauugcccugagccacauccucugccugguguucgcucagaaaauucccggcaacgacaauuccacagccacgcuuugucuggggcaucacgcggucccuaacggaaccaucguuaagacaauuaccaaugauagaaucgaggugacaaacgcuaccgaacucgugcaaaauucuagcaucggcgagauuugcgacuccccgcaucagauccuggauggggaaaacuguacacuuauugacgcccugcucggagauccccagugcgacggcuuucagaauaaaaagugggaucuguucgucgagcggucuaaagccuacagcaacuguuauccuuacgacgugcccgauuaugcuucccugcgcucucucguugccagcuccgggacccuggaauuuaauaacgagagcuucaauuggacgggagugacccaaaacggcacaucuuccgcuugcaucagacggagcagcuccagcuuuuucucucgccuuaauuggcugacccaccucaacuacacauauccugcccugaaugucaccaugcccaacaacgagcaguuugacaaacuuuacauuuggggcgugcaucacccugggacggauaaggaccagaucuuccuguaugcgcaguccagcggaagaauuacaguuuccaccaagcggucucaacaggccgugaucccgaauaucggcagccgcccccggauuagagauaucccuucccgcauuagcaucuacuggacaauugucaagcccggggacauccuccugaucaacucuaccggaaaucugauugcuccuagaggcuacuuuaaaauccgguccgggaagucuucuauuaugcgcagcgacgcccccaucggaaaauguaaguccgaaugcauuaccccgaacggcucuaucccuaaugauaagcccuuccagaacgugaauagaaucacauauggcgcuuguccucgguacgugaaacacagcacgcucaagcuggccaccgggaugcgcaacguccccgagaaacagacaagaggaauuuuuggcgcgaucgccggguucauugaaaauggaugggagggcaugauggacgggugguauggauuucggcaucaaaacuccgagggcagaggccaggcugccgaucuuaagagcacccaggcugccaucgaccaaauuaaugggaaacugaaccgccucaucggaaagacaaaugaaaaauuccaccagauugagaaggaguucucugaaguugaaggccggauccaggaucuggagaaguacguggaggacaccaaaaucgaucuuugguccuauaacgccgaacugcucguggcucuggagaaucagcauacgauugaccugacagauagcgaaaugaacaagcucuuugagaaaaccaagaaacaacugagagaaaacgcggaggacauggggaauggaugcuucaagaucuaccacaagugugauaacgccugcauuggcucuauccgcaaugggaccuaugaccacaacgucuaccgggacgaggcucuuaauaacagauuucagauuaaaggcguggaacugaaguccggauacaaagauuggauccucuggaucagcuucgccauuuccugcuuucugcuuuguguugcccugcucggcuucaucaugugggcuugccagaaggggaauauucgcuguaacaucugcauuuga

SEQ ID NO: 205586 - RNA, 1701 nt, Artificial Sequence; identical to SEQ ID NO: 205164
  derived and/or modified CDS sequence (opt5) from hemagglutinin__InfluenzaA__ALE32029

SEQ ID NO: 205587 - RNA, 1701 nt, Artificial Sequence
  derived and/or modified CDS sequence (opt5) from hemagglutinin__InfluenzaA__ALE32030
augaagaccaucauugcccugagccacauccucugccugguguucgcucagaaaauucccggcaacgacaauuccacagccacgcuuugucuggggcaucacgcggucccuaacggaaccaucguuaagacaauuaccaaugauagaaucgaggugacaaacgcuaccgaacucgugcaaaauucuagcaucggcgagauuugcgacuccccgcaucagauccuggauggggaaaacuguacacuuauugacgcccugcucggagauccccagugcgacggcuuucagaauaaaaagugggaucuguucgucgagcggucuaaagccuacagcaacuguuauccuuacgacgugcccgauuaugcuucccugcgcucucucguugccagcuccgggacccuggaauuuaauaacgagagcuucaauuggacgggagugacccaaaacggcacaucuuccgcuugcaucagacggagcagcuccagcuuuuucucucgccuuaauuggcugacccaccucaacuacauuuauccugcccugaaugucacaaugcccaacaacgagcaguuugacaaacuuuacaucuggggcgugcaucacccugggaccgauaaggaccagauuuuccuguaugcgcaguccagcggaagaaucacgguuuccacaaagcggucucaacaggccgugaucccgaauauuggcagccgccccagaauccgggauauuccuucccgcaucagcauuuacuggaccaucgucaagcccggggacauccuccugauuaacucuacaggaaaucugaucgcuccuagaggcuacuuuaaaauucgguccgggaagucuucuaucaugcgcagcgacgcccccauuggaaaauguaaguccgaaugcaucaccccgaacggcucuaucccuaaugauaagcccuuccagaacgugaauagaauuaccuauggcgcuuguccucgguacgugaaacacagcacacucaagcuggccacggggaugcgcaacguccccgagaaacagaccagaggaaucuuuggcgcgauugccggguucaucgaaaauggaugggagggcaugauggacgggugguauggauuucggcaucaaaacuccgagggcagaggccaggcugccgaucuuaagagcacacaggcugccauugaccaaaucaaugggaaacugaaccgccucauuggaaagaccaaugaaaaauuccaccagaucgagaaggaguucucugaaguugaaggccggauccaggaucuggagaaguacguggaggacacaaaaauugaucuuugguccuauaacgccgaacugcucguggcucuggagaaucagcauaccaucgaccugacggauagcgaaaugaacaagcucuuugagaaaacaaagaaacaacugagagaaaacgcggaggacauggggaauggaugcuucaagauuuaccacaagugugauaacgccugcaucggcucuauucgcaaugggaccuaugaccacaacgucuaccgggacgaggcucuuaauaacagauuucagaucaaaggcguggaacugaaguccggauacaaagauuggauccucuggauuagcuucgccaucuccugcuuucugcuuuguguugcccugcucggcuucauuaugugggcuugccagaaggggaauauccgcuguaacauuugcaucuga

SEQ ID NO: 205588 - RNA, 1701 nt, Artificial Sequence
  derived and/or modified CDS sequence (opt5) from hemagglutinin__InfluenzaA__ALE32031
augaagaccaucauugcccugagcuacauccucugccugguguucgcucagaaaauucccggcaacgacaauuccacagccacgcuuugucuggggcaccaugcggucccuaacggaaccaucguuaagacaauuaccaaugauagaaucgaggugacaaacgcuaccgaacucgugcaaaauucuagcaucggcgagauuugcgacuccccgcaccagauccuggauggggaaaacuguacacuuauugacgcccugcucggagauccccagugcgacggcuuucagaauaaaaagugggaucuguucgucgagcggucuaaagccuauagcaacuguuacccuuaugacgugcccgauuacgcuucccugcgcucucucguugccagcuccgggacccuggaauuuaauaacgagagcuucaauuggacgggagugacccaaaacggcacaucuuccgcuugcaucagacggagcagcuccagcuuuuucucucgccuuaauuggcugacccaucucaacuauacauacccugcccugaaugucaccaugcccaacaacgagcaguuugacaaacuuuauauuuggggcgugcaccauccugggacggauaaggaccagaucuuccuguacgcgcaguccagcggaagaauuacaguuuccaccaagcggucucaacaggccgugaucccgaauaucggcagccgcccccggauuagagauaucccuucccgcauuagcaucuacuggacaauugucaagcccggggacauccuccugaucaacucuaccggaaaucugauugcuccuagaggcuauuuuaaaauccgguccgggaagucuucuauuaugcgcagcgacgcccccaucggaaaauguaaguccgaaugcauuaccccgaacggcucuaucccuaaugauaagcccuuccagaacgugaauagaaucacauacggcgcuuguccucgguaugugaaacacagcacgcucaagcuggccaccgggaugcgcaacguccccgagaaacagacaagaggaauuuuuggcgcgaucgccggguucauugaaaauggaugggagggcaugauggacgggugguacggauuucggcaccaaaacuccgagggcagaggccaggcugccgaucuuaagagcacccaggcugccaucgaccaaauuaaugggaaacugaaccgccucaucggaaagacaaaugaaaaauuccaucagauugagaaggaguucucugaaguugaaggccggauccaggaucuggagaaguauguggaggacaccaaaaucgaucuuugguccuacaacgccgaacugcucguggcucuggagaaucagcacacgauugaccugacagauagcgaaaugaacaagcucuuugagaaaaccaagaaacaacugagagaaaacgcggaggacauggggaauggaugcuucaagaucuaucauaagugugauaacgccugcauuggcucuauccgcaaugggaccuacgaccacaacgucuaccgggacgaggcucuuaauaacagauuucagauuaaaggcguggaacugaaguccggauauaaagauuggauccucuggaucagcuucgccauuuccugcuuucugcuuuguguugcccugcucggcuucaucaugugggcuugccagaaggggaauauucgcuguaacaucugcauuuga

SEQ ID NO: 205589 - RNA, 1701 nt, Artificial Sequence
  derived and/or modified CDS sequence (opt5) from hemagglutinin__InfluenzaA__ALE32032
augaagaccaucauugcccugagcuacauccucugccugguguucgcucagaaaauucccggcaacgacaauuccacagccacgcuuugucuggggcaccaugcggucccuaacggaaccaucguuaagacaauuaccaaugauagaaucgaggugacaaacgcuaccgaacucgugcaaaauucuagcaucggcgagauuugcgacuccccgcaccagauccuggauggggaaaacuguacacuuauugacgcccugcucggagauccccagugcgacggcuuucagaauaaaaagugggaucuguucgucgagcggucuaaagccuauagcaacuguuacccuuaugacgugcccgauuacgcuucccugcgcucucucguugccagcuccgggacccuggaauuuaauaacgagagcuucaauuggacgggagugacccaaaacggcacaucuuccgcuugcaucagacggagcagcuccagcuuuuucucucgccuuaauuggcugacccaucucaacuauacauacccugcccugaaugucaccaugcccaacaacgagcaguuugacaaacuuuauauuuggggcgugcaccauccugggacggauaaggaccagaucuuccuguacgcgcaguccagcggaagaauugccguuuccacaaagcggucucaacaggcugugaucccgaauaucggcagccgcccccggauuagagauaucccuucccgcauuagcaucuacuggaccauugucaagcccggggacauccuccugaucaacucuacaggaaaucugauugccccuagaggcuauuuuaaaauccgguccgggaagucuucuauuaugcgcagcgacgcucccaucggaaaauguaaguccgaaugcauuaccccgaacggcucuaucccuaaugauaagcccuuccagaacgugaauagaaucaccuacggcgccuguccucgguaugugaaacacagcacacucaagcuggcgacggggaugcgcaacguccccgagaaacagaccagaggaauuuuuggcgccaucgcuggguucauugaaaauggaugggagggcaugauggacgggugguacggauuucggcaccaaaacuccgagggcagaggccaggccgcugaucuuaagagcacacaggccgccaucgaccaaauuaaugggaaacugaaccgccucaucggaaagaccaaugaaaaauuccaucagauugagaaggaguucucugaaguugaaggccggauccaggaucuggagaaguauguggaggacacaaaaaucgaucuuugguccuacaacgcugaacugcucguggcgcuggagaaucagcacaccauugaccugacggauagcgaaaugaacaagcucuuugagaaaacaaagaaacaacugagagaaaacgccgaggacauggggaauggaugcuucaagaucuaucauaagugugauaacgcuugcauuggcucuauccgcaaugggaccuacgaccacaacgucuaccgggacgaggcccuuaauaacagauuucagauuaaaggcguggaacugaaguccggauauaaagauuggauccucuggaucagcuucgccauuuccugcuuucugcuuuguguugcucugcucggcuucaucaugugggccugccagaaggggaauauucgcuguaacaucugcauuuga

SEQ ID NO: 205590 - RNA, 1701 nt, Artificial Sequence; identical to SEQ ID NO: 204513
  derived and/or modified CDS sequence (opt5) from hemagglutinin__InfluenzaA__ALE32033

SEQ ID NO: 205591 - RNA, 1701 nt, Artificial Sequence
  derived and/or modified CDS sequence (opt5) from hemagglutinin__InfluenzaA__ALE32034
augaagaccaucauugcccugggcuacauccucugccugguguucgcucagaaaauucccgggaacgacaauagcacagccacgcuuugucugggacaccaugcggucccuaacggcaccaucguuaagacaauuaccaaugauagaaucgaggugacaaacgcuaccgaacucgugcaaaauuccucuaucggggagauuugcgacagcccgcacaaaauccuggauggagaaaacuguacacuuauugacgcccugcucggcgauccccagugcgacggguuucagaauaagaaaugggaucuguucgucgagcgguccaaggccuauucuaacuguuacccuuaugacgugcccgauuacgcuagccugcgcucccucguugccucuagcggaacccuggaauuuaauaacgaguccuucaauuggacgggcgugacccagaacggcacaagcucugcuugcaucagacgguccucuagcuccuuuuucagccgccuuaauuggcugacccaucucaaguauacauacccugcccugaacgucaccaugcccaauaacgagcaauuugacaaacuuuauauuuggggagugcaccauccugggacggauaaggaccagaucuuccuguacgcgcagucuuccggcagaauuacaguuagcaccaaacggucccagcaagccgugaucccgaacaucgggucucgcccccggauuagagauaucccuagccgcauuuccaucuacuggacaauugucaagcccggagacauccuccugaucaauagcaccggcaaccugauugcuccuagaggguauuuuaaaauccggucuggaaaguccagcauuaugcgcucugacgcccccaucggcaaguguaaaagcgaaugcauuaccccgaauggcuccaucccuaacgauaagcccuuccagaaugugaacagaaucacauacggggcuuguccucgguaugugaaacacucuacgcucaagcuggccaccggaaugcgcaauguccccgagaaacagacaagaggcauuuuuggggcgaucgccggauucauugaaaacggcugggaggggaugguugacggaugguacggcuuucggcaccagaauagcgagggcagagggcaagcugccgaucuuaaguccacccaggcugccaucgaccagauuaacggaaaacugaaucgccucaucggcaagacaaacgaaaaguuccaucaaauugagaaagaguucagcgaaguggaagggcggauccaggaucuggagaaguauguggaggacaccaaaaucgaucuuuggucuuacaaugccgaacugcucgucgcucuggagaaccagcacacgauugaccugacagauuccgaaaugaauaagcucuuugagaaaaccaagaagcagcugagagaaaacgcggaggacaugggaaacggcugcuucaaaaucuaucauaagugugauaaugccugcauugggagcauccgcaacggcaccuacgaccacaauguguaccgggacgaggcucuuaacaauagauuucaaauuaaaggaguugaacugaagucuggcuauaaagauuggauccucuggaucuccuucgccauuagcugcuuucugcuuuguguggcccugcucggguucaucaugugggcuugccagaagggaaacauucgcuguaauaucugcauuuga

SEQ ID NO: 205592 - RNA, 1701 nt, Artificial Sequence; identical to SEQ ID NO: 205403
  derived and/or modified CDS sequence (opt5) from hemagglutinin__InfluenzaA__ALE32035

SEQ ID NO: 205593 - RNA, 1701 nt, Artificial Sequence
  derived and/or modified CDS sequence (opt5) from hemagglutinin__InfluenzaA__ALE32036
augaagaccaucauugcccugggcuacauccucugccugguguucgcucagaaaauucccgggaacgacaauagcacagccacgcuuugucugggacaccaugcggucccuaacggcaccaucguuaagacaauuaccaaugauagaaucgaggugacaaacgcuaccgaacucgugcaaaauuccucuaucggggagauuugcgacagcccgcacaaaauccuggauggagaaaacuguacacuuauugacgcccugcucggcgauccccagugcgacggguuucagaauaagaaaugggaucuguucgucgagcgguccaaggccuauucuaacuguuacccuuaugacgugcccgauuacgcuagccugcgcucccucguugccucuagcggaacccuggaauuuaauaacgaguccuucaauuggacgggcgugacccagaacggcacaagcucugcuugcaucagacgguccucuagcuccuuuuucagccgccuuaauuggcugacccaucuccacuauacauacccugcccugaacgucaccaugcccaauaacgagcaauuugacaaacuuuauauuuggggagugcaucacccugggacggauaaggaccagaucuuccuguacgcgcagucuuccggcagaauuacaguuagcaccaagcggucccagcaagccgugaucccgaacaucgggucucgcccccggauuagagauaucccuagccgcauuuccaucuacuggacaauugucaaacccggagacauccuccugaucaauagcaccggcaaccugauugcuccuagaggguauuuuaagauccggucuggaaaauccagcauuaugcgcucugacgcccccaucggcaaguguaagagcgaaugcauuaccccgaauggcuccaucccuaacgauaaacccuuccagaaugugaacagaaucacauacggggcuuguccucgguaugugaagcacucuacgcucaaacuggccaccggaaugcgcaauguccccgagaagcagacaagaggcauuuuuggggcgaucgccggauucauugaaaacggcugggaggggaugguugacggaugguacggcuuucggcaucagaauagcgagggcagagggcaagcugccgaucuuaaauccacccaggcugccaucgaccagauuaacggaaagcugaaucgccucaucggcaaaacaaacgaaaaguuccaccaaauugagaaggaguucagcgaaguggaagggcggauccaggaucuggagaaauauguggaggacaccaagaucgaucuuuggucuuacaaugccgaacugcucgucgcucuggagaaccagcauacgauugaccugacagauuccgaaaugaauaaacucuuugagaagaccaaaaagcagcugagagaaaacgcggaggacaugggaaacggcugcuucaagaucuaucacaaaugugauaaugccugcauugggagcauccgcaacggcaccuacgaccacaauguguaccgggacgaggcucuuaacaauagauuucaaauuaagggaguugaacugaaaucuggcuauaaggauuggauccucuggaucuccuucgccauuagcugcuuucugcuuuguguggcccugcucggguucaucaugugggcuugccagaaaggaaacauucgcuguaauaucugcauuuga

SEQ ID NO: 205594 - RNA, 1701 nt, Artificial Sequence
  derived and/or modified CDS sequence (opt5) from hemagglutinin__InfluenzaA__ALE32037
augaagaccaucauugcccugagcuacauccucugccugguguucgcucagaaaauucccggcaacgacaauuccacagccacgcuuugucuggggcaccaugcggucccuaacggaaccaucguuaagacaauuaccaaugauagaaucgaggugacaaacgcuaccgaacucgugcaaaauucuagcaucggcgagauuugcgacuccccgcaccagauccuggauggggaaaacuguacacuuauugacgcccugcucggagauccccagugcgacggcuuucagaauaaaaagugggaucuguucgucgagcggucuaaagccuauagcaacuguuacccuuaugacgugcccgauuacgcuucccugcgcucucucguugccagcuccgggacccuggaauuuaauaacgagagcuucaauuggacgggagugacccaaaacggcacaucuuccgcuugcaucagacggucuagcuccagcuuuuucucucgccuuaauuggcugacccaucucaacuauaaguacccugcccugaaugucacaaugcccaacaacgagcaguuugacaaacuuuauauuuggggcgugcaccauccugggaccgauaaagaccagaucuuccuguacgcgcaguccagcggaagaauuacgguuuccacaaagcggucucaacaggccgugaucccgaauaucggcagccgcccccggauuagagauaucccuucccgcauuagcaucuacuggaccauugucaaacccggggacauccuccugaucaacucuacaggaaaucugauugcuccuagaggcuauuuuaagauccucuccgggaaaagcucuauuaugcggagcgacgcccccaucggaaaguguaaguccgaaugcauuaccccgaacggcucuaucccuaaugauaaacccuuccagaacgugaaucgcaucaccuacggcgcuuguccuagauaugugaagcacagcacacugaaacuugccacggggaugcggaacguccccgagaagcagacccgcggaauuuuuggcgcgaucgccggguucauugaaaauggaugggagggcaugguugacgggugguacggauuuagacaccaaaacuccgagggccggggccaggcugccgaucugaaaagcacacaggcugccaucgaccaaauuaaugggaagcucaacagacugaucggaaaaaccaaugaaaaguuccaucagauugagaaggaguucucugaaguggaaggccgcauccaggaucuugagaaauauguggaggacacaaagaucgaucugugguccuacaacgccgaacuccuggucgcucuggagaaucagcacaccauugaccucacggauagcgaaaugaacaaacuguuugagaagacaaagaagcaacuucgggaaaacgcggaggacauggggaauggaugcuucaagaucuaucauaaaugugauaacgccugcauuggcucuaucagaaaugggaccuacgaccacaacguguaccgcgacgaggcucugaauaaccgguuucagauuaagggcguugaacucaaauccggauauaaggauuggauccuguggaucagcuucgccauuuccugcuuucuucuguguguggcccuccugggcuucaucaugugggcuugccagaaagggaauauuagauguaacaucugcauuuga

SEQ ID NO: 205595 - RNA, 1701 nt, Artificial Sequence
  derived and/or modified CDS sequence (opt5) from hemagglutinin__InfluenzaA__ALE32038
augaagaccaucauugcccugagcuacauccucugccugguguucgcucagaaaauucccggcaacgacaauuccacagccacgcuuugucuggggcaccaugcggucccuaacggaaccaucguuaagacaauuaccaaugauagaaucgaggugacaaacgcuaccgaacucgugcaaaauucuagcaucggcgagauuugcgacuccccgcaccagauccuggauggggaaaacuguacacuuauugacgcccugcucggagauccccagugcgacggcuuucagaauaaaaagugggaucuguucgucgagcggucuaaagccuauagcaacuguuacccuuaugacgugcccgauuacgcuucccugcgcucucucguugccagcuccgggacccuggaauuuaauaacgagagcuucaauuggacgggagugacccaaaacggcacaucuuccgcuugcaucagacggucuagcuccagcuuuuucucucgccuuaauuggcugacccaucucaacuauacauacccugcccugaaugucaccaugcccaacaacgagcaguuugacaaacuuuauauuuggggcgugcaccauccugggacggauaaggaccagaucuuccuguacgcgcaguccagcggaagaauuacaguuuccaccaaacggucucaacaggccgugaucccgaauaucggcagccgcccccggauuagagauaucccuucccgcauuagcaucuacuggacaauugucaagcccggggacauccuccugaucaacucuaaaggaaaucugauugcuccuagaggcuauuuuaagauccgguccgggaaaagcucuauuaugcgcagcgacgcccccaucggaaaguguaaguccgaaugcauuaccccgaacggcucuaucccuaaugauaaacccuuccagaacgugaauagaaucaccuacggcgcuuguccucgguaugugaagcacagcacacucaaacuggccacggggaugcgcaacguccccgagaagcagaccagaggaauuuuuggcgcgaucgccggguucauugaaaauggaugggagggcaugguugacgggugguacggauuucggcaccuuaacuccgagggcagaggccaagcugccgaucugaaaagcacacaggcugccaucgaccagauuaaugggaagcucaaccgccugaucggaaaaaccaaugaaaaguuccaucaaauugagaaggaguucucugaaguggaaggccggauccaggaucuugagaaauauguggaggacacaaagaucgaucugugguccuacaacgccgaacuccuggucgcucuggagaaucagcacaccauugaccucacggauagcgaaaugaacaaacuguuugagaagacaaagaagcagcuuagagaaaacgcggaggacauggggaauggaugcuucaagaucuaucauaaaugugauaacgccugcauuggcucuauccgcaaugggaccuacgaccacaacguguaccgggacgaggcucugaauaacagauuucaaauuaagggcguugaacucaaauccggauauaaggauuggauccuguggaucagcuucgccauuuccugcuuucuucuguguguggcccuccugggcuucaucaugugggcuugccagaaagggaauauucgcuguaacaucugcauuuga

SEQ ID NO: 205596 - RNA, 1701 nt, Artificial Sequence; identical to SEQ ID NO: 205171
  derived and/or modified CDS sequence (opt5) from hemagglutinin__InfluenzaA__ALE32039

SEQ ID NO: 205597 - RNA, 1701 nt, Artificial Sequence
  derived and/or modified CDS sequence (opt5) from hemagglutinin__InfluenzaA__ALE32040
augaagaccaucauugcccugagcuacauccucugccugguguucgcucagaaaauucccggcaacgacaauuccacagccacgcuuugucuggggcaccaugcggucccuaacggaaccaucguuaagacaauuaccaaugauagaaucgaggugacaaacgcuaccgaacucgugcaaaauucuagcaucggcgagauuugcgacuccccgcaccagauccuggauggggaaaacuguacacuuauugacgcccugcucggagauccccagugcgacggcuuucagaauaaaaagugggaucuguucgucgagcggucuaaagccuauagcaacuguuacccuuaugacgugcccgauuacgcuucccugcgcucucucguugccagcuccgggacccuggaauuuaauaacgagagcuucaauuggacgggagugacccaaaacggcacaucuuccgcuugcaucagacggucuagcuccagcuuuuucucucgccuuaauuggcugacccaucucaacuauacauacccugcccugaaugucaccaugcccaacaacgagcaguuugacaaacuuuauauuuggggcgugcaccauccugggacggauaaggaccagaucuuccuguacgcgcaguccagcggaagaauuacaguuuccaccaagcggucucaacaggccgugaucccgaauaucggcagccgcccccggauuagagauaucccuucccgcauuagcaucuacuggacaauugucaagcccggggacauccuccugaucaacucuaccggaaaucugauugcuccuagaggcuauuuuaaaauccgguccgggaccagcucuauuaugcgcagcgacgcccccaucggaaaguguaaauccgaaugcauuacaccgaacggcucuaucccuaaugauaagcccuuccagaacgugaauagaaucacguacggcgcuuguccucgguaugugaagcacagcacccucaaacuggccacagggaugcgcaacguccccgagaagcagaccagaggaauuuuuggcgcgaucgccggguucauugaaaauggaugggagggcaugguugacgggugguacggauuucggcaccaaaacuccgagggcagaggccaggcugccgaucuuaaaagcacacaggcugccaucgaccaaauuaaugggaagcugaaccgccucaucggaaaaaccaaugaaaaguuccaucagauugagaaagaguucucugaaguggaaggccggauccaggaucuggagaaguauguggaggacacgaagaucgaucuuugguccuacaacgccgaacugcucgucgcucuggagaaucagcacacaauugaccugaccgauagcgaaaugaacaaacucuuugagaagaccaaaaagcaacugagagaaaacgcggaggacauggggaauggaugcuucaaaaucuaucauaagugugauaacgccugcauuggcucuauccgcaaugggacauacgaccacaacguguaccgggacgaggcucuuaauaacagauuucagauuaagggcguugaacugaaauccggauauaaggauuggauccucuggaucagcuucgccauuuccugcuuucugcuuuguguggcccugcucggcuucaucaugugggcuugccagaaagggaauauucgcuguaacaucugcauuuga

SEQ ID NO: 205598 - RNA, 1701 nt, Artificial Sequence; identical to SEQ ID NO: 204513
  derived and/or modified CDS sequence (opt5) from hemagglutinin__InfluenzaA__ALE32041

SEQ ID NO: 205599 - RNA, 1701 nt, Artificial Sequence; identical to SEQ ID NO: 204513
  derived and/or modified CDS sequence (opt5) from hemagglutinin__InfluenzaA__ALE32042

SEQ ID NO: 205600 - RNA, 1701 nt, Artificial Sequence
  derived and/or modified CDS sequence (opt5) from hemagglutinin__InfluenzaA__ALE32043
augaagaccaucauugcccugagcuacauccucugccugguguucgcucagaaaauucccggcaacgacaauuccacagccacgcuuugucuggggcaccaugcggucccuaacggaaccaucguuaagacaauuaccaaugauagaaucgaggugacaaacgcuaccgaacucgugcaaaauucuagcaucggcgagauuugcgacuccccgcaccagauccuggauggggaaaacuguacacuuauugacgcccugcucggagauccccagugcgacggcuuucagaauaaaaagugggaucuguucgucgagcggucuaaagccuauagcaacuguuacccuuaugacgugcccgauuacaccucccugcgcucucucguugcuagcuccgggacgcuggaauuuaauaacgagagcuucaauuggaccggagugacacaaaacggcaccucuuccgccugcaucagacggagcagcuccagcuuuuucucucgccuuaauuggcugacacaucucaacuauaccuacccugcucugaaugucacgaugcccaacaacgagcaguuugacaaacuuuauauuuggggcgugcaccauccugggacagauaaggaccagaucuuccuguacgcccaguccagcggaagaauuaccguuuccacaaagcggucucaacaggcggugaucccgaauaucggcagccgcccccggauuagagauaucccuucccgcauuagcaucuacuggaccauugucaagcccggggacauccuccugaucaacucuaccggaaaucugauugccccuagaggcuauuuuaaaauccgguccgggaagucuucuauuaugcgcagcgacgcucccaucggaaaauguaaguccgaaugcauuacaccgaacggcucuaucccuaaugauaagcccuuccagaacgugaauagaaucacguacggcgccuguccucgguaugugaaacacagcacccucaagcuggcuacagggaugcgcaacguccccgagaaacagaccagaggaauuuuuggcgccaucgcgggguucauugaaaauggaugggagggcaugguugacgggugguacggauuucggcaccaaaacuccgagggcagaggccaggccgcugaucuuaagagcacacaggccgcuaucgaccaaauuaaugggaaacugaaccgccucaucggaaagaccaaugaaaaauuccaucagauugagaaggaguucucugaaguggaaggccggauccaggaucuggagaaguauguggaggacacgaaaaucgaucuuugguccuacaacgccgaacugcucgucgcccuggagaaucagcacacaauugaccugaccgauagcgaaaugaacaagcucuuugagaaaaccaagaaacaacugagagaaaacgcugaggacauggggaauggaugcuucaagaucuaucauaagugugauaacgcgugcauuggcucuauccgcaaugggacauacgaccacaacguguaccgggacgaggcccuuaauaacagauuucagauuaaaggcguugaacugaaguccggauauaaagauuggauccucuggaucagcuucgcuauuuccugcuuucugcuuuguguggcccugcucggcuucaucaugugggccugccagaaggggaauauucgcuguaacaucugcauuuga

SEQ ID NO: 205601 - RNA, 1701 nt, Artificial Sequence; identical to SEQ ID NO: 204513
  derived and/or modified CDS sequence (opt5) from hemagglutinin__InfluenzaA__ALE32044

SEQ ID NO: 205602 - RNA, 1701 nt, Artificial Sequence; identical to SEQ ID NO: 204513
  derived and/or modified CDS sequence (opt5) from hemagglutinin__InfluenzaA__ALE32045

SEQ ID NO: 205603 - RNA, 1701 nt, Artificial Sequence; identical to SEQ ID NO: 204513
  derived and/or modified CDS sequence (opt5) from hemagglutinin__InfluenzaA__ALE32046

SEQ ID NO: 205604 - RNA, 1701 nt, Artificial Sequence
  derived and/or modified CDS sequence (opt5) from hemagglutinin__InfluenzaA__ALE32047
augaagaccaucauugcccugagcuacauccucugccugguguucgcucagaaaauucccggcaacgacaauuccacagccacgcuuugucuggggcaccaugcggucccuaacggaaccaucguuaagacaauuaccaaugauagaaucgaggugacaaacgcuaccgaacucgugcaaaauucuagcaucggcgagauuugcgacuccccgcaccagguccuggauggggaaaacuguacacuuaucgacgcccugcucggagauccccagugcgacggcuuucagaauaaaaagugggaucuguucguggagcggucuaaagccuauagcaacuguuacccuuaugacguucccgauuacgcuucccugcgcucucucguggccagcuccgggacccuggaauuuaauaacgagagcuucaauuggacgggagucacccaaaacggcacaucuuccgcuugcauuagacggagcagcuccagcuuuuucucucgccuuaauuggcugacccaucucaacuauacauacccugcccugaaugugaccaugcccaacaacgagcaguuugacaagcuguauaucuggggcguucaccauccugggacggauaaggaccagauuuuccuguacgcgcaguccagcggaagaaucacaguguccaccaaacggucucaacaggccgucauuccgaauaucggcagccgccccagaauccgggauauuccuucccgcaucagcauuuacuggacaaucgugaagcccggggacauucuccugaucaacucuaccggaaaucugaucgcuccuagaggcuauuuuaaaauucgguccgggaagucuucuaucaugauuagcgacgcccccaucggaaaauguaaguccgaaugcauuaccccgaacggcucuaucccuagcgauaagcccuuccagaaugugaaccgcaucacauacggcgcuuguccuagauaugucaaacacuccacgcucaagcuggccaccgggaugcggaauguucccgagaaacagacacgcggaauuuuuggcgcgaucgccggguucauugaaaacggaugggagggcaugguggacgggugguacggauuuagacaccaaaauagcgagggccggggccaggcugccgaucuuaagucuacccaggcugccaucgaccaaauuaacgggaaacugaauagacucaucggaaagacaaacgaaaaauuccaucagauugagaaggaguucuccgaaguggaaggccgcauccaggaucuggagaaguaugucgaggacaccaaaaucgaucuuuggagcuacaaugccgaacugcucguggcucuggagaaccagcacacgauugaccugacagauucugaaaugaauaagcucuuugagaaaaccaagaaacaacugcgggaaaacgcggaggacauggggaacggaugcuucaagaucuaucauaagugugauaaugccugcauuggcuccaucagaaacgggaccuacgaccacaauguuuaccgcgacgaggcucuuaacaaucgguuucagauuaaaggcguggaacuuaagagcggauauaaagauuggauccucuggaucuccuucgccauuucuugcuuucugcuuugugucgcccugcucggcuucaucaugugggcuugccagaaggggaacauuagauguaauaucugcauuuga

SEQ ID NO: 205605 - RNA, 1701 nt, Artificial Sequence; identical to SEQ ID NO: 204513
  derived and/or modified CDS sequence (opt5) from hemagglutinin__InfluenzaA__ALE32048

SEQ ID NO: 205606 - RNA, 1701 nt, Artificial Sequence; identical to SEQ ID NO: 205171
  derived and/or modified CDS sequence (opt5) from hemagglutinin__InfluenzaA__ALE32049

SEQ ID NO: 205607 - RNA, 1701 nt, Artificial Sequence
  derived and/or modified CDS sequence (opt5) from hemagglutinin__InfluenzaA__ALE32050
augaagaccaucauugcccugagcuacauccucugccugguguucgcucagaaaauucccggcaacgacaauuccacagccacgcuuugucuggggcaccaugcggucccuaacggaaccaucguuaagacaauuaccaaugauagaaucgaggugacaaacgcuaccgaacucgugcaaaauucuagcaucggcgagauuugcgacuccccgcaccagauccuggauggggaaaacuguacacuuauugacgcccugcucggagauccccagugcgacggcuuucagaauaaaaagugggaucuguucgucgagcggucuaaagccuauagcaacuguuacccuuaugacgugcccgauuacgcuucccugcgcucucucguugccagcuccgggacccuggaauuuaauaacgagagcuucaauuggacgggagugacccaagacggcacaucuuccgcuugcaucagacggagcagcuccagcuuuuucucucgccuuaacuggcugacccaucucaauuauacauacccugcccugaacgucaccaugcccaauaacgagcaguuugauaaacuuuauauuuggggcgugcaccauccugggacggacaaggaucagaucuuccuguacgcgcaguccagcggaagaauuacaguuuccaccaagcggucucaacaggccgugaucccgaacaucggcagccgcccccggauuagagacaucccuucccgcauuagcaucuacuggacaauugucaagcccggggacauccuccugaucaauucuaccggaaaccugauugcuccuagaggcuauuuuaaaauccgguccgggaagucuucuauuaugcgcagcgaugcccccaucggaaaauguaaguccgaaugcauuaccccgaauggcucuaucccuaacgacaagcccuuccagaaugugaacagaaucacauacggcgcuuguccucgguaugugaaacacagcacgcucaagcuggccaccgggaugcgcaauguccccgagaaacagacaagaggaauuuuuggcgcgaucgccggguucauugaaaacggaugggagggcaugguugaugggugguacggauuucggcaccaaaauuccgagggcagaggccaggcugccgaccuuaagagcacccaggcugccaucgaucaaauuaacgggaaacugaaucgccucaucggaaagacaaacgaaaaauuccaucagauugagaaggaguucucugaaguggaaggccggauccaggaccuggagaaguauguggaggauaccaaaaucgaccuuugguccuacaaugccgaacugcucgucgcucuggagaaccagcacacgauugaucugacagacagcgaaaugaauaagcucuuugagaaaaccaagaaacaacugagagaaaacgcggaggauauggggaacggaugcuucaagaucuaucauaagugugacaaugccugcauuggcucuauccgcaacgggaccuacgaccacaauguguaccgggaugaggcucuuaacaauagauuucagauuaaaggcguugaacugaaguccggauauaaagacuggauccucuggaucagcuucgccauuuccugcuuucugcuuuguguggcccugcucggcuucaucaugugggcuugccagaaggggaacauucgcuguaauaucugcauuuga

SEQ ID NO: 205608 - RNA, 1701 nt, Artificial Sequence
  derived and/or modified CDS sequence (opt5) from hemagglutinin__InfluenzaA__ALE32051
augaagaccaucauugcccugagcuacauccucugccugguguucgcucagaaaauucccggcaacgacaauuccacagccacgcuuugucuggggcaccaugcggucccuaacggaaccaucguuaagacaauuaccaaugauagaaucgaggugacaaacgcuaccgaacucgugcaaaauucuagcaucggcgagauuugcgacuccccgcaccagauccuggauggggaaaacuguacacuuauugacgcccugcucggagauccccagugcgacggcuuucagaauaaaaagugggaucuguucgucgagcggucuaaagccuauagcaacuguuacccuuaugacgugcccgauuacgcuucccugcgcucucucguugccagcuccgggacccuggaauuuaauaacgagagcuucaauuggacgggagugacccaaaacggcacaucuuccgcuugcaucagacggagcagcuccagcuuuuucucucgccuuaauuggcugacccaucucaacuauacauacccugcccugaaugucaccaugcccaacaacgagcaguuugacaaacuuuauauuuggggcgugcaccauccugggacggauaaggaccagaucuuccuguacgcgcaguccagcggaagaauuacaguuuccaccaagcggucucaacaggccgugaucccgaauaucggcagccgcccccggauuagagauaucccuucccgcauuagcaucuacuggacaauugucaagcccggggacauccuccugaucaacucuaccggaaaucugauugcuccuagaggcuauuuuaaaauccgguccgggaagucuucuauuaugcgcagcgacgcccccaucggaaaauguaaguccgaaugcauuaccccgaacggcucuaucccuaaugauaagcccuuccagaacgugaauagagugacauacggcgcuuguccucgguaugucaaacacagcacgcucaagcuggccaccgggaugcgcaacguucccgagaaacagacaagaggaaucuuuggcgcgauugccggguucaucgaaaauggaugggagggcaugguggacgggugguacggauuucggcaccaaaacuccgagggcagaggccaggcugccgaucuuaagagcacccaggcugccauugaccaaaucaaugggaaacugaaccgccucauuggaaagacaaaugaaaaauuccaucagaucgagaaggaguucucugaaguggaaggccggauucaggaucuggagaaguaugucgaggacaccaaaaucgaucuuugguccuacaacgccgaacugcucguggcucuggagaaucagcacacgaucgaccugacagauagcgaaaugaacaagcucuuugagaaaaccaagaaacaacugagagaaaacgcggaggacauggggaauggaugcuucaagauuuaucauaagugugauaacgccugcaucggcucuauucgcaaugggaccuacgaccacaacguuuaccgggacgaggcucuuaucaauagauuucagauuaaaggcguggaacugaaguccggauauaaagauuggauccucuggaucagcuucgccauuuccugcuuucugcuuugugucgcccugcucggcuucaucaugugggcuugccagaaggggaacauucgcuguaauaucugcauuuga

SEQ ID NO: 205609 - RNA, 1701 nt, Artificial Sequence; identical to SEQ ID NO: 204513
  derived and/or modified CDS sequence (opt5) from hemagglutinin__InfluenzaA__ALE32052

SEQ ID NO: 205610 - RNA, 1701 nt, Artificial Sequence; identical to SEQ ID NO: 204513
  derived and/or modified CDS sequence (opt5) from hemagglutinin__InfluenzaA__ALE32053

SEQ ID NO: 205611 - RNA, 1701 nt, Artificial Sequence
  derived and/or modified CDS sequence (opt5) from hemagglutinin__InfluenzaA__ALE32054
augaagaccaucauugcccugagcuacauccucugccugguguucgcucagaaaauucccggcaacgacaauuccacagccacgcuuugucuggggcaccaugcggucccuaacggaaccaucguuaagacaauuaccaaugauagaaucgaggugacaaacgcuaccgaacucgugcaaaauucuagcaucggcgagauuugcgaauccccgcaccagauccuggacggggagaacuguacacuuauugaugcccugcucggagacccccagugcgauggcuuucagaauaaaaagugggaccuguucgucgaacggucuaaagccuauagcaacuguuacccuuaugaugugcccgacuacgcuucccugcgcucucucguugccagcuccgggacccuggaguuuaauaacgagagcuucaauuggacgggagugacccaaaacggcacaucuuccgcuugcaucagacggucuagcuccagcuuuuucucucgccuuaauuggcugacccaucucaacuauacauacccugcccugaaugucaccaugcccaacaacgaacaguuugauaaacuuuauauuuggggcgugcaccauccugggacggacaaggaucagaucuuccuguacgcgcaguccagcggaagaauuacaguuuccaccaaaggcucucaacaggccgugaucccgaauaucgggagccggccccgcauuagagacaucccuucccggauuagcaucuacuggacaauugucaagcccggagauauccuccugaucaacucuaccggcaaucugauugcuccucgcggguauuuuaaaaucagauccggaaagagcucuauuaugcggagcgacgcccccaucggcaaauguaaguccgagugcauuaccccgaacggcucuaucccuaaugacaagcccuuccagaacgugaaucgcaucacauacggggcuuguccuagauaugugaaacacagcacgcucaagcuggccaccggaaugcggaacguccccgaaaaacagacacgcggcauuuuuggggcgaucgccggauucauugagaauggcugggaggggaugguugauggaugguacggcuuuagacaccaaaacuccgaaggccgggggcaggcugccgaccuuaagagcacccaggcugccaucgaucaaauuaauggaaaacugaacagacucaucggcaagacaaaugagaaauuccaucagauugaaaaggaguucucugaaguggaggggcgcauccaggaccuggagaaguauguggaagauaccaaaaucgaccuuugguccuacaacgccgagcugcucgucgcucuggaaaaucagcacacgauugaucugacagacagcgagaugaacaagcucuuugaaaagaccaagaaacaacugcgggagaacgcggaggauaugggaaauggcugcuucaagaucuaucauaagugugacaacgccugcauugggucuaucagaaauggcaccuacgaucacaacguguaccgcgacgaagcucuuaauaaccgguuucagauuaaaggaguugagcugaaguccggcuauaaagacuggauccucuggaucagcuucgccauuuccugcuuucugcuuuguguggcccugcucggguucaucaugugggcuugccagaagggaaauauuagauguaaccacugcaucuga

SEQ ID NO: 205612 - RNA, 1701 nt, Artificial Sequence
  derived and/or modified CDS sequence (opt5) from hemagglutinin__InfluenzaA__ALE32055
augaagaccaucauugcccugagcuacauccucugccugguguucgcucagaaaauucccggcaacgacaauuccacagccacgcuuugucuggggcaccaugcggucccuaacggaaccaucguuaagacaauuaccaaugauagaaucgaggugacaaacgcuaccgaacucgugcaaaauucuagcaucggcgagauuugcgacuccccgcaccagauccuggauggggaaaacuguacacuuauugacgcccugcucggagauccccagugcgacggcuuucagaauaaaaagugggaucuguucgucgagcggucuaaagccuauagcaacuguuacccuuaugacgugcccgauuacgcuucccugcgcucucucguugccagcuccgggacccuggaauuuaauaacgagagcuucaauuggacgggagugacccaaaacggcacaucuuccgcuugcaucagacggucuagcuccagcuuuuucucucgccuuaauuggcugacccaucucaacuauaaguacccugcccugaaugucacaaugcccaacaacgagcaguuugacaaacuuuauauuuggggcgugcaccauccugggaccgauaaagaccagaucuuccuguacgcgcaguccagcggaagaauuacgguuuccacaaagcggucucaacaggccgugaucccgaauaucggcagccgcccccggauuagagauaucccuucccgcauuagcaucuacuggaccauugucaaacccggggacauccuccugaucaacucuacaggaaaucugauugcuccuagaggcuauuuuaagauccgguccgggaaaagcucuauuaugcgcagcgacgcccccaucggaaaguguaaguccgaaugcauuaccccgaacggcucuaucccuaaugauaaacccuuccagaacgugaauagaaucaccuacggcgcuuguccucgguaugugaagcacagcacacucaaacuggccacggggaugcgcaacguccccgagaagcagaccagaggaauuuuuggcgcgaucgccggguucauugaaaauggaugggagggcaugguugacgggugguacggauuucggcaccaaaacuccgagggcagaggccaggcugccgaucuuaaaagcacacaggcugccaucgaccaaauuaaugggaagcugaaccgccucaucggaaaaaccaaugaaaaguuccaucagauugagaaggaguucucugaaguggaaggccggauccaggaucuggagaaauauguggaggacacaaagaucgaucuuugguccuacaacgccgaacugcucgucgcucuggagaaucagcacaccauugaccugacggauagcgaaaugaacaaacucuuugagaagacaaagaagcaacugagagaaaacgcggaggacauggggaauggaugcuucaagaucuaucauaaaugugauaacgccugcauuggcucuauccgcaaugggaccuacgaccacaacguguaccgggacgaggcucuuaauaacagauuucagauuaagggcguugaacugaaauccggauauaaggauuggauccucuggaucagcuucgccauuuccugcuuucugcuuuguguggcccugcucggcuucaucaugugggcuugccagaaugggaacauucgcuguaauaucugcauuuga

SEQ ID NO: 205613 - RNA, 1701 nt, Artificial Sequence; identical to SEQ ID NO: 205164
  derived and/or modified CDS sequence (opt5) from hemagglutinin__InfluenzaA__ALE32056

SEQ ID NO: 205614 - RNA, 1701 nt, Artificial Sequence
  derived and/or modified CDS sequence (opt5) from hemagglutinin__InfluenzaA__ALE32057
augaagaccaucauugcccugagcuacgugcucugccuggucuucgcucagaaaauccccggcaacgacaauuccacagccacgcuuugucuggggcaccaugcgguuccuaacggaaccauugugaagacaaucaccaaugauagaauugaggugacaaacgcuaccgaacucguccaaaauucuagcaucggcgagaucugcgacuccccgcaccagauucuggauggggaaaacuguacacuuaucgacgcccugcucggagauccccagugcgacggcuuucagaauaaaaagugggaucuguucguggagcggucuaaagccuauagcaacuguuacccuuaugacguucccgauuacgcuucccugcgcucucucguggccagcuccgggacccuggaauuuaauaacgagagcuucaauuggacgggagucacccaaaacggcacaucuuccgcuugcauuagacggagcagcuccagcuuuuucucucgccuuaauuggcugacccaucucaacuauacauacccugcccugaaugugaccaugcccaacaacgagcaguuugacaaacuuuauaucuggggcguucaccauccugggacggauaaggaccagauuuuccuguacgcgcaguccagcggaagaaucacaguguccaccaagcggucucaacaggccgucauuccgaauaucggcagccgccccagaauccgggauauuccuucccgcaucagcauuuacuggacaaucgugaagcccggggacauucuccugaucaacucuaccggaaaucugaucgcuccuagaggcuauuuuaaaauucgguccgggaagucuucuaucaugcgcagcgacgcccccauuggaaaauguaaguccgaaugcaucaccccgaacggcucuauuccuaaugauaagcccuuccagaacgugaauagaaucacauacggcgcuuguccucgguaugucaaacacagcacgcucaagcuggccaccgggaugcgcaacguucccgagaaacagacaagaggaaucuuuggcgcgauugccggguucaucgaaaauggaugggagggcaugguggacgggugguacggauuucggcaccaaaacuccgagggcagaggccaggcugccgaucuuaagagcacccaggcugccauugaccaaaucaaugggaaacugaaccgccucauuggaaagacaaaugaaaaauuccaucagaucgagaaggaguucucugaaguggaaggccggauucaggaucuggagaaguaugucgaggacaccaaaaucgaucuuugguccuacaacgccgaacugcucguggcucuggagaaucagcacacgaucgaccugacagauagcgaaaugaacaagcucuuugagaaaaccaagaaacaacugagagaaaacgcggaggacauggggaauggaugcuucaagauuuaucauaagugugauaacgccugcaucggcucuauucgcaaugggaccuacgaccacaacguuuaccgggacgaggcucuuaauaacagauuucagaucaaaggcguggaacugaaguccggauauaaagauuggauucucuggaucagcuucgccaucuccugcuuucugcuuugugucgcccugcucggcuucauuaugugggcuugccagaaggggaauauccgcuguaacauuugcaucuga

SEQ ID NO: 205615 - RNA, 1701 nt, Artificial Sequence; identical to SEQ ID NO: 204513
  derived and/or modified CDS sequence (opt5) from hemagglutinin__InfluenzaA__ALE32058

SEQ ID NO: 205616 - RNA, 1701 nt, Artificial Sequence; identical to SEQ ID NO: 204513
  derived and/or modified CDS sequence (opt5) from hemagglutinin__InfluenzaA__ALE32059

SEQ ID NO: 205617 - RNA, 1701 nt, Artificial Sequence
  derived and/or modified CDS sequence (opt5) from hemagglutinin__InfluenzaA__ALE32060
augaagaccaucauugcccugagcuacauccucugccugguguucgcucagaaaauucccggcaacgacaauuccacagccacgcuuugucuggggcaccaugcggucccuaacggaaccaucguuaagacaauuaccaaugauagaaucgaggugacaaacgcuaccgaacucgugcaaaauucuagcaucggcgagauuugcgacuccccgcaccagauccuggauggggaaaacuguacacuuauugacgcccugcucggagauccccagugcgacggcuuucagaauaaaaagugggaucuguucgucgagcggucuaaagccuauagcaacuguuacccuuaugacgugcccgauuacgcuucccugcgcucucucguugccagcuccgggacccuggaauuuaauaacgagagcuucaauuggacgggagugacccaaaacggcacaucuuccgcuugcaucagacggagcagcuccagcuuuuucucucgccuuaauuggcugacccaucucaacuauacauacccugcccugaaugucaccaugcccaacaacgagcaguuugacaaacuuuauauuuggggcgugcaccauccugggacggauaaggaccagguuuuccuguacgcgcaguccagcggaagaaucacaguguccaccaagcggucucaacaggccgucauuccgaauaucggcagccgccccagaauccgggauauuccuucccgcaucagcauuuacuggacaaucgugaagcccggggacauucuccugauccacucuaccggaaaccugaucgcuccuagaggcuauuuuaaaauucgguccgggaagucuucuaucaugcgcagcgacgcccccauuggaaaauguaaguccgaaugcaucaccccgaauggcucuauuccuaacgauaagcccuuccagaaugugaacagaaucacauacggcgcuuguccucgguaugucaaacacagcacgcucaagcuggccaccgggaugcgcaauguucccgagaaacagacaagaggaaucuuuggcgcgauugccggguucaucgaaaacggaugggagggcaugguggacgggugguacggauuucggcaucaaaauuccgagggcagaggccaggcugccgaucuuaagagcacccaggcugccauugaccaaaucaacgggaaacugaaucgccucauuggaaagacaaacgaaaaauuccaccagaucgagaaggaguucucugaaguggaaggccggauucaggaucuggagaaguaugucgaggacaccaaaaucgaucuuugguccuacaaugccgaacugcucguggcucuggagaaccagcauacgaucgaccugacagauagcgaaaugaauaagcucuuugagaaaaccaagaaacaacugagagaaaacgcggaggacauggggaacggaugcuucaagauuuaucacaagugugauaaugccugcaucggcucuauucgcaacgggaccuacgaccacaauguuuaccgggacgaggcucuuaacaauagauuucagaucaaaggcguggaacugaaguccggauauaaagauuggauucucuggaucagcuucgccaucuccugcuuucugcuuugugucgcccugcucggcuucauuaugugggcuugccagaaggggaacauccgcuguaauauuugcaucuga

SEQ ID NO: 205618 - RNA, 1701 nt, Artificial Sequence
  derived and/or modified CDS sequence (opt5) from hemagglutinin__InfluenzaA__ALE32061
augaagaccaucauugcccugagcuacauccucugccugguguucgcucagaaaauucccggcaacgacaauuccacagccacgcuuugucuggggcaccaugcggucccuaacggaaccaucguuaagacaauuaccaaugauagaaucgaggugacaaacgcuaccgaacucgugcaaaauucuagcaucggcgagauuugcgacuccccgcaccagauccuggauggggaaaacuguacacuuauugacgcccugcucggagauccccagugcgacggcuuucagaauaaaaagugggaucuguucgucgagcggucuaaagccuauagcaacuguuacccuuaugacgugcccgauuacgcuucccugcgcucucucguugccagcuccgggacccuggaauuuaauaacgagagcuucaauuggacgggagugacccaaaacggcacaucuuccgcuugcaucagacggucuagcuccagcuuuuucucucgccuuaauuggcugacccaucucaaguauacauacccugcccugaacgucaccaugcccaauaacgagcaguuugacaaacuuuauauuuggggcgugcaccauccugggacggauaacgaccagaucuuccuguacgcgagauccagcggacggauuacaguuuccaccaagggcucucagcaagccgugaucccgaauaucgggagccgcccccggauuagagauaucccuucccgcauuagcaucuacuggacaauugucaagcccggagacauccuccugaucaacucuaccggcaaucugauugcuccuagaggguauuuuaaaauccgguccggaaagagcucuauuaugcgcagcgacgcccccaucggcaaauguaaguccgaaugcauuaccccgaacggcucuaucccuaaugauaagcccuuccagaacgugaauagaaucacauacggggcuuguccucgguaugugaaacacagcacgcucaagcuggccaccggaaugcgcaacguccccgagaaacagacaagaggcauuuuuggggcgaucgccggauucauugaaaauggcugggaggggaugguugacggaugguacggcuuucggcaccagaacuccgagggcagagggcaagcugccgaucuuaagagcacccaggcugccaucgaccagauuaauggaaaacugaaccgccucaucggcaagacaaaugaaaaauuccaucaaauugagaaggaguucucugaaguggaagggcggauccaggaucuggagaaguauguggaggacaccaaaaucgaucuuugguccuacaacgccgaacugcucgucgcucuggagaaucagcacacgauugaccugacagauagcgaaaugaacaagcucuuugagaaaaccaagaaacagcugagagaaaacgcggaggacaugggaaauggcugcuucaagaucuaucauaagugugauaacgccugcauugggucuauccgcaauggcaccuacgaccacaacguguaccgggacgaggcucuuaauaacagauuucaaauuaaaggaguugaacugaaguccggcuauaaagauuggauccucuggaucagcuucgccauuuccugcuuucugcuuuguguggcccugcucggguucaucaugugggcuugccagaagggaaauauucgcuguaacaucugcauuuga

SEQ ID NO: 205619 - RNA, 1701 nt, Artificial Sequence
  derived and/or modified CDS sequence (opt5) from hemagglutinin__InfluenzaA__ALE32062
augaagaccaucauugcccugagcuacauccucugccugguguucgcucagaaaauucccggcaacgacaauuccacagccacgcuuugucuggggcaccaugcggucccuaacggaaccaucguuaagacaauuaccaaugauagaaucgaggugacaaacgcuaccgaacucgugcaaaauucuagcaucggcgagauuugcgacuccccgcaccagauccuggauggggaaaacuguacacuuauugacgcccugcucggagauccccagugcgacggcuuucagaauaaaaagugggaucuguucgucgagcggucuaaagccuauagcaacuguuacccuuaugacgugcccgauuacgcuucccugcgcucucucguugccagcuccgggacccuggaauuuaauaacgagagcuucaauuggacgggagugacccaaaacggcacaucuuccgcuugcaucagacggagcagcuccagcuuuuucucucgccuuaauuggcugacccaucucaacuauacauacccugcccugaaugucaccaugcccaacaacgagcaguuugacaaacuuuauauuuggggcgugcaccauccugggacggauaaggaccagaucuuccuguacgcgcaguccagcggaagaauuacaguuuccaccaagcggucucaacaggccgugaucccgaauaucggcagccgcccccggauuagagauaucccuucccgcauuagcaucuacuggacaauugucaagcccggggacauccuccugaucuauucuaccggaaaccugauugcuccuagaggcuacuuuaaaauccgguccgggaagucuucuauuaugcgcagcgacgcccccaucggaaaauguaaguccgaaugcauuaccccgaauggcucuaucccuaacgauaagcccuuccagaaugugaacagaaucacauauggcgcuuguccucgguacgugaaacacagcacgcucaagcuggccaccgggaugcgcaauguccccgagaaacagacaagaggaauuuuuggcgcgaucgccggguucauugaaaacggaugggagggcaugguugacgggugguauggauuucggcaccaaaauuccgagggcagaggccaggcugccgaucuuaagagcacccaggcugccaucgaccaaauuaacgggaaacugaaucgccucaucggaaagacaaacgaaaaauuccaucagauugagaaggaguucucugaaguggaaggccggauccaggaucuggagaaguacguggaggacaccaaaaucgaucuuugguccuauaaugccgaacugcucgucgcucuggagaaccagcacacgauugaccugacagauagcgaaaugaauaagcucuuugagaaaaccaagaaacaacugagagaaaacgcggaggacauggggaacggaugcuucaagaucuaccauaagugugauaaugccugcauuggcucuauccgcaacgggaccuacgaccacaauguguaucgggacgaggcucuuaacaauagauuucagauuaaaggcguugaacugaaguccggauacaaagauuggauccucuggaucagcuucgccauuuccugcuuucugcuuuguguggcccugcucggcuucaucaugugggcuugccagaaggggaacauucgcuguaauaucugcauuuga

SEQ ID NO: 205620 - RNA, 1701 nt, Artificial Sequence; identical to SEQ ID NO: 204513
  derived and/or modified CDS sequence (opt5) from hemagglutinin__InfluenzaA__ALE32063

SEQ ID NO: 205621 - RNA, 1701 nt, Artificial Sequence
  derived and/or modified CDS sequence (opt5) from hemagglutinin__InfluenzaA__ALE32064
augaagaccaucauugcccugagcuacauccucugccugguguucgcucagaaaauucccggcaacgacaauuccacagccacgcuuugucuggggcaccaugcggucccuaacggaaccaucguuaagacaauuaccaaugauagaaucgaggugacaaacgcuaccgaacucgugcaaaauucuagcaucggcgagauuugcgacuccccgcaccagauccuggauggggaaaacuguacacuuauugacgcccugcucggagauccccagugcgacggcuuucagaauaaaaagugggaucuguucgucgagcggucuaaagccuauagcaacuguuacccuuaugacgugcccgauuacgcuucccugcgcucucucguugccagcuccgggacccuggaauuuaauaacgagagcuucaauuggacgggagugacccaaaacggcacaucuuccgcuugcaucagacggagcucuaauuccuuuuucagccgccuuaacuggcugacccaucucaauuauacauacccugcccugaacgucaccaugcccaacaaugagcaguuugacaaacuuuauauuuggggcgugcaccauccugggacggauaaggaccagaucuuccuguacgcgcagucuuccggaagaauuacaguuagcaccaagcggucccaacaggccgugaucccgaacaucggcucucgcccccggauuagagauaucccuagccgcauuuccaucuacuggacaauugucaagcccggggacauccuccugaucaauagcaccggaaaccugauugcuccuagaggcuauuuuaaaauccggucugggaaguccagcauuaugcgcucugacgcccccaucggaaaauguaagagcgaaugcauuaccccgaauggcuccaucccuaacgauaagcccuuccagaaugugaacagaaucacauacggcgcuuguccucgguaugugaaacacucuacgcucaagcuggccaccgggaugcgcaauguccccgagaaacagacaagaggaauuuuuggcgcgaucgccggguucauugaaaacggaugggagggcaugguugacgggugguacggauuucggcaccaaaauagcgagggcagaggccaggcugccgaucuuaaguccacccaggcugccaucgaccaaauuaacgggaaacugaaucgccucaucggaaagacaaacgaaaaauuccaucagauugagaaggaguucagcgaaguggaaggccggauccaggaucuggagaaguauguggaggacaccaaaaucgaucuuuggucuuacaaugccgaacugcucgucgcucuggagaaccagcacacgauugaccugacagauuccgaaaugaacaagcucuuugagaaaaccaagaaacaacugagagaaaaugcggaggacaucgggaacggaugcuucaagauuuaucauaagugugauaaugccugcaucggcagcauucgcaacgggaccuacgaccacaauguguaccgggacgaggcucuuaacaauagauuucagaucaaaggcguugaacugaagucuggauauaaagauuggauccucuggauuuccuucgccaucagcugcuuucugcuuuguguggcccugcucggcuucauuaugugggcuugccagaaggggaacauccgcuguaauauuugcaucuga

SEQ ID NO: 205622 - RNA, 1701 nt, Artificial Sequence; identical to SEQ ID NO: 204513
  derived and/or modified CDS sequence (opt5) from hemagglutinin__InfluenzaA__ALE32065

SEQ ID NO: 205623 - RNA, 1701 nt, Artificial Sequence
  derived and/or modified CDS sequence (opt5) from hemagglutinin__InfluenzaA__ALE32066
augaagaccaucauugcccugagcuacauccucugccugguguucgcucagaaaauucccggcaacgacaauuccacagccacgcuuugucuggggcaccaugcggucccuaacggaaccaucguuaagacaauuaccaaugauagaaucgaggugacaaacgcuaccgaacucgugcaaaauucuagcaucggcgagauuugcgacuccccgcaccagauccuggauggggaaaacuguacacuuauugacgcccugcucggagauccccagugcgacggcuuucagaauaaaaagugggaucuguucgucgagcggucuaaagccuauagcaacuguuacccuuaugacgugcccgauuacgcuucccugcgcucucucguugccagcuccgggacccuggaauuuaauaacgagagcuucaauuggacgggagugacccaaaacggcacaucuuccgcuugcaucagacggucuagcuccagcuuuuucucucgccuuaauuggcugacccaucucaacuauacauacccugcccugaaugucuccaugcccaacaacgagcaguuugacaagcuguauauuuggggcgugcaccauccugggaccgauaaggaccagaucuuccuguacgcgcagagcuccggaagaauuacgguuucuacaaaacggagccaacaggccgugaucccgaauaucggcucccgcccccggauuagagauaucccuagccgcauuucuaucuacuggaccauugucaagcccggggacauccuccugaucaacuccacaggaaaucugauugcuccuagaggcuauuuuaaaauccggagcgggaagucuagcauuaugcgcuccgacgcccccaucggaaaauguaagucugaaugcauuaccccgaacggcagcaucccuaaugauaagcccuuccagaacgugaauagaaucaccuacggcgcuuguccucgguaugugaaacacuccacacucaagcuggccacggggaugcgcaacguccccgagaaacagaccagaggaauuuuuggcgcgaucgccggguucauugaaaauggaugggagggcaugguugacgggugguacggauuucggcaccaaaacagcgagggcagaggccaggcugccgaucuuaagucuacacaggcugccaucgaccaaauuaaugggaaacugaaccgccucaucggaaagaccaaugaaaaauuccaucagauugagaaggaguucuccgaaguggaaggccggauccaggaucuggagaaguauguggaggacacaaaaaucgaucuuuggagcuacaacgccgaacugcucgucgcucuggagaaucagcacaccauugaccugacggauucugaaaugaacaagcucuuugagaaaacaaagaaacaacugagagaaaacgcggaggacauggggaauggaugcuucaagaucuaucauaagugugauaacgccugcauuggcuccauccgcaaugggaccuacgaccacaacguguaccgggacgaggcucuuaauaacagauuucagauuaaaggcguugaacuuaagagcggauauaaagauuggauccucuggaucuccuucgccauuucuugcuuucugcuuuguguggcccugcucggcuucaucaugugggcuugccagaaggggaauauucgcuguaacaucugcauuuga

SEQ ID NO: 205624 - RNA, 1701 nt, Artificial Sequence; identical to SEQ ID NO: 205295
  derived and/or modified CDS sequence (opt5) from hemagglutinin__InfluenzaA__ALE32067

SEQ ID NO: 205625 - RNA, 1701 nt, Artificial Sequence; identical to SEQ ID NO: 204513
  derived and/or modified CDS sequence (opt5) from hemagglutinin__InfluenzaA__ALE32068

SEQ ID NO: 205626 - RNA, 1701 nt, Artificial Sequence; identical to SEQ ID NO: 204513
  derived and/or modified CDS sequence (opt5) from hemagglutinin__InfluenzaA__ALE32069

SEQ ID NO: 205627 - RNA, 1701 nt, Artificial Sequence
  derived and/or modified CDS sequence (opt5) from hemagglutinin__InfluenzaA__ALE32070
augaagaccaucauugcccugagcuacauccucugccugguguucgcucagaaaauucccggcaacgacaauuccacagccacgcuuugucuggggcaccaugcggucccuaacggaaccaucguuaagacaauuaccaaugauagaaucgaggugacaaacgcuaccgaacucgugcaaaauucuagcaucggcgagauuugcgacuccccgcaccagauccuggauggggaaaacuguacacuuauugacgcccugcucggagauccccagugcgacggcuuucagaauaaaaagugggaucuguucgucgagcggucuaaagccuauagcaacuguuacccuuaugacgugcccgauuacgcuucccugcgcucucucguugccagcuccgggacccuggaauuuaauaacgagagcuucaauuggacgggagugacccaaaacggcacaucuuccgcuugcaucagacggagcagcuccagcuuuuucucucgccuuaauuggcugacccaucucaacuauacauacccugcccugaaugucaccaugcccaacaacgagcaguuugacaaacuuuauauuuggggcgugcaccauccugggacggauaaggaccagaucuuccuguacgcgcaguccagcggaagaauuacaguuuccaccaagcggucucaacaggccgugaucccgaauaucggcagccgcccccggauuagagauaucccuucccgcauuagcaucuacuggacaauugucaagcccggggacauccuccugaucaacucuaccggaaaucugauugcuccuagaggcuauuuuaaaauccgguccgggaagucuucuauuaugcgcagcgacgcccccaucggaaaauguaaguccgaaugcauuaccccgaacggcucuaucccuaaugauaagcccuuccagaacgugaauagaaucacauacggcguguguccucgguaugucaaacacagcacgcucaagcuggcuaccgggaugcgcaacguucccgagaaacagacaagaggaauuuuuggcgccaucgcgggguucauugaaaauggaugggagggcaugguggacgggugguacggauuucggcaccaaaacuccgagggcagaggccaggccgcugaucuuaagagcacccaggccgcuaucgaccaaauuaaugggaaacugaaccgccucaucggaaagacaaaugaaaaauuccaucagauugagaaggaguucucugaaguggaaggccggauccaggaucuggagaaguaugucgaggacaccaaaaucgaucuuugguccuacaacgccgaacugcucguggcccuggagaaucagcacacgauugaccugacagauagcgaaaugaacaagcucuuugagaaaaccaagaaacaacugagagaaaacgcugaggacauggggaauggaugcuucaagaucuaucauaagugugauaacgcgugcauuggcucuauccgcaaugggaccuacgaccacaacguuuaccgggacgaggcccuuaauaacagauuucagauuaaaggcguggaacugaaguccggauauaaagauuggauccucuggaucagcuucgcuauuuccugcuuucugcuuugugucgcccugcucggcuucaucaugugggccugccagaaggggaauauucgcuguaacaucugcauuuga

SEQ ID NO: 205628 - RNA, 1701 nt, Artificial Sequence; identical to SEQ ID NO: 204513
  derived and/or modified CDS sequence (opt5) from hemagglutinin__InfluenzaA__ALE32071

SEQ ID NO: 205629 - RNA, 1701 nt, Artificial Sequence; identical to SEQ ID NO: 205510
  derived and/or modified CDS sequence (opt5) from hemagglutinin__InfluenzaA__ALE32072

SEQ ID NO: 205630 - RNA, 1701 nt, Artificial Sequence
  derived and/or modified CDS sequence (opt5) from hemagglutinin__InfluenzaA__ALE32073
augaagaccaucauugcccugagcuacauccucugccugguguucgcucagaaaauucccggcaacgacaauuccacagccacgcuuugucuggggcaccaugcggucccuaacggaaccaucguuaagacaauuaccaaugauagaaucgaggugacaaacgcuaccgaacucgugcaaaauucuagcaucggcgagauuugcgacuccccgcaccagauccuggauggggaaaacuguacacuuauugacgcccugcucggagauccccagugcgacggcuuucagaauaaaaagugggaucuguucgucgagcggucuaaagccuauagcaacuguuacccuuaugacgugcccgauuacgcuucccugcgcucucucguugccagcuccgggacccuggaauuuaauaacgagagcuucaauuggacgggagugacccaaaacggcacaucuuccgcuugcaucagaaagucuagcuccagcuuuuucucucggcuuaauuggcugacccaucucaacuauacauacccugcccugaaugucaccaugcccaacaacgagcaguuugacaaacuuuauauuuggggcgugcaccauccugggacggauaaggaccagaucuuccuguacgcgcaguccagcggacgcauuacaguuuccaccaagagaucucaacaggccgugaucccgaauaucggcagccggccccgcauuagagauaucccuucccggauuagcaucuacuggacaauugucaaacccggggacauccuccugaucaacucuaccggaaaucugauugcuccucgcggcuauuuuaagauccucuccgggaaaagcucuauuaugagaagcgacgcccccaucggaaaguguaaguccgaaugcauuaccccgaacggcucuaucccuaaugauaaacccuuccagaacgugaaucggaucacauacggcgcuuguccucgcuaugugaagcacagcacgcugaaacuugccaccgggaugagaaacguccccgagaagcagacacggggaauuuuuggcgcgaucgccggguucauugaaaauggaugggagggcaugguugacgggugguacggauuucgccaccaaaacuccgagggcagaggccaggcugccgaucugaaaagcacccaggcugccaucgaccaaauuaaugggaagcucaaccggcugaucggaaaaacaaaugaaaaguuccaucagauugagaaggaguucucugaaguggaaggcagaauccaggaucuugagaaauauguggaggacaccaagaucgaucugugguccuacaacgccgaacuccuggucgcucuggagaaucagcacacgauugaccucacagauagcgaaaugaacaaacuguuugagaagaccaaaaagcaacuucgcgaaaacgcggaggacauggggaauggaugcuucaagaucuaucauaaaugugauaacgccugcauuggcucuauccggaaugggaccuacgaccacaacguguacagagacgaggcucugaauaaccgcuuucagauuaagggcguugaacucaaauccggauauaaggauuggauccuguggaucagcuucgccauuuccugcuuucuucuguguguggcccuccugggcuucaucaugugggcuugccagaaagggaauauucgguguaacaucugcauuuga

SEQ ID NO: 205631 - RNA, 1701 nt, Artificial Sequence
  derived and/or modified CDS sequence (opt5) from hemagglutinin__InfluenzaA__ALE32074
augaagaccaucauugcccugagcuacauccucugccugguguucgcucagaaaauucccggcaacgacaauuccacagccacgcuuugucuggggcaccaugcggucccuaacggaaccaucguuaagacaauuaccaaugauagaaucgaggugacaaacgcuaccgaacucgugcaaaauucuagcaucggcgagauuugcgacuccccgcaccagauccuggauggggaaaacuguacacuuauugacgcccugcucggagauccccagugcgacggcuuucagaauaaaaagugggaucuguucgucgagcggucuaaagccuauagcaacuguuacccuuaugacgugcccgauuacgcuucccugcgcucucucguugccagcuccgggacccuggaauuuaauaacgagagcuucaauuggacgggagugacccaaaacggcacaucuuccagcugcaucagacggucuuccagcucuuucuucucccgccuuaauuggcugacccaucucaacuauacauacccugcucugaaugucaccaugcccaacaacgagcaguuugacaaacuuuauauuuggggcgugcaccauccugggacggauaaggaccagaucuuccuguacgcccagagcuccggaagaauuacaguuucuaccaagcggagccaacaggcggugaucccgaauaucggcucccgcccccggauuagagauaucccuagccgcauuucuaucuacuggacaauugucaagcccggggacauccuccugaucaacuccaccggaaaucugauugccccuagaggcuauuuuaaaauccucagcgggaagucuagcauuaugcgguccgacgcucccaucggaaaauguaagucugaaugcauuaccccgaacggcagcaucccuaaugauaagcccuuccagaacgugaaucgcaucacauacggcgccuguccuagauaugugaaacacuccacgcugaaacuugcuaccgggaugcggaacguccccgagaagcagacacgcggaauuuuuggcgccaucgcgggguucauugaaaauggaugggagggcaugguugacgggugguacggauuuagacaccaaaacagcgagggccggggccaggccgcugaucugaagucuacccaggccgcuaucgaccaaauuaaugggaaacucaacagacugaucggaaagacaaaugaaaaauuccaucagauugagaaggaauuuuccgagguggaaggccgcauccaggaucuugagaaguauguggaggacaccaaaaucgaucuguggagcuacaacgccgaacuccuggucgcccuggagaaucagcacacgauugaccucacagauucugaaaugaacaagcuguuugagaaaaccaagaaacaacuucgggaaaacgcugaggacauggggaauggaugcuucaagaucuaucauaagugugauaacgcgugcauuggcuccaucagaaaugggaccuacgaccacaacguguaccgcgacgaggcccugaauaaccgguuucagauuaaaggcguugaacucaagagcggauauaaagauuggauccuguggaucuccuucgcuauuucuugcuuucuucuguguguggcccuccugggcuucaucaugugggccugccagaaggggaauauuagauguaacaucugcauuuga

SEQ ID NO: 205632 - RNA, 1701 nt, Artificial Sequence
  derived and/or modified CDS sequence (opt5) from hemagglutinin__InfluenzaA__ALE32075
augaagaccaucauugcccugagcuacauccucugccugguguucgcucagaaacuucccgagaacgacaauuccacagccacgcugugucucggccaccaugcggucccuaacgggaccauuguuaagacaaucaccucugauagaauugaagugacaaaugcuaccgagcuggugcaaaacagcuccaucggagaaaucugcgacucuccgcaccagauucuugauggcaaaaauuguacacugaucgacgcccuccugggggauccccagugcgacggauuucagaacaagaaaugggaucuguucgucgagcggagcaaggccuauuccaauuguuacccuuaugacgugcccgauuacgcuucucuccgcagccugguugccuccagcggcacccuugaauuuaacgacgagucuuucaauugggcuggggugacgcaaaacggaaccuccagcucuugcauuagaggcuccaauagcagcuuuuucucccggcugaacuggcucacacauagcaauuuuaaguauccugcccugaacgucaccaugcccaauaacgagcaguucgauaaacuuuacaucuggggcgugcaccauccugggacagacaaggaucagauuuuucuguaugcgcaguccucuggacgcaucaccguuagcacgaaaagaucccaacaggccgugauuccgaacaucggcagccggccccgcaucagaaauauuccuucucggaucuccauuuacuggacaaucgucaagcccggggacauucuccugaucaacagcaccggaaaucugaucgcuccucgcggcuacuucaaaauuagaucugggaagucuuccaucaugcggucugacgcccccauuggaaaguguaaaagcgaaugcaucacaccgaacggcuccauuccuaaugauaagcccuuucagaacgugaaucgcaucaccuauggcgcuuguccuagauacgugaaacagagcacccucaagcuggccacagggaugcggaacguccccgagaaacaaacgcgcggaaucuucggcgcgauugccggguuuaucgaaaauggaugggagggcaugaaggacgggugguauggauucagacaccagaacucugagggccggggccaggcugccgaucuuaaauccacccaagcugccauugaccagaucaaugggaagcugaacagacucauuggaaagacaaaugaaaaauuccaccagaucgagaaggaauuuagcgagguugaaggccgcauucaggaucuggagaaauacguggaggacaccaagaucgaucuuuggucuuauaacgccgaacugcucguggcucuggagaaucaacauacaaucgaccugaccgauuccgaaaugaacaaacucuucgagaagacgaagaaacagcugcgggaaaacgcggaggacauggggaauggaugcuuuaagauuuaccacaaaugugauaacgccugcaucggcagcauuagaaaugggacauaugaccaugacgucuaccgcgaugaggcucuuaacaaucgguuccagaucaagggcguggaacugaaauccggauacaaggacuggauucucuggaucucuuuugccaucagcugcuuccugcuuuguguugcccugcucggcuuuauuaugugggcuugccagaaggggaacaucagauguaauauuugcaucuga

SEQ ID NO: 205633 - RNA, 1701 nt, Artificial Sequence; identical to SEQ ID NO: 205070
  derived and/or modified CDS sequence (opt5) from hemagglutinin__InfluenzaA__ALE32076

SEQ ID NO: 205634 - RNA, 1701 nt, Artificial Sequence
  derived and/or modified CDS sequence (opt5) from hemagglutinin__InfluenzaA__ALE32077
augaagaccaucauugcccugagcuacauccucugccugguguucgcucagaaaauucccggcaacgacaauuccacagccacgcuuugucuggggcaccaugcggucccuaacggaaccaucguuaagacaauuaccaaugauagaaucgaggugacaaacgcuaccgaacucgugcaaaauucuagcaucggcgagauuugcgacuccccgcaccagauccuggauggggaaaacuguacacuuauugacgcccugcucggagauccccagugcgacggcuuucagaauaaaaagugggaucuguucgucgagcggucuaaagcccauagcaacuguuauccuuacgacgugcccgauuaugcuucccugcgcucucucguugccagcuccgggacccuggaauuuaauaacgagagcuucaauuggacgggagugacccaaaacggcacaucuuccgcuugcaucagacggucuagcuccagcuuuuucucucgccuuaauuggcugacccaccucaacuacacauauccugcccugaaugucaccaugcccaacaacgagcaguuugacaaacuuuacauuuggggcgugcaucacccugggacggauaaggaccagaucuuccuguaugcgagauccagcggacggauuacaguuuccaccaagggcucucagcaagccgugaucccgaauaucgggagccgcccccggauuagagauaucccuucccgcauuagcaucuacuggacaauugucaagcccggagacauccuccugaucaacucuaccggcaaucugauugcuccuagaggguacuuuaaaauccgguccggaaagagcucuauuaugcgcagcgacgcccccaucggcaaauguaaguccgaaugcauuaccccgaacggcucuaucccuaaugauaagcccuuccagaacgugaauagaaucacauauggggcuuguccucgguacgugaaacacagcacgcucaagcuggccaccggaaugcgcaacguccccgagaaacagacaagaggcauuuuuggggcgaucgccggauucauugaaaauggcugggaggggaugguugacggaugguauggcuuucggcaucagaacuccgagggcagagggcaagcugccgaucuuaagagcacccaggcugccaucgaccagauuaauggaaaacugaaccgccucaucggcaagacaaaugaaaaauuccaccaaauugagaaggaguucucugaaguggaagggcggauccaggaucuggagaaguacguggaggacaccaaaaucgaucuuugguccuauaacgccgaacugcucgucgcucuggagaaucagcauacgauugaccugacagauagcgaaaugaacaagcucuuugagaaaaccaagaaacagcugagagaaaacgcggaggacaugggaaauggcugcuucaagaucuaccacaagugugauaacgccugcauugggucuauccgcaauggcaccuaugaccacaacguguaccgggacgaggcucuuaauaacagauuucaaauuaaaggaguugaacugaaguccggcuacaaagauuggauccucuggaucagcuucgccauuuccugcuuucugcuuuguguggcccugcucggguucaucaugugggcuugccagaagggaaauauucgcuguaacaucugcauuuga

SEQ ID NO: 205635 - RNA, 1701 nt, Artificial Sequence; identical to SEQ ID NO: 205171
  derived and/or modified CDS sequence (opt5) from hemagglutinin__InfluenzaA__ALE32078

SEQ ID NO: 205636 - RNA, 1701 nt, Artificial Sequence; identical to SEQ ID NO: 205057
  derived and/or modified CDS sequence (opt5) from hemagglutinin__InfluenzaA__ALE32079

SEQ ID NO: 205637 - RNA, 1701 nt, Artificial Sequence
  derived and/or modified CDS sequence (opt5) from hemagglutinin__InfluenzaA__ALE32080
augaagaccaucauugcccugagcuacauccucugccugguguucgcucagaaaauucccggcaacgacaauuccacagccacgcuuugucuggggcaccaugcggucccuaacggaaccaucguuaagacaauuaccaaugauagaaucgaggugacaaacgcuaccgaacucgugcaaaauucuagcaucggcgagauuugcgacuccccgcaccagauccuggauggggaaaacuguacacuuauugacgcccugcucggagauccccagugcgacggcuuucagaauaaaaagugggaucuguucgucgagcggucuaaagccuauagcaacuguuacccuuaugacgugcccgauuacgcuucccugcgcucucucguugccagcuccgggacccuggaauuuaauaacgagagcuucaauuggacgggagugacccaaaacggcacaucuuccagcugcaucagacggucuuccagcucuuucuucucccgccuuaauuggcugacccaucucaacuauacauacccugcucugaaugucaccaugcccaacaacgagcaguuugacaagcuguauauuuggggcgugcaccauccugggacggauaaggaccagaucuuccuguacgcccagagcuccggaagaauuacaguuucuaccaaacggagccaacaggcggugaucccgaauaucggcucccgcccccggauuagagauaucccuagccgcauuucuaucuacuggacaauugucaagcccggggacauccuccugaucaacuccaccggaaaucugauugccccuagaggcuauuuuaaaauccggagcgggaagucuagcauuaugcgcuccgacgcucccaucggaaaauguaagucugaaugcauuaccccgaacggcagcaucccuaaugauaagcccuuccagaacgugaauagaaucacauacggcgccuguccucgguaugugaaacacuccacgcucaagcuggcuaccgggaugcgcaacguccccgagaaacagacaagaggaauuuuuggcgccaucgcgggguucauugaaaauggaugggagggcaugguugacgggugguacggauuucggcaccaaaacagcgagggcagaggccaggccgcugaucuuaagucuacccaggccgcuaucgaccaaauuaaugggaaacugaaccgccucaucggaaagacaaaugaaaaauuccaucagauugagaaggaauuuuccgagguggaaggccggauccaggaucuggagaaguauguggaggacaccaaaaucgaucuuuggagcuacaacgccgaacugcucgucgcccuggagaaucagcacacgauugaccugacagauucugaaaugaacaagcucuuugagaaaaccaagaaacaacugagagaaaacgcugaggacauggggaauggaugcuucaagaucuaucauaagugugauaacgcgugcauuggcuccauccgcaaugggaccuacgaccacaacguguaccgggacgaggcccuuaauaacagauuucagauuaaaggcguugaacuuaagagcggauauaaagauuggauccucuggaucuccuucgcuauuucuugcuuucugcuuuguguggcccugcucggcuucaucaugugggccugccagaaggggaauauucgcuguaacaucugcauuuga

SEQ ID NO: 205638 - RNA, 1701 nt, Artificial Sequence; identical to SEQ ID NO: 205171
  derived and/or modified CDS sequence (opt5) from hemagglutinin__InfluenzaA__ALE32081

SEQ ID NO: 205639 - RNA, 1701 nt, Artificial Sequence; identical to SEQ ID NO: 205171
  derived and/or modified CDS sequence (opt5) from hemagglutinin__InfluenzaA__ALE32082

SEQ ID NO: 205640 - RNA, 1701 nt, Artificial Sequence
  derived and/or modified CDS sequence (opt5) from hemagglutinin__InfluenzaA__ALE32083
augaagaccaucauugcccugagcuacauccucugccugguguucgcucagaaaauucccggcaacgacaauuccacagccacgcuuugucuggggcaccaugcggucccuaacggaaccaucguuaagacaauuaccaaugauagaaucgaggugacaaacgcuaccgaacucgugcaaaauucuagcaucggcgagauuugcgacuccccgcaccagauccuggauggggaaaacuguacacuuauugacgcccugcucggagauccccagugcgacggcuuucagaauaaaaagugggaucuguucgucgagcggucuaaagccuauagcaacuguuacccuuaugacgugcccgauuacgcuucccugcgcucucucguugccagcuccgggacccuggaauuuaauaacgagagcuucaauuggacgggagugacccaaaacggcacaucuuccgcuugcaucagacggucuagcuccagcuuuuucucucgccuuaauuggcugacccaucucaacuauaaguacccugcccugaaugucacaaugcccaacaacgagcaguuugacaaacuuuauauuuggggcgugcaccauccugggaccgauaaggaccagaucuuccuguacgcgagauccagcggacggauuacgguuuccacaaagggcucucagcaagccgugaucccgaauaucgggagccgcccccggauuagagauaucccuucccgcauuagcaucuacuggaccauugucaaacccggagacauccuccugaucaacucuacaggcaaucugauugcuccuagaggguauuuuaagauccgguccggaaaaagcucuauuaugcgcagcgacgcccccaucggcaaguguaaguccgaaugcauuaccccgaacggcucuaucccuaaugauaaacccuuccagaacgugaauagaaucaccuacggggcuuguccucgguaugugaagcacagcacacucaaacuggccacgggaaugcgcaacguccccgagaagcagaccagaggcauuuuuggggcgaucgccggauucauugaaaauggcugggaggggaugguugacggaugguacggcuuucggcaccagaacuccgagggcagagggcaagcugccgaucuuaaaagcacacaggcugccaucgaccagauuaauggaaagcugaaccgccucaucggcaaaaccaaugaaaaguuccaucaaauugagaaggaguucucugaaguggaagggcggauccaggaucuggagaaauauguggaggacacaaagaucgaucuuugguccuacaacgccgaacugcucgucgcucuggagaaucagcacaccauugaccugacggauagcgaaaugaacaaacucuuugagagaacaaagaaacagcugcgcgaaaacgcggaggacaugggaaauggcugcuucaagaucuaucauaagugugauaacgccugcauugggucuauccggaauggcaccuacgaccacaacguguacagagacgaggcucuuaauaaccgcuuucaaauuaaaggaguugaacugaaguccggcuauaaagauuggauccucuggaucagcuucgccauuuccugcuuucugcuuuguguggcccugcucggguucaucaugugggcuugccagaagggaaauauucgguguaacaucugcauuuga

SEQ ID NO: 205641 - RNA, 1701 nt, Artificial Sequence; identical to SEQ ID NO: 205128
  derived and/or modified CDS sequence (opt5) from hemagglutinin__InfluenzaA__ALE32084

SEQ ID NO: 205642 - RNA, 1701 nt, Artificial Sequence; identical to SEQ ID NO: 205171
  derived and/or modified CDS sequence (opt5) from hemagglutinin__InfluenzaA__ALE32085

SEQ ID NO: 205643 - RNA, 1701 nt, Artificial Sequence
  derived and/or modified CDS sequence (opt5) from hemagglutinin__InfluenzaA__ALE32086
augaagaccaucauugcccugagcuacauccucugccugguguucgcucagaaaauucccggcaacgacaauuccacagccacgcuuugucuggggcaccaugcggucccuaacggaaccaucguuaagacaauuaccaaugauagaaucgaggugacaaacgcuaccgaacucgugcaaaauucuagcaucggcgagauuugcgacuccccgcaccagauccuggauggggaaaacuguacacuuauugacgcccugcucggagauccccagugcgacggcuuucagaauaaaaagugggaucuguucgucgagcggucuaaagccuauagcaacuguuacccuuaugacgugcccgauuacgcuucccugcgcucucucguugccagcuccgggacccuggaauuuaauaacgagagcuucaauuggacgggagugacccaaaacggcacaucuuccgcuugcaucagaaagucuagcuccagcuuuuucucucggcuuaauuggcugacccaucucaacuauacauacccugcccugaaugucaccaugcccaacaacgagcaguuugacaaacuuuauauuuggggcgugcaccauccugggacggauaaggaccagaucuuccuguacgcgcgcuccagcggaagaauuacaguuuccaccaagcggucucagcaagccgugaucccgaauaucggcagccgcccccggauuagagauaucccuucccgcauuagcaucuacuggacaauugucaaacccggggacauccuccugaucaacucuaccggaaaucugauugcuccuagaggcuauuuuaagauccgguccgggaaaagcucuauuaugcgcagcgacgcccccaucuccaaguguaagucugaaugcauuaccccgaacggaagcaucccuaaugauaaacccuuccagaacgugaauagaaucacauacggcgcuuguccucgguaugugaagcacuccacgcucaaacuggccaccggcaugcgcaacguccccgagaagcagacaagagggauuuuuggagcgaucgccggcuucauugaaaaugggugggagggaaugguugacggcugguacggguuucggcaccagaacagcgagggaagaggccaagcugccgaucuuaaaucuacccaggcugccaucgaccagauuaauggcaagcugaaccgccucaucgggaaaacaaaugaaaaguuccaucaaauugagaaggaguucuccgaaguggaaggacggauccaggaucuggagaaauauguggaggacaccaagaucgaucuuuggagcuacaacgccgaacugcucgucgcucuggagaaucagcacacgauugaccugacagauucugaaaugaacaaacucuuugagaagaccaaaaagcagcugagagaaaacgcggaggacaugggcaaugggugcuucaagaucuaucauaaaugugauaacgccugcauuggauccauccgcaauggcaccuacgaccacaacguguaccgggacgaggcucuuaauaacagauuucaaauuaaggggguugaacugaaaagcggcuauaaggauuggauccucuggaucuccuucgccauuucuugcuuucugcuuuguguggcccugcucggauucaucaugugggcuugccagaaaggcaauauucgcuguaacaucugcauuuga

SEQ ID NO: 205644 - RNA, 1701 nt, Artificial Sequence
  derived and/or modified CDS sequence (opt5) from hemagglutinin__InfluenzaA__ALE32087
augaagaccaucauugcccugagcuacauccucugccugguguucgcucagaaaauucccggcaacgacaauuccacagccacgcuuugucuggggcaccaugcggucccuaacggaaccaucguuaagacaauuaccaaugauagaaucgaggugacaaacgcuaccgaacucgugcaaaauucuagcaucggcgagauuugcgacuccccgcaccagauccuggauggggaaaacuguacacuuauugacgcccugcucggagauccccagugcgacggcuuucagaauaaaaagugggaucuguucgucgagcggucuaaagccuauagcaacuguuacccuuaugacgugcccgauuacgcuucccugcgcucucucguugccagcuccgggacccuggaauuuaauaacgagagcuucaauuggacgggagugacccaaaacggcacaucuuccgcuugcaucagaaaguccucuuccagcuuuuucucucggcuuaauuggcugacccaucucgacuauacauacccugcccugaacgucaccaugcccaauaacgagcaguuugauaaacuuuauauuuggggcgugcaccauccugggacggacaaggaucagaucuuccuguacgcgcgcuccagcggaagaauuacaguuuccaccaagcggucucagcaagccgugaucccgaacaucggcagccgcccccggauuagagacaucccuucccgcauuagcaucuacuggacaauugucaaacccggggacauccuccugaucaauucuaccggaaaccugauugcuccuagaggcuauuuuaagauccgguccgggaaaagcucuauuaugcgcagcgaugcccccaucggaaaguguaaguccgaaugcauuaccccgaauggcucuaucccuaacgacaaacccuuccagaaugugaacagaaucacauacggcgcuuguccucgguaugugaagcacagcacgcucaaacuggccaccgggaugcgcaauguccccgagaagcagacaagaggaauuuuuggcgcgaucgccggguucauugaaaacggaugggagggcaugguugaugggugguacggauuucggcaccagaauagcgagggcagaggccaagcugccgaccuuaaaagcacccaggcugccaucgaucagauuaacgggaaucugaaccgccucaucggaaagacaaaugaaaaauuccaucaaauugagaaggaguucucugaaguggaaggccggauccaggaccuggagaaguauguggaggauaccaaaaucgaccuuugguccuacaacgccgaacugcucgucgcucuggagaaucagcacacgauugaucugacagacagcgaaaugaacaagcucuuugagaaaaccaagaaacagcugagagaaaacgcggaggauauggggaauggaugcuucaagaucuaucauaagugugacaacgccugcauuggcucuauccgcaaugggaccuacgaccacaacguguaccgggaugaggcucuuaauaacagauuucaaauuaaaggcguugaacugaaguccggauauaaagacuggauccucuggaucagcuucgccauuuccugcuuucugcuuuguguggcccugcucggcuucaucaugugggcuugccagaaggggaauauucgcuguaacaucugcauuuga

SEQ ID NO: 205645 - RNA, 1701 nt, Artificial Sequence
  derived and/or modified CDS sequence (opt5) from hemagglutinin__InfluenzaA__ALE32088
augaagaccaucauugcccugagcuacauccucugccugguguucgcucagaaaauucccggcaacgacaauuccacagccacgcuuugucuggggcaccaugcggucccuaacggaaccaucguuaagacaauuaccaaugauagaaucgaggugacaaacgcuaccgaacucgugcaaaauucuagcaucggcgagauuugcgacuccccgcaccagauccuggauggggaaaacuguacacuuauugacgcccugcucggagauccccagugcgacggcuuucagaauaaaaagugggaucuguucgucgagcggucuaaagccuauagcaacuguuacccuuaugacgugcccgauuacgcuucccugcgcucucucguugccagcuccgggacccuggaauuuaauaacgagagcuucaauuggacgggagugacccaaaacggcacaucuuccgcuugcaucagaaagucuagcuccagcuuuuucucucggcuuaauuggcugacccaucucaacuauacauacccugcccugaaugucaccaugcccaacaacgagcaguuugacaaacuuuauauuuggggcgugcugcacccugggacggauaaggaccagaucuuccucuacgcgcgcuccagcggaagaauuacaguuuccaccaagcggucucagcaagccgugaucccgaauaucggcagccgcccccggauuagagauaucccuucccgcauuagcaucuacuggacaauugucaaacccggggacauccugcugaucaacucuaccggaaaucucauugcuccuagaggcuauuuuaagauccgguccgggaaaagcucuauuaugcgcagcgacgcccccaucggaaaguguaaguccgaaugcauuaccccgaacggcucuaucccuaaugauaaacccuuccagaacgugaauagaaucacauacggcgcuuguccucgguaugugaagcauagcacgcugaaacuugccaccgggaugcgcaacguccccgagaagcagacaagaggaauuuuuggcgcgaucgccggguucauugaaaauggaugggagggcaugguugacgggugguacggauuucggcaccagaacuccgagggcagaggccaagcugccgaucugaaaagcacccaggcugccaucgaccagauuaaugggaagcucaaccgccugaucggaaaaacaaaugaaaaguuccaccaaauugagaaggaguucucugaaguggaaggccggauccaggaucuugagaaauauguggaggacaccaagaucgaucugugguccuacaacgccgaacuccuggucgcucuggagaaucagcauacgguggaccucacagauagcgaaaugaacaaacuguuugagaagaccaaaaagcagcuuagagaaaacgcggaggacauggggaauggaugcuucaagauuuaucacaaaugugauaacgccugcaucggcucuauucgcaaugggaccuacgaccauaacguuuaccgggacgaggcucugaauaacagauuucaaaucaagggcguggaacucaaauccggauauaaggauuggauucuguggaucagcuucgccaucuccugcuuucuucugugugucgcccuccugggcuucauuaugugggcuugccagaaagggaauauccgcuguaacauuugcaucuga

SEQ ID NO: 205646 - RNA, 1701 nt, Artificial Sequence; identical to SEQ ID NO: 204513
  derived and/or modified CDS sequence (opt5) from hemagglutinin__InfluenzaA__ALE32089

SEQ ID NO: 205647 - RNA, 1701 nt, Artificial Sequence; identical to SEQ ID NO: 204513
  derived and/or modified CDS sequence (opt5) from hemagglutinin__InfluenzaA__ALE32090

SEQ ID NO: 205648 - RNA, 1701 nt, Artificial Sequence; identical to SEQ ID NO: 204513
  derived and/or modified CDS sequence (opt5) from hemagglutinin__InfluenzaA__ALE32091

SEQ ID NO: 205649 - RNA, 1701 nt, Artificial Sequence
  derived and/or modified CDS sequence (opt5) from hemagglutinin__InfluenzaA__ALE32092
augaagaccaucauugcccugagcuacauccucugccugguguucgcucagaaaauucccggcaacgacaauuccacagccacgcuuugucuggggcaccaugcggucccuaacggaaccaucguuaagacaauuaccaaugauagaaucgaggugacaaacgcuaccgaacucgugcaaaauucuagcaucggcgagauuugcgacuccccgcaccagauccuggauggggaaaacuguacacuuauugacgcccugcucggagauccccagugcgacggcuuucagaauaaaaagugggaucuguucgucgagcggucuaaagccuauagcaacuguuacccuuaugacgugcccgauuacgcuucccugcgcucucucguugccagcuccgggacccuggaauuuaauaacgagagcuucaauuggacgggagugacccaaaacggcacaucuuccgcuugcaucagacggagcagcuccagcuuuuucucucgccuuaauuggcugacccaucucaacuauacauacccugcccugaaugucaccaugcccaacaacgagcaguuugacaaacuuuauauuuggggcgugcaccauccugggacggauaaggaccagaucuuccuguacgcgcaguccagcggaagaauuacaguuuccaccaagcggucucaacaggccgugaucccgaauaucggcagccgcccccggauuagagauaucccuucccgcauuagcaucuacuggacaauugucaagcccggggacauccuccugaucaacucuaccggaaaucugauugcuccuagaggcuauuuuaaaauccgguccgggaagucuucuauuaugcgcagcgacgcccccaucggaaaauguagauccgaaugcauuaccccgaacggcucuaucccuaaugauaagcccuuccagaacgugaaucggaucacauacggcgcuuguccucgcuaugugaagcacagcacgcucaaacuggccaccgggaugagaaacguccccgagaagcagacacggggaauuuuuggcgcgaucgccggguucauugaaaauggaugggagggcaugguugacgggugguacggauuuagacaccaaaacuccgagggccgcggccaggcugccgaucuuaaaagcacccaggcugccaucgaccaaauuaaugggaagcugaaccggcucaucggaaaaacaaaugaaaaguuccaucagauugagaaagaguucucugaaguggaaggcagaauccaggaucuggagaaguauguggaggacaccaagaucgaucuuugguccuacaacgccgaacugcucgucgcucuggagaaucagcacacgauugaccugacagauagcgaaaugaacaaacucuuugagaagaccaaaaagcaacugcgcgaaaacgcggaggacauggggaauggaugcuucaaaaucuaucauaagugugauaacgccugcauuggcucuauccggaaugggaccuacgagcacaacguguacagagacgaagcucuuaauaaccgcuuucagauuaagggcguugagcugaaauccggauauaaggacuggauccucuggaucagcuucgccauuuccugcuuucugcuuuguguggcccugcucggcuucaucaugugggcuugccagaaagggaauauucgguguaacaucugcauuuga

SEQ ID NO: 205650 - RNA, 1701 nt, Artificial Sequence; identical to SEQ ID NO: 205119
  derived and/or modified CDS sequence (opt5) from hemagglutinin__InfluenzaA__ALE32093

SEQ ID NO: 205651 - RNA, 1701 nt, Artificial Sequence
  derived and/or modified CDS sequence (opt5) from hemagglutinin__InfluenzaA__ALE32094
augaagaccaucauugcccugagcuacauccucugccugguguucgcucagaaaauucccggcaacgacaauuccacagccacgcuuugucuggggcaccaugcggucccuaacggaaccaucguuaagacaauuaccaaugauagaaucgaggugacaaacgcuaccgaacucgugcaaaauucuagcaucggcgagauuugcgacuccccgcaccagauccuggauggggaaaacuguacacuuauugacgcccugcucggagauccccagugcgacggcuuucagaauaaaaagugggaucuguucgucgagcggucuaaagccuauagcaacuguuacccuuaugacgugcccgauuacgcuucccugcgcucucucguugccagcuccgggacccuggaauuuaauaacgagagcuucaauuggacgggagugacccaaaacggcacaucuuccgcuugcaucagacggagcagcuccagcuuuuucucucgccuuaauuggcugacccaucucaacuauacauacccugcccugaaugucaccaugcccaacaacgagcaguuugacaaacuuuauauuuggggcgugcaccauccugggacggauaaggaccagaucuuccuguacgcgcaguccagcggaagaauuacaguuuccaccaagcggucucaacaggccgugaucccgaauaucggcagccgcccccggauuagagauaucccuucccgcauuagcaucuacuggacaauugucaagcccggggacauccuccugaucaccucuaccggaaaccugauugcuccuagaggcuauuuuaaaauccgguccgggaagucuucuauuaugcgcagcgacgcccccaucggaaaauguaaguccgaaugcauuacaccgaauggcucuaucccuaacgauaagcccuuccagaaugugaacagaaucacguacggcgcuuguccucgguaugugaaacacagcacccucaagcuggccacagggaugcgcaauguccccgagaaacagaccagaggaauuuuuggcgcgaucgccggguucauugaaaacggaugggagggcaugguugacgggugguacggauuucggcaccaaaauuccgagggcagaggccaggcugccgaucuuaagagcacacaggcugccaucgaccaaauuaacgggaaacugaaucgccucaucggaaagaccaacgaaaaauuccaucagauugagaaggaguucucugaaguggaaggccggauccaggaucuggagaaguauguggaggacacgaaaaucgaucuuugguccuacaaugccgaacugcucgucgcucuggagaaccagcacacaauugaccugaccgauagcgaaaugaauaagcucuuugagaaaaccaagaaacaacugagagaaaacgcggaggacauggggaacggaugcuucaagaucuaucauaagugugauaaugccugcauuggcucuauccgcaacgggacauacgaccacaauguguaccgggacgaggcucuuaacaauagauuucagauuaaaggcguugaacugaaguccggauauaaagauuggauccucuggaucagcuucgccauuuccugcuuucugcuuuguguggcccugcucggcuucaucaugugggcuugccagaaggggaacauucgcuguaauaucugcauuuga

SEQ ID NO: 205652 - RNA, 1701 nt, Artificial Sequence; identical to SEQ ID NO: 204513
  derived and/or modified CDS sequence (opt5) from hemagglutinin__InfluenzaA__ALE32095

SEQ ID NO: 205653 - RNA, 1701 nt, Artificial Sequence
  derived and/or modified CDS sequence (opt5) from hemagglutinin__InfluenzaA__ALE32096
augaagaccaucauugcccugagcuacauccucugccugguguucgcucagaaaauucccggcaacgacaauuccacagccacgcuuugucuggggcaccaugcggucccuaacggaaccaucguuaagacaauuaccaaugauagaaucgaggugacaaacgcuaccgaacucgugcaaaauucuagcaucggcgagauuugcgacuccccgcaccagauccuggauggggaaaacuguacacuuauugacgcccugcucggagauccccagugcgacggcuuucagaauaaaaagugggaucuguucgucgagcggucuaaagccuauagcaacuguuacccuuaugacgugcccgauuacgcuucccugcgcucucucguugccagcuccgggacccuggaauuuaauaacgagagcuucaauuggacgggagugacccaaaacggcacaucuuccgcuugcaucagacggucuagcuccagcuuuuucucucgccuuaauuggcugacccaucucuccuauacauacccugcccugaacgucaccaugcccaauaacgagcaguuugacaagcuguauauuuggggcgugcaccauccugggacggauaaggaccagaucuuccuguacgcgcagagcuccggaagaauuacaguuucuaccaaacggagccaacaggccgugaucccgaacaucggcucccgcccccggauuagagauaucccuagccgcauuucuaucuacuggacaauugucaagcccggggacauccuccugaucaauuccaccggaaaccugauugcuccuagaggcuauuuuaaaauccggagcgggaagucuagcauuaugcgcuccgacgcccccaucggaaaauguaagucugaaugcauuaccccgaauggcagcaucccuaacgauaagcccuuccagaaugugaacagaaucacauacggcgcuuguccucgguaugugaaacacuccacgcucaagcuggccaccgggaugcgcaauguccccgagaaacagacaagaggaauuuuuggcgcgaucgccggguucauugaaaacggaugggagggcaugguugacgggugguacggauuucggcaccaaaauagcgagggcagaggccaggcugccgaucuuaagucuacccaggcugccaucgaccaaauuaacgggaaacugaaucgccucaucggaaagacaaacgaaaaauuccaucagauugagaaggaguucuccgaaguggaaggccggauccaggaucuggagaaguauguggaggacaccaaaaucgaucuuuggagcuacaaugccgaacugcucgucgcucuggagaaccagcacacgauugaccugacagauucugaaaugaauaagcucuuugagaaaaccaagaaacaacugagagaaaacgcggaggacauggggaacggaugcuucaagaucuaucauaagugugauaaugccugcauuggcuccauccgcaacgggaccuacgaccacaauguguaccgggacgaggcucuuaacaauagauuucagauuaaaggcguugaacuuaagagcggauauaaagauuggauccucuggaucuccuucgccauuucuugcuuucugcuuuguguggcccugcucggcuucaucaugugggcuugccagaaggggaacauucgcuguaauaucugcauuuga

SEQ ID NO: 205654 - RNA, 1701 nt, Artificial Sequence; identical to SEQ ID NO: 204513
  derived and/or modified CDS sequence (opt5) from hemagglutinin__InfluenzaA__ALE32097

SEQ ID NO: 205655 - RNA, 1701 nt, Artificial Sequence; identical to SEQ ID NO: 205119
  derived and/or modified CDS sequence (opt5) from hemagglutinin__InfluenzaA__ALE32099

SEQ ID NO: 205656 - RNA, 1701 nt, Artificial Sequence
  derived and/or modified CDS sequence (opt5) from hemagglutinin__InfluenzaA__ALE32100
augaagaccaucauugcccugagcuacauccucugccugguguucgcucagaaaauucccggcaacgacaauuccacagccacgcuuugucuggggcaccaugcggucccuaacggaaccaucguuaagacaauuaccaaugauagaaucgaggugacaaacgcuaccgaacucgugcaaaauucuagcaucggcgagauuugcgacuccccgcaccagauccuggauggggaaaacuguacacuuauugacgcccugcucggagauccccagugcgacggcuuucagaauaaaaagugggaucuguucgucgagcggucuaaagccuauagcaacuguuacccuuaugacgugcccgauuacgcuucccugcgcucucucguugccagcuccgggacccuggaauuuaauaacgagagcuucaauuggacgggagugacccaaaacggcacaucuuccgcuugcaucagacggagcagcuccagcuuuuucucucgccuuaauuggcugacccaucucaacuauacauacccugcccugaaugucaccaugcccaacaacgagcaguuugacaaacuuuauauuuggggcgugcaccauccugggacggauaaggaccagaucuuccuguacgcgcaguccagcggaagaauuacaguuuccaccaaacggucucaacaggccgugaucccgaauaucggcagccgcccccggauuagagauaucccuucccgcauuagcaucuacuggacaauugucaagcccggggacauccuccugaucaacucuaccggaaaucugauugcuccuagaggcuauuuuaaaauccgguccgggaagucuucuauuaugcgcagcgacgcccccaucggaaaauguaaguccgaaugcauuaccccgaacggcucuaucccuaaugauaagcccuuccagaacgugaauagaaucacauacggcgcuuguccucgguaugugaaacacagcacgcucaagcuggccaccgggaugcgcaacguccccgagaaacagacaagaggaauuuuuggcgcgaucgccggguucauugaaaauggaugggagggcaugguugacgggugguacggauuucggcaccaaaacuccgagggcagaggccaggcugccgaucuuaagagcacccaggcugccaucgaccaaauuaaugggaaacugaaccgccucaucggaaagacaaaugaaaaauuccaucagauugagaaggaguucucugaaguggaaggccggauccaggaucuggagaaguauguggaggacaccaaaaucgaucuuugguccuacaacgccgaccugcucgucgcucuggaaaaucagcacacgauugaucugacagacagcgagaugaacaagcucuuugaaaagaccaagaaacaacugagagagaacgcggaagauauggggaauggaugcuucaagaucuaucauaagugugacaacgccugcauuggcucuauccgcaaugggaccuacgaccacaacguguaccgggaugaggcucuuaauaacagauuucagauuaaaggcguugagcugaaguccggauauaaagacuggauccucuggaucagcuucgccauuuccugcuuucugcuuuguguggcccugcucggcuucaucaugugggcuugccagaaggggaauauucgcuguaacaucugcauuuga

SEQ ID NO: 205657 - RNA, 1701 nt, Artificial Sequence
  derived and/or modified CDS sequence (opt5) from hemagglutinin__InfluenzaA__ALE32101
augaagaccaucauugcccugagcuacauccucugccugguguucgcucagaaaauucccggcaacgacaauuccacagccacgcuuugucuggggcaccaugcggucccuaacggaaccaucguuaagacaauuaccaaugauagaaucgaggugacaaacgcuaccgaacucgugcaaaauucuagcaucggcgagauuugcgacuccccgcaccagauccuggauggggaaaacuguacacuuauugacgcccugcucggagauccccagugcgacggcuuucagaauaaaaagugggaucuguucgucgagcggucuaaagccuauagccaauguuacccuuaugacgugcccgauuacgcuucccugcgcucucucguugccagcuccgggacccuggaauuuaacaaugagagcuucaacuggacgggagugacccagaauggcacaucuuccgcuugcaucagaaagagcucuggcuccuuuuucagccggcuuaacuggcugacccaucucaaguauacauacccugcccugaaugucaccaugcccaacaaugagcaguuugacaaacuuuauauuuggggagugcaccauccugggacggauaaggaccagaucuuccuguacgcgagaucuuccggcagaauuacaguuagcaccaaacggucccaacaggccgugaucccgaacaucgggucucgcccccgcauucgggauaucccuagccgcauuuccaucuacuggacaauugucaagcccggagacauccuccugaucaacagcaccggcaaucugauugcuccuagaggguauuuuaaaauccggucuggaaaguccagcauuaugcgcucugacgcccccaucggcaaguguaaaagcgaaugcauuaccccgaacggcuccaucccuaaugauaagcccuuccagaacgugaauagaaucacauacggggcuuguccucgguaugugaaacacucuacgcucaagcuggccaccggaaugcgcaacguccccgagaaacagacaagaggcauuuuuggggcgaucgccggauucauugaaaauggcugggaggggaugguugacggaugguacggcuuucggcaccaaaacagcgagggcagagggcaggcugccgaucuuaaguccacccaggcugccaucgaccaaauuaauggaaaacugaaccgccucaucggcaagacaaaugaaaaguuccaucagauugagaaagaguucagcgaaguggaagggcggauccaggaucuggagaaguauguggaggacaccaaaaucgaucuuuggucuuacaacgccgaacugcucgucgcucuggagaaucagcacacgauugaccugacagauuccgaaaugaacaagcucuuugagaaaaccaagaagcaacugagagaaaaugcggaggacaugggaaacggcugcuucaaaaucuaucauaagugugauaacgccugcauugggagcauccgcaauggcaccuacgaccacaacguguaccgggacgaggcucuuaauaacagauuucagauuaaaggaguugaacugaagucuggcuauaaagauuggauccucuggaucuccuucgccauuagcugcuuucugcuuuguguggcccugcucggguucaucaugugggcuugccagaagggaaauauucgcuguaacaucugcauuuga

SEQ ID NO: 205658 - RNA, 1701 nt, Artificial Sequence
  derived and/or modified CDS sequence (opt5) from hemagglutinin__InfluenzaA__ALE32102
augaagaccaucauugcccugagcuacauccucugccugguguucgcucagaaaauucccggcaacgacaauuccacagccacgcuuugucuggggcaccaugcggucccuaacggaaccaucguuaagacaauuaccaaugauagaaucgaggugacaaacgcuaccgaacucgugcaaaauucuagcaucggcgagauuugcgacuccccgcaccagauccuggauggggaaaacuguacacuuauugacgcccugcucggagauccccagugcgacggcuuucagaauaaaaagugggaucuguucgucgagcggucuaaagccuauagcaacuguuacccuuaugacgugcccgauuacgcuucccugcgcucucucguugccagcuccgggacccuggaauuuaauaacgagagcuucaauuggacgggagugacccaaaacggcacaucuuccgcuugcaucagaaagagcagcuccagcuuuuucucucggcuuaauuggcugacccaucucaaguauacauacccugcccugaacgucaccaugcccaauaacgagcaguuugacaaacuuuauauuuggggcgugcaccauccugggacggauaaggaccagaucuuccuguacgcgcgcuccagcggaagaauuacaguuuccaccaaacggucucagcaagccgugaucccgaacaucggcagccgcccccggauuagagauaucccuucccgcauuagcaucuacuggacaauugucaagcccggggacauccuccugaucaauucuaccggaaaccugauugcuccuagaggcuauuuuaaaauccgguccgggaagucuucuauuaugcgcagcgacgcccccaucggaaaguguaaauccgaaugcauuaccccgaauggcucuaucccuaacgauaagcccuuccagaaugugaacagaaucacauacggcgcuuguccucgguaugugaaacacagcacgcucaagcuggccaccgggaugcgcaauguccccgagaaacagacaagaggaauuuuuggcgcgaucgccggguucauugaaaacggaugggagggcaugguugacgggugguacggauuucggcaccagaauagcgagggcagaggccaagcugccgaucuuaagagcacccaggcugccaucgaccagauuaacgggaaacugaaucgccucaucggaaagacaaacgaaaaguuccaucaaauugagaaagaguucucugaaguggaaggccggauccaggaucuggagaaguauguggaggacaccaaaaucgaucuuugguccuacaaugccgaacugcucgucgcucuggagaaccagcacacgauugaccugacagauagcgaaaugaauaagcucuuugagaaaaccaagaagcagcugagagaaaacgcggaggacauggggaacggaugcuucaaaaucuaucauaagugugauaaugccugcauuggcucuauccgcaacgggaccuacgaccacaauguguaccgggacgaggcucuuuccaacagauuucaaauuaaaggcguugaacugaaguccggauauaaagauuggauccucuggaucuccuucgccauuucuugcuuucugcuuuguguggcccugcucggcuucaucaugugggcuugccagaaggggaauauucgcuguaacaucugcauuuga

SEQ ID NO: 205659 - RNA, 1701 nt, Artificial Sequence; identical to SEQ ID NO: 205226
  derived and/or modified CDS sequence (opt5) from hemagglutinin__InfluenzaA__ALE32103

SEQ ID NO: 205660 - RNA, 1701 nt, Artificial Sequence
  derived and/or modified CDS sequence (opt5) from hemagglutinin__InfluenzaA__ALE32104
augaagaccaucauugcccugagcuacauccucugccugguguucgcucagaaaauucccggcaacgacaauuccacagccacgcuuugucuggggcaccaugcggucccuaacggaaccaucguuaagacaauuaccaaugaucaaaucgaggugacaaacgcuaccgaacucgugcagaauagcagcaucggcgagauuugcgacuccccgcaccagauccuggauggggaaaacuguacacuuauugacgcccugcucggagauccccagugcgacggcuuucaaaauaaaaagugggaucuguucgucgagagaucuaaagccuauagcaacuguuacccuuaugacgugcccgauuacgcuucccugcggucucucguugccagcuccgggacccuggaauuuaauaacgagagcuucaauuggacgggagugacccagaacggcacaucuuccgcuugcauccgcagaucuucuuccagcuuuuucucucggcuuaauuggcugacccaucucaacuauacauacccugcccugaaugucaccaugcccaacaacgagcaguuugacaaacuuuauauuuggggcgugcaccauccugggacggauaaggaccagaucuuccuguacgcgcaauccagcggacgcauuacaguuuccaccaagagaucucagcaggccgugaucccgaauaucggcagccggccccgcauuagagauaucccuucccggauuagcaucuacuggacaauugucaagcccggggacauccuccugaucaacucuaccggaaaucugauugcuccucgcggcuauuuuaaaaucagauccggaaagagcucuauuaugcggagcgacgcccccaucgggaaauguaaguccgaaugcauuaccccgaacggcucuaucccuaaugauaagcccuuccagaacgugaaucgcaucacauacggcgcuuguccuagauaugugaaacacagcacgcucaagcuggccaccgggaugcggaacguccccgagaaacaaacacgcggaauuuuuggcgcgaucgccggguucauugaaaauggaugggagggcaugguugacgggugguacggauuuagacaccagaacuccgagggccggggccaggcugccgaucuuaagagcacccaagcugccaucgaccagauuaaugggaaacugaacagacucaucggaaagacaaaugaaaaauuccaucagauugagaaggaguucucugaaguggaaggccgcauccaggaucuggagaaguauguggaggacaccaaaaucgaucuuugguccuacaacgccgaacugcucgucgcucuggagaaucaacacacgauugaccugacagauagcgaaaugaacaagcucuuugagaaaaccaagaaacagcugcgggaaaacgcggaggacauggggaauggaugcuucaagaucuaucauaagugugauaacgccugcauuggcucuaucagaaaugggaccuacgaccacaacguguaccgcgacgaggcucuuaauaaccgguuucagauuaaaggcguugaacugaaguccggauauaaagauuggauccucuggaucagcuucgccauuuccugcuuucugcuuuguguggcccugcucggcuucaucaugugggcuugccagaaggggaauauuagauguaacaucugcauuuga

SEQ ID NO: 205661 - RNA, 1701 nt, Artificial Sequence; identical to SEQ ID NO: 205171
  derived and/or modified CDS sequence (opt5) from hemagglutinin__InfluenzaA__ALE32105

SEQ ID NO: 205662 - RNA, 1701 nt, Artificial Sequence; identical to SEQ ID NO: 205171
  derived and/or modified CDS sequence (opt5) from hemagglutinin__InfluenzaA__ALE32106

SEQ ID NO: 205663 - RNA, 1701 nt, Artificial Sequence; identical to SEQ ID NO: 205226
  derived and/or modified CDS sequence (opt5) from hemagglutinin__InfluenzaA__ALE32107

SEQ ID NO: 205664 - RNA, 1701 nt, Artificial Sequence; identical to SEQ ID NO: 205456
  derived and/or modified CDS sequence (opt5) from hemagglutinin__InfluenzaA__ALE32108

SEQ ID NO: 205665 - RNA, 1701 nt, Artificial Sequence; identical to SEQ ID NO: 205070
  derived and/or modified CDS sequence (opt5) from hemagglutinin__InfluenzaA__ALE32109

SEQ ID NO: 205666 - RNA, 1701 nt, Artificial Sequence; identical to SEQ ID NO: 205057
  derived and/or modified CDS sequence (opt5) from hemagglutinin__InfluenzaA__ALE32110

SEQ ID NO: 205667 - RNA, 1701 nt, Artificial Sequence; identical to SEQ ID NO: 204513
  derived and/or modified CDS sequence (opt5) from hemagglutinin__InfluenzaA__ALE32111

SEQ ID NO: 205668 - RNA, 1701 nt, Artificial Sequence
  derived and/or modified CDS sequence (opt5) from hemagglutinin__InfluenzaA__ALE32112
augaagaccaucauugcccugagcuacauccucugccugguguucgcucagaaaauucccggcaacgacaauuccacagccacgcuuugucuggggcaccaugcggucccuaacggaaccaucguuaagacaauuaccaaugauagaaucgaggugacaaacgcuaccgaacucgugcaaaauucuagcaucggcgagauuugcgacuccccgcaccagauccuggauggggaaaacuguacacuuauugacgcccugcucggagauccccagugcgacggcuuucagaauaaaaagugggaucuguucgucgagcggucuaaagccuauagcaacuguuacccuuaugacgugcccgauuacgcuucccugcgcucucucguugccagcuccgggacccuggaauuuaauaacgagagcuucaauuggacgggagugacccaaaacggcacaucuuccgcuugcaucagacggagcagcuccagcuuuuucucucgccuuaauuggcugacccaucucaacuaugccuacccugcgcugaaugucacaaugcccaacaacgagcaguuugacaaacuuuauauuuggggcgugcaccauccugggaccgauaaggaccagaucuuccuguacgcccaguccagcggaagaauuacgguuuccacaaagcggucucaacaggcugugaucccgaauaucggcagccgcccccggauuagagauaucccuucccgcauuagcaucuacuggaccauugucaagcccggggacauccuccugaucaacucuacaggaaaucugauugccccuagaggcuauuuuaaaauccgguccgggaagucuucuauuaugcgcagcgacgcucccaucggaaaauguaaguccgaaugcauuaccccgaacggcucuaucccuaaugauaagcccuuccagaacgugaauagaaucaccuacggcgccuguccucgguaugugaaacacagcacacucaagcuggcgacggggaugcgcaacguccccgagaaacagaccagaggaauuuuuggcgccaucgcuggguucauugaaaauggaugggagggcaugguugacgggugguacggauuucggcaccaaaacuccgagggcagaggccaggccgcugaucuuaagagcacacaggccgccaucgaccaaauuaaugggaaacugaaccgccucaucggaaagaccaaugaaaaauuccaucagauugagaaggaguucucugaaguggaaggccggauccaggaucuggagaaguauguggaggacacaaaaaucgaucuuugguccuacaacgcugaacugcucgucgcgcuggagaaucagcacaccauugaccugacggauagcgaaaugaacaagcucuuugagaaaacaaagaaacaacugagagaaaacgccgaggacauggggaauggaugcuucaagaucuaucauaagugugauaacgcuugcauuggcucuauccgcaaugggaccuacgaccacaacguguaccgggacgaggcccuuaauaacagauuucagauuaaaggcguugaacugaaguccggauauaaagauuggauccucuggaucagcuucgccauuuccugcuuucugcuuuguguggcucugcucggcuucaucaugugggccugccagaaggggaauauucgcuguaacaucugcauuuga

SEQ ID NO: 205669 - RNA, 1701 nt, Artificial Sequence
  derived and/or modified CDS sequence (opt5) from hemagglutinin__InfluenzaA__ALE32113
augaagaccaucauugcccugagcuacauccucugccugguguucgcucagaaaauucccggcaacgacaauuccacagccacgcuuugucuggggcaccaugcggucccuaacggaaccguugugaagacaaucaccaaugauagaauugaggugacaaacgcuaccgaacucguccaaaauucuagcaucggcgagaucugcgacuccccgcaccagauucuggauggggaaaacuguacacuuaucgacgcccugcucggagauccccagugcgacggcuuucagaauaaaaagugggaucuguucguggagcggucuaaagccuauagcaacuguuacccuuaugacguucccgauuacgcuucccugcgcucucucguggccagcuccgggacccuggaauuuaauaacgagagcuucaauuggacgggagucacccaaaacggcacaucuuccgcuugcauuagaggcucuagcuccagcuuuuucucucggcuuaauuggcugacccaucucaacuauacauacccugcccugaaugugaccaugcccaacaacgagcaguuugacaaacuuuauaucuggggaguucaccauccugggacggauaaggaccagauuuuccuguacgcgcaguccagcggccgcaucacaguguccaccaagagaucucaacaggccgucauuccgaauaucgggagccggccccgcaucagagauauuccuucccggaucagcauuuacuggacaaucgugaagcccggagacauucuccugaucaacucuaccggcaaucugaucgcuccucgcggguauuuuaaaaugagauccggaaagagcucuauuaugcggagcgacgcccccaucggcaaauguaaguccgaaugcauuaccccgaacggcucuaucccuaaugauaagcccuuccagaacgugaaucgcauuacauacggggcuuguccuagauaugucaaacacagcacgcucaagcuggccaccggaaugcggaacguucccgagaaacagacacgcggcaucuuuggggcgaucgccggauucauugaaaauggcugggaggggaugguggacggaugguacggcuuuagacaccaaaacuccgagggccgggggcaggcugccgaucuuaagagcacccaggcugccaucgaccaaauuaauggaaaacugaacagacucaucggcaagacaaaugaaaaauuccaucagauugagaaggaguucucugaaguggaagggcgcauccaggaucuggagaaguaugucgaggacaccaaaauugaucuuugguccuacaacgccgaacugcucguggcucuggagaaucagcacacgaucgaccugacagauagcgaaaugaacaagcucuuugagaaaaccaagaaacaacugcgggaaaacgcggaggacaugggaaauggcugcuucaagaucuaucauaagugugauaacgccugcauugggucuaucagaaauggcaccuacgaccacaacguuuaccgcgacgaggcucuuaauaaccgguuucagauuaaaggaguggaacugaaguccggcuauaaagauuggauccucuggauuagcuucgccaucuccugcuuucugcuuugugucgcccugcucggguucaucaugugggcuugccagaagggaaauauuagauguaacaucugcauuuga

SEQ ID NO: 205670 - RNA, 1701 nt, Artificial Sequence; identical to SEQ ID NO: 205057
  derived and/or modified CDS sequence (opt5) from hemagglutinin__InfluenzaA__ALE32114

SEQ ID NO: 205671 - RNA, 1701 nt, Artificial Sequence; identical to SEQ ID NO: 205057
  derived and/or modified CDS sequence (opt5) from hemagglutinin__InfluenzaA__ALE32115

SEQ ID NO: 205672 - RNA, 1701 nt, Artificial Sequence
  derived and/or modified CDS sequence (opt5) from hemagglutinin__InfluenzaA__ALE32116
augaagaccaucauugcccugagcuacauccucugccugguguucgcucagaaaauucccggcaacgacaauuccacagccacgcuuugucuggggcaccaugcggucccuaacggaaccaucguuaagacaauuaccaaugauagaaucgaggugacaaacgcuaccgaacucgugcaaaauucuagcaucggcgagauuugcgacuccccgcaccagauccuggauggggaaaacuguacacuuauugacgcccugcucggagauccccagugcgacggcuuucagaauaaaaagugggaucuguucgucgagcggucuaaagccuauagcaacuguuacccuuaugacgugcccgauuacgcuucccugcgcucucucguugccagcuccgggacccuggaauuuaauaacgagagcuucaauuggacgggagugacccaaaacggcacaucuuccgcuugcaucagacggagcagcuccagcuuuuucucucgccuuaauuggcugacccaucucaacuauacauacccugcccugaaugucaccaugcccaacaacgagcaguuugacaaacuuuauauuuggggcgugcaccauccugggacggauaaggaccagaucuuccuguacgcgcaguccagcggaagaauuacaguuuccaccaagcggucucaacaggccgugaucccgaauaucggcagccgcccccggauuagagauaucccuucccgcauuagcaucuacuggacaauugucaagcccggggacauccuccugaucaacucuaccggaaaucugauugcuccuagaggcuauuuuaaaauccgguccgggaagucuucuauuaugcgcagcgacgcccccaucggaaaauguaaguccgaaugcauuaccccgaacggcucuaucccuaaugauaagcccuuccagaacgugaauagaaucacauacggcgcuuguccucgguaugugaaacacagcacgcucaagcuggccaccgggaugcgcaacguccccgagaaacagacaagaggaauuuuuggcgcgaucgccggguucauugaaaauggaugggagggcaugguugacgggugguacggauuucggcaccaaaacuccgagggcagaggccaggcugccgaucuuaagagcacccaggcugccaucgaccaaauuaaugggaaacugaaccgccucaucggaaagacaaaugaaaaauuccaucagauugagaaggaguucucugaaguggaaggccggauccaggaucuggagaaguauguggaggacaccaaaaucgaucuuugguccuacaacgccgaacugcucgucgcucuggagaaucagcacacgauugaccugacagauagcgaaaugaacaagcucuuugagaaaaccaagaaacaacugagagaaaacgcggaggacauggggaauggaugcuucaagaucuaucauaagugugauaacgccugcauuggcucuauccgcaaugggaccuacgaccacaacguguaccgggacgaggcucuuaauaacagauuucagauuaaaggcguugaacugaaguccggauauaaagauuggauccucuggaucagcuucgccauuuccugcuuucugcuuuguguggcccugcucggcuucaucaugugggcuugccagaaggggaauguccgcuguaacauuugcaucuga

SEQ ID NO: 205673 - RNA, 1701 nt, Artificial Sequence
  derived and/or modified CDS sequence (opt5) from hemagglutinin__InfluenzaA__ALE32117
augaagaccaucauugcccugagcuacauccucugccugguguucgcucagaaaauucccggcaacgacaauuccacagccacgcuuugucuggggcaccaugcggucccuaacggaaccaucguuaagacaauuaccaaugauagaaucgaggugacaaacgcuaccgaacucgugcaaaauucuagcaucggcgagauuugcgacuccccgcaccagauccuggauggggaaaacuguacacuuauugacgcccugcucggagauccccagugcgacggcuuucagaauaaaaagugggaucuguucgucgagcggucuaaagccuauagcaacuguuacccuuaugacgugcccgauuacgcuucccugcgcucucucguugccagcuccgggacccuggaauuuaauaacgagagcuucaauuggacgggagugacccaaaacggcacaucuuccgcuugcaucagacggagcagcuccagcuuuuucucucgccuuaauuggcugacccaucucaacuauacauacccugcccugaaugucaccaugcccaacaacgagcaguuugacaaacuuuauauuuggggcgugcaccauccugggacggauaaggaccagaucuuccuguacgcgcaguccagcggaagaauuacaguuuccaccaagcggucucaacaggccgugaucccgaauaucggcagccgcccccggauuagagauaucccuucccgcauuagcaucuacuggacaauugucaagcccggggacauccuccugaucaacucuaccggaaaucugauugcuccuagaggcuauuuuaaaauccgguccgggaagucuucuauuaugcgcagcgacgcccccaucggaaaauguaaguccgaaugcauuaccccgaacggcucuaucccuaaugauaagcccuuccagaacgugaauagaaucacauacggcgcuuguccucgguaugugaaacacagcacgcucaagcuggccaccgggaugcgcaacguccccgagaaacagacaagaggaauuuuuggcgcgaucgccggguucauugaaaauggaugggagggcaugguugacgggugguacggauuucggcaccaaaacuccgagggcagaggccaggcugccgauuucaagagcacccaggcugccaucgaccaaauuaaugggaaacuuaaccgccugaucggaaagacaaaugaaaaauuccaucagauugagaaggaauuuucugagguggaaggccggauccaggaucucgagaaguauguggaggacaccaaaaucgaucugugguccuacaacgccgaacuucuggucgcucucgagaaucagcacacgauugaccugacagauagcgaaaugaacaagcuguucgagaaaaccaagaaacaacucagagaaaacgcggaggacauggggaauggaugcuuuaagaucuaucauaagugugauaacgccugcauuggcucuauccgcaaugggaccuacgaccacaacguguaccgggacgaggcucugaauaacagauuccagauuaaaggcguugaacuuaaguccgaguauaaagauuggauccuguggaucagcuuugccauuuccugcuuccuccuguguguggcccuucugggauuuaucaugugggcuugccagaagggcaauauucgcuguaacaucugcauuuga

SEQ ID NO: 205674 - RNA, 1701 nt, Artificial Sequence; identical to SEQ ID NO: 205119
  derived and/or modified CDS sequence (opt5) from hemagglutinin__InfluenzaA__ALE32118

SEQ ID NO: 205675 - RNA, 1701 nt, Artificial Sequence; identical to SEQ ID NO: 194741
  derived and/or modified CDS sequence (opt5) from hemagglutinin__InfluenzaA__ALM06086

SEQ ID NO: 205676 - RNA, 1701 nt, Artificial Sequence; identical to SEQ ID NO: 202112
  derived and/or modified CDS sequence (opt5) from hemagglutinin__InfluenzaA__ALM06087

SEQ ID NO: 205677 - RNA, 1701 nt, Artificial Sequence
  derived and/or modified CDS sequence (opt5) from hemagglutinin__InfluenzaA__ALM06088
augaaggccauccuggugguccuccuguacaccuucgcuacagccaacgcggacacgcuuugcauuggcuaucacgcuaauaacagcaccgauacaguugacaccgugcuggagaagaaugugacagucacccauuccgugaaccuccuggaagauaagcacaaugggaaacuuuguaagcugagaggaguugcuccccuccaucugggcaaaugcaacaucgccggguggauucugggaaauccugagugugaaucucucagcacagccuccucuuggagcuacaucguggagaccuccucuagcgacaacggcacgugcuauccgggggauuuuauuaauuacgaagaacugcgggagcagcuuuccagcgucucuuccuucgaacgcuuugagaucuuccccaagaccagcucuuggccuaaccacgacuccaauaagggagugacagccgcuuguccccaugccggcgcgaaaucuuuuuauaagaaccugaucuggcucguuaaaaagggcaauagcuacccuaaacugucccaaagcuauauuaacgauaaggggaaggaagugcuuguccuguggggaauccaccaccccuccaccacagccgaccagcagucucucuaccagaaugcugaugccuacguguucgugggcaccagcagauauuccaaaaaguuuaaaccugagauugcuauccggccgaagguccgcgggcaagagggaagaaugaacuacuauuggacgcugguugaacccggcgacaaaauuacauucgaggccaccgggaaccugguggugccucgguacgcguuuacaauggaacgcaaugccggaagcggcaucauuaucucugauacccccguccaugacugcaacaccacaugucagacgccugagggcgcuaucaauaccucccuccccuuccagaacauucacccgaucacaauugggaagugcccuaaauauguuaagagcaccaagcugagacuugccacaggacugcggaaugugcccucuauccagagccgcggccucuuuggggcuauugccggauucaucgaaggcggguggaccggaaugguggauggcugguacggcuaucaucaccaaaacgagcagggguccggauacgccgcugaccugaaaucuacgcagaaugcgaucgacaagauuacaaacaaagucaauagcgugaucgagaagaugaacacccaguuuaccgccguuggcaaagaguucaaucaccuugagaagagaauugaaaaccugaauaagaaaguggaugacggguuccucgauaucuggacauacaacgcugagcugcugguccuccuggaaaaugagcggacccuugacuaucaugauuccaacgugaagaaccuguacgagaaaguccgcaaucaacucaagaacaaugccaaagaaauuggaaacggcuguuuugaguucuaucacaagugcgacaauacauguauggaaagcgugaagaacgggacguacgauuauccuaaauacucugaggaagccaagcugaauagagagaaaaucgacggcguuaaacuugaguccacccggaucuaucagauucuggcuaucuacagcacaguggccucuucccucguccuggugguuagccugggagcgauuuccuuuuggaugugcucuaacggcagccuccagugccgcaucuguauuuga

SEQ ID NO: 205678 - RNA, 1701 nt, Artificial Sequence; identical to SEQ ID NO: 202112
  derived and/or modified CDS sequence (opt5) from hemagglutinin__InfluenzaA__ALM06089

SEQ ID NO: 205679 - RNA, 1701 nt, Artificial Sequence
  derived and/or modified CDS sequence (opt5) from hemagglutinin__InfluenzaA__ALN39661
augaagaccaucauugcccugagcuacauccucugccugguguucgcucagaaaauucccggcaacgacaauuccacagccacgcuuugucuggggcaccaugcggucccuaacggaaccaucguuaagacaauuaccaaugauagaaucgaggugacaaacgcuaccgaacucgugcaaaauucuagcaucggcgagauuugcgacuccccgcaccagauccuggauggggaaaacuguacacuuauugacgcccugcucggagauccccagugcgacggcuuucagaauaaaaagugggaucuguucgucgagcggucuaaagccuauagcaacuguuacccuuaugacgugcccgauuacgcuucccugcgcucucucguugccagcuccgggacccuggaauuuaauaacgagagcuucaauuggacgggagugacccaaaacggcacaucuuccgcuugcaucagacggagcagcuccagcuuuuucucucgccuuaauuggcugacccaucucaacuauacauacccugcccugaaugucaccaugcccaacaacgagcaguuugacaaacuuuauauuuggggcgugcaccauccugggacggauaaggaccagaucuuccuguacgcgcaguccagcggaagaauuacaguuuccaccaagcggucucaacaggccgugaucccgaauaucggcagccgcccccggauuagagauaucccuucccgcauuagcaucuacuggacaauugucaagcccggggacauccuccugaucaacucuaccggaaaucugauugcuccuagaggcuauuuuaaaauccgguccgggaagucuucuauuaugcgcagcgacgcccccaucggaaaauguaaguccgaaugcauuaccccgaacggcucuaucccuaaugauaagcccuuccagaacgugaauagaaucacauacggcgcuuguccucgguaugugaaacacagcacgcucaagcuggccaccgggaugcgcaacguccccgagaaacagacaagaggaauuuuuggcgcgaucgccggguucauugaaaauggaugggagggcaugguugacgggugguacggauuucggcaccaaaacuccgagggcagaggccaggcugccgaucuuaagagcacccaggcugccaucgaccaaauuaaugggaaacugaaccgccucaucggaaagacaaaugaaaaauuccaucagauugagaaggaguucucugaaguggaaggccggauccaggaucuggagaaguauguggaggacaccaaaaucgaucuuugguccuacaacgccgaacugcucgucgcucuggagaaucagcacacgauugaccugacagauagcgaaaugaacaagcucuuugagaaaaccaagaaacaacugagagaaaacgcggaggacauggggaauggaugcuucaagaucuaucauaagugugauaacgccugcauuggcucuauccgcaaugggaccuacgaccacaacguguaccgggacgaggcucuuaauaacagauuucagauuaaaggcguugaacugaaguccggauauaaagauuggauccucuggaucagcuucgccauuuccugcuuucugcuuuguaucgcccugcucggcuucauuaugugggcuugccagaaggggaauauccgcuguaacauuugcaucuga

SEQ ID NO: 205680 - RNA, 1701 nt, Artificial Sequence; identical to SEQ ID NO: 205046
  derived and/or modified CDS sequence (opt5) from hemagglutinin__InfluenzaA__ALN39662

SEQ ID NO: 205681 - RNA, 1701 nt, Artificial Sequence; identical to SEQ ID NO: 204513
  derived and/or modified CDS sequence (opt5) from hemagglutinin__InfluenzaA__ALN39663

SEQ ID NO: 205682 - RNA, 1701 nt, Artificial Sequence
  derived and/or modified CDS sequence (opt5) from hemagglutinin__InfluenzaA__ALN39664
augaagaccaucauugcccugagcuacauccucugccugguguucgcucagaaacuucccggcaacgacaauuccacagccacgcugugucucgggcaccaugcggucccuaacggaaccauuguuaagacaaucaccaaugauagaauugaggugacaaacgcuaccgaacuggugcaaaauucuagcaucggcgagaucugcgacuccccgcaccagauucuugauggggaaaacuguacacugaucgacgcccuccugggagauccccagugcgacggcuuucagaauaaaaagugggaucuguucgucgagcggucuaaagccuauagcaacuguuacccuuaugacgugcccgauuacgcuucccuccgcucucugguugccagcuccgggacccuugaauuuaauaacgagagcuucaauugggcuggagugacgcaaaacggcaccucuuccagcugcauuagaggcucuaauuccagcuuuuucucucggcugaacuggcucacacaucugaauagcaaguauccugcccuuaacgucaccaugcccaacaaugagcaguuugacaagcuguacaucuggggagugcaccauccugggacagauaaagaccagauuuuccucuaugcgcagccgagcggccgcguuaccguguccacgaagagaucucaacaggccgucauccccaacauugggagccggccucgcaucagagauauccccucccggauuagcaucuacuggacaauugugaaaccuggagacauccugcugauuaauucuaccggcaaccucaucgcuccccgcggguacuuuaagaucagauccggaaaaagcucuauuaugcggagcgacgccccgaucggcaaguguaaguccgaaugcauuacaccuaauggcucuauccccaacgauaaaccuuuccagaaugugaaccgcauuaccuauggggcuugucccagauacgucaagcagagcacccugaaacuugccacaggaaugcggaauguucccgagcgccaaacgagaggcaucuuuggggcgaucgccggauucauugaaaacggcugggaggggaugguggacggaugguauggcuuucggcaccaaaauuccgagggcagagggcaggcugccgaucugaaguccacccaggcugccaucgaccagauuaacggaaaacucaaucgccugaucggcaagacaaacgaaaaauuccaccagauugagaaggaguucucugaaguggaagggcggauccaggaucuugagaaguacgucgaggacaccaaaauugaucugugguccuauaaugccgaacuccugguggcucuggagaaccaacauacaaucgaccucaccgauagcgaaaugaacaagcuguuugagaaaacgaagaaacagcuuagagaaaaugcggaggacaugggaaacggcugcuucaagaucuaccacaagugugauaaugccugcauugggucuauccgcaacggcacauaugaccaugacguuuaccgggaugaggcucugaauaacagauuucagauuaaaggaguggaacucaaguccggcuacaaagacuggauccuguggauuagcuucgccaucuccugcuuucuucugugugucgcccuccugggguucaucaugugggcuugccagaagggaaauauucgcuguaacaucugcauuuga

SEQ ID NO: 205683 - RNA, 1701 nt, Artificial Sequence; identical to SEQ ID NO: 204513
  derived and/or modified CDS sequence (opt5) from hemagglutinin__InfluenzaA__ALN39665

SEQ ID NO: 205684 - RNA, 1701 nt, Artificial Sequence; identical to SEQ ID NO: 205119
  derived and/or modified CDS sequence (opt5) from hemagglutinin__InfluenzaA__ALN39666

SEQ ID NO: 205685 - RNA, 1701 nt, Artificial Sequence
  derived and/or modified CDS sequence (opt5) from hemagglutinin__InfluenzaA__ALN39667
augaagaccaucauugcccugagcuacauccucugccugguguucgcucagaaacuucccggcaacgacaauuccacagccacgcugugucucgggcaccaugcggucccuaacggaaccauuguuaagacaaucaccaaugauagaauugaggugacaaacgcuaccgaacuggugcaaaauucuagcaucggcgagaucugcaacuccccgcaccagauucuugacggggaaaauuguacacugaucgaugcccuccugggagacccccagugcgauggcuuucagaacaaaaagugggaccuguucgucgagcggucuaaagccuauagcaauuguuacccuuaugaugugcccgacuacgcuucccuccgcucucugguugccagcuccgggacccuugaauuuaacaaugagagcuucaacugggcuggagugacgcaaaauggcaccucuuccgccugcauuagaggcagcaacucuuccuuuuucagccggcugaauuggcucacacauucuaacuuuaaguauccugcgcugaacgucaccaugcccaauaacgagcaguucgauaaacuuuacaucuggggagugcaccauccugggacagacaaggaucagauuuuucuguaugcccaguccagcggccgcaucaccguuuccacgaagagaucucaacaggcugugacaccgaauauugggagccggccccgcaucagaaacaucccuucccggauuagcaucuacuggaccauugucaaacccggagacauccuccugauuaauucuacaggcaaccugaucgccccucgcggguacuucaagaucagauccggaaaaagcucuauuaugcggagcgaugcucccaucggcaaguguaaguccgaaugcauuaccccgaauggcucuaucccuaacgacaaacccuuucagaaugugaaccgcauuaccuauggggccuguccuagauacgugaagcagagcacacucaaacuggcgacgggaaugcggaauguccccgagaagcaaacccgcggcaucuucggggccaucgcuggauuuauugaaaacggcugggaggggaugaaagacggaugguauggcuucagacaccaaaauuccgagggccgggggcaggccgcugaucuuaagagcacacaggccgccaucgaccagauuaacggaaaacugaauagacucaucggcaagaccaacgaaaaguuccaccagauugagaaagaauuuucugagguugaagggcgcauccaggaucuggagaaguacguggaggacacaaaaauugaucuuugguccuauaacgcugaacugcucguggcgcuggagaaucaacauaccaucgaccugacggauagcgaaaugaacaaacucuucgagaagacaaagaagcagcugcgggaaaaugccgaggacaugggaaacggcugcuuuaaaaucuaccacaagugugauaaugcuugcauugggucuaucagaaacggcaccuaugaccaugaugucuaccgcaaugaggcccuuaacaaucgguuccagauuaaaggaguggaacugaaguccggcuacaaagacuggauccucuggauuagcuuugccaucuccugcuuccugcuuuguguugcucugcucggguuuaucaugugggccugccagaagggaaacauuagauguaauaucugcauuuga

SEQ ID NO: 205686 - RNA, 1701 nt, Artificial Sequence; identical to SEQ ID NO: 205588
  derived and/or modified CDS sequence (opt5) from hemagglutinin__InfluenzaA__ALN39668

SEQ ID NO: 205687 - RNA, 1701 nt, Artificial Sequence
  derived and/or modified CDS sequence (opt5) from hemagglutinin__InfluenzaA__ALN39669
augaagaccaucauugcccugagcuacauccucugccugguguucgcucagaaaauucccggcaacgacaauuccacagccacgcuuugucuggggcaccaugcggucccuaacggaaccaucguuaagacaauuaccaaugauagaaucgaggugacaaacgcuaccgaacucgugcaaaauucuagcaucggcgagauuugcgacuccccgcaccagauccuggauggggaaaacuguacacuuauugacgcccugcucggagauccccagugcgacggcuuucagaauaaaaagugggaucuguucgucgagcggucuaaagccuauagcaacuguuacccuuaugacgugcccgauuacgcuucccugcgcucucucguugccagcuccgggacccuggaauuuaauaacgagagcuucaauuggacgggagugacccaaaacggcacaucuuccgcuugcaucagacggucuagcuccagcuuuuucucucgccuuaauuggcugacccaucucaacuauacauacccugcccugaaugucaccaugcccaacaacgagcaguuugacaaacuuuauauuuggggcgugcaccauccugggacggauaaggaccagaucuuccuguacgcgcagcucuccggaagaauuacaguuagcaccaagcggucccaacaggccgugaucccgaauaucggcucucgcccccggauuagagauaucccuagccgcauuuccaucuacuggacaauugucaagcccggggacauccugcugaucaacagcaccggaaaucucauugcuccuagaggcuauuuuaaaauccggucugggaaguccagcauuaugcgcucugacgcccccaucggaaaauguaagagcgaaugcauuaccccgaacggcuccaucccuaaugauaagcccuuccagaacgugaauagaaucacauacggcgcuuguccucgguaugugaaacacucuacgcugaaacuugccaccgggaugcgcaacguccccgagaagcagacaagaggaauuuuuggcgcgaucgccggguucauugaaaauggaugggagggcaugguugacgggugguacggauuucggcaccaaaacagcgagggcagaggccaggcugccgaucugaaguccacccaggcugccaucgaccaaauuaaugggaaacucaaccgccugaucggaaagacaaaugaaaaauuccaucagauugagaaggaguucagcgaaguggaaggccggauccaggaucuugagaaguauguggaggacaccaaaaucgaucuguggucuuacaacgccgaacuccuggucgcucuggagaaucagcacacgauugaccucacagauuccgaaaugaacaagcuguuugagaaaaccaagaaacaacuuagagaaaacgcggaggacauggggaauggaugcuucaagaucuaucauaagugugauaacgccugcauuggcagcauccgcaaugggaccuacgaccacaacguguaccgggacgaggcucugaauaacagauuucagauuaaaggcguugaacucaagucuggauauaaagauuggauccuguggaucuccuucgccauuagcugcuuucuucuguguguggcccuccugggcuucaucaugugggcuugccagaaggggaauauucgcuguaacaucugcauuuga

SEQ ID NO: 205688 - RNA, 1701 nt, Artificial Sequence; identical to SEQ ID NO: 204513
  derived and/or modified CDS sequence (opt5) from hemagglutinin__InfluenzaA__ALN39670

SEQ ID NO: 205689 - RNA, 1701 nt, Artificial Sequence
  derived and/or modified CDS sequence (opt5) from hemagglutinin__InfluenzaA__ALN39671
augaagaccaucauugcccugagcuacauccucugccugguguucgcucagaaaauucccggcaacgacaauuccacagccacgcuuugucuggggcaccaugcggucccuaacggaaccaucguuaagacaauuaccaaugauagaaucgaggugacaaacgcuaccgaacucgugcaaaauucuagcaucggcgagauuugcgacuccccgcaccagauccuggauggggaaaacuguacacuuauugacgcccugcucggagauccccagugcgacggcuuucagaauaaaaagugggaucuguucgucgagcggucuaaagccuauagcaacuguuacccuuaugacgugcccgauuacgcuucccugcgcucucucguugccagcuccgggacccuggaauuuaauaacgagagcuucaauuggacgggagugacccaaaacggcacaucuuccgcuugcaucagacggagcagcuccagcuuuuucucucgccuuaauuggcugacccaucucaacuauacauacccugcccugaaugucaccaugcccaacaacgagcaguuugacaaacuuuauauuuggggcgugcaccauccugggacggauaaggaccagaucuuccuguacgcgcaguccagcggaagaauuacaguuuccaccaagcggucucaacaggccgugaucccgaauaucggcagccgcccccggauuagagauaucccuucccgcauuagcaucuacuggacaauugucaagcccggggacauccuccugaucaacucuaccggaaaucugauugcuccuagaggcuauuuuaaaauccgguccgggaagucuucuauuaugcgcagcgacgcccccaucggaaaauguaaguccgaaugcauuaccccgaacggcucuaucccuaaugauaagcccuuccagaacgugaauagaaucacauacggcgcuuguccucgguaugugaaacacagcacgcucaagcuggccaccgggaugcgcaacguccccgagaaacagacaagaggaauuuuuggcgcgaucgccggguucauugaaaauggaugggagggcaugguugacgggugguacggauuucggcaccaaaacuccgagggcagaggccaggcugccgaucuuaagagcacccaggcugccaucgaccaaauuaaugggaaacugaaccgccucaucggaaagacaaaugaaaaauuccaucagauugagaaggaguucucugaaguggaaggccggauccaggaucuggagaaguauguggaggacaccaaaaucgaucuuugguccuacaacgccgaacugcucgucgcucuggagaaucagcacacgauugaccugacagauagcgaaaugaacaagcucuuugagaaaaccagaaagcaacugcgcgaaaacgcggaggacauggggaauggaugcuucaaaaucuaucauaagugugauaacgccugcauuggcucuauccggaaugggaccuacgaccacaacguguacagagacgaggcucuuaauaaccgcuuucagauuaagggcguugaacugaaauccggauauaaggauuggauccucuggaucagcuucgccauuuccugcuuucugcuuuguguggcccugcucggcuucaucaugugggcuugccagaaagggaauauucgguguaacaucugcauuuga

SEQ ID NO: 205690 - RNA, 1701 nt, Artificial Sequence; identical to SEQ ID NO: 204513
  derived and/or modified CDS sequence (opt5) from hemagglutinin__InfluenzaA__ALN39672

SEQ ID NO: 205691 - RNA, 1701 nt, Artificial Sequence
  derived and/or modified CDS sequence (opt5) from hemagglutinin__InfluenzaA__ALN39673
augaagaccaucauugcccugagcuacauccucugccugguguucgcucagaaaauucccggcaacgacaauuccacagccacgcuuugucuggggcaccaugcggucccuaacggaaccaucguuaagacaauuaccaaugauagaaucgaggugacaaacgcuaccgaacucgugcaaaauucuagcaucggcgagauuugcgacuccccgcaccagauccuggauggggaaaacuguacacuuauugacgcccugcucggagauccccagugcgacggcuuucagaauaaaaagugggaucuguucgucgagcggucuaaagccuauagcaacuguuacccuuaugacgugcccgauuacgcuucccugcgcucucucguugccagcuccgggacccuggaauuuaauaacgagagcuucaauuggacgggagugacccaaaacggcacaucuuccgcuugcaucagacggagcagcuccagcuuuuucucucgccuuaauuggcugacccaucucaacuauacauacccugcccugaaugucaccaugcccaacaacgagcaguuugacaaacuuuauauuuggggcgugcaccauccugggacggauaaggaccagaucuuccuguacgcgcaguccagcggaagaauuacaguuuccaccaagcggucucaacaggccgugaucccggauaucggcagccgcccccggauuagagacaucccuucccgcauuagcaucuacuggacaauugucaagcccggggacauccuccugaucaauucuaccggaaaccugauugcuccuagaggcuauuuuaaaauccgguccgggaagucuucuauuaugcgcagcgaugcccccaucggaaaauguaaguccgaaugcauuaccccgaauggcucuaucccuaacgacaagcccuuccagaaugugaacagaaucacauacggcgcuuguccucgguaugugaaacacagcacgcucaagcuggccaccgggaugcgcaauguccccgagaaacagacaagaggaauuuuuggcgcgaucgccggguucauugaaaacggaugggagggcaugguugaugggugguacggauuucggcaccaaaauuccgagggcagaggccaggcugccgaccuuaagagcacccaggcugccaucgaucaaauuaacgggaaacugaaucgccucaucggaaagacaaacgaaaaauuccaucagauugagaaggaguucucugaaguggaaggccggauccaggaccuggagaaguauguggaggauaccaaaaucgaccuuugguccuacaaugccgaacugcucgucgcucuggagaaccagcacacgauugaucugacagacagcgaaaugaauaagcucuuugagaaaaccaagaaacaacugagagaaaacgcggaggauauggggaacggaugcuucaagaucuaucauaagugugacaaugccugcauuggcucuauccgcaacgggaccuacgaccacaauguguaccgggaugaggcucuuaacaauagauuucagauuaaaggcguugaacugaaguccggauauaaagacuggauccucuggaucagcuucgccauuuccugcuuucugcuuuguguggcccugcucggcuucaucaugugggcuugccagaaggggaacauucgcuguaauaucugcauuuga

SEQ ID NO: 205692 - RNA, 1701 nt, Artificial Sequence; identical to SEQ ID NO: 205053
  derived and/or modified CDS sequence (opt5) from hemagglutinin__InfluenzaA__ALN39674

SEQ ID NO: 205693 - RNA, 1701 nt, Artificial Sequence; identical to SEQ ID NO: 204513
  derived and/or modified CDS sequence (opt5) from hemagglutinin__InfluenzaA__ALN39675

SEQ ID NO: 205694 - RNA, 1701 nt, Artificial Sequence
  derived and/or modified CDS sequence (opt5) from hemagglutinin__InfluenzaA__ALN39676
augaagaccaucauugcccugagcugcauccucugucugguguucgcucagaaacuucccggcaacgacaauuccacagccacgcugugccucgggcaccaugcggucccuaacggaaccauuguuaagacaaucaccaaugauagaauugaggugacaaacgcuaccgaacuggugcaaaauucuagcaucggcgagaucugugacuccccgcaccagauucuugauggggaaaacugcacacugaucgacgcccuccugggagauccccagugugacggcuuucagaauaaaaagugggaucuguucgucgagcggucuaaagccuacagcaacugcuauccuuacgacgugcccgauuaugcuucccuccgcucucugguugccagcuccgggacccuugaauuuaauaacgagaauuucaacugggcuggagugacgcaaaauggcaccucuagcuccuguauuagaggcagcaacucuuccuuuuucagccggcugaauuggcucacacaucugaacucuaaguacccugcccuuaacgucaccaugcccaauaacgagcaguuugacaagcuguauaucuggggagugcaccauccugggacagauaaagaccagauuuuccucuacgcgcaguccagcggccgcaucaccguuuccacgaagagaucucaacaggccgugauuccgaauaucgggagccggccccgcaucagagauauuccuucccggaucagcauuuauuggacaaucgucaaacccggagacauucugcugaucaacucuaccggcaaucucaucgcuccucgcggguacuuuagaauuagauccggaaagagcucuaucaugcgcagcgacgcccccauuggcaaaugcaaguccgaauguaucacaccgaacggcucuauuccuaaugauaagcccuuccagaacgugaauagaaucaccuacggggcuugcccucgguaugugaaacagaacacccugaaacuugccacaggaaugcgcaauguccccgagagacaaacgcggggcaucuuuggggcgauugccggauucaucgaaaacggcugggaggggaugguugacggaugguacggcuuuagacaccagaauagcgagggccgcgggcaggcugccgaucugaaguccacccaaagcgcuauugaccagaucaacggaaagcucaaucggcugauuggcaaaacaaacgaaaaguuccaccagaucgagaaagaguucucugaaguggaagggcggauucaggaucuugagaaguauguggaggacaccaagaucgaucugugguccuacaacgccgaacuccuggucgcccuggagaaucaacauacaaucgaccucaccgauagcgaaaugaacaaacuguuugagaagacgaaaaagcagcuucgcgaaaaugcugaggacaugggaaacggcuguuucaaaauuuaucacaagugcgauaaugcgugcaucgggucuauucggaacggcacauacgaccaugacguguauagagaugaggcccugaauaaccgcuuucagaucaagggaguugaacucaaauccggcuacaaggacuggauucuguggaucagcuucgcuaucuccuguuuucuucugugcguggcccuccugggguucauuaugugggccugucagaaaggaaauauccggugcaacauuuguaucuga

SEQ ID NO: 205695 - RNA, 1701 nt, Artificial Sequence
  derived and/or modified CDS sequence (opt5) from hemagglutinin__InfluenzaA__ALN39677
augaagaccaucauugcccugggcuacauccucugccugguguucgcucagaaaauucccgggaacgacaauagcacagccacgcuuugucugggacaccaugcggucccuaacggcaccaucguuaagacaauuaccaaugauagaaucgaggugacaaacgcuaccgaacucgugcaaaauuccucuaucggggagauuugcgacagcccgcacaaaauccuggauggagaaaacuguacacuuauugacgcccugcucggcgauccccagugcgacggguuucagaauaagaaaugggaucuguucgucgagcgguccaaggccuauucuaacuguuacccuuaugacgugcccgauuacgcuagccugcgcucccucguugccucuagcggaacccuggaauuuaauaacgaguccuucaauuggacgggcgugacccagaacggcacaagcucugcuugcaucagacgguccucuagcuccuuuuucagccgccuuaauuggcugacccaucucaacuaugccuacccugcgcugaaugucacaaugcccaacaacgagcaauuugacaaacuuuauauuuggggagugcaccauccugggaccgauaaagaccagaucuuccuguacgcccagucuuccggcagaauuacgguuagcacaaagcggucccagcaagcugugaucccgaauaucgggucucgcccccggauuagagauaucccuagccgcauuuccaucuacuggaccauugucaaacccggagacauccuccugaucaacagcacaggcaaucugauugccccuagaggguauuuuaagauccggucuggaaaauccagcauuaugcgcucugacgcucccaucggcaaguguaagagcgaaugcauuaccccgaacggcuccaucccuaaugauaaacccuuccagaacgugaauagaaucaccuacggggccuguccucgguaugugaagcacucuacacucaaacuggcgacgggaaugcgcaacguccccgagaagcagaccagaggcauuuuuggggccaucgcuggauucauugaaaauggcugggaggggaugguugacggaugguacggcuuucggcaccagaacagcgagggcagagggcaagccgcugaucuuaaauccacacaggccgccaucgaccagauuaauggaaagcugaaccgccucaucggcaaaaccaaugaaaaguuccaucaaauugagaaggaguucagcgaaguggaagggcggauccaggaucuggagaaauauguggaggacacaaagaucgaucuuuggucuuacaacgcugaacugcucgucgcgcuggagaaucagcacaccauugaccugacggauuccgaaaugaacaaacucuuugagaagacaaagaagcagcugagagaaaacgccgaggacaugggaaauggcugcuucaagaucuaucauaaaugugauaacgcuugcauugggagcauccgcaauggcaccuacgaccacaacguguaccgggacgaggcccuuaauaacagauuucaaauuaagggaguugaacugaaaucuggcuauaaggauuggauccucuggaucuccuucgccauuagcugcuuucugcuuuguguggcucugcucggguucaucaugugggccugccagaaaggaaauauucgcuguaacaucugcauuuga

SEQ ID NO: 205696 - RNA, 1701 nt, Artificial Sequence; identical to SEQ ID NO: 205400
  derived and/or modified CDS sequence (opt5) from hemagglutinin__InfluenzaA__ALN39678

SEQ ID NO: 205697 - RNA, 1701 nt, Artificial Sequence
  derived and/or modified CDS sequence (opt5) from hemagglutinin__InfluenzaA__ALN39679
augaagaccaucauugcccugggcuacauccucugccugguguucgcucagaaaauucccgggaacgacaauagcacagccacgcuuugucugggacaccaugcggucccuaacggcaccguugugaagacaaucaccaaugauagaauugaggugacaaacgcuaccgaacucguccaaaauuccucuaucggggagaucugcgacagcccgcacaaaauucuggauggagaaaacuguacacuuaucgacgcccugcucggcgauccccagugcgacggguuucagaauaagaaaugggaucuguucguggagcgguccaaggccuauucuaacuguuacccuuaugacguucccgauuacgcuagccugcgcucccucguggccucuagcggaacccuggaauuuaauaacgaguccuucaauuggacgggcgucacccagaacggcacaagcucugcuugcauuagacgguccucuagcuccuuuuucagccgccuuaauuggcugacccaucucaacuauacauacccugcccugaaugugaccaugcccaacaacgagcaauuugacaaacuuuauaucuggggaguucaccauccugggacggauaaggaccagauuuuccuguacgcgcagucuuccggcagaaucacagugagcaccaagcggucccagcaagccgucauuccgaauaucgggucucgccccagaauccgggauauuccuagccgcaucuccauuuacuggacaaucgugaaacccggagacauucuccugaucaacagcaccggcaaucugaucgcuccuagaggguauuuuaagauucggucuggaaaauccagcaucaugcgcucugacgcccccauuggcaaguguaagagcgaaugcaucaccccgaacggcuccauuccuaaugauaaacccuuccagaacgugaauagaaucacauacggggcuuguccucgguaugucaagcacucuacgcucaaacuggccaccggaaugcgcaacguucccgagaagcagacaagaggcaucuuuggggcgauugccggauucaucgaaaauggcugggaggggaugguggacggaugguacggcuuucggcaccagaacagcgagggcagagggcaagcugccgaucuuaaauccacccaggcugccauugaccagaucaauggaaagcugaaccgccucauuggcaaaacaaaugaaaaguuccaucaaaucgagaaggaguucagcgaaguggaagggcggauucaggaucuggagaaauaugucgaggacaccaagaucgaucuuuggucuuacaacgccgaacugcucguggcucuggagaaucagcacacgaucgaccugacagauuccgaaaugaacaaacucuuugagaagaccaaaaagcagcugagagaaaacgcggaggacaugggaaauggcugcuucaagauuuaucauaaaugugauaacgccugcaucgggagcauucgcaauggcaccuacgaccacaacguuuaccgggacgaggcucuuaauaacagauuucaaaucaagggaguggaacugaaaucuggcuauaaggauuggauucucuggaucuccuucgccaucagcugcuuucugcuuugugucgcccugcucggguucauuaugugggcuugccagaaaggaaauauccgcuguaacauuugcaucuga

SEQ ID NO: 205698 - RNA, 1701 nt, Artificial Sequence; identical to SEQ ID NO: 205400
  derived and/or modified CDS sequence (opt5) from hemagglutinin__InfluenzaA__ALN39680

SEQ ID NO: 205699 - RNA, 1701 nt, Artificial Sequence; identical to SEQ ID NO: 205400
  derived and/or modified CDS sequence (opt5) from hemagglutinin__InfluenzaA__ALN39681

SEQ ID NO: 205700 - RNA, 1701 nt, Artificial Sequence; identical to SEQ ID NO: 205400
  derived and/or modified CDS sequence (opt5) from hemagglutinin__InfluenzaA__ALN39682

SEQ ID NO: 205701 - RNA, 1701 nt, Artificial Sequence; identical to SEQ ID NO: 205400
  derived and/or modified CDS sequence (opt5) from hemagglutinin__InfluenzaA__ALN39683

SEQ ID NO: 205702 - RNA, 1701 nt, Artificial Sequence; identical to SEQ ID NO: 205400
  derived and/or modified CDS sequence (opt5) from hemagglutinin__InfluenzaA__ALN39684

SEQ ID NO: 205703 - RNA, 1701 nt, Artificial Sequence; identical to SEQ ID NO: 205400
  derived and/or modified CDS sequence (opt5) from hemagglutinin__InfluenzaA__ALN39685

SEQ ID NO: 205704 - RNA, 1701 nt, Artificial Sequence
  derived and/or modified CDS sequence (opt5) from hemagglutinin__InfluenzaA__ALN39686
augaagaccaucauugcccugggcuacauccucugccuggcuuucgcccagaaaauucccgggaacgacaauagcacagcgacgcuuugucugggacaccaugcugugccuaacggcaccaucgucaagacaauuaccaaugauagaaucgagguuacaaacgccaccgaacucgugcaaaauuccucuaucggggagauuugcgacagcccgcacaaaauccuggauggagaaaacuguacacuuauugacgcccugcucggcgauccccagugcgacggguuucagaauaagaaaugggaucuguucguggagcgguccaaggcuuauucuaacuguuacccuuaugacguccccgauuacaccagccugcgcucccucguggccucuagcggaacgcuggaauuuaauaacgaguccuucaauuggaccggcguuacacagaacggcaccagcucugcuugcaucagacgguccucuagcuccuuuuucagccgccuuaauuggcugacacaucucaacuauaccuacccugcccugaaugugacgaugcccaacaacgagcaauuugacaaacuuuauauuuggggaguccaccauccugggacagauaaggaccagaucuuccuguacgcgcagucuuccggcagaauuaccgugagcacaaagcggucccagcaagccguuaucccgaauaucgggucucgcccccggauuagagauaucccuagccgcauuuccaucuacuggaccauugugaaacccggagacauccuccugaucaacagcaccggcaaucugauugcuccuagaggguauuuuaagauccggucuggaaaauccagcauuaugcgcucugacgcccccaucggcaaguguaagagcgaaugcauuacaccgaacggcuccaucccuaaugauaaacccuuccagaacgucaauagaaucacguacggggcuuguccucgguaugugaagcacucuacccucaaacuggccacaggaaugcgcaacgugcccgagaagcagaccagaggcauuuuuggggcgaucgccggauucauugaaaauggcugggaggggauggucgacggaugguacggcuuucggcaccagaacagcgagggcagagggcaagcugccgaucuuaaauccacacaggcugccaucgaccagauuaauggaaagcugaaccgccucaucggcaaaaccaaugaaaaguuccaucaaauugagaaggaguucagcgaaguugaagggcggauccaggaucuggagaaauauguggaggacacgaagaucgaucuuuggucuuacaacgccgaacugcucguggcucuggagaaucagcacacaauugaccugaccgauuccgaaaugaacaaacucuuugagaagaccaaaaagcagcugagagaaaacgcggaggacaugggaaauggcugcuucaagaucuaucauaaaugugauaacgccugcauugggagcauccgcaauggcacauacgaccacaacgucuaccgggacgaggcucuuaauaacagauuucaaauuaagggaguggaacugaaaucuggcuauaaggauuggauccucuggaucuccuucgccauuagcugcuuucugcuuuguguugcccugcucggguucaucaugugggcuugccagaaaggaaauauucgcuguaacaucugcauuuga

SEQ ID NO: 205705 - RNA, 1701 nt, Artificial Sequence; identical to SEQ ID NO: 205400
  derived and/or modified CDS sequence (opt5) from hemagglutinin__InfluenzaA__ALN39687

SEQ ID NO: 205706 - RNA, 1701 nt, Artificial Sequence
  derived and/or modified CDS sequence (opt5) from hemagglutinin__InfluenzaA__ALN39688
augaagaccaucauugcccugggcuacauccucugccugguguucgcucagaaaauucccgggaacgacaauagcacagccacgcuuugucugggacaccaugcggucccuaacggcaccaucguuaagacaauuaccaaugauagaaucgaggugacaaacgcuaccgaacucgugcaaaauuccucuaucggggagauuugcgacagcccgcacaaaauccuggauggagaaaacuguacacuuauugacgcccugcucggcgauccccagugcgacggguuucagaauaagaaaugggaucuguucgucgagcgguccaaggccuauucuaacuguuacccuuaugacgugcccgauuacgcuagccugcgcucccucguugccucuagcggaacccuggaauuuaauaacgaguccuucaauuggacgggcgugacccagaacggcacaagcucugcuugcaucagacgguccucuagcuccuuuuucagccgccuuaauuggcugacccaucucaacuauauuuacccugcccugaaugucacaaugcccaacaacgagcaauuugacaaacuuuauaucuggggagugcaccauccugggaccgauaaagaccagauuuuccuguacgcgcagucuuccggcagaaucacgguuagcacaaagcggucccagcaagccgugaucccgaauauugggucucgccccagaauccgggauauuccuagccgcaucuccauuuacuggaccaucgucaaacccggagacauccuccugauuaacagcacaggcaaucugaucgcuccuagaggguauuuuaagauucggucuggaaaauccagcaucaugcgcucugacgcccccauuggcaaguguaagagcgaaugcaucaccccgaacggcuccaucccuaaugauaaacccuuccagaacgugaauagaauuaccuacggggcuuguccucgguaugugaagcacucuacacucaaacuggccacgggaaugcgcaacguccccgagaagcagaccagaggcaucuuuggggcgauugccggauucaucgaaaauggcugggaggggaugguugacggaugguacggcuuucggcaccagaacagcgagggcagagggcaagcugccgaucuuaaauccacacaggcugccauugaccagaucaauggaaagcugaaccgccucauuggcaaaaccaaugaaaaguuccaucaaaucgagaaggaguucagcgaaguggaagggcggauccaggaucuggagaaauauguggaggacacaaagauugaucuuuggucuuacaacgccgaacugcucgucgcucuggagaaucagcacaccaucgaccugacggauuccgaaaugaacaaacucuuugagaagacaaagaagcagcugagagaaaacgcggaggacaugggaaauggcugcuucaagauuuaucauaaaugugauaacgccugcaucgggagcauucgcaauggcaccuacgaccacaacguguaccgggacgaggcucuuaauaacagauuucaaaucaagggaguugaacugaaaucuggcuauaaggauuggauccucuggauuuccuucgccaucagcugcuuucugcuuuguguggcccugcucggguucauuaugugggcuugccagaaaggaaauauccgcuguaacauuugcaucuga

SEQ ID NO: 205707 - RNA, 1701 nt, Artificial Sequence
  derived and/or modified CDS sequence (opt5) from hemagglutinin__InfluenzaA__ALN39689
augaagaccaucauugcccugggcuacauccucugccugguguucgcucagaaaauucccgggaacgacaauagcacagccacgcuuugucugggacaccaugcggucccuaacggcaccaucguuaagacaauuaccaaugauagaaucgaggugacaaacgcuaccgaacucgugcaaaauuccucuaucggggagauuugcgacagcccgcacaaaauccuggauggagaaaacuguacacuuauugacgcccugcucggcgauccccagugcgacggguuucagaauaagaaaugggaucuguucgucgagcgguccaaggccuauucuaacuguuacccuuaugacgugcccgauuacgcuagccugcgcucccucguugccucuagcggaacccuggaauuuaauaacgaguccuucaauuggacgggcgugacccagaacggcacaagcucugcuugcaucagacgguccucuagcuccuuuuucagccgccuuaauuggcugacccaucucaacuauacauacccugcccugaaugucaccaugcccaacaacgagcaauuugacaaacuuuauauuuggggagugcaccauccugggacggauaaggaccagaucuuccuguacgcgcagucuuccggcagaauuacaguuagcaccaagcggucccagcaagccgugaucccgaauaucgggucucgcccccggauuagagauaucccuagccgcauuuccaucuacuggacaauugucaaacccggagacauccuccugauccacagcaccggcaaccugauugcuccuagaggguauuuuaagauccggucuggaaaauccagcauuaugcgcucugacgcccccaucggcaaguguaagagcgaaugcauuaccccgaauggcuccaucccuaacgauaaacccuuccagaaugugaacagaaucacauacggggcuuguccucgguaugugaagcacucuacgcucaaacuggccaccggaaugcgcaauguccccgagaagcagacaagaggcauuuuuggggcgaucgccggauucauugaaaacggcugggaggggaugguugacggaugguacggcuuucggcaucagaauagcgagggcagagggcaagcugccgaucuuaaauccacccaggcugccaucgaccagauuaacggaaagcugaaucgccucaucggcaaaacaaacgaaaaguuccaccaaauugagaaggaguucagcgaaguggaagggcggauccaggaucuggagaaauauguggaggacaccaagaucgaucuuuggucuuacaaugccgaacugcucgucgcucuggagaaccagcauacgauugaccugacagauuccgaaaugaauaaacucuuugagaagaccaaaaagcagcugagagaaaacgcggaggacaugggaaacggcugcuucaagaucuaucacaaaugugauaaugccugcauugggagcauccgcaacggcaccuacgaccacaauguguaccgggacgaggcucuuaacaauagauuucaaauuaagggaguugaacugaaaucuggcuauaaggauuggauccucuggaucuccuucgccauuagcugcuuucugcuuuguguggcccugcucggguucaucaugugggcuugccagaaaggaaacauucgcuguaauaucugcauuuga

SEQ ID NO: 205708 - RNA, 1701 nt, Artificial Sequence
  derived and/or modified CDS sequence (opt5) from hemagglutinin__InfluenzaA__ALN39690
augaagaccaucauugcccugagcuacauccucugccugguguucgcucagaaacuucccggcaacgacaauuccacagccacgcugugucucgggcaccaugcggucccuaacggaaccauuguuaagacaaucaccaaugauagaauugaggugacaaacgcuaccgaacuggugcaaaauucuagcaucggcgagaucugcgacuccccgcaccagauucuugaugggaaaaacuguacacugaucgacgcccuccugggagauccccagugcgacggcuuucagaauaagaaaugggaucuguucgucgaacggucuaaggcccauagcaacuguuauccuuacgacgugcccgauuaugcuucccuccgcucucugguugccagcuccgggacccuugaguuuaauaacgaauccuucaauugggcuggagugacgcaaaacggcaccucuuccagcugcauuagaggcucuaauuccagcuuuuucucucggcugaacuggcucacacaccugaauagcaucuacccugcccuuaacgucaccaugcccaacaaugagcaguuugacaagcuguauauuuggggagugcaucacccugggacagauaaagaccagaucuuccucuacgcgcagagcuccggccgcauuaccguuucuacgaagagaagccaacaggccgugaucccgaacaucgggucccggccccgcauuagagauaucccuagccggauuucuaucuauuggacaauugucaaacccggagacauccugcugaucaauuccaccggcaaccucauugcuccucgcggguacuuuaagaucagaagcggaaaaucuagcauuaugcgguccgacgcccccaucggcaaguguaagucugagugcauuacaccgaauggcagcaucccuaacgauaaacccuuccagaaugugaaccgcaucaccuacggggcuuguccuagauaugugaagcaguccacccugaaacuugccacaggaaugcggaauguccccgaacgccaaacgagaggcauuuuuggggcgaucgccggauucauugagaacggcugggaagggaugguugacggaugguacggcuuucggcaccagaauagcgagggcagagggcaggcugccgaucugaagucuacccaagcugccaucgaccagauuaacggaaaacucaaucgccugaucggcaagacaaacgagaaauuccaucagauugaaaaggaguucuccgaaguggaggggcggauccaggaucuugaaaaguauguggaggacaccaaaaucgaucuguggagcuacaaugccgagcuccuggucgcucuggaaaaccaacacacaauugaccucaccgauucugagaugaacaagcuguuugagaaaacgaagaaacagcuuagagaaaaugcggaagacaugggaaacggcugcuucaagaucuaucauaagugugauaaugccugcauuggguccauccgcaacggcacauacgaccacaauguguaucgggacgaggcucugaacaauagauuucagauuaaaggaguugagcucaagagcggcuacaaagauuggauccuguggaucuccuucgccauuucuugcuuucuucuguguguggcccuccugggguucaucaugugggcuugccagaagggaaacauucgcuguaauaucugcauuuga

SEQ ID NO: 205709 - RNA, 1701 nt, Artificial Sequence
  derived and/or modified CDS sequence (opt5) from hemagglutinin__InfluenzaA__ALN39691
augaagaccaucauugcccugagcuacauccucugccugguguucgcucagaaacuucccggcaacgacaauuccacagccacgcugugucucgggcaccaugcggucccuaacggaaccauuguuaagacaaucaccaaugauagaauugaggugacaaacgcuaccgaacuggugcaaaauucuagcaucggcgagaucugcgacuccccgcaccagauucuugaugggaaaaacuguacacugaucgacgcccuccugggagauccccagugcgacggcuuucagaauaagaaaugggaucuguucgucgaacggucuaaggcccauagcaacuguuauccuuacgacgugcccgauuaugcuucccuccgcucucugguugccagcuccgggacccuugaguuuaauaacgaauccuucaauugggcuggagugacgcaaaacggcaccucuuccagcugcauuagaggcucuaauuccagcuuuuucucucggcugaacuggcucacacaccuuaauuccaaguacccugcccuuaacgucaccaugcccaacaaugagcaguuugacaaacuguauaucuggggagugcaucacccugggacagauaaggaccagauuuuccucuacgcgcagccgagcggccgcaucaccguuuccacgaaaagaucucaacaggccgugauucccaacaucgggagccggccucgcaucagagauauucccucccggaucagcauuuauuggacaaucgucaagccuggagacauucugcugaucaauucuaccggcaaccucaucgcuccccgcggguacuuuaaaauuagauccggaaagagcucuaucaugcggagcgacgccccgauuggcaaguguaaauccgagugcaucacaccuaauggcucuauucccaacgauaagccuuuccagaaugugaaccgcaucaccuacggggcuugucccagauaugugaaacagagcacccugaagcuggccacaggaaugcggaauguccccgaaaaacaaacgcgcggcaucuuuggggcgauugccggauucaucgagaacggcugggaagggaugaaggacggaugguacggcuuuagacaccagaauagcgagggccgggggcaggcugccgaucugaaaagcacccaagcugccauugaccagaucaacggaaagcucaauagacugauuggcaagacaaacgagaaauuccaucagaucgaaaaggaguucucugaaguugaggggcgcauucaggaucuugaaaaauauguggaggacaccaagaucgaucugugguccuacaaugccgagcuccugguggcucuggaaaaccaacacacaaucgaccucaccgauagcgagaugaacaaacuguuugaaaagacgaagaaacagcuucgggagaaugcggaagacaugggaaacggcugcuucaagauuuaucauaaaugugauaaugccugcaucgggucuauuagaaacggcacauacgaccacgacgucuaucgcgaugaggcucugaauaaccgguuucagaucaagggaguggagcucaaauccggcuacaaggacuggauucuguggaucagcuucgccaucuccugcuuucuucuguguguugcccuccugggguucauuaugugggcuugccagaagggaaauaucagauguaacauuugcaucuga

SEQ ID NO: 205710 - RNA, 1701 nt, Artificial Sequence; identical to SEQ ID NO: 205400
  derived and/or modified CDS sequence (opt5) from hemagglutinin__InfluenzaA__ALN39692

SEQ ID NO: 205711 - RNA, 1701 nt, Artificial Sequence; identical to SEQ ID NO: 205400
  derived and/or modified CDS sequence (opt5) from hemagglutinin__InfluenzaA__ALN39693

SEQ ID NO: 205712 - RNA, 1701 nt, Artificial Sequence; identical to SEQ ID NO: 205400
  derived and/or modified CDS sequence (opt5) from hemagglutinin__InfluenzaA__ALN39694

SEQ ID NO: 205713 - RNA, 1701 nt, Artificial Sequence; identical to SEQ ID NO: 205400
  derived and/or modified CDS sequence (opt5) from hemagglutinin__InfluenzaA__ALN39695

SEQ ID NO: 205714 - RNA, 1701 nt, Artificial Sequence; identical to SEQ ID NO: 205400
  derived and/or modified CDS sequence (opt5) from hemagglutinin__InfluenzaA__ALN39696

SEQ ID NO: 205715 - RNA, 1701 nt, Artificial Sequence; identical to SEQ ID NO: 205070
  derived and/or modified CDS sequence (opt5) from hemagglutinin__InfluenzaA__ALN39697

SEQ ID NO: 205716 - RNA, 1701 nt, Artificial Sequence
  derived and/or modified CDS sequence (opt5) from hemagglutinin__InfluenzaA__ALN39698
augaagaccaucauugcccugagccacauccucugccugguguucgcucagaaaauucccggcaacgacaauuccacagccacgcuuugucuggggcaucacgcggucccuaacggaaccaucguuaagacaauuaccaaugauagaaucgaggugacaaacgcuaccgaacucgugcaaaauucuagcaucggcgagauuugcgacuccccgcaucagauccuggauggggaaaacuguacacuuauugacgcccugcucggagauccccagugcgacggcuuucagaauaaaaagugggaucuguucgucgagcggucuaaagccuacagcaacuguuauccuuacgacgugcccgauuaugcuucccugcgcucucucguugccagcuccgggacccuggaauuuaauaacgagagcuucaauuggacgggagugacccaaaacggcacaucuuccgcuugcaucagacggagcagcuccagcuuuuucucucgccuuaauuggcugacccaccucaacuacacauauccugcccugaaugucaccaugcccaacaacgagcaguuugacaaacuuuacauuuggggcgugcaucacccugggacggauaaggaccagaucuuccuguaugcgcaguccagcggaagaauuacaguuuccaccaagcggucucaacaggccgugaucccgaauaucggcagccgcccccggauuagagauaucccuucccgcauuagcaucuacuggacaauugucaagcccggggacauccuccugaucaacucuaccggaaaucugauugcuccuagaggcuacuuuaaaauccgguccgggaagucuucuauuaugcgcagcgacgcccccaucggaaaauguaaguccgaaugcauuaccccgaacggcucuaucccuaaugauaagcccuuccagaacgugaauagaaucacauauggcgcuuguccucgguacgugaaacacagcacgcucaagcuggccaccgggaugcgcaacguccccgagaaacagacaagaggaauuuuuggcgcgaucgccggguucauugaaaauggaugggagggcaugauggacgggugguauggauuucggcaucaaaacuccgagggcagaggccaggcugccgaucuuaagagcacccaggcugccaucgaccaaauuaaugggaaacugaaccgccucaucggaaagacaaaugaaaaauuccaccagauugagaaggaguucucugaaguugaaggccggauccaggaucuggagaaguacguggaggacaccaaaaucgaucuuugguccuauaacgccgaacugcucguggcucuggagaaucagcauacgauugaccugacagauagcgaaaugaacaagcucuuugagaaaaccaagaaacaacugagagaaaacgcggaggacauggggaauggaugcuucaagaucuaccacaagugugauaacgccugcaugggcucuauucgcaaugggaccuaugaccacaacgucuaccggaaugaggcucuuaacaauagauuucagaucaaaggcguggaacugaaguccggauacaaagacuggauucucuggaucagcuucgccaucuccugcuuucugcuuuguguugcccugcucggcuucauuaugugggcuugccagaaggggaacauccgcuguaauauuugcaucuga

SEQ ID NO: 205717 - RNA, 1701 nt, Artificial Sequence
  derived and/or modified CDS sequence (opt5) from hemagglutinin__InfluenzaA__ALN39700
augaagaccaucauugcccugagcuacauccucugccugguguucgcucagaaaauucccggcaacgacaauuccacagccacgcuuugucuggggcaccaugcggucccuaacggaaccaucguuaagacaauuaccaaugauagaaucgaggugacaaacgcuaccgaacucgugcaaaauucuagcaucggcgagauuugcgacuccccgcaccagauccuggauggggaaaacuguacacuuauugacgcccugcucggagauccccagugcgacggcuuucagaauaaaaagugggaucuguucgucgagcggucuaaagccuauagcaacuguuacccuuaugacgugcccgauuacgcuucccugcgcucucucguugccagcuccgggacccuggaauuuaauaacgagagcuucaauuggacgggagugacccaaaacggcacaucuuccgcuugcaucagacggagcagcuccagcuuuuucucucgccuuaauuggcugacccaucucaacuauacauacccugcccugaaugucaccaugcccaacaacgagcaguuugacaaacuuuauauuuggggcgugcaccauccugggacggauaaggaccagaucuuccuguacgcgcaguccagcggaagaauuacaguuuccaccaagcggucucaacaggccgugaucccgaauaucggcagccgcccccggauuagagauaucccuucccgcauuagcaucuacuggacaauugucaagcccggggacauccuccugaucaacucuaccggaaaucugauugcuccuagaggcuauuuuaaaauccgguccgggaagucuucuauuaugcgcagcgacgcccccaucggaaaauguaaguccgaaugcauuaccccgaacggcucuaucccuaaugauaagcccuuccagaacgugaauagaaucacauacggcgcuuguccucgguaugugaaacacagcacgcucaagcuggccaccgggaugcgcaacguccccgagaaacagacaagaggaauuuuuggcgcgaucgccggguucauugaaaauggaugggagggcaugguugacgggugguacggauuucggcaccaaaacuccgagggcagaggccaggcugccgaucuuaagagcacccaggcugccaucgaccaaauuaaugggaaacugaaccgccucaucggaaagacaaaugaaaaauuccaucagauugagaaggaguucucugaaguggaaggccggauccaggaucuggagaaguauguggaggacaccaaaaucgaucuuugguccuacaacgccgaacugcucgucgcucuggagaaucagcacacgauugaccugacagauagcgaaaugaacaagcucuuugagaaaaccaagaaacaacugagagaaaacgcggaggacauggggaauggaugcuucaagaucuaucauaagugugauaacgccugcauuggcucuauccgcaaugggaccuacgaccacaacguguaccgggacgaggcucuuaauaacagauuucagauuaaaggcguugaacugaaguccggauauaaagauuggauccucuggaucagcuucgccauuuccugcuuucugcuuuguguggcccugcucggcuucaucaugugggcuugccagaaggggaauauuaaauguaacaucugcauuuga

SEQ ID NO: 205718 - RNA, 1701 nt, Artificial Sequence; identical to SEQ ID NO: 205119
  derived and/or modified CDS sequence (opt5) from hemagglutinin__InfluenzaA__ALN39701

SEQ ID NO: 205719 - RNA, 1701 nt, Artificial Sequence
  derived and/or modified CDS sequence (opt5) from hemagglutinin__InfluenzaA__ALN39702
augaagaccaucauugcccugagcuacauccucugccugguguucgcucagaaaauucccggcaacgacaauuccacagccacgcuuugucuggggcaccaugcggucccuaacggaaccaucguuaagacaauuaccaaugauagaaucgaggugacaaacgcuaccgaacucgugcaaaauucuagcaucggcgagauuugcgacuccccgcaccagauccuggauggggaaaacuguacacuuauugacgcccugcucggagauccccagugcgacggcuuucagaauaaaaagugggaucuguucgucgagcggucuaaagccuauagcaacuguuacccuuaugacgugcccgauuacgcuucccugcgcucucucguugccagcuccgggacccuggaauuuaauaacgagagcuucaauuggacgggagugacccaaaacggcacaucuuccgcuugcaucagaaagucuagcuccagcuuuuucucucggcuuaauuggcugacccaucucaacuauacauacccugcccugaaugucaccaugcccaacaacgagcaguuugacaaacuuuauauuuggggcgugcaccauccugggacggauaaggaccagaucuuccuguacgcgcgcuccagcggaagaauuacaguuuccaccaagcggucucagcaagccgugaucccgaauaucggcagccgcccccggauuagagauaucccuucccgcauuagcaucuacuggacaauugucaaacccggggacauccuccugaucaacucuaccggaaaucugauugcuccuagaggcuauuuuaagauccgguccgggaaaagcucuauuaugcgcagcgacgcccccaucggaaaguguaaguccgaaugcauuaccccgaacggcucuaucccuaaugauaaacccuuccagaacgugaauagaaucacauacggcgcuuguccucgguaugugaagcacagcacgcucaaacuggccaccgggaugcgcaacguccccgagaagcagacaagaggaauuuuuggcgcgaucgccggguucauugaaaauggaugggagggcaugguugacgggugguacggauuucggcaccagaacuccgagggcagaggccaagcugccgaucuuaaaagcacccaggcugccaucgaccagauuaaugggaagcugaaccgccucaucggaaaaacaaaugaaaaguuccaucaaauugagaaggaguucucugaaguggaaggccggauccaggaucuggagaaauauguggaggacaccaagaucgaucuuugguccuacaacgccgaacugcucgucgcucuggagaaucagcacacgauugaccugacagauagcgaaaugaacaaacucuuugagaagaccaaaaagcagcugagagaaaacgcggaggacauggggaauggaugcuucaagaucuaucauaaaugugauaacgccugcauuggcucuauccgcaaugggaccuacgaccacaacguguaccgggacgaggcucuuaauaacagauuucaaauuaagggcguugaacugaaauccggauauaaggauuggauccucuggaucagcuucgccauuuccugcuuucugcuuuguguggcccugcucggcuucaucaugugggcuugccagaaagggaauauucgcuguucuaucugcauuuga

SEQ ID NO: 205720 - RNA, 1701 nt, Artificial Sequence
  derived and/or modified CDS sequence (opt5) from hemagglutinin__InfluenzaA__ALN39703
augaagaccaucauugcccugagcuacauccucugccugguguucgcucagaaaauucccggcaacgacgauuccacagccacgcuuugucuggggcaccaugcggucccuaauggaaccaucguuaagacaauuaccaacgacagaaucgaggugacaaaugcuaccgaacucgugcaaaacucuagcaucggcgagauuugcgauuccccgcaccagauccuggacggggaaaauuguacacuuauugaugcccugcucggagacccccagugcgauggcuuucagaacaaaaagugggaccuguucgucgagcggucuaaagccuauagcaauuguuacccuuaugaugugcccgacuacgcuucccugcgcucucucguugccagcuccgggacccuggaauuuaacaaugagagcuucaacuggacgggagugacccaaaauggcacaucuuccgcuugcaucagacggagcagcuccagcuuuuucucucgccuuaacuggcugacccaucucaauuauacauacccugcccugaacgucaccaugcccaauaacgagcaguuugauaaacuuuauauuuggggcgugcaccauccugggacggacaaggaucagaucuuccuguacgcgcaguccagcggaagaauuacaguuuccaccaagcggucucaacaggccgugaucccgaacaucggcagccgcccccggauuagagacaucccuucccgcauuagcaucuacuggacaauugucaagcccggggacauccuccugaucaauucuaccggaaaccugauugcuccuagaggcuauuuuaaaauccgguccgggaagucuucuauuaugcgcagcgaugcccccaucggaaaauguaaguccgaaugcauuaccccgaauggcucuaucccuaacgacaagcccuuccagaaugugaacagaaucacauacggcgcuuguccucgguaugugaaacacagcacgcucaagcuggccaccgggaugcgcaauguccccgagaaacagacaagaggaauuuuuggcgcgaucgccggguucauugaaaacggaugggagggcaugguugaugggugguacggauuucggcaccaaaauuccgagggcagaggccaggcugccgaccuuaagagcacccaggcugccaucgaucaaauuaacgggaaacugaaucgccucaucggaaagacaaacgaaaaauuccaucagauugagaaggaguucucugaaguggaaggccggauccaggaccuggagaaguauguggaggauaccaaaaucgaccuuugguccuacaaugccgaacugcucgucgcucuggagaaccagcacacgauugaucugacagacagcgaaaugaauaagcucuuugagaaaaccaagaaacaacugagagaaaacgcggaggauauggggaacggaugcuucaagaucuaucauaagugugacaaugccugcauuggcucuauccgcaacgggaccuacgaccacaauguguaccgggaugaggcucuuaacaauagauuucagauuaaaggcguugaacugaaguccggauauaaagacuggauccucuggaucagcuucgccauuuccugcuuucugcuuuguguggcccugcucggcuucaucaugugggcuugccagaaggggaacauucgcuguaauaucugcauuuga

SEQ ID NO: 205721 - RNA, 1701 nt, Artificial Sequence; identical to SEQ ID NO: 205119
  derived and/or modified CDS sequence (opt5) from hemagglutinin__InfluenzaA__ALN39704

SEQ ID NO: 205722 - RNA, 1701 nt, Artificial Sequence; identical to SEQ ID NO: 204513
  derived and/or modified CDS sequence (opt5) from hemagglutinin__InfluenzaA__ALN39705

SEQ ID NO: 205723 - RNA, 1701 nt, Artificial Sequence
  derived and/or modified CDS sequence (opt5) from hemagglutinin__InfluenzaA__ALN39706
augaagaccaucauugcccugagcuacauccucugccugguguucgcucagaaacuucccggcaacgacaauuccacagccacgcugugucucgggcaccaugcggucccuaacggaaugauuguuaagaccaucacaaaugauagaauugaggugaccaacgcuacagaacuggugcaaaauucuagcaucggcgagaucugcgacuccccgcaccagauucuugaugggaaaaacuguacccugaucgacgcccuccugggagauccccagugcgacgauuuucagaauaagcggugggaccuguucgucgaacgcucuaaagccuauagcaacuguuacccuuaugaugugcccgacuacgcuucccucagaucucugguugccagcuccggcacacuugaguuuaaugaugaauccuucaacugggcuggggugacccaaaauggaacgucuuccgccugcauucggggcagcaacucuuccuuuuucagccgccugaauuggcucacccauucuaacuuuaaguauccugcgcugaaugucacaaugcccaacaacgagcaguucgacaaacuuuacaucuggggcgugcaccauccugggaccgauaaagaccagauuuuucuguaugcccaguccagcggaagaaucacaguuuccaccaagcggucucaacaggcugugauuccgaauaucggcagccgccccagaauccggaacauuccuucccgcaucagcauuuacuggacgaucgucaaacccggggacauucuccugaucaauucuacaggaaaccugaucgccccuagaggcuacuucaagauucaguccgggaaaagcucuaucaugcggagcgaugcucccauuggaaaguguaaguccgagugcaucaccccgaauggcucuauuccuaacgacaaacccuuucagaaugugaaccgcaucacauauggcgccuguccuagauacgugaagcaaagcacccucaaacuggcgaccgggaugcggaauguccccgaaaagcagacacgcggaaucuucggcgccauugcuggguuuaucgagaacggaugggaaggcaugaaagaugggugguauggauucagacaccagaauagcgagggccggggccaagccgcugaccuuaagagcacgcaggccgccauugaucagaucaacgggaaacugaauagacucauuggaaagaccaacgagaaguuccaccagaucgaaaaagaguuuucugaaguugagggccgcauucaagaccuggaaaaguacguggaggauacaaaaaucgaccuuugguccuauaaugcugagcugcucguggcgcuggaaaaccagcauaccaucgaucugacagacagcgagaugaacaaacucuucgaaaagaccaagaagcagcugcgggagaaugccgaagauauggggaacggaugcuuuaagauuuaccacaagugugacaaugcuugcaucggcucuauuagaaacgggacguaugaccaugaugucuaccgcgacgaggcccuuaauaaccgguuccagaucaaaggcguggagcugaaguccggauacaaagauuggauucucuggaucagcuuugccaucuccugcuuccugcuuuguguugcucugcucggcuuuauuaugugggccugccaaaaggggaauaucagauguaacauuugcaucuga

SEQ ID NO: 205724 - RNA, 1701 nt, Artificial Sequence; identical to SEQ ID NO: 204513
  derived and/or modified CDS sequence (opt5) from hemagglutinin__InfluenzaA__ALN39707

SEQ ID NO: 205725 - RNA, 1701 nt, Artificial Sequence; identical to SEQ ID NO: 205119
  derived and/or modified CDS sequence (opt5) from hemagglutinin__InfluenzaA__ALN39708

SEQ ID NO: 205726 - RNA, 1701 nt, Artificial Sequence
  derived and/or modified CDS sequence (opt5) from hemagglutinin__InfluenzaA__ALN39709
augaagaccaucauugcccugagcuacauccucugccugguguucgcucagaaacuucccggcaacgacaauuccacagccacgcugugucucgggcaccaugcggucccuaacggaaccauuguuaagacaaucaccaaugauagaauugaggugacaaacgcuaccgaacuggugcaaaauucuagcaucggcgagaucugcgacuccccgcaccagauucuugauggggaaaacuguacacugaucgacgcccuccugggagauccccagugcgacggcuuucagaauaaaaagugggaucuguucgucgagcggucuaaagccuauagcaacuguuacccuuaugacgugcccgauuacgcuucccuccgcucucugguugccagcuccgggacccuugaauuuaauaacgagagcuucaauugggcuggagugacgcaaaacggcaccucuuccagcugcaugagaggcucuaauuccagcuuuuucucucggcugaacuggcucacacaucuuaauuccaaguauccugcccugaacgucaccaugcccaacaaugagcaguuugacaagcuguacauuuggggagugcaccauccugggacagauaaagaccagaucuuccucuaugcgcagagcuccggccgcauuaccguuucuacgaagagaagccaacaggccgugacaccgaacaucgggucccggccccgcauuagagauaucccuagccggaucucuauuuacuggaccaucgucaaacccggagacauucugcugaucaauuccacaggcaaccucauugcuccucgcggguacuuuaagaucagaagcggaaaaucuagcaucaugcgguccgacgcccccauuggcaaguguaagucugaaugcaucaccccgaauggcagcauuccuaacgauaaacccuuccagaaugugaaccgcaucaccuauggggcuuguccuagauacgugaagcaguccacacugaaacuugccacgggaaugcggaauguccccgagcgccaaaccagaggcauuuuuggggcgaucgccggauucaucgaaaacggcugggaggggaugguugacggaugguauggcuuucggcaccagaauagcgagggcagagggcaggcugccgaucugaagucuacacaagcugccauugaccagaucaacggaaaacucaaucgccugauuggcaagaccaacgaaaaauuccaccagaucgagaaggaguucuccgaaguggaagggcggauucaggaucuugagaaguacguggaggacacaaaaaucgaucuguggagcuauaaugccgaacuccuggucgcucuggagaaccaacauaccauugaccucacggauucugaaaugaacaagcuguuugagaaaacaaagaaacagcuuagagaaaaugcggaggacaugggaaacggcugcuucaagaucuaccacaagugugauaaugccugcaucggguccauucgcaacggcaccuaugaccaugacguguaccgggaugaggcucugaauaacagauuucagaucaaaggaguugaacucaagagcggcuacaaagacuggauucuguggaucuccuucgccauuucuugcuuucuucuguguguggcccuccugggguucaucaugugggcuugccagaagggaaauauccgcuguaacauuugcaucuga

SEQ ID NO: 205727 - RNA, 1701 nt, Artificial Sequence; identical to SEQ ID NO: 205443
  derived and/or modified CDS sequence (opt5) from hemagglutinin__InfluenzaA__ALN39710

SEQ ID NO: 205728 - RNA, 1701 nt, Artificial Sequence; identical to SEQ ID NO: 205119
  derived and/or modified CDS sequence (opt5) from hemagglutinin__InfluenzaA__ALN39711

SEQ ID NO: 205729 - RNA, 1701 nt, Artificial Sequence; identical to SEQ ID NO: 204513
  derived and/or modified CDS sequence (opt5) from hemagglutinin__InfluenzaA__ALN39712

SEQ ID NO: 205730 - RNA, 1701 nt, Artificial Sequence
  derived and/or modified CDS sequence (opt5) from hemagglutinin__InfluenzaA__ALN39713
augaagaccaucauugcccugagcuacauccucugccugguguucgcucagaaaauucccggcaacgacaauuccacagccacgcuuugucuggggcaccaugcggucccuaacggaaccaucguuaagacaauuaccaaugauagaaucgaggugacaaacgcuaccgaacucgugcaaaauucuagcaucggcgagauuugcgacuccccgcaccagauccuggauggggaaaacuguacacuuauugacgcccugcucggagauccccagugcgacggcuuucagaauaaaaagugggaucuguucgucgagcggucuaaagccuauagcaacuguuacccuuaugacgugcccgauuacgcuucccugcgcucucucguugccagcuccgggacccuggaauuuaauaacgagagcuucaauuggacgggagugacccaaaacggcacaucuuccgcuugcaucagaggcucuagcuccagcuuuuucucucggcuuaauuggcugacccaucucaacuauacauacccugcccugaaugucaccaugcccaacaacgagcaguuugacaaacuuuauauuuggggagugcaccauccugggacggauaaggaccagaucuuccuguacgcgcaguccagcggccgcauuacaguuuccaccaagagaucucaacaggccgugaucccgaauaucgggagccggccccgcauuagagauaucccuucccggauuagcaucuacuggacaauugucaagcccggagacauccuccugaucaacucuaccggcaaucugauugcuccucgcggguauuuuaaaaucagauccggaaagagcucuauuaugcggagcgacgcccccaucggcaaauguaaguccgaaugcauuaccccgaacggcucuaucccuaaugauaagcccuuccagaacgugaaucgcaucacauacggggcuuguccuagauaugugaaacacagcacgcucaagcuggccaccggaaugcggaacguccccgagaaacagacacgcggcauuuuuggggcgaucgccggauucauugaaaauggcugggaggggaugguugacggaugguacggcuuuagacaccaaaacuccgagggccgggggcaggcugccgaucuuaagagcacccaggcugccaucgaccaaauuaauggaaaacugaacagacucaucggcaagacaaaugaaaaauuccaucagauugagaaggaguucucugaaguggaagggcgcauccaggaucuggagaaguauguggaggacaccaaaaucgaucuuugguccuacaacgccgaacugcucgucgcucuggagaaucagcacacgauugaccugacagauagcgaaaugaacaagcucuuugagaaaaccaagaaacaacugcgggaaaacgcggaggacaugggaaauggcugcuucaagaucuaucauaagugugauaacgccugcauugggucuaucagaaauggcaccuacgaccacaacguguaccgcgacgaggcucuuaauaaccgguuucagauuaaaggaguugaacugaaguccggcuauaaagauuggauccucuggaucagcuucgccauuuccugcuuucugcuuuguguggcccugcucggguucaucaugugggcuugccagaagggaaauauuagauguaacaucugcauuuga

SEQ ID NO: 205731 - RNA, 1701 nt, Artificial Sequence
  derived and/or modified CDS sequence (opt5) from hemagglutinin__InfluenzaA__ALN39714
augaagaccaucauugcccugagcuacauccucugccugguguucgcucagaaaauucccggcaacgacaauuccacagccacgcuuugucuggggcaccaugcggucccuaacggaaccaucguuaagacaauuaccaaugauagaaucgaggugacaaacgcuaccgaacucgugcaaaauucuagcaucggcgagauuugcgacuccccgcaccagauccuggauggggaaaacuguacacuuauugacgcccugcucggagauccccagugcgacggcuuucagaauaaaaagugggaucuguucgucgagcggucuaaagccuauagcaacuguuacccuuaugacgugcccgauuacgcuucccugcgcucucucguugccagcuccgggacccuggaauuuaauaacgagagcuucaauugggcuggagugacgcaaaacggcaccucuuccagcugcaucagaggcucuaauuccagcuuuuucucucggcuuaacuggcugacacaucucaauuccaaguauccugcccugaacgucaccaugcccaacaaugagcaguuugacaaacuuuacauuuggggagugcaccauccugggacagauaaggaccagaccuuccuguaugcgcagccgagcggccgcaucacgguuuccacaaagagaucucaacaggccgugauucccaacaucgggagccggccucgcaucagagauauucccucccggaucagcauuuacuggaccaucgucaaaccuggagacauucuccugaucaauucuacaggcaaccugaucgcuccccgcggguacuuuaagauuagauccggaaaaagcucuaucaugcggagcgacgccccgauuggcaaguguaaguccgaaugcaucaccccuaauggcucuauucccaacgauaaaccuuuccagaaugugaaccgcaucaccuauggggcuugucccagauacgugaagcagagcacacucaaacuggccacgggaaugcggaauguccccgagcgccaaaccagaggcaucuuuggggcgauugccggauucaucgaaaacggcugggaggggaugguugacggaugguauggcuuucggcaccaaaauuccgagggcagagggcaggcugccgaucuuaagagcacacaggcugccauugaccagaucaacggaaaacugaaucgccucauuggcaagaccaacgaaaaauuccaccagaucgagaaggaguucucugaaguggaagggcggauucaggaucuggagaaguacguggaggacacaaaaaucgaucuuugguccuauaaugccgaacugcucgucgcucuggagaaccaacauaccaucgaccugacggauagcgaaaugaacaagcucuuugagaaaacaaagaaacagcugagagaaaaugcggaggacaugggaaacggcugcuucaagauuuaccacaagugugauaaugccugcaucgggucuauucgcaacggcaccuaugaccaugacguguaccgggaugaggcucuuaauaacagauuucagaucaaaggaguugaacugaaguccggcuacaaagacuggauucucuggaucagcuucgccaucuccugcuuucugcuuuguguggcccugcucggguucauuaugugggcuugccagaagggaaauauccgcuguaacauuugcaucuga

SEQ ID NO: 205732 - RNA, 1701 nt, Artificial Sequence; identical to SEQ ID NO: 205171
  derived and/or modified CDS sequence (opt5) from hemagglutinin__InfluenzaA__ALN39715

SEQ ID NO: 205733 - RNA, 1701 nt, Artificial Sequence; identical to SEQ ID NO: 204513
  derived and/or modified CDS sequence (opt5) from hemagglutinin__InfluenzaA__ALN39716

SEQ ID NO: 205734 - RNA, 1701 nt, Artificial Sequence; identical to SEQ ID NO: 204513
  derived and/or modified CDS sequence (opt5) from hemagglutinin__InfluenzaA__ALN39717

SEQ ID NO: 205735 - RNA, 1701 nt, Artificial Sequence; identical to SEQ ID NO: 205551
  derived and/or modified CDS sequence (opt5) from hemagglutinin__InfluenzaA__ALN39718

SEQ ID NO: 205736 - RNA, 1701 nt, Artificial Sequence; identical to SEQ ID NO: 204513
  derived and/or modified CDS sequence (opt5) from hemagglutinin__InfluenzaA__ALN39734

SEQ ID NO: 205737 - RNA, 1701 nt, Artificial Sequence
  derived and/or modified CDS sequence (opt5) from hemagglutinin__InfluenzaA__ALN39735
augaagaccaucauugcccugagcuacauccucugccugguguucgcucagaaaauucccggcaacgacaauuccacagccacgcuuugucuggggcaccaugcggucccuaacggaaccaucguuaagacaauuaccgaugacagaaucgaggugacaaaugcuaccgaacucgugcaaaacucuagcaucggcgagauuugcgauuccccgcaccagauccuggacggggaaaauuguacacuuauugaugcccugcucggagacccccagugcgauggcuuucagaacaaaaagugggaccuguucgucgagcggucuaaagccuauagcaauuguuacccuuaugaugugcccgacuacgcuucccugcgcucucucguugccagcuccgggacccuggaauuuaacaaugagagcuucaacuggacgggagugacccaaaauggcacaucuuccgcuugcaucagacggagcagcuccagcuuuuucucucgccuuaacuggcugacccaucucaauuauacauacccugcccugaacgucaccaugcccaauaacgagcaguuugauaaacuuuauauuuggggcgugcaccauccugggacggacaaggaucagaucuuccuguacgcgcaguccagcggaagaauuacaguuuccaccaagcggucucaacaggccgugaucccgaacaucggcagccgcccccggauuagagacaucccuucccgcauuagcaucuacuggacaauugucaagcccggggacauccuccugaucaauucuaccggaaaccugauugcuccuagaggcuauuuuaaaauccgguccgggaagucuucuauuaugcgcagcgaugcccccaucggaaaauguaaguccgaaugcauuaccccgaauggcucuaucccuaacgacaagcccuuccagaaugugaacagaaucacauacggcgcuuguccucgguaugugaaacacagcacgcucaagcuggccaccgggaugcgcaauguccccgagaaacagacaagaggaauuuuuggcgcgaucgccggguucauugaaaacggaugggagggcaugguugaugggugguacggauuucggcaccaaaauuccgagggcagaggccaggcugccgaccuuaagagcacccaggcugccaucgaucaaauuaacgggaaacugaaucgccucaucggaaagacaaacgaaaaauuccaucagauugagaaggaguucucugaaguggaaggccggauccaggaccuggagaaguauguggaggauaccaaaaucgaccuuugguccuacaaugccgaacugcucgucgcucuggagaaccagcacacgauugaucugacagacagcgaaaugaauaagcucuuugagaaaaccaagaaacaacugagagaaaacgcggaggauauggggaacggaugcuucaagaucuaucauaagugugacaaugccugcauuggcucuauccgcaacgggaccuacgaccacaauguguaccgggaugaggcucuuaacaauagauuucagauuaaaggcguugaacugaaguccggauauaaagacuggauccucuggaucagcuucgccauuuccugcuuucugcuuuguguggcccugcucggcuucaucaugugggcuugccagaaggggaacauucgcuguaauaucugcauuuga

SEQ ID NO: 205738 - RNA, 1701 nt, Artificial Sequence
  derived and/or modified CDS sequence (opt5) from hemagglutinin__InfluenzaA__ALN39736
augaagaccaucauugcccugagcuacauccucugccugguguucgcucagaaaauucccggcaacgacaauuccacagccacgcuuugucuggggcaccaugcggucccuaacggaaccaucguuaagacaauuaccaaugauagaaucgaggugacaaacgcuaccgaacucgugcaaaauucuagcaucggcgagauuugcgacuccccgcaccagauccuggauggggaaaacuguacacuuauugacgcccugcucggagauccccagugcgacggcuuucagaauaaaaagugggaucuguucgucgagcggucuaaagccuauagcaacuguuacccuuaugacgugcccgauuacgcuucccugcgcucucucguugccagcuccgggacccuggaauuuaauaacgagagcuucaauuggacgggagugacccaaaacggcacaucuuccgcuugcaucagacggucuagcuccagcuuuuucucucgccuuaauuggcugacccaucucaacuauacauacccugcccugaaugucaccaugcccaacaacgagcaguuugacaagcuguauauuuggggcgugcaccauccugggacggauaaggaccagaucuuccuguacgcgcagccguccggaagaauuacaguuagcaccaaacggucccaacaggccgugauccccaauaucggcucucgcccucggauucgggauauccccagccgcauuuccaucuacuggacaauugucaagccuggggacauccuccugaucaacagcaccggaaaucugauugcucccagaggcuauuuuaaaaucagagggggaaagucuuccauuaugcgcagcgacgccccgaucggcaaauguaagucugaaugcauuaccccuaacggcagcauccccaaugauaagccuuuccagaacgugaauagaaucacauacggggcuuguccccgguaugugaaacacuccacgcucaagcuggccaccggaaugcgcaacguccccgagaaacagacaagaggcauuuuuggggcgaucgccggauucauugaaaauggcugggaggggaugguugacggaugguacggcuuucggcaccaaaacucugagggcagagggcaggcugccgaucuuaagagcacccaggcugccaucgaccaaauuaauggaaaacugaaccgccucaucggcaagacaaaugaaaaauuccaucagauugagaaggaguucuccgaaguggaagggcggauccagaaccuggagaaguauguggaggauaccaaaaucgaccuuuggagcuacaaugccgaacugcucgucgcucuggagaaccagcacacgauugaucugacagacucugaaaugaacaagcucuuugagaaaaccaagaaacaacugagagaaaaugcggaggauaugggaaacggcugcuucaagaucuaucauaagugugacaaugccugcauuggguccauccgcaacggcaccuacgaucacaauguguaccgggacgaggcucuuaacaauagauuucagauuaaaggaguugaacuuaagagcggcuauaaagacuggauccucuggaucucuuucgccauuuccugcuuucugcuuuguguggcccugcucggguucaucaugugggcuugccagaagggaaacauucgcuguaauaucugcauuuga

SEQ ID NO: 205739 - RNA, 1701 nt, Artificial Sequence; identical to SEQ ID NO: 205119
  derived and/or modified CDS sequence (opt5) from hemagglutinin__InfluenzaA__ALN39737

SEQ ID NO: 205740 - RNA, 1701 nt, Artificial Sequence
  derived and/or modified CDS sequence (opt5) from hemagglutinin__InfluenzaA__ALN39738
augaagaccaucauugcccugagcuacauccucugccugguguucgcucagaaaauucccggcaacgacaauuccacagccacgcuuugucuggggcaccaugcggucccuaacggaaccaucguuaagacaauuaccaaugauagaaucgaggugacaaacgcuaccgaacucgugcaaaauucuagcaucggcgagauuugcgacuccccgcaccagauccuggauggggaaaacuguacacuuauugacgcccugcucggagauccccugugcgacggcuuucagaauaaaaagugggaucuguucgucgagcggucuaaagccuauagcaacuguuacccuuaugacgugcccgauuacgcuucccuccgcucucugguugccagcuccgggacccuugaauuuaauaacgagagcuucaauuggacgggagugacccagaacggcacaucuuccgcuugcaucagacggagcagcuccagcuuuuucucucgccugaauuggcucacccaucugaacuauacauacccugcccuuaaugucaccaugcccaacaacgagcaauuugacaagcuguauauuuggggcgugcaccauccugggacggauaaggaccagaucuuccucuacgcgcaguccagcggaagaauuacaguuuccaccaaacggucucagcaagccgugaucccgaauaucggcagccgcccccggauuagagauaucccuucccgcauuagcaucuacuggacaauugucaagcccggggacauccugcugaucaacucuaccggaaaucucauugcuccuagaggcuauuuuaaaauccgguccgggaagucuucuauuaugcgcagcgacgcccccaucggaaaauguaaguccgaaugcauuaccccgaacggcucuaucccuaaugauaagcccuuccagaacgugaauagaaucacauacggcgcuuguccucgguaugugaaacacagcacgcugaagcuggccaccgggaugcgcaacguccccgagaaacagacaagaggaauuuuuggcgcgaucgccggguucauugaaaauggaugggagggcaugguugacgggugguacggauuucggcaccagaacuccgagggcagaggccaagcugccgaucuuaagagcacccaggcugccaucgaccagauuaaugggaaacucaaccgccugaucggaaagacaaaugaaaaauuccaucaaauugagaaggaguucucugaaguggaaggccggauccaggaucuugagaaguauguggaggacaccaaaaucgaucugugguccuacaacgccgaacuccuggucgcucuggagaaucagcacacgauugaccucacagauagcgaaaugaacaagcuguuugagaaaaccaagaaacagcuuagagaaaacgcggaggacauggggaauggaugcuucaagaucuaucauaagugugauaacgccugcauuggcucuauccgcaaugggaccuacgaccacaacguguaccgggacgaggcucugaauaacagauuucaaauuaaaggcguugaacucaaguccggauauaaagauuggauccuguggaucagcuucgccauuuccugcuuucuucuguguguggcccuccugggcuucaucaugugggcuugccagaaggggaauauucgcuguaacaucugcauuuga

SEQ ID NO: 205741 - RNA, 1701 nt, Artificial Sequence
  derived and/or modified CDS sequence (opt5) from hemagglutinin__InfluenzaA__ALN39739
augaagaccaucauugcccugggcuacauccucugccugguguucgcucagaaaauucccgggaacgacaauagcacagccacgcuuugucugggacaccaugcggucccuaacggcaccaucguuaagacaauuaccaaugauagaaucgaggugacaaacgcuaccgaacucgugcaaaauuccucuaucggggagauuugcgacagcccgcacaaaauccuggauggagaaaacuguacacuuauugacgcccugcucggcgauccccagugcgacggguuucagaauaagaaaugggaucuguucgucgagcgguccaaggccuauucuaacuguuacccuuaugacgugcccgauuacgcuagccugcgcucccucguugccucuagcggaacccuggaauuuaauaacgaguccuucaauuggacgggcgugacccagaacggcacaagcucugcuugcaucagacgguccucuagcuccuuuuucagccgccuuaauuggcugacccaucucgacuauacauacccugcccugaacgucaccaugcccaauaacgagcaauuugauaaacuuuauauuuggggagugcaccauccugggacggacaaggaucagaucuuccuguacgcgcagucuuccggcagaauuacaguuagcaccaagcggucccagcaagccgugaucccgaacaucgggucucgcccccggauuagagacaucccuagccgcauuuccaucuacuggacaauugucaaacccggagacauccuccugaucaauagcaccggcaaccugauugcuccuagaggguauuuuaagauccggucuggaaaauccagcauuaugcgcucugaugcccccaucggcaaguguaagagcgaaugcauuaccccgaauggcuccaucccuaacgacaaacccuuccagaaugugaacagaaucacauacggggcuuguccucgguaugugaagcacucuacgcucaaacuggccaccggaaugcgcaauguccccgagaagcagacaagaggcauuuuuggggcgaucgccggauucauugaaaacggcugggaggggaugguugauggaugguacggcuuucggcaccagaauagcgagggcagagggcaagcugccgaccuuaaauccacccaggcugccaucgaucagauuaacggaaagcugaaucgccucaucggcaaaacaaacgaaaaguuccaucaaauugagaaggaguucagcgaaguggaagggcggauccaggaccuggagaaauauguggaggauaccaagaucgaccuuuggucuuacaaugccgaacugcucgucgcucuggagaaccagcacacgauugaucugacagacuccgaaaugaauaaacucuuugagaagaccaaaaagcagcugagagaaaacgcggaggauaugggaaacggcugcuucaagaucuaucauaaaugugacaaugccugcauugggagcauccgcaacggcaccuacgaccacaauguguaccgggaugaggcucuuaacaauagauuucaaauuaagggaguugaacugaaaucuggcuauaaggacuggauccucuggaucuccuucgccauuagcugcuuucugcuuuguguggcccugcucggguucaucaugugggcuugccagaaaggaaacauucgcuguaauaucugcauuuga

SEQ ID NO: 205742 - RNA, 1701 nt, Artificial Sequence
  derived and/or modified CDS sequence (opt5) from hemagglutinin__InfluenzaA__ALN39740
augaagaccaucauugcccugagcuacauccucugccugguguucgcucagaaaauucccggcaacgacaauuccacagccacgcuuugucuggggcaccaugcggucccuaacggaaccaucguuaagacaauuaccaaugauagaaucgaggugacaaacgcuaccgaacucgugcaaaauucuagcaucggcgagauuugcgacuccccgcaccagauccuggauggggaaaacuguacacuuauugacgcccugcucggagauccccagugcgacggcuuucagaauaaaaagugggaucuguucgucgagcggucuaaagccuauagcaacuguuacccuuaugacgugcccgauuacgcuucccugcgcucucucguugccagcuccgggacccuggaauuuaauaacgagagcuucaauuggacgggagugacccaaaacggcacaucuuccgcuugcaucagaaagucuagcuccagcuuuuucucucggcuuaauuggcugacccaucucaacuauacauacccugcccugaaugucaccgugcccaacaacgagcaguuugacaaacuuuauauuuggggcguucaccauccugggacggauaaggaccagaucuuccuguacgcgcgcuccagcggaagaauuacaguguccaccaagcggucucagcaagccgucaucccgaauaucggcuaccgcccccggauuagagauaucccuagccgcauuuccaucuauuggacaauugugaaacccggggacauccuccugaucaacagcaccggaaaucugauugcuccuagaggcuacuuuaagauccggucugggaaauccagcauuaugcgcucugacgcccccaucggaaaguguaagagcgaaugcauuaccccgaacggcuccaucccuaaugauaaacccuuccagaacgugaauagaaucacauauggcgcuuguccucgguacgucaagcacucuacgcucaaacuggccaccgggaugcgcaacguucccgagaagcagacaagaggaauuuuuggcgcgaucgccggguucauugaaaauggaugggagggcaugguggacgggugguauggauuucggcaccagaacagcgagggcagaggccaagcugccgaucuuaaauccacccaggcugccaucgaccagauuaaugggaagcugaaccgccucaucggaaaaacaaaugaaaaguuccaucaaauugagaaggaguucagcgaaguggaaggccggauccaggaucuggagaaauacgucgaggacaccaagaucgaucuuuggucuuauaacgccgaacugcucguggcucuggagaaucagcacacgauugaccugacagauuccgaaaugaacaaacucuuugagaagaccaaaaagcagcugagagaaaacgcggaggacauggggaauggaugcuucaagaucuaccauaaaugugauaacgccugcauuggcagcauccgcaaugggaccuacgaccacaacguuuaucgggacgaggcucuuaauaacagauuucaaauuaagggcguggaacugaaaucuggauacaaggauuggauccucuggaucuccuucgccauuagcugcuuucugcuuugugucgcccugcucggcuucaucaugugggcuugccagaaagggaauauucgcuguaacaucugcauuuga

SEQ ID NO: 205743 - RNA, 1701 nt, Artificial Sequence; identical to SEQ ID NO: 204513
  derived and/or modified CDS sequence (opt5) from hemagglutinin__InfluenzaA__ALN39741

SEQ ID NO: 205744 - RNA, 1701 nt, Artificial Sequence
  derived and/or modified CDS sequence (opt5) from hemagglutinin__InfluenzaA__ALN39742
augaagaccaucauugcccugagcuacauccucugccugguguucgcucagaaaauucccggcaacgacaauuccacagccacgcuuugucuggggcaccaugcggucccuaacggaaccaucguuaagacaauuaccaaugauagaaucgaggugacaaacgcuaccgaacucgugcaaaauucuagcaucggcgagauuugcgacuccccgcaccagauccuggauggggaaaacuguacacuuauugacgcccugcucggagauccccagugcgacggcuuucagaauaaaaagugggaucuguucgucgagcggucuaaagccuauagcaacuguuacccuuaugacgugcccgauuacgcuucccugcgcucucucguugccagcuccgggacccuggaauuuaauaacgagagcuucaauuggacgggagugacccaaaacggcacaucuuccgcuugcaucagacggagcagcuccagcuuuuucucucgccuuaauuggcugacccaucucaacuauacauacccugcccugaaugucaccaugcccaacaacgagcaguuugacaaacuuuauauuuggggcgugcaccauccugggacggauaaggaccagaucuuccuguacgcgcaguccagcggaagaauuacaguuuccaccaagcggucucaacaggccgugaucccgaauaucggcagccgcccccggauuagagauaucccuucccgcauuagcaucuacuggacaauugucaagcccggggacauccuccugaucaacucuaccggaaaucugauugcuccuagaggcuauuuuaaaauccgguccgggaagucuucuauuaugcgcagcgacgcccccaucggaaaauguaaguccgaaugcauuaccccgaacggcucuaucccuaaugauaagcccuuccagaacgugaauagaaucacauacggcgacuguccucgguaugugaaacacagcacgcucaagcuggcuaccgggaugcgcaacguccccgagaaacagacaagaggaauuuuuggcgccaucgcgggguucauugaaaauggaugggagggcaugguugaugggugguacggauuucggcaccaaaacuccgagggcagaggccaggccgcugaccuuaagagcacccaggccgcuaucgaucaaauuaaugggaaacugaaccgccucaucggaaagacaaaugaaaaauuccaucagauugagaaggaguucucugaaguggaaggccggauccaggaccuggagaaguauguggaggauaccaaaaucgaccuuugguccuacaacgccgaacugcucgucgcccuggagaaucagcacacgauugaucugacagacagcgaaaugaacaagcucuuugagaaaaccaagaaacaacugagagaaaacgcugaggauauggggaauggaugcuucaagaucuaucauaagugugacaacgcgugcauuggcucuauccgcaaugggaccuacgaccacaacguguaccgggaugaggcccuuaauaacagauuucagauuaaaggcguugaacugaaguccggauauaaagacuggauccucuggaucagcuucgcuauuuccugcuuucugcuuuguguggcccugcucggcuucaucaugugggccugccagaaggggaauauucgcuguaacaucugcauuuga

SEQ ID NO: 205745 - RNA, 1701 nt, Artificial Sequence
  derived and/or modified CDS sequence (opt5) from hemagglutinin__InfluenzaA__ALN39743
augaagaccaucauugcccugagcuacauccucugccugguguucgcucagaaaauucccggcaacgacaauuccacagccacgcuuugucuggggcaccaugcggucccuaacggaaccaucguuaagacaauuaccaaugauagaaucgaggugacaaacgcuaccgaacucgugcaaaauucuagcaucggcgagauuugcgacuccccgcaccagauccuggauggggaaaacuguacacuuauugacgcccugcucggagauccccagugcgacggcuuucagaauaaaaagugggaucuguucgucgagcggucuaaagccuauagcaacuguuacccuuaugacgugcccgauuacgcuucccugcgcucucucguugccagcuccgggacccuggaauuuaauaacgagagcuucaauuggacgggagugacccaaaacggcacaucuuccgcuugcaucagaaagucuagcuccagcuuuuucucucggcuuaauuggcugacccaucucaacuauauuuacccugcccugaaugucacaaugcccaacaacgagcaguuugacaaacuuuauaucuggggcgugcaccauccugggaccgauaaagaccagauuuuccuguacgcgcaguccagcggacgcaucacgguuuccacaaagagaucucaacaggccgugaucccgaauauuggcagccggccccgcaucagagauauuccuucccggaucagcauuuacuggaccaucgucaaacccggggacauccuccugauuaacucuacaggaaaucugaucgcuccucgcggcuauuuuaagauuagauccgggaaaagcucuaucaugcggagcgacgcccccauuggaaaguguaaguccgaaugcaucaccccgaacggcucuaucccuaaugauaaacccuuccagaacgugaaucgcauuaccuacggcgcuuguccuagauaugugaagcacagcacacucaaacuggccacggggaugcggaacguccccgagaagcagacccgcggaaucuuuggcgcgauugccggguucaucgaaaauggaugggagggcaugguugacgggugguacggauuuagacaccaaaacuccgagggccggggccaggcugccgaucuuaaaagcacacaggcugccauugaccaaaucaaugggaagcugaacagacucauuggaaaaaccaaugaaaaguuccaucagaucgagaaggaguucucugaaguggaaggccgcauccaggaucuggagaaauauguggaggacacaaagauugaucuuugguccuacaacgccgaacugcucgucgcucuggagaaucagcacaccaucgaccugacggauagcgaaaugaacaaacucuuugagaagacaaagaagcaacugcgggaaaacgcggaggacauggggaauggaugcuucaagauuuaucauaaaugugauaacgccugcaucggcucuauuagaaaugggaccuacgaccacaacguguaccgcgacgaggcucuuaauaaccgguuucagaucaagggcguugaacugaaauccggauauaaggauuggauccucuggauuagcuucgccaucuccugcuuucugcuuuguguggcccugcucggcuucauuaugugggcuugccagaaagggaauaucagauguaacauuugcaucuga

SEQ ID NO: 205746 - RNA, 1701 nt, Artificial Sequence
  derived and/or modified CDS sequence (opt5) from hemagglutinin__InfluenzaA__ALN39744
augaagaccaucauugcccugagcuacauccucugccugguguucgcucagaaaauucccggcaacgacaauuccacagccacgcuuugucuggggcaccaugcggucccuaacggaaccaucguuaagacaauuaccaaugauagaaucgaggugacaaacgcuaccgaacucgugcaaaauucuagcaucggcgagauuugcgacuccccgcaccagauccuggauggggaaaacuguacacuuauugacgcccugcucggagauccccagugcgacggcuuucagaauaaaaagugggaucuguucgucgagcggucuaaagccuauagcaacuguuacccuuaugacgugcccgauuacgcuucccugcgcucucucguugccagcuccgggacccuggaauuuaauaacgagagcuucaauuggacgggagugacccaaaacggcacaucuuccgcuugcaucagaaagucuagcuccagcuuuuucucucggcuuaauuggcugacccaucucaacuauacauacccugcccugaaugucaccaugcccaacaacgagcaguuugacaaacuuuauauuuggggcgugcaccauccugggacggauaaggaccagaucuuccuguacgcgcaguccagcggacgcauuacaguuuccaccaagagaucucaacaggccgugaucccgaauaucggcagccggccccgcauuagagauaucccuucccggauuagcaucuacuggacaauugucaaacccggggacauccuccugaucaacucuaccggaaaucugauugcuccucgcggcuauuuuaagaucagauccgggaaaagcucuauuaugcggagcgacgcccccaucggaaaguguaaguccgaaugcauuaccccgaacggcucuaucccuaaugauaaacccuuccagaacgugaaucgcaucacauacggcgcuuguccuagauaugugaagcacagcacgcucaaacuggccaccgggaugcggaacguccccgagaagcagacacgcggaauuuuuggcgcgaucgccggguucauugaaaauggaugggagggcaugguugacgggugguacggauuuagacaccaaaacuccgagggccggggccaggcugccgaucuuaaaagcacccaggcugccaucgaccaaauuaaugggaagcugaacagacucaucggaaaaacaaaugaaaaguuccaucagauugagaaggaguucucugaaguggaaggccgcauccaggaucuggagaaauauguggaggacaccaagaucgaucuuugguccuacaacgccgaacugcucgucgcucuggagaaucagcacacgauugaccugacagauagcgaaaugaacaaacucuuugagaagaccaaaaagcaacugcgggaaaacgcggaggacauggggaauggaugcuucaagaucuaucauaaaugugauaacgccugcauuggcucuaucagaaaugggaccuacgaccacaacguguaccgcgacgaggcucuuaauaaccgguuucagauuaagggcguugaacugaaauccggauauaaggauuggauccucuggaucagcuucgccauuuccugcuuucugcuuuguguggcccugcucggcuucaucaugugggcuugccagaaagggaauauuagauguaacaucugcauuuga

SEQ ID NO: 205747 - RNA, 1701 nt, Artificial Sequence
  derived and/or modified CDS sequence (opt5) from hemagglutinin__InfluenzaA__ALN39745
augaagaccaucauugcccugagcuacauccucugccugguguucgcucagaaaauucccggcaacgacaauuccacagccacgcuuugucuggggcaccaugcggucccuaacggaaccaucguuaagacaauuaccaaugauagaaucgaggugacaaacgcuaccgaacucgugcaaaauucuagcaucggcgagauuugcgacuccccgcaccagauccuggauggggaaaacuguacacuuauugacgcccugcucggagauccccagugcgacggcuuucagaauaaaaagugggaucuguucgucgagcggucuaaagccuauagcaacuguuacccuuaugacgugcccgauuacgcuucccugcgcucucucguugccagcuccgggacccuggaauuuaauaacgagagcuucaauuggacgggagugacccaaaacggcacaucuuccgcuugcaucagaaagagcagcuccagcuuuuucucucggcuuaauuggcugacccaucucaacuauaaguacccugcccugaaugucacaaugcccaacaacgagcaguuugacaaacuuuauauuuggggcgugcaccauccugggaccgauaaggaccagaucuuccuguacgcgcaguccagcggacgcauuacgguuuccacaaaaagaucucaacaggccgugaucccgaauaucggcagccggccccgcauuagagauaucccuucccggauuagcaucuacuggaccauugucaagcccggggacauccuccugaucaacucuacaggaaaucugauugcuccucgcggcuauuuuaaaaucagauccgggaagucuucuauuaugcggagcgacgcccccaucggaaaguguaaauccgaaugcauuaccccgaacggcucuaucccuaaugauaagcccuuccagaacgugaaucgcaucaccuacggcgcuuguccuagauaugugaaacacagcacacucaagcuggccacggggaugcggaacguccccgagaaacagacccgcggaauuuuuggcgcgaucgccggguucauugaaaauggaugggagggcaugguugacgggugguacggauuuagacaccaaaacuccgagggccggggccaggcugccgaucuuaagagcacacaggcugccaucgaccaaauuaaugggaaacugaacagacucaucggaaagaccaaugaaaaguuccaucagauugagaaagaguucucugaaguggaaggccgcauccaggaucuggagaaguauguggaggacacaaaaaucgaucuuugguccuacaacgccgaacugcucgucgcucuggagaaucagcacaccauugaccugacggauagcgaaaugaacaagcucuuugagaaaacaaagaagcaacugcgggaaaacgcggaggacauggggaauggaugcuucaaaaucuaucauaagugugauaacgccugcauuggcucuaucagaaaugggaccuacgaccacaacguguaccgcgacgaggcucuuaauaaccgguuucagauuaaaggcguugaacugaaguccggauauaaagauuggauccucuggaucagcuucgccauuuccugcuuucugcuuuguguggcccugcucggcuucaucaugugggcuugccagaaggggaauauuagauguaacaucugcauuuga

SEQ ID NO: 205748 - RNA, 1701 nt, Artificial Sequence; identical to SEQ ID NO: 205746
  derived and/or modified CDS sequence (opt5) from hemagglutinin__InfluenzaA__ALN39746

SEQ ID NO: 205749 - RNA, 1701 nt, Artificial Sequence; identical to SEQ ID NO: 205441
  derived and/or modified CDS sequence (opt5) from hemagglutinin__InfluenzaA__ALN39747

SEQ ID NO: 205750 - RNA, 1701 nt, Artificial Sequence
  derived and/or modified CDS sequence (opt5) from hemagglutinin__InfluenzaA__ALN39748
augaagaccaucauugcccugagcuacauccucugccugguguucgcucagaaaauucccggcaacgacaauuccacagccacgcuuugucuggggcaccaugcggucccuaacggaaccaucguuaagacaauuaccaaugauagaaucgaggugacaaacgcuaccgaacucgugcaaaauucuagcaucggcgagauuugcgacuccccgcaccagauccuggauggggaaaacuguacacuuauugacgcccugcucggagauccccagugcgacggcuuucagaauaaaaagugggaucuguucgucgagcggucuaaagccuauagcaacuguuacccuuaugacgugcccgauuacgcuucccugcgcucucucguugccagcuccgggacccuggaauuuaauaacgagagcuucaauuggacgggagugacccaaaacggcacaucuuccgcuugcaucagacggagcagcuccagcuuuuucucucgccuuaauuggcugacccaucucaacuaugccuacccugcgcugaaugucacaaugcccaacaacgagcaguuugacaagcuguauauuuggggcgugcaccauccugggaccgauaaggaccagaucuuccuguacgcccaguccagcggaagaauuacgguuuccacaaaacggucucaacaggcugugaucccgaauaucggcagccgcccccggauuagagauaucccuucccgcauuagcaucuacuggaccauugucaagcccggggacauccuccugaucaacucuacaggaaaucugauugccccuagaggcuauuuuaaaauccucuccgggaagucuucuauuaugcggagcgacgcucccaucggaaaauguaaguccgaaugcauuaccccgaacggcucuaucccuaaugauaagcccuuccagaacgugaaucgcaucaccuacggcgccuguccuagauaugugaaacacagcacacugaaacuugcgacggggaugcggaacguccccgagaagcagacccgcggaauuuuuggcgccaucgcuggguucauugaaaauggaugggagggcaugguugacgggugguacggauuuagacaccaaaacuccgagggccggggccaggccgcugaucuuaagagcacacaggccgccaucgaccaaauuaaugggaaacucaacagacugaucggaaagaccaaugaaaaauuccaucagauugagaaggaguucucugaaguggaaggccgcauccaggaucuugagaaguauguggaggacacaaaaaucgaucugugguccuacaacgcugaacuccuggucgcgcuggagaaucagcacaccauugaccucacggauagcgaaaugaacaagcuguuugagaaaacaaagaaacaacuucgggaaaacgccgaggacauggggaauggaugcuucaagaucuaucauaagugugauaacgcuugcauuggcucuaucagaaaugggaccuacgaccacaacguguaccgcgacgaggcccugaauaaccgguuucagauuaaaggcguugaacucaaguccggauauaaagauuggauccuguggaucagcuucgccauuuccugcuuucuucuguguguggcucuccugggcuucaucaugugggccugccagaaggggaauauuagauguaacaucugcauuuga

SEQ ID NO: 205751 - RNA, 1701 nt, Artificial Sequence
  derived and/or modified CDS sequence (opt5) from hemagglutinin__InfluenzaA__ALN39749
augaagaccaucauugcccugagcuacauccucugccugguguucgcucagaaacuucccggcaacgacaauuccacagccacgcugugucucgggcaccaugcggucccuaacggaaccauuguuaagacaaucaccaaugauagaauugaggugacaaacgcuaccgaacuggugcaaaauucuagcaucggcgagaucugcaacuccccgcaccagauucuugacggggaaaauuguacacugaucgaugcccuccugggagacccccagugcgauggcuuucagaacaaaaagugggaccuguucgucgagcggucuaaagccuauagcaauuguuacccuuaugaugugcccgacuacgcuucccuccgcucucugguugccagcuccgggacccuugaauuuaacaaugagagcuucaacugggcuggagugacgcaaaauggcaccucuuccagcugcauuagaggcucuaacuccagcuuuuucucucggcugaauuggcucacacaucugaacuccaaguauccugcccuuaacgucaccaugcccaauaacgagcaguuugauaagcuguacaucuggggagugcaccauccugggacagacaaagaucagauuuuccucuaugcgcagccgagcggccgcaucaccguuuccacgaagagaucucaacaggccgugauucccaauaucgggagccggccucgcaucagagacauucccucccggaucagcauuuacuggacaaucgucaaaccuggagauauucugcugaucaacucuaccggcaaucucaucgcuccccgcggguacuuuaagauuagauccggaaaaagcucuaucaugcggagcgacgccccgauuggcaaguguaaguccgaaugcaucacaccuaacggcucuauucccaaugacaaaccuuuccagaacgugaaucgcaucaccuauggggcuugucccagauacgugaagcagagcacccugaaacuugccacaggaaugcggaacguccccgagcgccaaacgagaggcaucuuuggggcgauugccggauucaucgaaaauggcugggaggggaugguugauggaugguauggcuuucggcaccagaacuccgagggcagagggcaggcugccgaccucaagagcacccaagcugccauugaucagaucaauggaaaacugaaccgccugauuggcaagacaaaugaaaaauuccaccagaucgagaaggaguucucugaaguggaagggcggauucaggaccuugagaaguacguggaggauaccaaaaucgaccugugguccuauaacgccgaacuccuggucgcucuggagaaccaacauacaaucgaucucaccgacagcgaaaugaauaagcuguuugagaaaacgaagaaacagcuuagagaaaacgcggaggauaugggaaauggcugcuucaagauuuaccacaagugugacaacgccugcaucgggucuauucgcaauggcacauaugaucaugacguguaccgggacgaggcucugaacaauagauuucagaucaaaggaguugaacucaaguccggcuacaaagauuggauucuguggaucagcuucgccaucuccugcuuucuucuguguguggcccuccugggguucauuaugugggcuugccagaagggaaacauccgcuguaauauuugcaucuga

SEQ ID NO: 205752 - RNA, 1701 nt, Artificial Sequence; identical to SEQ ID NO: 204513
  derived and/or modified CDS sequence (opt5) from hemagglutinin__InfluenzaA__ALN39750

SEQ ID NO: 205753 - RNA, 1701 nt, Artificial Sequence; identical to SEQ ID NO: 204513
  derived and/or modified CDS sequence (opt5) from hemagglutinin__InfluenzaA__ALN39789

SEQ ID NO: 205754 - RNA, 1701 nt, Artificial Sequence; identical to SEQ ID NO: 205043
  derived and/or modified CDS sequence (opt5) from hemagglutinin__InfluenzaA__ALO75895

SEQ ID NO: 205755 - RNA, 1701 nt, Artificial Sequence
  derived and/or modified CDS sequence (opt5) from hemagglutinin__InfluenzaA__ALO75907
auggagaagaucgugcugcuccuggccauugucagccuuguuaaaggcgaccagaucugcauuggguaccacgcuaacaauuccaccgaacaaguggauacaaucauggagaagaacgugacggucacccaugcccaggacauucuggaaaagacacacaauggaaagcucugugaucugaacggcgugaaaccccuuauccugaaggacugcucuguugcggggugguuccucggaaauagaaugugugaugaguuuauccgggugccugaauggagcuauauugucgagcgcgcuaacccggccaaugaccugugcuaccccggcaaccugaaugauuaugaggaacucaagcaucugcuuuccagaaucaaccacuucgagaaaacccugauuaucccuaagucuagcuggcccaaucauacauccucuggggugagcgccgcuuguccuuaccagggaaugcccuccuuuuuccggaacguuguguggcucaccaaaaagaaugacgccuauccuacaauuaaaaugagcuacaacaauaccuaucgcgaagaucugcuuauccuguggggcauucaccacucuaacaacgcugccgagcagacgaaucucuacaagaacccgaccacauacgucuccgugggcaccagcacacugaaucaaagacuggagcccaagaucgcgacccggucucaggugaacgggcagcgcggaagaauggacuuuuucuggacgauccucaaaccuaaugaugccauucauuuugaauccaacggcaauuucaucgcucccgaguaugccuacaagauugucaaaaagggggacagcacaaucaugaaaucugaaauggaguauggacacugcaacaccaagugucagacaccuauuggcgcuaucaauuccagcaugcccuuucauaacauccacccgcugaccauuggggaaugcccuaaauacguuaaguccaauaaacuugugcuggccaccggacuccggaacucuccccugcgcgagagacggcgcaaaagaggccuuuucggcgcgaucgccggguuuauugagggaggcuggcaagggaugguggauggaugguauggcuaccaccauagcaaugaacagggguccggauaugcugccgaccgggagagcacacagaaggcuaucgacggcgucacgaacaaaguuaauucuauuaucgauaagaugaacacccaguucgaagccgugggccgcgaguuuaacaaucuggaaagacggaucgagaaccucaauaaaaagauggaggacggguuccuggauguguggacauacaacgccgaacugcucguccugauggagaaugaaagaacccuugacuuccacgauuccaacgugaagaaucuguacgacaaaguucgccuccaacugcgggauaacgcuaaggagcuuggaaauggcuguuuugaguucuaucauaaaugcgacaacgaauguauggagagcgugagaaaugggacauacgauuauccucuguacucugaagaggcgcgccucaagcgggaagagauuagcggagucaaacuggaguccaucggcaccuaucagauucugucuaacuacagcacgguggccuccagccucgcucuggccaucauugucgccgggcuuucucuguggaugugcuccaauggcagccuccagugcagaaucuguauuuga

SEQ ID NO: 205756 - RNA, 1701 nt, Artificial Sequence
  derived and/or modified CDS sequence (opt5) from hemagglutinin__InfluenzaA__ALO75919
auggagaagaucgugcugcuccuggccauugucagccuuguuaaaggcgaccagaucugcauuggguaccacgcuaacaauuccaccgaacaaguggauacaaucauggagaagaacgugacggucacccaugcccaggacauucuggaaaagacacacaauggaaagcucugugaucugaacggcgugaaaccccuuauccugaaggacugcucuguugcgggguggcuccauggaaauagaaugugugaugaguucauccgggugccugaauggagcuauauugucgagcgcgcuaacccggccaaugaccugugcuaccccggcaaccugaaugauuaugaggaacucaagcaucugcuuuccagaaucaaccacuuugagaaaacccugauuaucccuaagucuagcuggcccaaucacacauccucuggggugagcgccgcuuguccuuaccagggaaugcccuccuucuuucggaacguuguguggcucaccaaaaagaaugacgccuauccuacaauuaaaaugagcuacaacaauaccuaucgcgaagaucugcuuauccuguggggcauucaccauucuaacaacgcugccgagcagacgaaucucuacaagaacccgaccacauacgucuccgugggcaccagcacacugaaucaaagacuggagcccaagaucgcgacccggucucaggugaacgggcagcgcggaagaauggacuucuuuuggacgauccucaaaccuaaugaugccauucacuucgaauccaacggcaauuuuaucgcucccgaguaugccuacaagauugucaaaaagggggacagcacaaucaugaaaucugaaauggaguauggacauugcaacaccaagugucagacaccuauuggcgcuaucaauuccagcaugcccuuccacaacauccacccgcugaccauuggggaaugcccuaaauacguuaaguccaauaaacuugugcuggccaccggacuccggaacucuccccugcgcgagagacggcgcaaaagaggccuuuuuggcgcgaucgccggguucauugagggaggcuggcaagggaugguggauggaugguauggcuaccaucacagcaaugaacagggguccggauaugcugccgaccgggagagcacacagaaggcuaucgacggcgucacgaacaaaguuaauucuauuaucgauaagaugaacacccaguuugaagccgugggccgcgaguucaacaaucuggaaagacggaucgagaaccucaauaaaaagauggaggacggguuucuggauguguggacauacaacgccgaacugcucguccugauggagaaugaaagaacccuugacuuccaugauuccaacgugaagaaucuguacgacaaaguucgccuccaacugcgggauaacgcuaaggagcuuggaaauggcuguuucgaauuuuaucacaaaugcgacaacgaguguauggagagcgugagaaaugggacauacgauuauccucuguacucugaagaggcgagccucaagcgcgaagagauuuccggagucaaacuggagucuaucggcaccuaucagauucugagcaucuacuccacgguggccagcucucucgcucuggccauuaucgucgccgggcuuucccuguggaugugcagcaacggcucucuccagugccggauuuguaucuga

SEQ ID NO: 205757 - RNA, 1683 nt, Artificial Sequence
  derived and/or modified CDS sequence (opt5) from hemagglutinin__InfluenzaA__ALT20080
auggagaccgugagccugaucacaauucuccuggucgccacgguuuccaacgcugacaagaucugcauuggcuaccagucuaccaauagcacagaaaccguggauacacuuaccgagaacaaugugcccgucacacacgccaaagaacugcuccauaccgagcacaacgggaugcugugugcgacgucccuuggacaaccucugauccucgauaccugcacaauugaaggccugaucuaugggaauccgucuugugaccugagccucgagggaagagagugguccuacaucguggaacggcccucugcuguuaacggccugugcuauccugggaauguggagaaccuugaggaacugcgcagccucuucuccagcgccagaucuuaccagcggauucagaucuuucccgacaccauuuggaaugucuccuaugauggaacaagcaccgccuguucuggcuccuucuaccgcagcaugagauggcugacgcggaagaacggcgacuauccuauccaggaugcucaauacacaaauaaccaggggaaaaauauucuuuuuauguggggaaucaaccaucccccuaccgacacaacccagcgcgaucuguacaccagaacagacacgaccacaucuguggccaccgaggaaauuaaucggaucuucaagccgcucaucggcccccgcccucugguuaacgggcugaugggaagaauugauuauuacugguccgugcucaaacccggccagacacugcggaucaagagcgacgggaaccuuauugcuccuugguuuggacacauccuguccggcgagucucauggccgcauucucaagaccaaucugaaaagagggagcugcacgguccaaugucagacagaaaagggaggccuuaacaccacccugcccuuccagaauguguccaaauaugccuuugggaacugcagcaaguacaucggaaucaaaucucucaagcuggcggugggccugcggaaugucccgucccgcagcucuagaggacucuucggggccauugcuggcuuuaucgagggcggguggagcggacugguugccggcugguauggguuccagcacuccaacgaucaaggagugggcauggcugccgaccgggacucuacacagaaggcgauugauaaaaucaccagcaaggugaauaacauugucgacaaaaugaauaagcaguacgaaaucaucgaucacgaguuuuccgagguggaaacaagacuuaacaugauuaauaacaaaaucgacgaucaaauucaggacaucugggccuauaaugcugagcugcucguucugcuugaaaaccagaagacgcuggaugagcaugacgccaaugugaacaaccucuacaauaaagucaagcgcgcucuggggagcaacgccguggaagauggcaagggauguuucgagcuguaccacaaaugcgacgaucaguguauggagaccauucggaauggcacauauaacagacgcaaguaccaagaagagucuaaacucgaacggcagaagaucgaggggguuaaacuggaauccgagggaaccuauaagauucuuacaaucuacagcaccguggccucuucccuggucaucgcuaugggcuuugcggccuuccucuucugggcuaugagcaauggguccugcagaugcaacauuuguaucuga

SEQ ID NO: 205758 - RNA, 1701 nt, Artificial Sequence
  derived and/or modified CDS sequence (opt5) from hemagglutinin__InfluenzaA__ALT66860
augaaggccauccuggugguccuccuguacaccuucacaacggcuaacgccgacacccuuugcauuggcuaucacgcgaauaacagcacagauaccguugacacagugcuggagaagaaugugaccgucacacauuccgugaaccuccuggaagauaagcacaaugggaaacuuuguaagcugagaggaguugcuccccuccaucugggcaaaugcaacaucgccggguggauucugggaaauccugagugugaaucucucagcaccgccuccucuuggagcuacaucguggagacguccaacucugacaaugggaccugcuauccgggcgauuuuauuaacuacgaagaacugcgggagcagcuuagcuccgucagcucuuucgaacgcuuugagaucuuccccaagacauccagcuggccuaaucacgacucuaacaagggagugaccgcugccuguccccaugcuggcgccaaauccuuuuauaagaaucugaucuggcucguuaaaaagggcaacagcuacccuaaacugaaucaaucuuauauuaacgauaaggggaaggaagugcuuguccuguggggaauccaccaccccuccacaaccgcggaccagcagagccucuaccagaacgccgaugcuuacguguucgugggcacguccagauauucuaaaaaguuuaaaccugagauugccacacggccgaagguccgcgaccaagaggggagaaugaauuacuauuggacccugguugaacccggagauaaaaucacauucgaggcuaccggcaaccugguggugccucgguacgccuuuaccauggaacgcaaugcggggagcggaauuaucauuuccgacacacccguccaugauugcaacacgaccugucagacaccugagggcgccaucaauaccagccuccccuuccagaacauccacccgauuacaaucggcaagugcccuaaauaugugaagucuaccaagcugagacuugcuacggggcugcggaauguucccuccauucagagccgcggacucuuuggcgccaucgcuggguucauugaaggaggcuggacagggaugguggacggaugguacggcuaucaucaccaaaacgagcagggcucuggguacgccgccgaccugaaaagcacccagaaugcuaucgauaagaucaccaacaaagucaauuccgugauugagaagaugaacacacaguuuaccgcgguuggaaaagaguucaaucaccuugagaagagaaucgaaaaccugaauaagaaaguggacgauggcuuccucgacauuuggacauacaacgccgagcugcugguccuccuggaaaacgagcggacgcuugauuaucaugacucuaaugugaagaaccuguacgagaaaguccgcaaucaacucaagaacaaugcuaaagaaaucgggaacggauguuuugaguucuaucacaagugcgauaauaccuguauggaaagcgugaagaacggcacauacgacuauccuaaauacuccgaggaagccaagcugaauagagagaaaauugaugggguuaaacuugagagcacccggaucuaucagauccuggccauuuacucuacaguggcuuccagccucguccuggugguuucucugggcgccaucuccuuuuggaugugcagcaacggaucccuccagugccgcauuuguaucuga

SEQ ID NO: 205759 - RNA, 1701 nt, Artificial Sequence
  derived and/or modified CDS sequence (opt5) from hemagglutinin__InfluenzaA__AMA65391
augaaggccauccuggugguccuccuguacaccuucacaacggcuaacgccgacacccuuugcauuggcuaucacgcgaauaacagcacagauaccguugacacagugcuggagaagaaugugaccgucacacauuccgugaaccuccuggaagauaagcacaaugggaaacuuuguaagcugagaggaguugcuccccuccaucugggcaaaugcaacaucgccggguggauucugggaaauccugagugugaaucucucagcaccgccuccucuuggagcuacaucguggagacguccaacucugacaaugggaccugcuauccgggcgauuuuauuaacuacgaagaacugcgggagcagcuuagcuccgucagcucuuucgaacgcuuugagaucuuccccaagacauccagcuggccuaaucacgacucuaacaagggagugaccgcugccuguccccaugcuggcgccaaauccuuuuauaagaaucugaucuggcucguuaaaaagggcaacagcuacccuaaacugaaucaaucuuauauuaacgauaaggggaaggaagugcuuguccuguggggaauccaccaccccuccacaaccgcggaccagcagagccucuaccagaacgccgaugcuuacguguucgugggcacguccagauauucuaaaaaguuuaaaccugagauugccacacggccgaagguccgcgggcaagagggaagaaugaauuacuauuggacccugguugaacccggcgacaaaaucacauucgaggcuaccgggaaccugguggugccucgguacgccuuuaccauggaacgcaaugcgggaagcggcauuaucauuuccgauacacccguccaugacugcaacacgaccugucagacaccugagggcgccaucaauaccagccuccccuuccagaacauccacccgauuacaaucgggaagugcccuaaauaugugaagucuaccaagcugagacuugcuacgggacugcggaauguucccuccauucagagccgcggccucuuuggggccaucgcuggauucauugaaggcggguggacaggaaugguggauggcugguacggcuaucaucaccaaaacgagcaggggucuggauacgccgccgaccugaaaagcacccagaaugcuaucgacaagaucaccaacaaagucaauuccgugauugagaagaugaacacacaguuuaccgcgguuggcaaagaguucaaucaccuugagaagagaaucgaaaaccugaauaagaaaguggaugacggguuccucgauauuuggacauacaacgccgagcugcugguccuccuggaaaacgagcggacgcuugacuaucaugauucuaaugugaagaaccuguacgagaaaguccgcaaucaacucaagaacaaugcuaaagaaaucggaaacggcuguuuugaguucuaucacaagugcgacaauaccuguauggaaagcgugaagaacgggacauacgauuauccuaaauacuccgaggaagccaagcugaauagagagaaaauugacggcguuaaacuugagagcacccggaucuaucagauccuggccauuuacucuacaguggcuuccagccucguccuggugguuuuucugggagccaucucuuucuggaugugcuccaacggcagccuccagugccgcauuuguaucuga

SEQ ID NO: 205760 - RNA, 1701 nt, Artificial Sequence
  derived and/or modified CDS sequence (opt5) from hemagglutinin__InfluenzaA__AMA65393
augaaggccauccuggugguccuccuguacaccuucacaacggcuaacgccgacacccuuugcauuggcuaucacgcgaauaacagcacagauaccguugacacagugcuggagaagaaugugaccgucacacauuccgugaaccuccuggaagauaagcacaaugggaaacuuuguaagcugagaggaguugcuccccuccaucugggcaaaugcaacaucgccggguggauucugggaaauccugagugugaaucucucagcaccgccuccucuuggagcuacaucguggagacguccaacucugacaaugggaccugcuauccgggcgauuuuauuaacuacgaagaacugcgggagcagcuuagcuccgucagcucuuucgaacgcuuugagaucuuccccaagacauccagcuggccuaaucacgacucuaacaagggagugaccgcugccuguccccaugcuggcgccaaauccuuuuauaagaaucugaucuggcucguuaaaaagggcaacagcuacccuaaacugaaucaaucuuauauuaacgauaaggggaaggaagugcuuguccuguggggaauccaccaccccuccacaaccgcggaccagcagagccucuaccagaacgccgaugcuuacguguucgugggcacguccagauauucuaaaaaguuuaaaccugagauugccacacggccgaagguccgcgaccaagaggggagaaugaauuacuauuggacccugguugaacccggagauaaaaucacauucgaggcuaccggcaaccugguggugccucgguacgccuuuaccauggaacgcaaugcggggagcggaauuaucauuuccgacacacccguccaugauugcaacacgaccugucagacaccugagggcgccaucaauaccagccuccccuuccagaacauccacccgauuacaaucggcaagugcccuaaauaugugaagucuaccaagcugagacuugcuacggggcugcggaauguucccuccauucagagccgcggacucuuuggcgccaucgcuggguucauugaaggaggcuggacagggaugguggacggaugguacggcuaucaucaccaaaacgagcagggcucuggguacgccgccgaccugaaaagcacccagaaugcuaucgauaagaucaccaacaaagucaauuccgugauugagaagaugaacacacaguuuaccgcgguuggaaaagaguucaaucaccuugagaagagaaucgaaaaccugaauaagaaaguggacgauggcuuccucgacauuuggacauacaacgccgagcugcugguccuccuggaaaacgagcggacgcuugauuaucaugacucuaaugugaagaaccuguacgagaaaguccgcaaucaacucaagaacaaugcuaaagaaaucgggaacggauguuuugaguucuaucacaagugcgauaauaccuguauggaaagcgugaagaacggcacauacgacuauccuaaauacuccgaggaagccaagcugaauagagagaaaauugaugggguuaaacuugagagcacccggaucuaucagauccuggccauuuacucucccguggcuuccagccucguccuggugguuuuucugggcgccaucucuuucuggaugugcuccaacggaagccuccagugccgcauuuguaucuga

SEQ ID NO: 205761 - RNA, 1701 nt, Artificial Sequence
  derived and/or modified CDS sequence (opt5) from hemagglutinin__InfluenzaA__BAA02768
augaaggccaaacugcucgugcugcuuugcgcuuucaccgccacagacgcggauacgaucuguauuggcuaccacgcuaacaauagcaccgacacagucgauaccguucuggagaagaacgugacagugacccauuccgucaaucuccuggaagacucucacaacgggaaacuuugcagacugaagggaaucgccccgcuccagcugggcaauuguagcauugccggguggauccugggaaacccugagugcgaaucccucuuuucuaaagagagcugguccuauauugcugaaacacccaauucugagaacggcaccuguuaccccggguauuucgccgauuacgaggaacugcgggagcaacuuagcuccgugagcucuuuugaacgcuucgagaucuuuccuaaggaguccagcuggcccaaucauacgguuaccaagggagugacagcuucuugcucccacaacggcaaaagcucuuucuauagaaaucugcucuggcugaccggcaagaacgggcuuuacccuaaucuguccaaaagcuaugucaacaauaaggaaaaagaggugcucguucuguggggagugcaucaccccuccaacaucggcgaccagcgggccauuuaccacacagaaaacgcguacgucucuguggugagcucccauuauagccgcagauuuaccccugagaucgccaagcggccgaagguccgcgggcaggaaggaagaauuaauuacuauuggacgcugcucgagcccggcgauacaaucauuuucgaggcuaacgggaaucugaucgccccuugguacgcuuuugcccuuucucggggauucggcuccggcauuaucaccagcaacgcgucuauggacgaaugugaugccaaaugccagacaccccaaggggcuaucaauagcucccugccuuuucagaacguucaccccgugaccauuggagaguguccgaaguaugugcgcucuaccaaacucagaauggucacaggccugcggaauaucccuagcauucagucccgcgggcuuuucggagccaucgcuggcuuuauugaagggggauggacgggcaugaucgacggcugguacggguaucaucaccagaacgagcaaggaagcggcuacgccgccgaucagaagucuacccagaaugcuaucaacgggauuacaaauaaagugaacuccguuaucgaaaagaugaauacccaguucacagcggugggaaaagaguucaacaagcuggagagacggauggaauaccucaauaagaaagucgacgauggcuuucuggacauuuggaccuauaacgccgagcugcucgugcugcuugaaaacgagcgcacgcuggacuuccacgauagcaauguuaagaaccucuacgaaaaagugaagucucaacugaaaaauaacgcuaaggagaucggguauggcugcuuugaguucuaccauaaguguaauaacgaaugcauggaguccgucaaaaauggaacauaugacuaccccaaguauagcgaagaguccaaacuuaacagagagaagauugauggcgugaaacuggaaucuaugggggucuaccagauccucgccaucuacagcaccguggccuccucucugguucugcucgugagccugggagcuauuuccuuuuggaugugcagcaauggcucucuucagugucggaucugcauuuga

SEQ ID NO: 205762 - RNA, 1701 nt, Artificial Sequence
  derived and/or modified CDS sequence (opt5) from hemagglutinin__InfluenzaA__BAA02769
augaaggccaaacugcucgugcugcuuugcgcuuucaccgccacagacgcggauacgaucuguauuggcuaccacgcuaacaauagcaccgacacagucgauaccguucuggagaagaacgugacagugacccauuccgucaaucuccuggaagacucucacaacgggaaacuuugcagacugaagggaaucgccccgcuccagcugggcaauuguagcauugccggguggauccugggaaacccugagugcgaaucccucuuuucuaaagagagcugguccuauauugcugaaacacccaauucugagaacggcaccuguuaccccggguauuucgccgauuacgaggaacugcgggagcaacuuagcuccgugagcucuuuugaacgcuucgagaucuuuccuaaggaguccagcuggcccaaucauacgguuaccaagggagugacagcuucuugcucccacaacggcaaaagcucuuucuauagaaaucugcucuggcugaccggcaagaacgggcuuuacccuaaucuguccaaaagcuaugucaacaauaaggaaaaagaggugcucguucuguggggagugcaucaccccuccaacauccgggaccagcgcgccauuuaccacacagaaaacgcguacgucucuguggugagcucccauuauagcagacgguuuaccccugagaucgccaagcgcccgaaggucagagaucaggaaggccggauuaauuacuauuggacgcugcucgagcccggggacacaaucauuuucgaggcuaacggaaaucugaucgccccuugguacgcuuuugcccuuucucgcggcuucggguccggaauuaucaccagcaacgcgucuauggaugaaugugacgccaaaugccagacaccccaaggcgcuaucaauagcucccugccuuuucagaacguucaccccgugaccauuggcgaguguccgaaguaugugagaucuaccaaacuccggauggucaaggggcugcgcaauaucccuagcauucaguccagaggacuuuucggcgccaucgcuggguuuauugaaggaggcuggacagggaugaucgauggaugguacggcuaucaucaccagaacgagcaaggcagcggguacgccgccgaccagaaaucuacgcagaaugcuaucaacggaauuaccaauaaggugaacuccguuaucgaaaagaugaauacacaguucaccgcggugggcaaggaguucaacaagcuggagcggcgcauggaauaccucaauaaaaaggucgaugacggguuucuggacauuuggacauauaacgccgagcugcucgugcugcuugaaaacgagagaacccuggauuuccacgacagcaauguuaaaaaccucuacgaaaaggugaaaucucaacugaagaauaacgcuaaggagaucggauauggcugcuuugaguucuaccauaaauguaauaacgaaugcauggaguccgucaagaaugggacguaugauuaccccaaauauagcgaagaguccaaacuuaaccgggagaaaauugacggcgugaagcuggaaucuaugggagucuaccagauccucgccaucuacagcacaguggccuccucucugguucugcucgugagccugggcgcuauuuccuuuuggaugugcagcaaugggucucuucaguguagaaucugcauuuga

SEQ ID NO: 205763 - RNA, 1689 nt, Artificial Sequence
  derived and/or modified CDS sequence (opt5) from hemagglutinin__InfluenzaA__BAC43764
auggccaucauuuaccugauccuccuguucaccgcugugagaggcgaccagauuugcaucggguaucacgccaacaauagcacagagaaggucgauacgauucuugaacggaacguuaccgugacacaugcgaaaaauauccuggagaagacccacaacggaaaacucuguaagcugaauggcauucccccucuugaacugggggacugcuccaucgcuggauggcuccugggcaacccggagugugaucgccugcucaucgugcccgaauggucuuacauuauggagaaagagaauccuagagacgggcugugcuaucccggaucuuuuaacgauuacgaagaacuuaagcaucugcucuccucugucaagcacuucgaaaaagugaagauccugccuaaagaccgguggacacaacauaccacaaccggcggcagccgcgccugugccguuuccgggaaucccagcuuuuucagaaacaugguguggcuuacgaagaaaggaagcaauuauccugucgcuaagggcuccuacaacaauaccagcggggagcagaugcugauuaucuggggagugcaccacccgauugaugagacagaacagaucacccucuaucagaacguuggcacauacgugucugucgggaccuccacgcugaauaagcggagcacacccgagaucgccacccgcccuaaagugaacggacugggcucuagaauggaauuuuccuggacacuccuggacaugugggauaccauuaacuucgagagcaccggcaaucuuaucgcucccgaauacggguuuaagauuucuaaacggggauccagcggcaucaugaagacagaggggacgcuggagaacugcgaaaccaaaugucaaacaccucucggagccauuaauaccacacugcccuuccauaacgugcacccgcuuaccaucggcgagugcccuaaguaugucaaauccgaaaagcugguucucgcgacggggcugcgcaaugugccccagaucgagucuagaggacuguuuggcgccauugcuggcuucaucgaagggggauggcagggcaugguggacgggugguacggauaucaucacagcaacgaucagggcuccggguacgccgcugacaaggagagcacacaaaaagccuuugauggcauuaccaauaaggucaacucugugaucgagaaaaugaauacccaguucgaagcgguuggaaaggaguuuuccaaccucgaacggcgccuggagaaucuuaacaaaaagauggaagacggcuuccuggacguguggacauauaaugccgagcuccugguccuuauggagaacgaaagaacccuggauuuccacgacagcaaugugaagaaccucuacgauaaaguucggaugcagcugcgcgacaacgugaaggagcuggggaauggauguuuugaguucuaucauaaaugcgaugacgaguguaugaacucugucaagaauggcacauacgauuacccuaaauaugaggaagagagcaagcucaacagaaaugaaauuaagggggugaaacuguccucuaugggagucuaccagauccuugcuaucuaugccacgguggcuggcagccugucccucgccauuaugauggccgggaucagcuuuuggaugugcucuaacggcucccugcaauuccggauuugcaucuga

SEQ ID NO: 205764 - RNA, 1707 nt, Artificial Sequence
  derived and/or modified CDS sequence (opt5) from hemagglutinin__InfluenzaA__BAE07201
auggagaagaucgugcuccuguucgccauugucagccugguuaaauccgaccagaucugcauuggcuaccacgcuaacaauucuaccgaacaaguggauacaaucauggagaagaacgugacggucacccaugcccaggacauucuugaaaagacacacaaugggaagcugugugaucucgacggagugaaaccccugauccuuagagauugcagcguugcgggcuggcugcucgggaacccuaugugugacgaguuuaucaaugugccggaaugguccuauauugucgagaaggcuaaccccgccaaugaucugugcuacccuggagacuucaacgauuaugaggaacugaagcaucuccugucucggaucaaucacuuugagaaaauucagaucauucccaagaacagcugguccucucaugaagccagccuuggcguguccagcgcuuguccuuaccaggggaaaucuuccuucuuucgcaauguuguguggcugaucaagaaaaacaaugccuaucccaccauuaagagaagcuacaacaauacaaaccaagaggaccuccugguccuuuggggaauccaccacccuaacgaugcugccgagcagacccggcuguaucagaauccgacaaccuacaucucugugggcacguccacccucaaccagcgccuggugcccaagauugcgacaagaagcaaagucaauggccaaaacgggcggauggaguucuuuuggaccauccugaagccuaaugacgccauuaacuucgaaucuaauggaaacuuuaucgcucccgaauacgccuauaaaauuguuaagaaaggcgauuccgcuaucaugaaguccgagcucgaauacgggaauugcaacacaaaaugucagaccccuaugggagccaucaauuccucuaugcccuuccauaacauucacccgcugacgaucggcgagugcccuaaguaugugaaaagcaaucgccuugugcuggcgacagggcucagaaacagcccccagcgggagcgcagacggaaaaagcgcggacuguuuggcgccauugcuggcuucaucgaagggggauggcagggcauggucgacgggugguacggauaucaucacagcaaugagcaaggcucuggguacgccgcugacaaagaauccacccagaaggccauugauggagugacaaacaaaguuaacagcaucaucgacaagaugaauacccaguuugaggccgugggcagagaguucaacaaucuugaacggcgcauugagaaccugaauaagaaaauggaagauggcuuccucgacgucuggaccuauaacgcugagcugcuggugcucauggaaaaugagagaacacuggauuuucacgacucuaacguuaagaaucuuuacgauaaagugcggcugcaacucagagacaacgcgaaggaacuggggaauggauguuucgaguuuuaccauaaaugcgauaacgaguguauggaaagcguccgcaauggcacguaugacuacccucaguauuccgaggaagcccggcuuaagagagaggagaucucuggggugaagcuggaaagcauuggaaccuaccagauccucuccauuuauagcacagucgcuucuucccuggcccuggccaucaugguggcuggccucagccuguggaugugcucuaacgggucccuucagugccgcauuuguaucuga

SEQ ID NO: 205765 - RNA, 1701 nt, Artificial Sequence
  derived and/or modified CDS sequence (opt5) from hemagglutinin__InfluenzaA__BAH95823
augaaggccauccuggugguccuccuguacaccuucgcuacagccaacgcggacacgcuuugcauuggcuaucacgcuaauaacagcaccgauacaguugacaccgugcuggagaagaaugugacagucacccauuccgugaaccuccuggaagauaagcacaaugggaaacuuuguaagcugagaggaguugcuccccuccaucugggcaaaugcaacaucgccggguggauucugggaaauccugagugugaaucucucagcacagccuccucuuggagcuacaucguggagaccuccucuagcgacaacggcacgugcuauccgggggauuuuauugacuacgaagaacugcgggagcagcuuuccagcgucucuuccuucgaacgcuuugagaucuuccccaagaccagcucuuggccuaaucacgauuccaacaagggagugacagccgcuuguccccaugccggcgcgaaaucuuuuuauaagaaucugaucuggcucguuaaaaagggcaacagcuacccuaaacuguccaagagcuauauuaaugacaaggggaaagaagugcuuguccuguggggaauccaccaccccuccaccucugccgaucaacagagccucuaccagaacgcugacgccuacguguucgugggcuccagcagauauucuaagaaauuuaagccugagauugcuauccggccgaaaguccgcgaucaggaggggagaaugaauuacuauuggacacugguugaacccggagacaagauuaccuucgaggccacgggcaaccugguggugccucgguacgcguuugccauggaacgcaacgcuggguccggaaucauuaucagcgauacacccguccaugacugcaauaccacaugucaaaccccuaaaggcgccaucaacaccucucuccccuuccagaauauucacccgaucacaauuggcaagugcccuaagcaugugaaaagcacgaagcugagacuugcuaccgggcugcggaacguucccuccauccagucucgcggacucuuuggcgccauugccggguucaucgagggaggcuggacagggaugguggacggaugguauggcuaccaccaccagaaugaacaaggcagcggguaugcugcggaucugaaauccacccagaacgccaucgacgagauuacaaauaaggucaacagcgugaucgagaaaaugaauacccaguuuacggcuguuggaaaggaguucaaccaucuugagaagagaauugaaaaucugaacaaaaagguggaugacggcuuccucgauaucuggacauacaaugccgagcugcugguccuccuggaaaacgagcggacccuugacuaccacgauucuaaugugaaaaaccuguaugagaagguccgcucccagcucaaaaacaaugccaaggaaauugggaacggauguuuugaguucuaccauaagugcgacaauaccuguauggaaagcgugaaaaacggcacauaugauuacccuaaguauucugaggaagcuaaacugaauagagaggagaucgacgggguuaaacuugaauccacccggaucuaccaaauucuggccaucuauagcacaguggcguccucucucguccuggugguuagccugggcgcuauuuccuuuuggaugugcucuaacggaagccuccagugccgcaucuguauuuga

SEQ ID NO: 205766 - RNA, 1701 nt, Artificial Sequence; identical to SEQ ID NO: 194728
  derived and/or modified CDS sequence (opt5) from hemagglutinin__InfluenzaA__BAH95824

SEQ ID NO: 205767 - RNA, 1707 nt, Artificial Sequence
  derived and/or modified CDS sequence (opt5) from hemagglutinin__InfluenzaA__BAJ07997
auggagaagaucgugcuccuguucgccauugucagccugguuaaauccgaccagaucugcauuggcuaccacgcuaacaauucuaccgaacaaguggauacaaucauggagaagaacgugacggucacccaugcccaggacauucuugagaaaacacacaaugggaagcugugugaucucgacggagugaaaccccugauccuuagagauugcagcguugcgggcuggcugcucgggaacccuaugugugacgaauuuaucaaugugccggaaugguccuauauugucgagaaggcuaaccccgccaaugaucugugcuacccuggagacuucaacgauuaugaggaacugaagcaucuccugucucggaucaaucacuuugagaaaauucagaucauucccaagaacagcugguccucucaugaagccagccuuggcguguccagcgcuuguccuuaccaggggaaaucuuccuucuuucgcaauguuguguggcugaucaagaaaaacaaugccuaucccaccauuaagagaagcuacaacaauacaaaccaagaggaccuccugguccuuuggggaauccaccacccuaacgaugcugccgagcagacccggcuguaucagaauccgacaaccuacaucucugugggcacguccacccucaaccagcgccuggugcccaagauugcgacaagaagcaaagucaauggccaaucugggcggauggaguucuuuuggaccauccugaagccuaacgacgccauuaauuucgaauccaacggaaauuuuaucgcucccgaauacgccuauaaaauuguuaagaaaggcgauagcgcuaucaugaaguccgagcucgaauacgggaacugcaauacaaaaugucagaccccuaugggagccaucaacucuagcaugcccuuccauaauauucacccgcugacgaucggcgagugcccuaaguaugugaaguccaaccgccuugugcuggcgacagggcucagaaauagcccccagcgggagcgcagacggaaaaagcgcggacuguuuggcgccauugcuggcuucaucgaagggggauggcagggcauggucgacgggugguacggauaucaucacucuaacgagcaaggcuccggguacgccgcugacaaagaaagcacccagaaggccauugauggagugacaaauaaaguuaacucuaucaucgacaagaugaacacccaguuugaggccgugggcagagaguucaauaaccuugaacggcgcauugagaaucugaacaagaaaauggaagauggcuuccucgacgucuggaccuauaaugcugagcugcuggugcucauggaaaacgagagaacacuggauuuucacgacagcaauguuaagaaccuuuacgauaaagugcggcugcaacucagagacaaugcgaaggaacuggggaacggauguuucgaguuuuaccauaaaugcgauaaugaguguauggaauccguccgcaacggcacguaugacuacccucaguauucugaggaagcccggcuuaagagagaggagaucagcggggugaagcuggaauccauuggaaccuaccagauccucagcauuuauucuacagucgcuuccagccuggcccuggccaucaugguggcuggccucucucuguggaugugcuccaaugggagccuucagugccgcauuuguaucuga

SEQ ID NO: 205768 - RNA, 1701 nt, Artificial Sequence
  derived and/or modified CDS sequence (opt5) from hemagglutinin__InfluenzaA__BAJ39949
augaaggccauccuggugguccuccuguacaccuucgcuacagccaacgcggacacgcuuugcauuggcuaucacgcuaauaacagcaccgauacaguugacaccgugcuggagaagaaugugacagucacccauuccgugaaccuccuggaagauaagcacaaugggaaacuuuguaagcugagaggaguugcuccccuccaucugggcaaaugcaacaucgccggguggauucugggaaauccugagugugaaucucucagcacagccuccucuuggagcuacaucguggagaccuccucuagcgacaacggcacgugcuauccgggggauuuuauugacuacgaagaacugcgggagcagcuuuccagcgucucuuccuucgaacgcuuugagaucuuccccaagaccagcucuuggccuaaucacgauuccaacaagggagugacagccgcuuguccccaugccggcgcgaaaucuuuuuauaagaaucugaucuggcucguuaaaaagggcaacagcuacccuaaacuguccaagagcuauauuaaugacaaggggaaagaagugcuuguccuguggggaauccaccaccccuccaccucugccgaucaacagagccucuaccagaacgcugacacauacguguucgugggcaccuccagauauagcaagaaauuuaagccugagauugccauccggccgaaaguccgcgaucaggaggggagaaugaauuacuauuggacgcugguugaacccggagacaagauuacauucgaggcuaccggcaaccugguggugccucgguacgccuuugcgauggaacgcaacgccgggucuggaaucauuaucuccgauacacccguccaugacugcaauaccaccugucaaacaccuaaaggcgcuaucaacacgagccuccccuuccagaauauucacccgaucaccauuggcaagugcccuaaguaugugaaaucuacaaagcugagacuugccaccgggcugcggaacguucccagcauccagucccgcggacucuuuggcgcuauugccggguucaucgagggaggcuggacagggaugguggacggaugguacggcuaucaucaccagaaugaacaaggcucuggguacgccgcugaucugaaaagcacccagaacgcgaucgacgagauuacgaauaaggucaacuccgugaucgagaaaaugaauacacaguuuaccgccguuggaaaggaguucaaccaccuugagaagagaauugaaaaucugaacaaaaagguggaugacggcuuccucgauaucuggaccuacaaugcuaaacugcugguccuccugaagaacgagcggacacuugacuaucaugauagcaaugugaaaaaccuguacgaaaagguccgcucucagcucaagaacaaugccaaagagauugggaacggauguuuugaguucuaucacaagugcgacaauaccuguauggaauccgugaaaaacggcacauacgauuauccuaaguacagcgaggaagccaaacugaauagagaggaaaucgacgggguuaaacuugagucuacgcggaucuaucaaauucuggcuaucuacuccaccguggccagcucccucguccuggugguuucucugggcgcgauuagcuuuuggaugugcuccaacggaucucuccagugccgcaucuguauuuga

SEQ ID NO: 205769 - RNA, 1701 nt, Artificial Sequence
  derived and/or modified CDS sequence (opt5) from hemagglutinin__InfluenzaA__BAJ39950
augaaggccauccuggugguccuccuguacaccuucgcuacagccaacgcggacacgcuuugcauuggcuaucacgcuaauaacagcaccgauacaguugacaccgugcuggagaaaaaugugacagucacccauuccgugaaccuccuggaagauaagcacaaugggaaacuuuguaagcugagaggaguugcuccccuccaucugggcaaaugcaacaucgccggguggauucugggaaauccugagugugaaucucucagcacagccuccucuuggagcuacaucgccgagaccuccucuagcgacaacggcacgugcuauccgggggauuuuauugacuacgaagaacugcgggagcagcuuuccagcgugucuuccuucgaacgcuuugagaucuuccccaagaccagcucuuggccuaaucacgauuccaacaagggagucacagcugccuguccccaugcgggcgccaagagcuuuuauaagaaucugaucuggcucgugaaaaagggcaacucuuacccuaaacuguccaagagcuauauuaaugacaaggggaaagaaguucuugugcuguggggaauccaccaccccuccaccucugcugaucaacagagccucuaccagaacgccgacgcuuacgucuucgugggcacauccagauauagcaagaaauuuaagccugagauugccauccggccgaaagugcgcgaucaggaggggagaaugaauuacuauuggacccuggucgaacccggagacaagauuacguucgaggcgacaggcaaccugguugugccucgguacgccuuugcuauggaacgcaacgccgggucuggaaucauuaucuccgauacccccgugcaugacugcaauacaaccugucaaaccccuaaaggcgcuaucaacacaagccuccccuuccagaauauucacccgaucacgauuggcaagugcccuaaguaugucaaaucuaccaagcugagacuugccacagggcugcggaacgugcccagcauccagucccgcggacucuuuggcgccauugcuggguucaucgagggaggcuggaccgggaugguugacggaugguacggcuaucaucaccagaaugaacaaggcucuggguacgcggccgaucugaaaagcacacagaacgcuaucgacgagauuaccaauaaggugaacuccgucaucgagaaaaugaauacgcaguuuacagccgugggaaaggaguucaaccaccuugagaagagaauugaaaaucugaacaaaaagguugaugacggcuuccucgauaucuggaccuacaaugccgagcugcuggugcuccuggaaaacgagcggacccuugacuaucaugauagcaaugucaaaaaccuguacgagaaggugcgcucucagcucaaaaacaaugcuaaggaaauugggaacggauguuuugaguucuaucacaagugcgacaauacauguauggaauccgucaaaaacggcaccuacgauuauccuaaguacagcgaggaagccaaacugaauagagaggagaucgacggggugaaacuugaaucuacacggaucuaucaaauucuggcgaucuacuccacgguugcuagcucccucgugcuggucgugucucugggcgccauuagcuuuuggaugugcuccaacggaucucuccagugccgcaucuguauuuga

SEQ ID NO: 205770 - RNA, 1701 nt, Artificial Sequence
  derived and/or modified CDS sequence (opt5) from hemagglutinin__InfluenzaA__BAJ39951
augaaggccauccuggugguccuccuguacaccuucgcuacagccaacgcggacacgcuuugcauuggcuaucacgcuaauaacagcaccgauacaguugacaccgugcuggagaagaaugugacagucacccauuccgugaaccuccuggaagauaagcacaaugggaaacuuuguaagcugagaggaguugcuccccuccaucugggcaaaugcaacaucgccggguggauucugggaaauccugagugugaaucucucagcacagccuccucuuggagcuacaucguggagaccuccucuagcgacaacggcacgugcuauccgggggauuuuauugacuacgaagaacugcgggagcagcuuuccagcgucucuuccuucgaacgcuuugagaucuuccccaagaccagcucuuggccuaaucacgauuccaacaagggagugacagccgcuuguccccaugccggcgcgaaaucuuuuuauaagaaucugaucuggcucguuaaaaagggcaacagcuacccuaaacuguccaagagcuauauuaaugacaaggggaaagaagugcuuguccuguggggaauccaccaccccuccaccucugccgaucaacagagccucuaccagaacgcugacacauacguguucgugggcaccuccagauauagcaagaaauuuaagccugagauugccauccggccgaaaguccgcgaucaggaggggagaaugaauuacuauuggacgcugguugaacccggagacaagauuacauucgaggcuaccggcaaccugguggugccucgguacgccuuugcgauggaacgcaacgccgggucuggaaucauuaucuccgauacacccguccaugacugcaauaccaccugucaaacaccuaaaggcgcuaucaacacgagccuccccuuccagaauauucacccgaucaccauuggcaagugcccuaaguaugugaaaucuacaaagcugagacuugccaccgggcugcggaacguucccagcuuucagucccgcggacucuucggcgcuaucgccggguuuauugagggaggcuggacagggaugguggacggaugguacggcuaucaucaccagaaugaacaaggcucuggguacgccgcugaucugaaaagcacccagaacgcgaucgacgagaucacgaauaaggucaacuccgugauugagaaaaugaauacacaguucaccgccguuggaaaggaguucaaccaccuugagaagagaaucgaaaaucugaacaaaaagguggaugacggcuuucucgauauuuggaccuacaaugcugagcugcugguccuccuggaaaacgagcggacacuugacuaucaugauagcaaugugaaaaaccuguacgagaagguccgcucucagcucaaaaacaaugccaaggaaaucgggaacggauguuucgaguuuuaucacaagugcgacaauaccuguauggaauccgugaaaaacggcacauacgauuauccuaaguacagcgaggaagccaaacugaauagagaggagauugacgggguuaaacuugaaucuacgcggaucuaucaaauccuggcuauuuacuccaccguggccagcucccucguccuggugguuucucugggcgcgaucagcuucuggaugugcuccaacggaucucuccagugccgcauuuguaucuga

SEQ ID NO: 205771 - RNA, 1701 nt, Artificial Sequence; identical to SEQ ID NO: 201344
  derived and/or modified CDS sequence (opt5) from hemagglutinin__InfluenzaA__BAJ39952

SEQ ID NO: 205772 - RNA, 1701 nt, Artificial Sequence
  derived and/or modified CDS sequence (opt5) from hemagglutinin__InfluenzaA__BAJ39953
augaaggccauccuggugguccuccuguacaccuucgcuacagccaacgcggacacgcuuugcauuggcuaucacgcuaauaacagcaccgauacaguugacaccgugcuggagaaaaaugugacagucacccauuccgugaaccuccuggaagauaagcacaaugggaaacuuuguaagcugagaggaguugcuccccuccaucugggcaaaugcaacaucgccggguggauucugggaaauccugagugugaaucucucagcacagccuccucuuggagcuacaucguggagaccuccucuagcgacaacggcacgugcuauccgggggauuuuauugacuacgaagaacugcgggagcagcuuuccagcgucucuuccuucgaacgcuuugagaucuuccccaagaccagcucuuggccuaaucacgauuccaacaagggagugacagccgcuuguccccaugccggcgcgaaaucuuuuuauaagaaucugaucuggcucguuaaaaagggcaacagcuacccuaaacuguccaagagcuauauuaaugacaaggggaaagaagugcuuguccuguggggaauccaccaccccuccaccucugccgaucaacagagccucuaccagaacgcugacacauacguguucgugggcaccuccagauauagcaagaaauuuaagccugagauugccauccggccgaaaguccgcgaucaggaggggagaaugaauuacuauuggacgcugguugaacccggagacaagauuacauucgaggcuaccggcaaccugguggugccucgguacgccuuugcgauggaacgcaacgccgggucuggaaucauuaucuccgauacacccguccaugacugcaauaccaccugucaaacaccuaaaggcgcuaucaacacgagccuccccuuccagaauauucacccgaucaccauuggcaagugcccuaaguaugugaaaucuacaaagcugagacuugccaccgggcugcggaacguucccagcauccagucccgcggacucuuuggcgcuauugccggguucaucgagggaggcuggacagggaugguggacggaugguacggcuaucaucaccagaaugaacaaggcucuggguacgccgcugaucugaaaagcacccagaacgcgaucgacgagauuacgaauaaggucaacuccgugaucgagaaaaugaauacacaguuuaccgccguuggaaaggaguucaaccaccuugagaagagaauugaaaaucugaacaaaaagguggaugacggcuuccucgauaucuggaccuacaaugcuaaacugcugguccuccuggagaacgaacggacacuugacuaucaugauagcaaugugaagaaccuguacgagaaaguccgcucucagcucaagaacaaugccaaggagauugggaacggauguuuugaguucuaucacaaaugcgacaauaccuguauggaauccgugaagaacggcacauacgauuauccuaaauacagcgaagaggccaagcugaauagagaagagaucgacgggguuaaacuugagucuacgcggaucuaucaaauucuggcuaucuacuccaccguggccagcucccucguccuggugguuucucugggcgcgauuagcuuuuggaugugcuccaacggaucucuccagugccgcaucuguauuuga

SEQ ID NO: 205773 - RNA, 1701 nt, Artificial Sequence; identical to SEQ ID NO: 201344
  derived and/or modified CDS sequence (opt5) from hemagglutinin__InfluenzaA__BAJ39954

SEQ ID NO: 205774 - RNA, 1701 nt, Artificial Sequence
  derived and/or modified CDS sequence (opt5) from hemagglutinin__InfluenzaA__BAJ39955
augaaggccauccuggugguccuccuguacaccuucgcuacagccaacgcggacacgcuuagcauuggcuaucacgcuaauaacuccaccgauacaguugacaccgugcuggagaaaaaugugacagucacccauucugugaaccuccuggaagauaagcacaaugggaaacuuugcaagcugagaggaguugcuccccuccaucugggcaaauguaacaucgccggguggauucugggaaauccugagugcgaaagccucuccacagccucuagcugguccuacaucguggagaccucuagcuccgacaacggcacguguuauccgggggauuuuauugacuacgaagaacugcgggagcagcuuagcucugucuccagcuucgaacgcuuugagaucuuccccaagaccucuuccuggccuaaucacgauagcaacaagggagugacagccgcuugcccccaugccggcgcgaaaucuuuuuauaagaaucugaucuggcucguuaaaaagggcaacuccuacccuaaacugagcaaguccuauauuaaugacaaggggaaagaagugcuuguccuguggggaauccaccaccccucuauuagcgccgaucaacagucccucuaccagaacgcugacaccuacguguucgugggcacaagcagauauucuaagaaauuuaagccugagaucgccauucggccgaaaguccgcgaucaggaggggagaaugaauuacuauuggacccugguugaacccggagacaagaucacguucgaggcuacaggcaaccugguggugccucgguacgccuuugcgauggaacgcaacgccggguccggaauuaucaucagcgauacccccguccaugacuguaauacaaccugccaaaccccuaaaggcgcuauuaacacaucucuccccuuccagaauauccacccgauuacgaucggcaaguguccuaaguaugugaaaagcaccaagcugagacuugccacagggcugcggaacguucccuccauucagucucgcggacucuuuggcgcuaucgccggguucaucgagggaggcuggaccgggaugguggacggaugguacggcuaucaucaccagaaugaacaaggcagcggguacgccgcugaucugaaauccacacagaacgcgauugacgagaucaccaauaaggucaacagcgugauugagaaaaugaauacgcaguuuacagccguuggaaaggaguucaaccaccuugagaagagaaucgaaaaucugaacaaaaagguggaugacggcuuccucgauauuuggaccuacaaugcugagcugcugguccuccuggaaaacgagcggacccuugacuaucaugauucuaaugugaaaaaccuguacgagaagguccgcucccagcucaaaaacaaugccaaggaaaucgggaacggaugcuuugaguucuaucacaagugugacaauacaugcauggaaagcgugaaaaacggcaccuacgauuauccuaaguacucugaggaagccaaacugaauagagaggagaucgacgggguuaaacuugaauccacacggauuuaucaaauccuggcuauuuacagcacgguggccuccucucucguccuggugguuagccugggcgcgaucuccuuuuggauguguucuaacggaagccuccagugcaagauuugcaucuga

SEQ ID NO: 205775 - RNA, 1701 nt, Artificial Sequence; identical to SEQ ID NO: 205769
  derived and/or modified CDS sequence (opt5) from hemagglutinin__InfluenzaA__BAJ39956

SEQ ID NO: 205776 - RNA, 1701 nt, Artificial Sequence; identical to SEQ ID NO: 201344
  derived and/or modified CDS sequence (opt5) from hemagglutinin__InfluenzaA__BAJ39957

SEQ ID NO: 205777 - RNA, 1701 nt, Artificial Sequence
  derived and/or modified CDS sequence (opt5) from hemagglutinin__InfluenzaA__BAJ39958
augaaggccauccuggugguccuccuguacaccuucgcuacagccaacgcggacacgcuuugcauuggcuaucacgcuaauaacagcaccgauacaguugacaccgugcuggagaagaaugugacagucacccauuccgugaaccuccuggaagauaagcacaaugggaaacuuuguaagcugagaggaguugcuccccuccaucugggcaaaugcaacaucgccggguggauucugggaaauccugagugugaaucucucagcacagccuccucuuggagcuacaucguggagaccuccucuagcgacaacggcacgugcuauccgggggauuuuauugacuacgaagaacugcgggagcagcuuuccagcgucucuuccuucgaacgcuuugagaucuuccccaagaccagcucuuggccuaaucacgauuccaacaagggagugacagccgcuuguccccaugccggcgcgaaaucuuuuuauaagaaucugaucuggcucguuaaaaagggcaacagcuacccuaaacuguccaagagcuauauuaaugacaaggggaaagaagugcuuguccuguggggaauccaccaccccuccaccucugccgaucaacagagccucuaccagaacgcugacgccuacguguucgugggcacauccagauauagcaagaaauuuaagccugagauugcuauccggccgaaaguccgcgaucaggaggggagaaugaauuacuauuggacccugguugaacccggagacaagauuacguucgaggccacaggcaaccugguggugccucgguacgcguuugccauggaacgcaacgcugggucuggaaucauuaucuccgauacccccguccaugacugcaauacaaccugucaaaccccuaaaggcgccaucaacacaagccuccccuuccagaauauucacccgaucacgauuggcaagugcccuaaguaugugaaaucuaccaagcugagacuugcuacagggcugcggaacguucccagcauccagucccgcggacucuuuggcgccauugccggguucaucgagggaggcuggaccgggaugguggacggaugguacggcuaucaucaccagaaugaacaaggcucuggguacgcugcggaucugaaaagcacacagaacgccaucgacgagauuaccaauaaggucaacuccgugaucgagaaaaugaauacgcaguuuacagcuguuggaaaggaguucaaccaccuugagaagagaauugaaaaucugaacaaaaagguggaugacggcuuccucgauaucuggaccuacaaugccgagcugcugguccuccuggaaaacgagcggacccuugacuaucaugauagcaaugugaaaaaccuguacgagaaggucaaaucucagcucaagaacaaugccaaggaaauugggaacggauguuuugaguucuaucacaaaugcgacaauacauguauggaauccgugaagaacggcaccuacgauuauccuaaauacagcaaggaggcuaaacugaaucgcgaaaagaucgacgggguuaaacuugagucuacaagaaucuaucaaauucuggccaucuacuccacgguggcgagcucccucguccuggugguuucucugggcgcuauuagcuuuuggaugugcuccaacggaucucuccagugccggaucuguauuuga

SEQ ID NO: 205778 - RNA, 1701 nt, Artificial Sequence
  derived and/or modified CDS sequence (opt5) from hemagglutinin__InfluenzaA__BAJ39959
augaaggccauccuggugguccuccuguacaccuucgcuacagccaacgcggacacgcuuugcauuggcuaucacgcuaauaacagcaccgauacaguugacaccgugcuggagaagaaugugacagucacccauuccgugaaccuccuggaagauaagcacaaugggaaacuuuguaagcugagaggaguugcuccccuccaucugggcaaaugcaacaucgccggguggauucugggaaauccugagugugaaucucucagcacagccuccucuuggagcuacaucguggagaccuccucuagcgacaacggcacgugcuauccgggggauuuuauugacuacgaagaacugcgggagcagcuuuccagcgucucuuccuucgaacgcuuugagaucuuccccaagaccagcucuuggccuaaucacgauuccaacaagggagugacagccgcuuguccccaugccggcgcgaaaucuuuuuauaagaaucugaucuggcucguuaaaaagggcaacagcuacccuaaacuguccaagagcuauauuaaugacaaggggaaagaagugcuuguccuguggggaauccaccaccccuccaccucugccgaucaacagagccucuaccagaacgcugacgccuacguguucgugggcacauccagauauagcaagaaauuuaagccugagauugcuauccggccgaaaguccgcgaucaggaggggagaaugaauuacuauuggacccugguugaacccggagacaagauuacguucgaggccacaggcaaccugguggugccucgguacgcguuugccauggaacgcaacgcugggucuggaaucauuaucuccgauacccccguccaugacugcaauacaaccugucaaaccccuaaaggcgccaucaacacaagccuccccuuccagaauauucacccgaucacgauuggcaagugcccuaaguaugugaaaucuaccaagcugagacuugcuacagggcugcggaacguucccuuuauccagagccgcggacucuucggcgccauugccggguuuaucgagggaggcuggaccgggaugguggacggaugguacggcuaucaucaccagaaugaacaaggcuccggguacgcugcggaucugaaaucuacacagaacgccaucgacgagauuaccaauaaggucaacagcgugaucgagaaaaugaauacgcaguucacagcuguuggaaaggaguucaaccaccuugagaagagaauugaaaaucugaacaaaaagguggaugacggcuuucucgauaucuggaccuacaaugccgagcugcugguccuccuggaaaacgagcggacccuugacuaucaugauuccaaugugaaaaaccuguacgagaaggucaaaagccagcucaagaacaaugccaaggaaauugggaacggauguuucgaguuuuaucacaaaugcgacaauacauguauggaaucugugaagaacggcaccuacgauuauccuaaauacuccaaggaggcuaaacugaaucgcgaagagaucgacgggguuaaacuugagagcacaagaaucuaucaaauucuggccaucuacucuacgguggcguccagccucguccuggugguuucccugggcgcuauuucuuucuggaugugcagcaacggaucccuccagugccggaucuguauuuga

SEQ ID NO: 205779 - RNA, 1701 nt, Artificial Sequence; identical to SEQ ID NO: 194741
  derived and/or modified CDS sequence (opt5) from hemagglutinin__InfluenzaA__BAJ39960

SEQ ID NO: 205780 - RNA, 1701 nt, Artificial Sequence; identical to SEQ ID NO: 195370
  derived and/or modified CDS sequence (opt5) from hemagglutinin__InfluenzaA__BAJ39961

SEQ ID NO: 205781 - RNA, 1701 nt, Artificial Sequence
  derived and/or modified CDS sequence (opt5) from hemagglutinin__InfluenzaA__BAJ39962
augaaggccauccuggugguccuccuguacaccuucgcuacagccaacgcggacacgcuuugcauuggcuaucacgcuaauaacagcaccgauacaguugacaccgugcuggagaaaaaugugacagucacccauuccgugaaccuccuggaagauaagcacaaugggaaacuuuguaagcugagaggaguugcuccccuccaucugggcaaaugcaacaucgccggguggauucugggaaauccugagugugaaucucucagcacagccuccucuuggagcuacaucgccgagaccuccucuagcgacaacggcacgugcuauccgggggauuuuauugacuacgaagaacugcgggagcagcuuuccagcgugucuuccuucgaacgcuuugagaucuuccccaagaccagcucuuggccuaaucacgauuccaacaagggagucacagcugccuguccccaugcgggcgccaagagcuuuuauaagaaucugaccuggcucgugaaaaagggcaacucuuacccuaaacuguccaagagcuauaucaaugacaaggggaaagaaguucuugugcuguggggcauucaccaccccuccacaucugcugaucaacagagccucuaccagaacgccgacgcuuacgucuucgugggaaccuccagauauagcaagaaauuuaagccugagaucgccauucggccgaaagugcgcgaucaggaggggagaaugaauuacuauuggacgcuggucgaacccggagacaagaucacauucgaggcgaccggcaaccugguugugccucgguacgccuuugcuauggaacgcaacgccgggucuggaauuaucauuuccgauacacccgugcaugacugcaauaccaccugucaaacaccuaaaggcgcuaucaacacgagccuccccuuccagaauauccacccgauuaccaucggcaagugcccuaaguaugucaaaucuacaaagcugagacuugccaccgggcugcggaacgugcccuuuauucagagccgcggacucuucggcgccaucgcuggguuuauugagggaggcuggacagggaugguugacggaugguacggcuaucaucaccagaaugaacaaggcuccggguacgcggccgaucugaaaucuacccagaacgcuaucgacgagaucacgaauaaggugaacagcgucauugagaaaaugaauacacaguucaccgccgugggaaaggaguucaaccaccuugagaagagaaucgaaaaucugaacaaaaagguugaugacggcuuucucgauauuuggaccuacaaugccgagcugcuggugcuccuggaaaacgagcggacacuugacuaucaugauuccaaugucaaaaaccuguacgagaaggugaaaagccagcucaagaacaaugcuaaggaaaucgggaacggauguuucgaguuuuaucacaaaugcgacaauaccuguauggaaucugucaagaacggcacauacgauuauccuaaauacuccaaggaggccaaacugaaucgcgaagagauugacggggugaaacuugagagcacgagaaucuaucaaauccuggcgauuuacucuaccguugcuuccagccucgugcuggucgugucccugggcgccaucucuuucuggaugugcagcaacggaucccuccagugccggauuuguaucuga

SEQ ID NO: 205782 - RNA, 1701 nt, Artificial Sequence; identical to SEQ ID NO: 194741
  derived and/or modified CDS sequence (opt5) from hemagglutinin__InfluenzaA__BAJ39963

SEQ ID NO: 205783 - RNA, 1701 nt, Artificial Sequence; identical to SEQ ID NO: 201344
  derived and/or modified CDS sequence (opt5) from hemagglutinin__InfluenzaA__BAJ39964

SEQ ID NO: 205784 - RNA, 1701 nt, Artificial Sequence; identical to SEQ ID NO: 194741
  derived and/or modified CDS sequence (opt5) from hemagglutinin__InfluenzaA__BAJ39965

SEQ ID NO: 205785 - RNA, 1701 nt, Artificial Sequence; identical to SEQ ID NO: 194741
  derived and/or modified CDS sequence (opt5) from hemagglutinin__InfluenzaA__BAJ39966

SEQ ID NO: 205786 - RNA, 1701 nt, Artificial Sequence
  derived and/or modified CDS sequence (opt5) from hemagglutinin__InfluenzaA__BAJ39967
augaaggccauccuggugguccuccuguacaccuucgcuacagccaacgcggacacgcuuugcauuggcuaucacgcuaauaacagcaccgauacaguugacaccgugcuggagaaaaaugugacagucacccauuccgugaaccuccuggaagauaagcacaaugggaaacuuuguaagcugagaggaguugcuccccuccaucugggcaaaugcaacaucgccggguggauucugggaaauccugagugugaacuccugucuacagccagcuccuggucuuacaucguggagaccagcuccucugacaacggcacgugcuauccgggggauuuuauugacuacgaagaacuucgggagcagcugagcuccgucagcucuuucgaacgcuuugagaucuuccccaagaccuccagcuggccuaaucacgauucugacaagggagugacagccgcuuguccccaugccggcgcgaaauccuuuuauaagaaccucaucuggcugguuaaaaagggcaauagcuacccuaaacuuucuaaguccuauauuaacgauaaggggaaagaagugcugguccucuggggaauccaccaccccagcaccuccgccgaccaacagucucuguaccagaaugcugaugccuacguguucgugggcacaagcagauauuccaagaaauuuaagccugagauugcuauccggccgaaaguccgcgaccaggaggggagaaugaacuacuauuggacccugguugaacccggagauaagauuacguucgaggccacaggcaaucucguggugccucgguacgcguuugccauggaacgcaacgcugggagcggaaucauuaucucugacacccccguccaugacugcaacacaaccugucaaaccccuaaaggcgccaucaauacaucccugcccuuccagaacauucacccgaucacgauuggcaagugcccuaaguaugugaaaagcaccaaacuuagacuggcuacagggcuccggaauguucccucuauccagagccgcggacuguuuggcgccauugccggguucaucgagggaggcuggaccgggaugguggauggaugguacggcuaucaucaccagaacgaacaaggcuccggguacgcugcggaccuuaagucuacacagaaugccaucgaugagauuaccaacaaggucaauagcgugaucgagaaaaugaacacgcaguuuacagcucugggaaaggaguucaaucaccucgagaagaaaauugaaaaccugaauaagaaaguugacgauggcuuccuggacaucuggaccuacaacgccgagcuccuggugcuucuggaaaaugagagaacccucgauuaucaugacuccaacgucaagaaucuguacgagaaagugcggagccagcuuaagaacaacgccaaggaaauugggaauggauguuuugaguucuaucacaaaugcgauaacacauguauggaaucugucaagaauggcaccuacgacuauccuaaauacuccgaggaagcuaagcugaaccgcgaggagaucgauggggugaaacucgaaagcacaagaaucuaucaaauucuggccaucuacucuacgguugcguccagccuggugcucgucgugucccugggcgcuauuucuuuuuggaugugcagcaauggaucccuucagugccggaucuguauuuga

SEQ ID NO: 205787 - RNA, 1701 nt, Artificial Sequence; identical to SEQ ID NO: 200269
  derived and/or modified CDS sequence (opt5) from hemagglutinin__InfluenzaA__BAJ39968

SEQ ID NO: 205788 - RNA, 1701 nt, Artificial Sequence; identical to SEQ ID NO: 201344
  derived and/or modified CDS sequence (opt5) from hemagglutinin__InfluenzaA__BAJ39969

SEQ ID NO: 205789 - RNA, 1701 nt, Artificial Sequence; identical to SEQ ID NO: 194741
  derived and/or modified CDS sequence (opt5) from hemagglutinin__InfluenzaA__BAJ39970

SEQ ID NO: 205790 - RNA, 1701 nt, Artificial Sequence; identical to SEQ ID NO: 194741
  derived and/or modified CDS sequence (opt5) from hemagglutinin__InfluenzaA__BAJ39971

SEQ ID NO: 205791 - RNA, 1701 nt, Artificial Sequence; identical to SEQ ID NO: 195370
  derived and/or modified CDS sequence (opt5) from hemagglutinin__InfluenzaA__BAJ39972

SEQ ID NO: 205792 - RNA, 1701 nt, Artificial Sequence
  derived and/or modified CDS sequence (opt5) from hemagglutinin__InfluenzaA__BAJ39973
augaaggccauccuggugguccuccuguacaccuucgcuacagccaacgcggacacgcuuugcauuggcuaucacgcuaauaacagcaccgauacaguugacaccgugcuggagaaaaaugugacagucacccauuccgugaaccuccuggaagauaagcacaaugggaaacuuuguaagcugagaggaguugcuccccuccaucugggcaaaugcaacaucgccggguggauucugggaaauccugagugugaaucucucagcacagccuccucuuggagcuacaucguggagaccuccucuagcgacaacggcacgugcuauccgggggauuuuauugacuacgaagaacugcgggagcagcuuuccagcgucucuuccuucgaacgcuuugagaucuuccccaagaccagcucuuggccuaaucacgauuccaacaagggagugacagccgcuuguccccaugccggcgcgaaaucuuuuuauaagaaucugaucuggcucguuaaaaagggcaacagcuacccuaaacuguccaagagcuauauuaaugacaaggggaaagaagugcuuguccuguggggaauccaccaccccuccaccucugccgaucaacagagccucuaccagaacgcugacacauacguguucgugggcaccuccagauauagcaagaaauuuaagccugagauugccauccggccgaaaguccgcgaucaggaggggagaaugaauuacuauuggacgcugguugaacccggagacaagauuacauucgaggcuaccggcaaccugguggugccucgguacgccuuugcgauggaacgcaacgccgggucuggaaucauuaucuccgauacacccguccaugacugcaauaccaccugucaaacaccuaaaggcgcuaucaacacgagccuccccuuccagaauauucacccgaucaccauuggcaagugcccuaaguaugugaaaucuacaaagcugagacuugccaccgggcugcggaacguucccagcauccagucccgcggacucuuuggcgcuauugccggguucaucgagggaggcuggacagggaugguggacggaugguacggcuaucaucaccagaaugaacaaggcucuggguacgccgcugaucugaaaagcacccagaacgcgaucgacgagauuacgaauaaggucaacuccgugaucgagaaaaugaauacacaguuuaccgccguuggaaaggaguucaaccaccuugagaagagaauugaaaaucugaacaaaaagguggaugacggcuuccucgauaucuggaccuacaaugcugagcugcugguccuccuggaaaacgagcggacacuugacuaucaugauagcaaugugaaaaaccuguacgagaaggucaaaucucagcucaagaacaaugccaaggaaauugggaacggauguuuugaguucuaucacaaaugcgacaauaccuguauggaauccgugaagaacggcacauacgauuauccuaaauacagcgaggaagccaagcugaaucgcgaggagaucgacgggguuaaacuugaaucuacgagaaucuaucaaauucuggcuaucuacuccaccguggccagcucccucguccuggugguuucucugggcgcgauuagcuuuuggaugugcuccaacggaucucuccagugccggaucuguauuuga

SEQ ID NO: 205793 - RNA, 1701 nt, Artificial Sequence; identical to SEQ ID NO: 194741
  derived and/or modified CDS sequence (opt5) from hemagglutinin__InfluenzaA__BAJ39974

SEQ ID NO: 205794 - RNA, 1701 nt, Artificial Sequence; identical to SEQ ID NO: 195310
  derived and/or modified CDS sequence (opt5) from hemagglutinin__InfluenzaA__BAJ39975

SEQ ID NO: 205795 - RNA, 1701 nt, Artificial Sequence
  derived and/or modified CDS sequence (opt5) from hemagglutinin__InfluenzaA__BAJ39976
augaaggccauccuggugguccuccuguacaccuucgcuacagccaacgcggacacgcuuugcauuggcuaucacgcuaauaacagcaccgauacaguugacaccgugcuggagaaaaaugugacagucacccauuccgugaaccuccuggaagauaagcacaaugagaaacuuuguaagcugagagggguugcuccccuccaucugggaaaaugcaacaucgccggcuggauucuggggaauccugaaugugagucucucagcacagccuccucuuggagcuacaucguggaaaccuccucuagcgacaacggaacgugcuauccgggcgauuuuauugacuacgaggagcugcgggaacagcuuuccagcgucucuuccuucgagcgcuuugaaaucuuccccaagaccagcucuuggccuaaucacgauuccaacaagggggugacagccgcuuguccccaugccggagcgaaaucuuuuuauaagaaucugaucuggcucguuaaaaagggcaacagcuacccuaaacuguccaagagcuauauuaaugacaagggcaaagaggugcuuguccugugggggauccaccaccccuccaccucugccgaucaacagagccucuaccagaacgcugacgccuacguguucgugggaacauccagauauagcaagaaauuuaagccugagauugcuauccggccgaaaguccgcgaucaggaaggcagaaugaauuacuauuggacccugguugagcccggggacaagauuacguucgaagccacaggaaaccugguggugccucgguacgcguuugccauggagcgcaacgcuggcucugggaucauuaucuccgauacccccguccaugacugcaauacaaccugucaaaccccuaaaggagccaucaacacaagccuccccuuccagaauauucacccgaucacgauuggcaagugcccuaaguaugugaaaucuaccaagcugagacuugcuacaggccugcggaacguucccagcauccagucccgcgggcucuuuggagccauugccggcuucaucgaagggggauggaccggcaugguggacgggugguacggauaucaucaccagaaugagcaaggcucuggcuacgcugcggaucugaaaagcacacagaacgccaucgacaagauuaccaauaaagucaacuccgugaucgagaagaugaauacgcaguuuacagcuguugggaaggaauuuaaccaccuugagaaaagaauugaaaaucugaacaagaaaguggaugacggauuccucgauaucuggaccuacaaugccgagcugcugguccuccuggaaaacgagcggacccuugacuaucaugauagcaaugugaagaaccuguacgagaaaguccgcucucagcucaagaacaaugccaaggaaauuggcaacggguguuucgaguucuaucacaaaugcgacaauacauguauggaauccgugaagaacggaaccuacgauuauccuaaauacagcgaggaagcuaagcugaauagagaggagaucgacggcguuaaacuugaaucuacacggaucuaucaaauucuggccaucuacuccacgguggcgagcucccucguccuggugguuucucugggggcuauuaacuuuuggaugugcagcaauggcucccuccagugccgcaucuguauuuga

SEQ ID NO: 205796 - RNA, 1701 nt, Artificial Sequence; identical to SEQ ID NO: 194741
  derived and/or modified CDS sequence (opt5) from hemagglutinin__InfluenzaA__BAJ39977

SEQ ID NO: 205797 - RNA, 1701 nt, Artificial Sequence
  derived and/or modified CDS sequence (opt5) from hemagglutinin__InfluenzaA__BAJ39978
augaaggccauccuggugguccuccuguacaccuucgcuacagccaacgcggacacgcuuugcauuggcuaucacgcuaauaacagcaccgauacaguugacaccgugcuggagaaaaaugugacagucacccauuccgugaaccuccuggaagauaagcacaaugggaaacuuuguaagcugagaggaguugcuccccuccaucugggcaaaugcaacaucgccggguggauucugggaaauccugagugugaaucucucagcacagccuccucuuggagcuacaucguggagaccuccucuagcgacaacggcacgugcuauccgggggauuuuauugacuacgaagaacugcgggagcagcuuuccagcgucucuuccuucgaacgcuuugagaucuuccccaagaccagcucuuggccuaaucacgauuccaacaagggagugacagccgcuuguccccaugccggcgcgaaaucuuuuuauaagaaucugaucuggcucguuaaaaagggcaacagcuacccuaaacuguccaagagcuauauuaaugacaaggggaaagaagugcuuguccuguggggaauccaccaccccuccaccucugccgaucaacagagccucuaccagaacgcugacgccuacguguucgugggcacauccagauauagcaagaaauuuaagccugagauugcuauccggccgaaaguccgcgagcaggaagggagaaugaauuacuauuggacccugguugagcccggagauaagauuacguucgaagccacaggcaaccugguggugccucgguacgcguuugccauggagcgcaacgcugggucuggaaucauuaucuccgacacccccguccaugauugcaauacaaccugucaaaccccuaaaggcgccaucaacacaagccuccccuuccagaauauucacucuaucacgauuggcaagugcccgaaguaugugaaaagcaccaagcugagacuugcuacagggcugcggaacguuccuuccauccagucucgcggacucuuuggcgccauugccggguucaucgaaggaggcuggaccgggaugguggacggaugguacggcuaucaucaccagaaugagcaaggcagcggguacgcugcggaccugaaauccacacagaacgccaucgaugagauuaccaauaaggucaacagcgugaucgaaaagaugaauacgcaguuuacagcuguuggaaaggaguucaaccaccuugaaaagagaauugagaaucugaacaaaaagguggacgauggcuuccucgacaucuggaccuacaaugccgaacugcugguccuccuggagaacgagcggacccuugauuaucaugacucuaaugugaaaaaccuguacgaaaaggucaaaucccagcucaagaacaaugccaaggagauugggaacggauguuuugaguucuaucacaaaugcgauaauacauguauggagagcgugaagaacggcaccuacgacuaucccaaauacucugaagaggcuaagcugaaucgcgagaaaaucgaugggguuaaacuugaauccacaagaaucuaucaaauucuggccaucuacagcacgguggcguccucucucguccuggugguuagccugggcgcuauuuccuuuuggaugugcucuaacggaagccuccagugccggaucuguauuuga

SEQ ID NO: 205798 - RNA, 1701 nt, Artificial Sequence
  derived and/or modified CDS sequence (opt5) from hemagglutinin__InfluenzaA__BAJ39979
augaaggccauccuggugguccuccuguacaccuucgcuacagccaacgcggacacgcuuugcauuggcuaucacgcuaauaacagcaccgauacaguugacaccgugcuggagaaaaaugugacagucacccauuccgugaaccuccuggaagauaagcacaaugggaaacuuuguaagcugagaggaguugcuccccuccaucugggcaaaugcaacaucgccggguggauucugggaaauccugagugugaacuccugucuacagccagcuccuggucuuacaucguggagaccagcuccucugacaacggcacgugcuauccgggggauuuuauugacuacgaagaacuucgggagcagcugagcuccgucagcucuuucgaacgcuuugagaucuuccccaagaccuccagcuggccuaaucacgauucugacaagggagugacagccgcuuguccccaugccggcgcgaaauccuuuuauaagaaccucaucuggcugguuaaaaagggcaauagcuacccuaaacuuucuaaguccuauauuaacgauaaggggaaagaagugcugguccucuggggaauccaccaccccagcaccuccgccgaccaacagucucuguaccagaaugcugaugccuacguguucgugggcacaagcagauauuccaagaaauuuaagccugagauugcuauccggccgaaaguccgcgaccaggaggggagaauggauuacuauuggacccugguugaacccggagacaagauuacguucgaggccacaggcaaccucguggugccucgguacgcguuugccauggaacgcaaugcugggagcggaaucauuaucucugacacccccguccauaacugcaacacaaccugucaaaccccuaaaggcgccaucaauacaucccugcccuuccagaacauucacccgaucacgauuggcaagugcccuaaguaugugaaaagcaccaaacuuagacuggcuacagggcuccggaauguucccucuauccagagccgcggacuguuuggcgccauugccggguucaucgagggaggcuggaccgggaugguggauggaugguacggcuaucaucaccagaacgaacaaggcuccggguacgcugcggaccuuaagucuacacagaaugccaucgauaagauuaccaacaaagucaauagcgugaucgagaagaugaacacgcaguuuacagcuguuggaaaggaguucaaucaccuggaaaacagaauugagaaucucaacaaaaagguggacgauggcuuccuggacaucuggaccuacaaugccgaacugcucguccugcuugagaacgaacggacccuggauuaucaugacuccaaugugaaaaaccucuacgagaagguccgcagccagcugaaaaacaaugccaaggagauugggaacggauguuuugaguucuaucacaagugcgauaauacauguauggagucugugaaaaacggcaccuacgacuauccuaaguacuccgaagaggcuaaacuuaauagagaagagaucgaugggguuaagcuggagagcacacggaucuaucaaauucucgccaucuacucuacgguggcguccagccugguccuggugguuucccucggcgcuauuucuuuuuggaugugcagcaacggaucccugcagugccgcaucuguauuuga

SEQ ID NO: 205799 - RNA, 1701 nt, Artificial Sequence; identical to SEQ ID NO: 201344
  derived and/or modified CDS sequence (opt5) from hemagglutinin__InfluenzaA__BAJ39980

SEQ ID NO: 205800 - RNA, 1701 nt, Artificial Sequence
  derived and/or modified CDS sequence (opt5) from hemagglutinin__InfluenzaA__BAJ39981
augaaggccauccuggugguccuccuguacaccuucgcuacagccaacgcggacacgcuuugcauuggcuaucacgcuaauaacagcaccgauacaguugacaccgugcuggagaagaaugugacagucacccauuccgugaaccuccuggaagauaagcacaaugggaaacuuuguaagcugagaggaguugcuccccuccaucugggcaaaugcaacaucgccggguggauucugggaaauccugagugugaaucucucagcacagccuccucuuggagcuacaucguggagaccuccucuagcgacaacggcacgugcuauccgggggauuuuauugacuacgaagaacugcgggagcagcuuuccagcgucucuuccuucgaacgcuuugagaucuuccccaagaccagcucuuggccuaaucacgauuccaacaagggagugacagccgcuuguccccaugccggcgcgaaaucuuuuuauaagaaucugaucuggcucguuaaaaagggcaacagcuacccuaaacuguccaagagcuauauuaaugacaaggggaaagaagugcuuguccuguggggaauccaccaccccuccaccucugccgaucaacagagccucuaccagaacgcugacgccuacguguucgugggcacauccagauauagcaagaaauuuaagccugagauugcuauccggccgaaaguccgcgaucaggaggggagaaugaauuacuauuggacccugguugaacccggagacaagauuacguucgaggccacaggcaaccugguggugccucgguacgcguuugccauggaacgcaacgcugggucuggaaucauuaucuccgauacccccguccaugacugcaauacaaccugucaaaccccuaaaggcgccaucaacacaagccuccccuuccagaauauucacccgaucacgauuggcaagugcucuaaguaugugaaaagcaccaagcugagacuugcuacagggcugcggaacguuccuuccauccagucucgcggacucuuuggcgccauugccggguucaucgagggaggcuggaccgggaugguggacggaugguacggcuaucaucaccagaaugaacaaggcagcggguacgcugcggaucugaaauccacacagaacgccaucgacgagauuaccaauaaggucaacagcgugaucgagaaaaugaauacgcaguuuacagcuguuggaaaggaguucaaccaccuugagaagagaauugaaaaucugaacaaaaagguggaugacggcuuccucgauaucuggaccuacaaugccgagcugcugguccuccuggaaaacgagcggacccuugacuaucaugauucuaaugugaaaaaccuguacgagaaggucaaaucccagcucaagaacaaugccaaggaaauugggaacggauguuuugaguucuaucacaaaugcgacaauacauguauggaaagcgugaagaacggcaccuacgauuaucccaaauacucuaaggaggcuaaacugaaucgcgaaaagaucgacgggguuaaacuugaguccacaagaaucuaucaaauucuggccaucuacagcacgguggcguccucucucguccuggugguuagccugggcgcuauuuccuuuuggaugugcucuaacggaagccuccagugccggaucuguauuuga

SEQ ID NO: 205801 - RNA, 1701 nt, Artificial Sequence
  derived and/or modified CDS sequence (opt5) from hemagglutinin__InfluenzaA__BAJ39982
augaaggccauccuggugguccuccuguacaccuucgcuacagccaacgcggcuacgcuuugcauuggcuaucacgccaauaacagcaccgacacaguugauacccugcucgagaaaaaugugacagugacccauuccgucaaccugcuugaagacaagcacaaugggaaacuguguaagcucagaggaguggcuccccugcaucugggcaaaugcaacaucgccggguggauucucggaaauccugagugugaaucucugagcacagccuccucuuggagcuacaucguugagaccuccucuagcgauaacggcacgugcuauccgggggacuuuauugauuacgaagaacuucgggagcagcuguccagcgugucuuccuucgaacgcuuugagaucuuccccaagaccagcucuuggccuaaucacgacuccaacaagggagucacagcugccuguccccaugcgggcgccaagagcuuuuauaagaaucucaucuggcuggugaaaaagggcaacucuuacccuaaacuuuccaagagcuauauuaaugauaaggggaaagaaguucuggugcucuggggaauccaccaccccuccaccucugcugaccaacagagccuguaccagaacgccgaugcuuacgucuucgugggcacauccagauauagcaagaaauuuaagccugagauugccauccggccgaaagugcgcgaccaggaggggagaaugaauuacuauuggacccuggucgaacccggagauaagauuacguucgaggcgacaggcaaccucguugugccucgguacgccuuugcuauggaacgcaacgccgggucuggaaucauuaucuccgacacccccgugcaugauugcaauacaaccugucaaaccccuaaaggcgcuaucaacacaagccugcccuuccagaauauucacccgaucacgauuggcaagugcccuaaguaugucaaaucuaccaaacuuagacuggccacagggcuccggaacgugcccagcauccagucccgcggacuguuuggcgccauugcuggguucaucgagggaggcuggaccgggaugguugacggaugguacggcuaucaucaccagaaugaacaaggcucuggguacgcggccgaccuuaaaagcacacagaacgcuaucgaugagauuaccaauaaggugaacuccgucaucgagaaaaugaauacgcaguuuacagccgugggaaaggaguucaaccaccuggagaagagaauugaaaaucucaacaaaaagguugacgauggcuuccuggacaucuggaccuacaaugccgagcugcucgugcugcuugaaaacgagcggacccuggauuaucaugacagcaaugucaaaaaccucuacgagaaggugcgcucucagcugaaaaacaaugcuaaggaaauugggaacggauguuuugaguucuaucacaagugcgauaauacauguauggaauccgucaaaaacggcaccuacgacuauccuaaguacagcgaggaagccaaacuuaauagagaggagaucgauggggugaagcuggaaucuacacggaucuaucaaauucucgcgaucuacuccacgguugcuagcucccuggugcuggucgugucucucggcgccauuagcuuuuggaugugcuccaacggaucucugcagugccgcaucuguauuuga

SEQ ID NO: 205802 - RNA, 1701 nt, Artificial Sequence; identical to SEQ ID NO: 205769
  derived and/or modified CDS sequence (opt5) from hemagglutinin__InfluenzaA__BAJ39983

SEQ ID NO: 205803 - RNA, 1701 nt, Artificial Sequence
  derived and/or modified CDS sequence (opt5) from hemagglutinin__InfluenzaA__BAJ39984
augaaggccauccuggugguccuccuguacaccuucgcuacagccaacgcggacacgcuuugcauuggcuaucacgcuaauaacagcaccgauacaguugacaccgugcuggagaaaaaugugacagucacccauuccgugaaccuccuggaagauaagcacaaugggaaacuuuguaagcugagaggaguugcuccccuccaucugggcaaaugcaacaucgccggguggauucugggaaauccugagugugaacuccugucuacagccagcuccuggucuuacaucguggagaccagcuccucugacaacggcacgugcuauccgggggauuuuauugacuacgaagaacuucgggagcagcugagcuccgucagcucuuucgaacgcuuugagaucuuccccaagaccuccagcuggccuaaucacgauucuaacaagggagugacagccgcuuguccccaugccggcgcgaaauccuuuuauaagaaucucaucuggcugguuaaaaagggcaacagcuacccuaaacuuucuaaguccuauauuaaugacaaggggaaagaagugcugguccucuggggaauccaccaccccagcaccuccgccgaucaacagucucuguaccagaacgcugacgccuacguguucgugggcacaagcagauauuccaagaaauuuaagccugagauugcuauccggccgaaaguccgcgaucaggaggggagaaugaauuacuauuggacccugguugaacccggagacaagauuacguucgaggccacaggcaaccucguggugccucgguacgcguuugccauggaacgcaacgcugggagcggaaucauuaucucugauacccccguccauaauugcaacacaaccugucaaaccccuaaaggcgccaucaauacaucccugcccuuccagaacauucacccgaucacgauuggcaagugcccuaaguaugugaaaagcaccaaacuuagacuggcuacagggcuccggaauguucccucuauccagagccgcggacuguuuggcgccauugccggguucaucgagggaggcuggaccgggaugguggacggaugguacggcuaucaucaccagaacgaacaaggcuccggguacgcugcggaccuuaaaucuacacagaaugccaucgauaagauuaccaacaaagucaauagcgugaucgagaagaugaacacgcaguuuacagcuguuggaaaggaguucaaucaccuggaaaagagaauugagaaccucaauaagaaaguggacgauggcuuccuggacaucuggaccuacaacgccgaacugcucguccugcuugagaaugaacggacccuggauuaucaugacuccaacgugaagaaccucuacgagaaaguccgcagccagcugaagaauaacgccaaggagauugggaauggauguuuugaguucuaucacaaaugcgauaacacauguauggagucugugaagaauggcaccuacgacuauccuaaauacuccgaagaggcuaaacuuaacagagaagagaucgaugggguuaagcuggagagcacacggaucuaucaaauucucgccaucuacucuacgguggcguccagccugguccuggugguuucccucggcgcuauuucuuuuuggaugugcagcaauggaucccugcagugccgcaucuguauuuga

SEQ ID NO: 205804 - RNA, 1701 nt, Artificial Sequence; identical to SEQ ID NO: 194741
  derived and/or modified CDS sequence (opt5) from hemagglutinin__InfluenzaA__BAJ39985

SEQ ID NO: 205805 - RNA, 1701 nt, Artificial Sequence
  derived and/or modified CDS sequence (opt5) from hemagglutinin__InfluenzaA__BAJ39987
augaagaccauccuggugguccuccuguacacauucgccacggcuaacgccgacacccuuugcauuggcuaucacgcgaauaacagcacagauaccguugacacagugcuggagaaaaaugugaccgucacacauuccgugaaccuccuggaagauaagcacaaugggaaacuuuguaagcugagaggaguugcuccccuccaucugggcaaaugcaacaucgccggguggauucugggaaauccugagugugaaucucucagcaccgccuccucuuggagcuacaucguggagacguccucuagcgacaacgggaccugcuauccgggcgauuuuauugacuacgaagaacugcgggagcagcuuuccagcgucucuuccuucgaacgcuuugagaucuuccccaagacaagcucuuggccuaaucacgauuccaacaagggagugaccgcugccuguccccaugcuggcgccaagagcuuuuauaaaaaucugaucuggcucguuaaaaagggcaacucuuacccuaaacuguccaagagcuauauuaaugacaaggggaaagaagugcuuguccuguggggaauccaccaccccuccacaucugcggaucaacagagccucuaccagaacgccgacaccuacguguucgugggcacguccagauauagcaagaaauuuaagccugagauugcuauccggccgaaaguccgcgaucaggaggggagaaugaauuacuauuggacacugguugaacccggagacaagauuaccuucgaggccacaggcaaccugguggugccucgguacgcuuuugccauggaacgcaacgcggggucuggaaucauuaucuccgauacccccguccaugacugcaauaccacaugucaaacgccuaaaggcgccaucaacaccagccuccccuuccagaauauucacccgaucacaauuggcaagugcccuaaguaugugaaaucuaccaagcugagacuugcuacagggcugcggaacguucccagcauccagucccgcggacucuuuggcgccauugcuggguucaucgagggaggcuggaccgggaugguggacggaugguacggcuaucaucaccagaaugaacaaggcucuggguacgccgccgaucugaaaagcacgcagaacgcuaucgacgagauuacaaauaaggucaacuccgugaucgagaaaaugaauacccaguuuaccgcgguuggaaaggaguucaaccaccuugagaagagaauugaaaaucugaacaaaaagguggaugacggcuuccucgauaucuggacauacaaugccgagcugcugguccuccuggaaaacgagcggacccuugacuaucaugauagcaaugugaaaaaccuguacgagaagguccgcucucagcucaaaaacaaugcuaaggaaauugggaacggauguuuugaguucuaucacaagugcgacaauacauguauggaauccgugaaaaacggcacguacgauuauccuaaguacagcaaagaggccaagcugaauagagaagagaucgacgggguuaaacuugagucuacccggaucuaucaaauucuggccaucuacuccacaguggcuagcucccucguccuggugguuucucugggcgccauuagcuuuuggaugugcuccaacggaucucuccagugccgcaucuguauuuga

SEQ ID NO: 205806 - RNA, 1701 nt, Artificial Sequence
  derived and/or modified CDS sequence (opt5) from hemagglutinin__InfluenzaA__BAJ39988
augaaggccauccuggugguccuccuguacaccuucgcuacagccaacgcggacacgcuuugcauuggcuaucacgcuaauaacagcaccgauacaguugacaccgugcuggagaaaaaugugacagucacccauuccgugaaccuccuggaagauaagcacaaugggaaacuuuguaagcugagaggaguugcuccccuccaucugggcaaaugcaacaucgccggguggauucugggaaauccugagugugaaucucucagcacagccuccucuuggagcuacaucguggagaccuccucuagcgacaacggcacgugcuauccgggggauuuuauugacuacgaagaacugcgggagcagcuuuccagcgucucuuccuucgaacgcuuugagaucuuccccaagaccagcucuuggccuaaucacgauuccaacaagggagugacagccgcuuguccccaugccggcgcgaaaucuuuuuauaagaaucugaucuggcucguuaaaaagggcaacagcuacccuaaacuguccaagagcuauauuaaugacaaggggaaagaagugcuuguccuguggggaauccaccaccccuccaccucugccgaucaacagagcauuuaccagaacgcugacgccuacguguucgugggcacauccagauauagcaagaaauuuaagccugagaucgcuauucggccgaaaguccgcgaucaggaggggagaaugaauuacuauuggacccucguugaacccggagacaagaucacguucgaggccacaggcaaccugguggugccucgguacgcguuugccauggaacgcaacgcugggucuggaauuaucaucuccgauacccccguccaugacugcaauacaaccugucaaaccccuaaaggcgccauuaacacaagccugcccuuccagaauauccacccgauuacgaucggcaagugcucuaaguaugugaaaagcaccaagcucagacuggcuacagggcuucggaacguuccuuccauucagucucgcggacuguuuggcgccaucgccggguucaucgagggaggcuggaccgggaugguggacggaugguacggcuaucaucaccagaaugaacaaggcagcggguacgcugcggaucucaaauccacacagaacgccauugacgagaucaccaauaaggucaacagcgugauugagaaaaugaauacgcaguuuacagcuguuggaaaggaguucaaccaccuggagaagagaaucgaaaaucuuaacaaaaagguggaugacggcuuccuggauauuuggaccuacaaugccgagcuccugguccugcucgaaaacgagcggacccuggacuaucaugauucuaaugugaaaaaccuuuacgagaagguccgcucccagcugaaaaacaaugccaaggaaaucgggaacggauguuuugaguucuaucacaagugcgacaauacauguauggaaagcgugaaaaacggcaccuacgauuaucccaaguacucugaggaagcuaaacucaauagagaggagaucgacgggguuaagcuggaauccacacggauuuaucaaauccuugccauuuacagcacgguggcguccucucugguccucgugguuagccugggcgcuaucuccuuuuggaugugcucuaacggaagccugcagugccgcauuuguaucuga

SEQ ID NO: 205807 - RNA, 1701 nt, Artificial Sequence; identical to SEQ ID NO: 196055
  derived and/or modified CDS sequence (opt5) from hemagglutinin__InfluenzaA__BAJ39989

SEQ ID NO: 205808 - RNA, 1701 nt, Artificial Sequence; identical to SEQ ID NO: 194741
  derived and/or modified CDS sequence (opt5) from hemagglutinin__InfluenzaA__BAJ39990

SEQ ID NO: 205809 - RNA, 1701 nt, Artificial Sequence; identical to SEQ ID NO: 194741
  derived and/or modified CDS sequence (opt5) from hemagglutinin__InfluenzaA__BAJ39993

SEQ ID NO: 205810 - RNA, 1701 nt, Artificial Sequence
  derived and/or modified CDS sequence (opt5) from hemagglutinin__InfluenzaA__BAJ39994
augaaggccauccuggugguccuccuguacaccuucgcuacagccaacgcggacacgcuuugcauuggcuaucacgcuaauaacagcaccgauacaguugacaccgugcuggagaaaaaugugacagucacccauuccgugaaccuccuggaagauaagcacaaugggaaacuuuguaagcugagaggaguugcuccccuccaucugggcaaaugcaacaucgccggguggauucugggaaauccugagugugaaucucucagcacagccuccucuuggagcuacaucguggagaccuccucuagcgacaacggcacgugcuauccgggggauuuuauugacuacgaagaacugcgggagcagcuuuccagcgucucuuccuucgaacgcuuugagaucuuccccaagaccagcucuuggccuaaucacgauuccaacaagggagugacagccgcuuguccccaugccggcgcgaaaucuuuuuauaagaaucugaucuggcucguuaaaaagggcaacagcuacccuaaacuguccaagagcuauauuaaugacaaggggaaagaagugcuuguccuguggggaauccaccaccccuccaccucugccgaucaacagagccucuaccagaacgcugacacauacguguucgugggcaccuccagauauagcaagaaauuuaagccugagauugccauccggccgaaaguccgcgaucaggaggggagaaugaauuacuauuggacgcugguugaacccggagacaagauuacauucgaggcuaccggcaaccugguggugccucgguacgccuuugcgauggaacgcaacgccgggucuggaaucauuaucuccgauacacccguccaugacugcaauaccaccugucaaacaccuaaaggcgcuaucaacacgagccuccccuuccagaauauucacccgaccacaaucggcaagugcccuaaguaugugaaaucuaccaagcugagacuugccacagggcugcggaacguucccagcauucagucccgcggacucuuuggcgcuaucgccggguucauugagggaggcuggaccgggaugguggacggaugguacggcuaucaucaccagaaugaacaaggcucuggguacgccgcugaucugaaaagcacgcagaacgcgaucgacgagaucacaaauaaggucaacuccgugauugagaaaaugaauacccaguuuaccgccguuggaaaggaguucaaccaccuugagaagagaaucgaaaaucugaacaaaaagguggaugacggcuuccucgauauuuggacauacaaugcugagcugcugguccuccuggaaaacgagcggacccuugacuaucaugauagcaaugugaaaaaccuguacgagaaggucaaaucucagcucaagaacaaugccaaggaaaucgggaacggauguuuugaguucuaucacaaaugcgacaauacaugucuggaauccgugaagaacggcacguacgauuauccuaaauacagcgaggaagccaaacuuaaucgcgagaagauugacgggguuaagcuggagucuaccagaaucuaucaaauccucgcuauuuacuccacaguggccagcucccugguccuggugguuucucucggcgcgaucagcuuuuggaugugcuccaacggaucucugcagugccggauuuguaucuga

SEQ ID NO: 205811 - RNA, 1701 nt, Artificial Sequence; identical to SEQ ID NO: 194741
  derived and/or modified CDS sequence (opt5) from hemagglutinin__InfluenzaA__BAJ39996

SEQ ID NO: 205812 - RNA, 1701 nt, Artificial Sequence
  derived and/or modified CDS sequence (opt5) from hemagglutinin__InfluenzaA__BAJ39997
augaaggccauccuggugguccuccuguacaccuucgcuacagccaacgcggacacgcuuugcauuggcuaucacgcuaauaacagcaccgauacaguugacaccgugcuggagaagaaugugacagucacccauuccgugaaccuccuggaagauaagcacaaugggaaacuuuguaagcugagaggaguugcuccccuccaucugggcaaaugcaacaucgccggguggauucugggaaauccugagugugaaucucucagcacagccuccucuuggagcuacaucguggagaccuccucuagcgacaacggcacgugcuauccgggggauuuuauugacuacgaagaacugcgggagcagcuuuccagcgucucuuccuucgaacgcuuugagaucuuccccaagaccagcucuuggccuaaucacgauuccaacaagggagugacagccgcuuguccccaugccggcgcgaaaucuuuuuauaagaaucugaucuggcucguuaaaaagggcaacagcuacccuaaacuguccaagagcuauauuaaugacaaggggaaagaagugcuuguccuguggggaauccaccaccccuccaccucugccgaucaacagagccucuaccagaacgcugacacauacguguucgugggcaccuccagauauagcaagaaauuuaagccugagauugccauccggccgaaaguccgcgaucaggaggggagaaugaauuacuauuggacgcugguugaacccggagacaagauuacauucgaggcuaccggcaaccugguggugccucgguacgccuuugcgauggaacgcaacgccgggucuggaaucauuaucuccgauacacccguccaugacugcaauaccaccugucaaacaccuaaaggcgcuaucaacacgagccuccccuuccagaauauucacccgaccacaaucggcaagugcccuaaguaugugaaaucuaccaagcugagacuugccacagggcugcggaacguucccagcauucagucccgcggacucuuuggcgcuaucgccggguucauugagggaggcuggaccgggaugguggacggaugguacggcuaucaucaccagaaugaacaaggcucuggguacgccgcugaucugaaaagcacgcagaacgcgaucgacgagaucacaaauaaggucaacuccgugauugagaaaaugaauacccaguuuaccgccguuggaaaggaguucaaccaccuugagaagagaaucgaaaaucugaacaaaaagguggaugacggcuuccucgauauuuggacauacaaugcugagcugcugguccuccuggaaaacgagcggacccuugacuaucaugauagcaaugugaaaaaccuguacgagaagguccgcucucagcucaaaaacaaugccaaggaaaucgggaacggauguuuugaguucuaucacaagugcgacaauacauguauggaauccgugaaaaacggcacguacgauuauccuaaguacagcgaggaagccaaacugaauagagaggagauugacgggguuaaacuugaaucuacccggaucuaucaaauccuggcuauuuacuccacaguggccagcucccucguccuggugguuucucugggcgcgaucagcuuuuggaugugcuccaacggaucucuccagugccgcauuuguaucuga

SEQ ID NO: 205813 - RNA, 1701 nt, Artificial Sequence; identical to SEQ ID NO: 194741
  derived and/or modified CDS sequence (opt5) from hemagglutinin__InfluenzaA__BAJ39998

SEQ ID NO: 205814 - RNA, 1701 nt, Artificial Sequence
  derived and/or modified CDS sequence (opt5) from hemagglutinin__InfluenzaA__BAJ39999
augaaggccauccuggugguccuccuguacaccuucgcuacagccaacgcggacacgcuuugcauuggcuaucacgcuaauaacagcaccgauacaguugacaccgugcuggagagaaaugugacagucacccauuccgugaaccuccuggaagauaaacacaaugggaagcuguguaaacugcggggaguugcgccccuccaucugggcaagugcaacaucgccggguggauucugggaaauccugagugugaaucucucagcacagcuuccucuuggagcuacaucguggagaccuccucuagcgacaacggcacgugcuauccgggggauuuuauugacuacgaagaacugcgcgagcagcuuuccagcgucucuuccuucgaaagauuugagaucuuccccaaaaccagcucuuggccuaaucacgauuccaacaagggagugacagccgcuuguccccaugccggcgccaagagcuuuuauaaaaaucugaucuggcucguuaagaaaggcaacucuuacccuaagcuguccaaaagcuauauuaaugacaaggggaaggaagugcuuguccuguggggaauccaccaccccuccaccucugccgaucaacagagccucuaccagaacgcugacacauacguguucgugggcaccucccgguauagcaaaaaguuuaaaccugagauugccauccgcccgaaggucagagaucaggaggggcggaugaauuacuauuggacgcugguugaacccggagacaaaauuacauucgaggcuaccggcaaccugguggugccucgcuacgccuuugcgauggaaagaaacgccgggucuggaaucauuaucuccgauacacccguccaugacugcaauaccaccugucaaacaccuaagggcgcuaucaacacgagccuccccuuccagaauauucacccgaucaccauuggcaaaugcccuaaguaugugaagucuacaaaacugcggcuugccaccgggcugcgcaacguucccagcauccaguccagaggacucuuuggcgcuauugccggguucaucgagggaggcuggacagggaugguggacggaugguacggcuaucaucaccagaaugaacaaggcucuggguacgccgcugaucuuaagagcacccagaacgcgaucgacgagauuacgaauaaagucaacuccgugaucgagaagaugaauacacaguuuaccgccguuggaaaagaguucaaccaccuugagaagcggauugaaaaucugaacaagaaaguggaugacggcuuccucgauaucuggaccuacaaugcugagcugcugguccuccuggaaaacgagcgcacacuugacuaucaugauagcaaugugaagaaccuguacgagaaagucagaucucagcucaagaacaaugccaaagaaauugggaacggauguuuugaguucuaucacaagugcgacaauaccuguauggaauccgugaagaacggcacauacgauuauccuaaauacagcgaggaagccaagcugaaucgggaggagaucgacgggguuaaacuugaaucuacgcgcaucuaucaaauucuggcuaucuacuccaccguggccagcucccucguccuggugguuucucugggcgcgauuagcuuuuggaugugcuccaacggaucucuccagugcagaaucuguauuuga

SEQ ID NO: 205815 - RNA, 1701 nt, Artificial Sequence
  derived and/or modified CDS sequence (opt5) from hemagglutinin__InfluenzaA__BAJ40000
augaagaccauccuggugguccuccuguacacauucgccacggcuaacgccgacacccuuugcauuggcuaucacgcgaauaacagcacagauaccguugacacagugcuggagaaaaaugugaccgucacacauuccgugaaccuccuggaagauaagcacaaugggaaacuuuguaagcugagaggaguugcuccccuccaucugggcaaaugcaacaucgccggguggauucugggaaauccugagugugaaucucucagcaccgccuccucuuggagcuacaucguggagacguccucuagcgacaacgggaccugcuauccgggcgauuuuauugacuacgaagaacugcgggagcagcuuuccagcgucucuuccuucgaacgcuuugagaucuuccccaagacaagcucuuggccuaaucacgauuccaacaagggagugaccgcugccuguccccaugcuggcgccaagagcuuuuauaagaaucugaucuggcucguuaaaaagggcaacucuuacccuaaacuguccaagagcuauauuaaugacaaggggaaagaagugcuuguccuguggggaauccaccaccccuccacaucugcggaucaacagagccucuaccagaacgccgacaccuacguguucgugggcacguccagauauagcaagaaauuuaagccugagauugcuauccggccgaaaguccgcgaucaggaggggagaaugaauuacuauuggacacugguugaacccggagacaagauuaccuucgaggccacaggcaaccugguggugccucgguacgcuuuugccauggaacgcaacgcggggucuggaaucauuaucuccgauacccccguccaugacugcaauaccacaugucaaacgccuaaaggcgccaucaacaccagccuccccuuccagaauauucacccgaucacaauuggcaagugcccuaaguaugugaaaucuaccaagcugagacuugcuacagggcugcggaacguucccagcauccagucccgcggacucuuuggcgccauugcuggguucaucgagggaggcuggaccgggaugguggacggaugguacggcuaucaucaccagaaugaacaaggcucuggguacgccgccgaucugaaaagcacgcagaacgcuaucgacgagauuacaaauaaggucaacuccgugaucgagaaaaugaauacccaguuuaccgcgguuggaaaggaguucaaccaccuugagaagagaauugaaaaucugaacaaaaagguggaugacggcuuccucgauaucuggacauacaaugccgagcugcugguccuccuggaaaacgagcggacccuugacuaucaugauagcaaugugaaaaaccuguacgagaagguccgcucucagcucaaaaacaaugcuaaggaaauugggaacggauguuuugaguucuaucacaagugcgacaauacauguauggaauccgugaaaaacggcacguacgauuauccuaaguacagcgaggaagccaaacugaauagagaggagaucgacgggguuaaacuugaaucuacccggaucuaucaaauucuggccaucuacuccacaguggcuagcucccucguccuggugguuucucugggcgccauuagcuuuuggaugugcuccaacggaucucuccagugccgcaucuguauuuga

SEQ ID NO: 205816 - RNA, 1701 nt, Artificial Sequence; identical to SEQ ID NO: 199751
  derived and/or modified CDS sequence (opt5) from hemagglutinin__InfluenzaA__BAJ40001

SEQ ID NO: 205817 - RNA, 1701 nt, Artificial Sequence; identical to SEQ ID NO: 194741
  derived and/or modified CDS sequence (opt5) from hemagglutinin__InfluenzaA__BAJ40002

SEQ ID NO: 205818 - RNA, 1701 nt, Artificial Sequence; identical to SEQ ID NO: 199751
  derived and/or modified CDS sequence (opt5) from hemagglutinin__InfluenzaA__BAJ40003

SEQ ID NO: 205819 - RNA, 1701 nt, Artificial Sequence
  derived and/or modified CDS sequence (opt5) from hemagglutinin__InfluenzaA__BAJ40004
augaaggccauccuggugguccuccuguacaccuucgcuacagccaacgcggacacgcuuugcauuggcuaucacgcuaauaacagcaccgauacaguugacaccgugcuggagaagaaugugacagucacccauuccgugaaccuccuggaagauaagcacaaugggaaacuuuguaagcugagaggaguugcuccccuccaucugggcaaaugcaacaucgccggguggauucugggaaauccugagugugaaucucucagcacagccuccucuuggagcuacaucguggagaccuccucuagcgacaacggcacgugcuauccgggggauuuuauugacuacgaagaacugcgggagcagcuuuccagcgucucuuccuucgaacgcuuugagaucuuccccaagaccagcucuuggccuaaucacgauuccaacaagggagaaacagccgcuuguccccaugccggcgcgaaaucuuuuuauaagaaucugaucuggcucgugaaaaagggcaacagcuacccuaaacuguccaagagcuauauuaaugacaaggggaaagagguucuugugcuguggggaauccaccaccccuccaccucugccgaucaacagagccucuaccagaacgcugacgccuacgucuucgugggcacauccagauauagcaagaaauuuaagccugagauugcuauccggccgaaagugcgcgaucaggaagggagaaugaauuacuauuggacccuggucgagcccggagacaagauuacguucgaagccacaggcaaccugguugugccucgguacgcguuugccauggagcgcaacgcugggucuggaaucauuaucuccgauacccccgugcaugacugcaauacaaccugucaaaccccuaaaggcgccaucaacacaagccuccccuuccagaauauucacccgaucacgauuggcaagugcccuaaguaugucaaaucuaccaagcugagacuugcuacagggcugcggaacgugcccagcauccagucccgcggacucuuuggcgccauugccggguucaucgaaggaggcuggaccgggaugguugacggaugguacggcuaucaucaccagaaugagcaaggcucuggguacgcugcggaucugaaaagcacacagaacgccaucgacaagauuaccaauaaagugaacuccgucaucgagaagaugaauacgcaguuuacagcugugggaaaggaguucaaccaccuugagaaaagaauugaaaaucugaacaagaaaguugaugacggcuuccucgauaucuggaccuacaaugccgagcugcuggugcuccuggaaaacgagcggacccuugacuaucaugauagcaaugucaagaaccuguacgagaaagugaagucucagcucaagaacaaugccaaagaaauugggaacggauguuuugaguucuaucacaagugcgacaauacauguauggaauccgucaaaaacggcaccuacgauuauccuaaguacagcgaggaagcuaaacugaaucgcgagaagaucgacggggugaaacuugagucuacaagaaucuaucaaauucuggccaucuacuccacgguugcgagcucccucgugcuggucgugucucugggcgcuauuagcuuuuggaugugcuccaacggaucucuccagugccggaucuguauuuga

SEQ ID NO: 205820 - RNA, 1701 nt, Artificial Sequence
  derived and/or modified CDS sequence (opt5) from hemagglutinin__InfluenzaA__BAJ40006
augaaggccauccuggugguccuccuguacaccuucgcuacagccaacgcggacacgcuuugcauuggcuaucacgcuaauaacagcaccgauacaguugacaccgugcuggagaaaaaugugacagucacccauuccgugaaccuccuggaagauaagcacaaugggaaacuuuguaagcugagaggaguugcuccccuccaucugggcaaaugcaacaucgccggguggauucugggaaauccugagugugaaucucucagcacagccuccucuuggagcuacaucguggagaccuccucuagcgacaacggcacgugcuauccgggggauuuuauugacuacgaagaacugcgggagcagcuuuccagcgucucuuccuucgaacgcuuugagaucuuccccaagaccagcucuuggccuaaucacgauuccaacaagggagugacagccgcuuguccccaugccggcgcgaaaucuuuuuauaagaaucugaucuggcucguuaaaaagggcaacagcuacccuaaacuguccaagagcuauauuaaugacaaggggagagaagugcuuguccuguggggaauccaccaccccuccaccucugccgaucaacagagccucuaccagaacgcugacacauacguguucgugggcaccucccgguauagcaaaaaguuuaaaccugagauugccauccgcccgaaggucagagaucaggaggggcggaugaauuacuauuggacgcugguugaacccggagacaaaauuacauucgaggcuaccggcaaccugguggugccucgcuacgccuuugcgauggaaagaaacgccgggucuggaaucauuaucuccgauacacccguccaugacugcaauaccaccugucaaacaccuaagggcgcuaucaacacgagccuccccuuccagaauauucacccgaucaccauuggcaaaugcccuaaguaugugaagucuacaaaacugcggcuugccaccgggcugcgcaacguucccagcauccaguccagaggacucuuuggcgcuauugccggguucaucgagggaggcuggacagggaugguggacggaugguacggcuaucaucaccagaaugaacaaggcucuggguacgccgcugaucuuaagagcacccagaacgcgaucgacgagauuacgaauaaagucaacuccgugaucgagaagaugaauacacaguuuaccgccguuggaaaagaguucaaccaccuggagaagcggauugaaaaucugaacaagaaaguggaugacggcuuccucgauaucuggaccuacaaugcugagcugcugguccuccuggaaaacgagcgcacacuugacuaucaugauagcaaugugaagaaccuguacgagaaagucagaucucagcucaagaacaaugccaaagaaauugggaacggauguuuugaguucuaucacaagugcgacaauaccuguauggaauccgugaagaacggcacauacgauuauccuaaauacagcgaggaagccaagcugaaucgggaggagaucgacgggguuaaacuugaaucuacgcgcaucuaucaaauucuggcuaucuacuccaccguggccagcucccucguccuggugguuucucugggcgcgauuagcuuuuggaugugcuccaacggaucucuccagugcagaaucuguauuuga

SEQ ID NO: 205821 - RNA, 1701 nt, Artificial Sequence; identical to SEQ ID NO: 194741
  derived and/or modified CDS sequence (opt5) from hemagglutinin__InfluenzaA__BAJ40007

SEQ ID NO: 205822 - RNA, 1701 nt, Artificial Sequence
  derived and/or modified CDS sequence (opt5) from hemagglutinin__InfluenzaA__BAJ40008
augaaggccauccuggugguccuccuguacaccuucgcuacagccaacgcggacacgcuuugcauuggcuaucacgcuaauaacagcaccgauacaguugacaccgugcuggagaagaaugugacagucacccauuccgugaaccuccuggaagauaagcacaaugggaaacuuuguaagcugagaggaguugcuccccuccaucugggcaaaugcaacaucgccggguggauucugggaaauccugagugugaaucucucagcacagccuccucuuggagcuacaucguggagaccuccucuagcgacaacggcacgugcuauccgggggauuuuauugacuacgaagaacugcgggagcagcuuuccagcgucucuuccuucgaacgcuuugagaucuuccccaagaccagcucuuggccuaaucacgauuccaacaagggagugacagccgcuuguccccaugccggcgcgaaaucuuuuuauaagaaucugaucuggcucguuaaaaagggcaacagcuacccuaaacuguccaagagcuauauuaaugacaaggggaaagaagugcuuguccuguggggaauccaccaccccuccaccucugccgaucaacagagccucuaccagaacgcugacgccuacguguucgugggcacauccagauauagcaagaaauuuaagccugagauugcuauccggccgaaaguccgcgaucaggaggggagaaugaauuacuauuggacccugguugaacccggagacaagauuacguucgaggccacaggcaaccugguggugccucgguacgcguuugccauggaacgcaacgcugggucuggaaucauuaucuccgauacccccguccaugacugcaauacaaccugucaaaccccuaaaggcgccaucaacacaagccuccccuuccagaauauucacccgaucacgauuggcaagugcccuaaguaugugaaaucuaccaagcugagacuugcuacagggcugcggaacguucccagcauccagucccgcggacucuuuggcgccauugccggguucaucgagggaggcuggaccgggaugguggacggaugguacggcuaucaucaccagaaugaacaaggcucuggguacgcugcggaucugaaaagcacacagaacgccaucgacgagauuaccaauaaggucaacuccgugaucgagaaaaugaauacgcaguuuacagcuguuggaaaggaguucaaccaccuugagaagagaauugaaaaucugaacaaaaagguggaugacggcuuccucgauaucuggaccuacauugccgagcugcugguccuccuggaaaaugagcggacccuugacuaucaugauagcaacgugaaaaaucuguacgagaagguccgcucucagcucaaaaacaacgccaaggaaaucgggaauggauguuuugaguucuaucacaagugcgacaacacauguauggaauccgugaaaaauggcaccuacgauuauccuaaguacagcgaggaagcuaaacugaacagagaggagaucgacgggguuaaacuugaaucuacacggauuuaucaaauccuggccauuuacuccacgguggcgagcucccucguccuggugguuucucugggcgcuaucagcuuuuggaugugcuccaauggaucucuccagugccgcauuuguaucuga

SEQ ID NO: 205823 - RNA, 1701 nt, Artificial Sequence
  derived and/or modified CDS sequence (opt5) from hemagglutinin__InfluenzaA__BAJ40009
augaaggccauccuggugguccuccuguacaccuucgcuacagccaacgcggacacgcuuugcauuggcuaucacgcuaauaacagcaccgauacaguugacaccgugcuggagaagaaugugacagucacccauuccgugaaccuccuggaagauaagcacaaugggaaacuuuguaagcugagaggaguugcuccccuccaucugggcaaaugcaacaucgccggguggauucugggaaauccugagugugaaucucucagcacagccuccucuuggagcuacaucguggagaccuccucuagcgacaacggcacgugcuauccgggggauuuuauugacuacgaagaacugcgggagcagcuuuccagcgucucuuccuucgaacgcuuugagaucuuccccaagaccagcucuuggccuaaucacgauuccgacaagggagugacagccgcuuguccccaugccggcgcgaaaucuuuuuauaagaaccugaucuggcucguuaaaaagggcaauagcuacccuaaacuguccaagagcuauauuaacgauaaggggaaagaagugcuuguccuguggggaauccaccaccccuccaccucugccgaccaacagagccucuaccagaaugcugaugccuacguguucgugggcacauccagauauagcaagaaauuuaagccugagauugcuauccggccgaaaguccgcgaccaggaggggagaauggauuacuauuggacccugguugaacccggagacaagauuacguucgaggccacaggcaaccugguggugccucgguacgcguuugccauggaacgcaaugcugggucuggaaucauuaucuccgacacccccguccauaacugcaacacaaccugucaaaccccuaaaggcgccaucaauacaagccuccccuuccagaacauucacccgaucacgauuggcaagugcccuaaguaugugaaaucuaccaagcugagacuugcuacagggcugcggaauguucccagcauccagucccgcggacucuuuggcgccauugccggguucaucgagggaggcuggaccgggaugguggauggaugguacggcuaucaucaccagaacgaacaaggcucuggguacgcugcggaccugaaaagcacacagaaugccaucgauaagauuaccaacaaagucaauuccgugaucgagaagaugaacacgcaguuuacagcuguuggaaaggaguucaaucaccuugaaaacagaauugagaaucugaacaaaaagguggacgauggcuuccucgacaucuggaccuacaaugccgaacugcugguccuccuggagaacgaacggacccuugauuaucaugacagcaaugugaaaaaccuguacgagaagguccgcucucagcucaaaaacaaugccaaggagauugggaacggauguuuugaguucuaucacaagugcgauaauacauguauggaguccgugaaaaacggcaccuacgacuauccuaaguacagcgaagaggcuaaacugaauagagaagagaucgaugggguuaaacuugagucuacacggaucuaucaaauucuggccaucuacuccacgguggcgagcucccucguccuggugguuucucugggcgcuauuagcuuuuggaugugcuccaacggaucucuccagugccgcaucuguauuuga

SEQ ID NO: 205824 - RNA, 1701 nt, Artificial Sequence
  derived and/or modified CDS sequence (opt5) from hemagglutinin__InfluenzaA__BAJ40010
augaaggccauccuggugguccuccuguacaccuucgcuacagccaacgcggacacgcuuugcauuggcuaucacgcuaauaacagcaccgauacaguugacaccgugcuggagaaaaaugugacagucacccauuccgugaaccuccuggaagauaagcacaaugggaaacuuuguaagcugagaggaguugcuccccuccaucugggcaaaugcaacaucgccggguggauucugggaaauccugagugugaacuccugucuacagccagcuccuggucuuacaucguggagaccagcuccucugacaacggcacgugcuauccgggggauuuuauugacuacgaagaacuucgggagcagcugagcuccgucagcucuuucgaacgcuuugagaucuuccccaagaccuccagcuggccuaaucacgauucugacaagggagugacagccgcuuguccccaugccggcgcgaaauccuuuuauaagaaccucaucuggcugguuaaaaagggcaauagcuacccuaaacuuucuaaguccuauauuaacgauaaggggaaagaagugcugguccucuggggaauccaccaccccagcaccuccgccgaccaacagucucuguaccagaaugcugaugccuacguguucgugggcacaagcagauauuccaagaaauuuaagccugagauugcuauccggccgaaaguccgcgaccaggaggggagaauggauuacuauuggacccugguugaacccggagacaagauuacguucgaggccacaggcaaccucguggugccucgguacgcguuugccauggaacgcaaugcugggagcggaaucauuaucucugacacccccguccauaacugcaacacaaccugucaaaccccuaaaggcgccaucaauacaucccugcccuuccagaacauucacccgaucacgauuggcaagugcccuaaguaugugaaaagcaccaaacuuagacuggcuacagggcuccggaauguucccucuauccagagccgcggacuguuuggcgccauugccggguucaucgagggaggcuggaccgggaugguggauggaugguacggcuaucaucaccagaacgaacaaggcuccggguacgcugcggaccuuaaaucuacacagaaugccaucgauaagauuaccaacaaagucaauagcgugaucgagaagaugaacacgcaguuuacagcuguuggaaaggaguucaaucaccuggaaaagagaauugagaaccucaauaagaaaguggacgauggcuuccuggacaucuggaccuacaacgccgaacugcucguccugcuugagaaugaacggacccuggauuaucaugacuccaacgugaagaaucucuacgagaaaguccgcagccagcugaagaacaacgccaaggagauugggaauggauguuuugaguucuaucacaaaugcgauaacacauguauggagucugugaagaauggcaccuacgacuauccuaaauacuccgaagaggcuaaacuuaacagagaagagaucgaugggguuaagcuggagagcacacggaucuaucaaauucucgccaucuacucuacgguggcguccagccugguccuggugguuucccucggcgcuauuucuuuuuggaugugcagcaauggaucccugcagugccgcaucuguauuuga

SEQ ID NO: 205825 - RNA, 1701 nt, Artificial Sequence; identical to SEQ ID NO: 205814
  derived and/or modified CDS sequence (opt5) from hemagglutinin__InfluenzaA__BAJ40011

SEQ ID NO: 205826 - RNA, 1701 nt, Artificial Sequence
  derived and/or modified CDS sequence (opt5) from hemagglutinin__InfluenzaA__BAJ40012
augaaggccauccuggugguccuccuguacaccuucgcuacagccaacgcggacacgcuuugcauuggcuaucacgcuaauaacagcaccgauacaguugacaccgugcuggagaagaaugugacagucacccauuccgugaaccuccuggaagauaagcacaaugggaaacuuuguaagcugagaggaguugcuccccuccaucugggcaaaugcaacaucgccggguggauucugggaaauccugagugugaaucucucagcacagccuccucuuggagcuacaucguggagaccuccucuagcgacaacggcacgugcuauccgggggauuuuauugacuacgaagaacugcgggagcagcuuuccagcgucucuuccuucgaacgcuuugagaucuuccccaagaccagcucuuggccuaaucacgauuccaacaagggagugacagccgcuuguccccaugccggcgcgaaaucuuuuuauaagaaucugaucuggcucguuaaaaagggcaacagcuacccuaaacuguccaagagcuauauuaaugacaaggggaaagaagugcuuguccuguggggaauccaccaccccuccaccucugccgaucaacagagccucuaccagaacgcugacgccuacguguucgugggcacauccagauauagcaagaaauuuaagccugagauugcuauccggccgaaaguccgcgaucaggaggggagaaugaauuacuauuggacccugguugaacccggagacaagauuacguucgaggccacaggcaaccugguggugccucgguacgcguuugccauggaacgcaacgcugggucuggaaucauuaucuccgauacccccguccaugacugcaauacaaccugucaaaccccuaaaggcgccaucaacacaagccuccccuuccagaauauucacccgaucacgauuggcaagugcccuaaguaugugaaaucuaccaagcugagacuugcuacagggcugcggaacguucccagcauccagucccgcggacucuuuggcgccauugccggguucaucgagggaggcuggaccgggaugguggacggaugguacggcuaucaucaccagaaugaacaaggcucuggguacgcugcggaucugaaaagcacacagaacgccaucgacgagauuaccaauaaggucaacuccgugaucgagaaaaugaauacgcaguuuacagcuguuggaaaggaguucaaccaccuugagaagagaauugaaaaucugaacaaaaagguggaugacggcuuccucgauaucuggaccuacaaugccgagcugcugguccuccuggaaaacgagcggacccuugacuaucaugauagcaaugugaaaaaccuguacgagaagguccgcucucagcucaaaaacaaugccaaggaaauugggaacggauguuuugaguucuaucacaagugcgacaauacauguauggaauccgugaaaaacggcaccuacgauuauccuaaguacagcgaggaagcuaaacugaauagagaggagaucgacgggaucaaacuugaaucuacacggauuuaucaaauccuggccauuuacuccacgguugcgagcucccucgugcuggucgugucucugggcgcuaucagcuuuuggaugugcuccaacggaucucuccagugccgcauuuguaucuga

SEQ ID NO: 205827 - RNA, 1701 nt, Artificial Sequence; identical to SEQ ID NO: 205814
  derived and/or modified CDS sequence (opt5) from hemagglutinin__InfluenzaA__BAJ40013

SEQ ID NO: 205828 - RNA, 1701 nt, Artificial Sequence; identical to SEQ ID NO: 205814
  derived and/or modified CDS sequence (opt5) from hemagglutinin__InfluenzaA__BAJ40014

SEQ ID NO: 205829 - RNA, 1701 nt, Artificial Sequence
  derived and/or modified CDS sequence (opt5) from hemagglutinin__InfluenzaA__BAJ40015
augaaggccauccuggugguccuccuguacaccuucgcuacagccaacgcggacacgcuuugcauuggcuaucacgcuaauaacagcaccgauacaguugacaccgugcuggagaaaaaugugacagucacccauuccgugaaccuccuggaagauaagcacaaugggaaacuuuguaagcugagaggaguugcgccccuccaucugggcaaaugcaacaucgccggguggauucugggaaauccugagugugaaucucucagcacagcuuccucuuggagcuacaucguggagaccuccucuagcgacaacggcacgugcuauccgggggauuuuauugacuacgaagaacugcgggagcagcuuuccagcgucucuuccuucgaacgcuuugagaucuuccccaauaccagcucuuggccuaaccacgauuccaauaagggagugacagccgcuuguccccaugccggcgccaagagcuuuuauaaaaaccugaucuggcucguuaagaaaggcaauucuuacccuaagcuguccaaaagcuauauuaacgacaaggggaaggaagugcuuguccuguggggaauccaccaccccuccaccucugccgaucaacagagccucuaccagaaugcugacacauacguguucgugggcaccuccagauauagcaaaaaguuuaaaccugagauugccauccggccgaagguccgcgaucaggaggggagaaugaacuacuauuggacgcugguugaacccggagacaaaauuacauucgaggcuaccggcaaccugguggugccucgguacgccuuugcgauggaacgcaaugccgggucuggaaucauuaucuccgauacacccguccaugacugcaacaccaccugucaaacaccuaagggcgcuaucaauacgagccuccccuuccagaacauucacccgaucaccauuggcaaaugcccuaaguaugugaagucuacaaaacugagacuugccaccgggcugcggaauguucccagcauccagucccgcggacucuuuggcgcuauugccggguucaucgagggaggcuggacagggaugguggacggaugguacggcuaucaucaccagaacgaacaaggcucuggguacgccgcugaucuuaagagcacccagaaugcgaucgacgagauuacgaacaaagucaauuccgugaucgagaagaugaacacacaguuuaccgccguuggaaaagaguucaaucaccuggagaagagaauugaaaaccugaauaagaaaguggaugacggcuuccucgauaucuggaccuacaacgcugagcugcugguccuccuggaaaaugagcggacacuugacuaucaugauagcaacgugaagaaccuguacgagaaaguccgcucucagcucaagaauaacgccaaagaaauugggaauggauguuuugaguucuaucacaagugcgacaacaccuguauggaauccgugaagaauggcacauacgauuauccuaaauacagcgaggaagccaagcugaacagagaggagaucgacgggguuaaacuugaaucuacgcggaucuaucaaauucuggcuaucuacuccaccguggccagcucccucguccuggugguuucucugggcgcgauuagcuuuuggaugugcuccaauggaucucuccagugccgcaucuguauuuga

SEQ ID NO: 205830 - RNA, 1701 nt, Artificial Sequence; identical to SEQ ID NO: 205814
  derived and/or modified CDS sequence (opt5) from hemagglutinin__InfluenzaA__BAJ40016

SEQ ID NO: 205831 - RNA, 1701 nt, Artificial Sequence
  derived and/or modified CDS sequence (opt5) from hemagglutinin__InfluenzaA__BAJ40017
augaaggccauccuggugguccuccuguacaccuucgcuacagccaacgcggacacgcuuugcauuggcuaucacgcuaauaacagcaccgauacaguugacaccgugcuggagaaaaaugugacagucacccauuccgugaaccuccuggaagauaagcacaaugggaaacuuuguaagcugagaggaguugcuccccuccaucugggcaaaugcaacaucgccggguggauucugggaaauccugagugugaaucucucagcacagccuccucuuggagcuacaucguggagaccuccaacucugacaauggcacgugcuauccgggggauuuuauugacuacgaagaacugcgggagcagcuuagcuccgucagcucuuucgaacgcuuugagaucuuccccaagaccuccagcuggccuaaccacgauucuaauaagggagugacagccgcuuguccccaugccggcgcgaaauccuuuuauaagaaccugaucuggcucguuaaaaagggcaauagcuacccuaaacugucuaaguccuauauuaacgacaaggggaaagaagugcuuguccuguggggaauccaccaccccagcaccuccgccgaucaacagucucucuaccagaaugcugacgccuacguguucgugggcacaagcagauauuccaagaaauuuaagccugagauugcuauccggccgaaaguccgcgaucaggaggggagaaugaacuacuauuggacccugguugaacccggagacaagauuacguucgaggccacaggcaaccugguggugccucgguacgcguuugccauggaacgcaaugcugggagcggaaucauuaucucugauacccccguccaugacugcaacacaaccugucaaaccccuaaaggcgccaucaauacaucccuccccuuccagaacauucacccgaucacgauuggcaagugcccuaaguaugugaaaagcaccaagcugagacuugcuacagggcugcggaauguucccucuauccagagccgcggacucuuuggcgccauugccggguucaucgagggaggcuggaccgggaugguggacggaugguacggcuaucaucaccagaacgaacaaggcuccggguacgcugcggaucugaaaucuacacagaaggccaucgacgagauuaccaauaaagucaacagcgugaucgagaagaugaauacgcaguuuacagcuguuggaaaggaguucaaccaccuugagaaaagaauugaaaaucugaacaagaaaguggaugacggcuuccucgauaucuggaccuacaaugccgagcugcugguccuccuggaaaacgagcggacccuugacuaucaugauuccaaugugaagaaccuguacgagaaaguccgcagccagcucaagaacaaugccaaggaaauugggaacggauguuuugaguucuaucacaaaugcgacaauacauguauggaaucugugaagaacggcaccuacgauuauccuaaauacuccgaggaagcuaagcugaauagagaggagaucgacgggguuaaacuugaaagcacacggaucuaucaaauucuggccaucuacucuacgguggcguccagccucguccuggugguuucccugggcgcuauuucuuuuuggaugugcagcaacggaucccuccagugccgcaucuguauuuga

SEQ ID NO: 205832 - RNA, 1701 nt, Artificial Sequence; identical to SEQ ID NO: 195905
  derived and/or modified CDS sequence (opt5) from hemagglutinin__InfluenzaA__BAJ40018

SEQ ID NO: 205833 - RNA, 1701 nt, Artificial Sequence; identical to SEQ ID NO: 205820
  derived and/or modified CDS sequence (opt5) from hemagglutinin__InfluenzaA__BAJ40019

SEQ ID NO: 205834 - RNA, 1701 nt, Artificial Sequence; identical to SEQ ID NO: 205820
  derived and/or modified CDS sequence (opt5) from hemagglutinin__InfluenzaA__BAJ40020

SEQ ID NO: 205835 - RNA, 1701 nt, Artificial Sequence
  derived and/or modified CDS sequence (opt5) from hemagglutinin__InfluenzaA__BAJ40021
augaaggccauccuggugguccuccuguacaccuucgcuacagccaacgcggacacgcuuugcauuggcuaucacgcuaauaacagcaccgauacaguugacaccgugcuggagaaaaaugugacagucacccauuccgugaaccuccuggaagauaagcacaaugggaaacuuuguaagcugagaggaguugcuccccuccaucugggcaaaugcaacaucgccggguggauucugggaaauccugagugugaaucucucagcacagccuccucuuggagcuacaucguggagaccuccucuagcgacaacggcacgugcuauccgggggauuuuauugacuacgaagaacugcgggagcagcuuuccagcgucucuuccuucgaacgcuuugagaucuuccccaagaccagcucuuggccuaaucacgauuccaacaagggagaaacagccgcuuguccccaugccggcgcgaaaucuuuuuauaagaaucugaucuggcucgugaaaaagggcaacagcuacccuaaacuguccaagagcuauauuaaugacaaggggaaagagguucuugugcuguggggaauccaccaccccuccaccucugccgaucaacagagccucuaccagaacgcugacgccuacgucuucgugggcacauccagauauagcaagaaauuuaagccugagauugcuauccggccgaaagugcgcgaucaggaagggagaaugaauuacuauuggacccuggucgagcccggagacaagauuacguucgaagccacaggcaaccugguugugccucgguacgcguuugccauggagcgcaacgcugggucuggaaucauuaucuccgauacccccgugcaugacugcaauacaaccugucaaaccccuaaaggcgccaucaacacaagccuccccuuccagaauauucacccgaucacgauuggcaagugcccuaaguaugucaaaucuaccaagcugagacuugcuacagggcugcggaacgugcccagcauccagucccgcggacucuuuggcgccauugccggguucaucgaaggaggcuggaccgggaugguugacggaugguacggcuaucaucaccagaaugagcaaggcucuggguacgcugcggaucugaaaagcacacagaacgccaucgacaagauuaccaauaaagugaacuccgucaucgagaagaugaauacgcaguuuacagcugugggaaaggaguucaaccaccuugagaaaagaauugaaaaucugaacaagaaaguugaugacggcuuccucgauaucuggaccuacaaugccgagcugcuggugcuccuggaaaacgagcggacccuugacuaucaugauagcaaugucaagaaccuguacgagaaagugcgcucucagcucaagaacaaugccaaggaaauugggaacggauguuuugaguucuaucacaaaugcgacaauacauguauggaauccgucaagaacggcaccuacgauuauccuaaauacagcgaggaagcuaagcugaauagagaggagaucgacggggugaaacuugaaucuacacggaucuaucaaauucuggccaucuacuccacgguugcgagcucccucgugcuggucgugucucugggcgcuauuagcuuuuggaugugcuccaacggaucucuccagugccgcaucuguauuuga

SEQ ID NO: 205836 - RNA, 1701 nt, Artificial Sequence; identical to SEQ ID NO: 195905
  derived and/or modified CDS sequence (opt5) from hemagglutinin__InfluenzaA__BAJ40023

SEQ ID NO: 205837 - RNA, 1701 nt, Artificial Sequence
  derived and/or modified CDS sequence (opt5) from hemagglutinin__InfluenzaA__BAJ40024
augaaggccauccuggugguccuccuguacaccuucgcuacagccaacgcggacacgcuuugcauuggcuaucacgcuaauaacagcaccgauacaguugacaccgugcuggagaaaaaugugacagucacccauuccgugaaccuccuggaagauaagcacaaugggaaacuuuguaagcugagaggaguugcuccccuccaucugggcaaaugcaacaucgccggguggauucugggaaauccugagugugaaucucucagcacagccuccucuuggagcuacaucguggagaccuccucuagcgacaacggcacgugcuauccgggggauuuuauugacuacgaagaacugcgggagcagcuuuccagcgucucuuccuucgaacgcuuugagaucuuccccaagaccagcucuuggccuaaucacgauuccaacaagggagugacagccgcuuguccccaugccggcgcgaaaucuuuuuauaagaaucugaucuggcucguuaaaaagggcaacagcuacccuaaacuguccaagagcuauauuaaugacaaggggaaagaagugcuuguccuguggggaauccaccaccccuccaccucugccgaucaacagagccucuaccagaacgcugacacauacguguucgugggcaccuccagauauagcaagaaauuuaagccugagauugccauccggccgaaaguccgcgaucaggaggggagaaugaauuacuauuggacgcugguugaacccggagacaagauuacauucgaggcuaccggcaaccugguggugccucgguacgccuuugcgauggaacgcaacgccgggucuggaaucauuaucuccgauacacccguccaugacugcaauaccaccugucaaacaccuaaaggcgcuaucaacacgagccuccccuuccagaauauucacccgaucaccauuggcaagugcccuaaguaugugaaaucuacaaagcugagacuugccaccgggcugcggaacguucccagcauccagucccgcggacucuuuggcgcuauugccggguucaucgagggaggcuggacagggaugguggacggaugguacggcuaucaucaccagaaugaacaaggcucuggguacgccgcugaucugaaaagcacccagaacgcgaucgacgagauuacgaauaaggucaacuccgugaucgagaaaaugaauacacaguuuaccgccguuggaaaggaguucaaccaccuugagaagagaauugaaaaucugaacaaaaagguggaugacggcuuccucgauaucuggaccuacaaugcugagcugcugguccuccuggaaaacgagcggacacuugacuaucaugauagcaaugugaaaaaccuguacgagaagguccgcucucagcucaaaaacaaugccaaggaaauugggaacggauguuuugaguucuaucacaagugcgacaauaccuguauggaauccgugaaaaacggcacauacgauuauccuaaguacagcgaggaagccaaacugaauagagagaagaucgacgggguuaaacuugagucuacgcggaucuaucaaauucuggcuaucuacuccaccguggccagcucccucguccuggugguuucucugggcgcgauuagcuuuuggaugugcuccaacggaucucuccagugccgcaucuguauuuga

SEQ ID NO: 205838 - RNA, 1701 nt, Artificial Sequence; identical to SEQ ID NO: 205814
  derived and/or modified CDS sequence (opt5) from hemagglutinin__InfluenzaA__BAJ40025

SEQ ID NO: 205839 - RNA, 1701 nt, Artificial Sequence; identical to SEQ ID NO: 195905
  derived and/or modified CDS sequence (opt5) from hemagglutinin__InfluenzaA__BAJ40026

SEQ ID NO: 205840 - RNA, 1701 nt, Artificial Sequence
  derived and/or modified CDS sequence (opt5) from hemagglutinin__InfluenzaA__BAJ40027
augaaggccauccuggugguccuccuguacaccuucgcuacagccaacgcggacacgcuuugcauuggcuaucacgcuaauaacagcaccgauacaguugacaccgugcuggagaagaaugugacagucacccauuccgugaaccuccuggaagauaagcacaaugggaaacuuuguaagcugagaggaguugcuccccuccaucugggcaaaugcaacaucgccggguggauucugggaaauccugagugugaaucucucagcacagccuccucuuggagcuacaucguggagaccuccucuagcgacaacggcacgugcuauccgggggauuuuauugacuacgaagaacugcgggagcagcuuuccagcgucucuuccuucgaacgcuuugagaucuuccccaagaccagcucuuggccuaaucacgauuccaacaagggagaaacagccgcuuguccccaugccggcgcgaaaucuuuuuauaagaaucugaucuggcucgugaaaaagggcaacagcuacccuaaacuguccaagagcuauauuaaugacaaggggaaagagguucuugugcuguggggaauccaccaccccuccaccucugccgaucaacagagccucuaccagaacgcugacgccuacgucuucgugggcacauccagauauagcaagaaauuuaagccugagauugcuauccggccgaaagugcgcgaucaggaagggagaaugaauuacuauuggacccuggucgagcccggagacaagauuacguucgaagccacaggcaaccugguugugccucgguacgcguuugccauggagcgcaacgcugggucuggaaucauuaucuccgauacccccgugcaugacugcaauacaaccugucaaaccccuaaaggcgccaucaacacaagccuccccuuccagaauauucacccgaucacgauuggcaagugcccuaaguaugucaaaucuaccaagcugagacuugcuacagggcugcggaacgugcccagcauccagucccgcggacucuuuggcgccauugccggguucaucgaaggaggcuggaccgggaugguugacggaugguacggcuaucaucaccagaaugagcaaggcucuggguacgcugcggaucugaaaagcacacagaacgccaucgacaagauuaccaauaaagugaacuccgucaucgagaagaugaauacgcaguuuacagcugugggaaaggaguucaaccaccuugagaaaagaauugaaaaucugaacaagaaaguugaugacggcuuccucgauaucuggaccuacaaugccgagcugcuggugcuccuggaaaacgagcggacccuugacuaucaugauagcaaugucaagaaccuguacgagaaagugaagucucagcucaagaacaaugccaaagaaauugggaacggauguuuugaguucuaucacaagugcgacaauacauguauggaauccgucaaaaacggcaccuacgauuauccuaaguacagcgaggaagcuaaacugaaucgcgaggagaucgacggggugaaacuugaaucuacaagaaucuaucaaauucuggccaucuacuccacgguugcgagcucccucgugcuggucgugucucugggcgcuauuagcuuuuggaugugcuccaacggaucucuccagugccggaucuguauuuga

SEQ ID NO: 205841 - RNA, 1701 nt, Artificial Sequence
  derived and/or modified CDS sequence (opt5) from hemagglutinin__InfluenzaA__BAJ40028
augaaggccauccuggugguccuccuguacaccuucgcuacagccaacgcggacacgcuuugcauuggcuaucacgcuaauaacagcaccgauacaguugacaccgugcuggagaaaaaugugacagucacccauuccgugaaccuccuggaagauaagcacaaugggaaacuuuguaagcugagaggaguugcuccccuccaucugggcaaaugcaacaucgccggguggauucugggaaauccugagugugaaucucucagcacagccuccucuuggagcuacaucguggagaccuccucuagcgacaacggcacgugcuauccgggggauuuuauugacuacgaagaacugcgggagcagcuuuccagcgucucuuccuucgaacgcuuugagaucuuccccaagaccagcucuuggccuaaucacgauuccaacaagggagugacagccgcuuguccccaugccggcgcgaaaucuuuuuauaagaaucugaucuggcucguuaaaaagggcaacagcuacccuaaacuguccaagagcuauauuaaugacaaggggaaagaagugcuuguccuguggggaauccaccaccccuccaccucugccgaucaacagagccucuaccagaacgcugacgccuacguguucgugggcacauccagauauagcaagaaauuuaagccugagauugcuauccggccgaaaguccgcgaucaggaggggagaaugaauuacuauuggacccugguugaacccggagacaagauuacguucgaggccacaggcaaccugguggugccucgguacgcguuugccauggaacgcaacgcugggucuggaaucauuaucuccgauacccccguccaugacugcaauacaaccugucaaaccccuaaaggcgccaucaacacaagccuccccuuccagaauauucacccgaucacgauuggcaagugcccuaaguaugugaaaucuaccaagcugagacuugcuacagggcugcggaacguucccagcauccagucccgcggacucuuuggcgccauugccgcuuucaucgaagggggauggaccggcaugguggacgggugguacggauaucaucaccagaaugaacaaggcucuggcuacgcggccgaucugaaaagcacacagaacgcuaucgacaagauuaccaauaaagucaacuccgugaucgagaagaugaauacgcaguuuacagccguugggaaggaguucaaccaccuugagaaaagaauugagaaucugaacaagaaaguggaugacggauuccucgauaucuggaccuacaaugccgaacugcugguccuccuggagaacgaacggacccuugacuaucaugauagcaaugugaagaaccuguacgagaaaguccgcucucagcucaagaacaaugcuaaggagauuggcaacggguguuuugaguucuaucacaaaugcgacaauacauguauggaguccgugaagaacggaaccuacgauuauccuaaauacagcgaagaggccaagcugaauagagaagagaucgacggcguuaaacuugagucuacacggaucuaucaaauucuggcgaucuacuccacgguggcuagcucccucguccuggugguuucucugggggccauuagcuuuuggaugugcuccaacggcucucuccagugccgcaucuguauuuga

SEQ ID NO: 205842 - RNA, 1701 nt, Artificial Sequence; identical to SEQ ID NO: 205814
  derived and/or modified CDS sequence (opt5) from hemagglutinin__InfluenzaA__BAJ40029

SEQ ID NO: 205843 - RNA, 1701 nt, Artificial Sequence
  derived and/or modified CDS sequence (opt5) from hemagglutinin__InfluenzaA__BAJ40030
augaaggccauccuggugguccuccuguacaccuucgcuacagccaacgcggacacgcuuugcauuggcuaucacgcuaauaacagcaccgauacaguugacaccgugcuggagaagaaugugacagucacccauuccgugaaccuccuggaagauaagcacaaugggaaacuuuguaagcugagaggaguugcgccccuccaucugggcaaaugcaacaucgccggguggauucugggaaauccugagugugaaucucucagcacagcuuccucuuggagcuacaucguggagaccuccucuagcgacaacggcacgugcuauccgggggauuuuauugacuacgaagaacugaaggagcagcuuuccagcgucucuuccuucgaacgguuugagaucuuccccaagaccagcucuuggccuaaucacgauuccaacaaaggagugacagccgcuuguccccaugccggcgccaagagcuuuuauaaaaaucugaucuggcucguuaagaaaggcaacucuuacccuaagcuguccaagagcuauauuaaugacaaagggcgcgaagugcuuguccuguggggaauccaccaccccuccaccucugccgaucaacagagccucuaccagaacgcugacacauacguguucgugggcaccuccagauauagcaagaaauuuaagccugagauugccauccggccgaaaguccgcgaucaggaggggagaaugaauuacuauuggacgcugguugaacccggagacaagauuacauucgaggcuaccggcaaccugguggugccucgguacgccuuugcgauggaacgcaacgccgggucuggaaucauuaucuccgauacacccguccaugacugcaauaccaccugucaaacaccuaaaggcgcuaucaacacgagccuccccuuccagaauauucacccgaucaccauuggcaagugcccuaaguaugugaaaucuacaaagcugagacuugccaccgggcugcggaacguucccagcauccagucccgcggacucuuuggcgcuauugccggguucaucgagggaggcuggacagggaugguggacggaugguacggcuaucaucaccagaaugaacaaggcucuggguacgccgcugaucugaaaagcacccagaacgcgaucgacgagauuacgaauaaggucaacuccgugaucgagaaaaugaauacacaguuuaccgccguuggaaaggaguucaaccaccuugagaagagaauugaaaaucugaacaaaaagguggaugacggcuuccucgauaucuggaccuacaaugcugagcugcugguccuccuggaaaacgagcggacacuugacuaucaugauagcaaugugaaaaaccuguacgagaagguccgcucucagcucaaaaacaaugccaaggaaauugggaacggauguuuugaguucuaucacaagugcgacaauaccuguauggaauccgugaaaaacggcacauacgauuauccuaaguacagcgaggaagccaaacugaauagagaggagaucgacgggguuaaacuugaaucuacgcggaucuaucaaauucuggcuaucuacuccaccguggccagcucccucguccuggugguuucucugggcgcgauuagcuuuuggaugugcuccaacggaucucuccagugccgcaucuguauuuga

SEQ ID NO: 205844 - RNA, 1701 nt, Artificial Sequence; identical to SEQ ID NO: 194741
  derived and/or modified CDS sequence (opt5) from hemagglutinin__InfluenzaA__BAJ40031

SEQ ID NO: 205845 - RNA, 1701 nt, Artificial Sequence; identical to SEQ ID NO: 205814
  derived and/or modified CDS sequence (opt5) from hemagglutinin__InfluenzaA__BAJ40032

SEQ ID NO: 205846 - RNA, 1701 nt, Artificial Sequence; identical to SEQ ID NO: 205843
  derived and/or modified CDS sequence (opt5) from hemagglutinin__InfluenzaA__BAJ40033

SEQ ID NO: 205847 - RNA, 1701 nt, Artificial Sequence
  derived and/or modified CDS sequence (opt5) from hemagglutinin__InfluenzaA__BAJ40034
augaaggccauccuggugguccuccuguacaccuucgcuacagccaacgcggacacgcuuugcauuggcuaucacgcuaauaacagcaccgauacaguugacaccgugcuggagagaaaugugacagucacccauuccgugaaccuccuggaagauaagcacaaugggaagcuguguaaacugcggggaguugcgccccuccaucugggcaagugcaacaucgccggguggauucugggaaauccugagugugaaucucucagcacagcuuccucuuggagcuacaucguggagaccuccucuagcgacaacggcacgugcuauccgggggauuuuauugacuacgaagaacugcgcgagcagcuuuccagcgucucuuccuucgaaagauuugagaucuuccccaaaaccagcucuuggccuaaucacgauuccaacaagggagugacagccgcuuguccccaugccggcgccaagagcuuuuauaaaaaucugaucuggcucguuaagaaaggcaacucuuacccuaagcuguccaaaagcuauauuaaugacaaggggaaggaagugcuuguccuguggggaauccaccaccccuccaccucugccgaucaacagagccucuaccagaacgcugacacauacguguucgugggcaccucccgguauagcaaaaaguuuaaaccugagauugccauccgcccgaaggucagagaucaggaggggcggaugaauuacuauuggacgcugguugaacccggagacaaaauuacauucgaggcuaccggcaaccugguggugccucgcuacgccuuugcgauggaaagaaacgccgggucuggaaucauuaucuccgauacacccguccaugacugcaauaccaccugucaaacaccuaagggcgcuaucaacacgagccuccccuuccagaauauucacccgaucaccauuggcaaaugcccuaaguaugugaagucuacaaaacugcggcuugccaccgggcugcgcaacguucccagcauccaguccagaggacucuuuggcgcuauugccggguucaucgagggaggcuggacagggaugguggacggaugguacggcuaucaucaccagaaugaacaaggcucuggguacgccgcugaucuuaagagcacccagaacgcgaucgacgagauuacgaauaaagucaacuccgugaucgagaagaugaauacacaguuuaccgccguuggaaaagaguucaaccaccuugagaagcggauugaaaaucugaacaagaaaguggaugacggcuuccucgauaucuggaccuacaaugcugagcugcugguccuccuggaaaacgagcgcacacuugacuaucaugauagcaaugugaagaaccuguacgagaaagucagaucucagcucaagaacaaugccaaagaaauugggaacggauguuuugaguucuaucacaagugcgacaauaccuguauggaauccgugaagaacggcacauacgauuauccuaaauacagcgaggaagccaagcugaaucgggagaaaaucgacgggguuaaacuugagucuacgcgcaucuaucaaauucuggcuaucuacuccaccguggccagcucccucguccuggugguuucucugggcgcgauuagcuuuuggaugugcuccaacggaucucuccagugcagaaucuguauuuga

SEQ ID NO: 205848 - RNA, 1701 nt, Artificial Sequence
  derived and/or modified CDS sequence (opt5) from hemagglutinin__InfluenzaA__BAJ40035
augaaggccauccuggugguccuccuguacaccuucgcuacagccaacgcggacacgcuuugcauuggcuaucacgcuaauaacagcaccgauacaguugacaccgugcuggagaaaaaugugacagucacccauuccgugaaccuccuggaagauaagcacaaugggaaacuuuguaagcugagaggaguugcuccccuccaucugggcaaaugcaacaucgccggguggauucugggaaauccugagugugaaucucucagcacagccuccucuuggagcuacaucguggagaccuccucuagcgacaacggcacgugcuauccgggggauuuuauugacuacgaagaacugcgggagcagcuuuccagcgucucuuccuucgaacgcuuugagaucuuccccaagaccagcucuuggccuaaucacgauuccaacaagggagugacagccgcuuguccccaugccggcgcgaaaucuuuuuauaagaaucugaucuggcucguuaaaaagggcaacagcuacccuaaacuguccaagagcuauauuaaugacaaggggaaagaagugcuuguccuguggggaauccaccaccccuccaccucugccgaucaacagagccucuaccagaacgcugacacauacguguucgugggcaccuccagauauagcaagaaauuuaagccugagauugccauccggccgaaaguccgcgaucaggaggggagaaugaauuacuauuggacgcugguugaacccggagacaagauuaaauucgaggcuacaggcaaccugguggugccucgguacgccuuugcgauggaacgcaacgccgggucuggaaucauuaucuccgauacccccguccaugacugcaauacaaccugucaaaccccuaagggcgcuaucaacacaagccuccccuuccagaauauucacccgaucacgauuggcaagugcccuaaauaugugaagucuaccaaacugagacuugccacagggcugcggaacguucccagcauccagucccgcggacucuuuggcgcuauugccggguucaucgagggaggcuggaccgggaugguggacggaugguacggcuaucaucaccagaaugaacaaggcucuggguacgccgcugaucuuaagagcacacagaacgcgaucgacgagauuaccaauaaagucaacuccgugaucgagaagaugaauacgcaguuuacagccguuggaaaggaguucaaccaccuggagaaaagaauugaaaaucugaacaagaaaguggaugacggcuuccucgauaucuggaccuacaaugcugagcugcugguccuccuggaaaacgagcggacccuugacuaucaugauagcaaugugaagaaccuguacgagaaaguccgcaaccagcucaagaauaacgccaaggaaauugggaauggauguuuugaguucuaucacaaaugcgacaacacauguauggaaucugugaagaauggcaccuacgauuauccuaaauacuccgaggaagccaagcugaacagagaggagaucgacgggguuaaacuugaaagcacacggaucuaucaaauucuggcuaucuacucuacgguggccuccagccucguccuggugguuucccugggcgcgauuucuuuuuggaugugcagcaauggaucccuccagugccgcaucuguauuuga

SEQ ID NO: 205849 - RNA, 1701 nt, Artificial Sequence
  derived and/or modified CDS sequence (opt5) from hemagglutinin__InfluenzaA__BAJ40036
augaaggccauccuggugguccucauuuacaccuucgcuacagccaacgcggacacgcugugcaucggcuaucacgcuaauaacagcaccgauacaguugacaccgugcuugagaaaaaugugacagucacccauuccgugaaccugcucgaagauaagcacaaugggaaacuguguaaacuuagaggaguugcuccccugcaucucggcaagugcaacauugccggguggauccugggaaauccugagugugaaucucugagcacagccuccucuuggagcuacauuguggagaccuccucuagcgacaacggcacgugcuauccgggggauuuuaucgacuacgaagaacuccgggagcagcuguccagcgucucuuccuucgaacgcuuugagaucuuccccaagaccagcucuuggccuaaucacgauuccaacaagggagugacagccgcuuguccccaugccggcgcgaaaucuuuuuauaagaaucuuauuuggcugguuaaaaagggcaacagcuacccuaaacucuccaagagcuauaucaaugacaaggggaaagaagugcugguccuuuggggcauucaccaccccuccaccucugccgaucaacagagccuguaccagaacgcugacgccuacguguucgugggaacauccagauauagcaagaaauuuaagccugagaucgcuauucggccgaaaguccgcgaucaggaggggagaaugaauuacuauuggaccaucguugaacccggagacaagauuacguucgaggccacaggcaaccucguggugccucgguacgcguuugccauggaacgcaacgcugggucuggaaucaucauuuccgauacccccguccaugacugcaauacaaccugucaaaccccuaaaggcgccaucaacacaagccugcccuuccagaauauucacccgaucacgauuggcaagugcccuaaguaugugaaaucuaccaagcugagacucgcuacagggcugcggaacguucccagcauccagucccgcggacuuuuuggcgccaucgccggguucauugagggaggcuggaccgggaugguggacggaugguacggcuaucaucaccagaaugaacaaggcucuggguacgcugcggaucugaaaagcacacagaacgccaucgacgagauuaccaauaaggucaacuccgugaucgagaaaaugaauacgcaguuuacagcuguuggaaaggaguucaaccaccucgagaagagaauugaaaaucugaacaaaaagguggaugacggcuuccuugauaucuggaccuacaaugccgagcugcucguccugcuggaaaacgagcggacccucgacuaucaugauagcaaugugaaaaaccuguacgagaaggucaaaucucagcuuaagaacaaugccaaggaaaucgggaacggauguuuugaguucuaucacaaaugcgacaauacauguauggaauccgugaagaacggcaccuacgauuauccuaaauacagcgaggaagcuaagcugaaucgcgaggagauugacgggguuaaacucgaaucuacaagaaucuaucaaauucuggccaucuacuccacgguggcgagcucccuuguccuggugguuucucucggcgcuauuagcuuuuggaugugcuccaacggaucucugcagugccggaucuguauuuga

SEQ ID NO: 205850 - RNA, 1701 nt, Artificial Sequence; identical to SEQ ID NO: 201344
  derived and/or modified CDS sequence (opt5) from hemagglutinin__InfluenzaA__BAJ40037

SEQ ID NO: 205851 - RNA, 1701 nt, Artificial Sequence
  derived and/or modified CDS sequence (opt5) from hemagglutinin__InfluenzaA__BAJ40038
augaaggccauccugcucgugcugcuuuacaccuucgcuacagccaacgcggacacgcugugcauuggcuaucacgcuaauaacagcaccgauacagucgacaccguucucgagaagaaugugacagugacccauuccgucaaccugcuugaagauaagcacaaugggaaacuguguaagcucagaggaguggcuccccugcaucugggcaaaugcaacaucgccggguggauucucggaaauccugagugugaaucucugagcacagccuccucuuggagcuacaucguugagaccuccucuagcgacaacggcacgugcuauccgggggauuuuauugacuacgaagaacuucgggagcagcuguccagcgugucuuccuucgaacgcuuugagaucuuccccaagaccagcucuuggccuaaucacgauuccaacaagggagucacagccgcuuguccccaugccggcgcgaaaucuuuuuauaagaaucucaucuggcuggugaaaaagggcaacagcuacccuaaacuuuccaagagcuauauuaaugacaaggggaaagaaguucuggugcucuggggaauccaccaccccuccaccucugccgaucaacagagccuguaccagaacgcugacacauacgucuucgugggcaccuccagauauagcaagaaauuuaagccugagauugccauccggccgaaagugcgcgaucaggaggggagaaugaauuacuauuggacgauugucgaacccggagacaagaucacauucgaggcuaccggcaaccugguugugccucgguacgccuuugcgauggaacgcaacgccgggucuggaauuaucaucuccgauacacccgugcaugacugcaauaccaccugucaaacaccuaaaggcgcuauuaacacgagccuccccuuccagaauauccacccgauuaccaucggcaagugcccuaaguaugucaaaucuacaaagcugagacuugccaccgggcugcggaacgugcccagcauucagucccgcggacucuuuggcgcuaucgccggguucaucgagggaggcuggacagggaugguugacggaugguacggcuaucaucaccagaaugaacaaggcucuggguacgccgcugaucugaaaagcacccagaacgcgauugacgagaucacgaauaaggugaacuccgucauugagaaaaugaauacacaguuuaccgccgugggaaaggaguucaaccaccuugagaagagaaucgaaaaucugaacaaaaagguugaugacggcuuccucgauauuuggaccuacaaugcugagcugcuggugcuccuggaaaacgagcggacacuugacuaucaugauagcaaugucaaaaaccuguacgagaaggugcgcucucagcucaaaaacaaugccaaggaaaucgggaacggauguuuugaguucuaucacaagugcgacaauaccuguauggaauccgucaaaaacggcacauacgauuauccuaaguacagcgaggaagccaaacugaauagagaggagaucgacggggugaaacuugaaucuacgcggauuuaucaaauccuggcuauuuacuccaccguugccagcucccucgugcuggucgugucucugggcgcgaucagcuuuuggaugugcuccaacggaucucuccagugccgcauuuguaucuga

SEQ ID NO: 205852 - RNA, 1701 nt, Artificial Sequence; identical to SEQ ID NO: 194741
  derived and/or modified CDS sequence (opt5) from hemagglutinin__InfluenzaA__BAJ40039

SEQ ID NO: 205853 - RNA, 1701 nt, Artificial Sequence
  derived and/or modified CDS sequence (opt5) from hemagglutinin__InfluenzaA__BAJ40040
augaaggccauccuggugguccuccuguacaccuucgcuacagccaacgcggacacgcuuugcauuggcuaucacgcuaauaacagcaccgauacaguugacaccgugcuggagaaaaaugugacagucacccauuccgugaaccuccuggaagauaagcacaaugggaaacuuuguaagcugagaggaguugcuccccuccaucugggcaaaugcaacaucgccggguggauucugggaaauccugagugugaaucucucagcacagccuccucuuggagcuacaucguggagaccuccucuagcgacaacggcacgugcuauccgggggauuuuauugacuacgaagaacugcgggagcagcuuuccagcgucucuuccuucgaacgcuuugagaucuuccccaagaccagcucuuggccuaaucacgauuccaacaagggagugacagccgcuuguccccaugccggcgcgaaaucuuuuuauaagaaucugaucuggcucguuaaaaagggcaacagcuacccuaaacuguccaagagcuauauuaaugacaaggggagagaagugcuuguccuguggggaauccaccaccccuccaccucugccgaucaacagagccucuaccagaacgcugacacauacguguucgugggcaccucccgguauagcaaaaaguuuaaaccugagauugccauccgcccgaaggucagagaucaggaggggcggaugaauuacuauuggacgcugguugaacccggagacaaaauuacauucgaggcuaccggcaaccugguggugccucgcuacgccuuugcgauggaaagaaacgccggguauggaaucauuaucucugauacacccguccaugacugcaauaccaccugucaaacaccuaagggcgcuaucaacacgucccuccccuuccagaauauucacccgaucaccauuggcaaaugcccuaaguacguuaagagcacaaaacugcggcuugccaccgggcugcgcaacgugcccucuauccagagcagaggacucuuuggcgcuauugccggguucaucgagggaggcuggacagggaugguggacggaugguauggcuaccaucaccagaaugaacaaggcuccggguacgccgcugaucugaagucuacccagaacgcgaucgacgagauuacgaauaaagucaacagcgugaucgagaagaugaauacacaguuuaccgccguuggaaaagaguucaaccaccuugagaagcggauugaaaaucugaacaagaaaguggaugacggcuuccucgauaucuggaccuauaaugcugagcugcugguccuccuggaaaacgagcgcacacuugacuaccaugauuccaaugugaagaaccuguaugagaaagucagaagccagcucaagaacaaugccaaagaaauugggaacggauguuuugaguucuaccacaagugcgacaauaccuguauggaaucugugaagaacggcacauaugauuacccuaaauauuccgaggaagccaagcugaaucgggaggagaucgacgggguuaaacuugaaagcacgcgcaucuaccaaauucuggcuaucuacucuaccguggccuccagccucguccuggugguuucccugggcgcgauuucuuuuuggaugugcagcaacggaucccuccagugcagaaucuguauuuga

SEQ ID NO: 205854 - RNA, 1701 nt, Artificial Sequence; identical to SEQ ID NO: 201344
  derived and/or modified CDS sequence (opt5) from hemagglutinin__InfluenzaA__BAJ40041

SEQ ID NO: 205855 - RNA, 1701 nt, Artificial Sequence
  derived and/or modified CDS sequence (opt5) from hemagglutinin__InfluenzaA__BAJ40042
augaaggccauccuggugguccuccuguacaccuucgcuacagccaacgcggacacgcuuugcauuggcuaucacgcuaauaacagcaccgauacaguugacaccgugcuggagaagaaugugacagucacccauuccgugaaccuccuggaagauaagcacaaugggaaacuuuguaagcugagaggaguugcgccccuccaucugggcaaaugcaacaucgccggguggauucugggaaauccugagugugaaucucucagcacagcuuccucuuggagcuacaucguggagaccuccucuagcgacaacggcacgugcuauccgggggauuuuauugacuacgaagaacugaaggagccccuuuccagcgucucuuccuucgaacgguuugagaucuucccuaagaccagcucuuggcccaaucacgauuccaacaaaggagugacagccgcuuguccucaugccggcgccaagagcuuuuauaaaaaucugaucuggcucguuaagaaaggcaacucuuaccccaagcuguccaagagcuauauuaaugacaaagggcgcgaagugcuuguccuguggggaauccaccacccuuccaccucugccgauagacagagccucuaccaaaacgcugacacauacguguucgugggcaccucccgguauagcaagaaauuuaagccggagauugccauccgccccaaagucagagaucaggaggggcggaugaauuacuauuggacgcugguugaaccuggagacaagauuacauucgaggcuaccggcaaccugguggugccccgcuacgccuuugcgauggaaagaaacgccgggucuggaaucauuaucuccgauacaccuguccaugacugcaauaccaccugucagacacccaaaggcgcuaucaacacgagccucccguuccagaauauucacccuaucaccauuggcaagugccccaaguaugugaaaucuacaaagcugcggcuugccaccgggcugcgcaacguuccuagcauccaauccagaggacucuuuggcgcuauugccggguucaucgagggaggcuggacagggaugguggacggaugguacggcuaucaucaccagaaugaacagggcucuggguacgccgcugaucugaaaagcacccagaacgcgaucgacgagauuacgaauaaggucaacuccgugaucgagaaaaugaauacacaauuuaccgccguuggaaaggaguucaaccaccuugagaagcggauugaaaaucugaacaaaaagguggaugacggcuuccucgauaucuggaccuacaaugcugagcugcugguccuccuggaaaacgagcgcacacuugacuaucaugauagcaaugugaaaaaccuguacgagaaggucagaucucagcucaaaaacaaugccaaggaaauugggaacggauguuuugaguucuaucacaagugcgacaauaccuguauggaauccgugaaaaacggcacauacgauuaucccaaguacagcgaggaagccaaacugaaucgggaggagaucgacgggguuaaacuugaaucuacgcgcaucuaucagauucuggcuaucuacuccaccguggccagcucccucguccuggugguuucucugggcgcgauuagcuuuuggaugugcuccaacggaucucuccagugcagaaucuguauuuga

SEQ ID NO: 205856 - RNA, 1701 nt, Artificial Sequence; identical to SEQ ID NO: 201344
  derived and/or modified CDS sequence (opt5) from hemagglutinin__InfluenzaA__BAJ40043

SEQ ID NO: 205857 - RNA, 1701 nt, Artificial Sequence
  derived and/or modified CDS sequence (opt5) from hemagglutinin__InfluenzaA__BAJ40044
augaaggccauccuggugguccuccuguacaccuucgcuacagccaacgcggacacgcuuugcauuggcuaucacgcuaauaacagcaccgauacaguugacaccgugcuggagaaaaaugugacagucacccauuccgugaaccuccuggaagauaagcacaaugggaaacuuuguaagcugagaggaguugcgccccuccaucugggcaaaugcaacaucgccggguggauucugggaaauccugagugugaaucucucagcacagcuuccucuuggagcuacaucguggagaccuccucuagcgacaacggcacgugcuauccgggggauuuuauugacuacgaagaacagaaggagcaacuguccagcgucucuuccuucgaacgguuugagaucuuccccaagaccagcucuuggccuaaucacgauuccaacaaaggagugacagccgcuuguccccaugccggcgccaagagcuuuuauaaaaaucuuaucuggcugguuaagaaaggcaacucuuacccuaagcucuccaagagcuauauuaaugacaaagggaaggaagugcugguccuuuggggaauccaccaccccuccaccucugccgaucagcagagccuguaccagaacgcugacgccuacguguucgugggcacaucccgcuauagcaaaaaguuuaaaccugagauugcuaucagaccgaagguccgggaucaagaggggcgcaugaauuacuauuggacccucguugaacccggagacaaaauuacguucgaggccacaggcaaccugguggugccuagauacgcguuugccauggaaaucaacgcugggucuggaauuaucaucuccgauacccccguccaugacugcaauacaaccugucagaccccuaagggcgccauuaacacaagccugcccuuccagaauauccacccgauuacgaucggcaagugcccuaaauaugugaagucuaccaaacuccggcuggcuacagggcuucgcaacguucccagcauucaguccagaggacuguuuggcgccaucgccggguucaucgagggaggcuggaccgggaugguggacggaugguacggcuaucaucaccaaaaugaacagggcucuggguacgcugcggaucucaagagcacacagaacgccauugacaaaaucaccaauaaggucaacuccgugauugagaagaugaauacgcaguuuacagcuguuggaaaagaguucaaccaccuggaaaagcggaucgagaaucuuaacaaaaagguggaugacggcuuccuggauauuuggaccuacaaugccgaacuccugguccugcucgagaacgaacgcacccuggacuaucaugauagcaaugugaaaaaccuuuacgagaaggucagaucucaacugaagaacaaugccaaagagaucgggaacggauguuuugaguucuaucacaagugcgacaauacauguauggaguccgugaaaaacggcaccuacgauuauccuaaguacagcgaagaggcuaaacucaaucgggaagagaucgacgggguuaagcuggagucuacacgcauuuaucagauccuugccauuuacuccacgguggcgagcucccugguccucgugguuucucugggcgcuaucagcuuuuggaugugcuccaacggaucucugcagugcagaauuuguaucuga

SEQ ID NO: 205858 - RNA, 1701 nt, Artificial Sequence; identical to SEQ ID NO: 205820
  derived and/or modified CDS sequence (opt5) from hemagglutinin__InfluenzaA__BAJ40045

SEQ ID NO: 205859 - RNA, 1701 nt, Artificial Sequence
  derived and/or modified CDS sequence (opt5) from hemagglutinin__InfluenzaA__BAJ40046
augaaggccauccuggugguccuccuguacaccuucgcuacagccaacgcggacacgcuuugcauuggcuaucacgcuaauaacagcaccgauacaguugacaccgugcuggagaaaaaugugacagucacccauuccgugaaccuccuggaagauaagcacaaugggaaacuuuguaagcugagaggaguugcuccccuccaucugggccggugcaacaucgccggguggauucugggaaauccugagugugaaucucucagcacagccuccucuuggagcuacaucguggagaccuccauuucugacaacggcacgugcuauccgggggauuuuaucgacuacgaggaacugaaagagcagcuuagcuccgucagcucuuucgaacgcuuugagaucuuccccaagaccuccagcuggccuaaucacgauucuaacaagggagugacagccgcuuguccccaugccggcgcgaaauccuuuuauaagaaucugauuuggcucguuaaaaagggcaacagcuacccuaaacugucuaaguccuauaucaaugacaaggggaaagaagugcuuguccuguggggcauucaccaccccagcaccuccgccgaucaacagucucucuaccagaacgcugacgccuacguguucgugggaacaagcagauauuccaagaaauuuaagccugagaucgcuauucggccgaaaguccgcgaucaggaggggagaaugaauuacuauuggacccugguugaacccggagacaagaucacguucgaggccacaggcaaccugguggugccucgguacgcguuugccauggaacgcaacgcugggagcggaauuaucaucucugauacccccguccaugacugcaauacaaccugucaaaccccuaaaggcgccauuaacacaucccuccccuuccagaauauccacccgauuacgaucggcaagugcccuaaguaugugaaaagcaccaagcugagacuugcuacagggcugcggaacguucccucuauucagagccgcggacucuuuggcgccaucgccggguucaucgagggaggcuggaccgggaugguggacggaugguacggcuaucaucaccagaaugaacaaggcuccggguacgcugcggaucugaaaucuacacagaacgccauugacaagaucaccaauaaagucaacagcgugauugagaagaugaauacgcaguuuacagcuguuggaaaggaguucaaccaccuugaaaagaagaucgagaaucugaacaaaaagguggaugacggcuuccucgauauuuggaccuacaaugccaaacugcugguccuccuggaaaacgagagaacccuugacuaucaugauuccaaugugaagaaccuguacgaaaagguccggagccagcucaaaaacaaugccaaggagaucgggaacggauguuuugaguucuaucacaaaugcgacaauacauguauggaaucugugaagaacggcaccuacgauuauccuaaauacuccgaggaagcuaagcugaaucgcgaggaaaucgacgggguuaaacuugagagcacaagaauuuaucaaauccuggccauuuacucuacgguggcguccagccucguccuggugguuucccugggcgcuaucucuuuuuggaugugcagcaacggaucccuccagugccggauuuguaucuga

SEQ ID NO: 205860 - RNA, 1701 nt, Artificial Sequence; identical to SEQ ID NO: 205843
  derived and/or modified CDS sequence (opt5) from hemagglutinin__InfluenzaA__BAJ40047

SEQ ID NO: 205861 - RNA, 1701 nt, Artificial Sequence; identical to SEQ ID NO: 205814
  derived and/or modified CDS sequence (opt5) from hemagglutinin__InfluenzaA__BAJ40048

SEQ ID NO: 205862 - RNA, 1701 nt, Artificial Sequence
  derived and/or modified CDS sequence (opt5) from hemagglutinin__InfluenzaA__BAJ40050
augaaggccauccuggugguccuccuguacaccuucgcuacagccaacgcggacacgcuuugcauuggcuaucacgcuaauaacagcaccgauacaguugacaccgugcuggagaaaaaugugacagucacccauuccgugaaccuccuggaagauaagcacaaugggaaacuuuguaagcugagaggaguugcgccccuccaucugggcaaaugcaacaucgccggguggauucugggaaauccugagugugaaucucucagcacagcuuccucuuggagcuacaucguggagaccuccucuagcgacaacggcacgugcuauccgggggauuuuauugacuacgaagaacugaaggagcagcuuuccagcgucucuuccuucgaacgguuugagaucuuccccaagaccagcucuuggccuaaucacgauuccaacaaaggagugacagccgcuuguccccaugccggcgccaagagcuuuuauaaaaaucugaucuggcucguuaagaaaggcaacucuuacccuaagcuguccaagagcuauauuaaugacaaagggaaggaagugcuuguccuguggggaauccaccaccccuccaccucugccgaucaacagagccucuaccagaacgcugacgccuacguguucgugggcacaucccgcuauagcaaaaaguuuaaaccugagauugcuaucagaccgaagguccgggaucaggaggggcgcaugaauuacuauuggacccugguugaacccggagacaaaauuacguucgaggccacaggcaaccugguggugccuagauacgcguuugccauggaacggaacgcugggucuggaaucauuaucuccgauacccccguccaugacugcaauacaaccugucaaaccccuaagggcgccaucaacacaagccuccccuuccagaauauucacccgaucacgauuggcaagugcccuaaauaugugaagucuaccaaacugcgccuugcuacagggcugagaaacguucccagcauccagucccggggacucuuuggcgccauugccggguucaucgagggaggcuggaccgggaugguggacggaugguacggcuaucaucaccagaaugaacaaggcucuggguacgcugcggaucuuaagagcacacagaacgccaucgacaaaauuaccaauaaggucaacuccgugaucgagaagaugaauacgcaguuuacagcuguuggaaaagaguucaaccaccuugaaaagcgcauugagaaucugaacaaaaagguggaugacggcuuccucgauaucuggaccuacaaugccgaacugcugguccuccuggagaacgaaagaacccuugacuaucaugauagcaaugugaaaaaccuguacgagaagguccggucucagcucaagaacaaugccaaagagauugggaacggauguuuugaguucuaucacaagugcgacaauacauguauggaguccgugaaaaacggcaccuacgauuauccuaaguacagcgaagaggcuaaacugaaucgcgaagagaucgacgggguuaagcuggagucuacaagaaucuaucaaauucuggccaucuacuccacgguggcgagcucccucguccuggugguuucucugggcgcuauuagcuuuuggaugugcuccaacggaucucuccagugccggaucuguauuuga

SEQ ID NO: 205863 - RNA, 1701 nt, Artificial Sequence; identical to SEQ ID NO: 195905
  derived and/or modified CDS sequence (opt5) from hemagglutinin__InfluenzaA__BAJ40051

SEQ ID NO: 205864 - RNA, 1701 nt, Artificial Sequence
  derived and/or modified CDS sequence (opt5) from hemagglutinin__InfluenzaA__BAJ40052
augaaggccauccuggugguccuccuguacaccuucgcuacagccaacgcggacacgcuuugcauuggcuaucacgcuaauaacagcaccgauacaguugacaccgugcuggagaaaaaugugacagucacccauuccgugaaccuccuggaagauaagcacaaugggaaacuuuguaagcugagaggaguugcuccccuccaucugggcaaaugcaacaucgccggguggauucugggaaauccugagugugaaucucucagcacagccuccucuuggagcuacaucguggagaccuccucuagcgacaacggcacgugcuauccgggggauuuuauugacuacgaagaacugcgggagcagcuuuccagcgucucuuccuucgaacgcuuugagaucuuccccaagaccagcucuuggccuaaucacgauuccaacaagggagugacagccgcuuguccccaugccggcgcgaaaucuuuuuauaagaaucugaucuggcucguuaaaaagggcaacagcuacccuaaacuguccaagagcuauauuaaugacaaggggagagaagugcuuguccuguggggaauccaccaccccuccaccacagccgaucaacagucucucuaccagaacgcugacaccuacguguucgugggcacgagccgguauuccaaaaaguuuaaaccugagauugccauccgcccgaaggucagagaucaggaggggcggaugaauuacuauuggacacugguugaacccggagacaaaauuaccuucgaggcuacaggcaaccugguggugccucgcuacgccuuugcgauggaaagaaacgccgggagcggaaucauuaucucugauacccccguccaugacugcaauaccacaugucaaacgccuaagggcgcuaucaacaccucccuccccuuccagaauauucacccgaucacaauuggcaaaugcccuaaguauguuaagagcaccaaacugcggcuugccacagggcugcgcaacgugcccucuauccagagcagaggacucuuuggcgcuauugccggguucaucgagggaggcuggaccgggaugguggacggaugguacggcuaucaucaccagaaugaacaaggcuccggguacgccgcugaucugaagucuacgcagaacgcgaucgacgagauuacaaauaaagucaacagcgugaucgagaagaugaauacccaguuuaccgccguuggaaaagaguucaaccaccuugagaagcggauugaaaaucugaacaagaaaguggaugacggcuuccucgauaucuggacauacaaugcugagcugcugguccuccuggaaaacgagcgcacccuugacuaucaugauuccaaugugaagaaccuguacgagaaagucagaagccagcucaagaacaaugccaaagaaauugggaacggauguuuugaguucuaucacaagugcgacaauacauguauggaaucugugaagaacggcacguacgauuauccuaaauacuccgaggaagccaagcugaaucgggaggagaucgacgggguuaaacuugaaagcacccgcaucuaucaaauucuggcuaucuacucuacaguggccuccagccucguccuggugguuucccugggcgcgauuucuuuuuggaugugcagcaacggaucccuccagugcagaaucuguauuuga

SEQ ID NO: 205865 - RNA, 1701 nt, Artificial Sequence
  derived and/or modified CDS sequence (opt5) from hemagglutinin__InfluenzaA__BAJ40053
augaaggccauccuggugguccuccuguacaccuucgcuacagccaacgcggacacgcuuugcauuggcuaucacgcuaauaacagcaccgauacaguugacaccgugcuggagaagaaugugacagucacccauuccgugaaccuccuggaagauaagcacaaugggaaacuuuguaagcugagaggaguugcuccccuccaucugggcaaaugcaacaucgccggguggauucugggaaauccugagugugaaucucucagcacagccuccucuuggagcuacaucguggagaccuccucuagcgacaacggcacgugcuauccgggggauuuuauugacuacgaagaacugcgggagcagcuuuccagcgucucuuccuucgaacgcuuugagaucuuccccaagaccagcucuuggccuaaucacgauuccaacaagggagugacagccgcuuguccccaugccggcgcgaaaucuuuuuauaagaaucugaucuggcucguuaaaaagggcaacagcuacccuaaacuguccaagagcuauauuaaugacaaggggaaagaagugcuuguccuguggggaauccaccaccccuccaccucugccgaucaacagagccucuaccagaacgcugacacauacguguucgugggcaccuccagauauagcaagaaauuuaagccugagauugccauccggccgaaaguccgcgaucaggaggggagaaugaauuacuauuggacgcugguugaacccggagacaagauuacauucgaggcuaccggcaaccugguggugccucgguacgccuuugcgauggaacgcaacgccgggucuggaaucauuaucuccgauacacccguccaugacugcaauaccaccugucaaacaccuaaaggcgcuaucaacacgagccuccccuuccagaauauucacccgaucaccauuggcaagugcccuaaguaugugaaaucuacaaagcugagacuugccaccgggcugcggaacguucccagcauccagucccgcggacucuuuggcgcuauugccggguucaucgagggaggcuggacagggaugguggacggaugguacggcuaucaucaccagaaugaacaaggcucuggguacgccgcugaucugaaaagcacccagaacgcgaucgacgagauuacgaauaaggucaacuccgugaucgagaaaaugaauacacaguuuaccgccguuggaaaggaguucaaccaccuugagaagagaauugaaaaucugaacaaaaagguggaugacggcuuccucgauaucuggaccuacaaugcugagcugcugguccuccuggaaaacgagcggacacuugacuaucaugauagcaaugugaaaaaccuguacgagaagguccgcaaccagcucaaaaauaacgccaaggaaauugggaauggauguuuugaguucuaucacaagugcgacaacaccuguauggaaucugugaaaaauggcacauacgauuauccuaaguacuccgaggaagccaaacugaacagagaggagaucgacgggguuaaacuugaaagcacgcggaucuaucaaauucuggcuaucuacucuaccguggccuccagccucguccuggugguuucccugggcgcgauuucuuuuuggaugugcagcaauggaucccuccagugccgcaucuguauuuga

SEQ ID NO: 205866 - RNA, 1701 nt, Artificial Sequence; identical to SEQ ID NO: 195905
  derived and/or modified CDS sequence (opt5) from hemagglutinin__InfluenzaA__BAJ40054

SEQ ID NO: 205867 - RNA, 1701 nt, Artificial Sequence
  derived and/or modified CDS sequence (opt5) from hemagglutinin__InfluenzaA__BAJ40055
augaaggccauccuggugguccuccuguacaccuucgcuacagccaacgcggacacgcuuugcauuggcuaucacgcuaauaacagcaccgauacaguugacaccgugcuggagaagaaugugacagucacccauuccgugaaccuccuggaagauaagcacaaugggaaacuuuguaagcugagaggaguugcuccccuccaucugggcaaaugcaacaucgccggguggauucugggaaauccugagugugaaucucucagcacagccuccucuuggagcuacaucguggagaccuccucuagcgacaacggcacgugcuauccgggggauuuuauugacuacgaagaacugcgggagcagcuuuccagcgucucuuccuucgaacgcuuugagaucuuccccaagaccagcucuuggccuaaucacgauuccaacaagggagugacagccgcuuguccccaugccggcgcgaaaucuuuuuauaagaaucugaucuggcucguuaaaaagggcaacagcuacccuaaacuguccaagagcuauauuaaugacaaggggaaagaagugcuuguccuguggggaauccaccaccccuccaccucuacagaucaacagagccucuaccagaacgccgacaccuacguguucgugggcacguccagauauagcaagaaauuuaagccugagauugcuauccggccgaaaguccgcgaucaggaggggagaaugaauuacuauuggacacugguugaacccggagacaagauuaccuucgaggccacaggcaaccugguggugccucgguacgcuuuugccauggaacgcaacgcggggucuggaaucauuaucuccgauacccccguccaugacugcaauaccaucugucaaacaccuaaaggcgccauuaacacgagccuccccuuccagaauauccacccgauuaccaucggcaagugcccuaaguaugugaaaucuacaaagcugagacuugcuaccgggcugcggaacguucccagcgugcagucccgcggacucuuuggcgccauugcuggguucaucgagggaggcuggacagggauggucgacggaugguacggcuaucaucaccagaaugaacaaggcucuggguacgccgccgaucugaaaagcacccagaacgcuaucgacgagauuacgaauaaggugaacuccguuaucgagaaaaugaauacacaguuuaccgcggugggaaaggaguucaaccaccuugagaagagaauugaaaaucugaacaaaaaggucgaugacggcuuccucgauaucuggaccuacaaugccgagcugcuggugcuccuggaaaacgagcggacacuugacuaucaugauagcaaugucaaaaaccuguacgagaaggugcgcucucagcucaaaaacaaugcuaaggaaauugggaacggauguuuugaguucuaucacaagugcgacaauaccuguauggaauccguuaaaaacggcacauacgauuauccuaaguacagcgaggaagccaaacugaauagagaggagaucgacggggugaaacuugaaucuacgcggaucuaucaaauucuggccaucuacuccaccgucgcuagcucccucgugcugguugugucucugggcgccauuagcuuuuggaugugcuccaacggaucucuccagugccgcaucuguauuuga

SEQ ID NO: 205868 - RNA, 1701 nt, Artificial Sequence
  derived and/or modified CDS sequence (opt5) from hemagglutinin__InfluenzaA__BAJ40056
augaaggccauccuggugguccuccuguacaccuucgcuacagccaacgcggacacgcuuugcauuggcuaucacgcuaauaacagcaccgauacaguugacaccgugcuggagaaaaaugugacagucacccauuccgugaaccuccuggaagauaagcacaaugggaaacuuuguaagcugagaggaguugcuccccuccaucugggcaaaugcaacaucgccggguggauucugggaaauccugagugugaacuccugucuacagccagcuccuggucuuacaucguggagaccagcuccucugacaacggcacgugcuauccgggggauuuuauugacuacgaagaacuucgggagcagcugagcuccgucagcucuuucgaacgcuuugagaucuuccccaagaccuccagcuggccuaaucacgauucuaacaagggagugacagccgcuuguccccaugccggcgcgaaauccuuuuauaagaaucucaucuggcaaguuaaaaagggcaacagcuacccuaaacugucuaaguccuauauuaaugacaaggggaaagaagugcuuguccuguggggaauccaccaccccagcaccuccgccgaucagcagucucucuaccagaacgcugacgccuacguguucgugggcacaagcagauauuccaagaaauuuaagccugagauugcuauccggccgaaaguccgcgaucaagaggggagaaugaauuacuauuggacccugguugaacccggagacaagauuacguucgaggccacaggcaaccugguggugccucggcaugcguuugccauggaacgcaacgcugggagcggaaucauuaucucugauacccccguccacaauugcaacacaaccugucagaccccuaaaggcgccaucaauacaucccuccccuuccagaacauucauccgaucacgauuggcaagugcccuaaguacgugaaaagccccaagcugagacuugcuaccgggcugcggaauguuccuucuauccagagccgcggacucuuuggcgccauugccggguucaucgagggaggcuggacagggaugguggacggaugguauggcuaccaccaccaaaacgaacagggcuccggguaugcugcggaccugaaaucuacccagaaugccaucgauaagauuacaaacaaagucaauagcgugaucgagaagaugaacacccaguuuacggcuguuggaaaggaguucaaucaucuugagaaaagaauugagaaccugaauaagaaaguggacgauggcuuccucgacaucuggacauacaacgccgaacugcugguccuccuggagaaugaacggacccuugauuaccacgacuccuaugugaagaaccuguacgagaaaguccgcagccaacucaagaacaaugccaaggagauugggaacggauguuuugaguucuaucauaaaugcgauaauaccuguauggaaucugugaagaacggcacauacgacuaucccaaauacuccgaagaggcuaagcugaauagagaagagaucgaugggguuaaacuugagagcacccggaucuaucagauucuggccaucuacucuacaguggcguccagccucguccuggugguuucccugggcgcuauuucuuuuuggaugugcagcaacggaucccuccagugccgcaucuguauuuga

SEQ ID NO: 205869 - RNA, 1701 nt, Artificial Sequence
  derived and/or modified CDS sequence (opt5) from hemagglutinin__InfluenzaA__BAJ40057
augaaggccauccuggugguccuccuguacaccuucgcuacagccaacgcggacacgcuuugcauuggcuaucacgcuaauaacagcaccgauacaguugacaccgugcuggagagaaaugugacagucacccauuccgugaaccuccuggaagauaaacacaaugggaagcuguguaaacugcggggaguugcgccccuccaucugggcaagugcaacaucgccggguggauucugggaaauccugagugugaaucucucagcacagcuuccucuuggagcuacaucguggagaccuccucuagcgacaacggcacgugcuauccgggggauuuuauugacuacgaagaacugcgcgagcagcuuuccagcgucucuuccuucgaaagauuugagaucuuccccaaaaccagcucuuggccuaaucacgauuccaacaagggagugacagccgcuuguccccaugccggcgccaagagcuuuuauaaaaaucugaucuggcucguuaagaaaggcaacucuuacccuaagcuguccaaaagcuauauuaaugacaaggggaaggaagugcuuguccuguggggaauccaccaccccuccaccucugccgaucaacagagccucuaccagaacgcugacacauacguguucgugggcaccucccgguauagcaaaaaguuuaaaccugagauugccauccgcccgaaggucagagaucaggaggggcggaugaauuacuauuggacgcugguugaacccggagacaaaauuacauucgaggcuaccggcaaccugguggugccucgcuacgccuuugcgauggaaagaaacgccgggucuggaaucauuaucuccgauacacccguccaugacugcaauaccaccugucaaacaccuaagggcgcuaucaacacgagccuccccuuccagaauauucacccgaucaccauuggcaaaugcccuaaguaugugaagucuacaaaacugcggcuugccaccgggcugcgcaacguucccagcauccaguccagaggacucuuuggcgcuauugccggguucaucgagggaggcuggacagggaugguggacggaugguacggcuaucaucaccagaaugaacaaggcucuggguacgccgcugaucuuaagagcacccagaacgcgaucgacgagauuacgaaugaggucaacuccgugaucgaaaagaugaauacacaguuuaccgccguuggaaaggaguucaaccaccuugaaaaacggauugagaaucugaacaagaagguggaugacggcuuccucgauaucuggaccuacaaugcugaacugcugguccuccuggagaacgagcgcacacuugacuaucaugauagcaaugugaaaaaccuguacgaaaaggucagaucucagcucaaaaacaaugccaaggagauugggaacggauguuuugaguucuaucacaaaugcgacaauaccuguauggaguccgugaagaacggcacauacgauuauccuaaguacagcgaagaggccaaacugaaucgggaggaaaucgacgggguuaaacuugagucuacgcgcaucuaucaaauucuggcuaucuacuccaccguggccagcucccucguccuggugguuucucugggcgcgauuagcuuuuggaugugcuccaacggaucucuccagugcagaaucuguauuuga

SEQ ID NO: 205870 - RNA, 1701 nt, Artificial Sequence; identical to SEQ ID NO: 201344
  derived and/or modified CDS sequence (opt5) from hemagglutinin__InfluenzaA__BAJ40058

SEQ ID NO: 205871 - RNA, 1701 nt, Artificial Sequence; identical to SEQ ID NO: 205814
  derived and/or modified CDS sequence (opt5) from hemagglutinin__InfluenzaA__BAJ40059

SEQ ID NO: 205872 - RNA, 1701 nt, Artificial Sequence; identical to SEQ ID NO: 195905
  derived and/or modified CDS sequence (opt5) from hemagglutinin__InfluenzaA__BAJ40060

SEQ ID NO: 205873 - RNA, 1701 nt, Artificial Sequence
  derived and/or modified CDS sequence (opt5) from hemagglutinin__InfluenzaA__BAJ40061
augaaggccauccuggugguccuccuguacaccuucgcuacagccaacgcggacacgcuuugcauuggcuaucacgcuaauaacagcaccgauacaguugacaccgugcuggagaaaaaugugacagucacccauuccgugaaccuccuggaagauaagcacaaugggaaacuuuguaagcugagaggaguugcuccccuccaucugggcaaaugcaacaucgccggguggauucugggaaauccugagugugaaucucucagcacagccuccucuuggagcuacaucguggagaccuccucuagcgacaacggcacgugcuauccgggggauuuuauugacuacgaagaacugcgggagcagcuuuccagcgucucuuccuucgaacgcuuugagaucuuccccaaggccagcucuuggccuaaucacgauuccaacaagggagugaccgcugccuguccccaugcgggcgccaagagcuuuuauaaaaaucugaucuggcucguuaaaaagggcaacucuuacccuaaacuguccaagagcuauauuaaugacaaggggaaagaagugcuuguccuguggggaauccaccaccccuccacaucugcugaucaacagagccucuaccagaacgccgacgcuuacguguucgugggcaccuccagauauagcaagaaauuuaagccugagauugccauccggccgaaaguccgcgaucaggaggggagaaugaauuacuauuggacacugguugaacccggagacaagauuaccuucgaggcgacgggcaaccugguggugccucgguacgccuuugcuauggaacgcaacgccgggucuggaaucauuaucuccgauacacccguccaugacugcaauaccacaugucaaaccccuaaaggcgcuaucaacaccagccuccccuuccagaauauucacccgaucacaauuggcaagugcccuaaguaugugaaaucuacgaagcugagacuugccaccgggcugcggaacguucccagcauccagucccgcggacucuuuggcgccauugcuggguucaucgagggaggcuggacagggaugguggacggaugguacggcuaucaucaccagaaugaacaaggcucuggguacgcggccgaucugaaaagcacccagaacgcuaucgacaagauuacaaauaaagucaacuccgugaucgagaagaugaauacccaguuuacggccguuggaaaggaguucaaccaccuugagaaaagaauugagaaucugaacaagaaaguggaugacggcuuccucgauaucuggacauacaaugccgaacugcugguccuccuggagaacgaacggacccuugacuaucaugauagcaaugugaagaaccuguacgagaaaguccgcucucagcucaagaacaaugcuaaggagauugggaacggauguuuugaguucuaucacaaaugcgacaauaccuguauggaauccgugaagaacggcacauacgauuauccuaaauacagcgaagaggccaagcugaauagagaagagaucgacgggguuaaacuugagucuacccggaucuaucaaauucuggcgaucuacuccacaguggcuagcucccucguccuggugguuucucugggcgccauuagcuuuuggaugugcuccaacggaucucuccagugccgcaucuguauuuga

SEQ ID NO: 205874 - RNA, 1701 nt, Artificial Sequence
  derived and/or modified CDS sequence (opt5) from hemagglutinin__InfluenzaA__BAJ40062
augaaggccauccuggugguccuccuguacaccuucgcuacagccaacgcggacacgcuuugcauuggcuaucacgcuaauaacagcaccgauacaguugacaccgugcuggagaaaaaugugacagucacccauuccgugaaccuccuggaagauaagcacaaugggaaacuuuguaagcugagaggaguugcuccccuccaucugggcaaaugcaacaucgccggguggauucugggaaauccugagugugaaucucucagcacagccuccucuuggagcuacaucguggagaccuccucuagcgacaacggcacgugcuauccgggggauuuuauugacuacgaagaacugcgggagcagcuuuccagcgucucuuccuucgaacgcuuugagaucuuccccaagaccagcucuuggccuaaucacgauuccaacaagggagugacagccgcuuguccccaugccggcgcgaaaucuuuuuauaagaaucugaucuggcucguuaaaaagggcaacagcuacccuaaacuguccaagagcuauauuaaugacaaggggaaagaagugcuuguccuguggggaauccaccaccccuccaccucugccgaucaacagagccucuaccagaacgcugacacauacguguucgugggcaccuccagauauagcaagaaauuuaagccugagauugccauccggccgaaaguccgcgaucaggaggggagaaugaauuacuauuggacgcugguugaacccggagacaagauuacauucgaggcuaccggcaaccugguggugccucgguacgccuuugcgauggaacgcaacgccgggucuggaaucauuaucuccgauacacccguccaugacugcaauaccaccugucaaacaccuaaaggcgcuaucaacacgagccuccccuuccagaauauucacccgaucaccauuggcaagugcccuaaguaugugaaaucuacaaagcugagacuugccaccgggcugcggaacguucccagcauccagucccgcggacucuuuggcgcuauugccggguucaucgagggaggcuggacagggaugguggacggaugguacggcuaucaucaccagaaugaacaaggcucuggguacgccgcugaucugaaaagcacccagaacgcgaucgacgagauuacgaauaaggucaacuccgugaucgagaaaaugaauacacaguuuaccgccguuggaaaggaguucaaccaccuugagaagaaaauugaaaaucugaacaagaaaguggaugacggcuuccucgauaucuggaccuacaaugcugagcugcugguccuccuggaaaacgagagaacacuugacuaucaugauagcaaugugaagaaccuguacgagaaaguccggucucagcucaagaacaaugccaaggaaauugggaacggauguuuugaguucuaucacaaaugcgacaauaccuguauggaauccgugaagaacggcacauacgauuauccuaaauacagcgaggaagccaagcugaaucgcgaggagaucgacgggguuaaacuugaaucuacgagaaucuaucaaauucuggcuaucuacuccaccguggccagcucccucguccuggugguuucucugggcgcgauuagcuuuuggaugugcuccaacggaucucuccagugcaagaucuguauuuga

SEQ ID NO: 205875 - RNA, 1701 nt, Artificial Sequence; identical to SEQ ID NO: 205873
  derived and/or modified CDS sequence (opt5) from hemagglutinin__InfluenzaA__BAJ40063

SEQ ID NO: 205876 - RNA, 1701 nt, Artificial Sequence; identical to SEQ ID NO: 201344
  derived and/or modified CDS sequence (opt5) from hemagglutinin__InfluenzaA__BAJ40064

SEQ ID NO: 205877 - RNA, 1707 nt, Artificial Sequence
  derived and/or modified CDS sequence (opt5) from hemagglutinin__InfluenzaA__BAK23398
auggagaagaucgugcugcuccuggccauugucagccuuguuaaauccgaccagaucugcauuggcuaccacgcuaacaauucuaccgaacaaguggauacaaucauggagaagaacgugacggucacccaugcccaggacauucuggaaaagacacacaaugggaagcucugugaucuggacggagugaaaccccuuauccugagagauugcagcguugcgggcuggcuccuggggaacccuaugugugacgaguuccugaaugugccggaaugguccuauaucgucgagaagauuaaccccgugaaugaucucugcuacccuggaaacuuuaaugacuaugaggaacugaagcaucuucugucucggaucaaccacuucgagaaaauucagaucuuucccaagagcuccuggucugaucaugaagcuagcuccggcguuagcucugccuguccuuaccaggggcgcuccagcuucuuuagaaauguggucuggcucgugaaaaaggacaacgccuaucccaccauuaaaaagucuuacaauaacacaaaucaagaggaucugcuuauccuguggggcauucaccacccuaacgacgcugccgagcagacccggcucuaucagaacccgacaaccuacaucuccgugggaacgagcacccugaaucagcgccugguccccaagaucgcuacaagaucuaaaguuaacggccaauccgggcggauugaguucuuuuggaccauccucaagagcaaugaugugauuaacuucgaauccaauggaaacuuuaucgccccugaaaaugcguacaaaauugugaagaaaggcgacucuacaaucaugaaaagcgagcuggaauaugggaacugcaauaccaaaugucagacgcccaucggagccauuaacuccagcaugccuuuccauaauauccacccccuuacaauuggcgagugcccgaaguacgucaagucuaaccgccuggugcucgcuaccgggcugagaaauuccccucggggagagcgcagacggaaaaagcgcggccuuuuuggcgccaucgcuggguucauugaaggaggcuggcaggggaugguugacggaugguauggcuaccaucacagcaacgagcaggggucuggauaugccgcggauaaagaaagcacacaaaaggccaucgacggcgugaccaauaaagucaacuccaucauugauaagaugaacacccaguuugaggcugugggcagagaguucaauaaccuggaacggcgcaucgagaaucucaacaagaaaauggaagacggguuccuggauguuuggacauacaaugccgagcugcucgugcugauggaaaacgagagaacgcuugacuuucacgauucuaaugucaagaaccuguaugacaaagugcggcuccagcugagagauaaugcuaaggaacuuggaaacggcuguuucgaguuuuaccaucgcugcgacaaugaguguauggaaagcgucaaaaacgggaccuacgauuauccccaauacuccgaggaagcccggcugaagagagaggagauuagcggagugaagcucgaaucuaucggcacauaucagauucuguccaucuacagcaccguugccucuucccuggcucucgcgauuaugauggccgggcuguuccuuuggaugugcagcaauggcucccugcagugccgcaucuguaucuga

SEQ ID NO: 205878 - RNA, 1707 nt, Artificial Sequence
  derived and/or modified CDS sequence (opt5) from hemagglutinin__InfluenzaA__BAK23400
auggagaagaucgugcugcuccuggccauugucagccuuguuaaauccgaccagaucugcauuggcuaccacgcuaacaauucuaccgaacaaguggauacaaucauggagaagaacgugacggucacccaugcccaggacauucuggaaaagacacacaaugggaagcucugugaucugaacggagugaaaccccuuauccugagagacugcagcguugcgggcuggcuccuggggaauccuaugugugaugaguuccugaacgugccggaaugguccuauaucgucgagaagauuaaucccgcuaacgaccucugcuacccuggagauuuuaaugacuaugaggaacugaagcaucuucugucucggaucaaccacuucgagaaaauucagaucauucccaagagcuccuggucugaucaugaagccagcuccggcgugagcucugccuguccuuaccaggggcgcuccagcuuuuucagaaauguuguguggcucaucaaaaaggacaacgcuuaucccaccauuaaacggucuuacaauaacacaaaucaagaggaucugcuuguccuguggggaauccaccacccuaacgacgccgcugagcagacccgccucuaucauaacccgacaaccuacaucuccgugggcacgagcacccugaaucagagacuggugcccaagauugccacacggucuaaggucaacggccaguccgggcgcauggaauuuuucuggaccauccucaaaccuaaugaugcgauuaacuuugagagcaauggaaacuucaucgcccccgaaaaugcuuacaagauuguuaaaaagggcgacuccacaaucaugaaaucugagcuggaauaugggaacugcaauaccaagugucaaacgccuaucggagccauuaacagcuccaugcccuuucacaauauccauccgcuuacaauuggcgagugcccuaaauacgugaaaagcucuagacuggugcucgcuaccgggcugcggaacagcccccagggaaagucccgccggaaaaagagaggccuuuucggcgccaucgcgggguuuauugagggaggcuggcaggggauggucgacggaugguauggcuaccaccacucuaaugaacaggggagcggauaugccgcugauaaagaguccacacaacgcgccaucgacggcgugaccaacaagguuaauucuaucauugauaaaaugaacacccaguucgaagcugugggcagagaguuuaacaaucuggaacggcgcaucgagaaccucaauaagaagauggaggacggguuccuggaugucuggacauacaacgccgaacugcucgugcugauggagaaugaaagaacgcuugacuuccaugauagcaacguuaaaaaucuguaugacaaggugcggcuccagcugagagauaacgccaaagagcuuggaaauggcuguuuugaguucuaccaccgcugcgacaacgaauguauggaguccguccggaaugggaccuacgauuauccucaauacagcgaagaggcuagacugaagcgcgaagagauuucuggagugaaacucgaguccaucggcauuuaucagauccugagcauuuacucuacagucgcguccagccuggcccucgcuaucaugguggccgggcuguuucuuuggaugugcuccaacggcucucugcagugccggaucuguauuuga

SEQ ID NO: 205879 - RNA, 1707 nt, Artificial Sequence
  derived and/or modified CDS sequence (opt5) from hemagglutinin__InfluenzaA__BAK23401
auggagaagaucgugcugcuccuggccauugucagccuuguuaaauccgaccagaucugcauuggcuaccacgcuaacaauucuaccgaacaaguggauacaaucauggagaagaacgugacggucacccaugcccaggacauucuggagaaaacacacaaugggaagcucugugaucuggacggagugaaaccccuuauccugagagauugcagcguugcgggcuggcuccuggggaacccuaugugugacgaguuccugaauguguccgaauggucuuauaucgucgagaagauuaacccggcuaaugaucucugcuaccccggaaacuuuaauaacuaugaggaacugaagcaucuucugagccggaucaaucgcuucgagaaaauucagaucauuccuaaguccucuuggcccgaccacgaagccagccucggcguguccagcgccuguccuuaccaagggggacccucuuuuuauagaaacguuguguggcugaucaaaaagaauaacaccuacccuauuaucaaaaaguccuaucauaauacaaaccaggaggaucuucugguccucuggggcauccaccacccgaacgacgaggaagaacagacccggauuuacaagaaucccacaaccuacaucagcgugggcacgucuacccugaaccagcgccuggugccuaaaauugcuacaagauccaaggucaaugggcagagcggacggguugaguucuuuuggaccauccucaaaucuaacgauacaauuaauuucgaauccaacggcaauuuuaucgcccccgaaaacgcuuauaagaucgugaaaaagggggacagcaccauuaugaaauccgagcuggaguacggaaauugcaacacgaagugucaaacaccuaucggcgccauuaauucuagcaugcccuuccauaacauccacccgcuuaccauuggggaaugcccuaaguaugugaaauccaaucgccugguccucgcgacaggacugagaaacagcccccagggcgagcggcgcagaaagaaacggggccuuuuuggggccaucgcuggauucaucgaaggcggguggcagggaaugguggauggcugguacggguaucaucacucuaaugagcagggauccggcuacgccgcugacaaggaaagcacccaaaaagccauugacggcguuaccaacaaggugaacucuaucauugauaagaugaauauccaguuugaggcggucgggcgcgaguucaacaaucuggaaagacggauugagaaccucaauaaaaagauggaagacggauuucuggauguguggacauauaacgccgagcugcucguucugauggaaaaugagcgcacgcuugacuuccacgauagcaacgugaaaaaucuguacgacaaggucagacuccagcugcgggauaacgcuaaagagcuuggcaauggguguuucgaauuuuaccauagaugcgacaacgaguguauggaauccgugcgcaauggaaccuaugauuacccucaauauucugaggaggcccggcugaagagagaagagaucagcggcgucaagcucgaauccauugggacauaccagauccugagcaucuauucuaccguggcuuccagccuggcccucgccauuaugguugcuggccuguuccuuuggaugugcucuaacggaucccugcagugccgcaucuguauuuga

SEQ ID NO: 205880 - RNA, 1707 nt, Artificial Sequence
  derived and/or modified CDS sequence (opt5) from hemagglutinin__InfluenzaA__BAK23402
auggagaagaucgugcugcuccuggccauugucagccuuguuaaauccgaccagaucugcauuggcuaccacgcuaacaauucuaccgaacaaguggauacaaucauggagaagaacgugacggucacccaugcccaggacauucuggaaaagacacacaaugggaaacucugugaucuggacggagugaaaccccuuauccugagagauugcagcguugcgggcuggcuccuggggaacccuaugugugacgaguuccugaaugugccggaaugguccuauaucgucgagaagauuaaccccgcuaaugaucucugcuacccuggaaacuuuaaugacuaugaggaacugaagcaucuucugucucggaucaaccacuucgagaaaauucagaucauucccaagagcuccuggucuaaucaugaagccagcuccggcgugagcucugccuguccuuaccaggggcgcuccagcuuuuucagaaacguuguguggcucaucaaaaaggauaaugcuuaucccaccauuaaaaucucuuacaacaauacaaaccaagaggaccugcuuguccuguggggaauccaccacccuaacgaugccgcugagcagacccggcucuaucagaauccgacaaccuacauuuccgugggcacgagcacccugaaccagcgccuggugcccaagaucgccacaagaucuaaggucaauggccaauccgggcggauggaauuuuucuggaccauucucaaaagcaacgacgcgaucaauuuugaguccaacggaaauuucauugccccugaaaacgcuuacaagaucguuaaaaagggcgauucuacaaucaugaaaagcgagcuggaauaugggaauugcaacaccaagugucagacgcccauuggagccaucaauuccagcaugccuuuucauaacacacacccccuuaccauuggcgagugcccgaaauacgugaagucuaaucgccuggugcucgcuacagggcugagaaacuccccucauggagagcggcgcagaaagaaacggggccuuuucggcgccaucgcgggguuuauugaaggaggcuggcaggggauggucgacggaugguauggcuaccaccacagcaaugagcaggggucuggauaugccgcugacaaggaaagcacccaaaaagccaucgauggcgugaccaacaagguuaacuccaucauugacaaaaugaauacacaguucgaggcugugggccgcgaauuuaacaaucuggagagacggaucgagaaccucaauaagaagauggaagauggguuccuggacgucuggacguacaacgccgagcugcucgugcugauggaaaaugagcgcacccuugauuuccaugacucuaacguuaaaaaucuguaugauaaggugagacuccagcugcgggacaacgccaaagaacuuggaaauggcuguuuugaguucuaccacagaugcgauaacgaguguauggaaagcguccgcaaugggacauacgacuauccccaauacuccgaggaagcucggcugaagagagaggagauuagcggagugaaacucgaaucuaucggcaccuaucagauucuguccaucuacagcacagucgcgucuucccuggcccucgcuauuaugguggccgggcuguuucuuuggaugugcagcaacggcucccugcagugccgcaucuguaucuga

SEQ ID NO: 205881 - RNA, 1707 nt, Artificial Sequence
  derived and/or modified CDS sequence (opt5) from hemagglutinin__InfluenzaA__BAK23403
auggagaagaucgugcugcuccuggccauugucagccuuguuaaauccgaccagaucugcauuggcuaccacgcuaacaauucuaccgaacaaguggauacaaucauggagaagaacgugacggucacccaugcccaggacauucuggaaaagacacacaaugggaaacucugugaucuggacggagugaaaccccuuauccugagagauugcagcguugcgggcuggcuccuggggaacccuaugugugacgaguuccugaaugugccggaaugguccuauaucgucgagaagauuaaccccgcuaaugaucucugcuacccuggaaacuuuaaugacuaugaggaacugaagcaucuucugucucggaucaaccacuucgagaaaauucagaucauucccaagagcuccuggucuaaucaugaagccagcuccggcgugagcucugccuguccuuaccaggggcgcuccagcuuuuucagaaacguuguguggcucaucaaaaaggauaaugcuuaucccaccauuaaaaucucuuacaacaauacaaaccaagaggaccugcuuguccuguggggaauccaccacccuaacgaugccgcugagcagacccggcucuaucagaauccgacaaccuacauuuccgugggcacgagcacccugaaccagcgccuggugcccaagaucgccacaagaucuaaggucaauggccaauccgggcggauggaauuuuucuggaccauucucaaaagcaacgacgcgaucaauuuugaguccaacggaaauuucauugccccugaaaacgcuuacaagaucguuaaaaagggcgauucuacaaucaugaaaagcgagcuggaauaugggaauugcaacaccaagugucagacgcccauuggagccaucaauuccagcaugccuuuucauaacauucacccccuuacaaucggcgagugcccgaaauacgugaagucuaaucgccuggugcucgcuaccgggcugagaaacuccccucagggagagcggcgcagaaagaaacggggccuuuucggcgccauugcgggguuuaucgaaggaggcuggcaggggauggucgacggaugguauggcuaccaucacagcaaugagcaagggucuggauaugccgcugacaaggaaagcacacagaaagccaucgauggcgugaccaacaagguuaacuccauuaucgacaaaaugaauacccaguucgaggcugugggccgcgaauuuaacaaucuggagagacggauugagaaccucaauaagaagauggaagauggguuccuggacgucuggacauacaacgccgagcugcucgugcugauggaaaaugagcgcacgcuugauuuccacgacucuaacguuaaaaaucuguaugauaaggugagacuccaacugcgggacaacgccaaagaacuuggaaauggcuguuuugaguucuaccauagaugcgauaacgaguguauggaaagcguccgcaaugggaccuacgacuauccccaguacuccgaggaagcucggcugaagagagaggagaucagcggagugaaacucgaaucuauuggcacauaucagauccuguccauuuacagcaccgucgcgucuucccuggcccucgcuaucaugguggccgggcuguuucuuuggaugugcagcaacggcucccugcagugccgcaucuguauuuga

SEQ ID NO: 205882 - RNA, 1707 nt, Artificial Sequence
  derived and/or modified CDS sequence (opt5) from hemagglutinin__InfluenzaA__BAK23404
auggagaagaucgugcugcuccuggccauugucagccuuguuaaauccgaccagaucugcauuggcuaccacgcuaacaauucuaccgaacaaguggauacaaucauggagaagaacgugacggucacccaugcccaggacauucuggaaaagacacacaaugggaaacucugugaucuggacggagugaaaccccuuauccugagagauugcagcguugcgggcuggcuccuggggaacccuaugugugacgaguuccugaaugugccggaaugguccuauaucgucgagaagauuaaccccgcuaaugaucucugcuacccuggaaacuuuaaugacuaugaggaacugaagcaucuucugucucggaucaaccacuucgagaaaauucagaucauucccaagagcuccuggucugaucaugaagccagcuccggcgugagcucugccuguccuuaccaggggcgcuccagcuuuuucagaaauguuguguggcucaucaaaaaggacaacgcuuaucccaccauuaaacggucuuacaauaacacaaaucaagaggaucugcuuguccuguggggaauccaccacccuaacgacgccgcugagcagacccgccucuaucagaacccgacaaccuacaucuccgugggcacgagcacccugaaucagagacuggugcccaagauugccacacggucuaaggucaacggccaauccgggcgcauggaauuuuucuggaccauccucaaaagcaaugaugcgauuaacuuugaguccaauggaaacuucaucgccccugaaaaugcuuacaagauuguuaaaaagggcgacucuacaaucaugaaaagcgagcuggaauaugggaacugcaauaccaagugucagacgcccaucggagccauuaacuccagcaugccuuuucauaauauccacccccuuacaauuggcgagugcccgaaauacgugaagucuaacagacuggugcucgcuaccgggcugcgcaauuccccucagggagagcggagacggaagaaacgcggccuuuucggcgccaucgcgggguuuauugaaggaggcuggcaggggauggucgacggaugguauggcuaccaucacagcaacgagcaagggucuggauaugccgcugauaaggaaagcacacagaaagccaucgacggcgugaccaauaagguuaacuccaucauugauaaaaugaacacccaguucgaggcugugggcagagaauuuaauaaccuggagcggcgcaucgagaaucucaacaagaagauggaagacggguuccuggaugucuggacauacaaugccgagcugcucgugcugauggaaaacgagagaacgcuugacuuccacgauucuaauguuaaaaaccuguaugacaaggugcggcuccaacugagagauaaugccaaagaacuuggaaacggcuguuuugaguucuaccaucgcugcgacaaugaguguauggaaagcguccggaacgggaccuacgauuauccccaguacuccgaggaagcuagacugaagcgcgaggagauuagcggagugaaacucgaaucuaucggcacauaucagauucuguccaucuacagcaccgucgcgucuucccuggcccucgcuauuaugguggccgggcuguuucuuuggaugugcagcaauggcucccugcagugccggaucuguaucuga

SEQ ID NO: 205883 - RNA, 1707 nt, Artificial Sequence; identical to SEQ ID NO: 205882
  derived and/or modified CDS sequence (opt5) from hemagglutinin__InfluenzaA__BAK23405

SEQ ID NO: 205884 - RNA, 1707 nt, Artificial Sequence
  derived and/or modified CDS sequence (opt5) from hemagglutinin__InfluenzaA__BAK23406
auggagaagaucgugcugcuccuggccauugucagccuuguuaaauccgaccagaucugcauuggcuaccacgcuaacaauucuaccgaacaaguggauacaaucauggagaagaacgugacggucacccaugcccaggacauucuggaaaagacacacaaugggaagcucugugaucuggacggagugaaaccccuuauccugagagauugcagcguugcgggcuggcuccuggggaacccuaugugugacgaguuccugaaugugccggaaugguccuauaucgucgagaagauuaaccccgugaaugaucucugcuacccuggaaacuuuaaugacuaugaggaacugaagcaucuucugucucggaucaaccacuucgagaaaauucagaucuuucccaagagcuccuggucugaucaugaagcuagcuccggcguuagcucugccuguccuuaccaggggcgcuccagcuucuuuagaaauguggucuggcucgugaaaaaggacaacgccuaucccaccauuaaaaagucuuacaauaacacaaaucaagaggaucugcuuauccuguggggcauucaccacccuaacgacgcugccgagcagacccggcucuaucagaacccgacaaccuacaucuccgugggaacgagcacccugaaucagcgccugguccccaagaucgcuacaagaucuaaaguuaacggccaauccgggcggauugaguucuuuuggaccauccucaagagcaaugaugugauuaacuucgaauccaauggaaacuuuaucgccccugaaaaugcguacaaaauugugaagaaaggcgacucuacaaucaugaaaagcgagcuggaauaugggaacugcaauaccaaaugucagacgcccaucggagccauuaacuccagcaugccuuuccauaauauccacccccuuacaauuggcgagugcccgaaguacgucaagucuaaccgccuggugcucgcuaccgggcugagaaauuccccucagggagagcggcgccggaaaaagagaggccuuuuuggcgccaucgcuggguucauugaaggaggcuggcaggggaugguugacggaugguauggcuaccaucacagcaacgagcaagggucuggauaugccgcggauaaagaaagcacacagaaggccaucgacggcgugaccaauaaagucaacuccaucauugauaagaugaacacccaguuugaggcugugggccgcgaguucaauaaccuggaaagacggaucgagaaucucaacaagaaaauggaagacggguuccuggauguuuggacauacaaugccgagcugcucgugcugauggaaaacgagcgcacgcuugacuuucacgauucuaaugucaagaaccuguaugacaaagugagacuccaacugcgggauaaugcuaaggaacuuggaaacggcuguuucgaguuuuaccauagaugcgacaaugaguguauggaaagcgucaaaaacgggaccuacgauuauccccaguacuccgaggaagcccgccugaagcgggaggagauuagcggagugaagcucgaaucuaucggcacauaucagauucuguccaucuacagcaccguugccucuucccuggcucucgcgauuaugauggccgggcuguuccuuuggaugugcagcaauggcucccugcagugcagaaucuguaucuga

SEQ ID NO: 205885 - RNA, 1707 nt, Artificial Sequence
  derived and/or modified CDS sequence (opt5) from hemagglutinin__InfluenzaA__BAK23407
auggagaagaucgugcugcuccuggccauugucagccuuguuaaauccggccagaucugcauuggguaccacgcuaacaauucuaccgaacaaguggacacaaucauggagaagaacgugacggucacccaugcccaggauauucuggaaaagacacacaauggaaagcucugugaccuggauggcgugaaaccccuuauccugagagacugcagcguugcgggguggcuccugggaaacccuaugugugaugaguuccugaauguguccgaauggucuuauaucgucgagaagauuaacccggcuaaugaccucugcuaccccggcaacuuuaauaacuaugaggaacugaagcaucuucugagccggaucaaucgcuucgagaaaauucagaucauuccuaaguccucuuggcccgaucacgaagccagccucgggguguccgccgcuuguccuuaccagggaggccccagcuuuuauagaaacguuguguggcugaucaaaaagaauaacaccuacccuacaauugagaaaucuuaucauaauaccaaccaagaggaccuucugguccucuggggcauccaccacccgaacgaugaagccgagcagacacggaucuacaagaaucccaccacguacauuuccguggggaccagcacacugaaccagcgccuggugccuaagaucgcuaccagaucuaaagucaauggacaguccggccggguugaguucuuuuggacaauucucaagagcaacgacaccaucaauuucgaaucuaacgggaauuuuauugcccccgaaaacgcguauaaaaucgugaagaaaggagauuccacgaucaugaaguccgagcuggaguacggcaauugcaacacacgcugucaaaccccuauuggggccaucaauuccucuaugcccuuccauaacauucacccgcuuacaaucggagaaugcccuaaauaugugaaaagcaauagacugguccucgcuaccggccugcggaacagcccccagggcgagcgcagacggaagaaacgcgggcuuuuuggagccauugcuggcuucaucgaagggggauggcagggcaugguggacgggugguacggauaucaucacagcaaugagcagggcucuggcuacgccgcggauaaggaauccacccaaaaagccaucgacgggguuacaaacaaggugaacagcauuaucgacaaaaugaauacgcaguuugaggcugucggaagagaguucaacaaucuggaacggcgcauugagaaccucaauaagaagauggaagauggcuuucuggacguguggaccuauaacgccgagcugcucguucugauggaaaaugagagaacacuugauuuccacgacucuaacgugaaaaaucuguacgauaagguccggcuccagcugagagacaacgcuaaagagcuugggaauggauguuucgaauuuuaccaucgcugcgauaacgaguguauggaaagcgugcggaauggcaccuaugacuacccucaauauuccgaggaggccagacugaagcgcgaagagaucucuggggucaaacucgaaagcauuggcacauaccagauccuguccauuuauagcaccguggccucuucccuggcucucgcgaucaugguugccggacuguuccuuuggaugugcagcaacggcucucugcagugccggaucuguauuuga

SEQ ID NO: 205886 - RNA, 1707 nt, Artificial Sequence
  derived and/or modified CDS sequence (opt5) from hemagglutinin__InfluenzaA__BAK23408
auggagaagaucgugcugcuccuggccauugucagccuuguuaaauccgaccagaucugcauuggcuaccacgcuaacaauucuaccgaacaaguggauacaaucauggagaagaacgugacggucacccaugcccaggacauucuggagaaaacacacaaugggaagcucugugaucuggacggagugaaaccccuuauccugagagauugcagcguugcgggcuggcuccuggggaacccuaugugugacgaguucccgaauguguccgaauggucuuauaucgucgagaagauuaaccccgcuaaugaucugugcuacccuggaaacuuuaauaacuaugaggaacucaagcaucugcuuagccggaucaaucgcuucgagaaaauucagaucauucccaaguccucuuggccugaccacgaagccagccugggcguguccagcgccugucaguaccaagggggacccucuuuuuauagaaacguuguguggcucaucaaaaaggauaaugcuuacccuaccauuaaaaaguccuaucauaacacaaauaaggaggaccugcuuguccuguggggcauccaccacccgaacaacgaggaagaacagaccaaacucuaccagaaucccacaaccuacaucagcgugggcacgucuacccugaaccagcggcuggugccuaagauugccacacgcuccaaagucaaugggcaaagcggaagaguugaguucuuuuggaccauccucaagucuaacgaugcuauuaauuucgaauccaacggcaauuuuaucgcccccgaaaacgcguauaaaauugugaagaaaggggacagcacaaucaugaaguccgagcuggaguacggaaauuauaacaccaagugccagacgccuaucggcgccauuaauucuagcaugcccuuccauaacauccacccgcuuacaauuggggaauguccuaaauacgugaaguccaaucggcugguccucgcuaccggacugcgcaacagcccccagggcgagagacggcgcaaaaagagaggccuuuuuggggccaucgcuggauucauugaaggcggguggcagggaaugguggauggcugguauggguaccaucacucuaaugagcaaggauccggcuaugccgcggacaaagaaagcacacagaaggccaucgacggcguuaccaacaaggugaacucuaucauugauaaaaugaauacccaguuugaggcugucgggaaggaguucaacaaucuggaacggcgcaucgagaaccucaauaaaaagauggaagacggauuucuggauguguggacauacaacgccgagcugcucguucugauggaaaaugagagaacgcuugacuuccacgauagcaacgugaaaaaucuguacgacaagguccggcuccaacugcgcgauaacgcuaaggagcuuggcaaugggugcuucgaauuuuaucauagaugugacaacgagugcauggaauccgugcggaauggaaccuacgauuauccucaguacucugaggaggccagacugaaacgcgaagagauuagcggcgucaagcucgaauccaucgggacauaucagauucugagcaucuacucuaccguggccuccagccuggcucucgcgauuaugguugccggccuguuccuuuggauguguucuaacggaucccugcagugccggaucugcaucuga

SEQ ID NO: 205887 - RNA, 1707 nt, Artificial Sequence
  derived and/or modified CDS sequence (opt5) from hemagglutinin__InfluenzaA__BAK23411
auggagaagaucgugcugcuccuggccauugucagccuuguuaaauccgaccagaucugcauuggcuaccacgcuaacaauucuaccgaacaaguggauacaaucauggagaagaacgugacggucacccaugcccaggacauucuggagaaaacacacaaugggaagcucugugaucuggacggagugaaaccccuuauccugagagauugcagcguugcgggcuggcuccuggggaacccuaugugugacgaguuccugaauguguccgaauggucuuauaucgucgagaagauuaacccggcuaaugaucucugcuaccccggaaacuuuaauaacuaugaggaacugaagcaucuucugagccggaucaaucgcuucgagaaaauucagaucauuccuaaguccucuuggcccgaccacgaagccagccucggcguguccagcgccugucaguaccaagggggaccuucuuuuuauagaaacguuguguggcugaucaaaaaggauaaugcuuaccccaccauuaaaaaguccuaucauaacacaaauaaggaggaccuucugguccucuggggcauccaccacccuaacaacgaggaagaacagaccaaacuguaccagaauccgacaaccuacaucagcgugggcacgucuacccugaaccagcggcucgugcccaagauugccacacgcuccaaagucaaugggcaaagcggaagaguugaguucuuuuggaccauccugaagucuaacgaugcuauuaauuucgaauccaacggcaauuuuaucgccccugaaaacgcguauaaaauugugaagaaaggggacagcacaaucaugaaguccgagcuugaguacggaaauugcaacaccaagugucagacgcccaucggcgccauuaauucuagcaugccuuuccauaacauccacccccugacaauuggggaaugcccgaaauaugugaaguccaaucggcucguccuggcuaccggacuucgcaacagcccucagggcgagagacggcgcaaaaagagaggccuguuuggggccaucgcuggauucauugaaggcggguggcagggaaugguggauggcugguacggguaucaucacucuaaugagcaaggauccggcuacgccgcggacaaagaaagcacacagaaggccaucgacggcguuaccaacaaggugaacucuaucauugauaaaaugaauacccaguuugaggcugucgggaaggaguucaacaaucucgaacggcgcaucgagaaccugaauaaaaagauggaagacggauuucuggauguguggacauauaacgccgagcuccugguucuuauggaaaaugagagaacgcuggacuuccacgauagcaacgugaaaaaucucuacgacaagguccggcugcaacuucgcgauaacgcuaaggagcugggcaauggguguuucgaauuuuaccauagaugcgacaacgaguguauggaauccgugcggaauggaaccuaugauuacccccaguauucugaggaggccagacucaaacgcgaagagauuagcggcgucaagcuggaauccaucgggacauaccagauucugagcaucuauucuaccguggccuccagccucgcucuggcgauuaugguugccggccuuuuccuguggaugugcucuaacggaucccuccagugccggaucuguaucuga

SEQ ID NO: 205888 - RNA, 1707 nt, Artificial Sequence
  derived and/or modified CDS sequence (opt5) from hemagglutinin__InfluenzaA__BAK23412
auggagaagaucgugcugcuccuggccauugucagccuuguuaaauccgaccagaucugcauuggcuaccacgcuaacaauucuaccgaacaaguggauacaaucauggagaagaacgugacggucacccaugcccaggacauucuggagaaaacacacaaggggaaacucugugaucuggacggagugaagccccuuauccugagagauugcagcguugcgggcuggcuccuggggaauccuaugugugacgaguuccugaacguguccgaauggucuuauaucgucgagaagauuaauccggcuaacgaucucugcuaccccggaaauuuuaacaauuaugaggaacugaaacaucuucugagccggaucaaccgcuucgagaagauucagaucauuccuaaauccucuuggcccgaccacgaagccagccucggcguguccagcgccugucaguaccaagggggaccuucuuuuuauagaaauguuguguggcugaucaagaaagauaacaccuaccccacaauuaagaaguccuaucauaauaccaacaaagaggaccuucugguccucuggggcauccaccacccuaauaacgaggaagaacagacaaagcuguaccagaacccgaccacguacaucagcgugggcaccucuacacugaaucagcggcucgugcccaaaauugcuacccgcuccaaggucaacgggcaaagcggaagaguugaguucuuuuggacaauccugaaaucuaaugaugccauuaacuucgaauccaauggcaacuuuaucgcuccugaaaaugccuauaagauugugaaaaagggggacagcaccaucaugaaguccgagcuugaguacggaaacugcaauacgaaaugucagacacccaucggcgcgauuaacucuagcaugccuuuccauaauauccacccccugaccauuggggaaugcccgaaguaugugaaauccaaccggcucguccuggccacaggacuucgcaauagcccucagggcgagagacggcgcaagaaaagaggccuguuuggggcuaucgccggauucauugaaggcggguggcagggaaugguggauggcugguacggguaucaucacucuaacgagcaaggauccggcuacgcugccgacaaggaaagcacccagaaggcgaucgacggcguuaccaauaaagugaacucuaucauugauaagaugaacacacaguuugaggccgucgggaaagaguucaauaaccucgaacggcgcaucgagaaucugaacaagaaaauggaagacggauuucuggauguguggacguauaaugcugagcuccugguucuuauggaaaacgagagaacccuggacuuccacgauagcaaugugaagaaccucuacgacaagguccggcugcaacuucgcgauaaugccaaagagcugggcaacggguguuucgaauuuuaccauagaugcgacaaugaguguauggaauccgugcggaacggaacauaugauuacccccaguauucugaggaggcuagacucaagcgcgaagagauuagcggcgucaaacuggaauccaccgggacauaccagauccugagcauuuauucuaccguggccuccagccucgcccuggcuaucaugguugcgggccuuuuccuguggaugugcucuaauggaucccuccagugccggauuuguaucuga

SEQ ID NO: 205889 - RNA, 1707 nt, Artificial Sequence
  derived and/or modified CDS sequence (opt5) from hemagglutinin__InfluenzaA__BAK23413
auggagaagaucgugcugcuccuggccauugucagccuuguuaaauccgaccagaucugcauuggcuaccacgcuaacaauucuaccgaacaaguggauacaaucauggagaagaacgugacggucacccaugcccaggacauucuggagaaaacacacaaugggaagcucugugaucuggacggagugaaaccccuuauccugagagauugcagcguugcgggcuggcuccuggggaacccuaugugugacgaguuccugaauguguccgaauggucuuauaucgucgagaagauuaacccggcuaaugaucucugcuaccccggaaacuuuaauaacuaugaggaacugaagcaucuucugagccggaucaaucgcuucgagaaaauucagaucauuccuaaguccucuuggcccgaccacgaagccagccucggcguguccagcgccugucaguaccaagggggaccuucuuuuuauagaaacguuguguggcugaucaaaaaggauaauaccuaccccacaauuaaaaaguccuaucauaacaccaauaaggaggaccuucugguccucuggggcauccaccacccuaacaacgaggaagaacagacaaaacuguaccagaauccgaccacguacaucagcgugggcaccucuacacugaaccagcggcucgugcccaagauugcuacccgcuccaaagucaaugggcaaagcggaagaguugaguucuuuuggacaauccugaagucuaacgaugccauuaauuucgaauccaacggcaauuuuaucgcuccugaaaacgccuauaaaauugugaagaaaggggacagcaccaucaugaaguccgagcuugaguacggaaauugcaacacgaagugucagacacccaucggcgcgauuaauucuagcaugccuuuccauaacauccacccccugaccauuggggaaugcccgaaauaugugaaguccaaucggcucguccuggccacaggacuucgcaacagcccucagggcgagagacggcgcaaaaagagaggccuguuuggggcuaucgccggauucauugaaggcggguggcagggaaugguggauggcugguacggguaucaucacucuaaugagcaaggauccggcuacgcugccgacaaagaaagcacccagaaggcgaucgacggcguuaccaacaaggugaacucuaucauugauaaaaugaauacacaguuugaggccgucgggaaggaguucaacaaucucgaacggcgcaucgagaaccugaauaaaaagauggaagacggauuucuggauguguggacguauaacgcugagcuccugguucuuauggaaaaugagagaacccuggacuuccacgauagcaacgugaaaaaucucuacgacaagguccggcugcaacuucgcgauaacgccaaggagcugggcaauggguguuucgaauuuuaccauagaugcgacaacgaguguauggaauccgugcggaauggaacauaugauuacccccaguauucugaggaggcuagacucaaacgcgaagagauuagcggcgucaagcuggaauccaucgggaccuaccagauucugagcaucuauucuacaguggccuccagccucgcccuggcuauuaugguugcgggccuuuuccuguggaugugcucuaacggaucccuccagugccggaucuguaucuga

SEQ ID NO: 205890 - RNA, 1707 nt, Artificial Sequence; identical to SEQ ID NO: 205887
  derived and/or modified CDS sequence (opt5) from hemagglutinin__InfluenzaA__BAK23414

SEQ ID NO: 205891 - RNA, 1698 nt, Artificial Sequence
  derived and/or modified CDS sequence (opt5) from hemagglutinin__InfluenzaA__BAM65746
auggaggugaagcugcucguccugcuuugcaccuucacagccacguacgcugacaccaucuguauuggcuaucacgccaacaauagcacagauaccguugacacacugcccgaaaagaacgugaccgugacacauuccgucaaucuccuggaggauacccacaacgggaaacuuugccugcucaaaggaaucgcgccucugcagcugggcaauuguucuguggcuggguggauucucggaaacccggaaugcgagcugcuuaucagcagagaauccuggucuuacauuguugagaagcccaauccugagaacggcaucuguuaucccgggcauuuugccgacuacgaagaacugcgggaacaacucagcuccgugucuagcuucgagcgcuuugagaucuucccuaaagaauccagcuggcccaaucacacggccaccggagucucugcuuccugcagccauaacggcaagucuuccuuuuauaagaaucugcuuuggcugacagugaaaaacggccucuacccuaaucugagcaagucuuaugccaacaauaaagagaaggaaguucuggugcucuggggaguccaccacccgaccaacauuggggaucagagagcucuguaccauacagagaacgccuacguguccguggucagcucccacuauucucggcgcuucacccccgaaaucgcgaaaagaccuaagguucgggaccaggagggccgcauuaauuacuauuggacgcuucuggagcccggggauacaaucauuuuugaagccaacggaaaucucaucgcuccuagauacgccuucgcucugagccggggcuuuggguccggaauuaucaagagcaacgcccccauggacgaguguaaugcgaaaugccagaccccgcaaggcgccaucaacucuucccuuccuuuccagaaugugcaucccgugacaauuggcgaauguccuaaguauguccgcagcaccaaacugagaauggugaccgggcuccggaacacacccucuauccagagccgcggacuguuuggcgcuauugccggguucaucgagggaggcuggacggggaugguugauggaugguacggcuaucaccaccagaaugaacaaggcuccggguacgcugccgaccagaagucuacccagaacgccauuaauggaaucacaaacaaagugaauagcgucaucgagaagaugaacacccaguuuacagcuguggauaaagaguucaauaagcuggaaagacggauggagaacuucaacaagaaaguugacgauggcuuuauugacaucuggaccuacaaugcggaacuccugauucuucuggagaacgaacgcacgcucgacuuccaugauuccaaugugaagaaccuguaugagaaagucaagagccaacuuaaaaauaacgccaaggagaucgggaauggaugcuuugaguucuaccacaaguguaacgacgagugcauggaaucugugaaaaauggcacauaugauuaccccaaguauuccgaggagagcaaacugaacagagaaaagauugacggggucaaacucgagucuaugggcguguaccagauccuggcuaucuauuccaccguugccagcuccauggugcugcucgucucucugggagccauuagcuuuuggaugugcuccaauggcucucuucagugucggaucugcauuuga

SEQ ID NO: 205892 - RNA, 1701 nt, Artificial Sequence; identical to SEQ ID NO: 204638
  derived and/or modified CDS sequence (opt5) from hemagglutinin__InfluenzaA__BAO79716

SEQ ID NO: 205893 - RNA, 1683 nt, Artificial Sequence
  derived and/or modified CDS sequence (opt5) from Hemagglutinin__InfluenzaA__CAB95856
auggagaccaucagccugauuacaauccuccugguggucacggccuccaacgcugacaagauuugcaucggccaccagucuaccaauagcacagaaaccguugauacacuuaccgagacaaacgugcccgugacccaugccaaagaacugcuccacacggagcauaaugggaugcugugugcgaccucccuuggacacccucugauucucgacacaugcaccaucgaaggccuggucuacgggaacccgucuugugaucugcuccugggaggcagagaguggagcuauaucguggagcgguccucugcuguuaaugggacaugcuaccccggaaacguggaaaaucuugaggaacugcgcacccucuucagcuccgccagcucuuaucaacggauucagaucuuuccugacacgacauggaacgucaccuacacaggcaccuccagagccuguagcggcucuuucuaucgcuccaugagauggcugacccagaagucuggguuuuaccccgugcaggaugcucaauauacaaauaaccggggaaaaucuauucuuuucguuuggggcauccaucacccucccacguacaccgagcagacaaaucuguacauucgcaacgacaccacaaccuccgugacgacagaggaucucaauagaaccuuuaagccugucaucgggccgcggccccuggugaacggacugcagggccgcauugacuauuacuggagcgugcucaaaccugggcagacccugagaguccgguccaauggaaaccuuaucgcccccugguauggccacguucugucuggcgggagccauggacgcauccucaagacagaucugaagggcgggaacugcguggugcaaugucagaccgaaaaaggaggccuuaauuccacacugccuuuccacaacauuagcaaguacgcuuuugggacgugccccaaauaugucagagugaauagccucaagcuggccguuggacugcggaacgugccggcgcgcuccagcagaggccucuucggcgccaucgcuggguuuauugagggaggcuggccugggcuggucgccggaugguacggcuuccagcauucuaaugaccagggggugggcauggcugccgaucgggacagcacccaaaaagcgaucgauaagauuacauccaagguuaacaauaucguggacaaaaugaacaagcaguaugaaaucauugaccacgaguuuucugaagucgagaccagacuuaauaugaucaacaauaaaauugaugaccagauccaagaugugugggccuacaacgcugagcugcucguccugcuugaaaaucagaagacacuggacgagcacgaugccaacgugaauaaccucuacaacaaaguuaagcgcgcucugggaagcaaugccauggaagacggcaaaggguguuucgagcuguaucauaagugcgaugaccaguguauggaaaccauucggaacggaacguacaauagacgcaaguaucgggaggaguccagacucgaacgccagaaaaucgagggcgugaagcuggaaagcgaggggaccuacaaaauccuuacaauuuauucuaccgucgccuccagccuggugcucgcuaugggauuugcggccuuccuguucugggcuaugucuaacggcuccugccggugcaauaucuguauuuga

SEQ ID NO: 205894 - RNA, 1683 nt, Artificial Sequence
  derived and/or modified CDS sequence (opt5) from Hemagglutinin__InfluenzaA__CAB95857
auggagaccaucagccugauuacaauccuccugguggucacggccuccaacgcugacaagauuugcaucggccaccagucuaccaauagcacagaaaccguugauacacuuaccgagacaaacgugcccgugacccaugccaaagaacugcuccacacggagcauaaugggaugcugugugcgaccucccuuggacacccucugauucucgacacaugcaccaucgaaggccuggucuacgggaacccgucuugugaucugcuccuggagggaagagaguggagcuauaucguggaacgguccucugcuguuaauggcacaugcuaccccgggaacguggagaaucuugaggaacugcgcacccucuucagcuccgccagcucuuaucaacggauucagaucuuuccugacacgacauggaacgucaccuacacaggaaccuccagagccuguagcggcucuuucuaucgcuccaugagauggcugacccagaaguccggcuuuuaccccgugcaggaugcucaauauacaaauaaccgggggaaaucuauucuuuucguuuggggaauccaucacccucccacguacaccgagcagacaaaucuguacauucgcaacgacaccacaaccuccgugacgacagaagaucucaauagaaccuuuaagccugucaucggcccgcggccccuggugaacgggcugcagggacgcauugacuauuacuggagcgugcucaaaccuggccagacccugagaguccgguccaaugggaaccuuaucgcccccugguauggacacguucugucuggcggcagccaugggcgcauccucaagacagaucugaaguccggaaacugcguggugcaaugucagaccgagaaaggcgggcuuaauagcacacugccuuuccacaacauuucuaaguacgcuuuuggaacgugccccaaauaugucagagugaauagccucaagcuggccguuggccugcggaacgugccggcgcgcagcucuagaggacucuucggggccaucgcuggcuuuauugaaggcggguggccuggacuggucgccggcugguacggguuccagcauagcaaugaccagggagugggcauggcugccgaucgggacuccacccaaaaagcgaucgauaagauuacaucuaagguuaacaauaucguggacaaaaugaacaagcaguaugagaucauugaccacgaauuuagcgaggucgagaccagacuuaauaugaucaacaauaaaauugaugaccagauccaagaugugugggccuacaacgcugaacugcucguccugcuugagaaucagaagacacuggacgaacacgaugccaacgugaauaaccucuacaacaaaguuaagcgcgcucugggguccaaugccauggaggacggcaaaggauguuucgaacuguaucauaagugcgaugaccaguguauggagaccauucggaacggcacguacaauagacgcaaguaucgggaggaaagcagacucgagcgccagaaaaucgaaggggugaagcuggagucugaaggagccuacaaaauccuuaccauuuauuccacagucgcuagcucucuggugcucgcgaugggcuuugccgcuuuccuguucugggccauguccaacgggagcugccggugcaauaucuguauuuga

SEQ ID NO: 205895 - RNA, 1707 nt, Artificial Sequence
  derived and/or modified CDS sequence (opt5) from hemagglutinin__InfluenzaA__CBW54815
auggagaagaucgugcugcuccuggccauugucagccuuguuaaauccgaccagaucugcauuggcuaccacgcuaacaauucuaccgaacaaguggauacaaucauggagaagaacgugacggucacccaugcccaggacauucuggaaaagacacacaaugggaagcucugugaucuggacggagugaaaccccuuauccugagagauugcagcguugcgggcuggcuccuggggaacccuaugugugacgaguucccgaauguguccgaauggucuuauaucgucgagaagaccaaccccgcuaaugaucugugcuacccuggaaacuuugacaauuaugaggaacucaagcaucugcuuagccggauuaaccgcuucgagaaaauccagauuauccccaaguccucuuggccugaucacgaagccagccugggcguguccagcgccugucccuaccaagggggaccuucuuuuuauagaaauguuguguggcucauuaaaaagaacaauacauacccgaccaucaaagaguccuaucauaacacaaaucaggaggaccugcuuguccuguggggcauucaccaccccaacgaugaagaggaacagacccggaucuacaagaacccuacgaccuacaucagcgugggcacaucuacccucaaucagcgccuggugcccaagauugcuacaagauccaaagucaacgggcagagcggacggguugaguucuuuuggaccauccugaagucuaaugacacgauuaacuucgaauccaauggcaacuuuaucgccccugagaaugcuuauaaaauugugaagaaaggggauagcacaaucaugaaguccgagcucgaauacggaaacugcucuaccaaaugucaaacacccaucggcgccauuaauagcuccaugccguuccauaacauccacccucugaccauuggggagugccccaaguaugugaaaagcaaucgccuuguccuggcgaccggacucagaaacucuccucagggcgaaggccggcgcaaaaagagagggcuguuuggagccaucgcuggcuucauugaagggggauggcagggcaugguggacgggugguacggauaucaucacuccaaugaacagggcagcggcuacgccgcugacaaagagucuacacaaaaggccaucgaugggguuacgaacaaagugaauagcaucauugacaagaugaacacccaguuugaggcggucggacgggaguucaacaaucuugagaagcgcaucgaaaaccugaauaaaaagauggaggauggcuuucucgacguguggacauauaacgccgaacugcugguucucauggagaaugagagaacccuggauuuccacgacuccaacgugaaaaaucuuuacgauaagguccggcugcagcuccgcgacaacgcuaaagaacuggggaauggauguuucgaguuuuaccauagaugcgauaacgaauguauggagucugugcggaauggcacauaugacuacccccaauauagcgaggaagccagacuuaagcgcgaggaaauuuccggggucaagcuggagagcaucggcaccuaccagauucucucuaucuauuccacgguggcuagcucucuggcccuggccauuaugguugcuggacucuuccuguggaugugcuccaacggcagccuucagugccggaucuguaucuga

SEQ ID NO: 205896 - RNA, 1707 nt, Artificial Sequence
  derived and/or modified CDS sequence (opt5) from hemagglutinin__InfluenzaA__CBW54817
auggagaagaucgugcugcuccuggccauugucagccuuguuaaauccgaccagaucugcauuggcuaccacgcuaacaauucuaccgaacaaguggauacaaucauggagaagaacgugacggucacccaugcccaggacauucuggaaaagacacacaaugggaaacucugugaucuggacggagugaaaccccuuauccugagagauugcagcguugcgggcuggcuccuggggaacccuaugugugacgaguucccgaauguguccgaauggucuuauaucgucgagaagauuaaccccgcuaaugaucugugcuacccuggaaacuuuaauaacuaugaggaacucaagcaucugcuuagccggaucaaucgcuucgagaaaauucagaucauucccaaguccucuuggccugaccacgaagccagccugggcguguccagcgccugucccuaccagagagggccuucuuuuuaucggaacguuguguggcucaucaaaaagaaugauaccuacccgacaauuaaagaguccuaucauaacaccaaucaagaggaccugcuuguccuguggggaauccaccaccccaacgaugaagaggaacagaagcgcaucuacaagaacccuacaaccuacauuagcgugggcacgucuacccucaaucagagacuggugcccaaaaucgcuacacgguccaaggucaacggccagagcgggcgcguugaguucuuuuggaccauucugaaaucuaaugacacaaucaacuucgaauccaauggaaacuuuauugccccugagaaugcuuauaagaucgugaaaaagggcgauagcaccaucaugaaauccgagcucgaauacgggaacugcucuacgaagugucaaacacccauuggagccaucaauaccagcaugccguuccauaacauucacccucugacaaucggcgagugccccaaguaugugaaauccaauagacuuguccuggcgaccgggcuccggaacagcccucagggagaaggccgcagaaagaaacggggccuguuuggggccauugcuggauucaucgagggcggguggcagggaaugguggacggcugguacggguaucaucacucuaaugaacagggauccggcuacgccgcugacaaggagagcacccaaaaagccaucgauggcguuacaaacaaggucaauucuauuaucgacaagaugaacacgcaguuugaggcgguggggcgcgaauuuaacaaucuugagaaaagaauugaaaaccugaauaagaaaauggaggauggauuccucgacguguggaccuauaacgccgaacugcugguucucauggagaaugagcggacacuggauuuccacgacagcaacgugcgcaaucuuuacgauaaggucagacugcagcuccgggacaacgcuaaagaacugggcaauggguguuucgaguuuuaccauagaugcgauaacgaauguauggaguccgugcgcaauggaaccuaugacuacccccaauauucugaggaagcccggcuuaagagagaggaaaucagcggcgucaagcuggaguccauugggacauaccagauccucagcauuuauucuaccguggcuuccagccuggcccuggccaucaugguugcuggccucuuccuguggaugugcucuaacggaucccuucagugccgcaucuguauuuga

SEQ ID NO: 205897 - RNA, 1707 nt, Artificial Sequence
  derived and/or modified CDS sequence (opt5) from hemagglutinin__InfluenzaA__CBW54818
auggagaagaucgugcugcuccuggccauugucagccuuguuaaauccgaccagaucugcauuggcuaccacgcuaacaauucuaccgaacaaguggauacaaucauggagaagaacgugacggucacccaugcccaggacauucuggagaaaacacacaaugggaagcucugugaucuggacggagugaaaccccuuauccugagagauugcagcguugcgggcuggcuccuggggaacccuaugugugacgaguucccgaauguguccgaauggucuuauaucgucgagaagaccaaccccgcuaaugaucugugcuacccuggaaacuuuaauaacuaugaggaacucaagcaucugcuuagccggauuaaucgcuucgagaaaaucaagauuauccccaaauccucuuggccugaccacgaagccagccugggcguguccagcgccugucccuaccaagggggaccuucuuuuuauagaaacguuguguggcucauuaagaaaaauaacacauacccgaccaucaaggaguccuaucauaauacaaaccaggaggaucugcuuguccuguggggcauucaccaccccaacgacgaagaggaacagacccggaucuacaagaauccuacgaccuacaucagcgugggcacaucuacccucaaccagcgccuggugcccaaaauugcuacaagauccaaggucaaugggcagagcggacggguugaguucuuuuggaccauccugaaaucuaacgauacgauuaauuucgaauccaacggcaauuuuaucgccccugagaacgcuuauaagauugugaaaaagggggacagcacaaucaugaaauccgagcucgaauacggaaauugcucuaccaagugucagacacccgugggcgccaucaacagcuccaugccguuccauaauauucacccucugaccaucggggagugccccaaguaugucaaaagcaaccgccuugugcuggcgaccggacucagaaauucuccucaaggcgaaggccggcgcaagaaaagagggcuguuuggagccauugcuggcuucaucgaagggggauggcagggcaugguugaugggugguacggauaucaucacuccaacgaacagggcagcggcuacgccgcugaccgggagucuacacagaaggccauugacggggugacgaauaaagucaacagcaucaucgauaagaugaacacccaauuugaggcggugggacgcgaguucaauaaccuugaaaagagaauugaaaaucugaacaaaaagauggaggacggcuuucucgauguuuggacauauaaugccgaacugcuggugcucauggagaacgagcggacccuggacuuccacgauuccaaugucaaaaaccuuuacgacaaggugcgccugcagcucagagauaaugcuaaagaacuggggaacggauguuucgaguuuuaccaucggugcgacaaugaauguauggagucugucagaaacggcacauaugauuacccccaguauagcgaggaagcccgccuuaagcgggaggaaaucuccggggugaagcuggagagcauuggcaccuaccaaauccucucuauuuauuccacgguugcuagcucucuggcccuggccaucauuguggcuggacuccugcuuuggaugugcuccaauggcagccugcagugcagaaucuguaucuga

SEQ ID NO: 205898 - RNA, 1701 nt, Artificial Sequence
  derived and/or modified CDS sequence (opt5) from hemagglutinin__InfluenzaA__CCG47908
augaagaccgugaucgcccugagcuacgucuucugccucggcuuugggcagggacugcccggcaaagggaacaauacagcuacgcuuugucugggacaccaugccguuccuaacggcacccucgugaagacaauuaccgacgaucaaaucgaggugacaaaugcgaccgaacugguccagaacuucuccauggggaaaauuugcaagaauccgcacagaauccuugacggagcuaacuguacacugauugauucucuccugggcgacccccauugcgauggcuuucaggacgagaaaugggaucuguucaucgaacggagcaaggccuuuuccaauuguuauccuuacgacgugcccgaguauaccucucuccgcagcaucauugccuccucugggacgcuggaguucaccaacgaagauuuuaauuggacaggaguuacccagaacggcgggagcuccgcuugcaagagaggaccuaauaacagcuucuuuucucggcuuaauuggcuguacaaauccggcaacacauaucccaugcucaaugugaccaugccuaacagcgacgauuucgacaagcuguacaucuggggaguccaccauccgucuacggaucgcgagcaaacaaaccuuuauauucaggccuccgggaaaaucauugugagcaccaagagaucucagcagacaaucauucccaauaucggcucccggccuuggguucgcggccugagcuccagaaucucuauuuacuggaccaucgugaaacccggggacauucucaucauuaacagcaauggaaaccugaucgcuccucggggcuacuuuaagauccaaaccgggaaguccagcgucaugcgcucugacgcccccauugauacauguaauuccgaaugcaucacgccgaacggaagcauuccuaaugacaaacccuuccagaacgugaauagaaucaccuauggcgcguguccuaaguacauuaaacagaacacacugaagcucgccaccgggaugcggaauauccccgagcgccagacaagaggaaucuuuggcgcuauugccggcuucaucgaaaacgggugggagggaauggugaauggcugguauggguuccggcaccaaaacucugagggaauuggccaggcugccgaucugaaaagcacccaggcggccaucaaucaaauuaacgggaaacuuaaccgcgucaucgaaaagacgaaugagaaguuucaccagauugaaaaggaguucuccgaaguugagggcagaauccaggaccuggagcgguacguggaagauacaaaaaucgaccucuggucuuauaacgcugagcugcuuguggcccuggaaaaucagcauaccauugaucucaccgacagcgagaugaacaagcuguuugagaaaacaagaaagcaacugcgcgaaaaugcugaggauaugggaaacggcugcuucaaaaucuaccacaagugugacaauuccugcauggaaagcauucggaacgggaccuaugaucauaaugaguacagagacgaagccgucaacaaucgcuuucagaucaagucuguggagcucaaauccggauacaaggacuggauucuguggaucagcuucgccaucucuugcuuucuucugugugcuguuuggcucggcuucauuaucugggcgugccagaaagggaacauucgguguaauaucugcauuuga

SEQ ID NO: 205899 - RNA, 1701 nt, Artificial Sequence
  derived and/or modified CDS sequence (opt5) from hemagglutinin__InfluenzaA_ _AAB39851
augaaggccauccugcucgugcugcuuugcaccuucgcugccacaaacgcggacacgcuguguauuggcuaccacgcuaauaacagcaccgauacagucgacaccguucucgagaaaaaugugacagugacccauuccgucaaccugcuugaagauagacacaaugggaagcugugcaaacucggaggcaucgcuccccugcaucuggggaaguguaacauugccggacggcuccugggcaauccugagugcgaacuucugcucacagugucuagcugguccuauaucguugagaccucuaaaagcgacaacgggacguguuacccgggagauuuuauuaauuaugaagaacugcgcgagcagcuuuccucugugagcuccuucgaaagauuugagaucuuccccaagaccagcucuuggccuaaccacgaaacaaaucggggcgucaccgccgccugccccuacgcuggcgccaacuccuuuuaucgcaaucugaucuggcucgugaagaaagagaacagcuacccuaagcugucuaaauccuauguuaauaacaaggggaaagaggugcugguccucuggggcauucaucaucccccuacaagcaccgaccaacagucucuguaccagaacgcggaugccuacguguucgugggauccagcaaguauaauagaaaguuuaaaccggaaaucgcugcccggcccaagguccgcgggcaggcuggaagaauguccuacuauuggacgcuuauugagccuggcgacacaaucaccuucgaagccacagggaaccugguugugccccgguacgcguuugccaugaaucgcggaucuggcagcggcauuaucauuugggaugcuccugugcacgacuguaacaccaaaugccaaacccccaagggggccaucaauacaucccucccguuccagaacauccacccugucacgauuggagagugucccaaauauguuaagagcaccaaacugagaauggcuacaggccuucggaaugugccuucuauccagucccgcgggcuguuuggagccauugccggcuucaucgaagggggauggaccggcaugauugauggcugguacggguaucaccaucagaacgagcaaggaagcggcuacgcugcggaccagagaucuacacagaaugccaucgaugggaucaccaacaaggugaauagcgucauugagaagaugaacacgcaguuuacagcugugggaaaagaguucaaucaccucgagaagcggaucgaaaaccugaauaaaaagguugacgacggcuuccuggauauuuggaccuacaacgccgagcuccuggugcuucuggaaaacgagcgcacccucgacuuucacgauuccaaugucaaaaaccuguaugagaaggugagaucucaacuucggaauaacgccaaggaaaucgggaauggcugcuucgaguuuuaccauaaaugugacgauacaugcauggaaagcgucaagaacggaaccuaugacuaccccaaauauuccgaggaaagcaagcugaauagagaggagauugauggcgugaaacucgaaucuacacgcaucuaccagauccuggcuauuuauuccacgguugccagcucucuggugcuccuggucucccuuggggcgaucagcuucuggaugugcuccaacggaucucugcagugucggauuugcaucuga

SEQ ID NO: 205900 - RNA, 1701 nt, Artificial Sequence
  derived and/or modified CDS sequence (opt5) from hemagglutinin__InfluenzaA__AAA43178
augaagaccaucauugcccugagcuacaucuucugccucgcucugggccaggaccuucccgggaacgauaauuccacagccacgcugugucucggacaccaugcggugccuaacggcacccuggucaaaacaauuaccgacgaucaaaucgagguuacaaaugcuaccgaacuugugcagucuagcuccacagggaagauuugcaacaauccgcacagaauccuggacggaaucgauuguacccucauugacgcccugcugggcgauccccauugcgacguguuucagaacgagacgugggaucucuucgucgaacggucuaaagccuuuagcaauuguuauccuuacgacgugcccgauuaugcuucccugcgcucucuuguugccagcuccgggacccuggaguucaucacagaaggauuuaccuggacaggcgugacccagaacggcgggagcaaugcuugcaagagaggaccuggcucuggguucuuuucccggcucaacuggcugacgaaaagcggaucuacauaccccguccuuaaugugaccaugccuaacaaugacaacuucgauaagcuguauauuuggggcauccaccauccguccacaaaucaagagcagaccagccucuacguucaggccucugggcgcgugaccgucuccacaagacggagccagcaaacgauuauccccaacauuggaucccgcccuugggugagaggccugucuagccggaucuccaucuauuggaccauugugaagcccggcgacguccugguuaucaacagcaaugggaaccucauugcgccucgcggauacuuuaaaaugagaacaggcaagucuuccaucaugcggagcgacgcccccauugauaccuguaucucugagugcaucacaccgaaugggagcauuccuaacgacaaacccuuccagaaugugaacaagaucaccuacggagcuuguccuaaauaugugaagcagaauacgcugaaacuugccacaggcaugcgcaacguccccgaaaagcagaccagagggcuguuuggagcuauugccggcuucaucgagaauggcugggaagggaugauugauggaugguacggcuuucggcaccaaaacuccgaggggaccggacaggcggccgaccucaagucuacacaggcugccaucgaucaaaucaauggcaaacugaaccgcgugauugagaagaccaaugaaaaauuccaccagaucgagaaggaguucagcgaaguugaagggcggauucaggaccuugagaaauauguggaggauacaaagaucgaccugugguccuacaacgcugaacuccuggucgcccuggagaaucagcauacgauugaucucaccgacagcgaaaugaacaagcuguuugagaaaacaagaagacaacuucgcgaaaacgccgaggagaugggcaauggaugcuucaagaucuaucacaaaugugauaacgcuugcauugaaucuauccggaauggcaccuacgaccaugacguguauagagaugaggcgcugaacaaucgcuuucagaucaaggggguugaacucaaauccggauacaaggacuggauucuguggaucagcuucgccauuucuugcuuucuucugugugugguccuccugggcuucaucaugugggcuugccagcgggggaacauuagauguaauaucugcaucuga

SEQ ID NO: 205901 - RNA, 1689 nt, Artificial Sequence
  derived and/or modified CDS sequence (opt5) from hemagglutinin__InfluenzaA__AAA43185
auggccaucauuuaccugauccuccuguucaccgcugugagaggcgaccagauuugcaucggguaucacgccaacaauagcacagagaaggucgauacgaaccuugaacggaauguuaccgugacacaugcgaaagacauucuggagaagacccacaacggaaaacucuguaagcugaauggcauucccccucuugaacugggggauugcuccaucgcuggauggcuccugggcaacccggagugugaccgccugcucucugugcccgaauggagcuacaucauggagaaagagaauccuagagaugggcugugcuaucccggauccuuuaacgacuacgaggaacuuaagcaucugcucucuagcgucaagcacuucgaaaaagugaagauccugccuaaagaucgguggacacaacauaccacaaccggcggcucccgcgccugugccguuucugggaaucccagcuuuuucagaaacaugguguggcuuacgaaggagggauccgacuauccugucgcuaaaggcagcuacaauaacaccucuggggagcagaugcugauuaucuggggagugcaccacccgauugaugaaacagagcagcggacccucuaucagaauguuggcacauacguguccgucgggaccagcacgcugaacaagcgcucuacacccgaaaucgccaccagaccuaaggugaauggacaaggcggccggauggaguuuuccuggacacugcucgacaugugggauaccauuaacuucgaaagcaccgggaaccugaucgcucccgaguacggauuuaaaaucucuaagcgcggcuccagcgggauuaugaaaacagagggaacgcuugaaaauugcgagaccaagugucagacaccucugggcgccaucaacaccacacuccccuuccauaaugugcacccgcugaccauuggggaaugcccuaaauaugucaaguccgagaaacuuguucuggcgacgggacucagaaacgugccccagaucgaaucucggggccuguuuggcgccauugcuggguucaucgagggaggcuggcaggggaugguggacggaugguacggcuaucaucacagcaaugaucaaggguccggcuacgccgcugacaaggagagcacacagaaggccuuugacggaaucaccaacaaagucaauucugugauugaaaagaugaacacccaguucgaggcgguuggcaaagaauuugggaaucuggagcgcagacucgaaaaccugaauaagcggauggaggauggauuccuugacguguggacauauaacgccgagcugcucguccugauggaaaaugagcgcacccuugauuuccacgacuccaacgugaaaaaucuguacgauaagguuagaaugcagcuccgggacaacgugaaggaacugggcaacggguguuuugaguucuaucauaaaugcgaugacgaguguaugaauagcgucaagaacggaacauacgauuacccuaaauaugaagaggaaucuaagcugaauagaaacgagaucaaaggcgugaagcucagcuccaugggggucuaccaaauucuggcuaucuaugccacgguggcuggcucucuuagccuggccauuaugauggccggaaucuccuuuuggaugugcagcaauggcucucuccagugccgcaucuguauuuga

SEQ ID NO: 205902 - RNA, 1701 nt, Artificial Sequence
  derived and/or modified CDS sequence (opt5) from hemagglutinin__InfluenzaA__AAA43187
augaagaccaucauugcccugagccacaucuucugccucgugcugggccaguaccuucccgggaacgacaauuccacagcuacgcugugucucggacaucacgccgucccuaacggcacccugguuaaaacaauuaccaaugaucaaaucgaggugacaaacgcgaccgaacuugugcagucuagcuccacagggaagauuugcaauaacccgcauagaauccuggacggaaucgauuguacccucauugacgcucugcugggcgauccccacugcgacggguuucagaaugagacgugggaucucuucgucgaacggucuaaagccuuuagcaacuguuauccuuacgacgugcccgauuaugccucccugcgcucucuuguugcuagcuccggaacccuggaguucaucacagaaggcuuuaccuggacaggcgugacccagaaugggggaagcaacgccugcaagagaggcccugggucuggauucuuuucccggcucaauuggcugacgaaaagcgagucuacauaccccguccuuaacgugaccaugccuaauaacgacaauuucgauaagcuguauauuuggggcguucaucacccguccacaaaccaagagcagaccagccucuacgugcaggcuucugggcgcgucaccguguccacaagacggagccagcaaacgaucauucccaacaucggaucccgcccuugggugagaggccugucuagccggauuuccaucuauuggaccaucgucaagcccggcgacguucuggugauuaauagcaacgccaaucucaucgcgccucgcggguacuuuaaaaugagaacaggaaagucuuccauuaugcggagcgaugcccccaucgacaccuguauuucugaaugcaucacaccgaacggcagcaucccuaaugacaaacccuuccagaacgugaauaagauuaccuacggggcuuguccuaaauaugucaagcagaacacgcugaaacuugccacacgcaugagaaaugugcccgagaaacagacccggggacuguuuggcgcuaucgccggguucauugaaaacggaugggagggcaugaucgauggcugguacggguuucgccaccaaaauuccgagggaaccggccaggcggccgaccucaagucuacacaggcugccauugaucaaaucaacgggaaacugaauagaguuaucgaaaagaccaacgagaaauuccaucagauugaaaaggaguucagcgaaguggagggacggauccaggaccuugagaaauaugucgaagauacaaagauugaccugugguccuacaaugcugagcuccugguggcccuggaaaaccagcacacgaucgaucucaccgacagcgagaugaacaagcuguuugaaaagacaagacgccaacuucgggagaaugccgaggauaugggcaacgggugcuucaagauuuaugacaaaugugauaaugcuugcaucgaaucuauuagaaacggcaccuacgaccaugacguuuaucgcgaugaggcgcugaauaaccgguuucagaucaagggaguggaacucaaauccggcuacaaggacuggauccuguggauuagcuucgccaucucuugcuuucuucugugugucgugcuccugggguucauuaugugggcuugccagagaggaaauauccgcuguaacauuugcaucuga

SEQ ID NO: 205903 - RNA, 1698 nt, Artificial Sequence
  derived and/or modified CDS sequence (opt5) from hemagglutinin__InfluenzaA__AAA43209
augaaggccaaacugcucgugcugcuuuacgcuuucgucgccaccgacgcggauacaaucugcauuggcuaucacgcuaacaauagcacggacaccguugauacaaucuuugagaagaacguggccgugacccauuccgucaaucugcucgaagacagacacaacgggaaacuguguaaacuuaagggaauugcuccccugcagcucggcaagugcaauaucacaggguggcugcugggaaacccugagugugauucucuccugccggcccggagcugguccuacauuguggaaacccccaauucugagaacggcgccugcuauccuggggacuucaucgauuacgaagaacuucgcgagcaacugagcuccguuucuagccucgaaagauuugagaucuuccccaaggaauccagcuggccuaaucauacauuuaacggagugaccgucucuuguucccaccggggcaaaagcucuuucuaucgcaaucugcuuuggcugacgaagaaaggcgacuccuaccccaagcucaccaacagcuaugugaauaacaaagggaaggagguucuggugcuguggggaguccaucacccuucuuccagcgaugagcagcagucccucuacucuaauggcaacgcuuacgugagcguggccuccagcaacuauaauagacgguuuacaccggaaauugcggcccgccccaaggucaaagaccagcacgggagaaugaacuacuauuggacccugcuugagccuggagauacaaucauuuucgaagcuaccggcaaucugaucgcccccugguacgcuuuugcccucucucggggguucgaguccggaauuaucacgagcaacgcgucuaugcaugaaugcaauacaaagugucaaaccccucagggcagcauuaacuccaaucugcccuuucagaacauccacccgguuacaaucggcgagugcccuaaauaugugcgcucuaccaagcugagaauggugaccgggcuucggaauauucccagcauccaguaccgcggacucuucggcgccauugcuggguuuaucgagggaggcuggacagggaugauugacggaugguauggcuaccaucaccaaaacgaacagggcuccggguacgccgcugaucagaaaagcacgcagaaugccaucaacggaaucaccaauaaggucaacucugugauugagaaaaugaauacacaauucaccgccguuggcaaggaguucaacaaccuggagaagagaauggaaaaucugaacaaaaagguggacgacggguuucucgauaucuggacauauaaugcugagcugcuuguccugcucgagaacgaacggacccuggacuuccacgaucuuaaugugaaaaaccuguacgagaagguuaaaucccagcucaagaauaacgcgaaggaaauuggaaauggcuguuuugaguucuaucauaaaugcgacaacgaauguauggagagcgugcgcaaugggacguacgauuauccuaaguacucugaggaauccaaacugaacagagagaagaucgacggcgucaaacuggaaagcaugggaguguaucagauucucgccaucuacuccacagucgcuucuagccuggugcuucugguuucccucggcgccaucucuuuuuggaugugcagcaaugggucccugcaaugccggauuuguaucuga

SEQ ID NO: 205904 - RNA, 1683 nt, Artificial Sequence
  derived and/or modified CDS sequence (opt5) from hemagglutinin__InfluenzaA__AAC40998
augaacacccagauccugauucucgcccugguggcuaucauucccacaaaugccgacaagaucugccuuggccaccaugcggucagcaacggggcuaaaguuaauacgcugaccgagagaggaguggaaguggucaacgccacagagaccguggaacggacaaauguuccucgcauuuguuccaagggcaaaagaaccguggaucucgggcaaugcggacugcuuggcacaaucaccgggccgccccagugugaccaguuccuggaguuuucugccgaucucaucauugaacggcgcgagggaaacgacgucugcuacccuggcaaguucgugaaugaggaagcucugagacagauccugcggaaaagcggcgggauugauaaggagacgaugggauuuaccuauuccggcauccgcacaaacggggccaccucugcuuguagacggagcggauccucuuucuacgccgaaaugaaguggcuccugagcaauacagacaacgcggccuuuccccaaaugaccaaauccuauaagaauauucgcaaagauccugcucuuaucauuuggggcauccaccauagcgggucuacggccgagcagacaaagcuguacggauccggcaacaaacucaucaccguuggcagcucuaauuaucagcaguccuucgugcccagcccuggggcuagaccgcaagucaacggacagucuggccggauugacuuucacuggcugaugcuuaaucccaacgauacagugaccuucuccuuuaacggggccuucaucgcgccugaccgcgccagcuuucugagaggaaaguccaugggcauucagucugaggugcaggucgaugcuaauugcgaaggggacuguuaccauagcggaggcaccauccucuccagccugcccuuccaaaacauuaauucucggacaguuggcgagugcccucgcuaugugaagcaggaaucccugcuccuggccacggggaugaaaaacgugcccgagaucccgaagggaagaggccuuuuuggggcuaucgccggauucauugaaaauggcugggaggggcuggucgauggcugguacggauuccggcaccagaacgcccaaggcgaggggaccgcugcggacuacaaaagcacacagucugccaucgaccagauuaccggaaagcucaauagacugaucgagaaaacaaaccagcaauuugaacuuauugauaaugaguucaccgaaguggaaaagcagaucggcaacguuaucaauuggacgcgcgacagccugacagagaugugguccuauaacgcugagcuccugguggccauggaaaaucagcacaccauugaucuggccgacucugagaugaacaaacucuacgaacgggucagacgccagcugcgggagaaugcugaagaggaugggaccggauguuuugagaucuuccauaagugcgacgaugacuguauggccagcauuagaaacaacacauaugaucacuccaaguaccgcgaagaggcgauccaaaaucggauucagaucgacccugugaaacuuagcucuggcuauaaggauguuauucugugguuuuccuucggggcuagcugcuuuauccuccuggccaucgccaugggccuuguguucauuugcgucaaaaacggaaauaugagauguaccaucugcauuuga

SEQ ID NO: 205905 - RNA, 1683 nt, Artificial Sequence
  derived and/or modified CDS sequence (opt5) from hemagglutinin__InfluenzaA__AAC40999
augaacacccagauccugauucucgcccugguggcuaucauucccacaaaugccgacaagaucugccuuggccaccaugcggucagcaacgggacgaaaguuaauacccugacagagagaggaguggaaguggucaacgcuaccgagacaguggaacggaccaauguuccucgcauuuguuccaagggcaaaagaacaguggaucucgggcaaugcggacugcuuggcaccaucacggggccgccccagugugaccaguuccuggaguuuucugccgaucucaucauugaacggcgcgagggagacgaugucugcuacccuggcaaguucgugaacgaggaagcccugagacagauccugcgggagagcggcgggauugacaaagaaaccaugggauuuacauauuccggcauccgcaccaauggggcuacaucugccuguagacggagcggauccucuuucuacgcugagaugaaguggcuccugagcaacaccgauaaugccgcguuuccccaaaugacgaaguccuauaaaaacauucgcaaggacccugcccuuaucauuuggggcauccaccauagcgggucuacagcugagcagaccaaacuguacggauccggcaauaagcucaucacaguuggcagcucuaacuaucagcaguccuucgugcccauuccuggggccagaccgcaagucaauggacagagcggccggaucgauuuucacuggcugaugcuuaaccccaaugacaccgugaccuucucuuuuaacggggcuuucauugccccugaucgcgcguccuuucugagaggaaaaagcaugggcauccaguccgaagugcaggucgacgccaacugcgagggggauuguuaccauucuggaggcacaauucucaauaaccugcccuuccaaaauaucaacggccgggcuguugggaagugcccucgcuaugugaagcaggaaagccugcuccuggccacgggaaugaaaaaugugcccgagaucccgaagggcagagggcuuuuuggagcuauugccggcuucaucgaaaacgggugggagggccuggucgacggaugguacggcuuccggcaccagaaugcccaaggggagggaaccgcugcggacuacaaauccacacagagcgccauugaucagaucaccggcaagcucaacagacugauugagaaaacaaaucagcaauuugaacuuaucgacaacgaguucaccgaaguggaaaagcagaucgggaauguuauuaacuggacgcgcgauucuaugacagaggugugguccuauaaugcugagcugcucgucgccauggaaaaccagcacaccaucgaccuggccgauagcgagaugaauaaacuguacgaacgggugagacgccagcuccgggagaacgcugaagaggacggaaccggcuguuuugagauuuuccauaagugcgaugacgauuguauggccucuaucagaaacaauacauaugaccacagcaaguaccgcgaagaggcgauucaaaaccggauccagauugauccuguuaaacuguccucuggguauaaggacgugauccuuugguuuagcuucggcgcuuccugcuuuauccugcucgccauugccaugggacuggucuucaucugcgugaaaaauggcaacaugagauguaccauuugcaucuga

SEQ ID NO: 205906 - RNA, 1698 nt, Artificial Sequence; identical to SEQ ID NO: 194560
  derived and/or modified CDS sequence (opt5) from hemagglutinin__InfluenzaA__ACA28844

SEQ ID NO: 205907 - RNA, 1698 nt, Artificial Sequence; identical to SEQ ID NO: 199865
  derived and/or modified CDS sequence (opt5) from hemagglutinin__InfluenzaA__ACA28844/m1

SEQ ID NO: 205908 - RNA, 1701 nt, Artificial Sequence; identical to SEQ ID NO: 201222
  derived and/or modified CDS sequence (opt5) from hemagglutinin__InfluenzaA__ACV82259

SEQ ID NO: 205909 - RNA, 1701 nt, Artificial Sequence; identical to SEQ ID NO: 201222
  derived and/or modified CDS sequence (opt5) from hemagglutinin__InfluenzaA__ACV82259/m1

SEQ ID NO: 205910 - RNA, 1701 nt, Artificial Sequence; identical to SEQ ID NO: 201222
  derived and/or modified CDS sequence (opt5) from hemagglutinin__InfluenzaA__ACV82259/m2

SEQ ID NO: 205911 - RNA, 1701 nt, Artificial Sequence; identical to SEQ ID NO: 194739
  derived and/or modified CDS sequence (opt5) from hemagglutinin__InfluenzaA__ACP41953

SEQ ID NO: 205912 - RNA, 1701 nt, Artificial Sequence; identical to SEQ ID NO: 204313
  derived and/or modified CDS sequence (opt5) from hemagglutinin__InfluenzaA__AFM72832

SEQ ID NO: 205913 - RNA, 1701 nt, Artificial Sequence
  derived and/or modified CDS sequence (opt5) from hemagglutinin__InfluenzaA__EPI516528
augaaggccauccuggugguccuccuguacaccuucgcuacagccaacgcggacacgcuuugcauuggcuaucacgcuaauaacagcaccgauacaguugacaccgugcuggagaagaaugugacagucacccauuccgugaaccuccuggaagauaagcacaaugggaaacuuuguaagcugagaggaguugcuccccuccaucugggcaaaugcaacaucgccggguggauucugggaaauccugagugugaaucucucagcacagccuccucuuggagcuacaucguggagaccccguccucugacaacggcacgugcuaucccggggauuuuauugacuacgaagaacugcgggagcagcuuagcuccgucagcucuuucgaacgcuuugagaucuucccuaagaccuccagcuggcccaaucacgauucuaacaagggagugacagccgcuuguccucaugccggcgcgaaauccuuuuauaagaaucugaucuggcucguuaaaaagggcaacagcuaccccaaacugucuaaguccuauauuaaugacaaggggaaagaagugcuuguccuguggggaauccaccacccuagcaccuccgccgaucaacagucucucuaccagaacgcugacgccuacguguucgugggcagcuccagauauagcaagaaauuuaagccggagauugcuauccggcccaaaguccgcgaucaggaggggagaaugaauuacuauuggacacugguugaaccuggagacaagauuaccuucgaggccacgggcaaccugguggugccccgguacgcguuugccauggaacgcaacgcugggucuggaaucauuaucuccgauacaccuguccaugacugcaauaccacaugucaaacccccaaaggcgccaucaacaccagccucccguuccagaauauucacccuaucacaauuggcaagugccccaaguaugugaaaucuacgaagcugagacuugcuaccgggcugcggaacaucccuagcauucagucccgcggacucuuuggcgccaucgccggguucaucgagggaggcuggacagggaugguugacggaugguacggcuaucaucaccagaaugaacaaggcucuggguacgcugcggaucugaaaagcacccagaacgccauugacgagaucacaaauaaggugaacuccgucauugagaaaaugaauacccaguuuacggcugugggaaaggaguucaaccaccuugagaagagaaucgaaaaucugaacaaaaagguugaugacggcuuccucgauauuuggacauacaaugccgagcugcuggugcuccuggaaaacgagcggacccuugacuaucaugauagcaaugucaaaaaccuguacgagaaggugcgcucucagcucaaaaacaaugccaaggaaaucgggaacggauguuuugaguucuaucacaagugcgacaauaccuguauggaauccgucaaaaacggcacauacgauuaucccaaguacagcgaggaagcuaaacugaauagagaggagaucgacggggugaaacuugaaucuacccggauuuaucaaauccuggccauuuacuccacaguugcgagcucccucgugcuggucgugucucugggcgcuaucagcuuuuggaugugcuccaacggaucucuccauugccgcauuuguguuuga

SEQ ID NO: 205914 - RNA, 1701 nt, Artificial Sequence
  derived and/or modified CDS sequence (opt5) from hemagglutinin__InfluenzaA__AGM53850
augaaggccauccuggugguccuccuguacaccuucgcuacagccaacgcggacacgcuuugcauuggcuaucacgcuaauaacagcaccgauacaguugacaccgugcuggagaagaaugugacagucacccauuccgugaaccuccuggaagauaagcacaaugggaaacuuuguaagcugagaggaguugcuccccuccaucugggcaaaugcaacaucgccggguggauucugggaaauccugagugugaaucucucagcacagccuccucuuggagcuacaucguggagaccccguccucugacaacggcacgugcuaucccggggauuuuauugacuacgaagaacugcgggagcagcuuagcuccgucagcucuuucgaacgcuuugagaucuucccuaagaccuccagcuggcccaaucacgauucuaacaagggagugacagccgcuuguccucaugccggcgcgaaauccuuuuauaagaaucugaucuggcucguuaaaaagggcaacagcuaccccaaacugucuaaguccuauauuaaugacaaggggaaagaagugcuuguccuguggggaauccaccacccuccgaccagcgccgaucaacagucccucuaccagaacgcugacgccuacguguucgugggcucuagcagauauuccaagaaauuuaagcccgagauugcuauccggccuaaaguccgcgaucaggaggggagaaugaauuacuauuggacacugguugaacccggagacaagauuaccuucgaggccacgggcaaccugguggugccucgguacgcguuugccauggaacgcaacgcugggagcggaaucauuaucucugauacacccguccaugacugcaauaccacaugucaaaccccgaaaggcgccaucaacaccucccucccuuuccagaauauucaccccaucacaauuggcaagugcccuaaguaugugaaaagcacgaagcugagacuugcuaccgggcugcggaacauccccucuauucagagccgcggacucuuuggcgccaucgccggguucaucgagggaggcuggacagggaugguugacggaugguacggcuaucaucaccagaaugaacaaggcuccggguacgcugcggaucugaaaucuacccagaacgccauugacgagaucacaaauaaggugaacagcgucauugagaaaaugaauacccaguuuacggcugugggaaaggaguucaaccaccuugagaagagaaucgaaaaucugaacaaaaagguugaugacggcuuccucgauauuuggacauacaaugccgagcugcuggugcuccuggaaaacgagcggacccuugacuaucaugauuccaaugucaaaaaccuguacgagaaggugcgcagccagcucaaaaacaaugccaaggaaaucgggaacggauguuuugaguucuaucacaagugcgacaauaccuguauggaaucugucaaaaacggcacauacgauuaucccaaguacuccgaggaagcuaaacugaauagagaggagaucgacggggugaaacuugaaagcacccggauuuaucaaauccuggccauuuacucuacaguugcguccagccucgugcuggucgugucccugggcgcuaucucuuuuuggaugugcagcaacggaucccuccagugccgcauuuguaucuga

SEQ ID NO: 205915 - RNA, 1701 nt, Artificial Sequence
  derived and/or modified CDS sequence (opt5) from hemagglutinin__InfluenzaA__EPI731463
augaaggccauccuggugguccuccuguacaccuucgcuacagccaacgcggacacgcuuugcauuggcuaucacgcuaauaacagcaccgauacaguugacaccgugcuggagaaaaaugugacagucacccauuccgugaaccuccuggaagauaagcacaaugggaaacuuuguaagcugagaggaguugcuccccuccaucugggcaaaugcaacaucgccggguggauucugggaaauccugagugugaaucucucagcacagccuccucuuggagcuacaucguggagaccccguccucugacaacggcacgugcuaucccggggauuuuauugacuacgaagaacugcgggagcagcuuagcuccgucagcucuuucgaacgcuuugagaucuucccuaauaccuccagcuggcccaaccacgauucuaauaagggagugacagccgcuuguccucaugccggcgcgaaguccuuuuauaaaaaccugaucuggcucguuaagaaaggcaauagcuaccccaagcugucuaaauccuauauuaacgacaaggggaaggaagugcuuguccuguggggaauccaccacccuagcaccuccgccgaucaacagucucucuaccagaaugcugacgccuacguguucgugggcagcuccagauauagcaaaaaguuuaaaccggagauugcuauccggcccaagguccgcgggcaggagggaagaaugaacuacuauuggacacugguugaaccuggcgauaaaauuaccuucgaggccacggggaaccugguggugccccgguacgcguuugccauggaacgcaaugcuggaucuggcaucauuaucuccgacacaccuguccaugauugcaacaccacaugucaaacccccaagggcgccaucaauaccagccucccguuccagaacauucacccuaucacaauugggaaaugccccaaguaugugaagucuacgaaacugagacuugcuaccggacugcggaauaucccuagcauucagucccgcggccucuuuggggccaucgccggauucaucgagggcggguggacaggaaugguugacggcugguacggcuaucaucaccagaacgaacaagggucuggauacgcugcggaccugaaguccacccagaaugccauugaugagaucacaaacaaagugaauagcgucauugagaagaugaacacccaguuuacggcugugggcaaagaguucaaucaccuugagaagagaaucgaaaaccugaauaagaaaguugacgauggguuccucgacauuuggacauacaacgccgagcugcuggugcuccuggaaaaugagcggacccuugauuaucaugacagcaacgucaagaaccuguacgagaaagugcgcucucagcucaagaauaacgccaaagaaaucggaaauggcuguuuugaguucuaucacaagugcgauaacaccuguauggaauccgucaagaaugggacauacgacuaucccaaauacagcgaggaagcuaagcugaacagagaggagaucgauggcgugaaacuugaaucuacccggauuuaucaaauccuggccauuuacuccacaguugcgagcucccucgugcuggucgugucucugggagcuaucagcuuuuggaugugcuccaauggcucucuccagugccgcauuuguaucuga

SEQ ID NO: 205916 - RNA, 1701 nt, Artificial Sequence; identical to SEQ ID NO: 196570
  derived and/or modified CDS sequence (opt5) from hemagglutinin__InfluenzaA__EPI696972

SEQ ID NO: 205917 - RNA, 1701 nt, Artificial Sequence; identical to SEQ ID NO: 205758
  derived and/or modified CDS sequence (opt5) from hemagglutinin__InfluenzaA__EPI662594

SEQ ID NO: 205918 - RNA, 1701 nt, Artificial Sequence
  derived and/or modified CDS sequence (opt5) from hemagglutinin__InfluenzaA__EPI685579
augaaggccauccuggugguccuccuguacaccuucacaacggcuaacgccgacacccuuugcauuggcuaucacgcgaauaacagcacagauaccguugacacagugcuggagaagaaugugaccgucacacauuccgugaaccuccuggaagauaagcacaaugggaaacuuuguaagcugagaggaguugcuccccuccaucugggcaaaugcaacaucgccggguggauucugggaaauccugagugugaaucucucagcaccgccuccucuuggagcuacaucguggagacguccaacucugacaaugggaccugcuauccgggcgauuuuauuaacuacgaagaacugcgggagcagcuuagcuccgucagcucuuucgaacgcuuugagaucuuccccaagacauccagcuggccuaaucacgacucuaacaagggagugaccgcugccuguccccaugcuggcgccaaauccuuuuauaagaaucugaucuggcucguuaaaaagggcaacagcuacccuaaacugaaucaaucuuauauuaacgauaaggggaaggaagugcuuguccuguggggaauccaccaccccuccacaaccgcggaccagcagagccucuaccagaacgccgaugcuuacguguucgugggcacguccagauauucuaaaaaguuuaaaccugagauugccacacggccgaagguccgcgacagagaggggcggaugaauuacuauuggacccugguugaacccggagauaaaaucacauucgaggcuaccggcaaccugguggugccucgcuacgccuuuaccauggaaagaaaugcggggagcggaauuaucauuuccgacacacccguccaugauugcaacacgaccugucaaacaccugagggcgccaucaauaccagccuccccuuccagaacauccacccgauuacaaucggcaagugcccuaaauaugugaagucuaccaagcugcggcuugcuacggggcugcgcaauguucccuccauucagagcagaggacucuuuggcgccaucgcuggguucauugaaggaggcuggacagggaugguggacggaugguacggcuaucaucaccagaacgagcaaggcucuggguacgccgccgaccugaaaagcacccagaaugcuaucgauaagaucaccaacaaagucaauuccgugauugagaagaugaacacacaguuuaccgcgguuggaaaagaguucaaucaccuugagaagcggaucgaaaaccugaauaagaaaguggacgauggcuuccucgacauuuggacauacaacgccgagcugcugguccuccuggaaaacgagcgcacgcuugauuaucaugacucuaaugugaagaaccuguacgagaaagucagaaaucagcucaagaacaaugcuaaagaaaucgggaacggauguuuugaguucuaucacaagugcgauaauaccuguauggaaagcgugaagaacggcacauacgacuauccuaaauacuccgaggaagccaagcugaaucgggagaaaauugaugggguuaaacuugagagcacccgcaucuaucaaauccuggccauuuacucuacaguggcuuccagccucguccuggugguuucucugggcgccaucuccuuuuggaugugcagcaacggaucccuccagugcagaauuuguaucuga

SEQ ID NO: 205919 - RNA, 1701 nt, Artificial Sequence
  derived and/or modified CDS sequence (opt5) from hemagglutinin__InfluenzaA__EPI830230
augaaggccauccuggugguccuccuguacaccuucacaacggcuaacgccgacacccuuugcauuggcuaucacgcgaauaacagcacagauaccguugacacagugcuggagaaaaaugugaccgucacacauuccgugaaccuccuggaagauaagcacaaugggaaacuuuguaagcugagaggaguugcuccccuccaucugggcaaaugcaacaucgccggguggauucugggaaauccugagugugaaucucucagcaccgccuccucuuggagcuacaucguggagacguccaacucugacaaugggaccugcuauccgggcgauuuuauuaacuacgaagaacugcgggagcagcuuagcuccgucagcucuuucgaacgcuuugagaucuuccccaagacauccagcuggccuaaucacgacucuaacaagggagugaccgcugccuguccccaugcuggcgccaaauccuuuuauaagaaucugaucuggcucguuaaaaagggcaacagcuacccuaaacugaaucaaucuuauauuaacgauaaggggaaggaagugcuuguccuguggggaauccaccaccccuccacaaccgcggaccagcagagccucuaccagaacgccgaugcuuacguguucgugggcacguccagauauucuaaaauguuuaagccugagauugccacacggccgaaaguccgcgacagagaggggcggaugaauuacuauuggacccugguugaacccggagauaagaucacauucgaggcuaccggcaaccugguggugccucgcuacgccuuuaccauggaaagaaaugcggggagcggaauuaucauuuccgacacacccguccaugauugcaacacgaccugucaaacaccugagggcgccaucaauaccagccuccccuuccagaacauccacccgauuacaaucggcaaaugcccuaaguaugugaaaucuaccaagcugcggcuugcuacggggcugcgcaauguucccuccauucagagcagaggacucuuuggcgccaucgcuggguucauugaaggaggcuggacagggaugguggacggaugguacggcuaucaucaccagaacgagcaaggcucuggguacgccgccgaccuuaagagcacccagaaugcuaucgauaaaaucaccaacaaggucaauuccgugauugagaaaaugaacacacaguuuaccgcgguuggaaaggaguucaaucaccuggagaaacggaucgaaaaccugaauaagaagguggacgauggcuuccucgacauuuggacauacaacgccgagcugcugguccuccuggaaaacgagcgcacgcuugauuaucaugacucuaaugugaaaaaccuguacgagaaggucagaaaucagcucaaaaacaaugcuaaggaaaucgggaacggauguuuugaguucuaucacaaaugcgauaauaccuguauggaaagcgugaagaacggcacauacgacuauccuaaguacuccgaggaagccaaacugaaucgggagaagauugaugggguuaaacuugagagcacccgcaucuaucaaauccuggccauuuacucuacaguggcuuccagccucguccuggugguuucucugggcgccaucuccuuuuggaugugcagcaacggaucccuccagugcagaauuuguaucuga

SEQ ID NO: 205920 - RNA, 1701 nt, Artificial Sequence; identical to SEQ ID NO: 194728
  derived and/or modified CDS sequence (opt5) from hemagglutinin__InfluenzaA__ACQ45338

SEQ ID NO: 205921 - RNA, 1701 nt, Artificial Sequence; identical to SEQ ID NO: 194728
  derived and/or modified CDS sequence (opt5) from hemagglutinin__InfluenzaA__ACQ45338/m1

SEQ ID NO: 205922 - RNA, 1701 nt, Artificial Sequence; identical to SEQ ID NO: 194728
  derived and/or modified CDS sequence (opt5) from hemagglutinin__InfluenzaA__ACQ45338/m2

SEQ ID NO: 205923 - RNA, 1701 nt, Artificial Sequence; identical to SEQ ID NO: 194390
  derived and/or modified CDS sequence (opt5) from hemagglutinin__InfluenzaA__ACU79871

SEQ ID NO: 205924 - RNA, 1701 nt, Artificial Sequence
  derived and/or modified CDS sequence (opt5) from hemagglutinin__InfluenzaA__ACU79871/m1
augaagaccaucauugcccugagcuacaucuucugccucgcucugggccaggaccuucccgggaacgauaauuccacagccacgcugugucucggacaccaugcggugccuaacggcacccuggucaaaacaauuaccgacgaucaaaucgagguuacaaaugcuaccgaacuugugcagucuagcuccacagggaagauuugcaacaauccgcacagaauccuggacggaaucgauuguacccucauugacgcccugcugggcgauccccauugcgacguguuucagaacgagacgugggaucucuucgucgaacggucuaaagccuuuagcaauuguuauccuuacgacgugcccgauuaugcuucccugcgcucucuuguugccagcuccgggacccuggaguucaucacagaaggauuuaccuggacaggcgugacccagaacggcgggagcaaugcuugcaagagaggaccuggcucuggguucuuuucccggcucaacuggcugacgaaaagcggaucuacauaccccguccuuaaugugaccaugccuaacaaugacaacuucgauaagcuguauauuuggggcguucaccauccguccacaaaucaagagcagaccagccucuacgugcaggccucugggcgcgucaccguguccacaagacggagccagcaaacgaucauucccaacaucgagucccgcccuugggugagaggacagucuagccggauuuccaucuauuggaccaucgucaagcccggcgacguucuggugauuaacagcaauggcaaccugaucgcgccucgcggguacuuuaaaaugagaacaggaaagucuuccauuaugcggagcgacgcccccaucgauaccuguauuucugaaugcaucacaccgaauggcagcaucccuaacgacaaacccuuccagaaugugaacaagauuaccuacggggcuuguccuaaauaugucaagcagaauacgcucaagcuggccacaggaaugcgcaacgugcccgagaaacaaaccagaggccuuuuuggggcuaucgccggauucauugaaaauggcugggagggcaugaucgaugggugguacggauuucggcaccagaacuccgagggcaccgggcaggcggccgaccugaagucuacacaagcugccauugaucagaucaauggaaaaguuaaccgcaucauugaaaagaccaaugagaaauuccaccagaucgaaaaggaguucagcgaaguggagggccggauucaggaccucgagaaauaugucgaagauacaaagaucgaccugugguccuacaacgcugagcuucugguggcccucgaaaaucaacauacgauugaucugaccgacagcgagaugaacaagcuguuugagaaaacaagaagacagcuccgcgaaaacgccgaggauauggggaauggcugcuucaagaucuaucacaaaugugacaacgcuugcauugaaucuauccgguccggaaccuacgaccaugauguuuauagagacgaggcgcugaauaaccgcuuucagaucaagggcguggaacuuaaaagcggguacaaggauuggauucuguggaucucuuucgccauuuccugcuuucuccugugugucgugcuucugggauucaucaugugggcuugccagcggggcaauauuagauguaacaucugcaucuga

SEQ ID NO: 205925 - RNA, 1701 nt, Artificial Sequence
  derived and/or modified CDS sequence (opt5) from hemagglutinin__InfluenzaA__EPI643118
augaagaccaucauugcccugagcuacauccucugccugguguucgcucagaaaauucccggcaacgacaauuccacagccacgcuuugucuggggcaccaugcggucccuaacggaaccaucguuaagacaauuaccaaugauagaaucgaggugacaaacgcuaccgaacucgugcaaaauucuagcaucggcgagauuugcgacuccccgcaccagauccuggauggggaaaacuguacacuuauugacgcccugcucggagauccccagugcgacggcuuucagaauaaaaagugggaucuguucgucgagcggucuaaagccuauagcaacuguuacccuuaugacgugcccgauuacgcuucccugcgcucucucguugccagcuccgggacccuggaauuuaauaacgagagcuucaauuggacgggagugacccaaaacggcacaucuuccgcuugcaucagacggucuagcuccagcuuuuucucucgccuuaauuggcugacccaucucaacuauaaguacccugcccugaaugucacaaugcccaacaacgagcaguuugacaaacuuuauauuuggggcgugcaccauccugggaccgauaaggaccagaucuucccguacgcgcaguccagcggaagaauuaucguuuccacgaagcggucucaacaggccgugauccccaauauuggcagccgcccuagaauccgggauauucccucccgcaucagcauuuacuggacaaucgucaaaccuggggacauccugcucauuaacucuaccggaaaucugaucgcucccagaggcuauuuuaagcugcgguccgggaaaagcucuauuaugcgcagcgacgccccgaucggaaaguguaaguccgaaugcauuacaccuaacggcucuauccccaaugauaaaccuuuccagaacgugaauagaaucaccuacggcgcuuguccccgguaugugaagcacagcacccucaaacuggccacagggaugcgcaacguccccgagaagcagacgagaggaauuuuuggcgcgaucgccggguucauugaaaauggaugggagggcaugguugacgggugguacggauuucggcaccaaaacuccgagggcagaggccaggcugccgaucuuaaaagcacccaggcugccaucgaccaaauuaaugggaagcugaaccgccucaucggaaaaacaaaugaaaaguuccaucagauugagaaggaguucucugaaguggaaggccggauccaggaucuggagaaauauguggaggacaccaagaucgaucuuugguccuacaacgccgaacugcucgucgcucuggagaaucagcacacaauugaccugaccgauagcgaaaugaacaaacucuuugagaagacgaaaaagcaacugagagaaaacgcggaggacauggggaauggaugcuucaagaucuaucauaaaugugauaacgccugcauuggcucuauccgcaaugggacauacgaccacaacguguaccgggacgaggcucuuaauaacagauuucagauuaagggcguugaacugaaauccggauauaaggauuggauccucuggaucagcuucgccauuuccugcuuucugcuuuguguggcccugcucggcuucaucaugugggcuugccagaaagggaauauucgcuguaacaucugcauuuga

SEQ ID NO: 205926 - RNA, 1701 nt, Artificial Sequence; identical to SEQ ID NO: 204513
  derived and/or modified CDS sequence (opt5) from hemagglutinin__InfluenzaA__EPI675798

SEQ ID NO: 205927 - RNA, 1701 nt, Artificial Sequence
  derived and/or modified CDS sequence (opt5) from hemagglutinin__InfluenzaA__EPI578430
augaagaccaucauugcccugagcuacauccucugccugguguucgcucagaaaauucccggcaacgacaauuccacagccacgcuuugucuggggcaccaugcggucccuaacggaaccaucguuaagacaauuaccaaugauagaaucgaggugacaaacgcuaccgaacucgugcaaaauucuagcaucggcgagauuugcgacuccccgcaccagauccuggauggggaaaacuguacacuuauugacgcccugcucggagauccccagugcgacggcuuucagaauaaaaagugggaucuguucgucgagcggucuaaagccuauagcuccuguuacccuuaugacgugcccgauuacgcuucucugcgcagccucguugccuccagcgggacccuggaauuuaacaaugagucuuucaacuggacgggagugacccaaaauggcacauccagcgcuugcaucagacggucuuccagcucuuucuucucccgccuuaacuggcugacccaucucaauuauaaguacccugcccugaacgucacaaugcccaauaacgagcaguuugacaaacuuuauauuuggggcgugcaccauccugggaccgauaaagaccagaucuucccguacgcgcagagcuccggaagaauuacgguuucuacaaagcggagccaacaggccgugauccccaacaucggcucccgcccucggauuagagauauccccagccgcauuucuaucuacuggaccauugucaaaccuggggacauccugcucaucaauuccacaggaaaccugauugcucccagaggcuauuuuaagauccggagcgggaaaucuagcauuaugcgcuccgacgccccgaucggaaaguguaagucugaaugcauuaccccuaauggcagcauccccaacgauaaaccuuuccagaaugugaacagaaucaccuacggcgcuuguccccgguaugugaagcacuccacacugaaacucgccacggggaugcgcaauguccccgagaagcagaccagaggaauuuuuggcgcgaucgccggguucauugaaaacggaugggagggcaugguugacgggugguacggauuucggcaccaaaauagcgagggcagaggccaggcugccgaucugaaaucuacacaggcugccaucgaccaaauuaacgggaaacuuaaucgccugaucggaaagaccaacgaaaaguuccaucagauugagaaggaauuuuccgagguggaaggccggauccaggaucucgagaaauauguggaggacacaaagaucgaucuguggagcuacaaugccgaacuucuggucgcucucgagaaccagcacaccauugaccugacggauucugaaaugaauaaacuguuugagaagacaaagaagcaacucagagaaaacgcggaggacauggggaacggaugcuucaagaucuaucauaaaugugauaaugccugcauuggcuccauccgcaacgggaccuacgaccacaauguguaccgggacgaggcucugaacaauagauuucagauuaagggcguugaacuuaaaagcggauauaaggauuggauccuguggaucuccuucgccauuucuugcuuucuccuguguguggcccuucugggcuucaucaugugggcuugccagaaagggaacauucgcuguaauaucugcauuuga

SEQ ID NO: 205928 - RNA, 1701 nt, Artificial Sequence
  derived and/or modified CDS sequence (opt5) from hemagglutinin__InfluenzaA__EPI614406
augaagaccaucauugcccugagcuacauccucugccugguguucgcucagaaaauucccggcaacgacaauuccacagccacgcuuugucuggggcaccaugcggucccuaacggaaccaucguuaagacaauuaccaaugauagaaucgaggugacaaacgcuaccgaacucgugcaaaauucuagcaucggcgagauuugcgacuccccgcaccagauccuggauggggaaaacuguacacuuauugacgcccugcucggagauccccagugcgacggcuuucagaauaaaaagugggaucuguucgucgagcggucuaaagccuauagcuccuguuacccuuaugacgugcccgauuacgcuucucugcgcagccucguugccuccagcgggacccuggaauuuaacaaugagucuuucaacuggacgggagugacccaaaauggcacauccagcgcuugcaucagacggucuuccagcucuuucuucucccgccuuaacuggcugacccaucucaauuauaaguacccugcccugaacgucacaaugcccaauaacgagcaguuugacaaacuuuauauuuggggcgugcaccauccugggaccgauaaagaccagaucuucccguacgcgcagagcuccggaagaauuacgguuucuacaaagcggagccaacaggccgugauccccaacaucggcucccgcccucggauuagaaauauccccagccgcauuucuaucuacuggaccauugucaaaccuggggauauccugcucaucaacuccacaggaaaucugauugcucccagaggcuauuuuaagauccggagcgggaaaucuagcauuaugcgcuccgacgccccgaucggaaaguguaagucugaaugcauuaccccuaacggcagcauccccaaugacaaaccuuuccagaacgugaauagaaucaccuacggcgcuuguccccgguaugugaagcacuccacacugaaacucgccacggggaugcgcaacguccccgagaagcagaccagaggaauuuuuggcgcgaucgccggguucauugaaaauggaugggagggcaugguugaugggugguacggauuucggcaccaaaacagcgagggcagaggccaggcugccgaccugaaaucuacacaggcugccaucgaucaaauuaaugggaaacuuaaccgccugaucggaaagaccaaugaaaaguuccaucagauugagaaggaauuuuccgagguggaaggccggauccaggaccucgagaaauauguggaggauacaaagaucgaccuguggagcuacaacgccgaacuucuggucgcucucgagaaucagcacaccauugaucugacggacucugaaaugaacaaacuguuugagaagacaaagaagcaacucagagaaaacgcggaggauauggggaauggaugcuucaagaucuaucauaaaugugacaacgccugcauuggcuccauccgcaaugggaccuacgaucacaacguguaccgggacgaggcucugaauaacagauuucagauuaagggcguugaacuuaaaagcggauauaaggacuggauccuguggaucuccuucgccauuucuugcuuucuccuguguguggcccuucugggcuucaucaugugggcuugccagaaagggaauauucgcuguaacaucugcauuuga

SEQ ID NO: 205929 - RNA, 1695 nt, Artificial Sequence
  derived and/or modified CDS sequence (opt5) from hemagglutinin__InfluenzaA__ACU65077/m1
auggagaagaucgugcuccuguucgccauugucagccugguuaaauccgaccagaucugcauuggcuaccacgcuaacaauucuaccgaacaaguggauacaaucauggagaagaacgugacggucacccaugcccaggacauucuugaaaagacacacaaugggaagcugugugaucucgacggagugaaaccccugauccuuagagauugcagcguugcgggcuggcugcucgggaacccuaugugugacgaguuuaucaaugugccggaaugguccuauauugucgagaaggcuaaccccgugaaugaucugugcuacccuggagacuucaacgauuaugaggaacugaagcaucuccugucucggaucaaucacuuugagaaaauucagaucauucccaagagcuccuggucuagccaugaagccucccuuggcguuagcucugccuguccuuaccaggggaaauccagcuucuuucgcaacguggucuggcugaucaagaaaaauucuaccuaucccacaauuaagagauccuacaacaauaccaaccaagaggaccuccuggugcuuuggggaauccaccacccuaaugaugcugccgagcagacaaagcuguaucagaacccgaccacguacaucagcgugggcaccucuacacucaaccagcggcuggucccccgcauugcuaccagauccaaaguuaauggccaaagcgggcggauggaguucuuuuggacaauccugaagccuaacgacgccauuaauuucgaauccaacggaaauuuuaucgcgcccgaauacgccuauaaaauugugaagaaaggcgauucuaccaucaugaaaagcgagcucgaauacgggaacugcaauacgaaaugucagacaccuaugggagcuaucaacuccagcaugcccuuccauaauauucacccgcugaccaucggcgagugcccuaaguaugugaagucuaaccgccuuguccuggccacagggcucagaaauagcccccagcgggagacccgcggacuguuuggcgcuauugccggcuucaucgaagggggauggcagggcaugguggacgggugguacggauaucaucacuccaacgagcaaggcucuggguacgcggccgacaaagaaagcacccagaaggcuauugauggaguuacaaauaaagugaacuccaucaucgacaagaugaauacgcaguuugaggccgucggcagagaguucaacaaccuugaacggcgcauugagaaucugaacaaaaagauggaagauggcuuccucgacguguggaccuauaaugcugagcugcugguucucauggaaaacgagagaacacuggauuuucacgacucuaaugugaagaaccuuuacgauaaaguccggcugcaacuccgcgacaaugccaaggaacuggggaacggauguuucgaguuuuaccauaaaugcgauaaugaguguauggaaagcgugagaaacggcaccuaugacuacccucaguauuccgaggaagcccggcuuaagagagaggagaucagcggggucaaacuggaaucuauuggaaucuaccagauucucuccaucuauagcacaguggcuucuucccuggcgcuggccauuaugguugcuggccucagccuguggaugugcuccaaugggucucuucagugccgcaucuguaucuga

SEQ ID NO: 205930 - RNA, 1695 nt, Artificial Sequence; identical to SEQ ID NO: 205929
  derived and/or modified CDS sequence (opt5) from hemagglutinin__InfluenzaA__ACU65077/m2

SEQ ID NO: 205931 - RNA, 1707 nt, Artificial Sequence; identical to SEQ ID NO: 192100
  derived and/or modified CDS sequence (opt5) from hemagglutinin__InfluenzaA__ABP51976

SEQ ID NO: 205932 - RNA, 1707 nt, Artificial Sequence; identical to SEQ ID NO: 192100
  derived and/or modified CDS sequence (opt5) from hemagglutinin__InfluenzaA__ABP51976/m1

SEQ ID NO: 205933 - RNA, 1695 nt, Artificial Sequence
  derived and/or modified CDS sequence (opt5) from hemagglutinin__InfluenzaA__ABW90125
auggagaagaucgugcuccuguucgccauugucagccugguuaaauccgaccagaucugcauuggcuaccacgcuaacaauucuaccgaacaaguggauacaaucauggagaagaacgugacggucacccaugcccaggacauucuugagaaaaagcacaaugggaaacugugugaucucgacggagugaagccccugauccuuagagauugcagcguugcgggcuggcugcucgggaacccuaugugugacgaauuuaucaaugugccggaaugguccuauauugucgagaaggcuaaccccgugaaugaucugugcuacccuggagacuucaacgauuaugaggaacugaaacaucuccugucucggaucaaucacuuugagaagauucagaucauucccaaaagcuacugguccucucaugaagccagccuuggcguuuccagcgccuguccuuaucaggggaagucuuccuucuuucgcaacguggucuggcugaccaaaaagaauagcacauaccccacaaucaagagaucuuauaacaauaccaaccaagaggaccuccuggugcuuuggggcauucaccacccuaaugaugcugccgagcagacaaaacuguaccagaacccgaccacguacaucuccgugggaaccagcacacucaaccagcggcuggucccccgcaucgcuaccagaucuaagguuaauggccaauccgggcggauggaguucuuuuggacaauucugaaaccuaacgacgccaucaauuucgaaagcaacggaaauuuuauugcgcccgaauaugccuacaagaucgugaaaaagggcgauuccaccauuaugaaaucugagcucgaauaugggaacugcaauacgaagugucagacaccuaugggagcuaucaacagcuccaugcccuuccauaauauccacccgcugaccauuggcgagugcccuaaguacgugaaaagcaaccgccuuguccuggccacagggcucagaaauucuccccagcgggagacccgcggacuguuuggcgcuaucgccggcuucauugaagggggauggcagggcaugguggacgggugguauggauaccaucacuccaacgagcaaggcagcggguaugcggccgacaaggaaucuacccagaaagcuaucgauggaguuacaaauaaggugaacagcauuaucgacaaaaugaauacgcaguuugaggccgucggcagagaguucaacaaccuugaacggcgcaucgagaaucugaacaagaagauggaagauggcuuccucgacguguggaccuacaaugcugagcugcugguucucauggaaaacgagagaacacuggauuuucacgacuccaaugugaaaaaccuuuacgauaagguccggcugcaacuccgcgacaaugccaaagaacuggggaacggauguuucgaguuuuaucauaagugcgauaaugaguguauggaaucugugagaaacggcaccuacgacuauccucaguacagcgaggaagcccggcuuaaaagagaggagauuuccggggucaagcuggaaagcaucggaauuuaucagauccucucuauuuacuccacaguggcuagcucucuggcgcuggccaucaugguugcuggccucucccuguggaugugcagcaaugggucccuucagugccgcauuuguaucuga

SEQ ID NO: 205934 - RNA, 1695 nt, Artificial Sequence
  derived and/or modified CDS sequence (opt5) from hemagglutinin__InfluenzaA__ABW90126
auggagaagaucgugcuccuguucgccauugucagccugguuaaauccgaccagaucugcauuggcuaccacgcuaacaauucuaccgaacaaguggauacaaucauggagaagaacgugacggucacccaugcccaggacauucuugagaaaaagcacaaugggaaacugugugaucucgacggagugaagccccugauccuuagagauugcagcguugcgggcuggcugcucgggaacccuaugugugacgaauuuaucaaugugccggaaugguccuauauugucgagaaggcuaaccccgugaaugaucugugcuacccuggagacuucaacgauuaugaggaacugaaacaucuccugucucggaucaaucacuuugagaagauucagaucauucccaaaagcuccuggucuagccaugaagccucccuuggcguuagcucugccuguccuuaccaggggaaguccagcuucuuucgcaacguggucuggcugaucaaaaagaacucuacauaucccaccauuaagggauccuacaauaauacaaaccaagaggaccuccuggugcuuuggggcauccaccacccuaaugaugcugccgagcagaccaaacuguaucagaacccgacaaccuacaucagcgugggcacgucuacccucaaccagagacuggucccccggauugcuacacgcuccaagguuaaugggcaaagcggaagaauggaguucuuuuggaccauccugaaaccuaacgacgccauuaauuucgaauccaacggcaauuuuaucgcgcccgaauacgccuauaagauugugaaaaagggggauucuacaaucaugaaaagcgagcucgaauacggaaacugcaauaccaagugucagacgccuaugggcgcuaucaacuccagcaugcccuuccauaauauucacccgcugacaaucggggagugcccuaaguaugugaaaucuaaccggcuuguccuggccaccggacuccgcaauagcccccagagagagacacggggccuguuuggcgcuauugccggguucaucgaaggaggcuggcaggggaugguggacggaugguacggcuaucaucacuccaacgagcaagggucuggauacgcggccgacaaggaaagcacccagaaagcuauugauggcguuaccaauaaggugaacuccaucaucgacaaaaugaauacacaguuugaggccgucggccgcgaguucaacaaccuugaaagacggauugagaaucugaacaagaagauggaagauggguuccucgacguguggacguauaaugcugagcugcugguucucauggaaaacgagcgcacccuggauuuucacgacucuaaugugaaaaaccuuuacgauaaggucagacugcaacuccgggacaaugccaaagaacugggaaacggcuguuucgaguuuuaccauaagugcgauaaugaguguauggaaagcgugcgcaacgggacauaugacuacccucaguauuccgaggaagccagacuuaaacgggaggagaucagcggagucaagcuggaaucuauuggcaucuaccagauucucuccaucuauagcaccguggcuucuucccuggcgcuggccauuaugguugcugggcucagccuguggaugugcuccaauggcucucuucagugcagaaucuguaucuga

SEQ ID NO: 205935 - RNA, 1695 nt, Artificial Sequence
  derived and/or modified CDS sequence (opt5) from hemagglutinin__InfluenzaA__ABW90127
auggagaagaucgugcuccuguucgccauugucagccugguuaaauccgaccagaucugcauuggcuaccacgcuaacaauucuaccgaacaaguggauacaaucauggagaagaacgugacggucacccaugcccaggacauucuugagaaaaagcacaaugggaaacugugugaucucgacggagugaagccccugauccuuagagauugcagcguugcgggcuggcugcucgggaacccuaugugugacgaguuuaucaaugugccggaaugguccuauauugucgagaaggcuaaccccgugaaugaucugugcuacccuggagacuucaacgauuaugaggaacugaaacaucuccugucucggaucaaucacuuugagaagauucagaucauucccaaaagcuccuggucuagccaugaagccucccuuggcguuagcucugccuguccuuaccagggggaguccagcuucuuucgcaacguggucuggcugaucaagaaaaauucuacauaucccaccauuaagagauccuacaacaauacaaaccaagaggaccuccuggugcuuuggggaauccaccacccuaaugaugcugccgaacagaccaagcuguaucagaacccgacaaccuacaucagcgugggcacgucuacccucaaccagcggcuggucccccgcauugcuacaagauccaaaguuaauggccaaagcgggcggauggaguucuuuuggaccauccugaagccuaacgacgccauuaauuucgaauccaacggaaauuuuaucgcgcccgaguacgccuauaaaauugugaagaaaggcgauucuacaaucaugaaguccgaacucgaguacgggaacugcaauaccaaaugucagacgccuaugggagcuaucaacuccagcaugcccuuccauaauauucacccgcugacaaucggcgagugcccuaaguaugugaagucuaaccgccuuguccuggccaccgggcucagaaauagcccccagcgggaaacacgcggacuguuuggcgcuauugccggcuucaucgaagggggauggcagggcaugguggacgggugguacggauaucaucacagcaacgaacaaggcucuggguacgcggccgacaaagagagcacccagaaggcuauugauggaguuaccaauaaagugaacuccaucaucgacaagaugaauacacaguuugaagccgucggcagagaguucaacaaccuugagcggcgcauugaaaaucugaacaaaaagauggaggauggcuuccucgacguguggacguauaaugcugaacugcugguucucauggagaacgaaagaacccuggauuuucacgacucuaaugugaagaaccuuuacgauaaaguccggcugcaacuccgcgacaaugccaaggagcuggggaacggauguuucgaguuuuaccauaaaugcgauaaugaauguauggagagcgugagaaacggcacauaugacuacccucaguauuccgaagaggcccggcuuaagagagaggaaaucagcggggucaaacuggagucuauuggaaucuaccagauucucuccaucuauagcaccguggcuucuucccuggcgcuggccauuaugguugcuggccucagccuguggaugugcuccaaugggucucuucagugccgcaucuguaucuga

SEQ ID NO: 205936 - RNA, 1695 nt, Artificial Sequence
  derived and/or modified CDS sequence (opt5) from hemagglutinin__InfluenzaA__ABW90128
auggagaagaucgugcuccuguucgccauugucagccugguuaaauccgaccagaucugcauuggcuaccacgcuaacaauucuaccgaacaaguggauacaaucauggagaagaacgugacggucacccaugcccaggacauucuugagaaaaagcacaaugggaaacugugugaucucgacggagugaagccccugauccuuagagauugcagcguugcgggcuggcugcucgggaacccuaugugugacgaguuuaucaaugugccggaaugguccuauauugucgagaaggcuaaccccgugaaugaucugugcuacccuggagacuucaacgauuaugaggaacugaaacaucuccugucucggaucaaucacuuugagaagauucagaucauucccaaaagcuccuggucuagccaugaagccucccuuggcguuagcucugccuguccuuaccaggggaaguccagcuucuuucgcaacguggucuggcugaucgagaaaaauucuacauaucccaccauuaagagauccuacaacaauacaaaccaagaggaccuccuggugcuuuggggaauccaccacccuaaugaugcugccgaacagaccaagcuguaucagaacccgacaaccuacaucagcgugggcacgucuacccucaaccagcggcuggucccccgcauugcuacaagauccaaaguuaauggccaaagcgggcggauggaguucuuuuggaccauccugaagccuaacgacgccauuaauuucgaauccaacggaaauuuuaucgcgcccgaguacgccuauaaaauugugaagaaaggcgauucuacaaucaugaaguccgaacucgaguacgggaacugcaauaccaaaugucagacgccuaugggagcuaucaacuccagcaugcccuuccauaauauucacccgcugacaaucggcgagugcccuaaguaugugaagucuaaccgccuuguccuggccaccgggcucagaaauagcccccagcgggaaacacgcggacuguuuggcgcuauugccggcuucaucgaagggggauggcagggcaugguggacgggugguacggauaucaucacagcaacgaacaaggcucuggguacgcggccgacaaagagagcacccagaaggcuauugauggaguuaccaauaaagugaacuccaucaucgacaagaugaauacacaguuugaagccgucggcagagaguucaacaaccuugagcggcgcauugaaaaucugaacaaaaagauggaggauggcuuccucgacguguggacguauaaugcugaacugcugguucucauggagaacgaaagaacccuggauuuucacgacucuaaugugaagaaccuuuacgauaaaguccggcugcaacuccgcgacaaugccaaggagcuggggaacggauguuucgaguuuuaccauaaaugcgauaaugaauguauggagagcgugagaaacggcacauaugacuacccucaguauuccgaagaggcccggcuuaagagagaggaaaucagcggggucaaacuggagucuauuggaaucuaccagauucucuccaucuauagcaccguggcuucuucccuggcgcuggccauuaugguugcuggccucagccuguggaugugcuccaaugggucucuucagugccgcaucuguaucuga

SEQ ID NO: 205937 - RNA, 1695 nt, Artificial Sequence
  derived and/or modified CDS sequence (opt5) from hemagglutinin__InfluenzaA__ABW90129
auggagaagaucgugcuccuguucgccauugucagccugguuaaauccgaccagaucugcauuggcuaccacgcuaacaauucuaccgaacaaguggauacaaucauggagaagaacgugacggucacccaugcccaggacauucuugagaaaaagcacaaugggaaacugugugaucucgacggagugaagccccugauccuuagagauugcagcguugcgggcuggcugcucgggaacccuaugugugacgaguuuaucaaugugccggaaugguccuauauugucgagaaggcuaaccccgugaaugaucugugcuacccuggagacuucaacgauuaugaggaacugaaacaucuccugucucggaucaaucacuuugagaagauucagaucauucccaaaagcuccuggucuagccaugaagccucccuuggcguuagcucugccuguccuuaccaggggaaguccagcuucuuucgcaacguggucuggcugaucaaaaagaacucugcuuaucccacaauuaagagauccuacaauaauaccaaccaagaggaccuccuggugcuuuggggaauccaccacccuaaugaugccgcugagcagacagaacuguaucagaacccgaccacauacaucagcgugggcaccucuacgcucaaccagcggcuggucccccgcauugccaccagauccaaaguuaauggccaaagcgggcggauggaguucuuuuggacaauccugaagccuaacgacgcgauuaauuucgaauccaacggaaauuuuaucgcccccgaguacgcuuauaaaauugugaagaaaggcgauucuaccaucaugaaguccgaacucgaguacgggaacugcaauacaaaaugucagaccccuaugggagccaucaacuccagcaugcccuuccauaauauucacccgcugacgaucggcgagugcccuaaguaugugaagucuaaccgccuuguccuggcuacagggcucagaaauagcccccagcgggaaacccgcggacuguuuggcgccauugcgggcuucaucgaagggggauggcagggcaugguggacgggugguacggauaucaucacagcaacgaacaaggcucuggguacgccgcugacaaagagagcacacagaaggccauugauggaguuaccaauaaagugaacuccaucaucgacaagaugaauacccaguuugaagcugucggcagagaguucaacaaccuugagcggcgcauugaaaaucugaacaaaaagauggaggauggcuuccucgacguguggacauauaaugccgaacugcugguucucauggagaacgaaagaacgcuggauuuucacgacucuaaugugaagaaccuuuacgauaaaguccggcugcaacuccgcgacaaugccaaggagcuggggaacggauguuucgaguuuuaccauaaaugcgauaaugaauguauggagagcgugagaaacggcaccuaugacuacccucaguauuccgaagaggcucggcuuaagagagaggaaaucagcggggucaaacuggagucuauuggaaucuaccagauucucuccaucuauagcacaguggcgucuucccuggcccuggcuauuaugguugccggccucagccuguggaugugcuccaaugggucucuucagugccgcaucuguaucuga

SEQ ID NO: 205938 - RNA, 1695 nt, Artificial Sequence
  derived and/or modified CDS sequence (opt5) from hemagglutinin__InfluenzaA__ABW90130
auggagaagaucgugcuccuguucgccauugucagccugguuaaauccgaccagaucugcauuggcuaccacgcuaacaauucuaccgaacaaguggauacaaucauggagaagaacgugacggucacccaugcccaggacauucuugagaaaaagcacaaugggaaacugugugaucucgacggagugaagccccugauccuuagagauugcagcguugcgggcuggcugcucgggaacccuaugugugacgaauuuaucaaugugccggaaugguccuauauugucgagaaggcuaaccccgugaaugaucugugcuacccuggagacuucaacgauuaugaggaacugaaacaucuccugucucggaucaaucacuuugagaagauucagaucauucccaaaagcuccuggucuagccaugaagccucccuuggcguuagcucugccuguccuuaccaggggaaguucuccuuuuuccgcaacguggucuggcugaucaaaaagaauagcacauaucccaccauuaagagaucuuacaacaauacaaaccaagaggaccuccuggugcuuuggggaauccaccacccuaaugaugcugccgagcagaccaaacuguaucagaacccgacaaccuacaucuccgugggcacgagcacccucaaccagcggcuggucccccgcauugcuacaagaucuaagguuaauggccaauccgggcggauggaauuuuucuggaccauccugaaaccuaacgacgccauuaauuuugagagcaacggaaauuucaucgcgcccgaauacgccuauaagauugugaaaaagggcgauuccacaaucaugaaaucugagcucgaauacgggaacugcaauaccaagugucagacgccuaugggagcuaucaacagcuccaugcccuuucauaauauucacccgcugacaaucggcgagugcccuaaguaugugaaaagcaaccgccuuguccuggccaccgggcucagaaauucuccccagcgggagacacgcggacuguucggcgcuauugccggcuuuaucgaagggggauggcagggcaugguggacgggugguacggauaucaucacuccaacgagcaaggcagcggguacgcggccgacaaggaaucuacccagaaagcuauugauggaguuaccaauaaggugaacagcaucaucgacaaaaugaauacacaguucgaggccgucggcagagaguucaacaaccuugaacggcgcauugagaaucugaacaagaagauggaagauggcuuucucgacguguggacguauaaugcugagcugcugguucucauggaaaacgagagaacccuggauuuccacgacuccaaugugaaaaaccuuuacgauaagguccggcugcaacuccgcgacaaugccaaagaacuggggaacggauguuuugaguucuaccauaagugcgauaaugaguguauggaaucugugagaaacggcacauaugacuacccucaguauagcgaggaagcccggcuuaaaagagaggagaucuccggggucaagcuggaaagcauuggaaucuaccagauucucucuaucuauuccaccguggcuagcucucuggcgcuggccauuaugguugcuggccucucccuguggaugugcagcaaugggucccuucagugccgcaucuguaucuga

SEQ ID NO: 205939 - RNA, 1695 nt, Artificial Sequence
  derived and/or modified CDS sequence (opt5) from hemagglutinin__InfluenzaA__ABW90132
auggagaagaucgugcuccuguucgccauugucagccugguuaaauccgaccagaucugcauuggcuaccacgcuaacaauucuaccgaacaaguggauacaaucauggagaagaacgugacggucacccaugcccaggacauucuugagaaaaagcacaaugggaaacugugugaucucgacggagugaagccccugauccuuagagauugcagcguugcgggcuggcugcucgggaacccuaugugugacgaguuuaucaaugugccggaaugguccuauauugucgagaaggcuaaccccgugaaugaucugugcuacccuggagacuucaacgauuaugaggaacugaaacaucuccugucucggaucaaucacuuugagaagauucagaucauucccaaaagcuccuggucuagccaugaagccucccuuggcguuagcucugccuguccuuaccaggggaaguccagcuucuuucgcaacguggucuggcugaucaaaaagaacucuacauaucccaccauuaagagauccuacaauaauacaaaccaagaggaccuccuggugcuuuggggaauccaccacccuaauaacgcugccgagcagaccgaacuguaucagaacccgacaaccuacaucagcgugggcacgucuacccucaaucagcggcuggucccccgcauugcuacaagauccaaaguuaacggccaaagcgggcggauggaguucuuuuggaccauccugaagccuaaugaugccauuaacuucgaauccaauggaaacuuuaucgcgcccgaguacgccuauaaaauugugaagaaaggcgacucuacaaucaugaaguccgaacucgaguacgggaauugcaacaccaaaugucagacgccuaugggagcuaucaauuccagcaugcccuuccauaacauucacccgcugacaaucggcgagugcccuaaguaugugaagucuaaucgccuuguccuggccaccgggcucagaaacagcccccagcgggaaacacgcggacuguuuggcgcuauugccggcuucaucgaagggggauggcagggcaugguggaugggugguacggauaucaucacagcaaugaacaaggcucuggguacgcggccgacaaagagagcacccagaaggcuauugacggaguuaccaacaaagucaauuccaucaucgauaagaugaacacacaguuugaagccgugggcagagaguucaacaaucuugagcggcgcauugaaaaccugaauaaaaagauggaggacggcuuccucgauguguggacguauaacgcugaacugcugguucucauggagaaugaaagaacccuggacuuucacgauucuaacgugaagaaucuuuacgacaaaguccggcugcaacuccgcgauaacgccaaggagcuggggaauggauguuucgaguuuuaccauaaaugcgacaacgaauguauggagagcgugagaaauggcacauaugauuacccucaguauuccgaagaggcccggcuuaagagagaggaaaucagcggggucaaacuggagucuauuggaaucuaccagauucucuccaucuauagcaccguggcuucuucccuggcgcuggccauuaugguugcuggccucagccuguggaugugcuccaacgggucucuucagugccgcaucuguaucuga

SEQ ID NO: 205940 - RNA, 1695 nt, Artificial Sequence
  derived and/or modified CDS sequence (opt5) from hemagglutinin__InfluenzaA__ABW90133
auggagaagaucgugcuccuguucgccauugucagccugguuaaauccgaccagaucugcauuggcuaccacgcuaacaauucuaccgaacaaguggauacaaucauggagaagaacgugacggucacccaugcccaggacauucuugagaaaaagcacaaugggaaacugugugaucucgacggagugaagccccugauccuuagagauugcagcguugcgggcuggcugcucgggaacccuaugugugacgaauuuaucaaugugccggaaugguccuauauugucgagaaggcuaaccccgugaaugaucugugcuacccuggagacuucaacgauuaugaggaacugaaacaucuccugucucggaucaaucacuuugagaagauucagaucauucccaaaagcuccuggucuagccaugaagccucccuuggcguuagcucugccuguccuuaccaggggaagcccuccuucuuucgcaacguggucuggcugaucaaaaagaauagcacauauccuaccauuaagagaucuuacaacaauacaaaccaagaggaccuccuggugcuuuggggaauccaccacccgaaugaugcugccgagcagaccaaacuguaucagaaccccacaaccuacaucuccgugggcacgagcacccucaaccagcggcuggucccucgcauugcuacaagaucuaagguuaauggccaauccgggcggauggaguucuuuuggaccauccugaaacccaacgacgccauuaauuucgaaagcaacggaaauuuuaucgcgccugaauacgccuauaagauugugaaaaagggcgauuccacaaucaugaaaucugagcucgaauacgggaacugcaauaccaagugucagacgcccaugggagcuaucaacagcuccaugccguuccauaauauucacccucugacaaucggcgagugccccaaguaugugaaaagcaaccgccuuguccuggccaccgggcucagaaauucuccucagcgggagacacgcggacuguuuggcgcuauugccggcuucaucgaagggggauggcagggcaugguggacgggugguacggauaucaucacuccaacgagcaaggcagcggguacgcggccgacaaggaaucuacccagaaagcuauugauggaguuaccaauaaggugaacagcaucaucgacaaaaugaauacacaguuugaggccgucggcagagaguucaacaaccuugaacggcgcauugagaaucugaacaagaagauggaagauggcuuccucgacguguggacguauaaugcugagcugcugguucucauggaaaacgagagaacccuggauuuucacgacuccaaugugaaaaaccuuuacgauaagguccggcugcaacuccgcgacaaugccaaagaacuggggaacggauguuucgaguuuuaccauaagugcgauaaugaguguauggaaucugugagaaacggcacauaugacuacccccaguauagcgaggaagcccggcuuaaaagagaggagaucuccggggucaagcuggaaagcauuggaaucuaccagauucucucuaucuauuccaccguggcuagcucucuggcgcuggccauuaugguugcuggccucucccuguggaugugcagcaaugggucccuucagugccgcaucuguaucuga

SEQ ID NO: 205941 - RNA, 1695 nt, Artificial Sequence
  derived and/or modified CDS sequence (opt5) from hemagglutinin__InfluenzaA__ABW90134
auggagaagaucgugcuccuguucgccauugucagccugguuaaauccgaccagaucugcauuggcuaccacgcuaacaauucuaccgaacaaguggauacaaucauggagaagaacgugacggucacccaugcccaggacauucuugagaaaaagcacaaugggaaacugugugaucucgacggagugaagccccugauccuuagagauugcagcguugcgggcuggcugcucgggaacccuaugugugacgaauuuaucaaugugccggaaugguccuauauugucgagaaggcuaaccccgugaaugaucugugcuacccuggagacuucaacgauuaugaggaacugaaacaucuccugucucggaucaaucacuuugagaagauucagaucauucccaaaagcuccuggucuagccaugaagccucccuuggcguuagcucugccuguccuuaccaggagaaguccagcuucuuucgcaacguggucuggcugaucaaaaagaacucuacauaucccaccauuaagagauccuacaauaauacaaaccaagaggaccuccuggugcuuugggggauccaccacccuaaugaugcugccgaacagaccaaacuguaucagaacccgacaaccuacaucagcgugggaacgucuacccucaaccagcggcuggucccccgcauugcuacaagauccaagguuaauggccaaagcggccggauggaguucuuuuggaccauccugaaaccuaacgacgccauuaauuucgaauccaacgggaauuuuaucgcgcccgaguacgccuauaagauugugaaaaagggagauucuacaaucaugaaaagcgaacucgaguacggcaacugcaauaccaagugucagacgccuaugggggcuaucaacuccagcaugcccuuccauaauauucacccgcugacaaucggagagugcccuaaguaugugaaaucuaaccgccuuguccuggccaccggccucagaaauagcccccagcgggaaacacgcgggcuguuuggagcuauugccggcuucaucgagggcggguggcagggaaugguggacggcugguacggguaucaucacuccaacgaacaaggaucuggcuacgcggccgacaaggagagcacccagaaagcuauugaugggguuaccaauaaggugaacuccaucaucgacaaaaugaauacacaguuugaagccgucggaagagaguucaacaaccuugagcggcgcauugaaaaucugaacaagaagauggaggauggcuuccucgacguguggacguauaaugcugaacugcugguucucauggagaacgaaagaacccuggauuuucacgacucuaaugugaaaaaccuuuacgauaagguccggcugcaacuccgcgacaaugccaaagagcugggcaacggguguuucgaguuuuaccauaagugcgauaaugaauguauggagagcgugagaaacggaacauaugacuacccucaguauuccgaagaggcccggcuuaaaagagaggaaaucagcggcgucaagcuggagucuauugggaucuaccagauucucuccaucuauagcaccguggcuucuucccuggcgcuggccauuaugguugcuggacucagccuguggaugugcuccaauggcucucuucagugccgcaucuguaucuga

SEQ ID NO: 205942 - RNA, 1695 nt, Artificial Sequence
  derived and/or modified CDS sequence (opt5) from hemagglutinin__InfluenzaA__ABW90135
auggagaagaucgugcuccuguucgccauugucagccugguuaaauccgaccagaucugcauuggcuaccacgcuaacaauucuaccgaacaaguggauacaaucauggagaagaacgugacggucacccaugcccaggacauucuugaaaagaagcacaaugggaaacugugugaucucgacggagugaagccccugauccuuagagauugcagcguugcgggcuggcugcucgggaacccuaugugugacgaguuuaucaaugugccggaaugguccuauauugucgagaaggcuaaccccgugaaugaucugugcuacccuggagacuucaacgauuaugaggaacugaaacaucuccugucucggaucaaucacuuugagaagauucagaucauucccaaaagcuccuggucuagccaugaagccucccuuggcguuagcucugccuguccuuaccaggggaaguccagcuucuuucgcaacguggucuggcugaucaauaaaaacucuacauaucccaccauuaagagauccuacaauaacacaaaucaagaggaccuccuggugcuuuggggaauccaccacccuaacgaugcugccgagcagaccaagcuguaucagaacccgacaaccuacaucagcgugggcacgucuacccucaaucagcggcuggucccccgcauugcuacaagauccaaaguuaacggccaaagcgggcggauggaguucuuuuggaccauccugaagccuaaugacgccauuaacuucgaauccaauggaaacuuuaucgcgcccgaauacgccuauaaaauugugaagaaaggcgauucuacaaucaugaaaagcgagcucgaauacgggaauugcaacaccaaaugucagacgccuaugggagcuaucaauuccagcaugcccuuccauaacauucacccgcugacaaucggcgagugcccuaaguaugugaagucuaaucgccuuguccuggccaccgggcucagaaacagcccccagcgggagacacgcggacuguuuggcgcuauugccggcuucaucgaagggggauggcagggcaugguggacgggugguacggauaucaucacuccaaugagcaaggcucuggguacgcggccgacaaagaaagcacccagaaggcuauugauggaguuaccaacaaagucaauuccaucaucgacaagaugaacacacaguuugaggccgugggcagagaguucaacaaucuugaacggcgcauugagaaccugaauaaaaagauggaagauggcuuccucgacguguggacguauaacgcugagcugcugguucucauggaaaaugagagaacccuggauuuucacgacucuaacgugaagaaucuuuacgauaaaguccggcugcaacuccgcgacaacgccaaggaacuggggaauggauguuucgaguuuuaccauaaaugcgauaacgaguguauggaaagcgugagaaauggcacauaugacuacccucaguauuccgaggaagcccggcuuaagagagaggagaucagcggggucaaacuggaaucuauuggaaucuaccagauucucuccaucuauagcaccguggcuucuucccuggcgcuggccauuaugguugcuggccucagccuguggaugugcuccaacgggucucuucagugccgcaucuguaucuga

SEQ ID NO: 205943 - RNA, 1695 nt, Artificial Sequence
  derived and/or modified CDS sequence (opt5) from hemagglutinin__InfluenzaA__HB649491
auggagaagaucgugcuccuguucgccauugucagccugguuaaauccgaccagaucugcauuggcuaccacgcuaacaauucuaccgaacaaguggauacaaucauggagaagaacgugacggucacccaugcccaggacauucuugagaaaaagcacaaugggaaacugugugaucucgacggagugaagccccugauccuuagagauugcagcguugcgggcuggcugcucgggaacccuaugugugacgaauuuaucaaugugccggaaugguccuauauugucgagaaggcuaaccccgugaaugaucugugcuacccuggagacuucaacgauuaugaggaacugaaacaucuccugucucggaucaaucacuuugagaagauucagaucauucccaaaagcuccuggucuagccaugaagccucccuuggcguuagcucugccuguccuuaccaggggaaguccagcuucuuucgcaacguggucuggcugaucaaaaagaacucuacauaucccaccauuaagagauccuacaauaauacaaaccaagaggaccuccuggugcuuuggggaauccaccacccuaaugaugcugccgagcagaccaaacuguaucagaacccgacaaccuacaucagcgugggcacgucuacccucaaccagcggcuggucccccgcauugcuacaagauccaagguuaauggccaaagcgggcggauggaguucuuuuggaccauccugaaaccuaacgacgccauuaauuucgaauccaacggaaauuuuaucgcgcccgaauacgccuauaagauugugaaaaagggcgauucuacaaucaugaaaagcgagcucgaauacgggaacugcaauaccaagugucagacgccuaugggagcuaucaacuccagcaugcccuuccauaauauucacccgcugacaaucggcgagugcccuaaguaugugaaaucuaaccgccuuguccuggccaccgggcucagaaauagcccccagcgggagacacgcggacuguuuggcgcuauugccggcuucaucgaagggggauggcagggcaugguggacgggugguacggauaucaucacuccaacgagcaaggcucuggguacgcggccgacaaggaaagcacccagaaagcuauugauggaguuaccaauaaggugaacuccaucaucgacaaaaugaauacacaguuugaggccgucggcagagaguucaacaaccuugaacggcgcauugagaaucugaacaagaagauggaagauggcuuccucgacguguggacguauaaugcugagcugcugguucucauggaaaacgagagaacccuggauuuucacgacucuaaugugaaaaaccuuuacgauaagguccggcugcaacuccgcgacaaugccaaagaacuggggaacggauguuucgaguuuuaccauaagugcgauaaugaguguauggaaagcgugagaaacggcacauaugacuacccucaguauuccgaggaagcccggcuuaaaagagaggagaucagcggggucaagcuggaaucuauuggaaucuaccagauucucuccaucuauagcaccguggcuucuucccuggcgcuggccauuaugguugcuggccucagccuguggaugugcuccaaugggucucuucagugccgcaucuguaucuga

SEQ ID NO: 205944 - RNA, 1683 nt, Artificial Sequence; identical to SEQ ID NO: 202060
  derived and/or modified CDS sequence (opt5) from hemagglutinin__InfluenzaA__EPI439507

SEQ ID NO: 205945 - RNA, 1701 nt, Artificial Sequence
  derived and/or modified CDS sequence (opt5) from hemagglutinin__InfluenzaA__EPI482777
augaaggccauccuggugguccuccuguacaccuucacaacggcuaacgccgacacccuuugcauuggcuaucacgcgaauaacagcacagauaccguugacacagugcuggagaaaaaugugaccgucacacauuccgugaaccuccuggaaaauagacacaacgggaaacuuuguaagcugcggggaguugcuccccuccaucugggcaagugcaauaucgccggguggcugcucggaaacccugagugugaaucucugagcaccgccuccucuuggagcuacauuguggagacguccaauucugauaacgggaccugcuauccgggcgacuuuaucaauuacgaagaacuucgcgagcagcugagcuccgucagcucuuucgaaagauuugagauuuuccccaaaacauccagcuggccuaaccacgauaccaaucggggagugacagcugccuguccccaugcuggcgccaacucuuuuuaucgcaaucucguuuggcuggugaagaagggcaacuccuacccuaaaaucaacaagagcuauaucaauaacaaagaaaaggagguccuugugcugugggcgauucaccaccccucuaccuccgccgaccaacagagccucuaccagaaugcugaugccuacguguucgucggguccucuagauauagccggaaauuugagccugaaaucgcuacgcgcccgaagguuagagaccaggccggacggaugaacuacuauuggacacugguggagcccggcgauaagauuaccuucgaagcgacagggaaucugguggccccucgcuacgcuuuugcccucaaaagaaacuccggaagcggcaucauuaucucugacaccuccguccaugauugcgacaccacaugucaaacgcccaauggggcuauuaacaccagccugccuuuccagaauauccaccccgugacaaucggagagugcccgaaguauguuaaaucuaccaagcugcggauggccacaggccuucgcaacauuccuagcauccaguccagaggccucuuuggggccauugcuggauucaucgaaggcggguggaccggaaugauugauggcugguacggguaucaucaccagaaugagcaaggaucuggcuacgcggccgaccugaaaagcacgcagaacgcuaucgacggcaucacaaauaaggugaacuccgucauugagaaaaugaauacccaguuuaccgccguggggaaggaguucagccaccuugagcggcgcaucgaaaaccugaacaagaaaguugaugacggauuccucgauauuuggacauacaaugccgagcugcuggugcuccuggaaaacgagagaacccuugacuaucaugauucuaaugucaagaaccuguacgagaaagugcggucccagcucaagaauaacgcuaaagaaaucggcaauggguguuuugaguucuaucacaagugcgacgauauguguauggaaagcgucaagaacggaacauacgacuaucccaaauacucugaggaagccaagcugaauagagaggagauugauggcgugaaacuugaauccacgcgcaucuaucaaauccuggcgauuuacagcaccguugcuuccucucucgugcuggucgugagccugggggccaucuccuuuuggaugugcucuaacggcagccuccagugccggauuuguaucuga

SEQ ID NO: 205946 - RNA, 1701 nt, Artificial Sequence; identical to SEQ ID NO: 197656
  derived and/or modified CDS sequence (opt5) from hemagglutinin__InfluenzaA__EPI745532

SEQ ID NO: 205947 - RNA, 1701 nt, Artificial Sequence
  derived and/or modified CDS sequence (opt5) from hemagglutinin__InfluenzaA__EPI278594
augaaggccauccuggugguccuccuguacaccuucgcuacagccaacgcggacacgcuuugcauuggcuaucacgcuaauaacagcaccgauacaguugacaccgugcuggagaaaaaugugacagucacccauuccgugaaccuccuggaagauaagcacaaugggaaacuuuguaagcugagaggaguugcuccccuccaucugggcaaaugcaacaucgccggguggauucugggaaauccugagugugaaucucucagcacagccuccucuuggagcuacaucguggagaccuccucuagcgacaacggcacgugcuauccgggggauuuuauugacuacgaagaacugcgggagcagcuuuccagcgucucuuccuucgaacgcuuugagaucuuccccaagaccagcucuuggccugaucacgaauccaauaagggagugacagccgcuuguccccaugccggcgcgaaaucuuuuuauaagaaccugaucuggcucguuaaaaagggcaauagcuacccuaaacuguccaagagcuauauuaacgacaaggggaaagaggugcuuguccuguggggaauccaccaccccuccaccucugccgaucaacagagccucuaccagaaugcugacgccuacguguucgugggcacauccagauauagcaagaaauuuaagccugagauugcuauccggccgaaaguccgcgaucaggaagggagaaugaacuacuauuggacccugguugagcccggagacaagauuacguucgaagccacaggcaaucugguggugccucgguacgcguuugccauggagcgcaacgcugggucuggaaucauuaucuccgauacccccguccaugacugcaacacaaccugucaaaccccuaaaggcgccaucaauacaagccuccccuuccagaacauucacccgaucacgauuggcaagugcccuaaguaugugaaaucuaccaagcugagacuugcuacagggcugcggaauguucccagcauccagucccgcggacucuuuggcgccauugccggguucaucgaaggaggcuggaccgggaugguggacggaugguacggcuaucaucaccagaacgagcaaggcucuggguacgcugcggaucugaaaagcacacagaaugccaucgacaagauuaccaacaaagucaauuccgugaucgagaagaugaacacgcaguuuacagcuguuggaaaggaguucaaucaccuugagaaaagaauugaaaaccugaauaagaaaguggaugacggcuuccucgauaucuggaccuacaacgccgagcugcugguccuccuggaaaaugagcggacccuugacuaucaugauagcaacgugaagaaucuguacgagaaaguccgcucucagcucaagaacaacgccaaggaaauugggaauggauguuuugaguucuaucacaaaugcgacaacacauguauggaauccgugaagaauggcaccuacgauuauccuaaauacagcgaggaagcuaagcugaacagagaggagaucgacgggguuaaacuugaaucuacacggaucuaucaaauucuggccaucuacuccacgguggcgagcucccucguccuggugguuucucugggcgcuauuagcuuuuggaugugcuccaauggaucucuccagugccgcaucuguauuuga

SEQ ID NO: 205948 - RNA, 1701 nt, Artificial Sequence
  derived and/or modified CDS sequence (opt5) from hemagglutinin__InfluenzaA__AEE69009
augaaggccauccuggugguccuccuguacaccuucgcuacagccaacgcggacacgcuuugcauuggcuaucacgcuaauaacagcaccgauacaguugacaccgugcuggagaagaaugugacagucacccauuccgugaaccuccuggaagauaagcacaaugggaaacuuuguaagcugagaggaguugcuccccuccaucugggcaaaugcaacaucgccggguggauucugggaaauccugagugugaaucucucagcacagccuccucuuggagcuacaucguggagaccccguccucugacaacggcacgugcuaucccggggauuuuauugacuacgaagaacugcgggagcagcuuagcuccgucagcucuuucgaacgcuuugagaucuucccuaagaccuccagcuggcccaaucacgauucuaacaagggagugacagccgcuuguccucaugccggcgcgaaauccuuuuauaagaaucugaucuggcucguuaaaaagggcaacagcuaccccaaacugucuaaguccuauauuaaugacaaggggaaagaagugcuuguccuguggggaauccaccacccuccgaccagcgccgaucaacagucccucuaccagaacgcugacacauacguguucgugggcucuagcagauauuccaagaaauuuaagcccgagauugccauccggccuaaaguccgcgaucaggaggggagaaugaauuacuauuggacccugguugaacccggagacaagauuacguucgaggcuacaggcaaccugguggugccucgguacgccuuugcgauggaacgcaacgccgggagcggaaucauuaucucugauacccccguccaugacugcaauacaaccugucaaaccccgaaaggcgcuaucaacacaucccucccuuuccagaauauucaccccaucacgauuggcaagugcccuaaguaugugaaaagcaccaagcugagacuugccacagggcugcggaacauccccucuauucagagccgcggacucuuuggcgcuaucgccggguucaucgagggaggcuggaccgggaugguugacggaugguacggcuaucaucaccagaaugaacaaggcuccggguacgccgcugaucugaaaucuacacagaacgcgauugacgagaucaccaauaaggugaacagcgucauugagaaaaugaauacgcaguuuacagccgugggaaaggaguucaaccaccuugagaagagaaucgaaaaucugaacaaaaagguugaugacggcuuccucgauauuuggaccuacaaugcugagcugcuggugcuccuggaaaacgagcggacccuugacuaucaugauuccaaugucaaaaaccuguacgagaaggugcgcagccagcucaaaaacaaugccaaggaaaucgggaacggauguuuugaguucuaucacaagugcgacaauacauguauggaaucugucaaaaacggcaccuacgauuaucccaaguacuccgaggaagccaaacugaauagagaggagaucgacggggugaaacuugaaagcacacggauuuaucaaauccuggcuauuuacucuacgguugccuccagccucgugcuggucgugucccugggcgcgaucucuuuuuggaugugcagcaacggaucccuccagugccgcauuuguaucuga

SEQ ID NO: 205949 - RNA, 1701 nt, Artificial Sequence; identical to SEQ ID NO: 195023
  derived and/or modified CDS sequence (opt5) from hemagglutinin__InfluenzaA__GQ280797

SEQ ID NO: 205950 - RNA, 1701 nt, Artificial Sequence; identical to SEQ ID NO: 194756
  derived and/or modified CDS sequence (opt5) from hemagglutinin__InfluenzaA__EPI178457

SEQ ID NO: 205951 - RNA, 1701 nt, Artificial Sequence; identical to SEQ ID NO: 194756
  derived and/or modified CDS sequence (opt5) from hemagglutinin__InfluenzaA__EPI176470

SEQ ID NO: 205952 - RNA, 1701 nt, Artificial Sequence
  derived and/or modified CDS sequence (opt5) from hemagglutinin__InfluenzaA__EPI280341
augaaggccauccuggugguccuccugcacaccuucgcuacagccaacgcggacacgcuuugcauuggcuaccaugcuaauaacagcaccgauacaguugacaccgugcuggagaaaaaugugacagucacccacuccgugaaccuccuggaagauaagcauaaugggaaacuuuguaagcugagaggaguugcuccccuccaccugggcaaaugcaacaucgccggguggauucugggaaauccugagugugaaucucucagcacagccuccucuuggagcuauaucguggagaccuccucuagcgacaacggcacgugcuacccggggaauuuuauugauuaugaagaacugcgggagcagcuuuccagcgucucuuccuucgaacgcuuugagaucuuccccaagaccagcucuuggccugaccaugauuccaacaagggagugacagccgcuuguccccacgccggcgcgaaauccuuuuacaagaaucugaucuggcucguuaaaaagggcaacucuuauccuacccuguccaaaagcuacauuaaugacaaggggaaggaagugcuuguccuguggggaauccaccaucccuccacaucugccgaucaacagagccucuaucagaacgcugacgccuacguguucgugggcaccuccagauacagcaaaaaguuuaaaccugagauugcuauccggccgaagguccgcaaucaggaggggagaaugaacuauuacuggacgcugguugaacccggagauaaaauuacauucgaggccaccggcaaccugguggcgccucgguaugccuuugcuauggaacgcaaugccgggucuggaaucauuaucuccgacacacccgugcacgauugcaacaccaccugucaaacaccuaagggcgcuaucaauacgagccuccccuuccagaacauucauccgaucaccauuggcaaaugcccuaaguacgucaagucuacaaaacugagacuugccaccgggcugcggaaugugcccagcauccagucccgcggacucuuuggcgccauugcuggguucaucgagggaggcuggacagggaugguugacggaugguauggcuaccaccaccagaacgaacaaggcucuggguaugcggccgaccuuaagagcacccagaaugcuaucgauaaaauuacgaacaaggugaauagcgucaucgagaaaaugaacacacaguuuaccgccgugggaaaggaguucaaucaucuugaaaagagaauugagaaccugaauaaaaagguugacgauggcuuccucgacaucuggaccuacaacgccgaacugcuggugcuccuggagaaugaacggacacuugauuaccacgacagcaacgucaaaaaccuguaugagaaggugcgcucucagcucaaaaauaacgcuaaggagauugggaauggauguuuugaguucuaccauaagugcgauaacaccuguauggaguccgucaaaaauggcacauaugacuacccuaaguauagcgaagaggccaaacugaacagagaagagaucgauggggugaagcuggagucuacgcggaucuaccaaauucuggcgaucuauuccaccguugcuagcucccucgugcuggucgugucucugggcgccauuagcuuuuggaugugcuccaauggaucucuccagugccgcaucuguauuuga

SEQ ID NO: 205953 - RNA, 1701 nt, Artificial Sequence
  derived and/or modified CDS sequence (opt5) from hemagglutinin__InfluenzaA__EPI240319
augaaggccauccuggugguccuccuguacaccuucgcuacagccaacgcggacacgcuuugcauuggcuaucacgcuaauaacagcaccgauacaguugacaccgugcuggagaaaaaugugacagucacccauuccgugaacauccucgaagauaagcacaaugggaaacuguguaaacuuagaggaguugcuccccugcaucucggcaagugcaacauugccggguggauccugggaaauccugagugugaaucucugagcacagccuccucuuggagcuacauuguggagaccuccucuagcgacaacggcacgugcuauccgggggauuuuaucgacuacgaagaacuccgggagcagcuguccagcgucucuuccuucgaacgcuuugagaucuuccccaagaccagcucuuggccuaaucacgauuccaacaagggagugacagccgcuuguccccaugccggcgcgaaaucuuuuuauaagaaucuuauuuggcugguuaaaaagggcaacagcuacccuaaacucuccaagagcuauaucaaugacaaggggaaagaagugcugguccuuuggggcauucaccaccccuccaccucugccgaucaacagagccuguaccagaacgcugacgccuacguguucgugggauccagcagauauucuaagaaauuuaagccugagaucgcuauucggccgaaaguccgcgauagagaggggcggaugaauuacuauuggacacucguugaacccggagacaagaucaccuucgaggccacgggcaaccugguggugccucgcuacgcguuugccauggaaagaaacgcuggguccggaauuaucaucagcgauacacccguccaugacugcaauaccacaugucagaccccuaaaggcgccauuaacaccucucugcccuuccaaaauauccacccgauuacaaucggcaagugcccuaaguaugugaaaagcacgaagcuccggcuggcuaccgggcuucgcaacguucccuccauucagucuagaggacuguuuggcgccaucgccggguucaucgagggaggcuggacagggaugguggacggaugguacggcuaucaucaccagaaugaacagggcagcggguacgcugcggaucucaaauccacccaaaacgccauugacgagaucacaaauaaggucaacagcgugauugagaaaaugaauacccaguuuacggcuguuggaaaggaguucaaccaccuggagaagcggaucgaaaaucuuaacaaaaagguggaugacggcuuccuggauauuuggacauacaaugccgagcuccugguccugcucgaaaacgagcgcacccuggacuaucaugauucuaaugugaaaaaccuuuacgagaaggucagaucccagcugaaaaacaaugccaaggaaaucgggaacggauguuuugaguucuaucacaagugcgacaauaccuguauggaaagcgugaaaaacggcacauacgauuauccuaaguacucugaggaagcuaaacucaaucgggaggagaucgacgggguuaagcuggaauccacccgcauuuaucagauccuugccauuuacagcacaguggcguccucucugguccucgugguuagccugggcgcuaucuccuuuuggaugugcucuaacggaagccugcaaugcagaauuuguaucuga

SEQ ID NO: 205954 - RNA, 1701 nt, Artificial Sequence; identical to SEQ ID NO: 194921
  derived and/or modified CDS sequence (opt5) from hemagglutinin__InfluenzaA__EPI183134

SEQ ID NO: 205955 - RNA, 1701 nt, Artificial Sequence
  derived and/or modified CDS sequence (opt5) from hemagglutinin__InfluenzaA__EPI368693
augaaggccauccuggugguccuccuguacaccuucgcuacagccaacgcggacacgcuuugcauuggcuaucacgcuaauaacagcaccgauacaguugacaccgugcuggagaaaaaugugacagucacccauuccgugaacauccucgaagauaagcacaaugggaaacuguguaaacuuagaggaguugcuccccugcaucucggcaagugcaacauugccggguggauccugggaaauccugagugugaaucucugagcacagccuccucuuggagcuacauuguggagaccuccucuagcgacaacggcacgugcuauccgggggauuuuaucgacuacgaagaacuccgggagcagcuguccagcgucucuuccuucgaacgcuuugagaucuuccccaagaccagcucuuggccuaaucacgauuccaacaagggagugacagccagcuguccccaugcuggcgccaaaucuuuuuauaagaaucuuauuuggcugguuaaaaagggcaacuccuacccuaaacucagcaaguccuauaucaaugacaaggggaaagaagugcugguccuuuggggcauucaccaccccucuaccagcgcggaucaacagucccuguaccagaacgccgacgcuuacguguucgugggaagcucuagauauuccaagaaauuuaagccugagaucgccauucggccgaaaguccgcgggcaggagggaagaaugaauuacuauuggacacucguugaacccggcgauaagaucaccuucgaggcuacggggaaccugguggugccucgguacgccuuugcgauggaacgcaacgccggaagcggcauuaucaucucugacacacccguccaugauugcaauaccacaugucaaaccccuaaaggcgcuauuaacaccagccugcccuuccagaauauccacccgauuacaaucgggaagugcccuaaguaugugaaauccacgaagcucagacuggccaccggacuucggaacguucccucuauucagagccgcggccuguuuggggcuaucgccggauucaucgagggcggguggacaggaaugguggacggcugguacggcuaucaucaccagaaugaacaaggguccggauacgccgcugaccucaaaagcacccagaacgcgauugaugagaucacaaauaaggucaacucugugauugagaaaaugaauacccaguuuacggccguuggcaaggaguucaaccaccuggagaagagaaucgaaaaucuuaacaaaaagguggacgauggguuccuggacauuuggacauacaaugcugagcuccugguccugcucgaaaacgagcggacccuggauuaucaugacuccaaugugaaaaaccuuuacgagaagguccgcagccagcugaaaaacaaugccaaggaaaucggaaacggcuguuuugaguucuaucacaagugcgauaauaccuguauggaaucugugaaaaacgggacauacgacuauccuaaguacuccgaggaagccaaacucaauagagaggagaucgauggcguuaagcuggaaagcacccggauuuaucaaauccuugcuauuuacuccacaguggccucuagccugguccucgugguuucccugggagcgaucucuuuuuggaugugcagcaacggcucccugcagugccgcauuuguaucuga

SEQ ID NO: 205956 - RNA, 1701 nt, Artificial Sequence
  derived and/or modified CDS sequence (opt5) from hemagglutinin__InfluenzaA__EPI291788
augaaggccauccuggugguccuccuguacaccuucacaacggcuaacgccgacacccuuugcauuggcuaucacgcgaauaacagcacagauaccguugacacagugcuggagaaaaaugugaccgucacacauuccgugaaccuccuggaaaauagacacaacgggaaacuuuguaagcugcggggaguugcuccccuccaucugggcaagugcaauaucgccggguggcugcucggaaacccugagugugaaucucugagcaccgccuccucuuggagcuacauuguggagacguccaauucugauaacgggaccugcuauccgggcgacuuuaucaauuacgaagaacuucgcgagcagcugagcuccgucagcucuuucgaaagauuugagauuuuccccaaaacauccagcuggccuaaccacgauaccaaucggggagugacagcugccuguccccaugcuggcaccaacucuuuuuaucgcaaucucaucuggcugguuaagaagggcaacuccuacccuaaaaucaacaagagcuauauuaauaacaaagaaaaggaggugcuuguccugugggccauccaccaccccucuacguccgcggaccaacagagccucuaccagaaugccgaugcuuacguguucgugggguccucuagauauagccggaaauuugagccugaaauugccacacgcccgaaggucagagaccaggcuggacggaugaacuacuauuggacccugguugagcccggcgauaagaucacauucgaagccaccgggaaucugguggugccucgcuacgcguuugcccucaaaagaaacuccggaagcggcauuaucauuucugacaccuccguccaugauugcgacacaacgugucaaacccccaauggggcuaucaacacaagccugccuuuccagaauauccaccccgugaccauuggagagugcccgaaguauguuaaaucuacaaagcugcggauggccaccggccuucgcaacaucccuagcauucaguccagaggccucuuuggggcuaucgccggauucauugaaggcggguggacgggaaugaucgauggcugguacggguaucaucaccagaaugagcaaggaucuggcuacgccgcugaccugaaaagcacacagaacgcgaucgacggcauuaccaauaaggugaacuccgucaucgagaaaaugaauacccaguuuacagccguggggaaggaguucagccaccuugagcggcgcauugaaaaccugaacaagaaaguugaugacggauuccucgauaucuggaccuacaaugcugagcugcuggugcuccuggaaaacgagagaacacuugacuaucaugauucuaaugucaagaaccuguacgagaaagugcggucccagcucaagaauaacgccaaagaaauuggcaauggguguuuugaguucuaucacaagugcgacgauacguguauggaaagcgucaagaacggaaccuacgacuaucccaaauacucugaggaagccaagcugaauagagaggagaucgauggcgugaaacuugaauccacacgcaucuaucaaauucuggcuaucuacagcaccguugccuccucucucgugcuggucgugagccugggggcgauuuccuuuuggaugugcucuaacggcagccuccagugccggaucuguauuuga

SEQ ID NO: 205957 - RNA, 1701 nt, Artificial Sequence
  derived and/or modified CDS sequence (opt5) from hemagglutinin__InfluenzaA__EPI482788
augaaggccauccuggugguccuccuguacaccuucacaacggcuaacgccgacacccuuugcauuggcuaucacgcgaauaacagcacagauaccguugacacagugcuggagaaaaaugugaccgucacacauuccgugaaccuccuggaaaauagacacaacgggaaacuuuguaagcugcggggaguugcuccccuccaucugggcaagugcaauaucgccggguggcugcucggaaacccugagugugaaucucugagcaccgccuccucuuggagcuacauuguggagacguccaauucugauaacgggaccugcuauccgggcgacuuuaucaauuacgaagaacuucgcgagcagcugagcuccgucagcucuuucgaaagauuugagauuuuccccaaaacauccagcuggccuaaccacgauaccaaucggggagugacagcugccuguccccaugcuggcaccaacucuuuuuaucgcaaucucaucuggcugguuaagaagggcaacuccuacccuaaaaucaacaagagcuauauuaauaacaaagaaaaggaggugcuuguccugugggccauccaccaccccucuacguccgcggaccaacagagcauuuaccagaaugccgaugcuuacguguucgugggguccucuagauauagccggaaauuugagccugaaaucgccacacgcccgaaggucagagaccaggcuggacggaugaacuacuauuggacccucguugagcccggcgauaagauuacauucgaagccaccgggaaucugguggugccucgcuacgcguuugcccugaaaagaaacuccggaagcggcaucauuaucucugacaccuccguccaugauugcgacacaacgugucaaacccccaauggggcuaucaacacaagccucccuuuccagaauauucaccccgugaccaucggagagugcccgaaguauguuaaaucuacaaagcugcggauggccaccggccuucgcaacauuccuagcauccaguccagaggccuguuuggggcuauugccggauucaucgaaggcggguggacgggaaugaucgauggcugguacggguaucaucaccagaaugagcaaggaucuggcuacgccgcugaccucaaaagcacacagaacgcgauugacggcaucaccaauaaggugaacuccgucauugagaaaaugaauacccaguuuacagccguggggaaggaguucagccaccuggagcggcgcaucgaaaaccuuaacaagaaaguugaugacggauuccuggauauuuggaccuacaaugcugagcuccuggugcugcucgaaaacgagagaacacuggacuaucaugauucuaaugucaagaaccuuuacgagaaagugcggucccagcugaagaauaacgccaaagaaaucggcaauggguguuuugaguucuaucacaagugcgacgauacguguauggaaagcgucaagaacggaaccuacgacuaucccaaauacucugaggaagccaagcucaauagagaggagaucgauggcgugaaacuggaauccacacgcauuuaucaaauccuugcuauuuacagcaccguugccuccucucuggugcucgucgugagccugggggcgaucuccuuuuggaugugcucuaacggcagccugcagugccggauuuguaucuga

SEQ ID NO: 205958 - RNA, 1701 nt, Artificial Sequence
  derived and/or modified CDS sequence (opt5) from hemagglutinin__InfluenzaA__EPI178946/m1
augaaggccaucauugugguccugcucuacaccuucgcuacagccgacgcggauacgcugugcaucggcuaucacgcuaacaauagcaccgacacaguugauaccgugcuugagaaaaacgugacagucacccauuccgugaaucugcucgaaaacaagcacgacgggaaacuguguaaacuuagaggaguugcuccccugcaucucggcaaaugcaauauugccggguggcugcugggaaacccugagugugaaucucucuuuacagccagcuccuggucuuacaucguggagaccccgaauagcgauaacggcacgugcuaucccggggacuucauuaauuacgaggaacugcgggagcaccuuuccucugucagcuccuuugaacgcuucgagaucuuuccuaaggccaacagcuggcccaaucaugauaccaacaagggagugacagcugccuguccuuaugcgggcgccaauucuuucuacagaaaccugaucuggcucguuaaaaagggcaauuccuaucccaaacugagcaagucuuacauuaacaacaaaaagaaggaagugcuugucaucugggggauucaccacccuccgaccuccacagaccagcaaacccuguaccagaaugcugaugccuauguguuugugggaagcucuaaauacuccaagcgguucaaacccgagaucgcugcccgcccuaaggucagaaaccaggcgggccggaugaauuauuacuggacgcucauugagcccggggacacaaucaccuuugaagccacaggaaaccugguugugccucgcuaugcuuucgccaugaaaagaggcagcggguccggaauuaucgugucugaugcucccguccaugacugcaauaccaccugucagacaccgaagggcgccaucaacacgagccugccuuuucaaaauauucaccccgugaccaucggcgagugcccuaaauacguuaaguccacaaagcuccggauggccaccgggcugcgcaacauucccagcauccagucuagaggacuuuucggcgcuauugcgggguuucuggaaggaggcuggacagggaugaucgauggaugguauggcuaccaucaccagaaugagcagggcuccggguacgccgcugaccaaaagagcacccagaacgccaucgacggaauuacgaauaaggugaacucuaucauugaaaagaugaauacacaguucaccgccgucggcaaggaguucaaccagcucgagaaacggaucgaaagccugaauaacaagguggaugacggguuucuugauauuuggaccuauaacgcugagaugcugguucuccuggaaaaugagcgcacacuggacuaccacgauuccaacgugaagaaucucuaugaaaaagucagaucucaacugaagaacaaugccaaagagaucggaaacggcuguuucgaguuuuaccauaagugcgacaauaccuguauggaaagcgugaaaaacgggacauaugauuaccccaaguauuccgaggaagcgaaacuuaaucgggaggaaaucgacggcgucaaacuggagagcgcucgcauuuaccagauccucgccauuuacucuacgguggccuccagccugguucuucuggugucucucggagcugucuccuucuggaugugcagcaacggcucccugcagugcagaaucuguauuuga

SEQ ID NO: 205959 - RNA, 1701 nt, Artificial Sequence
  derived and/or modified CDS sequence (opt5) from hemagglutinin__InfluenzaA__EPI482791/m2
augaaggccaucauugugguccugcucuacaccuucgcuacagccgacgcggauacgcugugcaucggcuaucacgcuaacaauagcaccgacacaguugauaccgugcuugagaaaaacgugacagucacccauuccgugaaucugcucgaaaacaagcacgacgggaaacuguguaaacuuagaggaguugcuccccugcaucucggcaaaugcaauauugccggguggcugcugggaaacccugagugugaaucucucuuuacagccagcuccuggucuuacaucguggagaccccgaauagcgauaacggcacgugcuaucccggggacuucauuaauuacgaggaacugcgggagcaccuuuccucugucagcuccuuugaacgcuucgagaucuuuccuaaggccaacagcuggcccaaucaugaaaccaacaagggagugacagcugccuguccuuaugcgggcgccaauucuuucuacagaaaccugaucuggcucguuaaaaagggcaauuccuaucccaaacugagcaagucuuacauuaacaacaaaaagaaggaggugcuugucaucugggggauucaccacccuccgaccuccacagaucagcaaacccuguaccagaaugcugacgccuauguguuugugggaagcucuaaauacuccaagcgguucaaacccgagaucgcugcccgcccuaaggucagaaaccaggcgggccggaugaauuauuacuggacgcucauugaacccggggauacaaucaccuuugaggccacaggaaaccugguugugccucgcuaugcuuucgccaugaaaagaggcagcggguccggaauuaucgugucugacgcucccguccaugauugcaauaccaccugucagacaccgaagggcgccaucaacacgagccugccuuuucaaaauauucaccccgugaccaucggcgaaugcccuaaauacguuaaguccacaaagcuccggauggccaccgggcugcgcaacauucccagcauccagucuagaggacuuuucggcgcuauugcgggguuucuggagggaggcuggacagggaugaucgacggaugguauggcuaccaucaccagaaugaacagggcuccggguacgccgcugaucaaaagagcacccagaacgccaucgacggaauuacgaauaaggugaacucuaucauugagaaaaugaauacacaguucaccgccgucggcaaggaguucaaccagcucgaaaaacggaucgagagccugaauaacaagguggacgauggguuucuugacauuuggaccuauaacgcugaaaugcugguucuccuggagaaugaacgcacacuggauuaccacgacuccaacgugaagaaucucuaugagaaagucagaucucaacugaagaacaaugccaaagagaucggaaacggcuguuucgaauuuuaccauaagugcgauaauaccuguauggagagcgugaaaaacgggacauaugacuaccccaaguauuccgaagaggcgaaacuuaaucgggaagagaucgauggcgucaagcuggagagcgcucgcauuuaccagauccucgccauuuacucuacgguggccuccagccugguucuucuggugucucucggagcugucuccuucuggaugugcagcaacggcucccugcagugcagaaucuguauuuga

SEQ ID NO: 205960 - RNA, 1701 nt, Artificial Sequence
  derived and/or modified CDS sequence (opt5) from hemagglutinin__InfluenzaA__EPI291799
augaaggccauccuggugguccuccuguacaccuucacaacggcuaacgccgacacccuuugcauuggcuaucacgcgaauaacagcacagauaccguugacacagugcuggagaaaaaugugaccgucacacauuccgugaaccuccuggaaaauagacacaacgggaaacuuuguaagcugcggggaguugcuccccuccaucugggcaagugcaauaucgccggguggcugcucggaaacccugagugugaaucucugagcaccgccuccucuuggagcuacauuguggagacguccaauucugauaacgggaccugcuauccgggcgacuuuaucaauuacgaagaacuucgcgagcagcugagcuccgucagcucuuucgaaagauuugagauuuuccccaaaacauccagcuggccuaaccacgauaccaaucggggagugacagcugccuguccccaugcuggcaccaacucuuuuuaucgcaaucucaucuggcugguuaagaagggcaacuccuacccuaaaaucaacaagagcuauauuaauaacaaagaaaaggaggugcuuguccugugggccauccaccaccccucuacguccgcggaccaacagagccucuaccagaaugccgaugcuuacguguucgugggguccucuagauauagccggaaauuugagccugaaauugccacacgcccgaaggucagagaccaggcuggacggaugaacuacuauuggacccugguugagcccggcgauaagaucacauucgaagccaccgggaaucugguggugccucgcuacgcguuugcccucaaaagaaccuccggaagcggcauuaucauuucugacacauccguccaugauugcgacacgaccugucaaacacccaacggggcuaucaauaccagccugccuuuccagaacauccaccccgugacaauuggagagugcccgaaguauguuaaaucuaccaagcugcggauggccacgggccuucgcaauaucccuagcauucaguccagaggccucuuuggggcuaucgccggauucauugaaggcggguggacaggaaugaucgauggcugguacggguaucaucaccagaacgagcaaggaucuggcuacgccgcugaccugaaaagcacccagaaugcgaucgacggcauuaccaacaaggucaauuccgugaucgagaaaaugaacacacaguuuaccgccguggggaaggaguucagccaccuugagcggcgcauugaaaaucugaacaagaaaguugaugacggauuccucgauaucuggacauacaacgcugagcugcuggugcuccuggaaaaugagagaacgcuugacuaucaugauucuaacgucaagaaucuguacgagaaagugcggucccagcucaagaacaaugccaaagaaauuggcaacggguguuuugaguucuaucacaagugcgacgauaccuguauggaaagcgucaagaauggaacauacgacuaucccaaauacucugaggaagccaagcugaacagagaggagaucgauggcgugaaacuugaauccacccgcaucuaucaaauucuggcuaucuacagcacaguugccuccucucucgugcuggucgugagccugggggcgauuuccuuuuggaugugcucuaauggcagccuccagugccggaucuguauuuga

SEQ ID NO: 205961 - RNA, 1701 nt, Artificial Sequence
  derived and/or modified CDS sequence (opt5) from hemagglutinin__InfluenzaA__EPI482799
augaaggccauccuggugguccuccuguacaccuucacaacggcuaacgccgacacccuuugcauuggcuaucacgcgaauaacagcacagauaccguugacacagugcuggagaaaaaugugaccgucacacauuccgugaaccuccuggaaaauagacacaacgggaagcuguguaaacuucggggaguugcuccccuccaucugggcaagugcaauaucgccggguggcugcucggaaacccugagugugaaucucugagcaccgccuccucuuggagcuacauuguggagacguccaauucugauaacgggaccugcuauccgggcgacuuuaucaauuacgaagaacuucgcgagcagcugagcuccgucagcucuuucgaaagauuugagauuuuccccaaaacauccagcuggccuaaccacgaaaccaaucggggagugacagcugccuguccccaugcuggcaccaacucuuuuuaucgcaaucucaucuggcugguuaagaagggcaacuccuacccuaaaaucaacaagagcuauauuaauaacaaagagaaggaggugcuuguccugugggccauccaccaccccucuacguccgcggaucaacagagccucuaccagaaugccgacgcuuacguguucgugggguccucuagauauagccggaaauuugaaccugagauugccacacgcccgaaggucagagaucaggcuggacggaugaacuacuauuggacccugguugaacccggcgacaagaucacauucgaggccaccgggaaucugguggugccucgcuacgcguuugcccucaaaagaaccuccggaagcggcauuaucauuucugauacauccguccaugacugcgauacgaccugucaaacacccaacggggcuaucaauaccagccugccuuuccagaacauccaccccgugacaauuggagaaugcccgaaguauguuaaaucuaccaaacuucggauggccacgggccugcgcaauaucccuagcauucaguccagaggccucuuuggggcuaucgccggauucauugagggcggguggacaggaaugaucgacggcugguacggguaucaucaccagaacgagcaaggaucuggcuacgccgcugaucugaaaagcacccagaaugcgaucgacggcauuaccaacaaggucaauuccgugaucgaaaagaugaacacacaguuuaccgccguggggaaggaguucagccaccuugaacggcgcauugagaaucugaacaagaaaguugacgauggauuccucgacaucuggacauacaacgcugaacugcuggugcuccuggagaaugagagaacgcuugauuaucaugacucuaacgucaagaaucuguacgaaaaagugcggucccagcucaagaacaaugccaaagagauuggcaacggguguuuugaguucuaucacaagugcgaugacaccuguauggagagcgucaagaauggaacauacgauuaucccaaauacucugaagaggccaagcugaacagagaggaaaucgacggcgugaaacuugaguccacccgcaucuaucaaauucuggcuaucuacagcacaguugccuccucucucgugcuggucgugagccugggggcgauuuccuuuuggaugugcucuaauggcagccuccagugccggaucuguauuuga

SEQ ID NO: 205962 - RNA, 1701 nt, Artificial Sequence
  derived and/or modified CDS sequence (opt5) from hemagglutinin__InfluenzaA__EPI291807
augaaggccaucauugugguccugcucuacaccuucgcuacagccgacgcggauacgcugugcaucggcuaucacgcuaacaauagcaccgacacaguugauaccgugcuugagaaaaacgugacagucacccauuccgugaaucugcucgaaaacaagcacgacgggaaacuguguaaacuuagaggaguugcuccccugcaucucggcaaaugcaauauugccggguggcugcugggaaacccugagugugaaucucucuuugccgccagcuccuggucuuacaucguggagacaccgaauagcgauaacgggaccugcuaucccggcgacuucauuaauuacgaggaacugcgggagcaccuuuccucugucagcuccuuugaacgcuucgagaucuuuccuaaggcuaacagcuggcccaaucaugauacgaacaagggagugaccgccgcguguccuuaugccggcgcuaauucuuucuacagaaaccugaucuggcucguuaaaaagggcaauuccuaucccaaacugagcaagucuuacauuaacaacaaaaagaaggaagugcuugucaucugggggauucaccacccuccgacauccaccgaccagcaaacacuguaccagaaugccgaugcuuauguguuugugggaagcucuaaauacuccaagcgguucaaacccgagaucgccgcgcgcccuaaggucagagaccaggccggccggauggauuauuacuggacccucauugagcccggggacacgaucacauuugaagcuaccggaaaccugguugugccucgcuaugccuucgcuaugaaaagaggcagcggguccggaauuaucgugucugaugcccccguccaugacugcaauacaaccugucagaccccgaagggcgccaucaacacaagccugccuuuucaaaauauucaccccgugacgaucggcgagugcccuaaauacguuaaguccaccaagcuccggauggcuacagggcugcgcaacauucccagcauccagucuagaggacuuuucggcgcgauugccggguuuaucgaaggaggcuggaccgggaugaucgacggaugguauggcuaccaucaccagaaugagcagggcuccggguacgcugccgaucaaaagagcacacagaacgccauugacggaaucaccaauaaggugaacucuauuaucgaaaagaugaauacgcaguucacagcugucggcaaggaguucagccagcuggagaaacggauugaaucccucaacaauaagguggaugacggguuucuggauaucuggaccuauaacgccgagcuucugguucuccuggaaaaugagcgcacccuggacuaccacgauucuaacgugaagaaccucuaugaaaaagucagaagccaacugaagaauaacgcgaaagagaucggaaauggcuguuucgaguuuuaccauaagugcgacaacacauguauggaauccgugaaaaaugggaccuaugauuaccccaaguauagcgaggaagcuaaacuuaaccgggaggaaauugacggcgucaaacuggagucugcccgcaucuaccagauucucgccaucuacuccacaguggcuagcucucugguucuucuggugucccucggagccgucagcuucuggaugugcuccaauggcucucugcagugcagaauuuguaucuga

SEQ ID NO: 205963 - RNA, 1701 nt, Artificial Sequence
  derived and/or modified CDS sequence (opt5) from hemagglutinin__InfluenzaA__EPI638970
augaaggccauccuggugguccuccuguacaccuucacaacggcuaacgccgacacccuuugcauuggcuaucacgcgaauaacagcacagauaccguugacacagugcuggagaaaaaugugaccgucacacauuccgugaaccuccuggaaaauagacacaacgggaaacuuuguaaacugcggggaguugcuccccuccaucugggcaagugcaauaucgccggguggauucugggaaacccugagugugaaucucucagcaccgccuccucuuggagcuacaucguggagacguccaauucugaaaacgggaccugcuauccgggcgauuuuauuaauuacgaggagcugcgcgaacagcuuagcuccgucagcucuuucgagagauuugaaaucuuccccaaaacauccagcuggccuaaccacgacaccaauaagggagugacagcugccuguccccauucuggcaccaacuccuuuuaucggaaucugguuuggcucgugcaaaagggcaacagcuacccuaaaaucaacaagucuuauauuaauaacaaagagaaugagguccuggugcuuugggcuauccaccaccccuccacgagcgccgaucagcagucccuguacaagaacgcggacgccuacguguucgucgggucuagccgcuauuccagaaaauuugaaccugagauugcuacacggccgaagguucgcgaucaggccggaagaaugaauuacuauuggacccucguggaacccggcgacaagaucacauucgaggcuaccgggaaccugguggccccucgguacgcguuuacccugaaacgcaauagcggaucuggcauuaucauuuccgauacaagcguccaugacugcgauacgaccugucaaacacccaacggggccaucaauaccucucucccuuuccagaacauccaccccgugacaauuggagaaugcccgaaguauguuaaaagcaccaagcugagaauggcuacgggccuucggaauaucccuuccauucagucucgcggccuguuuggggccaucgcuggauucauugagggcggguggacaggaaugaucgacggcugguacggguaucaucaccagaacgagcaaggaagcggcuacgccgccgaucucaaauccacccagaaugcuaucgacggcauuaccaacaaggugaauagcgucaucgaaaagaugaacacacaguuuaccgcgguggggaaggaguucucucaccuggaaagacggauugagaaccuuaauaagaaaguugacgauggauuccuggacaucuggacauacaacgccgaacuccuggugcugcucgagaaugagcgcacgcuggauuaucaugacuccaacgucaagaaucuuuacgaaaaagugagaagccagcugaagaacaaugcuaaagagauuggcaacggguguuuugaguucuaucacaagugcgaugacauguguauggaaucugucaagaauggaaccuacgauuaucccaaauacuccgaagaggccaagcucaaccgggaggaaaucgacggcgugaaacuggagagcacaaagaucuaucaaauucuugccaucuacuccaccguugcuucuagccuggugcucgucgugucccugggggccauuucuuuuuggaugugcagcaauggcucccugcagugcagaaucuguauuuga

SEQ ID NO: 205964 - RNA, 1701 nt, Artificial Sequence
  derived and/or modified CDS sequence (opt5) from hemagglutinin__InfluenzaA__ABI19015
augaaggccaucauugugguccugcucuacaccuucgcuacagccgacgcggauacgcugugcaucggcuaucacgcuaacaauagcaccgacacaguugauaccgugcuugagaaaaacgugacagucacccauuccgugaaucugcucgaaaacaagcacgacgggaaacuguguaaacuuagaggaauugcuccccugcaucucggcaaaugcaauaucgccggguggauucugggaaacccugagugugaaucucuguuuacaaccagcuccuggucuuacaucguugagacgccgaauagcgauaacgggaccugcuaucccggcgacuucaucaauuacgaagaacuccgggagcaccuguccucugugagcuccuuugaacgcuucgagauuuuuccuaaggccaacagcuggcccuaucaugauacaaauaagggagucaccgccgcuuguccuuacgccggcgcgaacucuuucuauagaaaucuuaucuggcuggugaaaaagggcaacuccuaccccaaacucagcaagucuuacauuaauaacaaaaagaaggaaguucuggugaucugggggauucaccacccuccgacauccaccgaccagcaaacgcuuuaucagaacgccgaugcuuacgucuuugugggaagcucuaaauauuccaagcgguucaaacccgagaucgccgcucgcccuaaggugagagaccaggccggccggauggauuacuauuggacacugauugagcccggggacaccaucacauuugaagcgaccggaaaucucgucguuccucgcuacgccuucaccaugaaaagaggcagcggguccggaaucauugugucugaugcucccgugcaugacugcaacacaacgugucagaccccgaagggcgccaucaauacaagccugccuuuucaaaacauucaccccgucaccaucggcgagugcccuaaauaugugaaguccacaaagcugcggauggcuaccgggcuccgcaauauucccagcauccagucuagaggacuguucggcgccaucgccggguuuauugaaggaggcuggacggggaugaucgacggaugguacggcuaccaucaccagaacgagcagggcuccggguaugcugcggaucaaaagagcacacagaaugccauugacggaaucaccaacaagguuaauucuauuaucgagaaaaugaacacccaguucacagcugugggcaaggaguucagccagcuugagaaacggaucgaaucccugaauaacaaggucgaugacggguuucucgauauuuggaccuacaaugccgagcugcuugugcugcucgaaaacgagcgcacacuggacuaucacgauucuaauguuaagaaccuguacgaaaaagugagaagccaacucaagaacaaugccaaagagaucggaaacggcuguuucgaguuuuaucauaagugcgacgauacguguauggaauccgucaaaaaugggaccuacgacuaucccaaguacagcgaggaagcuaagcugaaccggcaggagauugauggcgugaaacuugaaucugcccgcaucuaccagauucuggcgaucuauuccacagucgcuagcucucucgugcugcuuguuucccugggagccgugagcuucuggaugugcuccaauggcucucuccaaugcagaauuuguaucuga

SEQ ID NO: 205965 - RNA, 1701 nt, Artificial Sequence
  derived and/or modified CDS sequence (opt5) from hemagglutinin__InfluenzaA__EPI687790
augaaggccauccuggugguccuccuguacaccuucacaacggcuaacgccgacacccuuugcauuggcuaucacgcgaauaacagcacagauaccguugacacagugcuggagaagaaugugaccgucacacauuccgugaaccuccuggaagauaagcacaaugggaaacuuuguaagcugggaggcguugcuccccuccaucuggggaaaugcaacaucgccggauggauucugggcaauccugagugugaaucucucagcaccgccuccucuuggagcuacaucguggagacguccaacucugacaaugggaccugcuauccgggagauuuuauuaacuacgaagaacugagagagcagcuuagcuccgucagcucuuucgaacgguuugagaucuuccccaagacauccagcuggccuaaucacgacucuaacaagggcgugaccgcugccuguccccaugcuggcgccaaauccuuuuauaagaaucugaucuggcucguuaaaaaggggaacagcuacccuaaacugaaucaaucuuauauuaacgauaagggaaaggaagugcuuguccuguggggcauccaccaccccuccacaaccgcggaccagcagagccucuaccagaacgccgaugcuuacguguucguggggacgucccgcuauucuaaaaaguuuaaaccugagauugccacaagaccgaagguccgggaccaagagggacgcaugaauuacuauuggacccugguugaacccggcgauaaaaucacauucgaggcuaccgggaaccugguggugccuagauacgccuuuaccauggaacggaaugcgggaagcggcauuaucauuuccgacacacccguccaugauugcaacacgaccugucagacaccugagggcgccaucaauaccagccuccccuuccagaacauccacccgauuacaaucgggaagugcccuaaauaugugaagucuaccaagcugcgccuugcuacgggacugagaaauguucccuccauucagagccggggccucuuuggggccaucgcuggauucauugaaggcggguggacaggaaugguggacggcugguacggcuaucaucaccaaaacgagcaggggucuggauacgccgccgaccugaaaagcacccagaaugcuaucgauaagaucaccaacaaagucaauuccgugauugagaagaugaacacacaguuuaccgcgguuggcaaagaguucaaucaccuugagaagcgcaucgaaaaccugaauaagaaaguggacgauggguuccucgacauuuggacauacaacgccgagcugcugguccuccuggaaaacgagagaacgcuugauuaucaugacucuaaugugaagaaccuguacgagaaaguccggaaucaacucaagaacaaugcuaaagaaaucggaaacggcuguuuugaguucuaucacaagugcgauaauaccuguauggaaagcgugaagaacgggacauacgacuauccuaaauacuccgaggaagccaagcugaaucgcgagaaaauugauggcguuaaacuugagagcaccagaaucuaucagauccuggccauuuacucuacaguggcuuccagccucguccuggugguuucucugggagccaucuccuuuuggaugugcagcaacggcucccuccagugccggauuuguaucuga

SEQ ID NO: 205966 - RNA, 1701 nt, Artificial Sequence
  derived and/or modified CDS sequence (opt5) from hemagglutinin__InfluenzaA__EPI841265
augaaggccauccuggugguccuccuguacaccuucacaacggcuaacgccgacacccuuugcauuggcuaucacgcgaauaacagcacagauaccguugacacagugcuggagaaaaaugugaccgucacacauuccgugaaccuccuggaagauaagcacaaugggaaacuuuguaagcugggaggcguugcuccccuccaucuggggaaaugcaacaucgccggauggauucugggcaauccugagugugaaucucucagcaccgccuccucuuggagcuacaucguggagacguccaacucugacaaugggaccugcuauccgggagauuuuauuaacuacgaagaacugagagagcagcuuagcuccgucagcucuuucgaacgguuugagaucuuccccaagacauccagcuggccuaaucacgacucuaacaagggcgugaccgcugccuguccccaugcuggcgccaaauccuuuuauaagaaucugaucuggcucguuaaaaaggggaacagcuacccuaaacugaaucaaucuuauauuaacgauaagggaaaggaagugcuuguccuguggggcauccaccaccccuccacaaccgcggaccagcagagcauuuaccagaacgccgaugcuuacguguucguggggacgucccgcuauucuaaaaaguuuaaaccugagaucgccacaagaccgaagguccgggaccaagagggacgcauuaauuacuauuggacccucguugaacccggcgauaaaaucacauucgaggcuaccgggaaccugguggugccuagauacgccuuuaccauggaacggaaugcgggaagcggcauuaucaucuccaacacacccguccaugacugcaauacgaccugucagacaccugagggcgccauuaacaccagccugcccuuccagaauauccacccgauuacaaucgggaagugcccuaaauaugugaagucuaccaagcuccgccuggcuacgggacuuagaaacguucccuccauucagagccggggccuguuuggggccaucgcuggauucaucgaaggcggguggacaggaaugguggauggcugguacggcuaucaucaccaaaaugagcaggggucuggauacgccgccgaccucaaaagcacccagaacgcuauugacaagaucaccaauaaagucaacuccgugauugagaagaugaauacacaguuuaccgcgguuggcaaagaguucaaccaccuggagaagcgcaucgaaaaucuuaacaagaaaguggaugacggguuccuggauauuuggacauacaacgccgagcuccugguccugcucgaaaaugagagaacgcuggacuaucaugauucuaacgugaagaaucuuuacgagaaaguccggaaccaacugaagaauaacgcuaaagaaaucggaaauggcuguuuugaguucuaucacaagugcgacaacaccuguauggaaagcgugaagaaugggacauacgauuauccuaaauacuccgaggaagccaagcucaaccgcgagaaaaucgacggcguuaagcuggagagcaccagaauuuaucagauccuugccauuuacucuacaguggcuuccagccugguccucgugguuucucugggagccaucuccuuuuggaugugcagcaauggcucccugcagugccggauuuguaucuga

SEQ ID NO: 205967 - RNA, 1701 nt, Artificial Sequence
  derived and/or modified CDS sequence (opt5) from hemagglutinin__InfluenzaA__EPI291846
augaaggccaucauugugguccugcucuacaccuucgcuacagccgacgcggauacgcugugcaucggcuaucacgcuaacaauagcaccgacacaguugauaccgugcuugagaaaaacgugacagucacccauuccgugaaucugcucgaaaacaagcacgacgggaaacuguguaaucuuaagggaguugcuccccugcaucucggcaaaugcaacauugccggguggcugcugggaaauccugagugugaaucucucuuuacagccagcuccuggucuuacaucguggagaccccgaacagcgauaauggcacgugcuaucccggggacuucauuaacuacgaggaacugagagagcaccuuuccucugucagcuccuuugaacgguucgagaucuuuccuaaggugaauagcuggcccaaccaugauaccaauaagggaguuacagccgcuuguccuuaugccggcgcgaacucuuucuaccgcaaucugaucuggcucgugaaaaagggcaacuccuaucccaaacugagcaagucuuacauuaacaauaaaaagaaggaaguccuugugaucugggggauucaccacccuccgaccuccacagaccagcaaacccuguaccagaacgccgaugcuuauguguuugucggaagcucuaaauacuccaagagauucgagcccgagaucgccgcucggccuaaaguucgcaaucaggccggcagaaugaacuauuacuggacgcucauugaacccggggacacaaucaccuuugaggcgacaggaaaucugguggugccucgguaugccuucgcuaugcgcagaggcagcggguccggaauuaucgucucugaugcccccgugcaugacugcaacaccaccugucagacaccgaagggcgcuaucaauacgagccugccuuuucaaaacauucaccccguuaccaucggcgaaugcccuaaauacgugaaguccacaaaacuccggauggccaccgggcugcgcaauauucccagcauccagucuagaggacuuuucggcgccauugcuggguuucuggagggaggcuggacagggaugaucgauggaugguauggcuaccaucaccagaacgaacagggcuccggguacgcggccgaccaaaagagcacccagaaugcuaucgacggaauuacgaacaaggucaauucuaucauugagaaaaugaacacacaguucaccgccgugggcaaggaguucagccagcucgaaaaacggaucgagucccugaauaacaagguugaugacggguuucuugauauuuggaccuauaacgccgaaaugcuggugcuccuggagaaugaacgcacacuggacuaccacgauucuaacgucaaaaaucucuaugagaaggugagaagccaacugaagaacaaugcuaaagagaucggaaacggcuguuucgaauuuuaccauaagugcgacaauaccuguauggaguccguccggaacgggacauaugauuaccccaaauauagcgaagaggccaaacuuaaucgcgaagagaucgacggcgugaagcuggagucugcgagaauuuaccagauccucgcuauuuacuccacgguugccagcucucuggugcuucuggucucccucggagccgugagcuucuggaugugcuccaacggcucucugcagugccggaucuguauuuga

SEQ ID NO: 205968 - RNA, 1695 nt, Artificial Sequence
  derived and/or modified CDS sequence (opt5) from hemagglutinin__InfluenzaA__EPI558121
augaaggccauccuggugguccuccuguacaccuucacaacggcuaacgccgacacccuuugcauuggcuaucacgcgaauaacagcacagauaccguugacacagugcuggagaagaaugugaccgucacacauuccgugaaccuccuggaaaauagacacaacgggaaacuuuguaagcugcggggaguugcuccccuccaucugggcaagugcaauaucgccggguggcugcucggaaacccugagugugaaucucugagcaccgccuccucuuggagcuacauuguggagacguccaauucugauaacgggaccugcuauccgggcgacuuuaucaauuacgaagaacuucgcgagcagcugagcuccgucagcucuuucgaaagauuugagauuuucccccaaacauccagcuggccuaaccacgauaccaaucggggagugacagcugccuguccccaugcuggcaccaacucuuuuuaucgcaaucucguuuggcuggugaaaaagggcaacuccuacagcaagaucaacaaaucuuauaucaauaacaaggaaaaagagguccuugugcugugggccauucaccacccuuccacgagcgcggaccagcagucccucuaccagaaugccgaugcuuacguguucgucgggucuagcagauauucccggaaguuugagcccgaaaucgccacacgcccuaaaguuagagaccaagcuggacggaugaacuacuauuggacccugguggagccgggcgauaagauuacauucgaagccaccgggaaucugguggcgccccgcuacgccuuugcucucaagagaaacagcggaucuggcaucauuaucuccgacaccagcguccaugauugcgacacaacgugucagaccccuaauggggccauuaacacaucucugcccuuccagaauauccacccugugaccaucggagagugccccaaauauguuaagagcacaaaacuucggauggcuaccggccugcgcaacauuccguccauccagucuagaggccucuuuggggccauugccggauucaucgaaggcggguggacgggaaugauugauggcugguacggguaucaucaccaaaaugagcagggaagcggcuacgcugcggaccugaaguccacacagaacgccaucgacggcaucaccaauaaagugaacagcgucauugagaagaugaauacccaguuuacagcuguggggaaagaguucucucaccuugagcggcgcaucgaaaaccugaacaagaagguugaugacggauuccucgauauuuggaccuacaaugccgagcugcuggugcuccuggaaaacgagagaacacuugacuaucaugauuccaaugucaaaaaccuguacgagaaggugcggagccaacucaaaaauaacgccaaggaaaucggcaauggguguuuugaguucuaucacaaaugcgacgauauguguauggaaucugucaagaacggaacguacgacuauccuaaguacuccgaggaagcuaaacugaauagagaggagauugauggcgugaaacuugaaagcacccgcaucuaucagauccuggccauuuacuccacaguugcgucuagccucgugcuggucgugucccugggggcuaucucuuuuuggaugugcagcaacggcucccuccagugccggauuuga

SEQ ID NO: 205969 - RNA, 1701 nt, Artificial Sequence; identical to SEQ ID NO: 204513
  derived and/or modified CDS sequence (opt5) from hemagglutinin__InfluenzaA__EPI564139

SEQ ID NO: 205970 - RNA, 1701 nt, Artificial Sequence; identical to SEQ ID NO: 205758
  derived and/or modified CDS sequence (opt5) from hemagglutinin__InfluenzaA__EPI786706

SEQ ID NO: 205971 - RNA, 1701 nt, Artificial Sequence
  derived and/or modified CDS sequence (opt5) from hemagglutinin__InfluenzaA__EPI395313
augaaggccauccugauugugcuccuguacaccuucacaacggcuaacgccgacacccuuugcaucggcuaucacgcgaauaacagcacagauaccgucgacacaguucuggagaaaaaugugaccgugacacauuccgucaaccuccuggaaaauagacacaacgggaaacuuuguaagcugcggggaguggcuccccuccaucugggcaagugcaauauugccggguggcugcucggaaacccugagugugaaucucugagcaccgccuccucuuggagcuacaucguugagacguccaauucugauaacgggaccugcuauccgggcgacuuuauuaauuacgaagaacuucgcgagcagcugagcuccgugagcucuuucgaaagauuugagaucuuccccaaaacauccagcuggccuaaccacgauaccaaucggggagucacagcugccuguccccaugcuggcaccaagucuuuuuauaagaaccucaucuggauugccaaaaagggcaauuccuacccuaaaaucaacaagagcuauauuaacaauaaagaaaaggaggugcugguucuuugggcgauccaccaccccucuacguccgccgaccaacagagccuguaccagaacgcugaugccuacguguucgucggguccucucgcuauagcagaaaguuugagccugaaauugcuacacggccgaaagugcgcgaccaggccggaagaaugaauuacuauuggacccucguggagcccggcgauaagaucacauucgaagcgaccgggaaccuggucgccccucgguacgcuuuugcccugaaacgcaauuccggaagcggcauuaucaucucugacaccuccguucaugauugcgacacaacgugucaaacccccaacggggcuauuaauacaagccucccuuuccagaacauccaccccgugaccauuggagagugcccgaaguaugugaaaucuacaaagcugagaauggccaccggccuucggaauaucccuagcauucagucccgcggccuguuuggggccaucgcuggauucaucgaaggcggguggacgggaaugauugauggcugguacggguaucaucaccagaacgagcaaggaucuggcuacgcggccgaccucaaaagcacacagaaugcuaucgacggcauuaccaacaaggucaauuccgugaucgagaagaugaacacccaguuuacagccguugggaaagaguucagccaccuggagagacggauugaaaaucuuaacaagaaaguggaugacggauuccuggauaucuggaccuacaacgccgagcuccugguccugcucgaaaaugagcgcacacuggacuaucaugauucuaacgugaagaaucuuuacgagaaaguuagaucccagcugaagaacaaugcuaaggaaaucggcaacggguguuuugaguucuaucacaaaugcgacgauauguguauggaaagcgugaagaauggaacguacgacuaucccaaauacucugaggaagccaagcucaaccgggaggucauugauggcgugaaacuggaguccaccagaaucuaucaaauucuugcgaucuacgcuacagucgccagcucccuggugcucguugugucucugggggccauuagcuuuuggaugugcuccaauggcucucugcagugccgcaucuguauuuga

SEQ ID NO: 205972 - RNA, 1701 nt, Artificial Sequence
  derived and/or modified CDS sequence (opt5) from hemagglutinin__InfluenzaA__EPI291696
augaaggccauccugcucgugcugcuuuacaccuucacagcugccaacgcggacacgcugugcauuggcuaucacgcuaauaacagcaccgauacagucgacaccguucucgagaaaaaugugacagugacccauuccgucaaccugcuugaaaauagacacaacgggaagcuguguaaacuccggggagugcccccucugcaucugggcaagugcaauaucgccggguggcuccugggaaacccggagugugaacuucuguuuacagccucuagcugguccuacauuguugagaccucuaauagcgauaacggcacgugcuaucccggggacuucaucaauuacgaggaacuccgcgagcagcuguccucugugagcuccuuugaaagauucgagauuuuuccuaaagcuagcucuuggcccgaucacgaaaccaaccggggagucacagccgcuuguccuuaugccggcgccaauuccuucuaccgcaaccuuaucuggcuggugaagaagggcaauagcuaucccaaacucucuaaguccuacguuaacaacaaagagaaggaggugcugguccugugggggauccaucacccuccgaccagcacagaccaacagucucucuaccagaaugcggaugcuuauguguuugugggauccagcaaauacaacaagaaguucaaacccgaaauggccgcuagaccuaagguccggggccaggccgggcgcaugaauuauuacuggacccugguugcgcccggagacacgauuacauuugaggccaccggcaaccuuguggugccuagauaugcuuucgccaugaaacggggguccggaucuggcaucauuaucagcgauacacccguccacgacugcaauaccaccugucaaacaccgaagggcgcuauuaacacgucccugccuuuucagaauauccaucccgugaccauuggggaaugcccuaaauacguuaagagcacaaaacuccgcauggccaccggacugagaaacauccccucuauccagucccggggccuuuucggggccauugcuggauuuaucgagggcggguggacaggaaugauugauggcugguauggcuaccaccaucagaaugaacaagggagcggauacgcggccgaccgcaagucuacccagaacgcuaucgauggcauuacgaauaaggugaacagcgucaucgagaaaaugaauacacaguucaccgccguggggaaggaguucaaccaccuggaaaagagaaucgagaaucucaacaagaaaguugacgacggauuucuggauguguggaccuauaacgccgaacugcucguccugcuugagaaugaacggacacuggacuaccacgauuccaacgugaagaaucucuaugagaagguccgcucucagcugaaaaacaaugcuaaggagauuggcaacggguguuucgaauuuuaccauaaaugcgacgauaccuguauggagagcgugaagaauggcacauaugacuaccccaaauauuccgaagagagcaaacuuaacagagaagagaucgauggaguuaagcuggagucuacgcggauuuaccaaauccucgccauuuacuccaccguggcgagcucucugguccuguccgugagccucggcgcuaucuccuucuggaugugcucuaaugggagccugcagugcagaaucuguauuuga

SEQ ID NO: 205973 - RNA, 1701 nt, Artificial Sequence; identical to SEQ ID NO: 201903
  derived and/or modified CDS sequence (opt5) from hemagglutinin__InfluenzaA__ACU80014

SEQ ID NO: 205974 - RNA, 1701 nt, Artificial Sequence; identical to SEQ ID NO: 194741
  derived and/or modified CDS sequence (opt5) from hemagglutinin__InfluenzaA__EPI177400

SEQ ID NO: 205975 - RNA, 1701 nt, Artificial Sequence; identical to SEQ ID NO: 195184
  derived and/or modified CDS sequence (opt5) from hemagglutinin__InfluenzaA__ACT36512

SEQ ID NO: 205976 - RNA, 1704 nt, Artificial Sequence
  derived and/or modified CDS sequence (opt5) from hemagglutinin__InfluenzaA__AJE30344
auggagaagaucgugcugcuccuggccgucauuagccuuguuaaauccgaccagaucugcauuggcuaccacgcuaacaauucuaccaagcaaguggauacaaucauggaaaagaacgugacggucacccaugcccaggacauucuggagaagacacacaaugggaaacucugugaucugaacggagugaagccccuuauccugaaggacugcagcguugcgggcuggcuccuggggaauccuaugugugaugaguucaucagagugccggagugguccuauauugucgaacgggcuaaccccgccaaugaccugugcuacccuggaacccucaacgauuaugaggagcugaaacaucuucugucucgcaucaaucacuuugaaaagaaccucauuauccccagaagcuccuggccuaaucaugagacaucucugggcgugagcgccgcuugucccuaccagggggccuccagcuucuuucggaacguuguguggcuuauuaaaaagaaugacgcuuauccuaccaucaaaauuucuuacaacaauacaaaccgcgaagaucugcucauccuguggggaauccaccacuccaacaaugccgcggagcagaccaaccuguauaagaauccggacacguacgucagcgugggcaccucuacacucaaccaaagacuggugcccaagauugccacccggucccaggucaauggccagagcgggcgcauggauuucuuuuggacaauccuuaaaccuaacgacgcuauucauuucgagucuaauggaaacuuuaucgcccccgaauacgcuuauaagauuguuaaaaagggcgauuccaccaucaugaaaagcgagauggaauacgggcacugcaauacgaagugucagacaccuaucggagccauuaacuccucuaugcccuuccauaauauccacccgcugaccauuggcgagugcccuaaauaugugaaaagcaacaagcucgugcuggcgacagggcuuagaaauagcccccugcgggaacgcagacggaaacgcggacucuuuggcgccaucgcuggcuucauugaagggggauggcaaggcauggucgacgggugguacggauaucaccauuccaacgagcagggcucuggguacgccgcugacaaggaauccacccagaaagccaucgauggagugaccaauaagguuaacagcaucauugacaaaaugaacacacaguuugaggccgugggcagagaguucaauaaccuggaacggcgcaucgaaaaucugaacaagaagauggaggauggcuuucucgacgucuggacguauaaugcugagcugcuugugcugauggaaaacgagagaacccucgauuuccacgacucuaauguuaaaaaccuguacgauaaggugcggcuucaacugagagacaaugcgaaagaacucgggaacggauguuucgaguuuuaccauaagugcgauaaugaauguauggagagcguccgcaacggcacauaugacuacccuaaauauuccgaggaagccauucugaagcgggaggaaaucucuggggugaagcuggagagcauuggaaccuaccagauccucuccauuuauagcacagucgcuucuucccuggcccuugccaucaucguggcuggccugagccucuggaugugcucuaaugggucccugcagugcagaauuuguaucuga

SEQ ID NO: 205977 - RNA, 1701 nt, Artificial Sequence; identical to SEQ ID NO: 205956
  derived and/or modified CDS sequence (opt5) from hemagglutinin__InfluenzaA__EPI178948

SEQ ID NO: 205978 - RNA, 1701 nt, Artificial Sequence; identical to SEQ ID NO: 205956
  derived and/or modified CDS sequence (opt5) from hemagglutinin__InfluenzaA__EPI178949

SEQ ID NO: 205979 - RNA, 1701 nt, Artificial Sequence
  derived and/or modified CDS sequence (opt5) from hemagglutinin__InfluenzaA__EPI590132
augaaggccauccugauugugcuccuguacaccuucacaacggcuaacgccgacaaaaucugcauuggcuaucacgcgaauaacagcaccgauacagucgacaccguucuugagaagaaugugacagugacccauuccgucaaccugcucgaaaauaaacacaacgggaagcuguguaaacuuagaggaguggcuccccugcaucucggcaagugcaauaucgccggguggcugcugggaaacccugagugugaaucucucgccacagcuagcuccuggucuuacauuguugagaccagcuccucuaauaacggcacgugcuauccgggggauuuuaucaauuacgaggagcugcgggagcagcuuagcuccgugagcucuuucgaaaaguuugagaucuuccccaaaaccuccagcuggccuaaccacgaaacaaauaagggagucaccgccgcuuguccccaugccggcacaaacucuuuuuauaaaaaucugauuuggcucgugaagaaagagaacuccuacccuaagaucaacauuagcuauaccaauaaccgcggcaaggagguucuggugcuuugggcgauccaccaucccccuacgucuacagaccaacagucccuguaccagaaugccaacagcuacgucuucgugggguccucuagauauagccggaaauuugaaccggagauugcuacccgccccaaggugagaggacaggccggccggaugaauuacuauuggacacucgucgaaccuggggauaaaaucaccuucgaggcuaccggaaaccugguugugccccgcuacgccuuugcgcugaagagaaauuccggcagcgggauuaucaucucugaaacaccugugcacgacugcgauacgaccugucaaacacccaacggagccauuaauaccucccucccguuccagaacauccacccugucacaauuggcgagugccccaaauauguuaagagcaccaaacugcggauggcuacgggccuucgcaauaucccuucuauucagagcagagggcuguuuggagccaucgcuggcuucaucgaagggggauggacaggcaugauugacgggugguacggauaucaucaccagaacgaacaaggcuccggcuacgccgccgaucucaagucuacccagaaugcuaucgacgggauuaccaacaaggugaauagcgugaucgagaaaaugaacacacaguuuaccgcggucggaaaggaguucucccaccuggaacggcgcauugaaaaccuuaauaaaaagguggaugacggcuucaucgauaucuggacauacaacgccgagcugcucguucugcuggagaaugaaagaacgcucgacuaucaugacagcaacgugaaaacccuguacgagaagguccggucucagcuuaagaauaacgcuaaagaaauugggaauggauguuuugaguucuaucacaagugcgaugacacauguauggaauccgugaaaaacggcaccuacgauuaucccaaguacagcgaggaggccaaacugaaucgcgaagagaucgacgggauuaagcucgaaucuacaagaaucuaucaaauucuggccaucuacuccaccgucgcuagcucccuugugcugguugugucucucggcgccauuagcuuuuggaugugcuccaacggaucucugcagugccgggucuguaucuga

SEQ ID NO: 205980 - RNA, 1701 nt, Artificial Sequence; identical to SEQ ID NO: 193808
  derived and/or modified CDS sequence (opt5) from hemagglutinin__InfluenzaA__ABU80400

SEQ ID NO: 205981 - RNA, 1698 nt, Artificial Sequence
  derived and/or modified CDS sequence (opt5) from hemagglutinin__InfluenzaA__ABO21709
augaaggccaaccugcucgugcugcuuugcgcucuggccgcggcugacgccgauaccaucuguauuggcuaccacgccaauaacagcacagacacggucgauaccguucucgagaaaaaugugacagugacccauuccgucaaccugcuugaagacucucacaaugggaagcugugcagacucaaaggaaucgcuccccugcagcugggcaaguguaacauugccggguggcuccugggaaauccugagugcgauccgcuucugcccgugcggagcugguccuauaucguugaaacaccuaacucugagaauggcauuuguuaccccggggacuucaucgauuaugaagaacuccgcgagcaacugagcuccgugucuagcuuugaaagauucgagaucuuuccuaaagaauccagcuggcccaaccauaauaccaacggagucacagcugccugcucucacgagggcaaguccagcuucuaccggaaucuucuguggcucaccgagaaggaaggcucuuauccuaaacugaagaacuccuacgugaauaaaaaggggaaagagguucuggugcucuggggcauucaucacccgcccaacagcaaggaacagcagaaccuguaucagaaugagaacgcguacgucucuguggugacguccaauuacaaccgcagauuuaccccugaaaucgccgagcggcccaagguccgcgaccaagcuggaagaaugaauuauuacuggacacuucugaaaccuggggauaccauuaucuucgaggccaacggaaaucucauugcucccauguaugccuuugcgcugagccggggcuucggguccggaaucauuacaucuaacgccagcaugcacgaauguaauaccaagugccagacgccgcuuggcgcuaucaacuccagccugccuuaccagaauauccaucccguuacaauuggcgaguguccuaaauaugugcgcucugccaagcucagaauggugaccgggcugcggaacaaucccuccauccagagccgcggacuguuuggcgcuauugccggguucaucgaaggaggcuggacagggaugauugacggaugguacggcuaucaccaucaaaacgagcagggcucuggguacgccgcugaucagaaaagcacccagaaugcgaucaacggaaucaccaacaaggucaauacagugauugagaaaaugaacauccaauuuacggccguuggcaaggaguucaauaagcucgagaaaagaauggaaaaccugaauaagaaaguggacgauggguuucuugacauuuggaccuacaacgcugagcugcucguccugcuugaaaaugagcggacacuggacuuccacgauuccaacgugaagaaucucuaugaaaaaguuaagucucagcugaagaacaaugccaaagagaucggaaacggcugcuucgaguuuuaccacaagugugacaaugaaugcauggagagcgugcgcaacgggaccuaugauuaccccaaauauuccgaagagagcaagcugaauagagagaaagucgacggcgugaagcucgaaucuaugggaauuuaccagauccuggccaucuauuccacagucgcuagcucucuugugcugcucguuucccugggcgccauuagcuucuggaugugcuccaacgggucucugcaaugucggaucugcauuuga

SEQ ID NO: 205982 - RNA, 1701 nt, Artificial Sequence; identical to SEQ ID NO: 194728
  derived and/or modified CDS sequence (opt5) from hemagglutinin__InfluenzaA__CAZ65588

SEQ ID NO: 205983 - RNA, 1701 nt, Artificial Sequence; identical to SEQ ID NO: 205758
  derived and/or modified CDS sequence (opt5) from hemagglutinin__InfluenzaA__EPI697744

SEQ ID NO: 205984 - RNA, 1701 nt, Artificial Sequence; identical to SEQ ID NO: 205918
  derived and/or modified CDS sequence (opt5) from hemagglutinin__InfluenzaA__EPI768525

SEQ ID NO: 205985 - RNA, 1701 nt, Artificial Sequence
  derived and/or modified CDS sequence (opt5) from hemagglutinin__InfluenzaA__EPI726930
augaaggccauccuggugguccuccuguacaccuucacaacggcuaacgccgacacccuuugcauuggcuaucacgcgaauaacagcacagauaccguugacacagugcuggagaagaaugugaccgucacacauuccgugaaccuccuggaagauaagcacaaugggaaacuuuguaagcugagaggaguugcuccccuccaucugggcaaaugcaacaucgccggguggauucugggaaauccugagugugaaucucucagcaccgccuccucuuggagcuacaucguggagacguccaacucugacaaugggaccugcuauccgggcgauuuuauuaacuacgaagaacugcgggagcagcuuagcuccgucagcucuuucgaacgcuuugagaucuuccccaaggcuuccagcuggccuaaucacgacucuaacaagggagugacagccgcuuguccccaugccggcgcgaaauccuuuuauaagaaucugaucuggcucguuaaaaagggcaacagcuacccuaaacugaaucaaucuuauauuaacgauaaggggaaggaagugcuuguccuguggggaauccaccaccccuccaccacagccgaccagcagagccucuaccagaacgcugaugccuacguguucgugggcaccuccagauauucuaaaaaguuuaaaccugagauugcuacgcggccgaagguccgcgaccaagaggggagaaugaauuacuauuggacacugguugaacccggagauaaaaucaccuucgaggccacaggcaaccugguggugccucgguacgcguuuaccauggaacgcaaugccgggagcggaauuaucauuuccgacacccccguccaugauugcaacacaacgugucagaccccugagggcgcuaucaauacaagccuccccuuccagaacauccacccgauuaccaucggcaagugcccuaaauaugugaagucuacaaagcugagacuugccaccgggcugcggaauguucccuccauucagagccgcggacucuuuggcgcuaucgccggguucauugaaggaggcuggacggggaugguggacggaugguacggcuaucaucaccaaaacgagcagggcucuggguacgccgcugaccugaaaagcacacagaaugcgaucgauaagaucaccaacaaagucaauuccgugauugagaagaugaacacccaguuuacagccguuggaaaagaguucaaucaccuugagaagagaaucgaaaaccugaauaagaaaguggacgauggcuuccucgacauuuggaccuacaacgcugagcugcugguccuccuggaaaacgagcggacacuugauuaucaugacucuaaugugaagaaccuguacgagaaaguccgcaaucaacucaagaacaaugccaaagaaaucgggaacggauguuuugaguucuaucacaagugcgauaauacguguauggaaagcgugaagaacggcaccuacgacuauccuaaauacuccgaggaagccaagcugaauagagagaaaauugaugggguuaaacuugagagcacacggaucuaucagauccuggcuauuuacucuaccguggccuccagccucguccuggugguuucucugggcgcgaucuccuuuuggaugugcagcaacggaucccuccagugccgcauuuguaucuga

SEQ ID NO: 205986 - RNA, 1701 nt, Artificial Sequence
  derived and/or modified CDS sequence (opt5) from hemagglutinin__InfluenzaA__EPI813817
augaaggccauccuggugguccuccuguacaccuucacaacggcuaacgccgacacccuuugcauuggcuaucacgcgaauaacagcacagauaccguugacacagugcuggagaagaaugugaccgucacacauuccgugaaccuccuggaagauaagcacaaugggaaacuuuguaagcugagaggaguugcuccccuccaucugggcaaaugcaacaucgccggguggauucugggaaauccugagugugaaucucucagcaccgccuccucuuggagcuacaucguggagacguccaacucugacaaugggaccugcuauccgggcgauuuuauuaacuacgaagaacugcgggagcagcuuagcuccgucagcucuuucgaacgcuuugagaucuuccccaaggcuuccagcuggccuaaucacgacucuaacaagggagugacagccgcuuguccccaugccggcgcgaaauccuuuuauaagaaucugaucuggcucguuaaaaagggcaacagcuacccuaaacugaaucaaucuuauauuaacgauaaggggaaggaagugcuuguccuguggggaauccaccaccccuccaccacagccgaccagcagagccucuaccagaacgcugaugccuacguguucgugggcaccuccagauauucuaaaaaguuuaaaccugagauugcuacgcggccgaagguccgcgaccaagaggccagaaugaauuacuauuggacacugguugaacccggggauaaaaucaccuucgaggcgacaggaaaccugguggugccucgguacgccuuuaccauggaacgcaaugcuggcagcgggauuaucauuuccgacacccccguccaugauugcaacacaacgugucagaccccugagggagccaucaauacaagccuccccuuccagaacauccacccgauuaccaucggcaagugcccuaaauaugugaagucuacaaagcugagacuugcuaccggccugcggaauguucccuccauucagagccgcgggcucuuuggagccaucgccggcuucauugaagggggauggacgggcaugguggacgggugguacggauaucaucaccaaaacgagcagggcucuggcuacgcugcggaccugaaaagcacacagaaugccaucgauaagaucaccaacaaagucaauuccgugauugagaagaugaacacccaguuuacagcuguugggaaagaguucaaucaccuugagaagagaaucgaaaaccugaauaagaaaguggacgauggauuccucgacauuuggaccuacaacgccgagcugcugguccuccuggaaaacgagcggacacuugauuaucaugacucuaaugugaagaaccuguacgagaaaguccgcaaucaacucaagaacaaugccaaagaaaucggcaacggguguuuugaguucuaucacaagugcgauaauacguguauggaaagcgugaagaacggaaccuacgacuauccuaaauacuccgaggaagcuaagcugaauagagagaaaauugauggcguuaaacuugagagcacacggaucuaucagauccuggccauuuacucuaccguggcguccagccucguccuggugguuucucugggggcuaucuccuuuuggaugugcagcaacggcucccuccagugccgcauuuguaucuga

SEQ ID NO: 205987 - RNA, 1701 nt, Artificial Sequence
  derived and/or modified CDS sequence (opt5) from hemagglutinin__InfluenzaA__EPI466626
augaaggccauccuggugguccuccuguacaccuucgcuacagccaacgcggacacgcuuugcauuggcuaucacgcuaauaacagcaccgauacaguugacaccgugcuggagaagaaugugacagucacccauuccgugaaccuccuggaagauaagcacaaugggaaacuuuguaagcugagaggaguugcuccccuccaucugggcaaaugcaacaucgccggguggauucugggaaauccugagugugaaucucucagcacagccuccucuuggagcuacaucguggagaccuccucuagcgacaacggcacgugcuauccgggggauuuuauuaauuacgaagaacugcgggagcagcuuuccagcgucucuuccuucgaacgcuuugagaucuuccccaagaccagcucuuggccuaaccacgacuccaauaagggagugacagccgcuuguccccaugccggcgcgaaaucuuuuuauaagaaccugaucuggcucguuaaaaagggcaauagcuacccuaaacugucccaaagcuauauuaacgauaaggggaaggaagugcuuguccuguggggaauccaccaccccuccaccacagccgaccagcagucucucuaccagaaugcugaugccuacguguucgugggcaccagcagauauuccaaaaaguuuaaaccugagauugcuauccggccgaagguccgcgaccaagaggggagaaugaacuacuauuggacgcugguugaacccggagauaaaauuacauucgaggccaccggcaaccugguggugccucgguacgcguuuacaauggaacgcaaugccgggagcggaaucauuaucucugacacccccguccaugauugcaacaccacaugucagacgccugagggcgcuaucaauaccucccuccccuuccagaacauucacccgaucacaauuggcaagugcccuaaauauguuaagagcaccaagcugagacuugccacagggcugcggaaugugcccucuauccagagccgcggacucuuuggcgcuauugccggguucaucgaaggaggcuggaccgggaugguggacggaugguacggcuaucaucaccaaaacgagcagggcuccggguacgccgcugaccugaaaucuacgcagaaugcgaucgauaagauuacaaacaaagucaauagcgugaucgagaagaugaacacccaguuuaccgccguuggaaaagaguucaaucaccuugagaagagaauugaaaaccugaauaagaaaguggacgauggcuuccucgacaucuggacauacaacgcugagcugcugguccuccuggaaaaugagcggacccuugauuaucaugacuccaacgugaagaaccuguacgagaaaguccgcaaucaacucaagaacaaugccaaagaaauugggaacggauguuuugaguucuaucacaagugcgauaauacauguauggaaagcgugaagaacggcacguacgacuauccuaaauacucugaggaagccaagcugaauagagagaaaaucgaugggguuaaacuugaguccacccggaucuaucagauucuggcuaucuacagcacaguggccucuuccgucgugcucguugugagccugggcgcgauuuccuuuuggaugugcucuaacggaagccugcagugccgcaucuguauuuga

SEQ ID NO: 205988 - RNA, 1701 nt, Artificial Sequence
  derived and/or modified CDS sequence (opt5) from hemagglutinin__InfluenzaA__EPI541966
augaaggccauccuggugguccuccuguacaccuucgcuacagccaacgcggacacgcuuugcauuggcuaucacgcuaauaacagcaccgauacaguugacaccgugcuggagaagaaugugacagucacccauuccgugaaccuccuggaagauaagcacaaugggaaacuuuguaagcugagaggaguugcuccccuccaucugggcaaaugcaacaucgccggguggauucugggaaauccugagugugaaucucucagcacagccuccucuuggagcuacaucguggagaccuccucuagcgacaacggcacgugcuauccgggggauuuuauuaauuacgaagaacugcgggagcagcuuuccagcgucucuuccuucgaacgcuuugagaucuuccccaagaccagcucuuggccuaaccacgaauccaauaagggagugacagccgcuuguccccaugccggcgcgaaaucuuuuuauaagaaccugaucuggcucguuaaaaagggcaauagcuacccuaaacugucccaaagcuauauuaacgacaaggggaaggaggugcuuguccuguggggaauccaccaccccuccaccacagccgaucagcagucucucuaccagaaugcugacgccuacguguucgugggcaccagcagauauuccaaaaaguuuaaaccugagauugcuauccggccgaagguccgcgaucaagaagggagaaugaacuacuauuggacgcugguugagcccggagacaaaauuacauucgaagccaccggcaaccugguggugccucgguacgcguuuacaauggagcgcaaugccgggagcggaaucauuaucucugauacccccguccaugacugcaacaccacaugucagacgccugaaggcgcuaucaauaccucccuccccuuccagaacauucacccgaucacaauuggcaagugcccuaaauauguuaagagcaccaagcugagacuugccacagggcugcggaaugugcccucuauccagagccgcggacucuuuggcgcuauugccggguucaucgagggaggcuggaccgggaugguggauggaugguacggcuaucaucaccaaaacgagcagggcuccggguacgccgcugaccugaaaucuacgcagaaugcgaucgacaagauuacaaacaaagucaauagcgugaucgaaaagaugaacacccaguuuaccgccguuggaaaagaguucaaucaccuugaaaagagaauugagaaccugaauaagaaaguggaugacggcuuccucgauaucuggacauacaacgcugaacugcugguccuccuggagaaugagcggacccuugacuaucaugauuccaacgugaagaaccuguacgaaaaaguccgcaaucaacucaagaacaaugccaaagagauugggaacggauguuuugaguucuaucacaagugcgacaauacauguauggagagcgugaagaacggcacguacgauuauccuaaauacucugaagaggccaagcugaauagagagaaaaucgacgggguuaaacuugaauccacccggaucuaucagauucuggcuaucuacagcacaguggccucuuccgucgugcucguugugagccugggcgcgauuuccuuuuggaugugcucuaacggaagccugcagugccgcaucuguauuuga

SEQ ID NO: 205989 - RNA, 1701 nt, Artificial Sequence
  derived and/or modified CDS sequence (opt5) from hemagglutinin__InfluenzaA__EPI652003
augaaggccauccuggugguccuccuguacaccuucgcuacagccaacgcggacacgcuuugcauuggcuaucacgcuaauaacagcaccgauacaguugacaccgugcuggagaagaaugugacagucacccauuccgugaaccuccuggaagauaagcacaaugggaaacuuuguaagcugagaggaguugcuccccuccaucugggcaaaugcaacaucgccggguggauucugggaaauccugagugugaaucucucagcacagccuccucuuggagcuacaucguggagaccuccucuagcgacaacggcacgugcuauccgggggauuuuauuaauuacgaagaacugcgggagcagcuuuccagcgucucuuccuucgaacgcuuugagaucuuccccaagaccagcucuuggccuaaccacgaauccaauaagggagugacagccgcuuguccccaugccggcgcgaaaucuuuuuauaagaaccugaucuggcucguuaaaaagggcaauagcuacccuaaacugucccaaagcuauauuaacgacaaggggaaggaggugcuuguccuguggggaauccaccaucccccuaccacagccgaucagcagucccucuaccagaaugcugacgccuacguguucgugggcaccucuagauauagcaaaaaguuuaaaccggagauugcuauccggcccaagguccgcgaucaagaagggagaaugaacuacuauuggacgcugguugagccuggagacaaaauuacauucgaagccaccggcaaccugguggugccccgguacgcguuuacaauggagcgcaaugccggguccggaaucauuaucagcgauaccccuguccacgacugcaacaccacaugucagacgcccgaaggcgcuaucaauaccucucucccguuccagaacauucacccuaucacaauuggcaagugccccaaauaugugaaguccaccaagcugagacuugccacagggcugcggaauguuccuagcauccagucucgcggacucuuuggcgcuauugccggguucaucgagggaggcuggaccgggaugguggauggaugguacggcuaucaucaccaaaacgagcagggcagcggguacgccgcugaccugaaauccacgcagaaugcgaucgacaagauuacaaacaaagucaauucugugaucgaaaagaugaacacccaguuuaccgccguuggaaaagaguucaaucaccuugaaaagagaauugagaaccugaauaagaaaguggaugacggcuuccucgauaucuggacauacaacgcugaacugcugguccuccuggagaaugagcggacccuugacuaucaugauagcaacgugaagaaccuguacgaaaaaguccgcaaucaacucaagaacaaugccaaagagauugggaacggauguuuugaguucuaucacaagugcgacaauacauguauggaguccgugaagaacggcacguacgauuaucccaaauacagcgaagaggccaagcugaauagagagaaaaucgacgggguuaaacuugaaucuacccggaucuaucagauucuggcuaucuacuccacaguggccagcucugucgugcucguugugucccugggcgcgauuagcuuuuggaugugcuccaacggaucucugcagugccgcaucuguauuuga

SEQ ID NO: 205990 - RNA, 1701 nt, Artificial Sequence
  derived and/or modified CDS sequence (opt5) from hemagglutinin__InfluenzaA__EPI291877
augaaggccaucauugugguccugcucuacaccuucgcuacagccgacgcggauacgcugugcaucggcuaucacgcuaacaauagcaccgacacaguugauaccgugcuugagaaaaacgugacagucacccauuccgugaauauucuggaaaacaagcacgacgggaaacucuguaagcugagaggaguugcuccccuucaucugggcaaaugcaauaucgccggguggcuccugggaaacccugagugugaaucucuguuugccgccagcuccuggucuuacauuguggagacaccgaauagcgauaacgggaccugcuaucccggcgacuucaucaauuacgaagaacuccgggagcaccuguccucugucagcuccuuugaacgcuucgagaucuuuccuaaggcuaacagcuggcccaaucaugauacgaacaagggagugaccgccgcguguccuuaugccggcgcuaauucuuucuacagaaaccuuauuuggcugguuaaaaagggcaauuccuaucccaaacucagcaagucuuacaucaacaacaaaaagaaggaagugcuggucauuugggggauccaccacccuccgacauccauugaccagcaaacccuuuaccagaaugccgaugcuuauguguuugugggaagcucuaaauacuccaagcgguucaaacccgagaucgccgcgcgcccuaaggucagagaccaggccggccggauggauuauuacuggacacugauugagcccggggacaccaucacguuugaagcuacaggaaaccucguugugccucgcuaugccuucgcuaugaaaagaggcagcggguccggaaucauugugucugaugcccccguccaugacugcaauaccacaugucagaccccgaagggcgccaucaacaccagccugccuuuucaaaauauucaccccgugacaaucggcgagugcccuaaauacguuaaguccacgaagcugcggauggcuaccgggcuccgcaacauucccagcauccagucuagaggacuguucggcgcgaucgccggguuuauugaaggaggcuggacagggaugaucgacggaugguauggcuaccaucaccagaaugagcagggcuccggguacgcugccgaucagaaaagcacccaaaacgccauugacggaaucacaaauaaggugaacucuauuaucgagaaaaugaauacccaguucacggcugucggcaaggaguucagccagcuugagaaacggaucgaaucccugaacaauaagguggaugacggguuucucgauauuuggacauauaacgccgagcugcuuguucugcucgaaaaugagcgcacccuggacuaccacgauucuaacgugaagaaccuguaugaaaaagucagaagccaacucaagaauaacgcgaaagagaucggaaauggcuguuucgaguuuuaccauaagugcgacaacaccuguauggaauccgugaaaaaugggacauaugauuaccccaaguauagcgaggaagcuaagcugaaccgggaggaaauugacggcaucaaacuugagucugcccgcauuuaccagauccuggccauuuacuccaccgucgcuagcucucucgugcugcuuguuucccugggagccgugagcuucuggaugugcuccaauggcucucuccagugcagaaucuguaucuga

SEQ ID NO: 205991 - RNA, 1701 nt, Artificial Sequence
  derived and/or modified CDS sequence (opt5) from hemagglutinin__InfluenzaA__ABR29595
augaaggccauccugcucgugcugcuuuacaccuucacagcugccaacgcggacacgcugugcauuggcuaucacgcuaauaacagcaccgauacagucgacaccguucucgagaagaaugugacagugacccauuccgucaaccugcuugaagauagacacaaugggaagcuguguaaacuccggggaguggcuccccugcaucugggcaagugcaacaucgccggguggcuccugggaaauccugagugugaacuucuguuuacagccucuagcugguccuacauuguugagaccucuaacagcgacaauggcacgugcuauccgggggauuucaucaacuacgaagaacuccgcgagcagcuguccucugugagcuccuuugaaagauucgagauuuuucccaaagccagcucuuggccuaaucacgaaaccaaccggggagucacagcugccugucccuaugcgggcgccaauuccuucuaccgcaaccuuaucuggcuggugaagaagggcaauagcuauccuaaacucucuaaguccuacguuaacaacaaagagaaggaggugcugguccugugggggauccaucaucccccuaccagcacagaccaacagucucucuaccagaaugcugaugccuauguguuugugggauccagcaaauacaacaagaaguucaaaccggaaauugcuaccagacccaagguccggggccaggccgggcgcaugaauuauuacuggacgcugguugagccuggagacacaaucaccuuugaagcgacaggcaaccuuguggugcccagauaugccuucgcuaugaaacggggguccggaucuggcauuaucauuagcgauaccccuguccacgacugcaauaccacaugucaaacgcccaagggcgccaucaacaccucccugccguuucagaauauucacccugugacaaucggggagugccccaaauacguuaagagcaccaaacuccgcauggcuacaggacugagaaacaucccuucuauucagucccggggccuuuucggggccaucgccggauuuauugaaggcggguggaccggaaugaucgauggcugguauggcuaccaccaucagaaugagcaagggagcggauacgcugcggaccgcaagucuacgcagaacgccauugauggcaucacaaauaaggugaacagcgucaucgagaaaaugaauacccaguucaccgcuguggggaaggaguucaaccaccuggagaaaagaauugaaaaucucaacaagaaaguugacgacggauuucuggauguguggacauauaacgccgagcugcucguccugcuugaaaaugagcggacccuggacuaccacgauuccaacgugaagaaucucuaugagaagguccgcucucagcugaaaaacaaugccaaggaaaucggcaacggguguuucgaguuuuaccauaaaugcgacgauacauguauggaaagcgugaagaauggcacguaugacuaccccaaauauuccgaggaaagcaaacuuaacagagaggagauugauggaguuaagcuggaaucuacccggaucuaccaaauucucgcuaucuacuccacaguggccagcucucugguccugcucgugucccugggcgcgaucagcuucuggaugugcuccaaugggucucuucagugcagaauuuguaucuga

SEQ ID NO: 205992 - RNA, 1701 nt, Artificial Sequence
  derived and/or modified CDS sequence (opt5) from hemagglutinin__InfluenzaA__EPI291885
augaaggccaucauugugguccugcuccacaccuucgcuacagccgacgcggauacgcugugcaucggcuaccaugcuaacaauagcaccgacacaguugauaccgugcuugagaaaaacgugacagucacccacuccgugaaucugcucgaaacaaagcaugacgggaaacuguguaaccuuaagggaguugcuccccugcaccucggcaaaugcaauauugccggguggcugcugggaaacccugagugugaaucucucuuuaccgccagcuccuggucuuauaucguggagacgccgaauagcgauaacgggaccugcuaccccggcaauuucauuaacuaugaggaacugagagagcaucuuuccucugucagcuccuuugaacgguucgagaucuuuccuaaggccaauagcuggcccaaccacgacacaaauaagggagugaccgcugccuguccuuacgcgggcgccaacucuuucuaucgcaaucugaucuggcucguuaaaaagggcaacuccuaccccaaacugagcaagucuuauauuaacaauaaaaagaaggaagugcuugucaucugggggauucaccauccuccgacauccaccgaucagcaaacgcuguaccagaacgcugacgccuacguguuugugggaagcucuaaauauuccaagagauucgagcccgagaucgcugcccggccuaaaguccgcaaucaggcgggcagaaugaacuacuauuggacacucauugaacccggggauaccaucacauuugaggccaccggaaaucugguugugccucgguacgcuuucgccaugcgcagaggcagcggguccggaauuaucgugucugacgcucccguccacgauugcaacaccacaugucagacgccgaagggcgccaucaauaccagccugccuuuucaaaacauucaucccgugacaaucggcgaaugcccuaaauauguuaaguccaccaaacuccggauggccacagggcugcgcaauauucccagcauccagucuagaggacuuuucggcgcuauugcgggguuucuggagggaggcuggaccgggaugaucgacggaugguacggcuaucaccaccagaacgaacagggcuccggguacgccgcugaucaaaagagcacgcagaaugccaucgacggaauuacaaacaaggucaauucuaucauugagaaaaugaacacccaguucaccgccgugggcaaggaguucagccagcucgaaaaacggaucgagucccugaauaacaagguggacgauggguuucuugacauuuggacauacaacgcugaaaugcugguucuccuggagaaugaacgcacccuggauuaucaugacucuaacgugaaaaaucucuacgagaaggucagaagccaacugaagaacaaugccaaagagaucggaaacggcuguuucgaauuuuaucacaagugcgauaauacauguauggaguccgugaaaaacgggacguacgacuaucccaaguacagcgaagaggcgaaacuuaaucgggaagagaucgauggcgucaagcuggagucugcucgcauuuaucagauccucgccauuuacuccaccguggccagcucucugguucuucuggugucccucggagcugucagcuucuggaugugcuccaacggcucucugcagugcagaaucuguauuuga

SEQ ID NO: 205993 - RNA, 1701 nt, Artificial Sequence; identical to SEQ ID NO: 194728
  derived and/or modified CDS sequence (opt5) from hemagglutinin__InfluenzaA__EPI176515

SEQ ID NO: 205994 - RNA, 1701 nt, Artificial Sequence; identical to SEQ ID NO: 195184
  derived and/or modified CDS sequence (opt5) from hemagglutinin__InfluenzaA__EPI189182

SEQ ID NO: 205995 - RNA, 1701 nt, Artificial Sequence; identical to SEQ ID NO: 194976
  derived and/or modified CDS sequence (opt5) from hemagglutinin__InfluenzaA__EPI180574

SEQ ID NO: 205996 - RNA, 1701 nt, Artificial Sequence; identical to SEQ ID NO: 200781
  derived and/or modified CDS sequence (opt5) from hemagglutinin__InfluenzaA__EPI377499

SEQ ID NO: 205997 - RNA, 1701 nt, Artificial Sequence
  derived and/or modified CDS sequence (opt5) from hemagglutinin__InfluenzaA__EPI346916
augaaggccauccuggugguccuccuguacaccuucacaacggcuaccgccgacacacuuugcauuggcuaucacgcgaacaauagcaccgauacaguugacaccgugcuggagaaaaacgugacagucacccauuccgugaaucuccuggaaaacagacacaaugggaaacuuuguaagcugcggggaguugcuccccuccaucugggcaagugcaacaucgccggguggcugcucggaaauccugagugugaaucucugagcacggccuccucuuggagcuacauuguggagaccuccaacucugauaauggcacaugcuauccgggggacuuuaucaacuacgaagaacuucgcgagcagcugagcuccgucagcucuuucgaaagauuugagauuuuccccaaaaccuccagcuggccuaaucacgauacaaaccggggagugaccgcugccuguccccaugacggcacaaauucuuuuuaucgcaaccucaucuggcugguuaagaagggcaauuccuacccuaaaaucaacaagagcuauauuaacaauaaagaaaaggagauccuugugcugugggcuauucaccaccccucuacguccgccgaucaacagagccucuaccagaacgcggacgccuacgucuucgugggguccucuagauauagccggaaauuugagccugaaguggcuacccgcccgaaggucagagaucaggccggacggaugaauuacuauuggacacugguugagcccggcgacaagaucaccuucgaagcuaccgggaaccugguggugccucgcuacgccuuugcgcucaaaagaaauuccggaagcggcauuaucauuucugauacauccguccaugacugcgauacgaacugucaaacccccaauggggccaucaacacaagccugccuuuccagaauauccaccccgugaccauuggagagugcccgaaguauguuaaaucuacaaagcugcggauggcuaccggccuucgcaacaucccuagcauucaguccagaggccucuuuggggccaucgcuggauucauugaaggcggguggacgggaaugaucgacggcugguacggguaucaucaccagaaugagcaaggaucuggcuacgccgccgaccugaaaagcacacagaacgcuaucgauggcauuaccaauaaggugaacuccgucaucgagaaaaugaauacccaguuuacagcgguggggaaggaguucagccaccuugagcggcgcauugaaaaccugaacaagaaaguugacgauggauuccucgacaucuggaccuacaaugccgagcugcuggugcuccuggaaaacgagagaacacuugauuaucaugacucuaaugucaagaaccuguacgagaaagugcggucccagcucaagaauaacgcuaaagaaauuggcaauggguguuuugaguucuaucacaagugcgaugacauguguauggaaagcgucaagaacggaacguacgauuaucccaaauacucugaggaagccaagcugaauagagaggagaucgacggcgugaaacuugaauccacccgcaucuaucaaauucuggccaucuacagcacaguugcuuccucucucgugcuggucgugagccugggggccauuuccuuuuggaugugcucuaacggcagccuccagugccggaucuguauuuga

SEQ ID NO: 205998 - RNA, 1689 nt, Artificial Sequence; identical to SEQ ID NO: 195355
  derived and/or modified CDS sequence (opt5) from hemagglutinin__InfluenzaA__ACV49600

SEQ ID NO: 205999 - RNA, 1701 nt, Artificial Sequence; identical to SEQ ID NO: 194401
  derived and/or modified CDS sequence (opt5) from hemagglutinin__InfluenzaA__BAF48361

SEQ ID NO: 206000 - RNA, 1701 nt, Artificial Sequence
  derived and/or modified CDS sequence (opt5) from hemagglutinin__InfluenzaA__EPI507594
augaagaccaucauugcccugagcuacauccucugccugguguucgcucagaaacuucccggcaacgacaauuccacagccacgcugugucucgggcaccaugcggucccuaacggaaccauuguuaagacaaucaccaaugauagaauugaggugacaaacgcuaccgaacuggugcaaaauucuagcaucggcgagaucugcgacuccccgcaccagauucuugauggggaaaacuguacacugaucgacgcccuccugggagauccccagugcgacggcuuucagaauaaaaagugggaucuguucgucgagcggucuaaagccuauagcaacuguuacccuuaugacgugcccgauuacgcuucccuccgcucucugguugccagcuccgggacccuugaauuuaauaacgagagcuucaauugggcuggagugacgcaaaacggcaccucuuccgccugcaagagaggcagcaauucuuccuuuuucagccggcugaacuggcucacacaucugaauuuuaaguauccugcgcuuaacgucaccaugcccaacaaugagcaguucgacaaacuguacauuuggggagugcaccauccuguuacagauaaggaccagaucuuucucuaugcccagucuuccgggcgcauuaccgugagcacgaaaagaucccaacaggcugucaucccgaacauuggcuuccggccccgcaucagaaauaucccuucucggauuagcaucuacuggacaauugugaagcccggggauauccugcugauuaacuccaccggaaaucucaucgccccucgcggcuacuuuaaaaucagaagcgggaagucuuccauuaugcggagcgacgcucccaucggaaaguguaaaucugaaugcauuacaccgaacggcagcaucccuaaugacaagcccuuccagaacgugaaucgcauuaccuauggcgccuguccuagauacgucaaacaguccacccugaaacuugcgacagggaugcggaacguucccgagaagcaaacgcgcggaaucuuuggcgccaucgcuggguucauugaaaauggaugggagggcaugguggaugggugguauggauucagacaccagaacuuugagggccggggccaggccgcugaccugaagucuacccaagccgccaucgaucagauuaaugggaaacucaacagacugaucggaaagacaaaugaaaaguuccaccagauugagaaagaauuuagcgagguggaaggccgcauccaggaccuugagaaguacgucgaggauaccaaaauugaccugugguccuauaacgcugaacuccugguggcgcuggagaaccaacauacaaucgaucucaccgacagcgaaaugaauaagcuguucgagaaaacgaagaagcagcuucgggaaaacgccgaggauauggggaauggaugcuuuaaaaucuaccacaagugugacaacgcuugcauuggcucuaucagaaaugggacauaugaucaugacguuuaccgcgacgaggcccugaacaaucgguuccagauuaaaggcguggaacucaaguccggauacaaagauuggauccuguggauuagcuuugccaucucuugcuuccuucugugugucgcucuccugggcuuuaucaugugggccugccagaaggggaacauuagauguaauaucugcauuuga

SEQ ID NO: 206001 - RNA, 1701 nt, Artificial Sequence
  derived and/or modified CDS sequence (opt5) from hemagglutinin__InfluenzaA__EPI461953
augaagaccaucauugcccugagcuacauccucugccugguguucgcucagaaacuucccggcaacgacaauuccacagccacgcugugucucgggcaccaugcggucccuaacggaaccauuguuaagacaaucaccaaugauagaauugaggugacaaacgcuaccgaacuggugcaaaauucuagcaucggcgagaucugcgacuccccgcaccagauucuugauggggaaaacuguacacugaucgacgcccuccugggagauccccagugcgacggcuuucagaauaaaaagugggaucuguucgucgagcggucuaaagccuauagcaacuguuacccuuaugacgugcccgauuacgcuucccuccgcucucugguugccagcuccgggacccuugaauuuaauaacgagagcuucaauugggcuggagugacgcaaaacggcaccucuuccgccugcauuagaggcagcaauucuuccuuuuucagccggcugaacuggcucacacaucugaauuuuaaguauccugcgcuuaacgucaccaugcccaacaaugagcaguucgacaagcuguacaucuggggagugcaccauccugggacagauaaagaccagauuuuucucuaugcccagucuuccggccgcaucaccguuagcacgaagagaucccaacaggcugugauuccgaacaucgggucucggccccgcaucagaaauauuccuagccggaucuccauuuacuggacaaucgucaaacccggagauauucugcugaucaacagcaccggcaaucucaucgccccucgcggguacuucaagauuagaucuggaaaauccagcaucaugcggucugacgcucccauuggcaaguguaagagcgaaugcaucacaccgaacggcuccauuccuaaugacaaacccuuucagaacgugaaucgcaucaccuauggggccuguccuagauacgugaagcagucuacccugaaacuugcgacaggaaugcggaacguccccgagaagcaaacgcgcggcaucuucggggccauugcuggauuuaucgaaaauggcugggaggggaugguugauggaugguauggcuucagacaccagaacuucgagggccgggggcaggccgcugaccugaaaagcacccaagccgccauugaucagaucaauggaaagcucaacagacugauuggcaaaacaaaugaaaaguuucaccagaucgagaaggaguucuccgaaguggaagggcgcauucaggaccuugagaaauacguggaggauaccaagaucgaccuguggagcuauaacgcugaacuccuggucgcgcuggagaaccaacauacaaucgaucucaccgacucugaaaugaauaaacuguuugagaagacgaaaaagcagcuucgggaaaacgccgaggauaugggaaauggcugcuucaagauuuaccacaaaugugacaacgcuugcaucggguccauuagaaauggcacauaugaucaugacguguaccgcgacgaggcccugaacaaucgguuucagaucaagggaguugaacucaaaagcggcuacaaggauuggauucuguggaucucuuucgccaucuccugcuuucuucuguguguggcucuccugggguucauuaugugggccugccagaaaggaaacaucagauguaauauuugcaucuga

SEQ ID NO: 206002 - RNA, 1701 nt, Artificial Sequence
  derived and/or modified CDS sequence (opt5) from hemagglutinin__InfluenzaA__EPI461953/m1
augaagaccaucauugcccugagcuacauccucugccugguguucgcucagaaacuucccggcaacgacaauuccacagccacgcugugucucgggcaccaugcggucccuaacggaaccauuguuaagacaaucaccaaugauagaauugaggugacaaacgcuaccgaacuggugcaaaauucuagcaucggcgagaucugcgacuccccgcaccagauucuugauggggaaaacuguacacugaucgacgcccuccugggagauccccagugcgacggcuuucagaauaaaaagugggaucuguucgucgagcggucuaaagccuauagcaacuguuacccuuaugacgugcccgauuacgcuucccuccgcucucugguugccagcuccgggacccuugaauuuaauaacgagagcuucaauugggcuggagugacgcaaaacggcaccucuuccgccugcaagagaggcagcaauucuuccuuuuucagccggcugaacuggcucacacaucugaauuuuaaguauccugcgcuuaacgucaccaugcccaacaaugagcaguucgacaaacuguacauuuggggagugcaccauccuguuacagauaaggaccagaucuuucucuaugcccagucuuccgggcgcauuaccgugagcacgaaaagaucccaacaggcugucaucccgaacauuggcuaccggccccgcaucagaaauaucccuucucggauuagcaucuacuggacaauugugaagcccggggauauccugcugauuaacuccaccggaaaucucaucgccccucgcggcuauuucaaaaucagaagcgggaagucuuccauuaugcggagcgacgcucccaucggaaaguguaaaucugaaugcauuacaccgaacggcagcaucccuaaugacaagcccuuucagaacgugaaucgcauuaccuacggcgccuguccuagauaugucaaacaguccacccugaaacuugcgacagggaugcggaacguucccgagaagcaaacgcgcggaaucuucggcgccaucgcuggguuuauugaaaauggaugggagggcaugguggaugggugguacggauucagacaccagaacuucgagggccggggccaggccgcugaccugaagucuacccaagccgccaucgaucagauuaaugggaaacucaacagacugaucggaaagacaaaugaaaaguuucaccagauugagaaagaguucagcgaaguggaaggccgcauccaggaccuugagaaguaugucgaggauaccaaaauugaccugugguccuacaacgcugaacuccugguggcgcuggagaaccaacauacaaucgaucucaccgacagcgaaaugaauaagcuguuugagaaaacgaagaagcagcuucgggaaaacgccgaggauauggggaauggaugcuucaaaaucuaucacaagugugacaacgcuugcauuggcucuaucagaaaugggacauacgaucaugacguuuaccgcgacgaggcccugaacaaucgguuucagauuaaaggcguggaacucaaguccggauauaaagauuggauccuguggauuagcuucgccaucucuugcuuucuucugugugucgcucuccugggcuucaucaugugggccugccagaaggggaacauuagauguaauaucugcauuuga

SEQ ID NO: 206003 - RNA, 1701 nt, Artificial Sequence
  derived and/or modified CDS sequence (opt5) from hemagglutinin__InfluenzaA__EPI668105
augaagaccaucauugcccugagcuacauccucugccugguguucgcucagaaaauucccggcaacgacaauuccacagccacgcuuugucuggggcaccaugcggucccuaacggaaccaucguuaagacaauuaccaaugauagaaucgaggugacaaacgcuaccgaacucgugcaaaauucuagcaucggcgagauuugcgacuccccgcaccagauccuggauggggaaaacuguacacuuauugacgcccugcucggagauccccagugcgacggcuuucagaauaaaaagugggaucuguucgucgagcggucuaaagccuauagcaacuguuacccuuaugacgugcccgauuacgcuucccugcgcucucucguugccagcuccgggacccuggaauuuaauaacgagagcuucaauuggacgggagugacccaaaacggcacaucuuccgcuugcaucagaggcucuagcuccagcuuuuucucucggcuuaauuggcugacccaucucaacuauaaguacccugcccugaaugucacaaugcccaacaacgagcaguuugacaaacuuuauauuuggggagugcaccauccugggaccgauaaagaccagaucuucccguacgcgcaguccagcggccgcauuacgguuuccacaaagagaucucaacaggccgugauccccaauaucgggagccggccucgcauuagaggaauccccucccggauuagcaucuacuggaccauugucaaaccuggcgauauccugcucaucaacucuacagggaaucugauugcuccccgcggauauuuuaagaucagauccggcaaaagcucuauuaugcggagcgacgccccgaucggcaaguguaaguccgaaugcauuaccccuaacgggucuauccccaaugacaaaccuuuccagaacgugaaucgcaucaccuacggagcuugucccagauaugugaagcacagcacacugaaacucgccacgggcaugcggaacguccccgagaagcagacccgcgggauuuuuggagcgaucgccggcuucauugaaaaugggugggagggaaugguugauggcugguacggcuuuagacaccaaaacuccgaggggcggggacaggcugccgaccugaaaagcacacaggcugccaucgaucaaauuaauggcaaacuuaacagacugaucgggaagaccaaugaaaaguuccaucagauugagaaggaguucucugaaguggaaggacgcauccaggaccucgagaaauauguggaggauacaaagaucgaccugugguccuacaacgccgaacuucuggucgcucucgagaaucagcacaccauugaucugacggacagcgaaaugaacaaacuguuugagaagacaaagaagcaacuccgggaaaacgcggaggauaugggcaaugggugcuucaagaucuaucauaaaugugacaacgccugcauuggcucuaucagaaauggaaccuacgaucacaacguguaccgcgacgaggcucugaauaaccgguuucagauuaagggcguugaacuuaaauccggguauaaggacuggauccuguggaucagcuucgccauuuccugcuuucuccuguguguggcccuucugggauucaucaugugggcuugccagaaaggcaauauuagauguaacaucugcauuuga

SEQ ID NO: 206004 - RNA, 1701 nt, Artificial Sequence
  derived and/or modified CDS sequence (opt5) from hemagglutinin__InfluenzaA__EPI578446
augaagaccaucauugcccugagcuacauccucugccugguguucgcucagaaaauucccggcaacgacaauuccacagccacgcuuugucuggggcaccaugcggucccuaacggaaccaucguuaagacaauuaccaaugauagaaucgaggugacaaacgcuaccgaacucgugcaaaauucuagcaucggcgagauuugcgacuccccgcaccagauccuggauggggaaaacuguacacuuauugacgcccugcucggagauccccagugcgacggcuuucagaauaaaaagugggaucuguucgucgagcggucuaaagccuauagcaacuguuacccuuaugacgugcccgauuacgcuucccugcgcucucucguugccagcuccgggacccuggaauuuaauaacgagagcuucaauuggacgggagugacccaaaacggcacaucuuccgcuugcaucagacggucuagcuccagcuuuuucucucgccuuaauuggcugacccaucucaacuauaaguacccugcccugaaugucacaaugcccaacaacgagcaguuugacaaacuuuauauuuggggcgugcaccauccugggaccgauaaagaccagaucuucccguacgcgcaguccagcggaagaauuacgguuuccacaaagcggucucaacaggccgugauccccaauaucggcagccgcccucggauuagagggauccccucccgcauuagcaucuacuggaccauugucaaaccuggagauauccugcucaucaacucuacaggcaaucugauugcucccagaggguauuuuaagauccgguccggaaaaagcucuauuaugcgcagcgacgccccgaucggcaaguguaaguccgaaugcauuaccccuaacggcucuauccccaaugacaaaccuuuccagaacgugaauagaaucaccuacggggcuuguccccgguaugugaagcacagcacacugaaacucgccacgggaaugcgcaacguccccgagaagcagaccagaggcauuuuuggggcgaucgccggauucauugaaaauggcugggaggggaugguugauggaugguacggcuuucggcaccaaaacuccgagggcagagggcaggcugccgaccugaaaagcacacaggcugccaucgaucaaauuaauggaaaacuuaaccgccugaucggcaagaccaaugaaaaguuccaucagauugagaaggaguucucugaaguggaagggcggauccaggaccucgagaaauauguggaggauacaaagaucgaccugugguccuacaacgccgaacuucuggucgcucucgagaaucagcacaccauugaucugacggacagcgaaaugaacaaacuguuugagaagacaaagaagcaacucagagaaaacgcggaggauaugggaaauggcugcuucaagaucuaucauaaaugugacaacgccugcauugggucuauccgcaauggcaccuacgaucacaacguguaccgggacgaggcucugaauaacagauuucagauuaagggaguugaacuuaaauccggcuauaaggacuggauccuguggaucagcuucgccauuuccugcuuucuccuguguguggcccuucugggguucaucaugugggcuugccagaaaggaaauauucgcuguaacaucugcauuuga

SEQ ID NO: 206005 - RNA, 1701 nt, Artificial Sequence; identical to SEQ ID NO: 204513
  derived and/or modified CDS sequence (opt5) from hemagglutinin__InfluenzaA__EPI551882

SEQ ID NO: 206006 - RNA, 1701 nt, Artificial Sequence
  derived and/or modified CDS sequence (opt5) from hemagglutinin__InfluenzaA__EPI344389
augaagaccaucauugccuucagcugcauccugugucucauuuuugcucagaaacugcccggcuccgacaacucuauggccacacuuugccuggggcaccaugcggugccuaauggaacgcucgucaagaccaucacagaugaccaaauugagguuaccaacgcuacagaacuggugcagagcuccucuaccggcagaaucuguaauagcccgcaccagauccuugaugggaaaaacugcacacugauugacgcccuccugggagauccccauugugacgaucugcagaauaaggagugggaccucuucguggaacgguccaccgccuacucuaacugcuauccuuacuauguccccgauuacgcuacgcugcgcagccuuguggccuccagcggcaaucuggaguuuacccaagaaucuuucaacuggacagggguugcucaggacggauccagcuaugccuguagacggggcucugucaauuccuuuuucagccgccucaacuggcuguacaaucuuaacuauaaauacccugagcagaaugugaccaugcccaacaaugauaaguuugacaagcuguacaucuggggcgugcaccauccugggacagauaaagaccagaccaaccucuauguucaagcgucuggaagagugauugucuccacgaagcggagccagcagacagugaucccgaacauuggcucccgccccugggugagaggggucucuagcaucauuuccaucuacuggaccaucguuaaaccuggagacauucugcugaucaauagcacaggcaaccucauugcuccccggggguauuucaagauccagucuggaaaauccagcauuaugcgcucugaugcccacaucgacgagugcaauagcgaauguaucaccccuaacggcuccauucccaaugauaagccguuucaaaacgugaauaagaucaccuacggcgccugcccuagauaugugaaacagaacacacugaagcuggcuacggggaugcggaauguccccgagaaacagacccgcggaauuuucggcgccaucgcgggguuuauugaaaacggaugggagggcaugguggacgggugguacggauucagacaccaaaauucugagggcacaggccaggccgcugaucuuaagagcacccaggccgcuaucaaccagaucacagggaaacucaaucggguuauuaagaaaaccaacgaaaaguuucaucaaaucgagaaggaguucuccgaaguggaaggacgcauucaggaccuggagaaauaugucgaggauacgaagaucgaccuuuggagcuacaaugccgaacugcucguggcccuggagaaccagcacacaauugaucugaccgacucugaaauguccaaacucuucgagagaacccggagacagcugcgcgaaaacgcugaggauaugggcaauggguguuuuaagaucuaccauaaaugcgacaacgcgugcauuggaagcauccggaauggcacauaugaccacgauaucuacagaaacgaggcccuuaauaaccgcuuccaaauuaaggggguucagcugaagucuggcuauaaagacuggauccucuggauuuccuuugcuaucagcuguuuccugcuuugcgugguccugcucggauuuauuaugugggccugucagaagggcaauauccggugcaacaucuguauuuga

SEQ ID NO: 206007 - RNA, 1701 nt, Artificial Sequence
  derived and/or modified CDS sequence (opt5) from hemagglutinin__InfluenzaA__EPI348782
augaagaccaucauugccuucagcugcauccugugucucauuuuugcucagaaacugcccggcuccgacaacucuauggccacacuuugccuggggcaccaugcggugccuaauggaacgcucgucaagaccaucacagaugaccaaauugagguuaccaacgcuacagaacuggugcagagcuccucuaccggcagaaucuguaauagcccgcaccagauccuugaugggaaaaacugcacacugauugacgcccuccugggagauccccauugugacgaucugcagaauaaggagugggaccucuucguggaacgguccaccgccuacucuaacugcuauccuuacuauguccccgauuacgcuacgcugcgcagccuuguggccuccagcggcaaucuggaguuuacccaagaaucuuucaacuggacagggguugcucaggacggauccagcuaugccuguagacggggcucugucaauuccuuuuucagccgccucaacuggcuguacaaacuuaauuauaaguacccugagcagaacgugaccaugcccaauaacgauaaguuugacaaacuguacaucuggggcgugcaccauccugggacagauaaggaccagaccaauauuuauguucaagcgucuggaagagugaucgucuccacgaaacggagccagcagacagugauuccgaacaucggcucccgccccugggugagaggggucucuagcauuaucuccaucuacuggaccauuguuaagccuggagacauccuccugauuaacagcacaggcaaucugaucgcuccccggggguauuucaaaauucagucuggaaaguccagcaucaugcgcucugaugcccacaucgacgagugcaacagcgaauguauuaccccuaauggcuccauccccaacgauaagccguuucaaaaugugaacaaaauuaccuacggcgccugcccuagauaugugaagcagaauacacucaaacuggcuacggggaugcggaacguccccgagaagcagacccgcggaaucuucggcgccauugcgggguuuaucgaaaauggaugggagggcaugguggacgggugguacggauucagacaccaaaacucugagggcacaggccaggccgcugaucuuaaaagcacccaggccgcuaucaaucagauuacagggaagcugaaccggguuaucaaaaagaccaaugaaaaguuucaucaaauugagaaagaguucuccgaaguggaaggacgcauccaggaccucgagaaguaugucgaggauacgaaaauugaccuguggagcuacaacgccgaacuucugguggcccucgagaaucagcacacaaucgaucugaccgacucugaaauguccaagcuguucgagagaacccggagacagcuccgcgaaaacgcugaggauaugggcaacggguguuuuaaaauuuaccauaagugcgacaaugcgugcaucggaagcauccggaacggcacauaugaccacgauauuuacagaaaugaggcccugaacaaucgcuuccaaaucaaggggguucagcuuaaaucuggcuauaaggacuggauucuguggaucuccuuugcuauuagcuguuuccuccugugcgugguccuucugggauuuaucaugugggccugucagaaaggcaacauccggugcaauauuuguaucuga

SEQ ID NO: 206008 - RNA, 1701 nt, Artificial Sequence
  derived and/or modified CDS sequence (opt5) from hemagglutinin__InfluenzaA__EPI642513
augaagaccaucauugccuucagcugcauccugugucucauuuuugcucagaaacugcccggcuccgacaagucuauggccacacuuugccuggggcaccaugcggugccuaacggaacgcucgucaaaaccaucacagaugaccaaauugagguuaccaaugcuacagaacuggugcagagcuccucuaccagcagaaucuguaacuccccgcaccagauccuugauggcaagaauugcacacugauugacgcccuccugggggauccccauugugacgauuuccagaacaaaaagugggaccuguuuguggagcggucuaccgccuacagcaauugcuauccuuacuauguccccgauuacgcuacgcuccgcucccugaucgccagcucuggaaaccuugaguucacccaagaauccuuuaauuggacaggcguggcucaggacgggagcucuuaugccuguagacggggauccguuaacagcuucuuuucucgccugaauuggcucuacaaccugaauuauaaguacccugaacagaacgugaccaugcccaauaacgauaaauucgacaaacuuuacauuuggggcguccaccauccuggcacagauaaggaccagaccaaucuguaugugcaagcguccgggagaguuaucgugagcacgaagcggucccagcagacagucauuccgaacaucggaucucgccccugggugagaggcgugagcuccauuaucagcaucuacuggaccauugucaaaccuggggacauccuccugauuaacucuacaggaaaucugaucgcuccccggggcuauuuuaagauucaguccggaaagagcucuaucaugcgcagcgaugcccacaucgacgagugcaacuccgaguguauuaccccuaaugggucuauccccaacgauaaaccguuccaaaauguuaacaagauuaccuacggcgccugcccuagauaugugaaacagaauacacucaagcuggcuacgggcaugcggaacgugcccgaaaaacagacccgcgggaucuuuggagccauugcgggcuucaucgagaaugggugggaaggaauggucgacggcugguacggguuuagacaccaaaacagcgagggaacaggccaggccgcugaucuuaaguccacccaggccgcuaucaaucagauuacaggcaaacugaaccgggugaucaagaagaccaaugagaaauuccaucaaauugaaaaggaguucagcgaaguugaggggcgcauccaggaccucgaaaaauauguggaggauacgaagauugaccuguggucuuacaacgccgagcuucuggucgcccucgaaaaucagcacacaaucgaucugaccgacuccgagaugagcaaacuguuugaaagaacccggagacagcuccgcgagaacgcugaagauaugggaaacggcuguuucaagauuuaccauaagugcgacaaugcgugcaucgggucuauccggaacggaacauaugaccacgauauuuacagaaaugaggcccugaacaaucgcuuucaaaucaaaggcgugcagcuuaaguccggguauaaagacuggauucuguggaucagcuucgcuauuuccuguuuucuccugugcguugugcuucugggcuucaucaugugggccugucagaagggaaacauccggugcaauauuuguaucuga

SEQ ID NO: 206009 - RNA, 1701 nt, Artificial Sequence
  derived and/or modified CDS sequence (opt5) from hemagglutinin__InfluenzaA__EPI293965
augaagaccaucauugccuucagcugcauccugugucucauuuuugcucagaaacugcccggcuccgacaacucuauggccacacuuugccuggggcaccaugcggugccuaauggaacgcucgucaagaccaucacagaugaccaaauugagguuaccaacgcuacagaacuggugcagagcuccucuaccggcagaaucuguaauagcccgcaccagauccuugaugggaaaaacugcacacugauugacgcccuccugggagauccccauugugacgauuuccagaauaaggagugggaccuguuuguggaacgguccaccgccuacucuaacugcuauccuuacuauguccccgauuacgcuacgcuccgcagccugguggccuccagcggcaaucuugaguucacccaagaaucuuuuaacuggacagggguugcucaggacggauccagcuaugccuguagacggggcucugucaauuccuucuuuagccgccugaacuggcucuacaaucugaacuauaaauacccugagcagaaugugaccaugcccaacaaugauaaguucgacaaacuuuacaucuggggcgugcaccauccugggacagauaaggaccagaccaaccuguauguucaagcgucuggaagagugauugucuccacgaagcggagccagcagacagugaucccgaacauuggcucccgccccugggugagaggggucucuagcaucauuuccaucuacuggaccaucguuaaaccuggagacauucuccugaucaauagcacaggcaaccugauugcuccccggggguauuuuaagauccagucuggaaaauccagcauuaugcgcucugaugcccacaucgacgagugcaauagcgaauguaucaccccuaacggcuccauucccaaugauaagccguuccaaaacgugaauaagaucaccuacggcgccugcccuagauaugugaaacagaacacacucaagcuggcuacggggaugcggaauguccccgagaaacagacccgcggaauuuuuggcgccaucgcgggguucauugaaaacggaugggagggcaugguggacgggugguacggauuuagacaccaaaauucugagggcacaggccaggccgcugaucuuaagagcacccaggccgcuaucaaccagaucacagggaaacugaaucggguuauuaagaaaaccaacgaaaaguuccaucaaaucgagaaggaguucuccgaaguggaaggacgcauucaggaccucgagaaauaugucgaggauacgaagaucgaccuguggagcuacaaugccgaacuucugguggcccucgagaaccagcacacaauugaucugaccgacucugaaauguccaaacuguuugagagaacccggagacagcuccgcgaaaacgcugaggauaugggcaauggguguuucaagaucuaccauaaaugcgacaacgcgugcauuggaagcauccggaauggcacauaugaccacgauaucuacagaaacgaggcccugaauaaccgcuuucaaauuaaggggguucagcuuaagucuggcuauaaagacuggauccuguggauuuccuucgcuaucagcuguuuucuccugugcgugguccuucugggauucauuaugugggccugucagaagggcaauauccggugcaacaucuguauuuga

SEQ ID NO: 206010 - RNA, 1701 nt, Artificial Sequence
  derived and/or modified CDS sequence (opt5) from hemagglutinin__InfluenzaA__EPI465400
augaagaccaucauugccuucagcugcauccugugucucauuuuugcucagaaacugcccggcuccgacaacucuauggccacacuuugccuggggcaccaugcggugccuaauggaacgcucgucaagaccaucacagaugaccaaauugagguuaccaacgcuacagaacuggugcagagcuccucuaccggcagaaucuguaauagcccgcaccagauccuugaugggaaaaacugcacacugauugacgcccuccugggagauccccauugugacgauuuccagaauaaggagugggaccuguuuguggaacgguccaccgccuacucuaacugcuauccuuacuauguccccgauuacgcuacgcuccgcagccugguggccuccagcggcaaucuugaguucacccaagaaucuuuuaacuggacagggguugcucaggacggauccagcuaugccuguagacggggcucugucaauuccuucuuuagccgccugaacuggcucuacaaucugaacuauaaauacccugagcagaaugugaccaugcccaacaaugauaaguucgacaaacuuuacaucuggggcgugcaccauccugggacagauaaggaccagaccaagcuguauguucaagcgucuggaagagugauugucuccacgaaacggagccagcagacagugaucccgaacauuggcucccgccccugggugagaggggucucuagcaucauuuccaucuacuggaccaucguuaagccuggagacauucuccugaucaacagcacaggcaaucugauugcuccccggggguauuuuaaaauccagucuggaaaguccagcauuaugcgcucugaugcccacaucgacgagugcaacagcgaauguaucaccccuaauggcuccauucccaacgauaagccguuccaaaaugugaacaaaaucaccuacggcgccugcccuagauaugugaagcagaauacacucaaacuggcuacggggaugcggaacguccccgagaagcagacccgcggaauuuuuggcgccaucgcgggguucauugaaaauggaugggagggcaugguggacgggugguacggauuuagacaccaaaacucugagggcacaggccaggccgcugaucuuaaaagcacccaggccgcuaucaaucagaucacagggaagcugaaccggguuauuaaaaagaccaaugaaaaguuccaucaaaucgagaaagaguucuccgaaguggaaggacgcauucaggaccucgagaaguaugucgaggauacgaaaaucgaccuguggagcuacaacgccgaacuucugguggcccucgagaaucagcacacaauugaucugaccgacucugaaauguccaagcuguuugagagaacccggagacagcuccgcgaaaacgcugaggauaugggcaacggguguuucaaaaucuaccauaagugcgacaaugcgugcauuggaagcauccggaacggcacauaugaccacgauaucuacagaaaugaggcccugaacaaucgcuuucaaauuaaggggguucagcuuaaaucuggcuauaaggacuggauccuguggauuuccuucgcuaucagcuguuuucuccugugcgugguccuucugggauucauuaugugggccugucagaaaggcaacauccggugcaauaucuguauuuga

SEQ ID NO: 206011 - RNA, 1701 nt, Artificial Sequence
  derived and/or modified CDS sequence (opt5) from hemagglutinin__InfluenzaA__EPI328898
augaagaccaucauugccuucagcugcauccugugucucauuuuugcucagaaacugcccggcuccgacaacucuauggccacacuuugccuggggcaccaugcggugccuaauggaacgcucgucaagaccaucacagaugaccaaauugagguuaccaacgcuacagaacuggugcagagcuccucuaccggcagaaucuguaauagcccgcaccagauccuugaugggaaaaacugcacacugauugacgcccuccugggagauccccauugugacgauuuccagaauaaggagugggaccuguuuguggaacgguccaccgccuacucuaacugcuauccuuacuauguccccgauuacgcuacgcuccgcagccugguggccuccagcggcaaucuugaguucacccaagaaucuuuuaacuggacagggguugcucaggacggauccagcuaugccuguagacggggcucugucaauuccuucuuuagccgccugaacuggcucuacaaucugaacuauaaauacccugagcagaaugugaccaugcccaacaaugauaaguucgacaaacuuuacaucuggggcgugcaccauccugggacagauaaggaccagaccaagauuuauguucaagcgucuggaagagugaucgucuccacgaaacggagccagcagacagugauuccgaacaucggcucccgccccugggugagaggggucucuagcauuaucuccaucuacuggaccauuguuaagccuggagacauccugcucauuaacagcacaggcaaucugaucgcuccccggggguauuuuaaaauucagucuggaaaguccagcaucaugcgcucugaugcccacaucgacgagugcaacagcgaauguauuaccccuaauggcuccauccccaacgauaagccguuccaaaaugugaacaaaauuaccuacggcgccugcccuagauaugugaagcagaauacacugaaacucgcuacggggaugcggaacguccccgagaagcagacccgcggaaucuuuggcgccauugcgggguucaucgaaaauggaugggagggcaugguggacgggugguacggauuuagacaccaaaacucugagggcacaggccaggccgcugaucugaaaagcacccaggccgcuaucaaucagauuacagggaaacuuaaccggguuaucaagaagaccaaugaaaaguuccaucaaauugagaaagaguucuccgaaguggaaggacgcauccaggaccuggagaaguaugucgaggauacgaaaauugaccucuggagcuacaacgccgaacugcuuguggcccuggagaaucagcacacaaucgaucucaccgacucugaaauguccaagcuguuugagagaacccggagacagcugcgcgaaaacgcugaggauaugggcaacggguguuucaaaauuuaccauaagugcgacaaugcgugcaucggaagcauccggaacggcacauaugaccacgauauuuacagaaaugaggcccucaacaaucgcuuucaaaucaaggggguucagcugaaaucuggcuauaaggacuggauucuuuggaucuccuucgcuauuagcuguuuucugcucugcgugguccugcuuggauucaucaugugggccugucagaaaggcaacauccggugcaauauuuguaucuga

SEQ ID NO: 206012 - RNA, 1701 nt, Artificial Sequence; identical to SEQ ID NO: 206011
  derived and/or modified CDS sequence (opt5) from hemagglutinin__InfluenzaA__EPI328900

SEQ ID NO: 206013 - RNA, 1701 nt, Artificial Sequence
  derived and/or modified CDS sequence (opt5) from hemagglutinin__InfluenzaA__EPI574644
augaagaccaucauugcccugagcuacauccucugccugguguucgcucagaaacuucccggcaacgacaauuccacagccacgcugugucucgggcaccaugcggucccuaacggaaccauuguuaagacaaucaccaaugauagaauugaggugacaaacgcuaccgaacuggugcaaaauucuagcaucggcgagaucugcgacuccccgcaccagauucuugaugggaaaaacuguacacugaucgacgcccuccugggagauccccagugcgacggcuuucagaauaagcggugggaucuguucgucgaacgcucuaaagccuauagcaacuguuacccuuaugacgugcccgauuacgcuucccucagaucucugguugccagcuccgggacccuugaguuuaaugacgaauccuucaacugggcuggagugacgcaaaauggcaccucuuccgccugcauucggggcagcaacucuuccuuuuucagccgccugaauuggcucacacauucuaacuuuaaguauccugcgcugaaugucaccaugcccaacaacgagcaguucgauaaacuuuacaucuggggagugcaccauccugggacagacaaagaucagauuuuucuguaugcccacuccagcggcagaaucaccguuuccacgaagcggucucagcaagcugugauuccgaauaucgggagccgccccagaauccggaacauuccuucccgcaucagcauuuacuggacaaucgucaaacccggagacauucuccugaucaauucuaccggcaaccugaucgccccuagaggguacuucaagauucaguccggaaaaagcucuaucaugcggagcgacgcucccauuggcaaguguaaguccgagugcaucacaccgaauggcucuauuccuaacgauaaacccuuucagaaugugaaccgcaucaccuauggggccuguccuagauacgugaagcagagcacccucaaacuggcgacaggaaugcggaauguccccgaaaagcaaacgcgcggcaucuucggggccauugcuggauuuaucgagaacggcugggaagggaugaaagacggaugguauggcuucagacaccagaauagcgagggccgggggcaggccgcugaucuuaagagcacccaagccgccauugaccagaucaacggaaaacugaauagacucauuggcaagacaaacgagaaguuccaucagaucgaaaaagaguuuucugaaguugaggggcgcauucaggaucuggaaaaguacguggaggacaccaaaaucgaucuuugguccuauaaugcugagcugcucguggcgcuggaaaaccaacacacaaucgaccugaccgauagcgagaugaacaaacucuucgaaaagacgaagaagcagcugcgggagaaugccgaagacaugggaaacggcugcuuuaagauuuaccauaagugugauaaugcuugcaucgggucuauuagaaacggcacauaugaccacgacgucuaccgcgaugaggcccuuaauaaccgguuccagaucaaaggaguggagcugaaguccggcuacaaagacuggauucucuggaucagcuuugccaucuccugcuuccugcuuuguguugcucugcucggguuuauuaugugggccugccagaagggaaauaucagauguaacauuugcaucuga

SEQ ID NO: 206014 - RNA, 1701 nt, Artificial Sequence
  derived and/or modified CDS sequence (opt5) from hemagglutinin__InfluenzaA__EPI563212
augaagaccaucauugcccugagcuacauccucugccugguguucgcucagaaaauucccggcaacgacaauaacacagccacgcuuugucuggggcaccaugcggucccuaauggaaccaucguuaagacaauuaccaacgauagaaucgaggugacaaaugcuaccgaacucgugcaaaacuccucuaucggcgagauuugcgacagcccgcaccagauccuggauggggaaaauuguacacuuauugacgcccugcucggagauccccagugcgacggcuuucagaacaaaaagugggaucuguucgucgagcgguccaaagccuauucuaauuguuacccuuaugacgugcccgauuacgcuagccugcgcucccucguugccucuagcgggacccuggaauuuaacaaugaguccuucaacuggacgggagugacccaaaauggcacaagcucugcuugcaucagacgguccucuagcuccuuuuucagccgccuuaacuggcugacccaucucaauuauaaguacccugcccugaacgucacaaugcccaacaaugagcaguuugacaaacuuuauauuuggggcgugcaccauccugggaccgauaaagaccagaucuucccguacgcgcagucuuccggaagaauuacgguuagcacaaagcggucccaacaggccgugauccccaacaucggcucucgcccucggauuagagggauccccagccgcauuuccaucuacuggaccauugucaaaccuggagauauccugcucaucaauagcacaggcaaccugauugcucccagaggguauuuuaagauccggucuggaaaauccagcauuaugcgcucugacgccccgaucggcaaguguaagagcgaaugcauuaccccuaauggcuccauccccaacgacaaaccuuuccagaaugugaacagaaucaccuacggggcuuguccccgguaugugaagcacucuacacugaaacucgccacgggaaugcgcaauguccccgagaagcagaccagaggcauuuuuggggcgaucgccggauucauugaaaacggcugggaggggaugguugauggaugguacggcuuucggcaccaaaauagcgagggcagagggcaggcugccgaccugaaauccacacaggcugccaucgaucaaauuaacggaaaacuuaaucgccugaucggcaagaccaacgaaaaguuccaucagauugagaaggaguucagcgaaguggaagggcggauccaggaccucgagaaauauguggaggauacaaagaucgaccuguggucuuacaaugccgaacuucuggucgcucucgagaaccagcacaccauugaucugacggacuccgaaaugaacaaacuguuugagaagacaaagaagcaacucagagaaaaugcggaggauaugggaaacggcugcuucaagaucuaucauaaaugugacaaugccugcauugggagcauccgcaacggcaccuacgaucacaauguguaccgggacgaggcucugaacaauagauuucagauuaagggaguugaacuuaaaucuggcuauaaggacuggauccuguggaucuccuucgccauuagcugcuuucuccuguguguggcccuucugggguucaucaugugggcuugccagaaaggaaacauucgcuguaauaucugcauuuga

SEQ ID NO: 206015 - RNA, 1701 nt, Artificial Sequence; identical to SEQ ID NO: 206014
  derived and/or modified CDS sequence (opt5) from hemagglutinin__InfluenzaA__EPI553999

SEQ ID NO: 206016 - RNA, 1701 nt, Artificial Sequence
  derived and/or modified CDS sequence (opt5) from hemagglutinin__InfluenzaA__EPI551570
augaagaccaucauugcccugagcuacauccucugccugguguucgcucagaaaauucccggcaacgacaauaacacagccacgcuuugucuggggcaccaugcggucccuaauggaaccaucguuaagacaauuaccaacgauagaaucgaggugacaaaugcuaccgaacucgugcaaaacuccucuaucggcgagauuugcgacagcccgcaccagauccuggauggggaaaauuguacacuuauugacgcccugcucggagauccccagugcgacggcuuucagaacaaaaagugggaucuguucgucgagcgguccaaagccuauucuaauuguuacccuuaugacgugcccgauuacgcuagccugcgcucccucguugccucuagcgggacccuggaauuuaacaaugaguccuucaacuggacgggagugacccaaaauggcacaagcucugcuugcaucagacgguccucuagcuccuuuuucagccgccuuaacuggcugacccaucucaauuauacauacccugcccugaacgucaccaugcccaacaaugagcaguuugacaaacuuuauauuuggggcgugcaccauccugggacggauaaggaccagaucuuccuguacgcgcagucuuccggaagaauuacaguuagcaccaagcggucccaacaggccgugaucccgaacaucggcucucgcccccggauuagagauaucccuagccgcauuuccaucuacuggacaauugucaagcccggggacauccuccugaucaauagcaccggaaaccugauugcuccuagaggcuauuuuaaaauccggucugggaaguccagcauuaugcgcucugacgcccccaucggaaaauguaagagcgaaugcauuaccccgaauggcuccaucccuaacgauaagcccuuccagaaugugaacagaaucacauacggcgcuuguccucgguaugugaaacacucuacgcucaagcuggccaccgggaugcgcaauguccccgagaaacagacaagaggaauuuuuggcgcgaucgccggguucauugaaaacggaugggagggcaugguugacgggugguacggauuucggcaccaaaauagcgagggcagaggccaggcugccgaucuuaaguccacccaggcugccaucgaccaaauuaacgggaaacugaaucgccucaucggaaagacaaacgaaaaauuccaucagauugagaaggaguucagcgaaguggaaggccggauccaggaucuggagaaguauguggaggacaccaaaaucgaucuuuggucuuacaaugccgaacugcucgucgcucuggagaaccagcacacgauugaccugacagauuccgaaaugaacaagcucuuugagaaaaccaagaaacaacugagagaaaaugcggaggacauggggaacggaugcuucaagaucuaucauaagugugauaaugccugcauuggcagcauccgcaacgggaccuacgaccacaauguguaccgggacgaggcucuuaacaauagauuucagauuaaaggcguugaacugaagucuggauauaaagauuggauccucuggaucuccuucgccauuagcugcuuucugcuuuguguggcccugcucggcuucaucaugugggcuugccagaaggggaacauucgcuguaauaucugcauuuga

SEQ ID NO: 206017 - RNA, 1701 nt, Artificial Sequence
  derived and/or modified CDS sequence (opt5) from hemagglutinin__InfluenzaA__EPI629738
augaagaccaucauugcccugagcuacauccucugccugguguucgcucagaaaauucccggcaacgacaauaacacagccacgcuuugucuggggcaccaugcggucccuaauggaaccaucguuaagacaauuaccaacgauagaaucgaggugacaaaugcuaccgaacucgugcaaaacuccucuaucggcgagauuugcgacagcccgcaccagauccuggauggggaaaauuguacacuuauugacgcccugcucggagauccccagugcgacggcuuucagaacaaaaagugggaucuguucgucgagcgguccaaagccuauucuaauuguuacccuuaugacgugcccgauuacgcuagccugcgcucccucguugccucuagcgggacccuggaauuuaacaaugaguccuucaacuggacgggagugacccaaaauggcacaagcucugcuugcaucagacgguccucuagcuccuuuuucagccgccuuaacuggcugacccaucucaauuauaaguacccugcccugaacgucacaaugcccaacaaugagcaguuugacaaacuuuauauuuggggcgugcaccauccugggaccgauaaggaccagaucuucccguacgcgcagucuuccggaagaauuaucguuagcacgaagcggucccaacaggccgugauccccaacauuggcucucgcccuagaauccgggauauucccagccgcaucuccauuuacuggacaaucgucaaaccuggggacauccugcucauuaauagcaccggaaaccugaucgcucccagaggcuauuuuaagauucggucugggaaauccagcaucaugcgcucugacgccccgauuggaaaguguaagagcgaaugcaucacaccuaauggcuccauccccaacgauaaaccuuuccagaaugugaacagaauuaccuacggcgcuuguccccgguaugugaagcacucuacccugaaacucgccacagggaugcgcaauguccccgagaagcagacgagaggaaucuuuggcgcgauugccggguucaucgaaaacggaugggagggcaugguugacgggugguacggauuucggcaccaaaauagcgagggcagaggccaggcugccgaucugaaauccacccaggcugccauugaccaaaucaacgggaaacuuaaucgccugauuggaaagacaaacgaaaaguuccaucagaucgagaaggaguucagcgaaguggaaggccggauccaggaucucgagaaauauguggaggacaccaagauugaucuguggucuuacaaugccgaacuucuggucgcucucgagaaccagcacacaaucgaccugaccgauuccgaaaugaacaaacuguuugagaagacgaaaaagcaacucagagaaaaugcggaggacauggggaacggaugcuucaagauuuaucauaaaugugauaaugccugcaucggcagcauucgcaacgggacauacgaccacaauguguaccgggacgaggcucugaacaauagauuucagaucaagggcguugaacuuaaaucuggauauaaggauuggauccuguggauuuccuucgccaucagcugcuuucuccuguguguggcccuucugggcuucauuaugugggcuugccagaaagggaacauccgcuguaauauuugcaucuga

SEQ ID NO: 206018 - RNA, 1701 nt, Artificial Sequence
  derived and/or modified CDS sequence (opt5) from hemagglutinin__InfluenzaA__EPI631887
augaagaccaucauugcccugagcuacauccucugccugguguucgcucagaaaauucccggcaacgacaauaacacagccacgcuuugucuggggcaccaugcggucccuaauggaaccaucguuaagacaauuaccaacgauagaaucgaggugacaaaugcuaccgaacucgugcaaaacuccucuaucggcgagauuugcgacagcccgcaccagauccuggauggggaaaauuguacacuuauugacgcccugcucggagauccccagugcgacggcuuucagaacaaaaagugggaucuguucgucgagcgguccaaagccuauucuaauuguuacccuuaugacgugcccgauuacgcuagccugcgcucccucguugccucuagcgggacccuggaauuuaacaaugaguccuucaacuggacgggagugacccaaaauggcacaagcucugcuugcaucagacgguccucuagcuccuuuuucagccgccuuaacuggcugacccaucucaauuauaaguacccugcccugaacgucacaaugcccaacaaugagcaguuugacaaacuuuauauuuggggcgugcaccauccugggaccgauaaggaccagaucuucccguacgcgcagucuuccggaagaauuaucguuagcacgaagcggucccaacaggccgugauccccaacauuggcucucgcccuagaauccgggauagccccucccgcauuagcaucuacuggacaauugucaaaccuggggacauccugcucaucaauucuaccggaaaccugauugcucccagaggcuauuuuaagauccgguccgggaaaagcucuauuaugcgcagcgacgccccgaucggaaaguguaaguccgaaugcauuacaccuaauggcucuauccccaacgauaaaccuuuccagaaugugaacagaaucaccuacggcgcuuguccccgguaugugaagcacagcacccugaaacucgccacagggaugcgcaauguccccgagaagcagacgagaggaauuuuuggcgcgaucgccggguucauugaaaacggaugggagggcaugguugacgggugguacggauuucggcaccaaaauuccgagggcagaggccaggcugccgaucugaaaagcacccaggcugccaucgaccaaauuaacgggaaacuuaaucgccugaucggaaagacaaacgaaaaguuccaucagauugagaaggaguucucugaaguggaaggccggauccaggaucucgagaaauauguggaggacaccaagaucgaucugugguccuacaaugccgaacuucuggucgcucucgagaaccagcacacaauugaccugaccgauagcgaaaugaacaaacuguuugagaagacgaaaaagcaacucagagaaaaugcggaggacauggggaacggaugcuucaagaucuaucauaaaugugauaaugccugcauuggcucuauccgcaacgggacauacgaccacaauguguaccgggacgaggcucugaacaauagauuucagauuaagggcguugaacuuaaauccggauauaaggauuggauccuguggaucagcuucgccauuuccugcuuucuccuguguguggcccuucugggcuucaucaugugggcuugccagaaagggaacauucgcuguaauaucugcauuuga

SEQ ID NO: 206019 - RNA, 1701 nt, Artificial Sequence
  derived and/or modified CDS sequence (opt5) from hemagglutinin__InfluenzaA__EPI577026
augaagaccaucauugcccugagcuacauccucugccugguguucgcucagaaaauucccggcaacgacaauaacacagccacgcuuugucuggggcaccaugcggucccuaauggaaccaucguuaagacaauuaccaacgauagaaucgaggugacaaaugcuaccgaacucgugcaaaacuccucuaucggcgagauuugcgacagcccgcaccagauccuggauggggaaaauuguacacuuauugacgcccugcucggagauccccagugcgacggcuuucagaacaaaaagugggaucuguucgucgagcgguccaaagccuauucuaauuguuacccuuaugacgugcccgauuacgcuagccugcgcucccucguugccucuagcgggacccuggaauuuaacaaugaguccuucaacuggacgggagugacccaaaauggcacaagcucugcuugcaucagacgguccucuagcuccuuuuucagccgccuuaacuggcugacccaucucaauuauaaguacccugcccugaacgucacaaugcccaacaaugagcaguuugacaaacuuuauauuuggggcgugcaccauccugggaccgauaaagaccagaucuucccguacgcgcagucuuccggaagaauuacgguuagcacaaagcggucccaacaggccgugauccccaacaucggcucucgcccucggauuagagggauccccagccgcauuuccaucuacuggaccauugucaaaccuggagauauccugcucaucaauagcacaggcaaccugauugcucccagaggguauuuuaagauccggucuggaaaauccagcauuaugcgcucugacgccccgaucggcaaguguaagagcgaaugcauuaccccuaauggcuccauccccaacgacaaaccuuuccagaaugugaacagaaucaccuacggggcuuguccccgguaugugaagcacucuacacugaaacucgccacgggaaugcgcaauguccccgagaagcagaccagaggcauuuuuggggcgaucgccggauucauugaaaacggcugggaggggaugguugauggaugguacggcuuucggcaccaaaauagcgagggcagagggcaggcugccgaccugaaauccacacaggcugccaucgaucaaauuaacggaaaacuuaaucgccugaucggcaagaccaacgaaaaguuccaucagauugagaaggaguucagcgaaguggaagggcggauccaggaccucgagaaauauguggaggauacaaagaucgaccuguggucuuacaaugccgaacuucuggucgcucucgagaaccagcacaccauugaucugacggacuccgaaaugaacaaacuguuugagaagacaaagaagcaacucagagaaaaugcggaggauaugggaaacggcugcuucaagaucuaucauaaaugugacaaugccugcauugagagcauccgcaacgggaccuacgaucacaauguguaccgggacgaagcucugaacaauagauuucagauuaagggcguugagcuuaaaucuggauauaaggacuggauccuguggaucuccuucgccauuagcugcuuucuccuguguguggcccuucugggcuucaucaugugggcuugccagaaagggaacauucgcuguaauaucugcauuuga

SEQ ID NO: 206020 - RNA, 1701 nt, Artificial Sequence; identical to SEQ ID NO: 202066
  derived and/or modified CDS sequence (opt5) from hemagglutinin__InfluenzaA__EPI404927

SEQ ID NO: 206021 - RNA, 1701 nt, Artificial Sequence
  derived and/or modified CDS sequence (opt5) from hemagglutinin__InfluenzaA__EPI489319
augaagaccaucauugcccugagcuacauccucugccugguguucgcucagaaacuucccggcaacgacaauuccacagccacgcugugucucgggcaccaugcggucccuaacggaaccauuguuaagacaaucaccaaugauagaauugaggugacaaacgcuaccgaacuggugcaaaauucuagcaucggcgagaucugcgacuccccgcaccagauucuugauggggaaaacuguacacugaucgacgcccuccugggagauccccagugcgacggcuuucagaauaaaaagugggaucuguucgucgagcggucuaaagccuauagcaacuguuacccuuaugacgugcccgauuacgcuucccuccgcucucugguugccagcuccgggacccuugaauuuaauaacgagagcuucaauugggcuggagugacgcaaaacggcaccucuuccgccugcaagagaggcagcaauucuuccuuuuucagccggcugaacuggcucacacaucugaauuuuaaguauccugcgcuuaacgucaccaugcccaacaaugagcaguucgacaaacuguacauuuggggagugcaccauccugggacagauaaggaccagaucuuuccguaugcccagucuuccggccgcauuaccguuagcacgaaaagaucccaacaggcugugauccccaacauugggucucggccucgcaucagaaauauccccagccggauuuccaucuacuggacaauugucaagccuggagauauccuccugauuaacagcaccggcaaucugaucgcuccccgcggguacuucaaaaucagaucuggaaaguccagcauuaugcggucugacgccccgaucggcaaguguaaaagcgaaugcauuacaccuaacggcuccauccccaaugacaagccuuuucagaacgugaaucgcauuaccuauggggccugucccagauacgugaaacagucuacccucaagcuggcgacaggaaugcggaacguccccgagaaacaaacgcgcggcaucuucggggccaucgcuggauuuauugaaaauggcugggaggggaugguugauggaugguauggcuucagacaccagaacagcgagggccgggggcaggccgcugaccuuaaguccacccaagccgccaucgaucagauuaauggaaaacugaacagacucaucggcaagacaaaugaaaaguuccaccagauugagaaagaauuuagcgagguggaagggcgcauccaggaccuggagaaguacguggaggauaccaaaauugaccuuuggucuuauaacgcugaacugcucgucgcgcuggagaaccaacauacaaucgaucugaccgacuccgaaaugaauaaacucuucgagaagacgaagaagcagcugcgggaaaacgccgaggauaugggaaauggcugcuuuaaaaucuaccacaagugugacaacgcuugcauugggagcaucagaaauggcacauaugaucaugacguguaccgcgacgaggcccuuaacaaucgguuccagauuaaaggaguugaacugaagucuggcuacaaagauuggauccucuggauuuccuuugccaucagcugcuuccugcuuuguguggcucugcucggguuuaucaugugggccugccagaagggaaacauuagauguaauaucugcauuuga

SEQ ID NO: 206022 - RNA, 1701 nt, Artificial Sequence; identical to SEQ ID NO: 204499
  derived and/or modified CDS sequence (opt5) from hemagglutinin__InfluenzaA__EPI530647

SEQ ID NO: 206023 - RNA, 1701 nt, Artificial Sequence; identical to SEQ ID NO: 204513
  derived and/or modified CDS sequence (opt5) from hemagglutinin__InfluenzaA__EPI541083

SEQ ID NO: 206024 - RNA, 1701 nt, Artificial Sequence
  derived and/or modified CDS sequence (opt5) from hemagglutinin__InfluenzaA__EPI684315
augaagaccaucauugcccugagcuacauccucugccugguguucgcucagaaaauucccggcaacgacaauuccacagccacgcuuugucuggggcaccaugcggucccuaacggaaccaucguuaagacaauuaccaaugauagaaucgaggugacaaacgcuaccgaacucgugcaaaauucuagcaucggcgagauuugcgacuccccgcaccagauccuggauggggaaaacuguacacuuauugacgcccugcucggagauccccagugcgacggcuuucagaauaaaaagugggaucuguucgucgagcggucuaaagccuauagcaacuguuacccuuaugacgugcccgauuacgcuucccugcgcucucucguugccagcuccgggacccuggaauuuaauaacgagagcuucaauuggacgggagugacccaaaacggcacaucuuccgcuugcaucagacggucuagcuccagcuuuuucucucgccuuaauuggcugacccaucucaacuauaaguacccugcccugaaugucacaaugcccaacaacgagcaguuugacaaacuuuauauuuggggcgugcaccauccugggaccgauaaggaccagaucuucccguacgcgcaguccagcggaagaauuaucguuuccacgaagcggucucaacaggccgugauccccaauauuggcagccgcccuagaauccgggauauucccucccgcaucagcauuuacuggacaaucgucaaaccuggggacauccugcucauuaacucuaccggaaaucugaucgcucccagaggcuauuuuaagauucgguccgggaaaagcucuaucaugcgcagcgacgccccgauuggaaaguguaaguccgaaugcaucacaccuaacggcucuauccccaaugauaaaccuuuccagaacgugaauagaauuaccuacggcgcuuguccccgguaugugaagcacagcacccugaaacucgccacagggaugcgcaacguccccgagaagcagacgagaggaaucuuuggcgcgauugccggguucaucgaaaauggaugggagggcaugguugacgggugguacggauuucggcaccaaaacuccgagggcagaggccaggcugccgaucugaaaagcacccaggcugccauugaccaaaucaaugggaaacuuaaccgccugauuggaaagacaaaugaaaaguuccaucagaucgagaaggaguucucugaaguggaaggccggauccaggaucucgagaaauauguggaggacaccaagauugaucugugguccuacaacgccgaacuucuggucgcucucgagaaucagcacacaaucgaccugaccgauagcgaaaugaacaaacuguuugagaagacgaaaaagcaacucagagaaaacgcggaggacauggggaauggaugcuucaagauuuaucauaaaugugauaacgccugcaucggcucuauucgcaaugggacauacgaccacaacguguaccgggacgaggcucugaauaacagauuucagaucaagggcguugaacuuaaauccggauauaaggauuggauccuguggauuagcuucgccaucuccugcuuucuccuguguguggcccuucugggcuucauuaugugggcuugccagaaagggaauauccgcuguaacauuugcaucuga

SEQ ID NO: 206025 - RNA, 1701 nt, Artificial Sequence
  derived and/or modified CDS sequence (opt5) from hemagglutinin__InfluenzaA__EPI614462
augaagaccaucauugcccugagcuacauccucugccugguguucgcucagaaacuucccggcaacgacaauuccacagccacgcugugucucgggcaccaugcggucccuaacggaaccauuguuaagacaaucaccaaugauagaauugaggugacaaacgcuaccgaacuggugcaaaauucuagcaucggcgagaucugcgacuccccgcaccagauucuugauggggaaaacuguacacugaucgacgcccuccugggagauccccagugcgacggcuuucagaauaaaaagugggaucuguucgucgagcggucuaaagccuauagcaacuguuacccuuaugacgugcccgauuacgcuucccuccgcucucugguugccagcuccgggacccuugaauuuaauaacgagagcuucaauugggcuggagugacgcaaaacggcaccucuuccagcugcauuagaggcucuaauuccagcuuuuucucucggcugaacuggcucacacaucuuaauuccaaguauccugcccuuaacgucaccaugcccaacaaugagcaguuugacaagcuguacaucuggggagugcaccauccugggacagauaaagaccagauuuuccucuaugcgcagagcuccggccgcaucaccguuucuacgagacggagccaacaggccgugauuccgaacaucgggucccgccccagaauccgggauauuccuagccgcaucucuauuuacuggacaaucgucaagcccggagacauucugcugaucaauuccaccggcaaccucaucgcuccuagaggguacuuuaaaauucggagcggaaagucuagcaucaugcgcuccgacgcccccauuggcaaauguaagucugaaugcaucacaccgaauggcagcauuccuaacgauaagcccuuccagaaugugaacagaaucaccuauggggcuuguccucgguacgugaaacaguccacccugaagcuggccacaggaaugcgcaauguccccgagagacaaacgcggggcaucuuuggggcgauugccggauucaucgaaaacggcugggaggggaugguugacggaugguauggcuuuagacaccagaauagcgagggccgcgggcaggcugccgaucugaaaucuacccaagcugccauugaccagaucaacggaaagcucaaucggcugauuggcaaaacaaacgaaaaguuccaccagaucgagaaagaguucuccgaaguggaagggcgcauucaggaucuugagaaguacguggaggacaccaagaucgaucuguggagcuauaaugccgaacuccuggucgcucuggagaaccaacauacaaucgaccucaccgauucugaaaugaacaaacuguuugagaagacgaaaaagcagcuuagagaaaaugcggaggacaugggaaacggcugcuucaaaauuuaccacaagugugauaaugccugcaucggguccauucggaacggcacauaugaccaugacguguacagagaugaggcucugaauaaccgcuuucagaucaagggaguugaacucaaaagcggcuacaaggacuggauucuguggaucuccuucgccaucucuugcuuucuucuguguguggcccuccugggguucauuaugugggcuugccagaaaggaaauauccgguguaacauuugcaucuga

SEQ ID NO: 206026 - RNA, 1701 nt, Artificial Sequence
  derived and/or modified CDS sequence (opt5) from hemagglutinin__InfluenzaA__EPI541465
augaagaccaucauugcccugagcuacauccucugccugguguucgcucagaaacuucccggcaacgacaauuccacagccacgcugugucucgggcaccaugcggucccuaacggaaccauuguuaagacaaucaccaaugauagaauugaggugacaaacgcuaccgaacuggugcaaaauucuagcaucggcgagaucugcgacuccccgcaccagauucuugauggggaaaacuguacacugaucgacgcccuccugggagauccccagugcgacggcuuucagaauaaaaagugggaucuguucgucgagcggucuaaagccuauagcaacuguuacccuuaugacgugcccgauuacgcuucccuccgcucucugguugccagcuccgggacccuugaauuuaauaacgagagcuucaauugggcuggagugacgcaaaacggcaccucuuccagcugcauuagaggcucuaauaacuccuuuuucagccggcugaauuggcucacacaucugaacucuaaguauccugcccuuaacgucaccaugcccaauaacgagcaguuugacaagcuguacaucuggggagugcaccauccuggaacagauaaagaccagauuuuccucuaugcgcaguccagcggccgcaucaccguuuccacgagacggucucaacaggccgugauuccgaauaucgggagccgccccagaauccgggggauuccuucccgcaucagcauuuacuggacaaucgucaagcccggcgauauucugcugaucaacucuaccgggaaucucaucgcuccuagaggauacuuuaaaauucgguccggcaagagcucuaucaugcgcagcgacgcccccauuggcaaauguaaguccgaaugcaucacaccgaacgggucuauuccuaaugacaagcccuuccagaacgugaauagaaucaccuauggagcuuguccucgguacgugaaacagagcacccugaagcuggccacaggcaugcgcaacguccccgagagacaaacgcgggggaucuuuggagcgauugccggcuucaucgaaaaugggugggagggaaugguugauggcugguauggcuuuagacaccagaacuccgaggggcgcggacaggcugccgaccuuaaaagcacccaagcugccauugaucagaucaauggcaagcucaaccggcugauugggaaaacaaaugaaaaguuccaccagaucgagaaagaguucucugaaguggaaggacgcauucaggaccuugagaaguacguggaggauaccaagaucgaccugugguccuauaacgccgaacuccuggucgcucuggagaaccaacauacaaucgaucucaccgacagcgaaaugaauaaacuguuugagaagacgaaaaagcagcuuagagaaaacgcggaggauaugggcaaugggugcuucaaaauuuaccacaagugugacaacgccugcaucggcucuauucggaauggaacauaugaucaugacguguacagagacgaggcucugaacaaucgcuuucagaucaagggcguugaacucaaauccggguacaaggauuggauucuguggaucagcuucgccaucuccugcuuucuucuguguguggcccuccugggauucauuaugugggcuugccagaaaggcaacauccgguguaauauuugcaucuga

SEQ ID NO: 206027 - RNA, 1701 nt, Artificial Sequence
  derived and/or modified CDS sequence (opt5) from hemagglutinin__InfluenzaA__EPI696967
augaagaccaucauugcccugagcuacauccucugccugguguucgcucagaaacuucccggcaacgacaauuccacagccacgcugugucucgggcaccaugcggucccuaacggaaccauuguuaagacaaucaccaaugauagaauugaggugacaaacgcuaccgaacuggugcaaaauucuagcaucggcgagaucugcgacuccccgcaccagauucuugauggggaaaacuguacacugaucgacgcccuccugggagauccccagugcgacggcuuucagaauaaaaagugggaucuguucgucgagcggucuaaagccuauagcaacuguuacccuuaugacgugcccgauuacgcuucccuccgcucucugguugccagcuccgggacccuugaauuuaauaacgagagcuucaauugggcuggagugacgcaaaacggcaccucuuccagcugcauuagaggcucuaauuccagcuuuuucucucggcugaacuggcucacacgccuuaauuccaaguauccugcccuuaacgucaccaugcccaacaaugagcaguuugacaagcuguacaucuggggagugcaucacccugaaacagauaaagaccagauuuuccucuaugcgcagagcuccgggagaaucaccguuucuacgcggcgcagccaacaggccgugauuccgaacaucggcuccagaccccggauccgcgggauuccuagcagaaucucuauuuacuggacaaucgucaagcccggagauauucugcugaucaauuccaccggcaaccucaucgcuccucggggguacuuuaaaauucgcagcggaaagucuagcaucaugagauccgacgcccccauuggcaaauguaagucugagugcaucacaccgaauggcagcauuccuaacgacaagcccuuccagaaugugaaccggaucaccuauggggcuuguccucgcuacgugaaacaguccacccugaagcuggccacaggaaugagaaauguccccgaacggcaaacgagaggcaucuuuggggcgauugccggauucaucgagaacggcugggaggggaugguugauggaugguauggcuuucgccaucagaauagcgaaggccgggggcaggcugccgaccugaaaucuacccaagcugccauugaucagaucaacggaaagcucaauagacugauuggcaaaacaaacgagaaguuccaccagaucgaaaaagaguucuccgaaguggaggggcgcauucaggaccuugagaaguacguggaagauaccaagaucgaccuguggagcuauaaugccgagcuccuggucgcucuggaaaaccaacacacaaucgaucucaccgacucugagaugaacaaacuguuugaaaagacgaaaaagcagcuucgggagaaugcggaggauaugggaaacggcugcuucaaaauuuaccauaagugugacaaugccugcaucggguccauuagaaacggcacauaugaucacgacguguaccgcgacgaagcucugaauaaccgguuucagaucaagggaguugagcucaaaagcggcuacaaggauuggauucuguggaucuccuucgccaucucuugcuuucuucuguguguggcccuccugggguucauuaugugggcuugccagaaaggaaauaucagauguaacauuugcaucuga

SEQ ID NO: 206028 - RNA, 1701 nt, Artificial Sequence
  derived and/or modified CDS sequence (opt5) from hemagglutinin__InfluenzaA__EPI674597
augaagaccaucauugcccugagcuacauccucugccugguguucgcucagaaacuucccggcaacgacaauuccacagccacgcugugucucgggcaccaugcggucccuaacggaaccauuguuaagacaaucaccaaugauagaauugaggugacaaacgcuaccgaacuggugcaaaauucuagcaucggcgagaucugcgacuccccgcaccagauucuugauggggaaaacuguacacugaucgacgcccuccugggagauccccagugcgacggcuuucagaauaaaaagugggaucuguucgucgagcggucuaaagccuauagcaacuguuacccuuaugacgugcccgauuacgcuucccuccgcucucugguugccagcuccgggacccuugaauuuaauaacgagagcuucaauugggcuggagugacgcaaaacggcaccucuuccagcugcauuagaggcucuaauaacuccuuuuucagccggcugaauuggcucacacaucugaacucuaaguauccugcccuuaacgucaccaugcccaauaacgagcaguuugacaagcuguacaucuggggagugcaccauccuguuacagauaaagaccagauuuuccucuaugcgcaguccagcgggcgcaucaccguguccacgagacggucucaacaggccgucauuccgaauaucggcagccgccccagaauccgggggauuccuucccgcaucagcauuuacuggacaaucgugaagcccggagauauucugcugaucaacucuaccggcaaucucaucgcuccuagaggguacuuuaaaauucgguccggaaagagcucuaucaugcgcagcgacgcccccauuggcaaauguaaguccgaaugcaucacaccgaacggcucuauuccuaaugacaagcccuuccagaacgugaauagaaucaccuauggggcuuguccucgguacgucaaacagagcacccugaagcuggccacaggaaugcgcaacguucccgagagacaaacgcggggcaucuuuggggcgauugccggauucaucgaaaauggcugggaggggaugguggauggaugguauggcuuuagacaccagaacuccgagggccgcgggcaggcugccgaccuuaaaagcacccaagcugccauugaucagaucaauggaaagcucaaccggcugauuggcaaaacaaaugaaaaguuccaccagaucgagaaagaguucucugaaguggaagggcgcauucaggaccuugagaaguacgucgaggauaccaagaucgaccugugguccuauaacgccgaacuccugguggcucuggagaaccaacauacaaucgaucucaccgacagcgaaaugaauaaacuguuugagaagacgaaaaagcagcuuagagaaaacgcggaggauaugggaaauggcugcuucaaaauuuaccacaagugugacaacgccugcaucgggucuauucggaauggcacauaugaucaugacguuuacagagacgaggcucugaacaaucgcuuucagaucaagggaguggaacucaaauccggcuacaaggauuggauucuguggaucagcuucgccaucuccugcuuucuucugugugucgcccuccugggguucauuaugugggcuugccagaaaggaaacauccgguguaauauuugcaucuga

SEQ ID NO: 206029 - RNA, 1701 nt, Artificial Sequence
  derived and/or modified CDS sequence (opt5) from hemagglutinin__InfluenzaA__EPI530677
augaagaccaucauugcccugagcuacauccucugccugguguucgcucagaaacuucccggcaacgacaauuccacagccacgcugugucucgggcaccaugcggucccuaacggaaccauuguuaagacaaucaccaaugauagaauugaggugacaaacgcuaccgaacuggugcaaaauucuagcaucggcgagaucugcgacuccccgcaccagauucuugauggggaaaacuguacacugaucgacgcccuccugggagauccccagugcgacggcuuucagaauaaaaagugggaucuguucgucgagcggucuaaagccuauagcaacuguuacccuuaugacgugcccgauuacgcuucccuccgcucucugguugccagcuccgggacccuugaauuuaauaacgagagcuucaauugggcuggagugacgcaaaacggcaccucuuccagcugcauuagaggcucuaauuccagcuuuuucucucggcugaacuggcucacacaucuuaauuccaaguauccugcccugaacgucaccaugcccaacaaugagcaguuugacaagcuguacaucuggggagugcaccauccugggacagauaaagaccagauuuuccucuaugcgcagagcuccggccgcaucaccguuucuacgaagagaagccaacaggccgugauuccgaacaucgggucccggccccgcaucagagauauuccuagccggaucucuauuuacuggacaaucgucaaacccggagacauucugcugaucaauuccaccggcaaccucaucgcuccucgcggguacuuuaagauuagaagcggaaaaucuagcaucaugcgguccgacgcccccauuggcaaguguaagucugaaugcaucacaccgaauggcagcauuccuaacgauaaacccuuccagaaugugaaccgcaucaccuauggggcuuguccuagauacgugaagcaguccacccugaaacuugccacaggaaugcggaauguccccgagaagcaaacgcgcggcaucuuuggggcgauugccggauucaucgaaaacggcugggaggggaugguugacggaugguauggcuuuagacaccagaauagcgagggccgggggcaggcugccgaucugaaaucuacccaagcugccauugaccagaucaacggaaagcucaauagacugauuggcaaaacaaacgaaaaguuccaccagaucgagaaggaguucuccgaaguggaagggcgcauucaggaucuugagaaauacguggaggacaccaagaucgaucuguggagcuauaaugccgaacuccuggucgcucuggagaaccaacauacaaucgaccucaccgauucugaaaugaacaaacuguuugagaagacgaaaaagcagcuucgggaaaaugcggaggacaugggaaacggcugcuucaagauuuaccacaaaugugauaaugccugcaucggguccauuagaaacggcacauaugaccaugacguguaccgcgaugaggcucugaauaaccgguuucagaucaagggaguugaacucaaaagcggcuacaaggacuggauucuguggaucuccuucgccaucucuugcuuucuucuguguguggcccuccugggguucauuaugugggcuugccagaaaggaaauaucagauguaacauuugcaucuga

SEQ ID NO: 206030 - RNA, 1701 nt, Artificial Sequence
  derived and/or modified CDS sequence (opt5) from hemagglutinin__InfluenzaA__EPI530679
augaagaccaucauugcccugagcuacauccucugccugguguucgcucagaaacuucccggcaacgacaauuccacagccacgcugugucucgggcaccaugcggucccuaacggaaccauuguuaagacaaucaccaaugauagaauugaggugacaaacgcuaccgaacuggugcaaaauucuagcaucggcgagaucugcgacuccccgcaccagauucuugauggggaaaacuguacacugaucgacgcccuccugggagauccccagugcgacggcuuucagaauaaaaagugggaucuguucgucgagcggucuaaagccuauagcaacuguuacccuuaugacgugcccgauuacgcuucccuccgcucucugguugccagcuccgggacccuugaauuuaauaacgagagcuucaauugggcuggagugacgcaaaacggcaccucuuccagcugcauuagaggcucuaauuccagcuuuuucucucggcugaacuggcucacacaucugaauuuuaaguauccugcccuuaacgucaccaugcccaacaaugagcaguucgacaagcuguacaucuggggagugcaccauccugggacagauaaagaccagauuuuucucuaugcgcaguccagcggccgcaucaccguuuccacgaagagaucucaacaggccgugauuccgaacaucgggagccggccccgcaucagagauauuccuucccggaucagcauuuacuggacaaucgucaaacccggagacauucugcugaucaauucuaccggcaaccucaucgcuccucgcggguacuucaagauuagauccggaaaaagcucuaucaugcggagcgacgcccccauuggcaaguguaaguccgaaugcaucacaccgaauggcucuauuccuaacgauaaacccuuucagaaugugaaccgcaucaccuauggggcuuguccuagauacgugaagcagagcacccugaaacuugccacaggaaugcggaauguccccgagaagcaaacgcgcggcaucuucggggcgauugccggauuuaucgaaaacggcugggaggggaugguugacggaugguauggcuucagacaccaaaauuccgagggccgggggcaggcugccgaucugaaaagcacccaggcugccauugaccagaucaacggaaagcucaauagacugauuggcaaaacaaacgaaaaguuccaccagaucgagaaggaauuuucugagguggaagggcgcauucaggaucuugagaaauacguggaggacaccaagaucgaucugugguccuauaaugccgaacuccuggucgcucuggagaaccaacauacaaucgaccucaccgauagcgaaaugaacaaacuguucgagaagacgaaaaagcagcuucgggaaaaugcggaggacaugggaaacggcugcuuuaagauuuaccacaaaugugauaaugccugcaucgggucuauuagaaacggcacauaugaccaugacguguaccgcgaugaggcucugaauaaccgguuccagaucaagggaguugaacucaaauccggcuacaaggacuggauucuguggaucagcuuugccaucuccugcuuccuucuguguguggcccuccugggguuuauuaugugggcuugccagaaaggaaauaucagauguaacauuugcaucuga

SEQ ID NO: 206031 - RNA, 1701 nt, Artificial Sequence; identical to SEQ ID NO: 192094
  derived and/or modified CDS sequence (opt5) from hemagglutinin__InfluenzaA__AAG01785

SEQ ID NO: 206032 - RNA, 1701 nt, Artificial Sequence; identical to SEQ ID NO: 204499
  derived and/or modified CDS sequence (opt5) from hemagglutinin__InfluenzaA__EPI814528

SEQ ID NO: 206033 - RNA, 1701 nt, Artificial Sequence
  derived and/or modified CDS sequence (opt5) from hemagglutinin__InfluenzaA__EPI674736
augaagaccaucauugcccugagcuacauccucugccugguguucgcucagaaacuucccggcaacgacaauuccacagccacgcugugucucgggcaccaugcggucccuaacggaaccauuguuaagacaaucaccaaugauagaauugaggugacaaacgcuaccgaacuggugcaaaauucuagcaucggcgagaucugcgacuccccgcaccagauucuugauggggaaaacuguacacugaucgacgcccuccugggagauccccagugcgacggcuuucagaauaaaaagugggaucuguucgucgagcggucuaaagccuauagcaacuguuacccuuaugacgugcccgauuacgcuucccuccgcucucugguugccagcuccgggacccuugaauuuaauaacgagagcuucaauugggcuggagugacgcaaaacggcaccucuuccagcugcagacggggcucuaauuccagcuuuuucucucgccugaacuggcucacacaucuuaauuccaaguauccugcccugaacgucaccaugcccaacaaugagcaguuugacaagcuguacauuuggggagugcaccauccuguuacagauaaagaccagaucuuccucuaugcgcagagcuccgggagaauuaccgugucuacgaagcggagccaacaggccgucaucccgaacauuggcucccgccccagaauccgggauaucccuagccgcauuucuaucuacuggacaauugugaaacccggggacauccugcugauuaauuccaccggaaaccucaucgcuccuagaggcuacuuuaagauccggagcgggaaaucuagcauuaugcgcuccgacgcccccaucggaaaguguaagucugaaugcauuacaccgaauggcagcaucccuaacgauaaacccuuccagaaugugaacagaauuaccuauggcgcuuguccucgguacgucaagcaguccacccugaaacuugccacagggaugcgcaauguucccgagagacaaacgcggggaaucuuuggcgcgaucgccggguucauugaaaacggaugggagggcaugguggacgggugguauggauuuagacaccagaauagcgagggccgcggccaggcugccgaucugaagucuacccaagcugccaucgaccagauuaacgggaaacucaaucggcugaucggaaagacaaacgaaaaauuccaccagauugagaaggaguucuccgaaguggaaggcagaauccaggaucuugagaaguacgucgaggacaccaaaauugaucuguggagcuauaaugccgaacuccugguggcucuggagaaccaacauacaaucgaccucaccgauucugaaaugaacaagcuguuugagaaaacgaagaaacagcuucgcgaaaaugcggaggacauggggaacggaugcuucaagaucuaccacaagugugauaaugccugcauuggcuccauccggaacgggacauaugaccaugacguuuacagagaugaggcucugaauaaccgcuuucagauuaaaggcguggaacucaagagcggauacaaagacuggauccuguggauuuccuucgccaucucuugcuuucuucugugugucgcccuccugggcuucaucaugugggcuugccagaaggggaauauucgguguaacaucugcauuuga

SEQ ID NO: 206034 - RNA, 1701 nt, Artificial Sequence; identical to SEQ ID NO: 204499
  derived and/or modified CDS sequence (opt5) from hemagglutinin__InfluenzaA__EPI614444

SEQ ID NO: 206035 - RNA, 1701 nt, Artificial Sequence
  derived and/or modified CDS sequence (opt5) from hemagglutinin__InfluenzaA__EPI551814
augaagaccaucauugcccugagcuacauccucugccugguguucgcucagaaacuucccggcaacgacaauuccacagccacgcugugucucgggcaccaugcggucccuaacggaaccauuguuaagacaaucaccaaugauagaauugaggugacaaacgcuaccgaacuggugcaaaauucuagcaucggcgagaucugcgacuccccgcaccagauucuugauggggaaaacuguacacugaucgacgcccuccugggagauccccagugcgacggcuuucagaauaaaaagugggaucuguucgucgagcggucuaaagccuauagcaacuguuacccuuaugacgugcccgauuacgcuucccuccgcucucugguugccagcuccgggacccuugaauuuaauaacgagagcuucaauugggcuggagugacgcaaaacggcaccucuuccagcugcagacggggcucuaauuccagcuuuuucucucgccugaacuggcucacaagacuuaauuccaaguauccugcccugaacgucaccaugcccaacaaugagcaguuugacaagcuguacauuuggggagugcaucacccuguuacagauaaagaccagaucuuccucuaugcgcagagcuccgggcggauuaccgugucuacgaagcgcagccaacaggccgucaucccgaacauuggcuccagaccccggauccgcgauaucccuagcagaauuucuaucuacuggacaauugugaaacccggggacauccugcugauuaauuccaccggaaaccucaucgcuccucggggcuacuuuaagauccgcagcgggaaaucuagcauuaugagauccgacgcccccaucggaaaguguaagucugaaugcauuacaccgaauggcagcaucccuaacgauaaacccuuccagaaugugaaccggauuaccuauggcgcuuguccucgcuacgucaagcaguccacccugaaacuugccacagggaugagaaauguucccgagcggcaaacgagaggaaucuuuggcgcgaucgccggguucauugaaaacggaugggagggcaugguggacgggugguauggauuucgccaucagaauagcgagggccggggccaggcugccgaucugaagucuacccaagcugccaucgaccagauuaacgggaaacucaauagacugaucggaaagacaaacgaaaaauuccaccagauugagaaggaguucuccgaaguggaaggccgcauccaggaucuugagaaguacgucgaggacaccaaaauugaucuguggagcuauaaugccgaacuccugguggcucuggagaaccaacacacaaucgaccucaccgauucugaaaugaacaagcuguuugagaaaacgaagaaacagcuucgggaaaaugcggaggacauggggaacggaugcuucaagaucuaccauaagugugauaaugccugcauuggcuccaucagaaacgggacauaugaccacgacguuuaccgcgaugaggcucugaauaaccgguuucagauuaaaggcguggaacucaagagcggauacaaagacuggauccuguggauuuccuucgccaucucuugcuuucuucugugugucgcccuccugggcuucaucaugugggcuugccagaaggggaauauuagauguaacaucugcauuuga

SEQ ID NO: 206036 - RNA, 1701 nt, Artificial Sequence
  derived and/or modified CDS sequence (opt5) from hemagglutinin__InfluenzaA__EPI696955
augaagaccaucauugcccugagcuacauccucugccugguguucgcucagaaacuucccggcaacgacaauuccacagccacgcugugucucgggcaccaugcggucccuaacggaaccauuguuaagacaaucaccaaugauagaauugaggugacaaacgcuaccgaacuggugcaaaauucuagcaucggcgagaucugcgacuccccgcaccagauucuugauggggaaaacuguacacugaucgacgcccuccugggagauccccagugcgacggcuuucagaauaaaaagugggaucuguucgucgagcggucuaaagccuauagcaacuguuacccuuaugacgugcccgauuacgcuucccuccgcucucugguugccagcuccgggacccuugaauuuaauaacgagagcuucaauugggcuggagugacgcaaaacggcaccucuuccagcugcagacggggcucuaauuccagcuuuuucucucgccugaacuggcucacacaucugaauagcaaguauccugcccuuaacgucaccaugcccaacaaugagcaguuugacaagcuguacauuuggggagugcaccauccuguuacagauaaagaccagaucuuccucuaugcgcagagcuccgggagaauuaccgugucuacgaagcggagccaacaggccgucaucccgaacauuggcuaccgccccagaauccgggauaucccuucccgcauuagcaucuacuggacaauugugaaacccggggacauccugcugauuaauucuaccggaaaccucaucgcuccuagaggcuauuuuaagauccgguccgggaaaagcucuauuaugcgcagcgacgcccccaucggaaaguguaaguccgaaugcauuacaccgaauggcucuaucccuaacgauaaacccuuccagaaugugaacagaauuaccuacggcgcuuguccucgguaugucaagcagagcacccugaaacuugccacagggaugcgcaauguucccgagagacaaacgcggggaaucuuuggcgcgaucgccggguucauugaaaacggaugggagggcaugguggacgggugguacggauuuagacaccaaaauuccgagggccgcggccaggcugccgaucugaaguccacccaggcugccaucgaccagauuaacgggaaacucaaucggcugaucggaaagacaaacgaaaaauuccaccagauugagaaggaguucucugaaguggaaggcagaauccaggaucuugagaaguaugucgaggacaccaaaauugaucugugguccuacaaugccgaacuccugguggcucuggagaaccaacauacaaucgaccucaccgauagcgaaaugaacaagcuguuugagaaaacgaagaaacagcuucgcgaaaaugcggaggacauggggaacggaugcuucaagaucuaucacaagugugauaaugccugcauuggcucuauccggaacgggacauacgaccaugacguuuacagagaugaggcucugaauaaccgcuuucagauuaaaggcguggaacucaaguccggauauaaagacuggauccuguggauuagcuucgccaucuccugcuuucuucugugugucgcccuccugggcuucaucaugugggcuugccagaaggggaauauucgguguaacaucugcauuuga

SEQ ID NO: 206037 - RNA, 1701 nt, Artificial Sequence
  derived and/or modified CDS sequence (opt5) from hemagglutinin__InfluenzaA__EPI740790
augaagaccaucauugcccugagcuacauccucugccugguguucgcucagaaacuucccggcaacgacaauuccacagccacgcugugucucgggcaccaugcggucccuaacggaaccauuguuaagacaaucaccaaugauagaauugaggugacaaacgcuaccgaacuggugcaaaauucuagcaucggcgagaucugcgacuccccgcaccagauucuugauggggaaaacuguacacugaucgacgcccuccugggagauccccagugcgacggcuuucagaauaaaaagugggaucuguucgucgagcggucuaaagccuauagcaacuguuacccuuaugacgugcccgauuacgcuucccuccgcucucugguugccagcuccgggacccuugaauuuaauaacgagagcuucaauugggcuggagugacgcaaaacggcaccucuuccagcugcagacggggcucuaauuccagcuuuuucucucgccugaacuggcucacacaucugaauagcaaguauccugcccuuaacgucaccaugcccaacaaugagcaguuugacaagcuguacauuuggggagugcaccauccuguuacagauaaagaccagaucuuccucuaugcgcagagcuccgggagaauuaccgugucuacgaagcggagccaacaggccgucaucccgaacauuggcuuucgccccagaauccgggauaucccuucccgcauuagcaucuacuggacaauugugaaacccggggacauccugcugauuaauucuaccggaaaccucaucgcuccuagaggcuacuucaagauccgguccgggaaaagcucuauuaugcgcagcgacgcccccaucggaaaguguaaguccgaaugcauuacaccgaauggcucuaucccuaacgauaaacccuuucagaaugugaacagaauuaccuauggcgcuuguccucgguacgucaagcagagcacccugaaacuugccacagggaugcgcaauguucccgagagacaaacgcggggaaucuucggcgcgaucgccggguuuauugaaaacggaugggagggcaugguggacgggugguauggauucagacaccaaaauuccgagggccgcggccaggcugccgaucugaaguccacccaggcugccaucgaccagauuaacgggaaacucaaucggcugaucggaaagacaaacgaaaaauuccaccagauugagaaggaauuuucugagguggaaggcagaauccaggaucuugagaaguacgucgaggacaccaaaauugaucugugguccuauaaugccgaacuccugguggcucuggagaaccaacauacaaucgaccucaccgauagcgaaaugaacaagcuguucgagaaaacgaagaaacagcuucgcgaaaaugcggaggacauggggaacggaugcuuuaagaucuaccacaagugugauaaugccugcauuggcucuauccggaacgggacauaugaccaugacguuuacagagaugaggcucugaauaaccgcuuccagauuaaaggcguggaacucaaguccggauacaaagacuggauccuguggauuagcuuugccaucuccugcuuccuucugugugucgcccuccugggcuuuaucaugugggcuugccagaaggggaauauucgguguaacaucugcauuuga

SEQ ID NO: 206038 - RNA, 1701 nt, Artificial Sequence; identical to SEQ ID NO: 200781
  derived and/or modified CDS sequence (opt5) from hemagglutinin__InfluenzaA__EPI377499

SEQ ID NO: 206039 - RNA, 1701 nt, Artificial Sequence
  derived and/or modified CDS sequence (opt5) from hemagglutinin__InfluenzaA__EPI391247
augaagaccaucauugcccugagcuacauccucugccugguguucgcucagaaacuucccggcaacgacaauuccacagccacgcugugucucgggcaccaugcggucccuaacggaaccauuguuaagacaaucaccaaugauagaauugaggugacaaacgcuaccgaacuggugcaaaauucuagcaucggcgagaucugcgacuccccgcaccagauucuugauggggaaaacuguacacugaucgacgcccuccugggagauccccagugcgacggcuuucagaauaaaaagugggaucuguucgucgagcggucuaaagccuauagcaacuguuacccuuaugacgugcccgauuacgcuucccuccgcucucugguugccagcuccgggacccuugaauuuaauaacgagagcuucaauuggaacggagugacgcaaaauggcaccucuuccgcuugcauuagacggagcaacaauucuuucuucucccgccugaacuggcucacacaucugaacuuuaaguauccugcccuuaaugucaccaugcccaacaaugagcaguucgacaagcuguacaucuggggcgugcaccauccuguuacagauaaagaccagauuuuucucuaugcgcagccgagcgggagaaucaccgugucuacgaagcggucccaacaggccgucauucccaacaucggauuccgcccuagaauccggaauauucccagccgcaucuccauuuacuggacaaucgugaaaccuggcgauauucugcugaucaacucuaccgggaaucucaucgcucccagaggauacuuuaagauucggagcggcaaauccagcaucaugcgcucugacgccccgauugggaaguguaaguccgaaugcaucacaccuaacggaagcauucccaaugacaaaccuuuccagaacgugaauagaaucaccuauggcgcuuguccccgguacgucaagcagucuacccugaaacuugccacaggcaugcgcaacguucccgagaagcaaacgagagggaucuuuggagcgauugccggcuucaucgaaaaugggugggagggaaugguggauggcugguauggguuccggcaccagaacagcgagggaagaggccaggcugccgaccugaaauccacccaagcugccauugaucagaucaauggcaagcucaaccgccugauugggaaaacaaacgaaaaguuucaccagaucgagaaggaauuuucugagguggaaggacggauucaggaccuugagaaauacgucgaggauaccaagaucgaccuguggagcuauaaugccgaacuccugguggcucuggagaaccaacauacaaucgaucucaccgacuccgaaaugaauaaacuguuugagaagacgaaaaagcagcuuagagaaaacgcggaggauaugggcaaugggugcuucaagauuuaccacaaaugugacaacgccugcaucggaagcauucgcaauggcacauaugaucaugacguuuaccgggacgaggcucugaacaauagauuucagaucaaggggguggaacucaaaucuggcuacaaggauuggauucuguggaucuccuucgccaucagcugcuuucuucugugugucgcccuccugggauucauuaugugggcuugccagaaaggcaacauccgcuguaauauuugcaucuga

SEQ ID NO: 206040 - RNA, 1701 nt, Artificial Sequence
  derived and/or modified CDS sequence (opt5) from hemagglutinin__InfluenzaA__EPI407123
augaagaccaucauugcccugagcuacauccucugccugguguucgcucagaaacuucccggcaacgacaauuccacagccacgcugugucucgggcaccaugcggucccuaacggaaccauuguuaagacaaucaccaaugauagaauugaggugacaaacgcuaccgaacuggugcaaaauucuagcaucggcgagaucugcgacuccccgcaccagauucuugauggggaaaacuguacacugaucgacgcccuccugggagauccccagugcgacggcuuucagaauaaaaagugggaucuguucgucgagcggucuaaagccuauagcaacuguuacccuuaugacgugcccgauuacgcuucccuccgcucucugguugccagcuccgggacccuugaauuuaauaacgagagcuucaauuggaacggagugacgcaaaauggcaccucuuccgcuugcauuagacggagcaacaauuccuuuuucucucgccugaacuggcucacacaucugaacuuuaaguauccugcccuuaaugucaccaugcccaacaaugagcaguucgacaagcuguacaucuggggcgugcaccauccuguuacagauaaagaccagauuuuucucuaugcgcagccgagcgggagaaucaccgugucuacgaagcggucccaacaggccgucauucccaacaucggauuccgcccuagaauccggaauaaccccagccgcauuuccaucuacuggacaauugugaaaccuggcgauauccugcugauuaauucuaccgggaaccucaucgcucccagaggauacuuuaagauccggagcggcaaauccagcauuaugcgcucugacgccccgaucgggaaguguaaguccgaaugcauuacaccuaauggaagcauccccaacgacaaaccuuuccagaaugugaacagaauuaccuauggcgcuuguccccgguacgucaagcagucuacccugaaacuugccacaggcaugcgcaauguucccgagaagcaaacgagagggaucuuuggagcgaucgccggcuucauugaaaacgggugggagggaaugguggauggcugguauggguuccggcaccagaauagcgagggaagaggccaggcugccgaccugaaauccacccaagcugccaucgaucagauuaacggcaagcucaaccgccugaucggggaaacaaaugagaaauuucaccagauugaaaaggaguucucugaaguggagggacggauccaggaccuugagaaguacgucgaagauaccaaaauugaccuguggagcuauaacgccgagcuccugguggcucuggaaaaucaacauacaaucgaucucaccgacuccgagaugaacaagcuguuugagaaaacgaagaaacagcuuagagaaaaugcggaggauaugggcaacgggugcuucaagaucuaccacaagugugacaaugccugcauuggaagcauccgcaacggcacauaugaucaugacguuuaccgggacgaagcucugaauaacagauuucagauuaaagggguggagcucaagucuggcuacaaagauuggauccuguggauuuccuucgccaucagcugcuuucuucugugugucgcccuccugggauucaucaugugggcuugccagaagggcaauauucgcuguaacaucugcauuuga

SEQ ID NO: 206041 - RNA, 1701 nt, Artificial Sequence
  derived and/or modified CDS sequence (opt5) from hemagglutinin__InfluenzaA__EPI407126
augaagaccaucauugcccugagcuacauccucugccugguguucgcucagaaacuucccggcaacgacaauuccacagccacgcugugucucgggcaccaugcggucccuaacggaaccauuguuaagacaaucaccaaugauagaauugaggugacaaacgcuaccgaacuggugcaaaauucuagcaucggcgagaucugcgacuccccgcaccagauucuugauggggaaaacuguacacugaucgacgcccuccugggagauccccagugcgacggcuuucagaauaaaaagugggaucuguucgucgagcggucuaaagccuauagcaacuguuacccuuaugacgugcccgauuacgcuucccuccgcucucugguugccagcuccgggacccuugaauuuaauaacgagagcuucaauuggaacggagugacgcaaaauggcaccucuuccgcuugcauuagacggagcaacaauucuuucuucucccgccugaacuggcucacacaucugaacuuuaaguauccugcccuuaaugucaccaugcccaacaaugagcaguucgacaagcuguacaucuggggcgugcaccauccuguuacagauaaagaccagauuuuucucuaugcgcagccgagcgggagaaucaccgugucuacgaagcggucccaacaggccgucauucccaacaucggauuccgcccuagaauccggaauaaccccagccgcauuuccaucuacuggacaauugugaaaccuggcgauauccugcugauuaauucuaccgggaaccucaucgcucccagaggauacuuuaagauccggagcggcaaauccagcauuaugcgcucugacgccccgaucgggaaguguaaguccgaaugcauuacaccuaauggaagcauccccaacgacaaaccuuuccagaaugugaacagaauuaccuauggcgcuuguccccgguacgucaagcagucuacccugaaacuugccacaggcaugcgcaauguucccgagaagcaaacgagagggaucuuuggagcgaucgccggcuucauugaaaacgggugggagggaaugguggauggcugguauggguuccggcaccagaauagcgagggaagaggccaggcugccgaccugaaauccacccaagcugccaucgaucagauuaacggcaagcucaaccgccugaucgggaaaacaaaugaaaaguuucaccagauugagaaggaauuuucugagguggaaggacggauccaggaccuugagaaauacgucgaggauaccaagauugaccuguggagcuauaacgccgaacuccugguggcucuggagaaucaacauacaaucgaucucaccgacuccgaaaugaacaaacuguuugagaagacgaaaaagcagcuuagagaaaaugcggaggauaugggcaacgggugcuucaagaucuaccacaaaugugacaaugccugcauuggaagcauccgcaacggcacauaugaucaugacguuuaccgggacgaggcucugaauaacagauuucagauuaaggggguggaacucaaaucuggcuacaaggauuggauccuguggauuuccuucgccaucagcugcuuucuucugugugucgcccuccugggauucaucaugugggcuugccagaaaggcaauauucgcuguaacaucugcauuuga

SEQ ID NO: 206042 - RNA, 1701 nt, Artificial Sequence; identical to SEQ ID NO: 205927
  derived and/or modified CDS sequence (opt5) from hemagglutinin__InfluenzaA__EPI562037

SEQ ID NO: 206043 - RNA, 1701 nt, Artificial Sequence; identical to SEQ ID NO: 204513
  derived and/or modified CDS sequence (opt5) from hemagglutinin__InfluenzaA__EPI562034

SEQ ID NO: 206044 - RNA, 1701 nt, Artificial Sequence
  derived and/or modified CDS sequence (opt5) from hemagglutinin__InfluenzaA__EPI653140
augaagaccaucauugcccugagcuacauccucugccugguguucgcucagaaaauucccggcaacgacaauuccacagccacgcuuugucuggggcaccaugcggucccuaacggaaccaucguuaagacaauuaccaaugauagaaucgaggugacaaacgcuaccgaacucgugcaaaauucuagcaucggcgagauuugcgacuccccgcaccagauccuggauggggaaaacuguacacuuauugacgcccugcucggagauccccagugcgacggcuuucagaauaaaaagugggaucuguucgucgagcggucuaaagccuauagcuccuguuacccuuaugacgugcccgauuacgcuucucugcgcagccucguugccuccagcgggacccuggaauuuaacaaugagucuuucaacuggacgggagugacccaaaauggcacauccagcgcuugcaucagacggucuuccagcucuuucuucucccgccuuaacuggcugacccaucucaauuauaaguacccugcccugaacgucacaaugcccaauaacgagcaguuugacaaacuuuauauuuggggcgugcaccauccugggaccgauaaagaccagaucuucccguacgcgcagagcuccggaagaauuacgguuucuacaaagcggagccaacaggccgugauccccaacaucggcucccgcccucggauuagagggauccccagccgcauuucuaucuacuggaccauugucaaaccuggagauauccugcucaucaauuccacaggcaaccugauugcucccagaggguauuuuaagauccggagcggaaaaucuagcauuaugcgcuccgacgccccgaucggcaaguguaagucugaaugcauuaccccuaauggcagcauccccaacgacaaaccuuuccagaaugugaacagaaucaccuacggggcuuguccccgguaugugaagcacuccacacugaaacucgccacgggaaugcgcaauguccccgagaagcagaccagaggcauuuuuggggcgaucgccggauucauugaaaacggcugggaggggaugguugauggaugguacggcuuucggcaccaaaauagcgagggcagagggcaggcugccgaccugaaaucuacacaggcugccaucgaucaaauuaacggaaaacuuaaucgccugaucggcaagaccaacgaaaaguuccaucagauugagaaggaauuuuccgagguggaagggcggauccaggaccucgagaaauauguggaggauacaaagaucgaccuguggagcuacaaugccgaacuucuggucgcucucgagaaccagcacaccauugaucugacggacucugaaaugaauaaacuguuugagaagacaaagaagcaacucagagaaaacgcggaggauaugggaaacggcugcuucaagaucuaucauaaaugugacaaugccugcauuggguccauccgcaacggcaccuacgaucacaauguguaccgggacgaggcucugaacaauagauuucagauuaagggaguugaacuuaaaagcggcuauaaggacuggauccuguggaucuccuucgccauuucuugcuuucuccuguguguggcccuucugggguucaucaugugggcuugccagaaaggaaacauucgcuguaauaucugcauuuga

SEQ ID NO: 206045 - RNA, 1707 nt, Artificial Sequence
  derived and/or modified CDS sequence (opt5) from hemagglutinin__InfluenzaA__ACR48873/m
auggagaagaucgugcuccuguucgccauugucagccugguuaaauccgaccagaucugcauuggcuaccacgcuaacaauucuaccgaacaaguggauacaaucauggagaagaacgugacggucacccaugcccaggacauucuugagaaaacacacaaugggaagcugugugaucucgacggagugaaaccccugauccuuagagauugcagcguugcgggcuggcugcucgggaacccuaugugugacgaguuuaucaaugugccggaaugguccuauauugucgagaaggcuaaccccgugaaugaucugugcuacccuggagacuucaacgauuaugaggaacugaagcaucuccugucucggaucaaucacuuugagaaaauucagaucauucccaagagcuccuggucuagccaugaagccucccuuggcguuagcucugccuguccuuaccaggggaaauccagcuucuuucgcaacguggucuggcugaucgagaaaaauucuaccuaucccacaauuaagagauccuacaacaauaccaaccaagaggaccuccuggugcuuuggggaauccaccacccuaaugaugcugccgaacagacaaagcuguaucagaacccgaccacguacaucagcgugggcaccucuacacucaaccagcggcuggucccccgcauugcuaccagauccaagguuaauggccaaagcgggcggauggaguucuuuuggacaauccugaaaccuaacgacgccauuaauuucgaauccaacggaaauuuuaucgcgcccgaguacgccuauaagauugugaaaaagggcgauucuaccaucaugaaaagcgaacucgaguacgggaacugcaauacgaagugucagacaccuaugggagcuaucaacuccagcaugcccuuccauaauauucacccgcugaccaucggcgagugcccuaaauaugugaagucuaaccgccuuguccuggccacagggcucagaaauagcccccagcgggaacgcagacggaagaaacgcggacuguuuggcgcuauugccggcuucaucgaagggggauggcagggcaugguggacgggugguacggauaucaucacuccaacgaacaaggcucuggguacgcggccgacaaggagagcacccagaaagcuauugauggaguuaccaauaaggugaacuccaucaucgacaaaaugaauacacaguuugaagccgucggcagagaguucaacaaccuugagcggcgcauugaaaaucugaacaagaagauggaggauggcuuccucgacguguggacguauaaugcugaacugcugguucucauggagaacgaaagaacccuggauuuucacgacucuaaugugaaaaaccuuuacgauaagguccggcugcaacucagagacaaugccaaagagcuggggaacggauguuucgaguuuuaccauaagugcgauaaugaauguauggagagcgugcgcaacggcacauaugacuacccucaguauuccgaagaggcccggcuuaaaagagaggaaaucagcggggucaagcuggagucuauuggaaucuaccagauucucuccaucuauagcaccguggcuucuucccuggcgcuggccauuaugguugcuggccucagccuguggaugugcuccaaugggucucuucagugccgcaucuguaucuga

SEQ ID NO: 206046 - RNA, 1707 nt, Artificial Sequence
  derived and/or modified CDS sequence (opt5) from hemagglutinin__InfluenzaA__ACR48874/m
auggagaagaucgugcuccuguucgccauugucagccugguuaaauccgaccagaucugcauuggcuaccacgcuaacaauucuaccgaacaaguggauacaaucauggagaagaacgugacggucacccaugcccaggacauucuugagaaaacacacaaugggaagcugugugaucucgacggagugaaaccccugauccuuagagauugcagcguugcgggcuggcugcucgggaacccuaugugugacgaauuuaucaaugugccggaaugguccuauauugucgagaaggcuaaccccgugaaugaucugugcuacccuggagacuucaacgauuaugaggaacugaagcaucuccugucucggaucaaucacuuugagaaaauucagaucauucccaagagcuccuggucuagccaugaagccucccuuggcguuagcucugccuguccuuaccaggggaaauccagcuucuuucgcaacguggucuggcugaucaagaaaaauucuaccuaucccacaauuaagagauccuacaacaauaccaaccaagaggaccuccuggugcuuuggggaauccaccacccuaaggaugcugccgagcagacaaaacuguaucagaauccgaccacguacaucagcgugggcaccucuacacucaaccagcggcuggucccccgcauugcuaccagauccaagguuaacggccaaagcgggcggauggaguucuuuuggacaauccugaaaccuaaugacgccauuaacuucgaauccaauggaaacuuuaucgcgcccgaauacgccuauaagauugugaaaaagggcgauucuaccaucaugaaaagcgagcucgaauacgggaauugcaacacgaagugucagacaccuaugggagcuaucaauuccagcaugcccuuccauaacauucacccgcugaccaucggcgagugcccuaaguaugugaaaucuaaucgccuuguccuggccacagggcucagaaacagcccccagcgggagcgcagacggaagaaacgcggacuguuuggcgcuauugccggcuucaucgaagggggauggcagggcaugguggacgggugguacggauaucaucacuccaaugagcaaggcucuggguacgcggccgacaaggaaagcacccagaaagcuauugauggaguuaccaacaaggucaauuccaucaucgacaagaugaacacacaguuugaggccgugggcagagaguucaauaaccuugaacggcgcauugagaaccugaauaaaaagauggaagauggcuuccucgacguguggacguauaacgcugagcugcugguucucauggaaaaugagagaacccuggauuuucacgacucuaacgugaaaaaucuuuacgauaagguccggcugcaacucagagacaacgccaaagaacuggggaauggauguuucgaguuuuaccauaagugcgauaacgaguguauggaaagcgugcgcaauggcacauaugacuacccucaguauuccgaggaagcccggcuuaagagagaggagaucagcggggucaaacuggaaucuauuggaaucuaccagauucucuccaucuauagcaccguggcuucuucccuggcgcuggccauuaugguugcuggccucagccuguggaugugcuccaacgggucucuucagugccgcaucuguaucuga

SEQ ID NO: 206047 - RNA, 1701 nt, Artificial Sequence; identical to SEQ ID NO: 201218
  derived and/or modified CDS sequence (opt5) from hemagglutinin__InfluenzaA__ACD47234

SEQ ID NO: 206048 - RNA, 1707 nt, Artificial Sequence
  derived and/or modified CDS sequence (opt5) from hemagglutinin__InfluenzaA__ACZ36881
auggagaagaucgugcugcuccuggccauugucagccuuguuaaauccgaccagaucugcauuggcuaccacgcuaacaauucuaccgaacaaguggauacaaucauggagaagaacgugacggucacccaugcccaggacauucuggaaaagacacacaaugggaagcucugugaucuggacggagugaaaccccuuauccugagagauugcagcguugcgggcuggcuccuggggaacccuaugugugacgaguuccugaaugugccggaaugguccuauaucgucgagaagauuaaccccgcuaaugaucucugcuacccuggaaacuuuaaugacuaugaggaacugaagcaucuucugucucggaucaaccacuucgagaaaauucagaucauucccaagagcuccuggucugaucaugaagccagcuccggcgugagcucugccuguccuuaccaggggcgcuccagcuuuuucagaaauguuguguggcucaucaaaaaggacaacgcuuaucccaccauuaaacggucuuacaauaacacaaaucaagaggaucugcuuguccuguggggaauccaccacccuaacgacgccgcugagcagacccgccucuaucagaacccgacaaccuacaucuccgugggcacgagcacccugaaucagagacuggugcccaagauugccacacggucuaaggucaacggccaauccgggcgcauggaauuuuucuggaccauccucaaaccuaaugaugcgauuaacuuugagagcaauggaaacuucaucgcccccgaaaaugcuuacaagauuguuaaaaagggcgacuccacaaucaugaaaucugagcuggaauaugggaacugcaauaccaagugucagacgccuaucggagccauuaacagcuccaugcccuuucauaauauccacccgcuuacaauuggcgagugcccuaaauacgugaaaagcaacagacuggugcucgcuaccgggcugcgcaauucuccccagggagagcggagacggcgcaagagaggccuuuucggcgccaucgcgggguuuauugaaggaggcuggcaggggauggucgacggaugguauggcuaccaucacuccaacgagcaagggagcggauaugccgcugauaaagaaucuacacagaaggccaucgacggcgugaccaauaaaguuaacagcaucauugauaagaugaacacccaguucgaggcugugggccgggaauuuaauaaccuggagcgcagaaucgagaaucucaacaaaaagauggaagacggguuccuggaugucuggacauacaaugccgagcugcucgugcugauggaaaacgagcggacgcuugacuuccacgauuccaauguuaagaaccuguaugacaaagugagacuccaacugcgcgauaaugccaaggaacuuggaaacggcuguuuugaguucuaccaucggugcgacaaugaguguauggaaucugucagaaacgggaccuacgauuauccucaguacagcgaggaagcucgccugaaacgggaggagauuuccggagugaagcucgaaagcaucggcacauaucagauucugucuaucuacuccaccgucgcgagcucucuggcccucgcuauuaugguggccgggcugucccuuuggaugugcagcaauggcucccugcagugcagaaucuguaucuga

SEQ ID NO: 206049 - RNA, 1704 nt, Artificial Sequence
  derived and/or modified CDS sequence (opt5) from hemagglutinin__InfluenzaA__EPI500771
auggagaagaucgugcugcuguucgccaccauuagccuggucaaauccgaccacaucugcauuggcuaccaugcuaacaauucuacagaacagguugauacgaucauggagaagaacgugaccgugacacacgcccaagacauucuugagaaaacccauaaugggaagcugugugaucucaacggagucaaaccccugauccuuaaggacugcagcguggcgggcuggcugcucgggaauccucugugugaugaauuuacaaacguuccggaaugguccuauaucguggagaaggcuaaucccgccaacgaccugugcuacccuggaaauuucaacgauuaugaggaacucaaacaccuccuuucuagaauuaaucauuuugagaagauccagauuauccccaaagacagcugguccgaucacgaagccucucugggcgucagcgcugccuguuccuaccaggggaacagcucuuucuuucggaaugugguuuggcucauuaagaaagacaacgcuuauccuaccaucaagaagggauacaauaacacaaaccgcgaggaucugcuuauucuguggggcauccaccaucccaaugacgaggccgaacagaccaaacucuaucaaaacccuacgaccuacaucuccauuggcacaagcacccugaaucagagacuggugccgaagaucgcgacacggucuaaaauuaaccgccaguccgggagaaucgauuucuuuuggaccauucucaagcccaaugacgccauccacuucgagagcaacggaaauuuuaucgcuccugaauacgccuauaaaauugucaagaaaggcgacucuacgaucaugcgguccgagguggaauacgggaacugcaauacacgcugucagacccccauuggagcuaucaacagcuccaugccuuuccauaauauucacccccugacaaucggcgagugcccgaaguaugugaagucuaacaaacuuguccuggccaccgggcucagaaauagcccucaacgggagcgcagacggaagcgcggacuguuuggcgcgaucgccggcuucauugaagggggauggcagggcaugguugaugggugguacggauaucaccauuccaacgagcagggcagcggguacgcugccgacaaagaaucuacccagaaggcuaucgauggagugacaaauaaagugaacuccauuaucgacaagaugaacacgcaauuugaggccgucggcagagaguucaauaaccuugaacggcgcauugagaaucugaacaagaaaauggaagauggcuuccucgacguguggaccuauaaugccgagcugcugguucucauggaaaacgagagaacacuggauuuucacgacagcaaugugaagaaccuuuacgauaaaguccggcugcagcucaaggacaaugcuaaagaacuggggaacggauguuucgaguuuuaccauaagugcaauaacgaguguauggaaucugugagaaauggcaccuaugauuacccccaguauagcgaggaagcgcgccuuaagcgggaggagaucuccgggguuaaacuggaaucuauuggaaucuaccaaauccucagcauuuauuccacaguggccagcucucugguccuggcuaucaugauggccggccucucccuguggaugugcagcaacgggucucuucagugcagaauuuguaucuga

SEQ ID NO: 206050 - RNA, 1695 nt, Artificial Sequence
  derived and/or modified CDS sequence (opt5) from hemagglutinin__InfluenzaA__ABF93441
auggagaagaucgugcugcuccuggccauugucagccuuguuaaauccgaccagaucugcauuggcuaccacgcuaacaauucuaccgaacaaguggauacaaucauggagaagaacgugacggucacccaugcccaggacauucuggaaaagacacacaaugggaagcucugugaucuggacggagugaaaccccuuauccugagagauugcagcguugcgggcuggcuccuggggaacccuaugugugacgaguuccugaaugugccggaaugguccuauaucgucgagaagauuaaccccgcuaaugaucucugcuacccuggaaacuuuaaugacuaugaggaacugaagcaucuucugucucggaucaaccacuucgagaaaauucagaucauucccaagagcuccuggucugaucaugaagccagcuccggcgugagcucugccuguccuuaccaggggcgcuccagcuuuuucagaaauguuguguggcucaucaaaaagaacaaugcuuaucccaccauuaaacggucuuacaacaauacaaaccaagaggaccugcuuguccuguggggaauccaccacccuaacgaugccgcugagcagacccgccucuaucagaauccgacaaccuacaucuccgugggcacgagcacccugaaccagagacuggugcccaagauugccacacggucuaaggucaauggccaauccgggcgcauggaauuuuucuggaccauccucaaaccuaacgacgcgauuaauuuugagagcaacggaaauuucaucgcccccgaaaacgcuuacaagauuguuaaaaagggcgauuccacaaucaugaaaucugagcuggaauaugggaauugcaacaccaagugucagacgccuaucggagccauuaauagcuccaugcccuuucauaacauccacccgcuuacaauuggcgagugcccuaaauacgugaaaagcaauagacuggugcucgcuaccgggcugcggaacucuccccagaucgagacacgcggacuuuucggcgccauugcgggcuuuaucgaagggggauggcagggcauggucgacgggugguauggauaccaucacuccaaugagcaaggcagcggguaugccgcugacaaggaaucuacccagaaagccaucgauggagugaccaacaagguuaacagcauuaucgacaaaaugaauacacaguucgaggcugugggcagagaauuuaacaaucuggagcggcgcauugagaaccucaauaagaaaauggaagauggcuuccuggacgucuggacguacaacgccgagcugcucgugcugauggaaaaugagagaacccuugauuuccacgacuccaacguuaagaaucuguaugauaaggugcggcuccaacugcgcgacaacgccaaagaacuugggaauggauguuuugaguucuaccauagaugcgauaacgaguguauggaaucuguccggaauggcacauacgacuauccucaguacagcgaggaagcuagacugaagcgcgaggagaucuccggggugaaacucgaaagcauuggaaccuaucagauccugucuauuuacuccacagucgcgagcucucuggcccucgcuaucaugguggccggccugucccuuuggaugugcagcaacgggucccugcagugccggaucuguauuuga

SEQ ID NO: 206051 - RNA, 1707 nt, Artificial Sequence
  derived and/or modified CDS sequence (opt5) from hemagglutinin__InfluenzaA__AGG12577
auggagaagaucgugcuucucuucgccauuaucagccuggucaaauccgaccacauuugcaucggcuaccaugcuaacaauucuaccgaacagguugauacaauuauggagaagaacgugacggugacccacgcccaagacauccuugaaaagacacauaaugggaagcugugugaucucaacggagucaaaccccugauccuuaaggacugcagcguggcgggcuggcugcucgggaauccuaugugugaugaguuuauugacguuccggaaugguccuauaucguggagaaggcuaaccccgccaaugaucugugcuacccuggaaacuucaaugacuaugaggaacugaaacaccuccugucuagaauuaaccauuuugagaagauccggauuauccccaaagauagcuggccugaccacgaagccucccuuggcgucucugcugccuguagcuaccagggaaauuccagcuucuuucgcaacgugguuuggcugcucaagaaagauaaugcuuaucccauuaucaagaagucuuacaacaauaccaacaaagaggaccugcuugugcugugggggauccaccauccuaacgaugaggccgaacagacaagacucuaucagaauccgaccacauacgucuccauuggcaccagcacgcugaaccaacggcuggugccccgcaucgcgaccagaucuaaggugaauggccaguccgggcggauugacuucuuuuggacaauccucaaaccuaacgacgccauuaauuucgagagcaacggaaauuuuaucgcucccgaauacgccuauaagaucgucaaaaagggcgauucuaccauuaugcgcuccgagguugaauacgggaacugcagcacaagaugucagaccccuaugggagcuaucaauuccucuaugcccuuccacaacauucauccgcugacgaucggcgagugcccuaaauaugugaaaagcaauaagcuggugcuggccacagggcuccggaacagcccccagauugagcgcagacggcgcaaaagaggacuguuuggcgcgaucgccggcuucaucgaagggggauggcaaggcauggucgacgggugguacggauaucaccacuccaaugagcagggcucuggguacgcugccgauaaggaauccacccagaaagcuauugacggagugacaaacaagguuaauagcaucauugauaaaaugaacacccaguuugaggccgugggccgggaguucaacaaucuugaacgcagaaucgagaaccugaauaagaagauggaagacggcuuccucgaugucuggaccuauaacgccgagcugcuggugcucauggaaaaugagcggacacuggacuuucaugauucuaacguuaaaaaucuuuacgacaaggugagacugcaacuccgcgauaacgcuaaagaacuggggaauggauguuucgaguuuuaccacaagugcgacaacgaguguauggaaagcguccggaauggcacguaugacuacccucaguauuccgaggaagcgagacuuaaacgcgaggagauuucuggggugaagcuggaaagcaucggaaccuaccagauucucuccaucuauagcacagucgccucuucccuggugcuggcuaucaugguugccggccucagccuguggaugugcucuaacgggucccuucaaugccggauuuguaucuga

SEQ ID NO: 206052 - RNA, 1707 nt, Artificial Sequence; identical to SEQ ID NO: 206051
  derived and/or modified CDS sequence (opt5) from hemagglutinin__InfluenzaA__AGC13463

SEQ ID NO: 206053 - RNA, 1707 nt, Artificial Sequence; identical to SEQ ID NO: 197915
  derived and/or modified CDS sequence (opt5) from hemagglutinin__InfluenzaA__ACI06178/m1

SEQ ID NO: 206054 - RNA, 1707 nt, Artificial Sequence
  derived and/or modified CDS sequence (opt5) from hemagglutinin__InfluenzaA__AHF20402
auggagaagaucgugcuccuguucgccauugucagccugguuaaauccgaccagaucugcauuggcuaccacgcuaacaauucuaccgaacaaguggauacaaucauggagaagaacgugacggucacccaugcccaggacauucuugagaaaacacacaaugggaagcugugugaucucgacggagugagaccccugauccuucgggauugcagcguugcgggcuggcugcucgggaacccuaugugugacgaguuuaucaaugugccggaaugguccuauauugucgagaaagcuaaccccgugaaugaucugugcuacccuggaguuuucaacgacuaugaggaacugaagcaucuccugucucgcaucaaucacuuugagaagauucagaucauucccaaaaacagcuggccuucccaugaagccucucuuggcgugagcgccgcuugucccuaccaggggcaauccagcuucuuuagaaaugucguguggcugaucaagaaaaacaauaccuauccuacaauuaagcggucuuacaacaauaccaaccaggaggaucuccuggugauguggggaauccaccacccgaacgacgccgucgagcagacaaaacuuuaucagaaucccaccacguacaucuccguuggcaccagcacacugaaccaacgccucaccccuagaauugcuacacggucuaaggugaagggccuguccgggcgcauggaguucuuuuggaccauccugaaacccaaugaugccauuaacuucgaaagcaauggaaacuuuaucgcgccugaauacgccuauaagauugugaaaaagggcgacucuacgaucaugagauccgagcucgaauacgggaauugcaacacaaaaugucagacccccaugggagcuaucaauagcuccaugccguuccauaacauucacccucugacaaucggcgagugccccaaguaugucaaaucuacccggcuugugcuggccaccgggcuccgcaauagcccucagagagaggaacggcgcaagaagagaggacuguuuggcgcuauugccggcuucaucgaagggggauggcagggcaugguugaugggugguacggauaucaucacuccaacgaacaaggcagcggguacgcggccgacaaagagucuacacagaaggcuauugacggagugacgaauaaagucaacuccaucaucgauaagaugaauacccaguuugaagccgugggccgggaguucaacaaccuugagcgcagaauugaaaaucugaacaaaaagauggaggacggcuuccucgauguuuggacauauaaugcugaacugcuggugcucauggagaacgaacggacccuggacuuucacgauagcaaugucaagaaccuuuacgacaaagugagacugcaacuccgcgauaaugccaaggagcuggggaacggauguuucgaguuuuaccauaaaugcgacaauaaguguauggaaucuguccggaacggcacauaugauuacccccaguauagcgaggaagccagacuuaaacgcgaggagaucuccggggugaagcuggaaucuauuggaguuuaccagauccucagcauuuauuccaccguggcuagcucucuggcgcuggccaucauggucgcuggccucucccuguggaugugcagcaaugggucucuucagugccggauuuguaucuga

SEQ ID NO: 206055 - RNA, 1707 nt, Artificial Sequence
  derived and/or modified CDS sequence (opt5) from hemagglutinin__InfluenzaA__ABQ45850
auggagaagaucgugcugcuccuggccauugucagccuuguuaaauccgaccagaucugcauuggcuaccacgcuaacaauucuaccgaacaaguggauacaaucauggagaagaacgugacggucacccaugcccaggacauucuggaaaagacacacaaugggaagcucugugaucuggacggagugaaaccccuuauccugagagauugcagcguugcgggcuggcuccuggggaacccuaugugugacgaguuccugaaugugccggaaugguccuauaucgucgagaagauuaaccccgcuaaugaucucugcuacccuggaaacuuuaaugacuaugaggaacugaagcaucuucugucucggaucaaccacuucgagaaaauucagaucauucccaagagcuccuggucugaucaugaagccagcuccggcgugagcucugccuguccuuaccaggggcgcuccagcuuuuucagaaauguuguguggcucaucaaaaagaacgacgcuuaucccaccauuaaacggucuuacaauaacacaaaucaagaggaucugcuuguccuguggggaauccaccacccuaacgacgccgcugagcagacccgccucuaucagaacccgacaaccuacaucuccgugggcacgagcacccugaaucagagacuggugcccaagauugccacacggucuaaggucaacggccaauccgggcgcauggaauuuuucuggaccauccucaaaccuaaugaugcgauuaacuuugagagcaauggaaacuucaucgcccccgaaaaugcuuacaagauuguuaaaaagggcgacuccacaaucaugaaaucugagcuggaauaugggaacugcaauaccaagugucagacgccuaucggagccauuaacagcuccaugcccuuucauaauauccacccgcuuacaauuggcgagugcccuaaauacgugaaaagcaacagacuggugcucgcuaccgggcugcgcaauucuccccagggagagcggagacggaagaaacgcggccuuuucggcgccaucgcgggguuuauugaaggaggcuggcaggggauggucgacggaugguauggcuaccaucacuccaacgagcaagggagcggauaugccgcugauaaggaaucuacacagaaagccaucgacggcgugaccaauaagguuaacagcaucauugauaaaaugaacacccaguucgaggcugugggcagagaauuuaauaaccuggagcggcgcaucgagaaucucaacaagaagauggaagacggguuccuggaugucuggacauacaaugccgagcugcucgugcugauggaaaacgagagaacgcuugacuuccacgauuccaauguuaaaaaccuguaugacaaggugcggcuccaacugagagauaaugccaaagaacuuggaaacggcuguuuugaguucuaccaucgcugcgacaaugaguguauggaaucuguccggaacgggaccuacgauuauccucaguacagcgaggaagcuagacugaagcgcgaggagauuuccggagugaaacucgaaagcaucggcacauaucagauucugucuaucuacuccaccgucgcgagcucucuggcccucgcuauuaugguggccgggcugucccuuuggaugugcagcaauggcucccugcagugccggaucuguaucuga

SEQ ID NO: 206056 - RNA, 1713 nt, Artificial Sequence
  derived and/or modified CDS sequence (opt5) from hemagglutinin__InfluenzaA__AKI82373
auggagaagaucgugccccugcucgccauuaucggccuggucaaaagcgaccagauuugcaucggguaccacgcuaacaauuccaccgaacaaguugauacaauuauggagaagaacgugacggugacccaugcccaggacauccuugaaaagacacacaauggaaaacuguguaaccucgauggcgucaaaccucugauccuuaaggacugcucuguggcgggguggcugcucggaaauccgaugugugaugaguuccugaacguuagcgaaugguccuauauuguggagaaggcuucucccgccaauggccugugcuacccuggggacuuuaacgauuaugaggaacucaaacaucugcuuaauagaaucacccaccugaagaaaauuaagaucauucccaaaagcuacugguccaaccaugaggccucuagcggagucuccgcugccuguagcuauaugggcgaaccuucuuucuuucggaaugugguuuggcucaucaagaagaacaauacauaucccccuauuaaagugaacuacaccaauacaaaccaggaggaccugcuuguccuguggggcauccaccacccgaacaaugaggcugaacagauccaaauuuaccagaaccucaucacccauauuuccguggggacgagcacccugaaucagcgccugauccccaagauugccacaagaucuaaagugaacggacaguccggccggauggaguucuuuuggaccauccucaagccuaaugauagcaucaacuucgacucuaaugggaacuuuauugcgcccgaauacgccuauaucgucaaaaagggagauuccgcuauuaugaaaagcgagcuggaauacggcaauugcaacacaaagugucaaaccccuaugggggccaucaauuccucuaugcccuuccacaacauucauccgcuuacgaucggagagugcccuaaguauguuaaaagcaaucgccuggugcucgcuacaggccugagaaacgcgccccagcgggagcgcgaaggcgggagacggcgcaagagaggacuuuuuggcgccaucgccggguucauugagggaggcuggcaggggaugguggacggaugguacggcuaucaccacuccaaugaacagggcagcggguacgcugccgauaaagagucuacccaaaaggcuaucgacggaauuacaaacaaagucaacuccaucauugacaagaugaauacccaguuugaagccgugggccgggaguucaacaaucuggagcgcagaaucgaaaaccucaauaagaaaauggaggauggguuucuggacguuuggaccuauaacgccgaacugcucgugcugauggagaaugaacggacacuugauuuccaugacagcaacgucaagaaucuguacgagaaagugcgccuccagcugagagauaacgcuaaggagcuuggaaauggcuguuucgaauuuuaccacaaaugcgacaacgaguguauggaaucuguucggaaugggacguaugauuacagccaauauuccgaggaggcgagacugucucgcgaagagauuaacggcgugaagcucgaaagcauggucaccuaccagauccuguccaucuauagcacaguggccucuucccuggcucucgccauuauggucgccggacugagccuuuggaugugcucuaauggcucccugcagugccggaucuguauuuga

SEQ ID NO: 206057 - RNA, 1713 nt, Artificial Sequence
  derived and/or modified CDS sequence (opt5) from hemagglutinin__InfluenzaA__EPI284473
auggagaagaucgugcugcuccuggccauuaucagccuugucaaauccgaccagauuugcaucggcuaccacgcuaacaauucuaccgaacaaguugauacaauuauggagaagaacgugacggugacccaugcccaggacauccuggagaaaacacacaaugggaagcucuguaaccuggauggagucaaaccccuuauccugaaggacugcagcguggcgggcuggcuccuggggaauccuaugugugaugaguuccugaacguuuccgaauggucuuauauuguggagaaggcuagcccggccaauggacucugcuaccccggcgacuuuaacgauuaugaggaacugaaacaucuucugaauagaaucacccaccucaagaaaauuaagaucauuccuaaauccuacuggucuaaccaugaggccagcuccggggucagcgcugccuguucuuauaugggagaacccuccuucuuucggaaugugguuuggcugaucaagaagaacaauacauacccucccauuaaagugaacuauaccaauacaaaccaggaggaccuucugguccucuggggcauccaccacccuaacaaugaggcugaacagauccaaauuuaccagaaccugaucacccauauuagcgugggcacgucuacccugaaucagcgccucaucccgaagauugccacaagauccaaagugaacgggcagagcggacggauggaguucuuuuggaccauccugaagcccaaugauucuaucaacuucgacuccaauggcaacuuuauugcgccugaauacgccuauaucgucaaaaagggggauagcgcuauuaugaaauccgagcuugaauacggaaauugcaacacaaagugucaaacccccaugggcgccaucaauucuagcaugccuuuccacaacauucauccccugacgaucggggagugcccgaaguauguuaaauccaaucgccucgugcuggcuacaggacuuagaaacgccccucagcgggagcgcgaaggcggcagacggcgcaagagagggcuguuuggagcgaucgccggcuucauugaagggggauggcagggcaugguggacgggugguacggauaucaccacagcaaugaacagggcucuggcuacgcugccgauaaagaguccacccaaaaggcuaucgacgggauuacaaacaaagucaacagcaucauugacaagaugaauacccaguuugaagccgugggacgggaguucaacaaucucgagcgcagaaucgaaaaccugaauaagaaaauggaggauggcuuucuggacguuuggaccuauaacgccgaacuccuggugcuuauggagaaugaacggacacuggauuuccaugacucuaacgucaagaaucucuacgagaaagugcgccugcagcuuagagauaacgcuaaggagcuggggaauggauguuucgaauuuuaccacaaaugcgacaacgaguguauggaaagcguucggaauggcacguaugauuacucccaauauucugaggaggcgagacucagccgcgaagagauuaacggggugaagcuggaauccauggucaccuaccagauccugagcaucuauucuacaguggccuccagccucgcucuggccauuauggucgccggccuuucucuguggaugugcuccaauggaagccuccagugccggaucuguauuuga

SEQ ID NO: 206058 - RNA, 1710 nt, Artificial Sequence
  derived and/or modified CDS sequence (opt5) from hemagglutinin__InfluenzaA__ACO07033
auggagaagaucgugcugcuccuggccaugauuggccuugucaaaagcgaccagaucugcauuggguaccacgcuaacaauuccaccgaacaaguugauacaaucauggagaagaacgugacggugacccaugcccaggacauucuggaaaagacacacaauggaaaacucuguaaccuggauggcgucaaaccccuuauccugaaggacugcucuguggcgggguggcuccugggaaauccuaugugugaugaguuccugaacguuagcgaaugguccuauaucguggagaaggcuucuccggccaauggccucugcuaccccggggacuuuaacgauuaugaggaacugaaacaucuucugagcagaauuaaucaccucaagaaaaucaagauuaucccuaaauccuacuggucuaaccaugaggccagcuccggagucagcgcugccuguucuuaucugggcgaacccuccuucuuucggaaugugguuuggcuuauuaagaagaacaauaccuacccucccaucaaagugaacuauacaaauaccaaccaggaggaccugcucguccuguggggcauucaccacccuaacgaugagaaggaacagauccgcaucuaccaaaauccgaacacaagcauuucuguggggaccuccacgcugaaucagagacucgugcccaaaaucgcuacccggccuaaggucaacggacagagcggccgcauggaguucuuuuggacaauucugaaacccaaugacucuaucaacuucgauuccaaugggaacuuuauugccccugaauacgcguauaagaucgccaaaaagggagacagcguuaucaugaaguccgagcuugaauacggcaauugcaacaccaaaugucagacacccaugggggcuauuaauucuagcaugccguuccauaacauccacccucugaccauuggagagugccccaaguaugugaaauccaauagacucgugcuggccacgggccuucggaacgcuccucaacgcgagggcgggagacggcgcaagagaggacuguuuggcgccaucgcgggguucauugaaggaggcuggcaggggauggucgauggaugguacggcuaucaucacagcaaugagcagggcucuggguacgccgcugacaaagaauccacacagaaggccaucgacggaaucaccaacaaggugaacagcauuaucgauaaaaugaauacacaauuugagauuguuggccgggaguucaacaaucucgaacgcagaaucgagaaccugaauaagaaaauggaagacggguuucuggauguguggaccuauaacgcugagcuccugguccuuauggaaaaugagcggacccuggacuuccacgauucuaacgugaagaaucucuacgaaaaaguucgccugcagcuuagagacaacgccaaggagcugggaaauggcuguuucgaguuuuaccauaagugcgauaacgaauguauggagagcgugcggaaugggacauaugacuacccccaguauuccgaagaggccagacucucucgcgaggaaauuagcggcgucaaaauggaguccauggugacguaccaaauccugagcauuuauucuaccgucgcuuccagccuggcgcucgccaucaugguggcuggacugucucuuuggaugugcuccaacggcagccugcagugccggaucuguauuuga

SEQ ID NO: 206059 - RNA, 1695 nt, Artificial Sequence
  derived and/or modified CDS sequence (opt5) from hemagglutinin__InfluenzaA__EPI174803
auggagaagaucgugcugcuccuggccaugauuggccuugucaaaagcgaccagaucugcauuggguaccacgcuaacaauuccaccgaacaaguugauacaaucauggagaagaacgugacggugacccaugcccaggacauucuggaaaagacacacaauggaaaacucuguaaccuggauggcgucaaaccccuuauccugaaggacugcucuguggcgggguggcuccugggaaauccuaugugugaugaguuccugaacguuagcgaaugguccuauaucguggagaaggcuucuccggccaauggccucugcuaccccggggacuuuaacgauuaugaggaacugaaacaucuucugagcagaauuaaucaccucaagaaaaucaagauuaucccuaaauccuacuggucuaaccaugaggccagcuccggagucagcgcugccuguucuuaucugggcgaacccuccuucuuucggaaugugguuuggcuuauuaagaagaacaauaccuacccucccaucaaagugaacuauacaaauaccaaccaggaggaccugcucguccuguggggcauucaccacccuaacgaugagaaggaacagauccgcaucuaccaaaauccgaacacaagcauuucuguggggaccuccacgcugaaucagagacucgugcccaaaaucgcuacccggccuaaggucaacggacagagcggccgcauggaguucuuuuggacaauucugaaacccaaugacucuaucaacuucgauuccaaugggaacuuuauugccccugaauacgcguauaagaucgccaaaaagggagacagcguuaucaugaaguccgagcuugaauacggcaauugcaacaccaaaugucagacacccaugggggcuauuaauucuagcaugccguuccauaacauccacccucugaccauuggagagugccccaaguaugugaaauccaauagacucgugcuggccacgggccuucggaacgcuccucaaacagagacccgcggccuguuuggggccaucgcgggauucauugaaggcggguggcagggaauggucgauggcugguacggguaucaucacagcaaugagcagggaucuggcuacgccgcugacaaggaauccacacagaaagccaucgacggcaucaccaacaaggugaacagcauuaucgauaagaugaauacccaauuugagauuguugggagagaguucaacaaucucgaacggcgcaucgagaaccugaauaaaaagauggaagacggauuucuggauguguggacauauaacgcugagcuccugguccuuauggaaaaugagagaacgcuggacuuccacgauucuaacgugaaaaaucucuacgaaaagguucggcugcagcuucgcgacaacgccaaagagcugggcaauggguguuucgaguuuuaccauaagugcgauaacgaauguauggagagcgugagaaauggaaccuaugacuacccccaguauuccgaagaggcccggcucucucgcgaggaaauuagcggcgucaagauggaguccauggugacauaccaaauccugagcauuuauucuaccgucgcuuccagccuggcgcucgccaucaugguggcugggcugucucuuuggaugugcuccaacggcagccugcagugcagaaucuguauuuga

SEQ ID NO: 206060 - RNA, 1704 nt, Artificial Sequence
  derived and/or modified CDS sequence (opt5) from hemagglutinin__InfluenzaA__AGZ62382
auggagaagaucgugcuccuguucgccgcuauuagccuggucaaauccgaccacaucugcauuggcuaccaugccaacaauucuaccaagcagguugauacaaucauggagaaaaacgugacggugacccacgcgcaagacauucuugaaaagacacauaaugggaaacugugugaucucaacggagucaagccccugauccuuaaggacugcagcguggcuggcuggcugcucgggaauccuaugugugaugaauuuaucaacguuccggagugguccuauauuguggaaaaagccaaucccgccaacggacugugcuacccuggcaauuucaacgacuaugaggagcugaagcaccuccugucuagaaucaaucauuuugaaaagauucggaucauucccaaggauagcugguccgaccacgaggcuucucuuggggucagcgccgcuuguccuuaccagggaaacuccagcuucuuucgcaaugugguuuggcugaucaaaaaggauaacaccuaucccacaauuaagaaaucuuacaauaacaccaaccaggaagaccuccugauccuuuggggcauccaccauccuaaugaugaggccgagcagacaagacuguaucaaaacccgaccacguacauuuccaucggcaccagcacacucaaucagcggcuggugcccaagauugcgacccgcucuaaaaucaacgggcaguccggaagaauugacuucuuuuggacaauccugaagccuaaugaugccauccacuucgaaagcaacggcaauuuuauugcucccgaguacgccuauaaaaucgucaagaaaggggacucuaccauuaugaaguccgaaguggaguacggaaacugcaauacgcggugucagacaccuaucggcgcuauuaacagcuccaugcccuuccauaauauccacccgcucaccaucggggaaugcccuaaguaugugaaaucuaacaagcugguccuugccacaggacugcgcaauagcccccaaagagagcggcgcagaaaacggggccucuuuggcgcgauugccggguucaucgagggaggcuggcaggggaugguugacggaugguacggcuaucaccauuccaacgaacaggggagcggauacgcugccgauaaggagucuacccagaaagcuauugacggcgugaccaauaaggugaacuccaucauugauaagaugaacacacaauuugaagccgucggccgcgaguucaauaaccuggaaagacggaucgagaaucuuaacaaaaagauggaggacggguuccuggauguguggacguauaaugccgaacuccugguucugauggagaacgaacgcacccucgacuuucacgauagcaaugugagaaaccuguacgacaaaguccggcuucagcugaaggauaaugcuaaagagcucggaaacggcuguuucgaauuuuaccauaagugcaauaacgaguguauggagucugugagaaaugggacauaugacuacccucaguauagcgaagaggcgcgccugcggagagaagagauuuccggaguuaaacuugagucuaucggcaucuaccaaauucugagcaucuauuccaccguggccagcucucucguccuggcuauuaugauggccgggcugucccucuggaugugcagcaacggcucucugcagugccgcaucuguauuuga

SEQ ID NO: 206061 - RNA, 1704 nt, Artificial Sequence
  derived and/or modified CDS sequence (opt5) from hemagglutinin__InfluenzaA__ABG67978/m
auggagaagaucgugcugcuccuggccauugucagccuuguuaaauccgaccagaucugcauuggcuaccacgcuaacaauucuaccgaacaaguggauacaaucauggagaagaacgugacggucacccaugcccaggacauucuggaaaagacacacaaugggaagcucugugaucuggacggagugaaaccccuuauccugagagauugcagcguugcgggcuggcuccuggggaacccuaugugugacgaguucaucaaugugccggaaugguccuauauugucgagaaggcuaaccccgccaaugaucugugcuacccuggaaacuuuaaugacuaugaggaacucaagcaucugcuuucucggaucaaccacuucgagaaaauucagaucauucccaagagcuccuggucugaucaugaagccagcuccggcgugagcucugcuuguccuuaccaggggacccccuccuuuuuccgcaauguuguguggcugaucaaaaagaacaauacauauccuaccauuaaaagaagcuacaacaauacaaaccaagaggaccuccugauccuuuggggaauccaccacucuaacgaugccgcugagcagaccaagcuguaucagaauccgacgaccuacauuuccgucggcacaagcacccucaaccagcggcuggugcccaagaucgccacacgcucuaaagugaauggccaauccgggagaauggacuuuuucuggaccauucugaagccuaacgaugcgaucaauuuugaaagcaacggaaauuucauugcccccgaguacgcuuauaaaaucgucaagaaaggcgacuccgccaucauuaagucugaaguugaguacgggaacugcaauacgaaaugucagacaccuaucggagcuauuaacagcuccaugcccuuucauaauauccacccgcucaccauuggcgaaugcccuaaguaugugaaaagcaacaaacuggugcuugccacagggcugcgcaauucuccccuccgggagagacggcgcaagagaggacuguucggcgcgaucgccggcuuuaucgaagggggauggcagggcauggucgacgggugguacggauaucaucacuccaacgaacagggcagcggguacgcugccgauaaagagucuacccaaaaggcuauugacggagugaccaauaaaguuaacagcaucauugauaagaugaacacacaguucgaagccgugggccgggaguuuaauaaccuugaacgcagaaucgagaaucugaacaagaaaauggaggacggcuuccucgaugucuggacguauaaugccgaacugcuggugcucauggagaacgaacggacccuggacuuccacgauuccaauguuaagaaccuuuacgacaaagugcgccugcagcucagagauaaugcuaaggagcuggggaacggauguuuugaguucuaccauaaaugcgacaaugaguguauggagucuguccggaacggcacauaugauuacccucaauauagcgaagaggcgagacuuaagcgcgaagagauuuccggggugaagcuggagagcaucggaaccuaccagauucucucuaucuauuccacagucgccagcucucuggcucuggccaucaugguggccggccucucccuguggaugugcagcaaugggucccuucagugccggauuuguaucuga

SEQ ID NO: 206062 - RNA, 1695 nt, Artificial Sequence
  derived and/or modified CDS sequence (opt5) from hemagglutinin__InfluenzaA__EPI827075
auggagaagaucgugcugcuguucgccaccauuagccuggucaaauccgaccacaucugcauuggcuaccaugcuaacaauucuacagaacagguugauacgaucauggagaagaacgugaccgugacacacgcccaagacauucuugaaaagacccauaaugggaagcugugugaucucaacggagucaaaccccugauccuuaaggacugcagcguggcgggcuggcugcucgggaauccucugugugaugaguuuacaaacguuccggaaugguccuauaucguggagaaggcuaaucccgccaacgaccugugcuacccuggaaauuucaacgauuaugaggaacucaaacaccuccuuucuagaauuaaucauuuugagaagauccagauuauccccaaagacagcugguccgaucacgaagccucucugggcgucagcgcugccuguuccuaccaggggaacagcucuuucuuucggaaugugguuuggcucauuaagaaagacaacgcuuauccuaccaucaagaagggauacaauaacacaaaccgcgaggaucugcuuauucuguggggcauccaccaucccaaugacgaggccgaacagaccagacucuaucaaaacccuacgaccuacaucuccauuggcacaagcacccugaaucagcggcuggugccgaaaaucgcgacacgcucuaagauuaacgggcaguccggaagaaucgauuucuuuuggaccauucucaaacccaaugacgccauccacuucgagagcaacggcaauuuuaucgcuccugaauacgccuauaagauugucaaaaagggggacucuacgaucaugcgguccgagguggaauacggaaacugcaauacacgcugucagacccccauuggcgcuaucaacagcuccaugccuuuccauaauauucacccccugacaaucggggagugcccgaaauaugugaagucuaacaaacuuguccuggccaccggacucagaaauagcccucaacgggagacccgcggccuguuuggcgcgaucgccggguucauugaaggaggcuggcaggggaugguugauggaugguacggcuaucaccauuccaacgagcaggggagcggauacgcugccgacaaagaaucuacacagaaggcuaucgauggcgugacgaauaaagugaacuccauuaucgacaagaugaacacccaauuugaggccgucggcagagaguucaauaaccuugaacggcgcauugagaaucugaacaaaaagauggaagauggguuccucgacguguggacauauaaugccgagcugcugguucucauggaaaacgagagaacccuggauuuucacgacagcaaugugaagaaccuuuacgauaaaguccggcugcagcucaaggacaaugcuaaagaacugggaaacggcuguuucgaguuuuaccauaagugcaauaacgaguguauggaaucugugcgcaaugggacauaugauuacccccaguauagcgaggaagcgagacuuaaacgggaggagaucuccggaguuaagcuggaaucuauuggcaucuaccaaauccucagcauuuauuccaccguggccagcucucugguccuggcuaucaugauggccgggcucucccuguggaugugcagcaacggcucucuucagugcagaauuuguaucuga

SEQ ID NO: 206063 - RNA, 1707 nt, Artificial Sequence
  derived and/or modified CDS sequence (opt5) from hemagglutinin__InfluenzaA__ABP96850
auggagaagaucgugcugcuccuggccauugucagccuuguuaaauccgaccagaucugcauuggcuaccacgcuaacaauucuaccgaacaaguggauacaaucauggagaagaacgugacggucacccaugcccaggacauucuggaaaagacacacaaugggaaacucugugaucuggacggagugaaaccccuuauccugagagauugcagcguugcgggcuggcuccuggggaacccuaugugugacgaguuccugaaugugccggaaugguccuauaucgucgagaagauuaaccccgcuaaugaucucugcuacccuggagacuuuaacgauuaugaggaacugaagcaucuucugucucggaucaaucacuucgagaaaauucagaucauucccaagagcuccuggucugacuacgaagccagcuccggcgugagcucugccuguccuuaucaggggcgcuccagcuuuuucagaaacguuguguggcucaucaaaaagaauaacgcuuaccccaccauuaaacggucuuauaauaacacaaaucaagaggaucugcuuguccuguggggaauccaucacccuaacgacgccgcugagcagauccgccucuaccagaacccgaccacauacauuuccgugggcaccagcacgcugaaucagagacuggugcccaagaucgccacccggucuaaggucaacggccaauccgggcgcauggaauuuuucuggacaauucucaaaagcaaugaugcgaucaacuuugaguccaauggaaacuucauugccccugaauaugcuuacaagaucguuaaaaagggcgacucuaccaucaugaaaagcgagcuggaauaugggaauugcaacacaaagugucagacccccauuggagccaucaauuccagcaugccuuuucacaacauucauccccuuacgaucggcgagugcccgaaauacgugaagucuaauagacuggugcucgcuacagggcugcggaacuccccucagggagagcgcagacggcgcaagagaggccuuuucggcgccauugcgggguuuaucgaaggaggcuggcaggggauggucgacggaugguauggcuaccaccauagcaaugagcaagggucuggauaugccgcugauaaagaaagcacccagaaggccaucgacggcgugacaaacaaaguuaauuccauuaucaacaagaugaacacccaguucgaggcugugggccgggaauuuaauaaccuggagcgcagaauugagaaucucaacaaaaagauggaagauggguuccuggacgucuggaccuacaaugccgagcugcucgugcugauggaaaacgagcggacacuugauuuccacgacucuaauguuaagaaccuguacgauaaagugagacuccaacugcgcgacaaugccaaggaacuuggaaacggcuguuuugaguucuaucaccggugcgauaaugaguguauggaaagcgucagaaacgggacguacgacuauccccaguacuccgaggaagcucgccugaaacgggaggagaucagcggagugaagcucgaaucuauuggcaucuaucagauucuguccaucuacagcaccgucgcgucuucccuggcccucgcuaucaugguggccgggcuguuucuuuggaugugcagcaauggcucccugcagugcagaauuuguaucuga

SEQ ID NO: 206064 - RNA, 1692 nt, Artificial Sequence
  derived and/or modified CDS sequence (opt5) from hemagglutinin__InfluenzaA__EPI827077
auggagaagaucgugcugcuccuggccauugucagcaucguuaaauccgaccagauuugcaucggcuaccacgcuaacaauucuaccgaacaaguggauacaauuauggagaagaacgugacggucacccaugcccaggacauccuugaaaagacacacaaugggaagcuguguaaccucgauggagugaaaccccugauccuuagagacugcagcguugcgggcuggcugcucgggaauccuaugugugaugaguuccugaacgugccggaaugguccuauauugucgagaagaucaaucccgcuaacgaccugugcuacccuggaaauuuuaacgauuaugaggaacucaagcaucugcuuucucggauuaaucacuucgagaaaauccagauuauccccaaggacagcugguccgaucaugaagccucuggcgugagcuccgccuguccuuaccaggggcgcagcuccuuuuucagaaacguuguguggcugaccaaaaagaaugacgcuuaucccacaauuaaaaagucuuacaacaauaccaaccaagaggaucuccugguccuuuggggaauccaccacccuaacgacgccgcugagcagacacggcuguaucagaauccgaccacguacaucagcgugggcaccucuacacucaaccagcgccuggugcccaagauugccaccagauccaaagucaauggccaaagcgggcggauggaauuuuucuggacaauccugaagucuaacgaugcgauuaauuuugaguccaacggaaauuucaucgccccugaaaacgcuuacaaaauuguuaagaaaggcgacagcaccaucaugaaguccgagcucgaauauucuaauugcaacacgaaaugucagacacccaucggggccauuaauagcuccaugccuuuucauaacauccacccccugaccauuggagagugcccgaaguacgugaaaagcaaucgccuugugcuggcuacaggccucagaaacucuccucagcgggagacccgcgggcuguucggagccaucgcgggcuuuauugaaggcggguggcagggaauggucgacggcugguauggguaccaucacuccaaugagcaaggaagcggcuaugccgcugauaaagaaucuacccagagagccaucgacggggugacaaacaagguuaacagcaucauugauaaaaugaauacgcaguucgaggcugugggacgggaauuuaacaaucuugagcgcagaaucgagaaccugaauaagaaaauggaagacggcuuccucgaugucuggaccuacaacgccgagcugcuggugcucauggaaaaugagcggacacuggacuuccacgauuccaacguuaagaaucuuuaugacaaggugcgccugcaacucagagauaacgccaaagaacugggcaauggguguuuugaguucuaccaucggugcgacaacgaguguauggaaucugucagaaauggaaccuacgauuauccccaguacagcgaggaagcucgccuuaagcgggaggagauuuccggcgugaaacuggaaagcaucgggacauaucagauucucucuaucuacuccaccgucgcgagcucucuggcccuggcuauuaugguggccggacucucccuguggaugugcagcaacggcucccuucagugcagaaucuguaucuga

SEQ ID NO: 206065 - RNA, 1704 nt, Artificial Sequence
  derived and/or modified CDS sequence (opt5) from hemagglutinin__InfluenzaA__EPI594523
auggagaagaucauucugcuccuggccaucauuggccuugugaaaagcgaccagaucugcgucggguaccacgcuaacaauuccaccgaaagaguugauacaauuauggagaagaacgugacggugacccaugcccaagacauccuggagaaaacacacaauggaaagcucuguaaccugaauggcgucaaaccccuuauccuggaagauugcucuguggcgggguggcuccugggaaacccuaugugugacaaguuccugaauguuagcgaaugguccuauauuguggagaaggcuggcccggccaacgggcucugcuaccccggagauuuuaaugacuaugaggaacugaaacaucuucugucucggaucaaccacuucgagaagauugaaaucauuccuaaaaaucauuggagcaaccacaauaccuccggcgucucuagcgccuguuccuaccucgagaaccccagcuuuuuccgcaaugugguuuggcugacaaagaaaaacaacaccuauccuacaaucaaggugaauuacaccaacgcuaaucagaaggaucuucugguccucuggggcauucaccaucccaacaaugaggccgaacagaaaaugaucuaucagaacucuaauacguacguguccguggggaccagcacacugaaccaaagacuggucccuaagaucgcuacccggucuaaaguuaauggacaguccggccgcauugacuuuuucuggacaauccucaagccgaacgauaccauuaauuuugacagcaacgggaauuucaucgcccccaaauacgcguauaagauugugaaaaagggagauucugccaucaugaaguccgagcugaaauacgacaacugcaauacgaagugucagacaccuaucggcgcuauuaacagcuccaugcccuuucacaacauccauccucuuaccauuggggaaugccccaaauaugugaagucuaauagacugguccucgccacaggacugcggaacgcuccgcagaucgagggccgcagacggaaacgcggccuuuucggggccauugcgggauuuaucgaaggcggguggcaaggaaugguggauggcugguacggguaucaccacagcaaugagcagggauccggcuacgccgcugacaaggagagcacccagaaggccguugacggcaucaccaacaaaauuaauucuaucauugauaagaugaacaaucaguucgaagcuguggggagagaguuuaacaaucuggaacggcgcaucgagaaccucaauaaaaagauggaagacggauuccuggaugucuggacauauaacgccgagcugcucgugcugauggagaaugaaagaacgcuugacuuccaugauuccaacguuaaaaaucuguacgagaaggugcggcuccaacugcgcgacaacgccaaggaacuuggcaacggguguuuugaguucuaccacaaaugcgauaaugaauguauggagagcgucaagaacggaaccuaugacuacccucaguauucugaggaagcuagacugaaucgggaggaaauuagcggcgugaaacucgaguccacagucaccuaccagauccugucuauuuauagcacaguggcguccagccugguucucgccaucaugguggcugggcugucucuuuggaugugcuccaacggcagccugcaaugcagaaucuguauuuga

SEQ ID NO: 206066 - RNA, 1707 nt, Artificial Sequence
  derived and/or modified CDS sequence (opt5) from hemagglutinin__InfluenzaA__AAD37782
auggagagaaucgugcugcuccuggccauugucagccuuguuaaguccgaccagaucugcauuggcuaccacgcuaacaauucuaccgaacaaguggauacaaucauggagaaaaacgugacggucacccaugcccaggacauucuggaaaagacacacaaugggaaacucugugaucugaacggagugaagccccuuauccugcgggacugcagcguugcgggcuggcuccuggggaauccuaugugugaugaguucaucaacgugccggaaugguccuauauugucgagaaggcuucucccgccaaugaccugugcuacccuggagauuuuaacgacuaugaggaacucaaacaucugcuuagccgcaccaaucacuucgagaagauccagauuauucccccuuccucuuggagcaaccaugaugccuccagcggcgugucuuccgcuugucccuaccacgggagaagcuccuuuuuccggaauguuguguggcugauuaaaaagaacucugccuauccuacaaucaaacgcagcuacaauaacaccaaucaggaagaccuccugguccuuuggggaauccaccauccgaacgaugcugccgagcaaacaaagcuguaucagaaccccaccacguacaucucugugggcaccuccacacucaaucagagacuggugccugagaucgcgacccggcccaaagucaacggccagagcgggcgcauggaauuuuucuggacaauucugaagccuaaugacgccaucaacuuugaguccaauggaaacuucauugcucccgaauacgccuauaagaucguuaaaaagggcgauucugcuauuaugaaaagcgagcucgaauacgggaauugcaacaccaagugucaaacgccgaugggagccaucaauuccagcaugccuuuucacaacauccauccccugacaauuggcgagugcccuaaauaugugaagucuaauagacuugugcuggcgaccgggcuccggaacacaccccagcgcgagagacggcgcaaaaagagaggacuguucggcgccaucgcuggcuuuauugaagggggauggcagggcauggucaaugggugguacggauaucaccacuccaacgagcagggcagcggguacgccgcugacaaggaaucuacccaaaaagccaucgacggagugaccaauaagguuaacagcauuaucgauaaaaugaacacacaguucgaggccgugggccgggaauuuaauaaccuugagcgcagaaucgagaaucugaacaagcagauggaagacggcuuccucgaugucuggacguauaaugcugagcugcuggugcucauggaaaacgagcggacccuggacuuccaugauuccaauguuaaacaccuuuacgacaaggugagacugcaacuccgcgauaacgcgaaggaacuggggaauggauguuuugaguucuaccauaaaugcgacaacgaguguauggaaucugucaagaauggcacauaugauuacccccaguauagcgaggaagcccggcuuaacagagaggagauuuccggggugaaacuggaaagcaugggaaccuaccagauccucucuauuuauuccacagucgcuagcucucuggcccuggccaucaugguggcuggccucucccuguggaugugcagcaaugggucccuucagugccgcauuuguaucuga

SEQ ID NO: 206067 - RNA, 1707 nt, Artificial Sequence
  derived and/or modified CDS sequence (opt5) from hemagglutinin__InfluenzaA__AAD51927
auggagaagaucgugcugcuccuggccauugucagccuuguuaaauccgaccagaucugcauuggcuaccacgcuaacaauucuaccgaacaaguggauacaaucauggagaagaacgugacggucacccaugcccaggacauucuggaaaagacacacaaugggaaacucugugaucugaacggagugaaaccccuuauccugagagacugcagcguugcgggcuggcuccuggggaauccuaugugugaugaguucaucaacgugccggaaugguccuauauugucgagaaggcuucucccgccaaugaccugugcuacccuggagauuuuaacgacuaugaggaacucaagcaucugcuuagccggaccaaucacuucgagaaaauccagauuauccccaaguccucuuggagcaaccaugaugccuccagcggcgugucuuccgcuuguccuuaccacgggcgcagcuccuuuuucagaaauguuguguggcugauuaaaaagaacucugccuaucccacaaucaaacggagcuacaauaacaccaaucaggaagaccuccugguccuuuggggcauucaccauccuaacgaugcugccgagcaaacaaagcuguaucagaacccgaccacguacaucucugugggaaccuccacacucaaucagcgccuggugcccgagaucgcgaccagaccuaaggucaacggccagagcgggcggauggaauuuuucuggacaauucugaaacccaaugacgccaucaacuuugaguccaauggaaacuucauugcuccugaauacgccuauaagaucguuaaaaagggcgauucugcuauuaugaaaagcgagcucgaauacgggaauugcaacaccaagugucaaacgcccaugggagccaucaauuccagcaugccguuucacaacauccauccucugacaauuggcgagugccccaaauaugugaagucuaaucgccuugugcuggcgaccgggcucagaaacacaccucagcgggagcgcagacggaagaaacgcggacuguucggcgccaucgcuggcuuuauugaagggggauggcagggcauggucgacgggugguacggauaucaccacuccaaugagcagggcagcggguacgccgcugacaaggaaucuacccaaaaagccaucgauggagugaccaacaagguuaauagcauuaucgacaaaaugaacacacaguucgaggccgugggcagagaauuuaacaaucuugagcggcgcaucgagaaccugaauaagcagauggaagauggcuuccucgacgucuggacguauaacgcugagcugcuggugcucauggaaaaugagagaacccuggauuuccaugacuccaacguuaagaaucuuuacgauaaagugcggcugcaacucagagacaacgcgaaggaacuggggaauggauguuuugaguucuaccacaaaugcgauaacgaguguauggaaucugucaagaauggcacauaugacuacccccaguauagcgaggaagcccgccuuaaccgggaggagauuuccggggugaaacuggaaagcaugggaaccuaccagauccucucuauuuauuccacagucgcuagcucucuggcccuggccaucaugguggcuggccucucccuguggaugugcagcaaugggucccuucagugcagaauuuguaucuga

SEQ ID NO: 206068 - RNA, 1704 nt, Artificial Sequence; identical to SEQ ID NO: 199789
  derived and/or modified CDS sequence (opt5) from hemagglutinin__InfluenzaA__AEO89181

SEQ ID NO: 206069 - RNA, 1707 nt, Artificial Sequence; identical to SEQ ID NO: 201243
  derived and/or modified CDS sequence (opt5) from hemagglutinin__InfluenzaA__AFM78567

SEQ ID NO: 206070 - RNA, 1707 nt, Artificial Sequence
  derived and/or modified CDS sequence (opt5) from hemagglutinin__InfluenzaA__ACR48872
auggagaagaucgugcugcuccuggccauugucagccuuguuaaauccgaccagaucugcauuggcuaccacgcuaacaauucuaccgaacaaguggauacaaucauggagaagaacgugacggucacccaugcccaggacauucuggaaaagacacacaaugggaaacucugugaucuggacggagugaaaccccuuauccugagagauugcagcguugcgggcuggcuccuggggaacccuaugugugacgaguucaucaaugugccggaaugguccuauauugucgagaaggcuaaccccaccaaugaucugugcuacccuggaucuuuuaacgacuaugaggaacucaagcaucugcuuagccggaucaaucacuucgagaaaauucagaucauucccaaguccucuuggagcgaucaugaagccuccagcggcgugucuuccgccuguccuuaccuggggagccccuccuuuuuccgcaacguuguguggcucaucaaaaagaacucuacauauccuaccauuaaaaagagcuacaauaauacaaaccaggaggaccugcuuguccuguggggaauccaccacccgaaugaugcugccgagcaaaccaugcucuaucagaaccccacgaccuacaucucuauuggcacauccacccugaaccagagacuggugccuaagaucgcuacacggagcaaagugaauggccaguccgggcgcauggaauuuuucuggaccauucucaagcccaacgacgccaucaauuuugagucuaacggaaauuucauugcgccugaauacgccuauaaaaucgucaagaaaggcgauagcgcuaucaugaaguccgagcuggaauacgggaacugcaauacgaaaugucaaacacccaugggagccauuaacagcucuaugccguuucauaauauccacccucuuaccauuggcgagugccccaaguauguuaaguccaacagacuggugcucgcuacagggcugcggaauagcccucagcgcgagucuagacggaaaaagcgcggacuuuucggcgccaucgcgggcuuuauugaagggggauggcagggcaugguggacgggugguacggauaucaucacagcaacgagcagggcuccggguacgccgcugacaaagaaucuacccaaaaggccaucgauggagucaccaauaaagugaacagcaucauugacaagaugaauacacaguucgaggcuguuggcagagaauuuaacaaccuggagcggcgcaucgagaaucucaacaagaaaauggaagauggcuuccuggacguguggacguauaaugccgagcugcucguccugauggaaaacgagagaacccuugauuuccacgacuccaaugugaagaaccuguacgauaaaguucggcuccagcugcgcgacaaugccaaggaacuugggaacggauguuuugaguucuaccauaaaugcgauaaugaguguauggaaagcauuagaaacggcacauauaauuacccccaauauucugaggaagcucggcugaagagagaggagaucuccggggugaagcucgaaagcauuggaaccuaccagauccugucuauuuauuccacagucgcgagcucccuggcccucgcuaucaugauggccggccugucucuuuggaugugcagcaacgggucccugcagugccgcaucuguauuuga

SEQ ID NO: 206071 - RNA, 1707 nt, Artificial Sequence; identical to SEQ ID NO: 201243
  derived and/or modified CDS sequence (opt5) from hemagglutinin__InfluenzaA__ABW06108

SEQ ID NO: 206072 - RNA, 1707 nt, Artificial Sequence
  derived and/or modified CDS sequence (opt5) from hemagglutinin__InfluenzaA__EPI341633
auggagaagaucacccugcuccugagcauugugucccuugucaaaucugaccagaucugcauuggcuaccacgccaacaauagcacagaacaaguugauacgaucauggagaagaacgugaccgugacacaugcucaggacauucuggaaaagacccacaaugggaaacucugugaucuggacggagucaaaccccuuauccugaaggauugcuccguggccggcuggcuccuggggaacccuaugugugacgaguucaucaauguuccggaauggucuuauauuguggagaaggcgaaccccacaaaugaucugugcuacccuggcagcuuuaacgacuaugaggaacucaaacaucugcuuuccagaaucaaucacuucgagaagauucagaucauucccaaaucuagcugguccgaucaugaagcuagcucuggagucuccagcgccuguccuuaccuggggucucccuccuuuuuccggaacgugguuuggcucaucaagaaaaauagcaccuauccuacaauuaagaagaccuacaacaauacgaaccaggaggaccugcuuauccuguggggaauccaccacccgaauaacggcgccgagcaaaccaugcucuaucagaaccccacaaccuacauuucuaucggcacauccacccugaaucagcgccuggugccuaaaauugcuacgagaagcaaggucaacgggcaguccggacggauggaauuuuucuggacaauccucaaacccaaugaugccauuaacuuugagucuaauggcaacuucaucgcuccugaauacgccuauaagaucgugaaaaagggggacagcgcgauuaugaaauccgagcuggaauacggaaauugcaacaccaagugucaaacacccaugggcgccaucaauagcucuaugccguuucauaacauucacccuaucaccauuggggagugccccaaguaugugaaauccaaucgccuuguccuggcuaccggacucagaaacagcccucagcgggagucucgcagaaagaaacggggccuguucggcgccaucgcuggguuuaucgaaggaggcuggcaggggaugguugauggaugguacggcuaucaucacagcaaugagcagggguccggauacgccgcggacaaggaaucuacacaaaaagccauugacggcgugacgaacaaggugaauagcaucauugauaagaugaacacccaguucgaggcugucggccgcgaauuuuccaaccuugagagacggaucgagaaucugaacaaaaagauggaagacggguuccucgauguguggacauauaaugccgagcugcugguucucauggaaaacgagcgcacccuggacuuccacgauagcaaugugaaaaaccuuuacgacaaggucagacugcagcuccgggauaaugcuaaagaacugggaaacggcuguuuugaguucuaccauaagugcgacaaugaguguauggaaucuauucgcaacgggacauauaauuacccccaauauuccgaggaagccagacuuaagcgggaggagaucagcggagugaaacuggaaucuauuggcaccuaccagauccucuccaucuauagcacgguugccuccucucuggcucuggcgauuaugaucgccgggcucagccuguggaugugcuccaacggcucucuucagugcagaauuuguaucuga

SEQ ID NO: 206073 - RNA, 1707 nt, Artificial Sequence
  derived and/or modified CDS sequence (opt5) from hemagglutinin__InfluenzaA__ABD95991
auggagaagaucaugcugcuccuggccauugugagccuugucaaauccgaccagaucugcauuggcuaccacgcuaacaauucuaccgaacaaguugauacaaucauggagaagaacgugacggugacccaugcccaggacauucuggaaaagacacacaaugggaaacucugugaucuggacggagucaaaccccuuauccugagagauugcagcguggcgggcuggcuccuggggaacccuaugugugacgaguuccugaauguuccggaaugguccuauaucguggagaagauuaaccccgcuaaugaucucugcuacccuggaaacuuuaaugacuaugaggaacugaagcaucuucugucucggaucaaccacuucgagaaaauucagaucauucccaagagcuccuggucugaucaugaagccagcuccggcgucagcucugccuguccuuaccaggggcgcuccagcuuuuucagaaaugugguuuggcucaucaaaaaggacaacgcuuaucccaccauuaaacggucuuacaauaacacaaaucaagaggaucugcuugugcuguggggaauccaccacccuaacgacgccgcugagcagacccgccucuaucagaacccgacaaccuacaucuccgucggcacgagcacccugaaucagagacuggugcccaagauugccacacggucuaaggugaacggccaauccgggcgcauggaauuuuucuggaccauccucaaaccuaaugaugcgauuaacuuugagagcaauggaaacuucaucgcccccgaaaaugcuuacaagauugucaaaaagggcgacuccacaaucaugaaaucugagcuggaauaugggaacugcaauaccaagugucagacgccuaucggagccauuaacagcuccaugcccuuucauaauauccacccgcuuacaauuggcgagugcccuaaauacguuaagagcaacagacuggugcucgcuaccgggcugcgcaauucuccccagggagagcggagacggaagaaacgcggccuuuucggcgccaucgcgggguuuauugaaggaggcuggcaggggaugguggacggaugguauggcuaccaucacuccaacgagcaagggagcggauaugccgcugauaaggaaucuacacagaaagccaucgacggcgucaccaauaaggugaacagcaucauugauaaaaugaacacccaguucgaggcuguuggcagagaauuuaauaaccuggagcggcgcaucgagaaucucaacaagaagauggaagacggguuccuggauguguggacauacaaugccgagcugcucguccugauggaaaacgagagaacgcuugacuuccacgauuccaaugugaaaaaccuguaugacaagguucggcuccaacugagagauaaugccaaagaacuuggaaacggcuguuuugaguucuaccaucgcugcgacaaugaguguauggaaucugugcggaacgggaccuacgauuauccucaguacagcgaggaagcuagacugaagcgcgaggagauuuccggagucaaacucgaaagcaucggcacauaucagauucugucuaucuacuccaccguggcgagcucucuggcccucgcuauuauggucgccgggcugucccuuuggaugugcagcaauggcucccugcagugccggaucuguaucuga

SEQ ID NO: 206074 - RNA, 1707 nt, Artificial Sequence
  derived and/or modified CDS sequence (opt5) from hemagglutinin__InfluenzaA__AGN69453
auggagaagaucgugcugcuccuggccauugucagccuuguuaaauccgaccagaucugcauuggcuaccacgcuaacaauucuaccgaacaaguggauacaaucauggagaagaacgugacggucacccaugcccaggacauucuggaaaagacacacaaugggaagcucugugaucuggacggagugaaaccccuuauccugagagauugcagcguugcgggcuggcuccuggggaacccuaugugugacgaguuccugaaugugccggaaugguccuauaucgucgagaagauuaaccccgcuaaugaucucugcuacccuggaaacuuuaaugacuaugaggaacugaagcaucuucugucucggaucaaccacuucgagaaaauucagaucauucccaagagcuccuggucugaucaugaagccagcgccggcguguccagcgcuuguccuuaccaggggaugucuuccuuuuuccgcaauguuguguggcucaucaaaaaggacaacgccuaucccaccauuaaaagaagcuacaauaacacaaaucaagaggaucugcuuguccuguggggaauccaccacccuaacgacgcugccgagcagaccaagcucuaucagaacucuacaaccuacaucuccgugggcacgagcacccugaaucagcggcuggugccgaagauugcgacacgcucuaaagucaacggccaauccgggagaaucgaauuuuucuggaccauucucaagcccaaugauacaaucaacuuugagagcaauggaaacuucauugccccugaaaaugcuuacaaaaucguuaagaaaggcgacuccaccaucaugaagucugagcuggaauaugggaacugcaauacgaaaugucagacacccauuggagccaucaacagcuccaugccuuuucauaauauucacccccuuaccaucggcgagugcccgaaguacgugaaaagcucucggcuggugcucgcuacagggcugcgcaacuccccucagggagagagacggcgcaaaaagagaggccuuuucggcgccauugcgggguuuaucgaaggaggcuggcaggggauggucgacggaugguauggcuaccaucacagcaaugagcaagggucuggauaugccgcugauaaagaaagcacccagaaggccaucgacggcgugaccaacaaaguuaauuccauuaucgauaagaugaacacacaguucgaggcugugggccgggaauuuaacaaucuggagcgcagaauugagaaccucaauaagaaaauggaagacggguuccuggaugucuggacguacaacgccgagcugcucgugcugauggaaaaugagcggacccuugacuuccacgauucuaacguuaagaaucuguaugacaaagugcgccuccaacugagagauaacgccaaggaacuuggaaauggcuguuuugaguucuaccaucggugcgacaacgaguguauggaaagcgucagaaaugggacauacgauuauccccaguacuccgaggaagcucgccugaaacgggaggagaucagcggagugaagcucgaaucuauuggcaccuaucagauccuguccauuuacagcacagucgcgucuucccuggcccucgcuaucaugguggccgggcugagccuuuggaugugcuccaacggcucucugcagugcagaaucuguauuuga

SEQ ID NO: 206075 - RNA, 1707 nt, Artificial Sequence
  derived and/or modified CDS sequence (opt5) from hemagglutinin__InfluenzaA__AGN69452
auggagaagaucgugcugcuccuggccauugucagccuuguuaaauccgaccagaucugcauuggcuaccacgcuaacaauucuaccgaacaaguggauacaaucauggagaagaacgugacggucacccaugcccaggacauucuggaaaagacacacaaugggaagcucugugaucuggacggagugaaaccccuuauccugagagauugcagcguugcgggcuggcuccuggggaacccuaugugugacgaguuccugaaugugccggaaugguccuauaucgucgagaagauuaaccccgcuaaugaucucugcuacccuggaaacuuuaaugacuaugaggaacugaagcaucuucugucucggaucaaccacuucgagaaaauucagaucauucccaagagcuccuggucugaucaugaagccagcgccggcguguccagcgcuuguccuuaccaggggagaucuuccuuuuuccgcaauguuguguggcucaucaaaaaggacaacgccuaucccaccauuaaacggagcuacaauaacacaaaucaagaggaucugcuuguccuguggggaauccaccacccuaacgacgcugccgagcagacccgccucuaucagaacucuacaaccuacaucuccgugggcacgagcacccugaaucagagacuggugccgaagauugcgacacggucuaaggucaacggccaauccgggcgcaucgaauuuuucuggaccauucucaaacccaaugauacaaucaacuuugagagcaauggaaacuucauugccccugaaaaugcuuacaagaucguuaaaaagggcgacuccaccaucaugaaaucugagcuggaauaugggaacugcaauacgaagugucagacacccauuggagccaucaacagcuccaugccuuuucauaauauucacccccuuaccaucggcgagugcccgaaauacgugaaaagcucuagacuggugcucgcuacagggcugcggaacuccccucagggagagcgcagacggaagaaacgcggccuuuucggcgccauugcgggguuuaucgaaggaggcuggcaggggauggucgacggaugguauggcuaccaucacagcaaugagcaagggucuggauaugccgcugauaaggaaagcacccagaaagccaucgacggcgugaccaacaagguuaauuccauuaucgauaaaaugaacacacaguucgaggcugugggcagagaauuuaacaaucuggagcggcgcauugagaaccucaauaagaagauggaagacggguuccuggaugucuggacguacaacgccgagcugcucgugcugauggaaaaugagagaacccuugacuuccacgauucuaacguuaaaaaucuguaugacaaggugcggcuccaacugagagauaacgccaaagaacuuggaaauggcuguuuugaguucuaccaucgcugcgacaacgaguguauggaaagcguccggaaugggacauacgauuauccccaguacuccgaggaagcuagacugaagcgcgaggagaucagcggagugaaacucgaaucuauuggcaccuaucagauccuguccauuuacagcacagucgcgucuucccuggcccucgcuaucaugguggccgggcugagccuuuggaugugcuccaacggcucucugcagugccggaucuguauuuga

SEQ ID NO: 206076 - RNA, 1707 nt, Artificial Sequence
  derived and/or modified CDS sequence (opt5) from hemagglutinin__InfluenzaA__ABD73284
auggagaagaucgugcugcuccuggccauugucagccuuguuaaauccgaccagaucugcauuggcuaccacgcuaacaauucuaccgaacaaguggauacaaucauggagaagaacgugacggucacccaugcccaggacauucuggaaaagacacacaaugggaaacucugugaucuggacggagugaaaccccuuauccugagagauugcagcguugcgggcuggcuccuggggaacccuaugugugacgaguuccugaaugugccggaaugguccuauaucgucgagaagauuaaccccgcuaaugaucucugcuacccuggaaacuuuaaugacuaugaggaacugaagcaucuucugucucggaucaaccacuucgagaaaauucagaucauucccaagagcuccuggucugaucaugaagccagcgccggcguguccagcgcuuguccuuaccaggggagaucuuccuuuuuccgcaauguuguguggcucaucaaaaaggacaacgccuaucccaccauuaaacggagcuacaauaacacaaaucaagaggaucugcuuguccuguggggaauccaccacccuaacgacgcugccgagcagacccgccucuaucagaacccgacaaccuacaucucugugggcacguccacccugaaucagagacuggugcccaagauugcgacacggagcaaggucaacggccaaucugggcgcauggaauuuuucuggaccauccucaaaccuaaugaugccauuaacuuugaguccaauggaaacuucaucgcucccgaaaaugccuacaagauuguuaaaaagggcgacagcacaaucaugaaauccgagcuggaauaugggaacugcaauaccaagugucagacgccuaucggagcuauuaacucuagcaugcccuuucauaauauccacccgcuuacaauuggcgagugcccuaaauacgugaaguccagcagacuggugcucgccaccgggcugcggaacucuccccagggagagcgcagacggaagaaacgcggccuuuucggcgcgaucgccggguuuauugaaggaggcuggcaggggauggucgacggaugguauggcuaccaucacuccaaugagcaagggagcggauaugcugccgauaaggaaucuacacagaaagcuaucgacggcgugaccaacaagguuaauagcaucauugauaaaaugaacacccaguucgaggccgugggcagagaauuuaacaaucuggagcggcgcaucgagaaccucaauaagaagauggaagacggguuccuggaugucuggacauacaacgccgagcugcucgugcugauggaaaaugagagaacgcuugacuuccacgauuccaacguuaaaaaucuguaugacaaggugcggcuccaacugagagauaacgcuaaagaacuuggaaauggcuguuuugaguucuaccaucgcugcgacaacgaguguauggaaucuguccggaaugggaccuacgauuauccucaguacagcgaggaagcgagacugaagcgcgaggagauuuccggagugaaacucgaaagcaucggcacauaucagauucugucuaucuacuccaccgucgccagcucucuggcucucgccauuaugguggccgggcugucccuuuggaugugcagcaacggcucccugcagugccggaucuguaucuga

SEQ ID NO: 206077 - RNA, 1695 nt, Artificial Sequence
  derived and/or modified CDS sequence (opt5) from hemagglutinin__InfluenzaA__ABF93440
auggagaagaucgugcugcuccuggccauugucagccuuguuaaauccgaccagaucugcauuggcuaccacgcuaacaauucuaccgaacaaguggauacaaucauggagaagaacgugacggucacccaugcccaggacauucuggaaaagacacacaaugggaagcucugugaucuggacggagugaaaccccuuauccugagagauugcagcguugcgggcuggcuccuggggaacccuaugugugacgaguuccugaaugugccggaaugguccuauaucgucgagaagauuaaccccgcuaaugaucucugcuacccuggaaacuuuaaugacuaugaggaacugaagcaucuucugucucggaucaaccacuucgagaaaauucagaucauucccaagagcuccuggucugaucaugaagccagcuccggcgugagcucugccuguccuuaccaggggcgcuccagcuuuuucagaaauguuguguggcucaucaaaaaggacaacgcuuaucccaccauuaaacggucuuacaauaacacaaaucaagaggaucugcuuguccuguggggaauccaccacccuaacgacgccgcugagcagacccgccucuaucagaacccgacaaccuacaucuccgugggcacgagcacccugaaucagagacuggugcccaagauugccacacggucuaaggucaacggccaauccgggcgcauggaauuuuucuggaccauccucaaaccuaaugaugcgauuaacuuugagagcaauggaaacuucaucgcccccgaaaaugcuuacaagauuguuaaaaagggcgacuccacaaucaugaaaucugagcuggaauaugggaacugcaauaccaagugucagacgccuaucggagccauuaacagcuccaugcccuuucauaauauccacccgcuuacaauuggcgagugcccuaaauacgugaaaagcaacagacuggugcucgcuaccgggcugcgcaauucuccccagaucgagacacggggacuuuucggcgccauugcgggcuuuaucgaagggggauggcagggcauggucgacgggugguauggauaccaucacuccaacgagcaaggcagcggguaugccgcugauaaggaaucuacccagaaagccaucgacggagugaccaauaagguuaacagcauuaucgauaaaaugaacacacaguucgaggcugugggcagagaauuuaauaaccuggagcggcgcauugagaaucucaacaagaaaauggaagacggcuuccuggaugucuggacguacaaugccgagcugcucgugcugauggaaaacgagagaacccuugacuuccacgauuccaauguuaagaaccuguaugacaaggugcggcuccaacugcgcgauaaugccaaagaacuugggaacggauguuuugaguucuaccauagaugcgacaaugaguguauggaaucuguccggaacggcacauacgauuauccucaguacagcgaggaagcuagacugaagcgcgaggagaucuccggggugaaacucgaaagcauuggaaccuaucagauccugucuauuuacuccacagucgcgagcucucuggcccucgcuaucaugguggccggccugucccuuuggaugugcagcaaugggucccugcagugccggaucuguauuuga

SEQ ID NO: 206078 - RNA, 1701 nt, Artificial Sequence
  derived and/or modified CDS sequence (opt5) from hemagglutinin__InfluenzaA__AKC45369
auggagaagaucgugcugcuccuggccgucguuagccuugugaaauccgaccagauuugcaucggcuaccacgcuaacaauucuaccgaacaaguggauacaauuauggagaagaacgucacggugacccaugcccaggacauccuggagaaaacacacaaugggagacucugugaucugaacggaguuaagccccuuauucugaaagacugcagcguggcgggcuggcuccuggggaauccuaugugugaugaguucauccgggucccggaaugguccuauaucguggagcgcgcuaaccccgccaaugaccugugcuacccuggaaaccucaaugauuaugaggaacugaagcaucuucugucuagaauuaaccacuuugagaagacccucaucauucccaaaagcuccuggccuaaucauacaucuagcggcguuuccgccgcuugucccuaccaggggaccccuagcuucuuucggaacguggucuggcugacaaagaaaaaugacgccuauccgaccaucaagaugucuuacaacaauacgaaccgcgaagaucuucugauucucuggggaauccaccacuccaacaaugcugccgagcagaccaaccuguauaaaaaucccacaaccuacgugagcgugggcacaucuacccugaaccaaagacucgucccuaagauugcgacgcggucccagguuaauggccagcgcgggagaauggacuucuuuuggacaauccugaagcccaacgaugccauccauuucgagagcaauggaaacuuuauugcuccugaauacgccuauaaaaucgugaagaaaggcgacucuaccauuaugaaguccgagauggaauacgggcacugcaauacaaaaugucagacccccaucggagcuauuaacagcuccaugccguuccauaauauccacccucuuaccaucggcgagugccccaaguaugugaaaucuaacaagcugguccucgccacagggcugcggaauagcccucuucgcgaaagacggcgcaagagaggacuguuuggcgcgauugccggcuucaucgaagggggauggcaaggcaugguggaugggugguacggauaucaccauuccaacgagcagggcagcggguacgcugccgaccgggaaucuacgcagaaagcuauugacggaguuaccaauaaggugaacuccaucauugauaaaaugaacacacaguuugaggccgucggccgcgaguucaauaaccucgaaagacggaucgaaaaucugaacaagaaaauggaggacggcuuucuggauguguggaccuauaaugccgagcuccugguucuuauggaaaacgagagaacacuggacuuccacgauagcaaugugaagaaccucuacgacaagguccgccugcaacuucgggauaaugcuaaagaacuggggaacggauguuucgaguuuuaccauaagugcgacaaugaauguauggagucugugagaaacggcaccuaugauuacccccaguauagcgaggaagcgcgccucaaacgggaggaaaucuccggggucaagcuggagucuauuggaacguaccagauccugagcauuuauuccacaguggccagcucucucgcucuggccaucauuguugccggccuuucccuguggaugugcagcaaugggucucuccaaugcagaaucuguauuuga

SEQ ID NO: 206079 - RNA, 1704 nt, Artificial Sequence; identical to SEQ ID NO: 205030
  derived and/or modified CDS sequence (opt5) from hemagglutinin__InfluenzaA__AJS18479

SEQ ID NO: 206080 - RNA, 1704 nt, Artificial Sequence
  derived and/or modified CDS sequence (opt5) from hemagglutinin__InfluenzaA__EPI691378
auggagaagaucgugcugcuccuggccgucguuagccuugugaaauccgaccagauuugcaucggcuaccacgcuaacaauucuaccgaacaaguggauacaauuauggagaagaacgucacggugacccaugcccaggacauccuggagaaaacacacaaugggagacucugugaucugaacggaguuaagccccuuauucugaaagacugcagcguggcgggcuggcuccuggggaauccuaugugugaugaguucauccgggucccggaaugguccuauaucguggagcgcgcuaaccccgccaaugaccugugcuacccuggaaaccucaaugauuaugaggaacugaagcaucuucugucuagaauuaaccacuuugagaagacccucaucauucccaaaagcuccuggccuaaucaugaaacaucucugggcguuagcgccgcuugucccuaccagggggugccuuccuucuuucggaacgucguguggcuuaccaagaaaaaugacgccuauccgacaaucaagaugagcuacaacaauaccaaccgcgaggaucugcucauucuguggggaauccaccacucuaacaaugcugccgagcagacgaaccuguauaaaaaucccaccacauacguguccgucggcaccagcacacucaaccaaagacugguuccuaagauugcgacccggucucaggugaauggccagcgcgggagaauggacuucuuuuggacgauccuuaagcccaacgaugccauccauuucgaauccaauggaaacuuuauugcuccugaguacgccuauaaaaucgugaagaaaggcgacagcacaauuaugaagucugaaauggaguacgggcacugcaauaccaaaugucagacacccaucggagcuauuaacuccagcaugccguuccauaauauccacccucugaccaucggcgaaugccccaaguaugucaaauccaacaagcucgugcuggccaccgggcuucgcaauucuccucugcgggagagacggcgcaagagaggacucuuuggcgcgauugccggcuucaucgaagggggauggcaaggcaugguugaugggugguacggauaucaccauagcaacgaacagggcuccggguacgcugccgaccgggagagcacacagaaagcuauugacggagugacgaauaaggucaacucuaucauugauaaaaugaacacccaguuugaagccgugggccgcgaguucaauaaccuggaaagacggaucgagaaucugaacaagaaaauggaggacggcuuucucgauguuuggacauauaaugccgaacugcuugugcugauggagaacgaaagaacccucgacuuccacgauuccaaugucaagaaccuguacgacaaggugcgccuucaacugcgggauaaugcuaaagagcucgggaacggauguuucgaauuuuaccauaagugcgacaaugaguguauggagagcgucagaaacggcacauaugauuacccccaguauucugaagaggcgcgccugaaacgggaagagaucagcggggugaagcuggaguccauuggaaccuaccagauccucucuauuuauagcacgguugccuccagccuggcucuugccaucauuguggccggccugucucucuggaugugcuccaaugggagccugcaaugcagaaucuguauuuga

SEQ ID NO: 206081 - RNA, 1704 nt, Artificial Sequence
  derived and/or modified CDS sequence (opt5) from hemagglutinin__InfluenzaA__EPI533583
auggagaagaucgugcugcuccuggccauugucagccuuguuaaaggcgaccagaucugcauuggguaccacgcuaacaauuccaccgaacaaguggauacaaucauggagaagaacgugacggucacccaugcccaggacauucuggaaaagacacacaauggaaagcucugugaucugaacggcgugaaaccccuuauccugaaggacugcucuguugcgggguggcuccugggaaauccuaugugugaugaguucaucagagugccggaauggagcuauauugucgagcgggcuaaccccgccaaugaccugugcuacccuggcaaccucaaugauuaugaggaacugaagcaucuucugucccgcaucaaccacuuugagaaaauucucaucauucccaagucuagcuggaccaaucaugaaacaucccugggggugucugccgcuuguccuuaccagggaacccccagcuucuuuagaaacguuguguggcuuaucaaaaagaaugacgccuauccuacaauuaaaaucuccuacaacaauaccaaccaggaggaucugcucauccuguggggcguccaccacagcaacaaugcugccgagcaaacgaaccuguauaagaauccgaccacauacauuucugugggcaccuccacacucaaccagcggcuggugcccaagaucgcgacccgcagccaggucaaugggcagagaggacggauggacuucuuuuggacgauucuuaaaccuaacgaugccauccauuucgaaucuaauggcaacuuuauugcucccgaguacgccuauaagaucguuaaaaagggggacuccacaaucaugaaaagcgaaauggaguacggacacugcaauaccaagugucaaacaccuauuggcgcuaucaacucuuccaugcccuuccauaauauucacccgcugaccaucggggaaugcccuaaauaugugaaaagcaacaagcucgugcuggccaccggacuucgcaauucuccccugagagagaaacggcgcaagagaggccucuuuggcgcgauugccggguucaucgagggaggcuggcaggggauggucgauggaugguacggcuaucaccauuccaacgaacaggggagcggauacgcugccgacaaagaguccacacagaaggcuaucgacggcgugacgaauaaaguuaacagcauuaucgauaagaugaacacccaauuugaagccgugggccgggaguucaauaaccuggaacgcagaauugagaaucugaacaagaaaauggaggacggguuucucgaugucuggacauauaaugccgaacugcuugugcugauggagaacgaacggacccucgacuuccacgauucuaauguuaagaaccuguacgacaaagugcgccuucagcugagagauaaugcuaaggagcucggaaacggcuguuucgaauuuuaccauaaaugcgacaauaaguguauggaguccguccggaacgggacauaugauuacccucaguauagcgaggaagcgagacugaagcgcgaggaaaucucuggagugaaacuggagagcauuggcaccuaccaaauccucuccauuuauucuacggucgccagcucccuggcucuugccaucaucguggccgggcugagccucuggaugugcucuaauggcucccugcagugccggauuuguaucuga

SEQ ID NO: 206082 - RNA, 1701 nt, Artificial Sequence; identical to SEQ ID NO: 205043
  derived and/or modified CDS sequence (opt5) from hemagglutinin__InfluenzaA__AKS48023

SEQ ID NO: 206083 - RNA, 1701 nt, Artificial Sequence
  derived and/or modified CDS sequence (opt5) from hemagglutinin__InfluenzaA__EPI587621
auggagaagauggugcugcuccuggccgcugucagccuuguuaaauccgaccagaucugcauuggcuaccacgccaacaauucuaccgaacaaguggauacaaucauggagaagaacgugacggucacccaugcgcaggacauucuggagaaaacacacaaugggagacucugugaucugaacggagugaagccccuuauccugaaagacugcagcguugcuggcuggcuccuggggaauccuaugugugaugaguucauucgggugccggaaugguccuauaucgucgagcgcgccaaccccgccaaugaccugugcuacccuggaaaccucaaugauuaugaggaacugaagcaucuucugucuagaaucaaccacuuugagaagacccucauuauccccaaaagcuccuggccuaaucauacaucuagcggcguguccgcugccugucccuaccaggggaugccuagcuucuuucggaacguuguguggcugaccaagaaaaaugacgcuuauccgacaauuaagaugucuuacaacaauaccuaucgcgaagaucuucugauccucuggggcauucaccacuccaacaacgccgcggagcagacgaaucuguacaaaaaccccaccacauacgucagcgugggaaccucuacacugaaucaaagacucgagccuaagaucgccacccggucccaggugaacggccagcgcgggagaauggacuucuuuuggacgauucugaagcccaaugaugcuauccauuucgaaagcaacggaaauuuuaucgccccugaguaugcuuacaaaauugucaagaaaggcgacucuacaaucaugaaguccgaaauggaguaugggcacugcaacaccaaaugucagacacccauuggagccaucaauagcuccaugccguuccauaacauucacccucuuaccaucggcgaaugccccaaguacguuaaaucuaauaagcuggugcucgcgaccgggcugcggaacagcccucuucgcgagagacggcgcaagagaggacuguuuggcgccaucgcuggcuucauugaagggggauggcaaggcaugguggaugggugguauggauaccaccauuccaaugaacagggcagcggguaugccgcugaccgggagucuacacagaaagccaucgacggagucacgaacaagguuaauuccauuaucgauaaaaugaacacccaguuugaagccgugggccgcgaguucaacaaucucgaaagacggauugagaaccugaauaagaaaauggaggacggcuuucuggauguguggacauacaacgcugaacuccugguccuuauggagaaugaaagaacccuggacuuccacgauagcaacgugaagaaucucuacgacaagguucgccugcaacuucgggauaacgcgaaagagcuggggaauggauguuucgaauuuuaucauaagugcgacaacgaguguauggagucugugagaaauggcacauacgauuauccccaguacagcgaagaggcccgccucaaacgggaagagaucuccggggucaagcuggagucuaucggaaccuaucagauucugagcaucuacuccacgguggcuagcucucucgcccuggccauuaucgucgcuggccuuucccuguggaugugcagcaacgggucucuccaaugcagaauuuguaucuga

SEQ ID NO: 206084 - RNA, 1704 nt, Artificial Sequence
  derived and/or modified CDS sequence (opt5) from hemagglutinin__InfluenzaA__AJE30333
auggagaagaucgugcugcuccuggccgucauuagccuuguuaaauccgaccagaucugcauuggcuaccacgcuaacaauucuaccaagcaaguggauacaaucauggaaaagaacgugacggucacccaugcccaggacauucuggagaagacacacaaugggaaacucugugaucugaacggagugaagccccuuauccugaaggacugcagcguugcgggcuggcuccuggggaauccuaugugugaugaguucaucagagugccggagugguccuauauugucgaacgggcuaaccccgccaaugaccugugcuacccuggaacccucaacgauuaugaggagcugaaacaucuucugucucgcaucaaucacuuugaaaagacacucauuauccccagaagcuccuggccuaaccaugagaccucucugggcgugagcgccgcuugucccuaccagggggccuccagcuucuuucggaauguuguguggcuuauuaaaaagaacgacgcuuauccuacaaucaaaauuucuuacaauaacaccaaucgcgaagaucugcucauccuguggggaauccaccacuccaacaacgccgcggagcagacgaaucuguauaagaacccggacaccuacgucagcgugggcacaucuacccucaaucaaagacuggugcccaagauugccacacggucccaggucaacggccagagcgggcgcauggauuucuuuuggaccauccuuaaaccuaaugacgcuauucauuucgagucuaacggaaauuuuaucgcccccgaauacgcuuauaagauuguuaaaaagggcgauuccacgaucaugaaaagcgagauggaauacgggcacugcaacacaaagugucagaccccuaucggagccauuaauuccucuaugcccuuccauaacauccacccgcugacaauuggcgagugcccuaaauaugugaaaagcaauaagcucgugcuggcgaccgggcuuagaaacagcccccugcgggaacgcagacggaaacgcggacucuuuggcgccaucgcuggcuucauugaagggggauggcaaggcauggucgacgggugguacggauaucaccauuccaaugagcagggcucuggguacgccgcugacaaggaauccacccagaaagccaucgauggagugacaaacaagguuaauagcaucauugacaaaaugaacacgcaguuugaggccgugggcagagaguucaacaaucuggaacggcgcaucgaaaaccugaauaagaagauggaggauggcuuucucgacgucuggaccuauaacgcugagcugcuugugcugauggaaaaugagagaacacucgauuuccacgacucuaacguuaaaaaucuguacgauaaggugcggcuucaacugagagacaacgcgaaagaacucgggaauggauguuucgaguuuuaccauaagugcgauaacgaauguauggagagcguccgcaauggcaccuaugacuacccuaaauauuccgaggaagccauucugaagcgggaggaaaucucuggggugaagcuggagagcauuggaacauaccagauccucuccauuuauagcaccgucgcuucuucccuggcccuugccaucaucguggcuggccugagccucuggaugugcucuaacgggucccugcagugcagaauuuguaucuga

SEQ ID NO: 206085 - RNA, 1704 nt, Artificial Sequence
  derived and/or modified CDS sequence (opt5) from hemagglutinin__InfluenzaA__EPI459855
augaucgccauuguggucaucgcuauucuggccagcgcgggcaaguccgacaagaucugcauuggguaccacgcuaacaauucuaccacacagguugauacgcuccuggagaagaacgugaccgugacacauagcgucgaacuucuggagaaucaaaaagaaaagagauucuguaaaaucaugaacaaggcuccccucgaccugaaggauugcaccaucgagggauggauucuuggcaauccuaaaugugaccugcuccugggggaucaguccuggucuuauaucguggaacggccgaacgcccagaauggaauuugcuaccccggcguucugaacgagcucgaggaacugaaggccuuuaucgggagcggagagcgcguggaaagauucgagauguuuccuaaauccacaugggccggcgucgacaccucucggggcgugacaaaugcuugucccagcuauaccauugauuccagcuucuaccgcaaccuuguuuggaucgugaagacggacucugccaccuauccugucauuaaagggacauacaauaacaccggaacacagcccauccuguauuuuuggggcgugcaccauccucucgauaccacggugcaagacaaucuguacggguccggagauaaguacgucagaaugggcacagagagcaugaacuucgcgaagucuccggaaaucgccgcucggcccgccguuaaugggcagcgcuccagaauugacuauuacuggagcgugcuucggccuggagagacccugaacguggaaucuaacggcaaucucaucgcucccugguaugccuacaaauuugucuccacaaacaagaaaggcgcgguguucaagagcgaucugccuauugagaauugcgacgccaccugucagaccaucacagggguucugcgcacgaacaaaaccuuucagaaugugucuccccucuggauuggagaaugcccgaaguaugucaaauccgagagccugagacuugcuacaggccugcggaacgugccucaaaucgccacccgcgggaucuucggagcuauugccggcuuuaucgagggaggguggacaggcaugauugacggcugguacggguaucaccaugaaaauucccagggaagcggcuacgccgcugauagagagucuacccagaaggcgaucgacgggauuacgaacaagguuaauuccaucaucaacaaaaugaauacacaguucgaagccguggaucacgaguuuagcaaccucgaacggcgcauuggaaaucugaacaagagaauggaggacggcuuccuugaugucuggaccuacaaugcugagcugcucgugcugcuggaaaacgagcggacccucgaccugcacgaugccaacgucaaaaaucuuuaugaaaaggugaaaucucaacugagagacaacgccaaugaucucgggaacggcuguuucgaguuuuggcauaagugcgacaaugaauguauggagagcguuaagaacggaacauacgauuaucccaaauaccagaaggaguccaaacugaaucgccagggcaucgaaucugugaaacuugagaaccugggggucuaucaaauucucgcuaucuacagcaccguguccagcucucugguucuggugggacucauuauggccaucggccuguggaugugcuccaaugggagcaugcagugccggauuuguaucuga

SEQ ID NO: 206086 - RNA, 1704 nt, Artificial Sequence; identical to SEQ ID NO: 206085
  derived and/or modified CDS sequence (opt5) from hemagglutinin__InfluenzaA__EPI459855/m1

SEQ ID NO: 206087 - RNA, 1692 nt, Artificial Sequence
  derived and/or modified CDS sequence (opt5) from hemagglutinin__InfluenzaA__ACZ36872
augaacacccagauccugguguucgcccucgucgcuguuauucacacaaaugccgacaagaucugccugggccaucacgcggugagcaacgggacgaaagugaauacccuuacagagagaggagucgaagugguuaacgcuaccgagacaguggaacggaccaauauucccaagaucuguuccaaaggcaagcgcacagucgaucuggggcaaugcggacuccugggcaccauuacggggccuccgcagugugaccaguuucuugaguucucugccgaucugaucaucgaaagacgggacggaaacgaugugugcuaccccggcaaauuuguuaauggcgaggcccuccgccagauucugagaaagagcgggggaaucaacaaggagaccaugggcuucacauauuccgggauucggaccaauggaacaaccucugcuugucgcagaagcggcuccucuuuuuacgccgaaaugaaauggcugcucagcgacacggauaacgcugccuucccucaaaugacaaaguccuauaaaaauacccggcgcgagcccgcgcugaucgugugggggauucaucacagcggaucuacaaccgaacagaccaaacuuuacggcuccggcaacaagcuggucacaguggggagcucuaaguaucagcaguccuuugugccuagccccggaacgagaccucaagucaauggccagucugggcggaucgacuuccauuggcucauucuggauuccaacgacaccguuacauuuagcuucaauggagccuuuaucgcuccggaucgcgccuccuuccuuaagggcaaaucuauggggauccagagcgacguccagguggaugcuaacugcgagggagaguguuaccacuccggcggcaccauuacaagcucucugcccuuucaaaacaucaauuccagagccguggggaagugcccucgguaugugaaacaggaaagccuccugcuggcgaccggaaugaagaacguucccgagcucccuaaaaagcgcagaaaacggggccuguucggggccauugcuggauucaucgaaaauggcugggaggggcuuguggacggcugguacggauuuagacaccagaacgcccaaggcgaagggacggcugccgacuacaagucuacacagagcgccauugaucagaucaccggaaagcugaaucgccucaucgagaaaaccaaccagcaauucgagcugauugacaaugaauuuacagaggucgaaaagcagaucggcaacgugauuaauuggacccgggauuccaucacagagguuuggucuuauaacgcugaacuucugguggcgauggagaaucagcauacgauugaccucgccgauagcgagaugaacaaacuguacgaaagaguccgcaagcagcugcgggagaaugcugaagaggacgggaccggauguuucgaaaucuuucacaaaugcgaugacgauuguauggccuccaucagaaacaauacauaugaccauagcaaguaccgcgaggaggccaugcaaaaccggauucagaucgaucccgugaagcucucuggcggguauaaagacgucauucugugguucuccuuuggcgcuagcugcuuccuucugcucgccaucgcgaugggacugguguuuauuugcguuaagaacggcaauaugagauguaccaucugcauuuga

SEQ ID NO: 206088 - RNA, 1692 nt, Artificial Sequence
  derived and/or modified CDS sequence (opt5) from hemagglutinin__InfluenzaA__AGB51388
augaacacccagauccugguguucgcccucgucgcuguuauucacacaaaugccgacaagaucugccugggccaucacgcggugagcaacgggacgaaagugaauacccuuacagagagaggagucgaagugguuaacgcuaccgagacaguggaacggaccaauauucccaagaucuguuccaaaggcaagcgcacagucgaucuggggcaaugcggacuccugggcaccauuacggggccuccgcagugugaccaguuucuugaguucucugccgaucugaucaucgaaagacgggacggaaacgaugugugcuaccccggcaaauuuguuaauggcgaggcccuccgccagauucugagaaagagcgggggaaucaacaaggagaccaugggcuucacauauuccgggauucggaccaauggaacaaccucugcuugucgcagaagcggcuccucuuuuuacgccgaaaugaaauggcugcucagcgacacggauaacgcugccuucccucaaaugacaaaguccuauaaaaauacccggcgcgagcccgcgcugaucgugugggggauucaucacagcggaucuacaaccgaacagaccaaacuuuacggcuccggcaacaagcuggucacaguggggagcucuaaguaucagcaguccuuugugccuaaucccgagacgagaccucaagucaacggacagagcggccggaucgacuuccauuggcucauucuggauucuaaugacaccguuacauuuuccuucaacggggccuuuaucgcuccggaucgcgccagcuuccuuaagggaaaauccaugggcauccagucugacguccagguggaugcuaacugcgagggggaauguuaccacagcggaggcaccauuacauccagccugcccuuucaaaauaucaacucuagagccgugggcaagugcccucgguaugugaaacaggagucccuccugcuggcgaccgggaugaagaauguucccgaacucccuaaaaagcgcagaaaacggggacuguucggcgccauugcuggguucaucgagaacggaugggaaggccuuguggacgggugguacggcuuuagacaccagaaugcccaaggagagggcacggcugccgacuacaagagcacacagucugccauugaucagaucaccgggaagcugaaccgccucaucgagaaaaccaaucagcaauucgaacugauugacaacgaguuuacagaagucgagaagcagaccggaaaugugaucaacuggacacgggauagcauuacggaaguuugguccuauaaugcugagcuucugguggcgauggagaaccagcauaccaucgaccucgccgauucugaaaugaauaaacuguacgagagaguccgcaagcagcugcgggaaaacgcugaggaagacggcacaggguguuucgagauuuuucacaaaugcgaugacgauuguauggccagcaucagaaauaacaccuaugaccauuccaaguaccgcgaggaagccaugcaaaaccggauccagauugaucccgugaagcucagcggaggcuauaaagacgucauccugugguucucuuuuggggcuuccugcuuccuucugcucgccauugcgaugggccugguguuuaucugcguuaagaauggaaacaugagauguacaauuugcaucuga

SEQ ID NO: 206089 - RNA, 1683 nt, Artificial Sequence; identical to SEQ ID NO: 202060
  derived and/or modified CDS sequence (opt5) from hemagglutinin__InfluenzaA__EPI439507

SEQ ID NO: 206090 - RNA, 1704 nt, Artificial Sequence
  derived and/or modified CDS sequence (opt5) from hemagglutinin__InfluenzaA__EPI164216
auggagaagaucgugcugcuccuggccauugucagccuuguuaaauccgaccagaucugcauuggcuaccacgcuaacaauucuaccgaacaaguggauacaaucauggagaagaacgugacggucacccaugcccaggacauucuggaaaagacacacaaugggaagcucugugaucuggacggagugaaaccccuuauccugagagauugcagcguugcgggcuggcuccuggggaacccuaugugugacgaguucaucaaugugccggaaugguccuauauugucgagaaggcuaaccccgccaaugaucugugcuacccuggaaacuuuaaugacuaugaggaacucaagcaucugcuuucucggaucaaccacuucgagaaaauucagaucauucccaagagcuccuggucugaucaugaagccagcuccggcgugagcucugcuuguccuuaccaggggacccccuccuuuuuccgcaauguuguguggcugaucaaaaagaacaauacauauccuaccauuaaaagaagcuacaacaauacaaaccaagaggaccuccugauccuuuggggaauccaccacucuaacgaugccgcugagcagaccaagcuguaucagaauccgacgaccuacauuuccgucggcacaagcacccucaaccagcggcuggugcccaagaucgccacacgcucuaaagugaauggccaauccgggagaauggacuuuuucuggaccauucugaagccuaacgaugcgaucaauuuugaaagcaacggaaauuucauugcccccgaguacgcuuauaaaaucgucaagaaaggcgacuccgccaucguuaagucugaaguggaguacgggaacugcaauacgaaaugucagacaccuauuggagcuaucaacagcuccaugcccuuucauaauauucacccgcucaccaucggcgaaugcccuaaguaugugaaaagcaacaaacugguccuugccacagggcugcgcaauucuccccuccgggagagacggcgcaagagaggacuguucggcgcgauugccggcuuuaucgaagggggauggcagggcaugguggacgggugguacggauaucaucacuccaacgaacagggcagcggguacgcugccgauaaagagucuacccaaaaggcuaucgacggaguuaccaauaaagugaacagcauuaucgauaagaugaacacacaguucgaagccgucggccgggaguuuaauaaccuugaacgcagaauugagaaucugaacaagaaaauggaggacggcuuccucgauguguggacguauaaugccgaacugcugguucucauggagaacgaacggacccuggacuuccacgauuccaaugugaagaaccuuuacgacaaaguccgccugcagcucagagauaaugcuaaggagcuggggaacggauguuuugaguucuaccauaaaugcgacaaugaguguauggagucugugcggaacggcacauaugauuacccucaauauagcgaagaggcgagacuuaagcgcgaagagaucuccggggucaagcuggagagcauuggaaccuaccagauccucucuauuuauuccacaguggccagcucucuggcucuggccaucaugguugccggccucucccuguggaugugcagcaaugggucccuucagugccggaucuguauuuga

SEQ ID NO: 206091 - RNA, 1683 nt, Artificial Sequence; identical to SEQ ID NO: 204423
  derived and/or modified CDS sequence (opt5) from hemagglutinin__InfluenzaA__EPI486492

SEQ ID NO: 206092 - RNA, 1683 nt, Artificial Sequence
  derived and/or modified CDS sequence (opt5) from hemagglutinin__InfluenzaA__EPI740738
augaacacccagauccugguguucgcccucauugcuaucauucccacaaaugccgacaagaucugccugggccaccaugcggucagcaacgggacgaaaguuaauacccuuacagagagaggaguggaaguggucaacgcuaccgagacaguggaacggaccaauauuccucgcaucuguuccaagggcaaaagaacaguugaucuggggcaaugcggacuccugggcaccaucacggggccgccccagugugaccaguuucuugaguucucugccgaucugauuaucgaacggcgcgagggaagcgacgugugcuacccuggcaaguuugucaacgaggaagcccucagacagauucugcgggaguccggcgggaucgauaaagaaaccaugggauucacauauucuggcauucgcaccaauggggugacaagcgcuuguaagagauccggaucuagcuuuuacgccgagaugaaguggcugcucuccaacaccgacaaugcugccuucccccaaaugacgaaaagcuauaagaacacacggaaaucuccugcgaucauuguuuggggcauccaccauuccgugagcaccgccgagcagacaaagcuguacgggucuggaaauaaacuugucaccgugggcuccagcaacuaucagcagucuuuugugcccuccccuggcgcucgcccgcaagucaaugggcugagcggaagaaucgauuuccacuggcucauucugaaccccaaugacaccguuacauuuuccuucaacggcgccuuuaucgcuccugaucgggccucuuuccuucgcggaaagagcauggggauucaguccggcguccagguggacgcgaacugcgaaggggauuguuaccauagcggaggcacgaucauuucuaaucugcccuuucagaacaucgacuccagagccgugggcaagugcccucgguaugugaaacaacgcagccuccugcuggcuaccgggaugaagaauguucccgagaucccgaaaggaagaggccucuucggggccauugcuggauucaucgaaaacggcugggaggggcugauugauggcugguacggauuucggcaccagaaugcccagggcgaagggacagccgcugacuacaagucuacccaaagcgcgaucgaccagauuacaggaaaacuuaacagacugaucgccaagaccaaucagcaguucgagcucaucgauaacgaguuuaaugaaguggagaaacaaauuggcaacgucaucaauuggacgcgcgacuccauuacagaaguguggucuuauaacgcugagcugcuuaucgccauggaaaaucagcacaccauugaucuggccgacagcgagauggauaagcucuacgagcggguuaagagacagcugcgcgaaaacgcugaggaagacgggaccggauguuucgagaucuuucauaaaugcgaugacgauuguauggccuccauucggaauaacacauaugaccacagaaaguaccgcgaagaggcgaugcagaaccggauccaaaucgauccugugaaacugagcucuggcuauaaggacgucauucucugguucuccuuuggggcuagcugcuucauccugcuugccauugugaugggccuggucuuuaucugcgugaaaaauggaaacaugagauguaccauuugcaucuga

SEQ ID NO: 206093 - RNA, 1683 nt, Artificial Sequence
  derived and/or modified CDS sequence (opt5) from hemagglutinin__InfluenzaA__EPI730495
augaacauccagauucugguguucgcccucaucgcuauuauccccaccgacgccgauaagauuugccugggccaccaugcggucagcaaugggacaaaaguuaacacgcuuaccgagagaggaguggaaguggucaaugcuacagagaccguggaacggacaaacaucccucgcaucuguuccaagggcaaaagaaccguugaccuggggcaaugcggacuccugggcacaauuaccgggccgccccagugugaucaguuucuugaguucucugccgaccugaucauugaacggcgcgagggaagcgaugugugcuacccuggcaaguuugucaaugaggaagcccucagacagauccugcggaaauccggcgggauugacaaggaggcuaugggauucacguauucuggcauccgcaccaacggggccacaagcgcuuguagacgguccggaucuagcuuuuacgccgaaaugaaguggcugcucuccaauaccgauaacgcggccuucccccaaaugacaaaaagcuauaagaauacccgcaaaucuccugcuauuaucguguggggcauccaccauuccguuagcacggccgagcagacaaagcuguacgggucuggauccaaacuugugaccgucggcagcucuaacuaucagcaguccuuugugcccagcccuggcgcuagaccgcaagugaaugggcuguccggacggauugacuuccacuggcucauccugaaccccaaugauacagucaccuuuucuuucaacggcgccuuuauugcgccugaccgcgccagcuuccuuagagggaaguccaugggaauccagagcggcguucagguggaugcugacugcgagggggauuguuaccauucuggaggcaccauuaucuccaaucugcccuuucagaacaucgacagccgggccgugggcaagugcccucgcuaugucaaacaaagaucucuccugcuggcuacagggaugaagaacgugcccgaaauuccgaaaggacggggccucuucggggccaucgccggauucauugagaauggcugggaagggcugaucgacggcugguacggauuuagacaccagaacgcucagggcgaggggacggcggccgauuacaagagcacccaauccgcuauugaccagaucacaggaaaacuuaaucgccugaucgaaaagaccaaccagcaguucgagcucauugauaaugaguuuaucgaaguugagaaacaaauuggcaacgugaucaauuggacacgggacucuauuaccgaagucuggagcuauaacgccgagcugcuuguggccauggaaaaucagcacacgaucgaucuggcugacuccgagauggauaagcucuacgagagaguuaagcgccagcugcgggaaaacgccgaggaagacgggacaggauguuucgagauuuuucauaaaugcgaugacgauuguauggcgagcaucagaaauaacaccuaugaccacucuaaguaccgcgaagaggcuaugcagaaucggauccaaauugacccugugaaacuguccagcggcuauaaggaugucauccucugguucucuuuuggggccuccugcuucauucugcccgccaucgugaugggccuugucuuuaugugcgugaaaaacggaaauaugagauguaccauuugcaucuga

SEQ ID NO: 206094 - RNA, 1683 nt, Artificial Sequence
  derived and/or modified CDS sequence (opt5) from hemagglutinin__InfluenzaA__EPI712926
augaacacccagauccugguguucgcccucauugcuaucauucccacaaaugccgacaagaucugccugggccaccaugcggucagcaacgggacgaaaguuaauacccuuacagagagaggaguggaaguggucaacgcuaccgagacaguggaacggaccaauauuccucgcaucuguuccaagggcaaaagaacaguugaucuggggcaaugcggacuccugggcaccaucacggggccgccccagugugaccaguuucuugaguucucugccgaucugauuaucgaacggcgcgagggaagcgacgugugcuacccuggcaaguuugucaacgaggaagcccucagacagauucugcgggaguccggcgggaucgauaaagaaaccaugggauucacauauaauggcauucgcaucaacggggugaccucugcuuguaagagaagcggauccucuuuuuacgccgagaugaaguggcugcucagcaauacagacaacgcugccuucccccaaaugaccaaauccuauaagaauacgcggaaaagcccugcgauuaucguuuggggcauccaccauucuguguccacagccgagcagaccaagcuguacgggagcggaaacaaacuugucacagugggaucuuccaauuaucagcagagcuuugugcccucuccuggcgcucgcccgcaagucaacgggcuguccggaagaauugauuuccacuggcucauccugaaucccaacgacaccguuaccuuuagcuucaacggcgccuuuauugcuccugaucgggccuccuuccuucgcgggaagucuaucggcauucagagcggcguccagguggacgcgaauugcgaaggggauuguuaccauuccggaggcacaaucaucagcaaccugcccuuucagaauauugacucuagagccgugggcaagugcccucgguaugugaaacaacgcucccuccugcuggcuacggggaugaagaacguucccgagaucccgaaaggaagaggccucuucggggccauugcuggauucaucgaaaauggcugggaggggcugauugauggcugguacggauuucggcaccagaacgcccagggcgaagggaccgccgcugacuacaagagcacacaaucugcgaucgaccagaucaccggaaaacuuaauagacugauugccaagacaaaccagcaguucgagcucaucgauaaugaguuuaacgaaguggagaaacaaauuggcaaugucaucaacuggacccgcgacagcauuacggaagugugguccuauaaugcugagcugcuuaucgccauggaaaaccagcacacaauugaucuggccgacucugagauggauaagcucuacgagcggguuaagagacagcugcgcgaaaaugcugaggaagacgggaccggauguuucgagaucuuucauaaaugcgaugacgauuguauggccagcauccggaacaacaccuaugaccacagaaaguaccgcgaagaggcgaugcagaaucggauucaaaucgauccugugaaacuguccagcggcuauaaggacgucauucucugguucucuuuuggggcuuccugcuucauccugcuugccauugugaugggccuggucuuuaucugcgugaaaaacggaaauaugagauguacaaucugcauuuga

SEQ ID NO: 206095 - RNA, 1683 nt, Artificial Sequence; identical to SEQ ID NO: 202060
  derived and/or modified CDS sequence (opt5) from hemagglutinin__InfluenzaA__AGL44438

SEQ ID NO: 206096 - RNA, 1683 nt, Artificial Sequence
  derived and/or modified CDS sequence (opt5) from hemagglutinin__InfluenzaA__EPI445996
auggagaccgugagccugaugacaauccuccugcuugucacgaccuccaacgccgacaagauuugcaucggccaccagucuacaaauagcaccgaaacaguugauacccugacagagaccaacgugcccgugacgcaugcuaaagaacuccugcacaccgaccauaaugggaugcuuugugccacaaaccugggacacccucucauucuggauaccugcaaugucgagggccugaucuacgggaacccguccugugaccuccugcuuggaggcagagaauggucuuauauuguggagcggcccagcgcgguuaaugggacaugcuacccuggaaacguggagaaucuggaggaacuccgcacccuguucuccucuagcuccagcuaucaaagaauccagaucuuucccgauacgauuuggaacgucacauacaccggcacaucuaaguccuguagcgacucuuucuaucggaauaugcgcuggcuuacccagaaaaacggccuguacccugugcaggaugcucaauuuaccaauaacagagggaaggacauccucuucguuuggggcauucaucaucccccuacagauacggcccagaccaaucuguauacacggaccgacacaaccacguccgugacaaccgaaaaccuggaucgcaccuuuaaaccgcucaucggacccagaccucuggucaacgggcuuauuggacggaucaauuacuacuggagcgugcugaagcccggccagacacuccgcgugagaucuaacgggaaucugauugccccuugguauggacacguccuuuccggcgagagccacggccggauccugaagaccaaccucaauuccgggaacugcguugugcagugucaaacagagaaaggaggccucaauucuacgcugcccuuccacaacaucagcaaguacgcuuuugggaauugcccgaaauauauuggagugaagucccugaaacuggccaucggccuucgcaacgucccugcuaagagcucuagagggcuguucggagccauugcgggcuuuaucgaaggcggguggcccggacucguggccggcugguacggguuccagcauuccaaugaccagggaguuggcauugcugccgaucgggugagcacccagaaggcugucgacaaaaucacaucuaaggugaacaauaucguugacaaaaugaacaagcaauaugagauuaucgaucacgaauuuagcgagguggaaacccgccugaauaugauuaacaacaaaaucgacgaucagauucaggacgucugggccuacaaugcggagcuucuggugcuccuggagaaccaaaagacacuggaugaacacgacgccaaugucaacaaucucuauaacaaagugaagagagcucugggguccaaugcccuugaggauggcaagggauguuucgaacuguaccauaaaugcgacgaucaguguauggagaccauccggaacggcacguacaauagacgcaaguaucaggaagagucucggcucgagagacagaaaaucgaagggauuaagcuggagagcgaaggaaccuacaaaauccugacaauuuauuccaccguugcuagcucucuugugcucgccaugggcuuugccgcuuuccuguucugggcgauguccaacgggagcugccgcugcaauaucuguauuuga

SEQ ID NO: 206097 - RNA, 1695 nt, Artificial Sequence
  derived and/or modified CDS sequence (opt5) from hemagglutinin__InfluenzaA__EPI433309
auggagaagaucgugcugcuccuggccauugcuagccuugucaaauccgaccagaucugcauuggcuaccacgccaacaauucuaccgaacaaguugauacaaucauggagaagaacgugacggugacccaugcgcaggacauucuggagaaaacacacaaugggaagcucugugaucuggacggagucaaaccccuuauccugagagauugcagcguggcuggcuggcuccuggggaacccuaugugugacaaguucaaugauguuccggaaugguccuauaucguggaaaaggccaaccccgccaaugaccugugcuacccuggaaaccucaaugauuaugaggagcugaaacaucuucugucucggauuaaccacuuugaaaagauccagaccuuccccaaaagcuccuggucugaccaugaggcuagccucggcgucuccgccgcuuguccuuaccaggggaugcccagcuuuuuccgcaaugugguuuggcugauuaagaaaaacaauacauauccuaccaucaagucuuccuacaacaauacaaaccaagaagaucuucugauucucuggggaauccaccacagcaacgacgaggccgagcagaccagacuguaucaaaauucuaacacguacauuuccgugggcaccagcacacugaaucagcggcucgucccgaagaucgcgacccgcucuaaagugaacggccaguccgggagaauggauuucuucuggacaauccugaagcccaaugacgccauuaacuuugaaagcaauggaaacuucaucgcuccugaguacgccuauaaaauugugaagaaaggcgacuccgcuaucaugaagucugaagucggguacggagauugcaauaccaaaugucagacgcccauuggcgccaucaacagcuccaugccuuuucauaauauccacccccuuacaauuggggagugcccgaaguauguuaagagcaacaaacuggugcucgcgaccggacugcgcaauucuccucagaucgaaacacggggccuuuucggcgccauugcuggguuuaucgagggaggcuggcaggggaugguggacggaugguacggcuaucaucacuccaacgagcaagggagcggauacgccgcugauaaggaaucuacccagaaagccauugacggcgucaccaauaaggugaacagcaucaucgauaaaaugaacacacaguucgaggccguugaaagagaguuuaauaaccuggaacggcgcauugagaaucucaacaagaagauggaggacggcuuccuggauguguggacguauaaugcugaacugcucguccugauggagaacgaaagaacccuugacuuccacgauuccaaugugaaaaaccuguacgacaagguucggcuccaacugcgcgauaaugcgaaagagcuugggaacggauguuuugaauuuuaccauaagugcgacaaugaguguauggagucugugagaaacggcacauaugacuacccccaguauagcgaagaggcccggcugaaacgcgaagagaucuccggggucaagcucgagagcauuggaaccuaccagauccugucuauuuauuccacaguggcuagcucucuggcccucgccaucauggucgcuggccugucccuuuggaugugcagcaaugggucccugcagugcagaauuuguaucuga

SEQ ID NO: 206098 - RNA, 1683 nt, Artificial Sequence
  derived and/or modified CDS sequence (opt5) from hemagglutinin__InfluenzaA__EPI470859
auggaggccaucccccugauuaccauccuccugguggucacagcuagcaacgccgacaagauuugcaucggcuaccaguccacgaauagcaccgaaacaguugauacccuuacagagaacaaugugccugugacccacgcgaaagaacugcuccauacagagcacaacgggaugcugugugcuaccaaucuuggaagaccgcugauucucgacacgugcaccaucgaaggccugaucuaugggaaccccagcugugaucugcuccugggaggccgggagugguccuacauugucgagcgcccuucugccgugaaugggaugugcuaucccggaaacguugaaaaucuugaggaacugagaucuuucuuuuccucugccagcuccuaccaacggauccagauuuucccugacacaaucuggaacgugagcuauucuggcaccuccaaggcuuguagcgauucuuuuuaccgcuccaugagauggcucacacagaaaaauaacgccuaucccauucaggacgcucaauacaccaauaaccggggcaagagcauccuguucaugugggggauuaaucauccuccgacggauacagcccagaccaaccuuuacacacgcaccgacaccacaacgucugucgcgaccgaggauaucaacagaacauuuaaacccgugaucggaccucggccccugguuaauggccuccaggggcgcauugacuauuacugguccgugcugaagccuggacagacccugagaguccggagcaacggcaaucucaucgcccccugguaugggcacauucuguccggagagucucauggccgcauccuuaagacagaucugaacagcggcuccugcguggugcaaugucagaccgaaagagggggacucaauacgacacugccguuccacaacgucagcaaauacgcuuuuggcaauugcccuaaguauguuggggugaaaucucuuaagcuggccgugggacuccggaacguccccgcucgcuccagcagaggccuguucggggccauugcgggauuuaucgagggcggcuggucugggcugguggccggaugguacggcuuccagcacagcaaugaccaggggguuggaaucgcugccgaucgggacuccacccaaagagcuauugacaaaaucaccucuaaggugaacaauauugucgauaagaugaacaaacaguaugaaaucauugaccaugaguuuagcgaaguggagaaucgccucaacaugaucaauaacaagaucgaugaccagauucaagauaucugggccuacaacgccgagcugcuuguucugcucgaaaaucagaaaacacuggacgagcacgaugcuaacgugaauaaccuuuacaauaaggucaaacgggcgcugggcuccaacgccauggaagacgggaagggcuguuucgagcucuaucauaaaugcgaugaccaguguauggaaaccauuagaaauggaacauacaaccgccggaaguauaaggaggagagcagacuggaacgccagaaaaucgagggcgugaagcuggaaucugaggggacguacaaaauucucaccaucuauuccacagucgcuagcucucuggugauugccaugggauuugccgcuuuccuuuucugggccauguccaauggcagcugccggugcaacaucuguaucuga

SEQ ID NO: 206099 - RNA, 1683 nt, Artificial Sequence
  derived and/or modified CDS sequence (opt5) from hemagglutinin__InfluenzaA__EPI498037
auggagaccgugagccugaucacaauucuccuggucgccacgguuuccaacgcugacaagaucugcauuggcuaccagucuaccaauagcacagaaaccguggauacacuuaccgagaacaaugugcccgucacacacgccaaagaacugcuccauaccgagcacaacgggaugcugugugcgacgucccuuggacaaccucugauccucgauaccugcacaauugaaggccugaucuaugggaauccgucuugugaccugcuccuggagggaagagaguggagcuacaucguggaacggcccuccgcuguuaacggccuuugcuauccugggaauguggagaaccuggaggaacuccgcucucuguucagcuccgccagaagcuaccagcggauucagaucuuucccgacaccauuuggaaugucucuuauaacggaacauccaaggccuguagcggcucuuucuaccgcuccaugagauggcuuacccggaaaaauggcgauuauccuauccaggacgugcaauacacgaacaaucaggggaagaacauucuguuuauguggggaaucaaucaucccccuacagauaccacacagcgcgaccucuacaccagaaccgauacaacgaccagcguugcuacagaggaaauuaaccggaucuucaaaccgcugaucggcccccgcccucuggugaacgggcucaugggaagaauugacuauuacuggucuguccugaagcccggccagacccuucggaucaaguccgaugggaaucugauugccccuugguauggacacauccucagcggcgagucccauggccgcauucugaaaacagaccuuaagagagggucuugcaccgugcaaugucagacggaaaaaggaggccugaacacaacccuccccuuucagaaugugagcaaguacgcuuucgggaacugcuccaaauauaucggaaucaagagccugaagcuggccgucggccuccggaauguuccgucucgcuccagcagagggcuguuuggagcgauugccggcuucaucgagggcggguggucuggacuuguggcuggcugguacggguuucagcacagcaacgaucaaggagugggcauggccgcugaccgggacuccacccagaaagccauugauaagaucacaucuaaagucaauaacauuguggacaagaugaauaaacaguaugaaaucaucgaucacgaguucagcgagguugaaaccagacugaacaugauuaauaacaagaucgacgaucaaauucaggacaucugggcguacaaugccgagcuccuggugcuucuggaaaaccagaaaacacucgaugagcaugacgcuaaugucaacaaccuguacaauaaggugaagcgcgcccugggguccaacgcuguugaagauggcaaaggauguuuugagcucuaucacaagugcgacaaucaguguauggagacgauucggaacggcaccuacaauaaaagaaaguaucaagaagagagcaaacuggaacgccagaagaucgagggggugaaacuugaaucugagggaacauacaagauucugaccaucuauuccacagucgccagcucucucgugaucgccaugggcuucgcugcguuucuguucugggccauguccaacgggagcugccggugcaauauuuguaucuga

SEQ ID NO: 206100 - RNA, 1683 nt, Artificial Sequence
  derived and/or modified CDS sequence (opt5) from hemagglutinin__InfluenzaA__AGO17847
auggagaccaucagccugaugacaauucuccugaucacgaccgccuccaacgcugacaagauuugcaucggccaccagucuacaaauagcaccgaaacaguggauacccuuacagagaccaacguccccguuacgcaugccaaagaacugcuccaaaccgagcacaaugggaugcugugugcgacaaaccuuggacauccucugauucucgacacgugcacaaucgaaggccugaucuacgggaauccguccugugaucugcuccuggagggaagagaguggucuuauauuguggaacggcccagcgcugugaacggaaccugcuacccugggaaugucgagaaccuugaggaacugcgcacccucuucuccucugccagcuccuaucagagaauccagauuuuucccgacacaaccuggaaugugacauacaccggaaccagccggucuuguuccggcagcuucuaucgcucuaugagauggcugacacagaaguccggcuuuuacccuguucaagaugccaaauauacgaacaaucgggggaagaacauccuuuucguguggggcauucaccauccccacaccuacacagaccagaccacacuguacauccgcaaugauaccacgacaagcgucaccaccgaggaacucaacagaauuuuuaaaccugugaucguuccgcggcugcuggugaauggccagcaggggcgcaucgacuauuacuggucuguccucaagcccggacaaacacugagagugcgguccaacggcaaccuuauugcuccuugguaugggcacgugcugagcggaggcucccauggccgcauccucaagaccgaucugaaaucugggaauugcgucguucagugucagacagagaagggaggccuuaacagcacgcugcccuuccacaauauuuccaaauacgccuuugggaccugcccuaaguaugugaaagugaacagccucaagcuggcuaucggacugagaaauguccccgcccggucuaaccgcggccucuucggggcgauugccggauuuaucgaaggcggcuggccggggcugguggcuggaugguacggcuuccagcauuccaaugaccaagggguuggaauggccgcugauagagacagcacacagaaggccguggauaaaaucaccucuaaggucaacaauauuguggacaaaaugaacaagcaguaugagaucauugaccacgaauuuagcgagguugagacacggcuuaauaugaucaacaauaaaauugaugaccaaauccaggaugugugggcguacaacgccgaacugcucguccugcuugagaaucagaagacccuggacgaacacgaugcuaacgugaacaaucucuacaacaaagucaagagagcccugggcuccaaugcuauggaggacgggaagggcuguuucgaacuguaucauaaaugcgaugaccaguguauggagacgauccgcaacggaaccuacgaucggagaaaguaucgcgaggaaucucggcucgagagacaacgcauugaaggcgugaaacuggagagcgaagggacauacaagauccuuaccauuuauuccacaguugccagcucucuggugaucgccaugggauuugcugcguuccucuucugggccauguccaauggcagcugccggugcaacauuuguaucuga

SEQ ID NO: 206101 - RNA, 1683 nt, Artificial Sequence
  derived and/or modified CDS sequence (opt5) from hemagglutinin__InfluenzaA__ANZ03807
auggagaccgugagccugaucacaauucuccuggucgccacgguuuccaacgcugacaagaucugcauuggcuaccagucuaccaauagcacagaaaccguggauacacuuaccgagaacaaugugcccgucacacacgccaaagaacugcuccauaccgagcacaacgggaugcugugugcgacgucccuuggacaaccucugauccucgauaccugcacaauugaaggccugaucuaugggaauccgucuugugaccugagccucgagggaagagagugguccuacaucguggaacggcccucugcuguuaacggccugugcuauccugggaauguggagaaccuugaggaacugcgcagccucuucuccagcgccagaucuuaccagcggauucagaucuuucccgacaccauuuggaaugucuccuaugauggaacaagcaccgccuguucuggcuccuucuaccgcagcaugagauggcugacgcggaagaacggcgacuauccuacacaggaugcucaauacaccaauaaccaggggaaaaauauccuuuuuauguggggaauuaaccaucccccuacagacgauacccagcgcaaucuguacaccagaacagacacgaccacaucuguggccaccgaggaaaucaaccggauuuucaagccgcucaucggcccccgcccucugguuaacgggcugaugggaagaaucgauuauuacugguccgugcucaaacccggccagacacugcggauuaagagcgacgggaaucuuaucgcuccuugguauggacacauucuguccggcgagucucauggccgcauccucaagaccgaucugaaaagagggagcugcacgguccaaugucagacagaaaagggaggccuuaacaccacccugcccuuucagaauguguccaaauacgccuucgggaacugcagcaaguauauuggaaucaaaucucucaagcuggcggugggccugcggaaugucccgucccgcagcucuagagggcucuuuggagccaucgcuggcuucauugagggcggguggagcggacugguugccggcugguacggguuucagcacuccaacgaccaaggagugggcauggcugccgaccgggauucuacacagaaggcgaucgacaaaauuaccagcaaggugaauaacaucgucgauaaaaugaauaagcaguaugaaauuaucgaccacgaguucuccgagguggaaacaagacuuaacaugaucaauaacaaaauugaugaccaaauccaggauauuugggccuacaaugcugagcugcucguucugcuugaaaaccagaagacgcuggacgagcaugaugccaaugugaacaaccucuacaauaaagucaagcgcgcucuggggagcaacgccguggaagacggcaagggauguuuugagcuguaucacaaaugcaaugaucaguguauggagaccauccggaacggcacauacaauagacgcaaguaucaagaagagucuaaacucgaacggcagaagauugaggggguuaaacuggaauccgagggaaccuacaagauccuuacaauuuauagcaccguggccucuucccuggucaucgcuaugggcuucgcggccuuucucuucugggcuaugagcaacggguccugcagaugcaauaucuguauuuga

SEQ ID NO: 206102 - RNA, 1683 nt, Artificial Sequence; identical to SEQ ID NO: 206101
  derived and/or modified CDS sequence (opt5) from hemagglutinin__InfluenzaA__EPI680526

SEQ ID NO: 206103 - RNA, 1683 nt, Artificial Sequence; identical to SEQ ID NO: 205757
  derived and/or modified CDS sequence (opt5) from hemagglutinin__InfluenzaA__ALT20080

SEQ ID NO: 206104 - RNA, 1410 nt, Artificial Sequence
  derived and/or modified CDS sequence (opt5) from neuraminidase__InfluenzaA__AAA43084
augaaccccaaucagaagaucauuaccaucggcagcgugucccugacaauugccacggucugcuuccucaugcaaaucgcuauucuggccaccacaguuacccuucacuuuaaacagcaugagugugacucuccugcgagcaaccaggugaugccgugcgaacccaucaucauugagagaaauaucacagaaauuguguaccugaacaauaccacaaucgagaaggaaauuuguccugaggucguggaguaucggaacugguccaaaccccagugccaaaucaccggguucgcuccuuuuucuaaggauaauagcauucgccucuccgccggaggcgacaucuggguuacgagagaacccuacgugucuugugauccugggaaaugcuaucaguucgcccugggacagggcaccacacuugacaacaagcacagcaaugggaccauccaugaucggauuccgcaccgcacacugcucaugaacgagcugggaguccccuuucaucugggcaccaaacagguguguguugcuugguccucuagcuccugccacgacggcaaggccuggcuccacgugugugucacgggggaugacagaaaugcuacagccagcuucaucuacgauggacggcugguggacucuauuggcuccuggagccaaaacauccuucgcacccaggaaucugagugcguguguauuaaugggacaugcaccgucguuaugaccgauggauccgcgagcggcagagccgacacacggauccuguuuaucaaggaggggaaaauugugcauaucuccccucucucuggaagcgcucagcacauugaagagugcuccuguuauccccgcuacccugaugugagaugcaucugucgggacaacuggaagggcagcaaucgccccgucauugacaucaacauggaagauuauucuaucgacuccggcuacgugugcagcgggcugguuggagauacgccgagaaacgacgauucuagcuccaauucuaacugucgggacccuaauaacgagcgcggcaaucccggggugaaaggaugggccuucgauaacggcgacgaugucuggauggggagaaccauuaauaaggaaagccgguccggauacgagacauuuaaggugaucggcggcuggagcaccccuaacucuaaaucccagguuaauagacaagugauugucgacaacaauaacuggagcggguauucuggaaucuucuccguggagggcaagagcugcauuaaucgcuguuuuuacgucgaacuuauccgggggagaccccaggagacacgcgugugguggaccuccaacucuauuguuguguucugcggaacgagcggcacauaugggaccggcuccuggcccgauggagcuaauaucaacuuuaugccuaucuga

SEQ ID NO: 206105 - RNA, 1362 nt, Artificial Sequence
  derived and/or modified CDS sequence (opt5) from neuraminidase__InfluenzaA__AAA43397
augaaccccaaucagaagaucauuaccaucggcagcauuugcaugguggucgggaucauuucccugauccuccaaaucggaaacauuaucucuauuuggaucagccacuccauucagacaggcaaucagaaccauacggggaucuguaaucagggaucuauuaccuacaaaguuguggccggccaagacagcacauccgugauccugaccgggaacucuagccuuugcccuaucagaggaugggcuauucacuccaaggauaauggcauccggauuggcagcaaaggggacgucuucgugauccgcgagccguuuauuucuuguucccaucuggaaugcagaacauucuuucucacccagggagcccugcuuaacgauaagcacagccggggcacauucaaagaccgcucucccuauagagcgcugauguccuguccuguuggggaggcucccagcccuuacaauucucgguuugaauccguggccuggagcgccuccgcuugccaugauggagucggcuggcucaccaucgggaucucuggacccgacgauggcgccguggcuguucugaaguauaaccgcauuaucacggagaccauuaagagcuggagaaagaauauccugcggacacaggaauccgaguguaccugcgugaacggcagcuguuucacaauuaugaccgacgggccuucugauggacucgccuccuacaagaucuuuaaaaucgagaagggcaaagucacgaaaagcauugaacugaaugcgccgaacucucacuaugaggaaugcagcuguuaccccgacacagggaaggugaugugcgugugccgcgauaauuggcacggauccaacagaccuugggucucuuucgaccagaaccuugauuauaaaaucggcuacauuuguagcgggguuuuuggagacaauccccggccuaaggacggcaccggcuccugcgggcccgugagcgccgauggagcuaacggcgugaaaggguucucuuacaaguauggaaauggcgucuggaucgggcgcacaaaauccgacagcucuagacauggcuuugagaugauuugggauccgaacggauggaccgagaccgacucccgguucagcaugcgccaagaugugguugccaucacaaauagauccggcuacucugggagcuuugugcagcacccugaacugacgggacucgacuguaugcggcccugcuucugggucgagcugauuagaggccuuccugaagaggaugcuaucuggaccuccgggucuaucauuagcuucuguggagugaacuccgacacaguugauuggagcuggcccgacggcgccgaacugcccuuuaccaucgauaaguga

SEQ ID NO: 206106 - RNA, 1365 nt, Artificial Sequence
  derived and/or modified CDS sequence (opt5) from neuraminidase__InfluenzaA__AAA43412
augaaccccaaucagaagaucauuaccaucggcagcauuugccugguggucgggcucaucucccugauucuucaaaucggaaacaucauuucuaucuggauuagccacuccauccagacaggcucucagaaucauacggggauuuguaaccagaauaucauuaccuacaaaaacagcacauggguuaaggacaccacauccgugauccugaccggaaauucuagccucugcccuaucagaggcugggccauuuauuccaaagauaacagcauccggauugggucuaagggagacguguucgucauccgcgagccguuuauuuccuguagccaccuggaaugcagaacauucuuucuuacccaaggcgcucugcucaaugaucggcauucuaacggcacggugaaagaccgcucccccuacagagcccugaugagcuguccuguuggggaggcgcccucuccuuauaauucccgguucgaaagcguggcuugguccgccucugccugccacgauggaaugggcuggcugaccaucgggaucagcggacccgacaacggcgcugucgccgugcucaaguacaaugggauuaucacagagaccauuaaguccuggcgcaaaaagauccugagaacacaggaaagcgagugugcuugcguuaacggaucuuguuuuaccauuaugacggauggcccuuccgacggccuugccagcuauaaaaucuucaagaucgagaaagggaaggugacaaagucuauugaacugaaugcgccgaacagccauuacgaggaaugcuccuguuaucccgauaccggaaaagucaugugcgugugccgggacaacuggcacggcucuaaucgcccuugggugagcuuugaucagaaccucgacuaccagaucggguacauuuguuccggagucuucggcgauaaucccagaccuaaggacgggacaggaagcugcggccccguuuauguggacggcgccaacggggugaaaggauuuucuuaccgguauggcaauggggucuggaucggacgcaccaagucccacagcucuagacauggcuucgagaugauuugggauccgaacggguggaccgagacagacuccaaauuuagcgugcggcaagauguuguggcuaugacggacugguccggcuacucuggcagcuucguccagcacccugaacugaccggacuugauuguauccgccccugcuuuuggguggagcugauuagagggcggccuaaggagaaaacaaucuggaccuccgccucuagcaucuccuucuguggaguuaauagcgacacaguggauuggucuuggcccgacggcgcugaacuccccuucaccauugauaaguga

SEQ ID NO: 206107 - RNA, 1410 nt, Artificial Sequence
  derived and/or modified CDS sequence (opt5) from neuraminidase__InfluenzaA__AAG01743
augaaccccaaucagaagaucauuacccugggcagcgugucccucacaaucgccacgauuugcuuccugaugcaaaucgcuauucuugucaccacaguuacccugcacuuuaaacaguacgagugugacuauccugccaacaaucaggcgaugccgugcgaacccaucaucauugagagaaacaucacagaaauuguguaccucaccaauacaaccaucgagaaggaaguguguccuaaacuggucgaguaucggaacuggucuaagccccagugcaaaauuacgggguucgcuccuuuuagcaaggauaauuccauccgccuuucugccggaggcgacauuugggugaccagagagcccuacguuagcugugauccugggaagugcuaucaauucgcccugggacagggcacaacccucgacaacaaacauuccaaugauacaauccacgaccggaccccgcaucgcacgcugcugaugaacgaacucggggugcccuuucaccugggaacaagacaggucuguaucgcuuggucuagcuccagcugccaugauggcaaggccuggcuucacguguguguuaccggcuacgacaaaaaugcuacagccucuuucauuuaugaugggcggcugguggacuccaucggaagcuggucucagaacauucuccgcacccaagaguccgaaugcgucuguaucaauggaaccugcacaguggugaugacggaugggagcgcgucuggcagagccgacaccaagauucuguuuaucgaggagggcaaaaucguccacacauccccucuuagcggguccgcucagcauguugaagagugcucuuguuacccccgguacccuggagugcgcugcauuuguagagauaacuggaagggcagcaaucggcccguggucgacaucaacgugaaggacuauuccauuaacagcucuuacguuugcuccggccuggugggggauaccccgcgcaauaacgacagaagcucuagcuccuauugucagaauccuaacaaugaaaaaggaacacacggcgucaaggggugggccuucgaugacggaaacgauguguggaugggccggaccaucucugaggacagccgcuccggguacgaaacguuuaaaguuauuggaggcuggagcacacccaauucuaagcuccagaucaacagacaagugaucgucgauuccgacaaucggagcggcuauucugggauuuucuccguggagggaaaaagcugcaucaacagauguuuuuacgucgagcugauucgcggccgggaacaggagaccagagugugguggaccuccaauucuaucguuguguucugcgggacaagcggaaccuauggcacaggguccuggccugauggcgcugacauuaacaucaugcccauuuga

SEQ ID NO: 206108 - RNA, 1410 nt, Artificial Sequence
  derived and/or modified CDS sequence (opt5) from neuraminidase__InfluenzaA__AAG01759
augaaccccaaucagaagaucauuaccaucggcagcgugucccugacaauugccacgaugugcuuccucaugcaaaucgcuauucuggucaccacaguuacccuucacuuuaaacaguacgaguguaacucuccuccgaauaaccaggugauccugugcgaacccacaaucauugagagaaauaucaccgaaauuguguaucucacaaacaccacgaucgagaaggaaauuuguccuaaacuggccgaguacaagaauuggagcaaaccccagugcaagaucaccggguucgcgccuuuuuccaaggacaacucuauucggcuuagcgcuggaggcgauaucugggucacacgcgagcccuauguguccugugacccugauaaaugcuaccaauucgcccuggggcagggaaccacacucaauaacagacauucuaaugacaccguucacgaucggacgccguaucgcacacugcugaugaacgaacucggcgugcccuuucaucuggggaccaagcaggucuguaucgccuggagcuccagcucuugccacgacggaaaagccuggcuucauguguguguuacaggccacgaugagaaugcuaccgcuuccuucauuuacgacggcagacugguggauagcaucgggucuugguccaagaaaauucuccggacccaggaaagcgagugcgucuguaucaacggaacaugcacgguggugaugaccgacggcucugccuccgggcgcgcggauacaaagauucuguuuaucgaggaaggaaagaucguccacauuagcccucuucugggcuccgcccaacauguugaggaaugcucuuguuaucccagauacccuggggugcggugcgugugucgcgacaauuggaaaggaagcaacagacccaucgucgauauuaacgugaaggacuacuccaucguuagcucuuaugugugcuccggccucgucggcgacaccccgcggaaaaaugaucgcagcucuagcuccaacugucugaauccuaacaaugaggaagggggacacggcgugaaggggugggcuuucgacgauggaaacgacguuuggaugggcagaacaauuucugagaaacugcggagcggguacgagaccuuuaaggugaucgaaggaugguccaaacccaauagcaagcuccagaucaaccgccaggucauuguggauagaggcaaucggucuggcuauuccgggaucuucagcgucgagggaaagucuugcauuaacagauguuuuuacguggaacugauccgcggccggaaacaggagacggaaguuugguggacauccaauagcauuguggucuucugcgggaccuccggaaccuauggcacagggucuuggccugacggcgccgauaucaaccuuaugcccauuuga

SEQ ID NO: 206109 - RNA, 1410 nt, Artificial Sequence
  derived and/or modified CDS sequence (opt5) from neuraminidase__InfluenzaA__AAG01777
augaaccccaaucagaagaucauuaccaucggcagcgugucccugacaauugccacgaucugcuuccucaugcaaauugcuauccuggucaccacaguuacccuucacuuuaaacaguacgaguguaacucuccuccgaauaaccaggugauccugugcgaacccacaauuaucgagagaaauauuaccgaaaucguguaucucacaaacaccacgauugagaaggaaaucuguccuaaacuggccgaguacaagaauuggagcaaaccccagugcaagauuaccggguucgcgccuuuuuccaaggacaacucuauccggcuuagcgcuggaggcgauaucugggucacacgcgagcccuauguguccugugacccugauaaaugcuaccaauucgcccuggggcagggaaccacacucaauaacagacauucuaaugacaccguucacgaucggacgccguaucgcacacugcugaugaacgaacucggcgugcccuuucaucuggggaccaagcaggucuguauugccuggagcuccagcucuugccacgacggaaaagccuggcuucauguguguguuacaggccacgaugagaaugcuaccgcuuccuucaucuacgacggcagacugguggauagcauugggucuugguccaagaaaauccuccggacccaggaaagcgagugcgucuguauuaacggaacaugcacgguggugaugaccgacggcucugccuccgggcgcgcggauacaaagauccuguuuaucgaggaaggaaagauuguccacaucagcccucuucugggcuccgcccaacauguugaggaaugcucuuguuaucccagauacccuggggugcggugcgugugucgcgacaauuggaaaggaagcaacagacccauugucgauaucaacgugaaggacuacuccauuguuagcucuuaugugugcuccggccucgucggcgacaccccgcggaaaaaugaucgcagcucuagcuccaacugucugaauccuaacaaugaggaagggggacacggcgugaaggggugggcuuucgacgauggaaacgacguuuggaugggcagaacaaucucugagaaacugcggagcggguacgagaccuuuaaggugaucgaaggaugguccaaacccaauagcaagcuccagauuaaccgcccugucaucguggauagaggcgaccggucuggcuauuccgggauuuucagcgucgagggaaagucuugcaucaauagauguuuuuacguggaacugauucgcggccggaaacaggagacggaaguuugguggacauccaacagcaucguggucuucugcgggaccuccggaaccuauggcacagggucuuggcccgauggcgccgacauuaaucuuaugcccaucuga

SEQ ID NO: 206110 - RNA, 1410 nt, Artificial Sequence
  derived and/or modified CDS sequence (opt5) from neuraminidase__InfluenzaA__AAG01786
augaaccccaaucagaagaucauuaccaucggcagcgugucccugacaauugccacgaugugcuuccucaugcaaaucgcuauucuggucaccacaguuacccuucacuuuaaacaguacgaguguaacucuccuccgaauaaccaggugauccugugcgaacccacaaucauugagagaaauaucaccgaaauuguguaucucacaaacaccacgaucgagaaggaaauuuguccuaaacuggccgaguacaagaauuggagcaaaccccagugcaagaucaccggguucgcgccuuuuuccaaggacaacucuauucggcuuagcgcuggaggcgauaucugggucacacgcgagcccuauguguccugugacccugauaaaugcuaccaauucgcccuggggcagggaaccacacucaauaacagacauucuaaugacaccguucacgaucggacgccguaucgcacacugcugaugaacgaacucggcgugcccuuucaucuggggaccaagcaggucuguaucgccuggagcuccagcucuugccacgacggaaaagccuggcuucauguguguguuacaggccacgaugagaaugcuaccgcuuccuucauuuacgacggcagacugguggauagcaucgggucuugguccaagaaaauucuccggacccaggaaagcgagugcgucuguaucaacggaacaugcacgguggugaugaccgacggcucugccuccgggcgcgcggauacaaagauucuguuuaucgaggaaggaaagaucguccacauuagcccucuucugggcuccgcccaacauguugaggaaugcucuuguuaucccagauacccuggggugcggugcgugugucgcgacaauuggaaaggaagcaacagacccaucgucgauauuaacgugaaggacuacuccaucguuagcucuuaugugugcuccggccucgucggcgacaccccgcggaaaaaugaucgcagcucuagcuccaacugucugaauccuaacaaugaggaagggggacacggcgugaaggggugggcuuucgacgauggaaacgacguuuggaugggcagaacaauuucugagaaacugcggagcggguacgagaccuuuaaggugaucgaaggaugguccaaacccaauagcaagcuccagaucaaccgccaggucauuguggauagaggcgaccggucuggcuauuccgggaucuucagcgucgagggaaagucuugcauuaauagauguuuuuacguggaacugauccgcggccggaaacaggagacggaaguuugguggacauccaacagcauuguggucuucugcgggaccuccggaaccuauggcacagggucuuggccugauggcgccgacaucaaucuuaugcccauuuga

SEQ ID NO: 206111 - RNA, 1410 nt, Artificial Sequence
  derived and/or modified CDS sequence (opt5) from neuraminidase__InfluenzaA__AAK71688
augaaccccaaucagaagaucauuaccaucggcagcgugucccugacaauugccacgaugugcuuccucaugcaaaucgcuauucuggucaccacaguuacccuucacuuuaaacaguacgaguguaacucuccuccgaauaaccaggugauccugugcgaacccacaaucauugagagaaauaucaccgaaauuguguaucucacaaacgccaccaucgagaaggaaauuuguccuaaacuggcggaguaccggaauuggagcaagccccagugcaaaaucacgggguucgcuccuuuuuccaaggacaacucuauucgccuuagcgccggaggcgauaucugggucaccagagagcccuauguguccugugacccugauaagugcuaccaauucgcccuggggcagggaacaacccucaauaaccggcauucuaaugacacaguucacgaucgcaccccguauagaacgcugcugaugaacgaacucggcgugcccuuucaucuggggacaaaacaggucuguaucgcuuggagcuccagcucuugccacgacggaaaggccuggcuucauguguguguuaccggccacgaugagaaugcuacagccuccuucauuuacgacggccggcugguggauagcaucgggucuugguccaaaaagauucuccgcacccaggaaagcgagugcgucuguaucaacggaaccugcacaguggugaugacggacggcucugcguccgggagagccgauaccaaaauucuguuuaucgaggaaggaaagaucguccacauuagcccucuucugggcuccgcucaacauguugaggaaugcucuuguuauccccgguacccuggggugcgcugcguguguagagacaauuggaagggaagcaaccggcccaucgucgauauuaacgugaaagacuacuccaucguuagcucuuaugugugcuccggccucgucggcgacacaccgcgcaagaaugauagaagcucuagcuccaacugucugaauccuaacaaugaggaagggggacacggcgugaaagggugggccuucgacgauggaaacgacguuuggaugggccggaccauuucugaggagcugcgcagcggguacgaaacauuuaaggugaucgagggaugguccaaacccaauagcaagcuccagaucaacagacaggucauuguggaucggggcgacagaucuggcuauuccgggaucuucagcgucgaaggaaaaucuugcauuaaucgcuguuuuuacguggagcugauccggggcagaaagcaggaaaccgagguuugguggacguccaacagcauuguggucuucugcgggacauccggaaccuauggcaccgggucuuggccugauggcgcugacaucaaucuuaugcccauuuga

SEQ ID NO: 206112 - RNA, 1410 nt, Artificial Sequence
  derived and/or modified CDS sequence (opt5) from neuraminidase__InfluenzaA__AAN01169
augaaccccaaucagaagaucauuaccaucggcagcgugucccugacaauugccacgaucugcuuccucaugcaaauugcuauccuggucaccacaguuacccuucacuuuaaacaguacgaguguaacucucugccuaauaaccaggugaugcucugcgaaccgacaaucauugagagaaauaucaccgaaauuguguaucugacaaacaccacgaucgagaaggaaauuugucccaaacuugccgaguaccggaauuggagcaagccucagugcaaaaucaccggguucgcgcccuuuuccaaggacaacucuauucgccugagcgcuggaggcgauaucugggucacaagagagccuuauguguccugugaccccgauaagugcuaccaauucgcccucgggcagggaaccacacugaauaaccggcauucuaaugacaccguucacgaucgcacgccuuauagaacacugcucaugaacgaacugggcgugccguuucaucuugggaccaaacaggucuguaucgccuggagcuccagcucuugccacgacggaaaggcuuggcugcauguguguguuacaggccacgaugagaaugccaccgcuuccuucauuuacgacggccggcucguggauagcaucgggucuugguccaaaaagauucugcgcacccaggaaagcgagugcgucuguaucaacggaacaugcacgguggugaugaccgacggcucugccuccgggagagcggauacaaaaauucuuuuuaucgaggaaggaaagaucauucacaucagccaacuguccggcucugcccagcaugucgaggaaugcagcuguuauccccgguacccugggguucgcugcguguguagagacaauuggaagggauccaaccggcccauuguggauaucaacgucaaagacuacagcauugugucuuccuauguuugcagcggccucgugggcgacaccccucgcaagaaugauucuagcuccucuagccacugucugaaccccaauaacgaggaagggggacauggcgucaaagggugggcuuucgacgauggaaaugacguguggaugggcagaacaaucuccgagaaguuucggagcggguacgagaccuucaaaguuaucgaaggauggucuaagccgaacuccaaacugcagauuaaucgccaggugaucgucgauagagacaaccggagcggcuauucuggcauuuuuagcguggaggggaaguccugcaucaauagauguuucuacgucgaacucauucgcggacggaagcaagagacggaagugugguggacauccaacucuaucguuguguuuugcggcaccagcgggaccuauggaacaggcuccuggccugauggggccgacauuaaucugaugcccaucuga

SEQ ID NO: 206113 - RNA, 1410 nt, Artificial Sequence; identical to SEQ ID NO: 206112
  derived and/or modified CDS sequence (opt5) from neuraminidase__InfluenzaA__AAN01170

SEQ ID NO: 206114 - RNA, 1410 nt, Artificial Sequence
  derived and/or modified CDS sequence (opt5) from neuraminidase__InfluenzaA__AAN01171
augaaccccaaucagaagaucauuaccaucggcagcgugucccugacaauugccacgaucugcuuccucaugcaaauugcuauccuggucaccacaguuacccuucacuuuaaacaguacgaguguaacucucugccuaauaaccaggugaugcucugcgaaccgacaaucauugagagaaauaucaccgaaauuguguaucugacaaacaccacgaucgagaaggaaauuugucccaaacuugccgaguaccggaauuggagcaagccucagugcaaaaucaccggguucgcgcccuuuuccaaggacaacucuauucgccugagcgcuggaggcgauaucugggucacaagagagccuuauguguccugugaccccgauaagugcuaccaauucgcccucgggcagggaaccacacugaauaaccggcauucuaaugacaccguucacggccgcacgccuuauagaacacugcucaugaacgaacugggggugccguuucaucuuggaaccaaacaggucuguaucgccuggagcuccagcucuugccacgauggcaaggcuuggcugcauguguguguuacaggccacgacgagaaugccaccgcuuccuucauuuacgaugggcggcucguggacagcaucggaucuugguccaaaaagauucugcgcacccaggaaagcgagugcgucuguaucaacggcacaugcacgguggugaugaccgaugggucugccuccggcagagcggacacaaaaauucuuuuuaucgaggaaggaaagaucauucacaucagccaacuguccgggucugcccagcaugucgaggaaugcagcuguuauccccgguacccuggaguucgcugcguguguagagauaauuggaagggcuccaaccggcccauuguggacaucaacgucaaagauuacagcauugugucuuccuauguuugcagcggccucgugggggacaccccucgcaagaaugacucuagcuccucuagccacugucugaaccccaauaacgaggaaggaggccauggggucaaaggaugggcuuucgaugacggcaaugauguguggauggggagaacaaucuccgagaaguuucggagcggauacgagaccuucaaaguuaucgaaggcuggucuaagccgaacuccaaacugcagauuaaucgccaggugaucgucgacagagauaaccggagcggcuauucugggaucuuuuccguggagggaaagagcugcauuaauagauguuucuacgucgaacucauucgcggccggaagcaagagacggaagugugguggacauccaacucuaucguuguguuuugcgggaccagcggaaccuauggcacaggguccuggccugacggcgccgauauuaaucugaugcccaucuga

SEQ ID NO: 206115 - RNA, 1410 nt, Artificial Sequence; identical to SEQ ID NO: 206112
  derived and/or modified CDS sequence (opt5) from neuraminidase__InfluenzaA__AAN01172

SEQ ID NO: 206116 - RNA, 1410 nt, Artificial Sequence
  derived and/or modified CDS sequence (opt5) from neuraminidase__InfluenzaA__AAN01173
augaaccccaaucagaagaucauuaccaucggcagcgugucccugacaauugccacgaucugcuuccucaugcaaauugcuauccuggucaccacaguuacccuucacuuuaaacaguacgaguguaacucucugccuaauaaccaggugaugcucugcgaaccgacaaucauugagagaaauaucaccgaaauuguguaucugacaaacaccacgaucgagaaggaaaugugucccaaacuugccgaguaccggaauuggagcaagccucagugcaaaauuaccggguucgcgcccuuuuccaaggacaacucuauccgccugagcgcuggaggcgauauuugggucacaagagagccuuauguguccugugaccccgauaagugcuaccaauucgcccucgggcagggaaccacacugaauaaccggcauucuaaugacaccguucacgaucgcacgccuuauagaacacugcucaugaacgaacugggcgugccguuucaucuugggaccaaacaggucuguaucgccuggagcuccagcucuugccacgacggaaaggcuuggcugcauguguguguuacaggccacgaugagaaugccaccgcuuccuucaucuacgacggccggcucguggauagcauugggucuugguccaaaaagauccugcgcacccaggaaagcgagugcgucuguauuaacggaacaugcacgguggugaugaccgacggcucugccuccgggagagcggauacaaaaauccuuuuuauugaggaaggaaagaucauccacauuagccaacuguccggcucugcccagcaugucgaggaaugcagcuguuauccccgguacccugggguucgcugcguguguagagacaauuggaagggauccaaccggcccaucguggauauuaacgucaaagacuacagcaucgugucuuccuauguuugcagcggccucgugggcgacaccccucgcaagaaugauucuagcuccucuagccacugucugaaccccaauaacgaggaagggggacauggcgucaaagggugggcuuucgacgauggaaaugacguguggaugggcagaacaauuuccgagaaguuucggagcggguacgagaccuucaaaguuaucgaaggauggucuaagccgaacuccaaacugcagaucaaucgccaggugauugucgauagagacaaccggagcggcuauucuggcaucuuuuccguggagggaaagagcugcauuaauagauguuucuacgucgaacucauccgcgggcggaagcaagagacggaagugugguggacauccaacucuauuguuguguuuugcggcaccagcgggaccuauggaacaggcuccuggccugauggggccgacaucaaucugaugcccauuuga

SEQ ID NO: 206117 - RNA, 1410 nt, Artificial Sequence; identical to SEQ ID NO: 206112
  derived and/or modified CDS sequence (opt5) from neuraminidase__InfluenzaA__AAN01174

SEQ ID NO: 206118 - RNA, 1410 nt, Artificial Sequence; identical to SEQ ID NO: 206112
  derived and/or modified CDS sequence (opt5) from neuraminidase__InfluenzaA__AAN01175

SEQ ID NO: 206119 - RNA, 1410 nt, Artificial Sequence; identical to SEQ ID NO: 206112
  derived and/or modified CDS sequence (opt5) from neuraminidase__InfluenzaA__AAN01176

SEQ ID NO: 206120 - RNA, 1410 nt, Artificial Sequence; identical to SEQ ID NO: 206112
  derived and/or modified CDS sequence (opt5) from neuraminidase__InfluenzaA__AAN01177

SEQ ID NO: 206121 - RNA, 1410 nt, Artificial Sequence; identical to SEQ ID NO: 206112
  derived and/or modified CDS sequence (opt5) from neuraminidase__InfluenzaA__AAN01178

SEQ ID NO: 206122 - RNA, 1410 nt, Artificial Sequence; identical to SEQ ID NO: 206112
  derived and/or modified CDS sequence (opt5) from neuraminidase__InfluenzaA__AAN01179

SEQ ID NO: 206123 - RNA, 1410 nt, Artificial Sequence; identical to SEQ ID NO: 206112
  derived and/or modified CDS sequence (opt5) from neuraminidase__InfluenzaA__AAN01180

SEQ ID NO: 206124 - RNA, 1410 nt, Artificial Sequence
  derived and/or modified CDS sequence (opt5) from neuraminidase__InfluenzaA__AAN01181
augaaccccaaucagaagaucauuaccaucggcagcgugucccugacaauugccacgaucugcuuccucaugcaaauugcuauccuggucaccacaguuacccuucacuuuaaacaguacgaguguaacucucugccuaauaaccaggugaugcucugcgaaccgacaaucauugagagaaauaucaccgaaauuguguaucugacaaacaccacgaucgagaaggaaauuugucccaaacuugccgaguaccggaauuggagcaagccucagugcaaaaucaccggguucgcgcccuuuuccaaggacaacucuauucgccugagcgcuggaggcgauaucugggucacaagagagccuuauguguccugugaccccgauaagugcuaccaauucgcccucgggcagggaaccacacugaauaaccggcauucuaaugacaccguucacgaucgcacgccuuauagaacacugcucaugaacgaacugggcgugccguuucaucuugggaccaaacaggucuguaucgccuggagcuccagcucuugccacgacggaaaggcuuggcugcauguguguguuacaggccacgaugagaaugccaccgcuuccuucauuuacgacggccggcucguggauagcaucgggucuugguccaaaaagauucugcgcacccaggaaagcgagugcgucuguaucaacggaacaugcacgguggugaugaccgacggcucugccuccgggagagcggauacaaaaauucuuuuuaucgaggaaggaaagaucauucacaucagccaacuguccggcucugcccagcaugucgaggaaugcagcuguuauccccgguacccugggguucgcugcguguguagagacaauuggaagggauccaaccggcccauuguggauaucaacgucaaagacuacagcauugugucuuccuauguuugcagcggccucgugggcgacaccccucgcaagaaugauucuagcuccucuagccacugucugaaccccaauaacgaggaagggggacauggcgucaaagggugggcuuucgacgauggaaaugacguguggaugggcagaacaaucggggagaaguuucgguccggauacgagaccuucaaaguuaucgaaggcuggagcaagccgaacucuaaacugcagauuaaucgccaggugaucgucgauagagacaaccgguccggcuauagcgggaucuuuucuguggagggaaaguccugcauuaauagauguuucuacgucgaacucauucgcggccggaagcaagagacggaagugugguggacaagcaacuccaucguuguguuuugcgggaccucuggaaccuauggcacagggagcuggccugauggcgccgacauuaaucugaugcccaucuga

SEQ ID NO: 206125 - RNA, 1410 nt, Artificial Sequence; identical to SEQ ID NO: 206112
  derived and/or modified CDS sequence (opt5) from neuraminidase__InfluenzaA__AAN01182

SEQ ID NO: 206126 - RNA, 1410 nt, Artificial Sequence; identical to SEQ ID NO: 206112
  derived and/or modified CDS sequence (opt5) from neuraminidase__InfluenzaA__AAN01183

SEQ ID NO: 206127 - RNA, 1410 nt, Artificial Sequence; identical to SEQ ID NO: 206112
  derived and/or modified CDS sequence (opt5) from neuraminidase__InfluenzaA__AAN01184

SEQ ID NO: 206128 - RNA, 1410 nt, Artificial Sequence; identical to SEQ ID NO: 206112
  derived and/or modified CDS sequence (opt5) from neuraminidase__InfluenzaA__AAN01185

SEQ ID NO: 206129 - RNA, 1410 nt, Artificial Sequence
  derived and/or modified CDS sequence (opt5) from neuraminidase__InfluenzaA__AAN01186
augaaccccaaucagaagaucauuaccaucggcagcgugucccugacaauugccacgaucugcuuccucaugcaaauugcuauccuggucaccacaguuacccuucacuuuaaacaguacgaguguaacucucugccuaauaaccaggugaugcucugcgaaccgacaaucauugagagaaauaucaccgaaauuguguaucugacaaacaccacgaucgagaaggaaauuugucccaaacuugccgaguaccggaauuggagcaagccucagugcaaaaucaccggguucgcgcccuuuuccaaggacaacucuauucgccugagcgcuggaggcgauaucugggucacaagagagccuuauguguccugugaccccgauaagugcuaccaauucgcccucgggcagggaaccacacugaauaaccggcauucuaaugacaccguucacgaucgcacgccuuauagaacacugcucaugaacgaacugggcgugccguuucaucuugggaccaaacaggucuguaucgccuggagcuccagcucuugccacgacggaaaggcuuggcugcauguguguguuacaggccacgaugagaaugccaccgcuuccuucauuuacgacggccggcucguggauagcaucgggucuugguccaaaaagauucugcgcacccaggaaagcgagugcgucuguaucaacggaacaugcacgguggugaugaccgacggcucugccuccgggagagcggauacaaaaauucuuuuuaucgaggaaggaaagaucauucacaucagccaacuguccggcucugcccagcaugucgaggaaugcagcuguuauccccgguacccugggguucgcugcguguguagagacaauuggaagggauccaaccggcccauuguggauaucaacgucaaagacuacagcauugugucuuccuauguuugcagcggccucgugggcgacaccccucgcaagaaugauucuagcuccucuagccacugucugaaccccaauaacgaggaagggggacauggcgucaaagggugggcuuucgacgauggaaaugacguguggaugggcagaacaaucuccgagaaguuucggcugggguacgagaccuucaaaguuaucgaaggauggagcaagucuaacuccaaacuccagauuaaucgccaggugaucgucgauagagacaaccggagcggcuauucuggcauuuuuagcguggaggggaaguccugcaucaauagauguuucuacgucgaacugauucgcggacggaagcaagagacggaagugugguggacauccaacucuaucguuguguuuugcggcaccagcgggaccuauggaacaggcuccuggccggauggggccgacauuaaucuuaugccuaucuga

SEQ ID NO: 206130 - RNA, 1410 nt, Artificial Sequence
  derived and/or modified CDS sequence (opt5) from neuraminidase__InfluenzaA__AAN01187
augaaccccaaucagaagaucauuaccaucggcagcgugucccugacaauugccacgaucugcuuccucaugcaaauugcuauccuggucaccacaguuacccuucacuuuaaacaguacgagugugacucucugccuaacaaucaggugaugcucugcgaaccgacaaucauugagagaaacaucaccgaaauuguguaucugacaaauaccacgaucgagaaggaaaugugucccaaacuugccgaguaccggaacuggagcaagccucagugcaaaauuaccggguucgcgcccuuuuccaaggauaauucuauccgccugagcgcuggaggcgacauuugggucacaagagagccuuauguguccugugaucccgacaagugcuaccaauucgcccucgggcagggaaccacacugaacaaucggcauucuaacgauaccguucacgaccgcacgccuuauagaacacugcucaugaaugaacugggcgugccguuucaucuugggaccaaacaggucuguaucgccuggagcuccagcucuugccacgauggaaaggcuuggcugcauguguguguuacaggccacgacgagaacgccaccgcuuccuucaucuacgauggccggcucguggacagcauugggucuugguccaaaaagauccugcgcacccaggaaagcgagugcgucuguauuaauggaacaugcacgguggugaugaccgauggcucugccuccgggagagcggacacaaaaauccuuuuuauugaggaaggaaagaucauccacauuagccaaauguccggcucugcccagcaugucgaggaaugcagcuguuauccccgguacccugggguucgcugcguguguagagauaacuggaagggauccaaucggcccaucguggacauuaacgucaaagacuacagcaucgugucuuccuauguuugcagcggccuggugggcgauaccccucgcaagaacgacucuagcuccucuagccacugucucaaucccaacaaugaggaagggggacauggcgucaaagggugggcuuucgaugacggaaacgauguguggaugggcagaacaauuuccgagaaguuucggagcggguacgagaccuucaaaguuaucgaaggauggucuaagccgaauagcaaacugcagaucaaccgccaggugauugucgacagagauaaucggagcggcuauucuggcaucuuuuccguggaggggaaguccugcauuaacagauguuucuacgucgaacugauccgcggacggaagcaagagacggaagugugguggacauccaauucuauuguuguguuuugcggcaccagcgggaccuauggaacaggcuccuggccugacggggccgauaucaaccucaugcccauuuga

SEQ ID NO: 206131 - RNA, 1410 nt, Artificial Sequence; identical to SEQ ID NO: 206112
  derived and/or modified CDS sequence (opt5) from neuraminidase__InfluenzaA__AAN01188

SEQ ID NO: 206132 - RNA, 1410 nt, Artificial Sequence
  derived and/or modified CDS sequence (opt5) from neuraminidase__InfluenzaA__AAN64883
augaaccccaaucagaagaucauuaccaucggcagcgugucccugacaauugccacgaucugcuuccucaugcaaauugcuauccuggucaccacaguuacccuucacuuuaaacaguacgaguguaacucuccuccgaauaaccaggugaugcugugcgaacccacaaucauugagagaaauaucaccgaaauuguguaucucacaaacaccacgaucgagaaggaaauuuguccuaaacuggccgaguaccggaauuggagcaagccccagugcaacaucaccggguucgcgccuuuuuccaaagacaauucuauucgccuuagcgcuggaggcgauaucugggucacaagagagcccuauguguccugugacccugauaagugcuaccaauucgcccuggggcagggaaccacacucaacaauggccauucuaacgacaccguucacgaucggacgccguaucgcacacugcugaugaaugaacucggggugcccuuucaucugggaaccaagcaggucuguaucgccuggagcuccagcucuugccacgacggcaaagccuggcuucauguguguguuacaggcgaugacgagaacgcuaccgcuuccuucauuuacaaugggagacugguggauagcaucggaucuugguccaagaaaauucuccggacccaggaaagcgagugcgucuguaucaacggcacaugcacgguggugaugaccgacgggucugccuccggaaaggcggauacaaaaauucuguuuaucgaggaaggcaagaucguccacaccagccuucuguccgggucugcccaacacguugaggaaugcagcuguuauccucgcuaccccggagugagaugcgugugucgggacaacuggaagggcuccaaucgcccuauugucgauaucaacgugaaagacuacagcauuguuucuuccuaugugugcagcggccucgucggggacacacccagaaagaaugauucuagcuccucuagccauugucuggacccgaacaaugaggaaggaggccacggggugaaaggaugggcuuucgaugacggcgaugacguuuggauggggcggaccaucuccgagaagcugcgcagcggauacgagacguuuaaagugauugaaggcuggucuaagccuaacuccaaacuccagaucaauagacaggucaucguggaucggggcaaccgcagcggguauucuggaauuuucuccgucgagggcaagagcugcaucaauagauguuuuuacguggaacugauucgggggagaaagcaggagacagaaguucuuuggaccuccaacucuaucguggucuucugcggaaccagcggcacauaugggaccggcuccuggcccgacggagccgauauuaaucugaugccuaucuga

SEQ ID NO: 206133 - RNA, 1410 nt, Artificial Sequence
  derived and/or modified CDS sequence (opt5) from neuraminidase__InfluenzaA__AAN64884
augaaccccaaucagaagaucauuaccaucggcagcgugucccugacaauugccacgaucugcuuccucaugcaaauugcuauccuggucaccacaguuacccuucacuuuaaacaguacgaguguaacucuccuccgaauaaccaggugaugcugugcgaacccacaaucauugagagaaauaucaccgaaauuguguaucucacaaacaccacgaucgagaaggaaauuuguccuaaacuggccgaguaccggaauuggagcaagccccagugcaacaucaccggguucgcgccuuuuuccaaagacaauucuauucgccuuagcgcuggaggcgauaucugggucacaagagagcccuauguguccugugacccugauaagugcuaccaauucgcccuggggcagggaaccacacucaacaauggccauucuaacgacaccguucacgaucggacgccguaucgcacacugcugaugaaugaacucggggugcccuuucaucugggaaccaagcaggucuguaucgccuggagcuccagcucuugccacgacggcaaagccuggcuucauguguguguuacaggcgaugacgagaacgcuaccgcuuccuucauuuacaaugggagacugguggauagcaucggaucuugguccaagaaaauucuccggacccaggaaagcgagugcgucuguaucaacggcacaugcacgguggugaugaccgacgggucugccuccggaaaggcggauacaaaaauucuguuuaucgaggaaggcaagaucguccacaccagccuucuguccgggucugcccaacacguugaggaaugcagcuguuauccucgcuaccccggagugagaugcgugugucgggacaacuggaagggcuccaaucgcccuauugucgauaucaacgugaaagacuacagcauuguuucuuccuaugugugcagcggccucgucggggacacacccagaaagaaugauucuagcuccucuagccauugucuggacccgaacaaugaggaaggaggccacggggugaaaggaugggcuuucgaugacggcaacgauguuuggauggggcggaccaucuccgagaagcugcgcagcggauacgagacguuuaaagugauugaaggcuggucuaagccuaauuccaaacuccagaucaacagacaggucaucguggaccggggcaaucgcagcggguauucuggaauuuucuccgucgagggcaagagcugcaucaacagauguuuuuacguggaacugauucgggggagaaagcaggagacagaaguucuuuggaccuccaauucuaucguggucuucugcggaaccagcggcacauaugggaccggcuccuggcccgauggagccgacauuaaccugaugccuaucuga

SEQ ID NO: 206134 - RNA, 1410 nt, Artificial Sequence; identical to SEQ ID NO: 206133
  derived and/or modified CDS sequence (opt5) from neuraminidase__InfluenzaA__AAN64885

SEQ ID NO: 206135 - RNA, 1410 nt, Artificial Sequence; identical to SEQ ID NO: 206133
  derived and/or modified CDS sequence (opt5) from neuraminidase__InfluenzaA__AAN64886

SEQ ID NO: 206136 - RNA, 1410 nt, Artificial Sequence; identical to SEQ ID NO: 206133
  derived and/or modified CDS sequence (opt5) from neuraminidase__InfluenzaA__AAN64887

SEQ ID NO: 206137 - RNA, 1410 nt, Artificial Sequence
  derived and/or modified CDS sequence (opt5) from neuraminidase__InfluenzaA__AAN64888
augaaccccaaucagaagaucauuaccaucggcagcgugucccugacaauugccacgaucugcuuccucaugcaaauugucauccugguuaccacagugacccuucacuuuaaacaguacgaguguaacucuccuccgaauaaccaggugaugcugugcgaacccacaaucauugagagaaauaucaccgaaauugucuaucucacaaacaccacgaucgagaaggaaauuuguccuaaacuggcugaguaccggaauuggagcaagccccagugcaacaucaccggguucgccccuuuuuccaaagacaauucuauucgccuuagcgcgggaggcgauaucugggugacaagagagcccuauguuuccugugacccugauaagugcuaccaauucgcucuggggcagggaaccacacucaacaauggccauucuaacgacaccgugcacgaucggacgccguaucgcacacugcugaugaaugaacucgggguccccuuucaucugggaaccaaacagguguguaucgccuggagcuccagcucuugccacgacggcaaagccuggcuucauguuugugugacaggcgaugacaagaacgcuaccgccuccuucauuuacaaugggagacuggucgauagcaucggaucuugguccaaaaagauucuccggacccaggagagcgaaugcguguguaucaacggcacaugcacgguggucaugaccgacgggucugcuuccggaaaagccgauacaaagauucuguuuaucgaggagggcaagaucguucacaccagccuucuguccgggucugcgcaacacguggaagagugcagcuguuauccucgcuaccccggagugagaugcgucugucgggacaacuggaaaggcuccaaucgcccuauuguggauaucaacguuaaggacuacagcauugugucuuccuaugucugcagcggccucgugggggacacacccagaaagaaugauucuagcuccucuagccauugucuggacccgaacaaugaagagggaggccacgggguuaagggaugggccuucgaugacggcaacgauguguggauggggcggaccaucuccgaaaaacugcgcagcggauacgagacguuuaaggucauugagggcuggucuaaaccuaauuccaagcuccagaucaacagacaggugaucgucgaccggggcaaucgcagcggguauucuggaauuuucuccguggaaggcaagagcugcaucaacagauguuuuuacguugagcugauucgggggagaaaucaggaaacagaggugcuuuggaccuccaacucuaucgucguguucugcggaaccagcggcacauaugggaccggcuccuggcccgauggagcugacauuaaucugaugccuaucuga

SEQ ID NO: 206138 - RNA, 1410 nt, Artificial Sequence; identical to SEQ ID NO: 206133
  derived and/or modified CDS sequence (opt5) from neuraminidase__InfluenzaA__AAN64889

SEQ ID NO: 206139 - RNA, 1410 nt, Artificial Sequence
  derived and/or modified CDS sequence (opt5) from neuraminidase__InfluenzaA__AAN64890
augaaccccaaucagaagaucauuaccaucggcagcgugucccugacaauugccacgaucugcuuccucaugcaaauugcuauccuggucaccacaguuacccuucacuuuaaacaguacgaguguaacucuccuccgaauaaccaggaaaugcugugcgagcccacaaucauugaaagaaauaucaccgagauuguguaucucacaaacaccacgaucgaaaaggagauuuguccuaaacuggccgaguaccggaauuggagcaagccccagugcaacaucaccggguucgcgccuuuuuccaaagacaauucuauucgccuuagcgcuggaggcgauaucugggugacaagagaacccuaugucuccugugacccugauaagugcuaccaauucgcccuggggcagggaaccacacucaacaauggccauucuaacgacaccgugcacgaucggacgccguaucgcacacugcugaugaaugagcucgggguucccuuucaucugggaaccaaacagguguguaucgccuggagcuccagcucuugccacgacggcaaggcuuggcuucaugucugugugacaggcgaugacgaaaacgccaccgcuuccuucauuuacaaugggagacugguugauagcaucggaucuugguccaagaaaauucuccggacccaggagagcgagugcguguguaucaacggcacaugcacggucgugaugaccgacgggucugccuccggaaaggcggauacaaaaauucuguuuaucgaagagggcaagaucgugcacaccagccuucuguccgggucugcccaacacgucgaagagugcagcuguuauccucgcuaccccggaguuagaugcgugugucgggacaacuggaagggcuccaaucgcccuauuguggauaucaacgucaaagacuacagcauugugucuuccuauguuugcagcggccucgugggggacacacccagaaagaaugauucuagcuccucuagccauugucuggacccgaacaaugaagagggaggccacggggucaaaggaugggcuuucgaugacggcaacgauguguggauggggcggaccaucuccgagaagcugcgcagcggauacgaaacguuuaaaguuauugagggcuggucuaagccuaauuccaaacuccagaucaacagacaggugaucgucgaccggggcaaucgcagcggguauucuggaauuuucuccguggaaggcaagagcugcaucaacagauguuuuuacgucgagcugauucgggggagaaagcaggaaacagaggugcuuuggaccuccaauucuaucguuguguucugcggaaccagcggcacauaugggaccggcuccuggcccgauggagccgacauuaaccugaugccuaucuga

SEQ ID NO: 206140 - RNA, 1410 nt, Artificial Sequence; identical to SEQ ID NO: 206133
  derived and/or modified CDS sequence (opt5) from neuraminidase__InfluenzaA__AAN64891

SEQ ID NO: 206141 - RNA, 1410 nt, Artificial Sequence
  derived and/or modified CDS sequence (opt5) from neuraminidase__InfluenzaA__AAO46212
augaaccccaaucagaagaucauuaccaucggcagcgugucccugacaauugagacggucugcuuccucaugcaaaucgccauucuggcuaccacaguuacccuucacuuuaaacagcaugaaugugacucuccugccagcaaccaggugaugccgugcgagcccaucaucauugaaagaaauaucacagagauuguguaccugaacaauaccacaaucgaaaaggagauuuguccugaggucguggaauaucggaacugguccaaaccccagugccaaaucaccggguucgcgccuuuuucuaaggauaauagcauucgccucuccgcuggaggcgacaucuggguuacgagagagcccuacgugucuugugauaccgggaaaugcuaucaguucgcccugggacagggcacaacccuugacaacaagcacagcaaugggacaauccaugaucggauuccucaccgcacccugcucaugaacgaacugggagucccguuucaucugggcacgaaacagguguguguugccugguccuccucuuccugccacgacggcaaggcuuggcuccacgugugugucacaggggaugacagaaaugccaccgcuagcuucaucuacgauggacggcugguggacucuauuggcuccuggagccaaaacauccuucgcacacaggagucugagugcguguguauuaaugggaccugcaccgucguuaugacagauggauccgccagcggcagagcggacacgcggauccuguuuaucaaggaagggaaaauugugcauaucagcccccucucuggaagcgcccagcacauugaggaaugcuccuguuauccucgcuaccccgaugugagaugcaucugucgggacaacuggaagggcagcaaucgcccugucauugacaucaacauggaggauuauucuaucgacuccagcuacgugugcucuggccugguuggggauacccccagaaacgacgauagcuccucuaauagcaacugucgggacccgaauaacgaacgcggaaauccuggcgugaaagggugggcuuucgauaacggagacgaugucuggaugggcagaacaauuuccaaggaccuucggagcggguacgagaccuuuaaggugaucggaggcuggucuacacccaauuccaaaagccagguuaacagacaagugauugucgauaauaacaauuggucuggcuauuccgggaucuucagcguggagggaaaguccugcauuaaccgcuguuuuuacgucgaacugauccggggcagaccucaggagacccgcgugugguggacgucuaauagcauuguuguguucugcgggacauccggaaccuauggcaccgggucuuggcccgacggcgccaacaucaauuuuaugcccaucuga

SEQ ID NO: 206142 - RNA, 1410 nt, Artificial Sequence
  derived and/or modified CDS sequence (opt5) from neuraminidase__InfluenzaA__AAO46213
augaaccccaaucagaagaucauuaccaucgacagcgugucccugacaauugccacggucugcuuccucaugcaaaucgcuauucuggccaccacaguuacccuucacuuuaaacagcaugagugugauucuccugcgagcaaccaggugaugccgugcgaacccaucaucauugagagaaauaucacagaaauuguguaccugaacaauaccacaaucgagaaggaaauuuguccugaggucguggaguaucggaacugguccaaaccccagugccaaaucaccggcuucgcuccuuuuucuaaggacaauagcauucgccucuccgccgggggagauaucuggguuacgagagaacccuacgugucuugugacaccggcaaaugcuaucaguucgcccuggggcagggaacaacccuugauaacaagcacagcaauggcacaauccaugaccggauuccucaccgcacccugcucaugaacgagcugggggucccguuucaucugggaacgaaacagguguguguugcuugguccuccucuuccugccacgauggcaaggccuggcuccacgugugugucacaggcgacgauagaaaugcuaccgccagcuucaucuacgacgggcggcugguggauucuauuggauccuggagccaaaacauccuucgcacacaggaaucugagugcguguguauuaauggaaccugcaccgucguuaugacagacggguccgcgagcggcagagccgauacgcggauccuguuuaucaaggagggcaaaauugugcauaucagcccccucucugggagcgcucagcacauugaagagugcuccuguuauccucgcuaccccgacgugagaugcaucugucgggacaacuggaagggaagcaaucgcccugucauugauaucaacauggaagacuauucuaucgauuccagcuacgugugcucuggccugguuggcgacacccccagaaacgaugacagcuccucuaauagcaacugucgggauccgaauaacgagcgcgggaauccuggagugaaaggcugggccuucgacaacggggaugacgucuggaugggaagaacaauuuccaaggaucuucggagcggcuacgaaaccuuuaaggugaucgggggauggucuacacccaauuccaaaagccagguuaacagacaagugauugucgacaauaacaauuggucuggcuauuccggcaucuucagcguggaggggaaguccugcauuaaccgcuguuuuuacgucgagcugauccggggaagaccucaggaaacccgcgugugguggacgucuaauagcauuguuguguucugcggcacauccgggaccuauggaaccggcucuuggcccgacggggcuaacaucaauuuuaugcccaucuga

SEQ ID NO: 206143 - RNA, 1410 nt, Artificial Sequence
  derived and/or modified CDS sequence (opt5) from neuraminidase__InfluenzaA__AAO46214
augaaccccaaucagaagaucauuaccaucggcagcgugucccugacaauugccacggucugcuuccucaugcaaaucgcuauucuggccaccacaguuacccuucacuuuaaacagcaugagugugacucuccugcgagcaaccaggugaugccgugcgaacccaucaucauugagagaaauaucacagaaauuguguaccugaacaauaccacaaucgagaaggaaauuuguccugaggcugucgaguaucggaacugguccaaaccccagugccaaaucaccggguucgccccuuuuucuaaggauaauagcauucgccucuccgccggaggcgacaucugggugacgagagaacccuacguuucuugugauccugggaaaugcuaucaguucgcucugggacagggcaccacacuugacaacaagcacagcaaugggaccauccaugaucggauuccgcaccgcacacugcucaugaacgagcugggagugcccuuucaucugggcaccaagcaggucuguguggccugguccucuagcuccugccacgacggcaaggcuuggcuccacguuugugugacgggggaugacagaaaugccacagcgagcuucaucuacgauggacggcuggucgacucuauuggcuccuggagccaaaacauccuucgcacccaggaaucugagugcguguguauuaaugggaucugcacaguggucaugaccgauggauccgccagcggcagagcugacacccggauccuguuuauugaggaagggaaaaucguucauauuuccccucucucuggaagcgcccagcacguggaggaaugcuccuguuauccccgcuacccugaugugagaugcaucugucgggacaacuggaaaggcagcaaucgccccgucauugacaucaacauggaggauuauucuaucgacuccagcuacgugugcucuggccugguuggggauacaccgagaaacgacgaucggagcuccaauucuaacugucgcgacccuaauaacgaaagaggaaaucccggcgugaaggggugggcuuucgauaacggagacgaugucuggaugggccggacgauuagcaaagaccuuagauccggguacgagaccuuuaaggugaucggaggcuggagcacaccuaauucuaagucccagguuaaccgccaagugauugucgauaauaacaauuggagcggcuauucugggaucuucuccguggagggaaaaagcugcauuaaccgguguuuuuacgucgaacugaucagaggccgccagcaggagacccgggugugguggacauccaauucuauuguuguguucugcgggaccagcggaacguauggcacaggguccuggcccgacggcgccaacaucaauuuuaugcccaucuga

SEQ ID NO: 206144 - RNA, 1410 nt, Artificial Sequence
  derived and/or modified CDS sequence (opt5) from neuraminidase__InfluenzaA__AAO46215
augaaccccaaucagaagaucauuaccaucggcagcgugucccugacaauugccacggucugcuuccucaugcaaaucgcuauucuggccaccacaguuacccuucacuuuaaacagcaugagugugacucuccuacaagcaaccaggugaugccgugcgaacccaucaucauugagagaaauaucaccgaaauuguguaccugaacaauacaaccaucgagaaggaaauuuguccugaggucguggaguaucggaacugguccaaaccccagugccaaaucacgggguucgcgccuuuuucuaaggauaauagcauucgccucuccgcuggaggcgacaucuggguuaccagagaacccuacgugucuugugauccugggaaaugcuaucaguucgcccugggacagggcacaacccuugacaacaagcacagcaaugggacaauccaugaucggauuccgcaccgcacccugcucaugaacgagcugggaguccccuuucaucugggcacgaaacagguguguguugccugguccucuagcuccugccacgacggcaaggcuuggcuccacgugugugucacaggggaugacagaaaugccaccgcuagcuucaucuacgauggacggcugguggacucuauuggcuccuggagccaaaacauccuucgcacacaggaaucugagugcguguguauuaaugggaccugcaccgucguuaugacagauggauccgccagcggcagagcggacacgcggauccuguuuaucaaggaggggaaaauugugcauaucuccccucucucuggaagcgcccagcacauugaagagugcuccuguuauccccgcuacccugaugugagaugcaucugucgggacaacuggaagggcagcaaucgccccgucauugacaucaacauggaagauuauucuaucgacuccagcuacgugugcucuggccugguuggggauaccccgagaaacggagacagcuccucuaauagcaacugucgggauccuaauaacgagcgcggcaaucccggggugaaaggaugggcuuucgacaacggcgaugacgucuggauggggagaacaauuuccaaggaaagccggucuggauacgagaccuuuaaggugaucggcggcugguccacaccuaauagcaaaucucagguuaacagacaagugauugucgauaauaacaauugguccggguauagcggaaucuucuccguggagggcaagucuugcauuaaccgcuguuuuuacgucgaacuuauccgggggagaccccaggagacccgcgugugguggacgagcaauuccauuguuguguucugcggaacaucuggcaccuaugggaccggcagcuggcccgacggagccaacaucaauuuuaugccuaucuga

SEQ ID NO: 206145 - RNA, 1410 nt, Artificial Sequence
  derived and/or modified CDS sequence (opt5) from neuraminidase__InfluenzaA__AAO46216
augaaccccaaucagaagaucauuaccaucggcagcgugucccugacaauugccacggucugcuuccucaugcaaaucgcuauucuggccaccacaguuacccuucacuuuaaacagcaugagugugacucuccugcgagcaaccaggugaugccgugcgaacccaucaucauugagagaaauaucacagaaauuguguaccugaacaauaccacaaucgagaaggaaauuuguccugaggucguggaguaucggaacugguccaaaccccagugccaaaucaccggguucgcuccuuuuucuaaggauaauagcauucgccucuccgccggaggcgacaucuggguuacgagagaacccuacgugucuugugauccuagcaaaugcuaucaguucgcccuggggcagggaaccacacuugagaacaagcacuccaauggcaccaagcaugaccggaucccgcaccgcacacugcucaugaacgaacuggggguccccuuucaucugggaaccaaacagguguguguugcuuggucuagcuccagcugccacgauggcaaggccuggcuccacgugugugucacgggcgacgauagaaaugcuacagccucuuucauuuacgaggggcggcugguggacuccaucgugagcuggucucaaaacauucuucgcacccaggaguccgaaugcgucuguaucaauggaacaugcaccguugugaugaccgauggcagcgcguccgggagagccgacacacggauucuguuuaucaaagagggaaagaucgugcauauuucuccucucagcggcuccgcucagcacaucgaagagugcagcuguuauccccgcuacccugaugucagaugcauuugucgggacaacuggaaagggucuaaucgccccgugaucgauauuaacauggaagacuauuccaucgacagcucuuacguuugcagcggacuggugggcgauacgccgagaaacgacgauuccucuagcaauuccaacugucgggacccuaauaacgagcgcggcaaucccggggucaagggaugggccuucgauaacggcgacgauguguggauggggagaaccaucagcaaggacucucgguccggauacgagacauuuaaaguuauuggcggguggagcaccccuaauucuaagucccaggugaacagacaagucaucguggauagcaauaacugguccggauauucuggcauuuucagcgucgaaggcaaauccugcaucaaucgcuguuuuuacguggagcuuauucgggggagaccccaggaaacacgcguuugguggaccucuaacagcaucguggucuucugcggaacguccggcacauaugggaccggaagcuggcccgacggcgcuaauauuaacuuuaugccuaucuga

SEQ ID NO: 206146 - RNA, 1410 nt, Artificial Sequence
  derived and/or modified CDS sequence (opt5) from neuraminidase__InfluenzaA__AAO46217
augaaccccaaucagaagaucauuaccaucggcagcgugucccugacaauugccacggucugcuuccucaugcaaaucgcuauucuggccaccacaguuacccuucacuuuaaacagcaugagugugacucuccugcgagcaaccaggugaugccgugcgaacccaucaucauugagagaaauaucacagaaauuguguaccugaacaauaccacaaucgagaaggaaauuuguccugaggucguggaguaucggaacugguccaaaccccagugccaaaucaccggguucgcuccuuuuucuaaggauaauagcauucgccucuccgccggaggcgacaucuggguuacgagagaacccuacgugucuugugauccuagcaaaugcuaucaguucgcccuggggcagggaaccacacuugacaacaagcacuccaauggcaccauccaugaucggauuccgcaccgcacacugcucaugaacgagcuggggguccccuuucaucugggaaccaaacagguguguguugcuuggucuagcuccagcugccacgacggcaaggccuggcuccacgugugugucacgggcgaugacagaaaugcuacagccucuuucaucuacgaugggcggcuggaagacuccauuggaagcuggucucaaaacauccuucgcacccaggaguccgagugcguguguauuaauggcacaugcaccguggucaugaccgaugggagcgcguccgggagagccgacacacggauccuguuuaucaaggaaggcaaaauuguucauaucucuccucucagcggguccgcucagcacauugaggaaugcagcuguuauccccgcuacccugaugugagaugcaucugucgggacaacuggaagggaucuaaucgccccgugcuggacauuuccauggaggauuauagcaucgacucuagcuacgucugcuccggccuugugggcgauacgccgagaaacgacgauucuagcuccaacagcaauugucgggacccuaacaaugaacgcgggaaccccggaguuaaaggcugggccuucgauaauggggacgauguguggaugggaagaaccaucucuaaggaccugcgguccggcuacgagacauuuaaggucauugggggauggagcaccccuaacucuaaaucccaggugaauagacaaguuaucguggauaacaauaacuggagcggcuauuccggcauuuucucugucgagggaaagagcugcaucaaucgcuguuuuuacguggaacucauucggggaagaucccaggagacacgcgucugguggaccucuaacagcaucgugguuuucugcggcacguccgggacauauggaaccggcagcuggcccgacggggcuaauauuaacuuuaugcccaucuga

SEQ ID NO: 206147 - RNA, 1410 nt, Artificial Sequence
  derived and/or modified CDS sequence (opt5) from neuraminidase__InfluenzaA__AAO46218
augaaccccaaucagaagaucauuaccaucggcagcgugucccugacaauugccacggucugcuuccucaugcaaaucgcuauucuggccaccacaguuacccuucacuuuaaacagcaugagugugacucuccugcgagcaaccaggugaugccgugcgaacccaucaucauugagagaaauaucacagaaauuguguaccugaacaauaccacaaucgagaaggaaauuuguccugaggucguggaguaucggaacugguccaaaccccagugccaaaucaccggguucgcuccuuuuucuaaggauaauagcauucgccucuccgccggaggcgacaucuggguuacgagagaacccuacgugucuugugauccugggaaaugcuaucaguucgcccugggacagggcaccacacuugacaacaagcacagcaaugggaccauccaugaucggauuccgcaccgcacacugcucaugaacgagcugggaguccccuuucaucugggcaccaaacagguguguguugcuugguccucuagcuccugccacgacggcaaggccuggcuccacgugugugucacgggggaugacagaaaugcuacagccagcuucaucuacgauggacggcuggaagacucuauuggcuccuggagccaaaacauccuucgcacccaggagucugagugcguguguauuaaugggacaugcaccguggucaugaccgauggauccgcgagcggcagagccgacacacggauccuguuuaucaaggaagggaaaauuguucauaucuccccucucucuggaagcgcucagcacauugaggaaugcuccuguuauccccgcuacccugaugugagaugcaucugucgggacaacuggaagggcagcaaucgccccgugcuggacauuucuauggaggauuauuccaucggcagcucuuacgucugcagcgggcuugugggagacacgccgagaaacgaugacuccucuagcaacuccaauugucgggauccuaacaaugaacgcggcaaccccgggguuaaaggaugggccuucgacaauggcgaugacguguggauggggagaaccaucagcaaggaucugcggucuggauacgagacauuuaaggucauuggcggcugguccaccccuaacagcaaaucucaggugaauagacaaguuaucguggacaacaauaacugguccggguauagcggaauuuucuccgucgagggcaagucuugcaucaaucgcuguuuuuacguggaacucauucgggggagaagccaggagacacgcgucugguggaccuccaacucuaucgugguuuucugcggaacgagcggcacauaugggaccggcuccuggcccgauggagcuaauauuaacuuuaugcccaucuga

SEQ ID NO: 206148 - RNA, 1410 nt, Artificial Sequence
  derived and/or modified CDS sequence (opt5) from neuraminidase__InfluenzaA__AAO46220
augaaccccaaucagaagaucauuaccaucggcagcgugucccugacaauugccacggucugcuuccucaugcaaaucgcuauucuggccaccacaguuacccuucacuuuaaacagcaugagugugacucuccugcgagcaaccaggugaugccgugcgaacccaucaucauugagagaaauaucacagaaauuguguaccugaacaauaccacaaucgagaaggaaauuuguccugaggcugucgaguaucggaacugguccaaaccccagugccaaaucaccggguucgccccuuuuucuaaggauaauagcauucgccucuccgccggaggcgacaucugggugacgagagaacccuacguuucuugugauccugggaaaugcuaucaguucgcucugggacagggcaccacacuugacaacaagcacagcaaugauaccauccaugaccggauuccgcaccgcacacugcucaugaacgagcugggggugcccuuucaucugggaaccagacaggucuguguggccugguccagcagcuccugccacgauggcaaggcuuggcuccacguuugugugacgggcgacgaucggaaugccacagcgagcuucaucuacgacgggcgccuggucgauucuauuggauccuggagccaaaacauccuuagaacccaggaaucugagugcguguguauuaauggcaucugcacaguggucaugaccgacggguccgccagcggacgggcugauacccgcauccuguuuauugaggaaggcaaaaucguucauauuuccccucucucugggagcgcccagcacguggaggaaugcuccuguuaucccagauacccugacgugcggugcaucugucgcgacaacuggaagggaagcaauagacccgucauugauaucaacauggaggacuauucuaucgauuccagcuacgugugcucuggccugguuggcgacacaccgcggaacgaugaccgcagcuccaauucuaacuguagagauccuaauaacgaacgggggaaucccggagugaaaggcugggcuuucgacaacggggaugacgucuggaugggaagaacgauuagcaaggaucuucgcuccggcuacgagaccuuuaaagugaucgggggauggagcacaccuaauucuaagucccagguuaaccggcaagugauugucgacaauaacaauuggagcggcuauucuggcaucuucuccguggaggggaagucuugcauuaacagauguuuuuacgucgaacugauccgcggacggcagcaggagaccagagugugguggacauccaauucuauuguuguguucugcggcaccagcgggacguauggaacaggcuccuggcccgacggggccaacaucaauuuuaugcccaucuga

SEQ ID NO: 206149 - RNA, 1410 nt, Artificial Sequence
  derived and/or modified CDS sequence (opt5) from neuraminidase__InfluenzaA__AAO46221
augaaccccaaucagaagaucauuaccaucggcagcgugucccugacaauugccacggucugcuuccucaugcaaaucgcuauucuggccaccacaguuacccuucacuuuaaacagcaugagugugacucuccugcgagcaaccaggugaugccgugcgaacccaucaucauugagagaaauaucacagaaauuguguaccugaacaauaccacaaucgagaaggaaauuuguccugaggcugccgaguaucggaacugguccaaaccccagugccaaaucaccggguucgccccuuuuucuaaggauaauagcauucgccucuccgcuggaggcgacaucugggucacgagagaacccuacgugucuugugauccugggaaaugcuaucaguucgcccugggacagggcaccacacuugacaacaagcacagcaaugauaccauccaugaccggauuccgcaccgcacacugcucaugaacgagcuggggguucccuuucaucugggaaccagacaggugugugucgcuugguccagcagcuccugccacgauggcaaggccuggcuccacguguguguuacgggcgacgaucggaaugcgacagccagcuucaucuacgacgggcgccugguggauucuauuggauccuggagccaaaacauccuuagaacccaggaaucugagugcgucuguauuaauggcaucugcacaguggugaugaccgacggguccgcuagcggacgggccgauacccgcauccuguuuauugaggaaggcaaaaucguccauauuuccccucucucugggagcgcucagcacguugaggaaugcuccuguuaucccagauacccugacgugcggugcaucugucgcgacaacuggaagggaagcaauagacccgugauugauaucaacauggaggacuauucuaucgauuccagcuacgucugcucuggccuggugggcgacacaccgcggaacgaugaccgcagcuccaauucuaacuguagagauccuaauaacgaacgggggaaucccggaguuaaaggcugggccuucgacaacggggaugacguguggaugggaagaacgauuagcaaggaucuucgcuccggcuacgagaccuuuaaagucaucgggggauggagcacaccuaauucuaagucccaggugaaccggcaaguuauuguggacaauaacaauuggagcggcuauucuggcaucuucuccgucgaggggaagucuugcauuaacagauguuuuuacguggaacugauccgcggacggcagcaggagaccagagucugguggacauccaauucuauugugguuuucugcggcaccagcgggacguauggaacaggcuccuggcccgacggggcgaacaucaauuuuaugcccaucuga

SEQ ID NO: 206150 - RNA, 1410 nt, Artificial Sequence
  derived and/or modified CDS sequence (opt5) from neuraminidase__InfluenzaA__AAO46223
augaaccccaaucagaagaucauuaccaucggcagcgugucccugacaauugccacggucugcuuccucaugcaaaucgcuauucugguuaccacagugacccuucacuuuaaacagcaugagugugacucuccugccagcaaccaggugaugccgugcgaacccaucaucauugagagaaauaucacagaaauugucuaccugaacaauaccacaaucgagaaggaaauuuguccugaggugguugaguaucggaacugguccaaaccccagugccaaaucaccggguucgcgccuuuuucuaaggauaauagcauucgccucuccgcuggaggcgacaucugggugacgagagaacccuacgucucuugugauccugggaaaugcuaucaguucgcccugggacagggcaccacacuugacaacaagcacagcaaugauaccauccaugaccggauuccgcaccgcacacugcucaugaacgagcugggggugcccuuucaucugggaaccagacagguuuguguggccugguccucuagcuccugccacgauggcaaggcuuggcuccacgucugugugacgggcgacgauaaaaaugccacagcuagcuucaucuacgacgggcggcugguggauucuauuggauccuggagccaaaacauccuucgcacccaggaaucugagugcgucuguauuaauggcacaugcaccguugugaugaccgacggguccgccagcggcagagcggauacacggauccuguuuaucgaggaaggaaagauugugcauaucuccccucucucugggagcgcccagcacgucgaggaaugcuccuguuauccccgcuacccugacgugagaugcauuugucgggacaacuggaaaggaagcaaucgccccguuaucgauauuaacauggaggacuauucuaucgauuccagcuacgugugcucuggccuggucggcgacacgccgagaaacgaugaccggagcuccaauucuaacugucgcgauccuaauaacgaaagagggaaucccggagugaagggcugggcuuucgacaacggggaugacguuuggaugggacggaccaucagcaaagaucuuagauccggcuacgagacauuuaaggugauugggggauggagcaccccuaauucuaagucccagaucaaccgccaagucauuguggacagcaauaacuggucuggcuauuccggcaucuucagcgucgaggggaaauccugcauuaaucgguguuuuuacguggaacugaucagaggacgcaagcaggagacacggguuugguggaccucuaacagcauuguggucuucugcggcacguccgggacauauggaaccggcucuuggcccgacggggccaauaucaacuuuaugcccaucuga

SEQ ID NO: 206151 - RNA, 1410 nt, Artificial Sequence; identical to SEQ ID NO: 206150
  derived and/or modified CDS sequence (opt5) from neuraminidase__InfluenzaA__AAO46224

SEQ ID NO: 206152 - RNA, 1410 nt, Artificial Sequence
  derived and/or modified CDS sequence (opt5) from neuraminidase__InfluenzaA__AAO46225
augaaccccaaucagaagaucauuaccaucggcuucgugagccugauuaucgccacagucugcuuucucaugcaaauugcuauccuggccacgaccguuacacuucacuucaaacagcaugagugugacuccccugcgucuaaccaggugaugccgugcgaacccaucauuaucgagagaaauauuaccaagaucguguaccugaacaauacaaccauugaaaaagagaucuguccugaagucguggaguaucggaacuggagcaagccccagugccacauuacaggguuugcuccuuucuccaaagauaauucuauccgccucagcgccggaggcgacaucuggguuaccagagagcccuacguguccugugauccugggaagugcuaucaauuugcccugggacagggcacgacccuugacaacaagcauucuaaugauacaauucacgaccggaucccgcaucgcacccugcucaugaacgaacuggggguccccuuccaccugggaacaagacagguguguguugcuuggagcuccagcucuugccacgauggcaaagccuggcuccaugugugugucaccggcgacgauaagaaugcuacggccuccuuuauuuacgacgggcggcugguggauagcaucggaucuuggucccacaacauucuucgcacacaggagagcgaaugcguguguaucaauggaaccugcacagucguuaugaccgacgggucugcguccggcagagccgauacccggauccuguucauuaaagagggcaagaucgugcauauuagcccucucuccgggucugcucaacacguggaggaaugcagcuguuauccccgcuacccugacgucagaugcaucugucgggacaacuggaaaggauccaaucgccccgugauugauaucaacauggaggacuauagcaucgauucuuccuacguuugcagcggccuggugggcgacacaccgagaaacaaugaugggucuagcaacuccaauugucgggacccuaacaaugaacgcggaaaccccggcgucaaggggugggccuuugauaauggagacgauguguggaugggcagaacgauuucuaaggaccuucggagcggguacgagaccuucaaaguuaucggaggcugguccacaccuaacagcaagucucaggugaauagacaggucauuguggauaacaauaacugguccggcuauagcgggaucuuuucugucgaaggaaaauccugcauuaaucgcuguuucuacguggagcugauccggggcagacagcaagagacccgcguuugguggacaagcaacuccauuguggucuuuugcgggaccucuggaacguauggcacagggagcuggcccgacggcgcuaauaucaacuucaugcccaucuga

SEQ ID NO: 206153 - RNA, 1410 nt, Artificial Sequence
  derived and/or modified CDS sequence (opt5) from neuraminidase__InfluenzaA__AAO46226
augaaccccaaucagaagaucauuaccaucggcagcgugucccugacaauugccacggucugcuuccucaugcaaaucgcuauucugguuaccacagugacccuucacuuuaaacagcaugagugugacucuccugccagcaaccaggugaugccgugcgaacccaucaucauugagagaaauaucacagaaauugucuaccugaacaauaccacaaucgagaaggaaauuuguccugaggugguugaguaucggaacugguccaaaccccagugccaaaucaccggguucgcgccuuuuucuaaggauaauagcauucgccucuccgcuggaggcgacaucugggugacgagagaacccuacgucucuugugauccugggaaaugcuaucaguucgcccugggacagggcaccacacuugacaacaagcacagcaaugauaccauccaugaccggauuccgcaccgcacacugcucaugaacgagcugggggugcccuuucaucugggaaccagacagguuuguguggccugguccucuagcuccugccacgauggcaaggcuuggcuccacgucugugugacgggcgacgaugaaaaugccacagcuagcuucaucuacgacgggcggcugguggauucuauuggauccuggagccaaaacauccuucgcacccaggagucugagugcgucuguauuaauggcacaugcaccguugugaugaccgacggguccgccagcggcagagcggauacacggauccuguuuaucgaagagggaaaaauugugcauaucuccccucucucugggagcgcccagcacgucgaagagugcuccuguuauccccgcuacccugacgugagaugcauuugucgggacaacuggaagggaagcaaucgccccguuaucgauauuaacauggaagacuauucuaucgauuccagcuacgugugcucuggccuggucggcgacacgccgagaaacgaugaccggagcuccaauucuaacugucgcgauccuaauaacgagagagggaaucccggagugaaaggcugggcuuucgacaacggggaugacguuuggaugggacggaccaucagcaaggaucuuagauccggcuacgagacauuuaaagugauugggggauggagcaccccuaauucuaagucccagaucaaccgccaagucauuguggacagcaauaacuggucuggcuauuccggcaucuucagcgucgaagggaaguccugcauuaaucgguguuuuuacguggagcugaucagaggacgccagcaggaaacacggguuugguggaccucuaacagcauuguggucuucugcggcacguccgggacauauggaaccggcucuuggcccgacggggccaauaucaacuuuaugcccaucuga

SEQ ID NO: 206154 - RNA, 1410 nt, Artificial Sequence
  derived and/or modified CDS sequence (opt5) from neuraminidase__InfluenzaA__AAO46229
augaaccccaaucagaagaucauuaccaucggcagcgugucccugacaauugccacggucugcuuccucaugcaaaucgcuauucugguuaccacagugacccuucacuuuaaacagcaugagugugacucuccugccagcaaccaggugaugccgugcgaacccaucaucauugagagaaauaucacagaaauuauguaccugaacaauaccacaaucgagaaggaaauuuguccugaggucguggaguaucggaacugguccaaaccccagugccaaaucaccggguucgcgccuuuuucuaaggauaauagcauucgccucuccgcuggaggcgacaucuggguuacgagagaacccuacgugucuugugauccugggaaaugcuaucaguucgcccugggacagggcaccacacuugacaacaagcacagcaaugauaccauccaugaccggauuccgcaccgcacacugcucaugaacgagcuggggguccccuuucaucugggaaccagacagguguguguugccugguccucuagcuccugccacgauggcaaggcuuggcuccacgugugugucacgggcgacgauaaaaaugccacagcuagcuucaucuacgacgggcggcugguggauucuauuggauccuggagccaaaacauccuucgcacccaggaaucugagugcguguguauuaauggcacaugcaccgucguuaugaccgacggguccgccagcggcagagcggauacacggauccuguuuaucgaggaaggaaagauugugcauaucuccccucucucugggagcgcccagcacguggaggaaugcuccuguuauccccgcuacccugacgucagaugcauuugucgggacaacuggaaaggaagcaaucgccccaucauugauaucaacauggaggacuauucuaucgauuccagcuacgugugcucuggccugguuggcgacacgccgagaaacgaugaccggagcuccaauucuaacugucgcaauccuaacaaugaaagagggaaccccggagugaagggcugggcuuucgauaauggggacgaugucuggaugggacggaccauuagcaaagaccuuagauccggcuacgagacauuuaaggugaucgggggauggagcaccccuaacucuaagucccagauuaaucgccaaguuaucguggauagcaacaauuggucuggcuauuccggcauuuucagcgucgaggggaaauccugcaucaaccgguguuuuuacguggaacugauuagaggacgccagcaggagacacgggucugguggaccucuaauagcaucgugguuuucugcggcacguccgggacauauggaaccggcucuuggcccgacggggccaacaucaauuuuaugcccauuuga

SEQ ID NO: 206155 - RNA, 1410 nt, Artificial Sequence
  derived and/or modified CDS sequence (opt5) from neuraminidase__InfluenzaA__AAO46230
augaaccccaaucagaagaucauuaccaucggcagcgugucccugacaauugccacggucugcuuccucaugcaaaucgcuauucugguuaccacagugacccuucacuuuaaacagcaugagugugacucuccugccagcaaccaggugaugccgugcgaacccaucaucauugagagaaaucugacagaaaucgucuaccucaacaauaccacaauugagaaggaaaucuguccugaggugguugaguaucggaacugguccaaaccccagugccaaauuaccggguucgcgccuuuuucuaaggauaauagcauccgccuguccgcuggaggcgacauuugggugacgagagaacccuacgucucuugugauccugggaaaugcuaucaguucgcccuuggacagggcaccacacuggacaacaagcacagcaaugauaccauccaugaccggaucccgcaccgcacacuccugaugaacgagcugggggugcccuuucaucucggaaccagacagguuuguguggccugguccucuagcuccugccacgauggcaaggcuuggcugcacgucugugugacgggcgacgauaaaaaugccacagcuagcuucauuuacgacgggcggcuuguggauucuaucggauccuggagccaaaacauucugcgcacccaggaaucugagugcgucuguaucaauggcacaugcaccguugugaugaccgacggguccgccagcggcagagcggauacacggauucucuuuaucgaggaaggaaagaucgugcauauuuccccucugucugggagcgcccagcacgucgaggaaugcuccuguuauccccgcuacccugacgugagaugcaucugucgggacaacuggaaaggaagcaaucgccccguuauugauaucaacauggaggacuauucuauugauuccagcuacgugugcucuggccuugucggcgacacgccgagaaacgaugaccggagcuccaauucuaacugucgcgauccuaauaacgaaagagggaaucccggagugaagggcugggcuuucgacaacggggaugacguuuggaugggacggaccaucagcaaagaucugagauccggcuacgagacauuuaaggugaucgggggauggagcaccccuaauucuaagucccagauuaaccgccaagucaucguggacagcaauaacuggucuggcuauuccggcauuuucagcgucgaggggaaauccugcaucaaucgguguuuuuacguggaacucauuagaggacgccagcaggagacacggguuugguggaccucuaacagcaucguggucuucugcggcacguccgggacauauggaaccggcucuuggcccgacggggccaauauuaacuuuaugcccaucuga

SEQ ID NO: 206156 - RNA, 1410 nt, Artificial Sequence
  derived and/or modified CDS sequence (opt5) from neuraminidase__InfluenzaA__AAO46231
augaaccccaaucagaagaucauuaccaucggcagcgugucccugacaauugccacggucugcuuccucaugcaaaucgcuauucugguuaccacagugacccuucacuuuaaacagcaugacugugauucuccugccagcaaccaggugaugccgugcgagcccaucaucauugaaagaaauaucacagagauugucuaccugaacaauaccacaaucgaaaaggagauuuguccuaaagugguugaauaucggaacugguccaagccccagugccaaaucaccggguucgcgccuuuuucuaaagacaauagcauucgccucuccgcuggaggcgauaucugggugacgagagagcccuacgucucuugugacccugugaagugcuaucaguucgcccuggggcagggaaccacacuugauaacaagcacagcaaugacaccguucaugaucggaucccgcaccgcacacugcucaugaacgagcugggcgugcccuuucaucuggggaccagacaggucuguauugccugguccucuagcuccugccacgacggaaaggcuuggcuccacgugugugugacgggcgaugacaaaaaugccacagcuagcuucaucuacgauggccggcuggucgacucuauuggguccuggagccaaaacauccuucgcacccaggaaucugagugcguuuguauuaauggaacaugcaccguggugaugaccgauggcuccgccagcgggagagcggacacacggauccuguuuaucgaagagggaaaaauuguccauaucuccccucucucuggcagcgcccagcacguggaggaaugcuccuguuauccccgcuacccugacguuagaugcauuugucgggauaacuggaaggggagcaaucgccccgugaucgacauuaacauggaggauuauucuaucgacuccagcuacgucugcucuggacuggugggcgauacgccgagaaacgacgaucggagcuccaauucuaacugucgcaauccuaacaaugaaagaggcaaccccgggguuaaaggaugggcuuucgacaauggcgaugacguguggauggggcggaccaucagcaaggaucuuagauccggauacgagacauuuaaggucauuggcggguggagcaccccuaacucuaaaucccagaucaaucgccaagugauugucgacagcaacaauuggucuggauauuccggcaucuucagcguggaaggcaaguccugcauuaaccgguguuuuuacguugagcugaucagagggcgccagcaggagacacgggugugguggaccucuaauagcauugucguguucugcggaacguccggcacauaugggaccggaucuuggcccgacggcgccaacaucaauuuuaugcccaucuga

SEQ ID NO: 206157 - RNA, 1410 nt, Artificial Sequence
  derived and/or modified CDS sequence (opt5) from neuraminidase__InfluenzaA__AAO46232
augaaccccaaucagaagaucauuaccaucggcagcgugucccugacaauugccacggucugcuuccucaugcaaaucgcuauucugguuaccacagugacccuucacuuuaaacagcaugagugugacucuccugccagcaaccaggugaugccgugcgaacccacaaucaucgagagaaauauuaccgaaaucgucuaccugaacaauacaaccauugagaaggaaaucuguccuaaagugguugaguaucggaacugguccaagccccagugccaaauuacgggguucgcgccuuuuucuaaagauaauagcauccgccucuccgcuggaggcgacauuugggugaccagagagcccuacgucucuugugauccugggaagugcuaucaguucgcccugggacagggcacaacccuugacaacaagcacagcaaugauacaauccaugaccggaucccgcaccgcacccugcucaugaacgaacugggggugcccuuucaucugggaacgagacagguuuguauugccugguccucuagcuccugccacgauggcaaggcuuggcuccacgugugugucacaggcgacgauaaaaaugccaccgcuagcuucaucuacgacgggcggcugguggauucuauuggauccuggagccaaaacauccuucgcacacaggagucugaaugcguguguauuaauggaaccugcaccgucguuaugacagacggguccgccagcggcagagcggauacgcggauccuguuuaucgaggagggcaaaauugugcauaucuccccucucucugggagcgcccagcacguggaagagugcuccuguuauccccgcuacccugacgucagaugcauuugucgggacaacuggaagggaagcaaucgccccaucauugauaucaacauggaagacuauucuaucgauuccagcuacgugugcucuggccugguuggcgacaccccgagaaacgaugaccggagcuccaauucuaacugucgcaauccuaacaaugagagagggaaccccggagugaaaggcugggcuuucgauaauggggacgaugucuggaugggacggacaauuagcaaggaccuuagauccggcuacgaaaccuuuaaggugaucgggggauggagcacaccuaacucuaaaucccagauuaaucgccaaguuaucguggauagcaacaauuggucuggcuauuccggcauuuucagcgucgaggggaaguccugcaucaaccgguguuuuuacguggagcugauuagaggacgccagcaggaaacccgggucugguggacgucuaauagcaucgugguuuucugcggcacauccgggaccuauggaaccggcucuuggcccgacggggccaacaucaauuuuaugcccauuuga

SEQ ID NO: 206158 - RNA, 1410 nt, Artificial Sequence
  derived and/or modified CDS sequence (opt5) from neuraminidase__InfluenzaA__AAO46233
augaaccccaaucagaagaucauuaccaucggcagcgugucccugacaauugccgcugucugcuuccucaugcaaaucgccauucugguuacgaccgugacacuucacuuuaaacagcaugagugugacucuccugcgagcaaccaggugaugccgugcgaacccaucaucauugagagaaauaucaccgaaauugucuaccugaacaauacaaccaucgagaaggaaauuuguccuaaagugguugaguaucggaacugguccaagccccagugccaaaucacaggguucgcuccuuuuucuaaagauaauagcauucgccucuccgccggaggcgacaucugggugaccagagagcccuacgucucuugugauccugggaagugcuaucaguucgcccugggacagggcacgacccuugacaacaagcacagcaaugauacaauccaugaccggauuccgcaccgcacccugcucaugaacgaacugggggugcccuuucaucugggaacaagacagguuuguaucgcuugguccucuagcuccugccacgauggcaaagccuggcuccacgugugugucaccggcgacgauaagaaugcuacggccagcuucauuuacgacgggcggcugguggauucuaucggauccuggagccaaaacauucuucgcacacaggagucugaaugcguguguaucaauggaaccugcacagucguuaugaccgacggguccgcgagcggcagagccgauacccggauccuguuuauugaggagggcaaaaucgugcauauuuccccucucucugggagcgcucagcacguggaagagugcuccuguuauccccgcuacccugacgucagaugcaucugucgggacaacuggaagggaagcaaucgccccgugguugauauuaacauggaagacuauucuaucgauuccagcuacgugugcucuggccuggucggcgacacaccgagaaacgaugaccggagcuccaauucuaacugucgcaauccuaacaaugagagagggaaccccggagugaaaggcugggccuucgauaauggggacgauguuuggaugggacggacgaucagcaaggaccuuagauccggcuacgaaaccuuuaaggugauugggggauggagcacaccuaacucuaaaucccagaucaaucgccaagucauuguggauagcaacaaucggucuggcuauuccggcaucuucagcgucgaggggaagggaugcauuaacagauguuuuuacguggagcugauccgcggccggcagcaggaaaccagaguuugguggacauccaauucuauuguggucuucugcgggaccagcggaacguauggcacaggguccuggcccgacggcgcuaacaucaauuuuaugcccaucuga

SEQ ID NO: 206159 - RNA, 1410 nt, Artificial Sequence
  derived and/or modified CDS sequence (opt5) from neuraminidase__InfluenzaA__AAO46235
augaaccccaaucagaagaucauuaccaucggcagcgugucccugacaauugccacggucugcuuccucaugcaaaucgcuauucugguuaccacagugacccuucacuuuaaacagcaugagugugacucuccugccagcaaccaggugaugccgugcgaacccaucaucauugagagaaauaucacagaaauugucuaccugaacaauaccacaaucgagaaggaaauuuguccuaaagugguugaguaucggaacugguccaagccccagugccaaaucaccggguucgcgccuuuuucuaaagauaauagcauucgccucuccgcuggaggcgacaucugggugacgagagagcccuacgucucuugugauccugggaagugcuaucaguucgcccugggacagggcaccacacuugacaacaagcacagcaaugauaccauccaugaccggauuccgcaccgcacacugcucaugaacgaacugggggugcccuuucaucugggaaccagacagguuuguaucgccugguccucuagcuccugccacgauggcaaggcuuggcuccacguguguauuacgggcgacgauaaaaaugccacagcuagcuucaucuacgacgggcggcuggucgauucuauuggauccuggagccaaaacauccuucgcacccaggagucugaaugcguguguaucaauggcacaugcaccguggucaugaccgacggguccgccagcggcagagcggauacacggauucuguuuaucgaggagggaaaaauuguucauaucuccccucucucugggagcgcccagcacguggaagagugcuccuguuauccccgcuacccuggagugagaugcauuugucgggacaacuggaagggcagcaaucgccccgucguggacaucaacauggaagauuauucuaucgacuccagcuacguuugcucuggccuggugggggauacgccgagaaacgacgaucggagcuccaauucuaacugucgcaauccuaacaaugagagaggaaaccagggcgucaaagggugggcuuucgacaauggagaugacguguggaugggccggaccauuagcaaggaucuuagauccggguacgaaacauuuaagguuaucggaggcuggagcacccccaacucuaaaucccaaauuaaucgccaggugaucgucgacagcgauaaccggucuggcuauuccgggauuuucagcguggagggaaaguccugcaucaauagauguuuuuacgucgagcugauucgcggccggaaacaggaaacaagagugugguggaccucuaacagcaucguuguguucugcgggacguccggaacauauggcaccgggucuuggccugacggcgccaauaucaacuuuaugcccauuuga

SEQ ID NO: 206160 - RNA, 1410 nt, Artificial Sequence
  derived and/or modified CDS sequence (opt5) from neuraminidase__InfluenzaA__AAO46236
augaaccccaaucagaagaucauuaccaucggcagcgugucccugacaauugccacggucugcuuccucaugcacaucgcuauucugguuaccacagugacccuucauuuuaaacaacacgagugugacucuccugccagcaaccaggugaugccgugcgaacccaucaucauugagagaaauaucacagaaauugucuaccugaacaauaccacaaucgagaaggaaauuuguccuaaagugguugaguaucggaacugguccaagccccagugccagaucaccggguucgcgccuuuuucuaaagauaauagcauucgccucuccgcuggaggcgacaucugggugacgagagagcccuacgucucuugugauccugggaagugcuaucaauucgcccugggacagggcaccacacuugacaacaagcauagcaaugauaccauccacgaccggauuccgcaucgcacacugcucaugaacgaacugggggugcccuuucaccugggaaccagacagguuuguaucgccugguccucuagcuccugccacgauggcaaggcuuggcuccauguguguauuacgggcgacgauaaaaaugccacagcuagcuucaucuacgacgggcggcuggucgauucuauuggauccuggagccagaacauccuucgcacccaagagucugaaugcguguguaucaauggcacaugcaccguggucaugaccgacggguccgccagcggcagagcggauacacggauucuguuuaucgaggagggaaaaauuguucacaucuccccucucucugggagcgcccagcauguggaagagugcuccuguuauccccgcuacccuggagugagaugcauuugucgggacaacuggaagggcagcaaucgccccgucguggacaucaacauggaagauuauucuaucgacuccagcuacguuugcucuggccuggugggggauacgccgagaaacgacgaucggagcuccaauucuaacugucgcaauccuaacaaugagagaggaaaccagggcgucaaagggugggcuuucgacaauggagaugacguguggaugggccggaccauuagcaaggaucuuagauccggguacgaaacauuuaagguuaucggaggcuggagcacccccaacucuaaaucccagauuaaucgccaagugaucgucgacagcgauaaccggucuggcuauuccgggauuuucagcguggagggaaaguccugcaucaauagauguuuuuacgucgagcugauucgcggccggaaacaggaaacaagagugugguggaccucuaacagcaucguuguguucugcgggacguccggaacauauggcaccgggucuuggccugacggcgccaauaucaacuuuaugcccauuuga

SEQ ID NO: 206161 - RNA, 1410 nt, Artificial Sequence
  derived and/or modified CDS sequence (opt5) from neuraminidase__InfluenzaA__AAO46237
augaaccccaaucagaagaucauuaccaucggcagcgugucccugacaauugccacggucugcuuccucaugcaaaucgcuauucugguuaccacagugacccuucacuuuaaacagcaugagugugacucuccugccagcaaccaggugaugccgugcgaacccaucaucauugagagaaauaucacagaaauugucuaccugaacaauaccacaaucgagaaggaaauuuguccuaaaaucguggaguaucggaacugguccaagccccagugccaaauuaccggguucgcgccuuuuucuaaagauaauagcauccgccucuccgcuggaggcgacaucuggguuacgagagagcccuacgugucuugugauccugggaagugcuaucaguucgcccugggacagggcaccacacuugacaacaagcacagcaaugauaccauucaugaccggaucccgcaccgcacacugcucaugaacgaacuggggguccccuuucaucugggaaccagacagguguguauugccugguccucuagcuccugccacgauggcaaggcuuggcuccacguuuguaucacgggcgacgauaaaaaugccacagcuagcuucauuuacgacgggcggcugguggauucuaucggauccuggagccaaaacauccuucgcacccaggagucugaaugcgucuguauuaauggcacaugcaccguggugaugaccgacggguccgccagcggcagagcggauacacggauccuguuuauugaggagggaaaaaucguccauauuuccccucucucugggagcgcccagcacguugaagagugcuccuguuauccccgcuacccuggagugagaugcaucugucgggacaacuggaagggcagcaaucgccccguggucgacaucaacauggaagauuauucuauugacuccagcuacgugugcucuggccugguuggggauacgccgagaaacgacgaucggagcuccaauucuaacugucgcaauccuaacaaugagagaggaaaccagggcgugaaagggugggcuuucgacaauggagaugacgucuggaugggccggaccaucagcaaggaucuuagauccggguacgaaacauuuaaggugauuggaggcuggagcacccccaacucuaaaucccaaaucaaucgccagguuauuguggacagcgauaaccggucuggcuauuccgggaucuucagcgucgagggaaaguccugcauuaauagauguuuuuacguggagcugauccgcggccggaaacaggaaacaagagucugguggaccucuaacagcaucgugguuuucugcgggacguccggaacauauggcaccgggucuuggccugacggcgccaauauuaacuuuaugcccaucuga

SEQ ID NO: 206162 - RNA, 1410 nt, Artificial Sequence
  derived and/or modified CDS sequence (opt5) from neuraminidase__InfluenzaA__AAO46238
augaaccccaaucagaagaucauuaccaucggcagcgccucccugacaauugcuacggugugcuuccucaugcaaaucgccauucuggucaccacaguuacccuucacuuuaaacagcaugagugugacucuccugcgagcaaccaggugaugccgugcgaacccaucaucauugagagaaauaucacagaaauuguguaccugaacaauaccacaaucgagaaggaaauuuguccuaaaaucgucgaguaucggaacugguccaagccccagugcaaaauuaccggguucgcuccuuuuucuaaggauaauagcauccgccucuccgccggaggcgacaucugggugacgagagagcccuacguuucuugugauccugggaagugcuaucaauucgcccugggacagggcaccacacuugacaacaaacacagcaaugauaccauucaugaccggaucccgcaccgcacacugcucaugaacgaacugggggugcccuuucaucugggaaccagacaggucuguauugcuugguccucuagcuccugccacgauggcaaggccuggcuccacguguguguuacgggcgacgauaaaaaugcuacagccagcuucaucuacgacgggcggcugguggauucuauuggauccuggagccagaacauccuucgcacccaagagucugaaugcgucuguaucaauggcacaugcaccguggugaugaccgacggguccgcgagcggcagagccgauacacggauucuguuuaucgaggagggaaagauuguccauaucuccccucucucugggagcgcucagcacguugaagagugcuccuguuauccccgcuacccugacgugagaugcauuugucgggacaacuggaaaggaagcaaucgccccguggucgauaucaacauggaagacuauucuaucgauuccagcuacgugugcucuggccugguuggcgacacgccgagaaacgaugaccggagcuccaauucuaacugucgcaauccuaacaaugagaaggggaaccagggagugaagggcugggccuucgauaauggggacgaugucuggaugggaagaaccauuagcaaagaccuucgguccggcuacgaaacauuuaaggugaucgggggauggagcacccccaacucuaaaucccagauuaauagacaaguuaucguggauagcgacaaccgcucuggcuauuccggcauuuucagcgucgaggggaaguccugcaucaaucgguguuuuuacguggagcugauuagaggacgcaaacaggaaacacgggucugguggaccucuaacagcaucgugguuuucugcggcacguccgggacauauggaaccggcucuuggccugacggggcuaauaucaaccucaugcccauuuga

SEQ ID NO: 206163 - RNA, 1410 nt, Artificial Sequence
  derived and/or modified CDS sequence (opt5) from neuraminidase__InfluenzaA__AAO46241
augaaccccaaucagaagaucauuaccaucggcagcgugucccugacaauugccacggucugcuuccucaugcaaaucgcuauucugguuaccacagugacccuucacuuuaaacagcaugagugugacucuccugccagcaaccaggugaugccgugcgaacccaucaucauugagagaaauaucacagaaauugucuaccugaacaauaccacaaucgagaaggaaauuuguccuaaagugguuggguaucggaacugguccaagccccagugccaaaucaccggauucgcgccuuuuucuaaagauaauagcauucgccucuccgcuggcggggacaucugggugacgagagagcccuacgucucuugugauccuggaaagugcuaucaguucgcccugggccaggggaccacacuugacaacaagcacagcaaugauaccauccaugaccggauuccgcaccgcacacugcucaugaacgagcugggagugcccuuucaucugggcaccagacagguuuguaucgccugguccucuagcuccugccacgauggcaaggcuuggcuccacguguguauuacgggggacgauaaaaaugccacagcuagcuucaucuacgacggacggcuggucgauucuauuggcuccuggagccaaaacauccuucgcacccaggaaucugagugcguguguaucaaugggacaugcaccguggucaugaccgacggauccgccagcggcagagcggauacacggauucuguuuaucgaagaggggaaaauuguucauaucuccccucucucuggaagcgcccagcacguggaggaaugcuccuguuauccccgcuacccuggcgugagaugcauuugucgggacaacuggaagggcagcaaucgccccgucguggacaucaacauggaggauuauucuaucgacuccagcuacguuugcucugggcuggugggagauacgccgagaaacgacgaucggagcuccaauucuaacugucgcaauccuaacaaugaaagaggcaaccagggggucaaaggaugggcuuucgacaauggcgaugacguguggauggggcggaccauuagcaaggaucuuagauccggauacgagacauuuaagguuaucggcggcuggagcacccccaacucuaaaucccaaauuaaucgccaggugaucgucgacagcgauaaccggucuggguauuccggaauuuucagcguggaaggcaaguccugcaucaauagauguuuuuacgucgagcugauucgcgggcggaaacaggagacaagagugugguggaccucuaacagcaucguuguguucugcggaacguccggcacauaugggaccggcucuuggccugacggagccaauaucaacuuuaugcccauuuga

SEQ ID NO: 206164 - RNA, 1410 nt, Artificial Sequence
  derived and/or modified CDS sequence (opt5) from neuraminidase__InfluenzaA__AAO46245
augaaccccaaucagaagaucauuaccaucggcagcgugucccugacaauugccacggucugcuuccucaugcaaaucgcuauucugguuaccacagugacccuucacuuuaaacagcaugacugugauucuccugccagcaaccaggugaugccgugcgagcccaucaucauugaaagaaauaucacagagauugucuaccugaacaauaccacaaucgaaaaggagauuuguccuaaagugguugaauaucggaacugguccaagccccagugccaaaucaccggguucgcgccuuuuucuaaagacaauagcauucgccucuccgcuggaggcgauaucugggugacgagagagcccuacgucucuugugacccugugaagugcuaucaguucgcccuggggcagggaaccacacuugauaacaagcacagcaaugacaccguucaugaucggaucccgcaccgcacacugcucaugaacgagcugggcgugcccuuucaucuggggaccagacaggucuguauugccugguccucuagcuccugccacgacggaaaggcuuggcuccacguguguaucacgggcgaugacaagaaugccacagcuagcuucauuuacgauggccggcugguggacucuaucggguccuggagccaaaacauucuucgcacccaggaaucugagugcgucuguaucaauggaacaugcaccguugugaugaccgauggcuccgccagcgggagagcggacacacggauccuguuuauugaagagggaaaaaucgugcauauuuccccucucgccggcucugcucagcacgucgaggaaugcagcuguuauccccgcuacccuggggugagaugcaucugucgggacaacuggaagggauccaaucgccccguuguggauauuaacauggaggacuauagcaucgauucuuccuacgucugcagcggccuggugggcgacacgccgagaaacgaugaccggucuagcaauuccaacugucgcaauccuaacaaugaaagagggacccagggaguuaaaggcugggccuucgauaacgggaaugaccuuuggaugggacggacaaucucuaaggaucugagaagcggcuacgagaccuuuaaggugauugggggaugguccacacccaacagcaaaucucaaaucaaucgccaggucauuguggacuccgauaaccggagcggcuauucuggcaucuucuccgucgaagggaaaagcugcauuaauagauguuuuuacguggagcucauccgcggacggaaacaggagaccagaguuugguggacguccaacucuauuguggucuucugcggcacaagcgggaccuauggaaccggcuccuggccugacggggcuaauaucaacuuuaugcccaucuga

SEQ ID NO: 206165 - RNA, 1410 nt, Artificial Sequence
  derived and/or modified CDS sequence (opt5) from neuraminidase__InfluenzaA__AAO46246
augaaccccaaucagaagaucauuaccaucggcagcgugucccugacaauugccacggucugcuuccucaugcaaaucgcuauucuggccaccacaguuacccuucacuuuaaacagcaugagugugacucuccugcgagcaaccaggugaugccgugcgaacccaucaucauugagagaaauaucacagaaauuguguaccugaacaauaccaucauugagaaggaaaucuguccuaaagucguggaguaucggaacugguccaagccccagugccaaauuacaggguucgcuccuuuuucuaaagauaauagcauccgccucuccgccggaggcgacaucuggguuaccagagagcccuacgugucuugugauccugggaagugcuaucaguucgcccugggacagggcacgacccuugacaacaagcacagcaaugauacaauucaugaccggaccccgcaccgcacacugcucaugaacgaacuggggguccccuuucaucugggaaccagacagguguguaucgcuugguccucuagcuccugccacgauggcaaagccuggcuccacguuuguauuacgggcgacgauaagaaugcuacagccagcuucaucuacgacgggcggcugguggauucuauuggauccuggagccaaaacauccuucgcacccaggagucugaaugcgucuguaucaauggcacaugcaccguggugaugaccgacggguccgcgagcggcagagccgauacacggauucuguuuaucgaggagggaaaaauuguccauaucuccccucucucugggagcgcucagcacguugaagagugcuccuguuauccccgcuacccuggagugagaugcauuugucgggacaacuggaagggcagcaaucgccccguggucgacaucaacauggaagauuauucuaucgacuccagcuacgugugcucuggccugguuggggauacgccgagaaacgacgaucggagcuccaauucuaacugucgcaauccuaacaaugagagaggaaaccagggcgugaaagggugggccuucgacaauggagaugacgucuggaugggccggaccauuagcaaggaucuuagauccggguacgaaacauuuaaggugaucggaggcuggagcacccccaacucuaaaucccaaauuaaucgccagguuaucguggacagcgauaaccggucuggcuauuccgggauuuucagcgucgagggaaaguccugcaucaauagauguuuuuacguggagcugauucgcggccggaaacaggaaacaagagucugguggaccucuaacagcaucgcuguguucugcgggacguccggaacauauggcaccgggucuuggccugacggcgccaauaucaacuuuaugcccauuuga

SEQ ID NO: 206166 - RNA, 1410 nt, Artificial Sequence
  derived and/or modified CDS sequence (opt5) from neuraminidase__InfluenzaA__AAO46247
augaaccccaaucagaagaucauuaccaucggcagcgugucccugacaauugccacggucugcuuccucaugcaaaucgcuauucugguuaccacagugacccuucacuuuaaacagcaugagugugacucuccugccagcaaccaggugaugccgugcgaacccaucaucauugagagaaauaucacagaaauugucuaccugaacaauaccacaaucgagaaggaaauuuguccuaaagugguugaguaucggaacugguccaagccccagugccaaaucaccggguucgcgccuuuuucuaaagauaauagcauucgccucuccgcuggaggcgacaucugggugacgagagagcccuacgucucuugugauccugggaagugcuaucaguucgcccugggacagggcaccacacuugacaacaagcacagcaaugauaccauccaugaccggauuccgcaccgcacacugcucaugaacgaacugggggugcccuuucaucugggaaccagacagguuuguaucgccugguccucuagcuccugccacgauggcaaggcuuggcuccacguguguauuacgggcgacgauaaaaaugccacagcuagcuucaucuacgacgggcggcuggucgauucuauuggauccuggagccaaaacauccuucgcacccaggagucugaaugcguguguaucaauggcacaugcaccguggucaugaccgacggguccgccagcggcagagcggauacacggauucuguuuaucgaggagggaaaaauuguucauaucuccccucucucugggagcgcccagcacguggaagagugcuccuguuauccccgcuacccuggagugagaugcauuugucgggacaacuggaagggcagcaaucgccccgucaucgacaucaacauggaagauuauucuauugacuccagcuacgugugcucuggccugguuggggauacgccgagaaacgacgaucggagcuccaauucuaacugucgcaauccuaacaaugagagaggaaaccagggcgugaaagggugggcuuucgacaauggagaugacgucuggaugggccggaccaucagcaaggaucuuagauccggguacgaaacauuuaaggugauuggaggcuggagcacccccaacucuaaaucccaaaucaaucgccagguuauuguggacagcgauaaccggucuggcuauuccgggaucuucagcgucgagggaaaguccugcauuaauagauguuuuuacguggagcugauccgcggccggaaacaggaaacaagagucugguggaccucuaacagcaucgugguuuucugcgggacguccggaacauauggcaccgggucuuggccugacggcgccaauauuaacuuuaugcccaucuga

SEQ ID NO: 206167 - RNA, 1410 nt, Artificial Sequence
  derived and/or modified CDS sequence (opt5) from neuraminidase__InfluenzaA__AAO46462
augaaccccaaucagaagaucauuaccaucggcagcgugucccugacaauugccacggucugcuuccucaugcaaaucgcuauucugguuaccacagugacccuucacuuuaaacaguacgagugugacucuccugccagcaaccaggugaugccgugcgaacccaucaucauugagagaaauaucacagaaauugucuaucugaacaauaccacaaucgagaaggaaauuuguccuaaagugguugaguaccggaacugguccaagccccagugccaaaucaccggguucgcgccuuuuucuaaagauaauagcauucgccucuccgcuggaggcgacaucugggugacgagagagcccuaugucucuugugaucaugggaagugcuaccaguucgcccugggacagggcaccacacuugacaacaagcacagcaaugauaccauccaugaccggauuccucaccgcacacugcucaugaacgaacugggggugccguuucaucugggaaccagacagguuuguaucgccugguccuccucuuccugccacgauggcaaggcuuggcuccacguguguauuacgggcgacgauaaaaaugccacagcuagcuucaucuaugacgggcggcuggucgauucuauuggauccuggagccaaaacauccuucgcacccaggagucugaaugcguguguaucaauggcacaugcaccguggucaugaccgacggguccgccagcggcagagcggauacacggauucuguuuaucgaggagggaaaaauuguucauaucagcccccucucugggagcgcccagcacguggaagagugcuccuguuacccucgcuaucccggagugagaugcauuugucgggacaacuggaagggcagcaaucgcccugucguggacaucaacauggaagauuacucuaucgacuccagcuacguuugcucuggccuggugggggauacgcccagaaacgacgaucggagcuccaauucuaacugucgcaauccgaacaaugagagaggaaaccagggcgucaaagggugggcuuucgacaauggagaugacguguggaugggccggaccauuagcaaggaucuuagauccggguaugaaacauuuaagguuaucggaggcuggagcaccccuaacucuaaaucccaaauuaaucgccaggugaucgucgacagcgauaaccggucuggcuacuccgggauuuucagcguggagggaaaguccugcaucaauagauguuuuuaugucgagcugauucgcggccggaaacaggaaacaagagugugguggaccucuaacagcaucguuguguucugcgggacguccggaacauacggcaccgggucuuggcccgacggcgccaauaucaacuuuaugccuauuuga

SEQ ID NO: 206168 - RNA, 1410 nt, Artificial Sequence; identical to SEQ ID NO: 206167
  derived and/or modified CDS sequence (opt5) from neuraminidase__InfluenzaA__AAO46463

SEQ ID NO: 206169 - RNA, 1410 nt, Artificial Sequence; identical to SEQ ID NO: 206167
  derived and/or modified CDS sequence (opt5) from neuraminidase__InfluenzaA__AAO46464

SEQ ID NO: 206170 - RNA, 1410 nt, Artificial Sequence; identical to SEQ ID NO: 206167
  derived and/or modified CDS sequence (opt5) from neuraminidase__InfluenzaA__AAO46465

SEQ ID NO: 206171 - RNA, 1410 nt, Artificial Sequence; identical to SEQ ID NO: 206167
  derived and/or modified CDS sequence (opt5) from neuraminidase__InfluenzaA__AAO46466

SEQ ID NO: 206172 - RNA, 1410 nt, Artificial Sequence
  derived and/or modified CDS sequence (opt5) from neuraminidase__InfluenzaA__AAO46467
augaaccccaaucagaagaucauuaccaucggcagcgugucccugacaauugccacggucugcuuccucaugcaaaucgcuauucugguuaccacagugacccuucacuuuaaacaguacgagugugacucuccugccagcaaccaggugaugccgugcgaacccaucaucauugagagaaauaucacagaaauugucuaucugaacaauaccacaaucgagaaggaaauuuguccuaaagugguugaguaccggaacugguccaagccccagugccaaaucaccggguucgcgccuuuuucuaaagauaauagcauucgccucuccgcuggaggcgacaucugggugacgagagagcccuaugucucuugugaucaugggaagugcuaccaguucgcccugggacagggcaccacacuugacaacaagcacagcaaugauaccauccaugaccggauuccucaccgcacacugcucaugaacgaacugggggugccguuucaucugggaaccagacagguuuguaucgccugguccuccucuuccugccacgauggcaaggcuuggcuccacguguguauuacgggcgacgauaaaaaugccacagcuagcuucaucuaugacgggcggcuggucgauucuauuggauccuggagccaaaacauccuucgcacccaggagucugaaugcguguguaucaauggcacaugcaccguggucaugaccgacggguccgccagcggcagagcggauacacggauucuguuuaucgaggagggaaaaauuguucauaucagcccccucacggggucugcccagcacguggaagagugcagcuguuacccucgcuaucccggagugagaugcauuugucgggacaacuggaagggcuccaaucgcccugucguggacaucaacauggaagauuacagcaucgacucuuccuacguuugcagcggccuggugggggauacccccagaaacgacgaucggucuagcaauuccaacugucgcaauccgaacaaugagagaggaaaccagggcgucaaagggugggcuuucgacaauggagaugacguguggaugggccggacaauuucuaaggaucuuagaagcggguaugaaaccuuuaagguuaucggaggcugguccacaccuaacagcaaaucucaaauuaaucgccaggugaucgucgacuccgauaaccggagcggcuacucugggauuuucuccguggagggaaagagcugcaucaauagauguuuuuaugucgagcugauucgcggccggaaacaggaaaccagagugugguggacguccaacucuaucguuguguucugcgggacaagcggaaccuacggcaccggguccuggcccgacggcgccaauaucaacuuuaugccuauuuga

SEQ ID NO: 206173 - RNA, 1410 nt, Artificial Sequence
  derived and/or modified CDS sequence (opt5) from neuraminidase__InfluenzaA__AAO46468
augaaccccaaucagaagaucauuaccaucggcagcgugucccugacaauugccacggucugcuuccucaugcaaaucgcuauucugguuaccacagugacccuucacuuuaaacaguacgagugugacuucccugccucuaaccaggugaugccgugcgaacccaucaucauugagagaaauaucacagaaauugucuaucugaacaauaccacaaucgagaaggaaauuuguccuaaagugguugaguaccggaacuggagcaagccccagugccaaaucaccggguuugcgccuuucuccaaagauaauucuauucgccucagcgcuggaggcgacaucugggugacgagagagcccuaugucuccugugaucaugggaagugcuaccaguuugcccugggacagggcaccacacuugacaacaagcacucuaaugauaccauccaugaccggauuccucaccgcacacugcucaugaacgaacugggggugccguuccaucugggaaccagacagguuuguaucgccuggagcuccagcucuugccacgauggcaaggcuuggcuccacguguguauuacgggcgacgauaaaaaugccacagcuuccuuuaucuaugacgggcggcuggucgauagcauuggaucuuggucccaaaacauccuucgcacccaggagagcgaaugcguguguaucaauggcacaugcaccguggucaugaccgacgggucugccuccggcagagcggauacacggauucuguucaucgaggagggaaaaauuguucauaucagcccccucuccgggucugcccagcacguggaagagugcagcuguuacccucgcuaucccggagugagaugcauuugucgggacaacuggaagggcuccaaucgcccugucguggacaucaacauggaagauuacagcaucgacucuuccuacguuugcagcggccuggugggggauacgcccagaaacgacgaucggucuagcaauuccaacugucgcaauccgaacaaugagagaggaaaccagggcgucaaagggugggcuuuugacaauggagaugacguguggaugggccggaccauuucuaaggaucuuagaagcggguaugaaacauucaagguuaucggaggcugguccaccccuaacagcaaaucucaaauuaaucgccaggugaucgucgacuccgauaaccggagcggcuacucugggaucuuuuccguggagggaaagagcugcauuaauagauguuucuaugucgagcugauucgcggccggaaacaggaaacaagagugugguggaccuccaacucuaucguuguguuuugcgggacgagcggaacauacggcaccggguccuggcccgacggcgccaauaucaacuucaugccuauuuga

SEQ ID NO: 206174 - RNA, 1410 nt, Artificial Sequence; identical to SEQ ID NO: 206167
  derived and/or modified CDS sequence (opt5) from neuraminidase__InfluenzaA__AAO46469

SEQ ID NO: 206175 - RNA, 1410 nt, Artificial Sequence
  derived and/or modified CDS sequence (opt5) from neuraminidase__InfluenzaA__AAO46471
augaaccccaaucagaagaucauuaccaucggcagcgugucccugacaauugccacggucugcuuccucaugcaaaucgcuauucugguuaccacagugacccuucacuuuaaacaguacgagugugacucuccugccagcaaccaggugaugccgugcgaacccaucaucauugagagaaauaucacagaaauugucuaucugaacaauaccacaaucgagaaggaaauuuguccuaaagugguugaguaccggaacugguccaagccccagugccaaaucaccggguucgcgccuuuuucuaaagauaauagcauucgccucuccgcuggaggcgacaucugggugacgagagagcccuaugucucuugugauccugggaagugcuaccaguucgcccugggacagggcaccacacuugacaacaagcauagcaaugauaccauccacgaccggauuccgcaucgcacacugcucaugaacgaacugggggugcccuuucaccugggaaccagacagguuuguaucgccugguccucuagcuccugccaugauggcaaggcuuggcuccacguguguauuacgggcgacgauaaaaaugccacagcuagcuucaucuaugacgggcggcuggucgauucuauuggauccuggagccaaaacauccuucgcacccaggagucugaaugcguguguaucaauggcacaugcaccguggucaugaccgacggguccgccagcggcagagcggauacacggauucuguuuaucgaggagggaaaaauuguucacaucuccccucucucugggagcgcccagcauguggaagagugcuccuguuacccccgcuauccuggagugagaugcauuugucgggacaacuggaagggcagcaaucgccccgucguggacaucaacauggaagauuacucuaucgacuccagcuacguuugcucuggccuggugggggauacgccgagaaacgacgaucggagcuccaauucuaacugucgcaauccuaacaaugagagaggaaaccagggcgucaaagggugggcuuucgacaauggagaugacguguggaugggccggaccauuagcaaggaucuuagauccggguaugaaacauuuaagguuaucggaggcuggagcacccccaacucuaaaucccaaauuaaucgccaggugaucgucgacagcgauaaccggucuggcuacuccgggauuuucagcguggagggaaaguccugcaucaauagauguuuuuaugucgagcugauucgcggccggaaacaggaaacaagagugugguggaccucuaacagcaucguuguguucugcgggacguccggaacauacggcaccgggucuuggccugacggcgccaauaucaacuuuaugcccauuuga

SEQ ID NO: 206176 - RNA, 1410 nt, Artificial Sequence
  derived and/or modified CDS sequence (opt5) from neuraminidase__InfluenzaA__AAO46472
augaaccccaaucagaagaucauuaccaucggcagcgugucccugacaauugccacggucugcuuccucaugcaaaucgcuauucugguuaccacagugacccuucacuuuaaacaguacgagugugacucuccugccagcaaccaggugaugccgugcgaacccaucacaaucgagagaaauauuaccgaaaucgucuaucugaacaauacaaccauugagaaggaaaucuguccuaaagugguugaguaccggaacugguccaagccccagugccaaauuacgggguucgcgccuuuuucuaaagauaauagcauccgccucuccgcuggaggcgacauuugggugaccagagagcccuaugucucuugugauccugggaagugcuaccaguucgcccugggacagggcacaacccuugacaacaagcauagcaaugauacaauccacgaccggaucccgcaucgcacccugcucaugaacgaacugggggugcccuuucaccugggaacgagacagguuuguauugccugguccucuagcuccugccaugauggcaaggcuuggcuccacguguguaucacaggcgacgauaaaaaugccaccgcuagcuucauuuaugacgggcggcuggucgauucuaucggauccuggagccaaaacauucuucgcacacaggagucugaaugcguguguaucaauggaaccugcaccguggucaugacagacggguccgccagcggcagagcggauacgcggauccuguuuauugaggagggcaaaaucguucacauuuccccucucucugggagcgcccagcauguggaagagugcuccuguuacccccgcuauccuggagugagaugcaucugucgggacaacuggaagggcagcaaucgccccgucguggacauuaacauggaagauuacucuaucgacuccagcuacguuugcucuggccuggugggggauaccccgagaaacgacgaucggagcuccaauucuaacugucgcaauccuaacaaugagagaggaaaccagggcgucaaagggugggcuuucgacaauggagaugacguguggaugggccggacaaucagcaaggaucuuagauccggguaugaaaccuuuaagguuauuagcggauggucuacacccaacuccaaaagccaaaucaaucgccaggugauugucgacucugauaaccgguccggcuacagcggcaucuucuccguggaggggaagucuugcauuaauagauguuuuuaugucgagcugauccgcggacggaaacaggaaaccagagugugguggacgagcaacuccauuguuguguucugcggcacaucugggaccuacggaaccggcagcuggccugacggggccaauaucaacuuuaugcccaucuga

SEQ ID NO: 206177 - RNA, 1410 nt, Artificial Sequence; identical to SEQ ID NO: 206167
  derived and/or modified CDS sequence (opt5) from neuraminidase__InfluenzaA__AAO46473

SEQ ID NO: 206178 - RNA, 1410 nt, Artificial Sequence; identical to SEQ ID NO: 206167
  derived and/or modified CDS sequence (opt5) from neuraminidase__InfluenzaA__AAO46474

SEQ ID NO: 206179 - RNA, 1410 nt, Artificial Sequence; identical to SEQ ID NO: 206167
  derived and/or modified CDS sequence (opt5) from neuraminidase__InfluenzaA__AAO46475

SEQ ID NO: 206180 - RNA, 1410 nt, Artificial Sequence
  derived and/or modified CDS sequence (opt5) from neuraminidase__InfluenzaA__AAO46476
augaaccccaaucagaagaucauuaccaucggcagcgugucccugacaauugccacggucugcuuccucaugcaaaucgcuauucugguuaccacagugacccuucacuuuagacaguacgagugugacucuccugccaacaaucaggugaugccgugcgaacccacaaucaucgagcggaacauuaccgaaaucgucuaucugaauaacacaaccauugagaaagaaaucuguccuaagcucguggaguaccgcaauuggagcaaaccccagugcaagauuacgggguucgcgccuuuuuccaaagauaacucuaucagacugagcgcuggaggcgacauuuggguuacccgggagcccuauguguccugugauccugggaagugcuaccaauucgcccuuggacagggcacaacccuggacaauaagcauucuaacgauacaauccacgaccgcaucccgcauagaacccuccugaugaaugaacuggggguccccuuucaccucggaacgcgccagguguguauugccuggagcuccagcucuugccaugauggcaaggcuuggcugcacguuugugugacaggcgacgauaaaaacgccaccgcuuccuucaucuaugacgggcggcuugucgauagcauuggaucuuggucccagaauauccugagaacacaagagagcgaaugcguguguauuaacgggaccugcaccguggucaugacagacggcucugccuccggacgggcggauacgcgcauccucuuuaucgaggagggcaaaauuguucacaucagcccucuguccgggucugcccagcauguggaagagugcagcuguuaccccagauauccuggagugcggugcauuugucgcgacaauuggaagggcuccaacagacccgucguggacaucaacguugaagauuacagcauugacucuuccuacgugugcagcggccuugucggggauaccccgcggaauaacgaccgcucuagcaauuccaacuguagaaauccuaacaaugagcggggaaaccacggcgugaaagggugggcuuucgaugacggaaaugauguuuggaugggcagaacaaucucuaaggaccugcgcagcggguaugaaaccuuuaaggugaucggaggcugguccacacccaacagcaaaucucagauuaaucggcaggucaucguggauuccgacaacagaagcggcuacucugggauuuucuccgucgagggaaagagcugcaucaaucgcuguuuuuauguggagcucauucggggcagagaacaagagacccgcguuugguggacguccaacucuaucguggucuucugcgggacaagcggaaccuacggcaccggguccuggccugauggcgccgacauuaaucugaugcccaucuga

SEQ ID NO: 206181 - RNA, 1410 nt, Artificial Sequence; identical to SEQ ID NO: 206167
  derived and/or modified CDS sequence (opt5) from neuraminidase__InfluenzaA__AAO46477

SEQ ID NO: 206182 - RNA, 1410 nt, Artificial Sequence
  derived and/or modified CDS sequence (opt5) from neuraminidase__InfluenzaA__AAO46478
augaaccccaaucagaagaucauuaccaucggcagcgugucccugauuaucgccacagucugcuuccucaugcaaauugcuauccugguuacgaccgugacacuucacuuuaaacagcaugagugugacucuccuagcuccaaccaggugaugccgugcgaacccaucauuaucgagagaaauauuaccgaaaucgucuaccugaacaauacaaccauugagaaggaaacauguccuaaacucguggaguaucggaacuggucuaagccccagugcaaaaucaccggguucgccccuuuuagcaaggauaauuccauucgccugucugcgggaggcgacaucuggguuacgagagagcccuacgugagcugugauccugggaagugcuaucaauucgcucuuggacagggcaccacacuggacaacaaacacuccaaugauaccauccaugaccggauuccgcaccgcacacuccugaugaacgaacuggggguccccuuucaucucggaaccagacagguguguaucgccuggucuagcuccagcugccacgauggcaaggccuggcugcacguuugugugacgggcgacgauaaaaaugcuacagccucuuucauuuacgacgggcggcuugucgauuccaucggaagcuggucucagaacauucugcgcacccaagaguccgaaugcguguguaucaauggcacaugcaccguggucaugaccgacgggaacgcuagcggcagagccgauacacggauccucuuuauugaggagggaaagaucguucauauuuccccucugucugggagcgcgcagcacguggaagagugcuccuguuauccccgcuacccugacgugagaugcaucugucgggacaauuggaaaggaagcaaccgccccauugucgauaucaacaugaaggacuauucuaucgauuccagcuacgugugcucuggccuuguuggcgacacgccgagaaaugaugaccggagcuccaagucuaacugucgcaauccuaacaaugaaagagggaaccauggagugaaaggcugggccuucgauaaugggaacgacgucuggaugggacggaccauuagcaaggaucugagauccggcuacgagacauuuaaagugaucgggggauggagcacccccaauucuaagucccagauuaaccgccagguuaucguggacagcgauaaucggucuggcuauuccggcauuuucagcgucgaagggaaauccugcaucaacagauguuuuuacguggagcucauucgcggacgggagcaagaaacaagagucugguggaccucuaauagcaucgugguuuucugcggcacguccgggacauauggaaccggcucuuggccugacggggcuaacaucaauuuuaugcccauuuga

SEQ ID NO: 206183 - RNA, 1410 nt, Artificial Sequence
  derived and/or modified CDS sequence (opt5) from neuraminidase__InfluenzaA__AAO46479
augaaccccaaucagaagaucauuaccaucggcagcgugucccugacaauugccacggucugcuuccucaugcaaaucgcuauucugguuaccacagugacccuucacuuuaaacaguacgagugugacucuccugccagcaacagagugaugccgugcgaacccaucaucauugagcggaauaucacagaaauugucuaucugaacaauaccacaaucgagaaggaaauuuguccuaaagugguugaguaccgcaacugguccaagccccagugccagaucaccggguucgcgccuuuuucuaaagauaauagcauuagacucuccgcuggaggcgacaucugggugacgcgggagcccuaugucucuugugauccugggaagugcuaccaauucgcccugggacagggcaccacacuugacaacaagcauagcaaugauaccauccacgaccgcauuccgcauagaacacugcucaugaacgaacugggggugcccuuucaccugggaacccggcagguuuguaucgccugguccucuagcuccugccaugauggcaaggcuuggcuccacguguguauuacgggcgacgauaaaaaugccacagcuagcuucaucuaugacgggcgccuggucgauucuauuggauccuggagccagaacauccuuagaacccaagagucugaaugcguguguaucaauggcacaugcaccguggucaugaccgacggguccgccagcggacgggcggauacacgcauucuguuuaucgaggagggcaaaauuguucacaucuccccucucucugggagcgcccagcauguggaagagugcuccuguuaccccagauauccuggagugcggugcauuugucgcgacaacuggaagggcagcaauagacccgucguggacaucaacauggaagauuacucuaucgacuccagcuacguuugcucuggccuggugggggauacgccgcggaacgacgaucgcagcuccaauucuaacuguagaaauccuaacaaugagcggggaaaccagggcgucaaagggugggcuuucgacaauggagaugacguguggaugggcagaaccauuagcaaggaucuucgcuccggguaugaaacauuuaagguuaucggaggcuggagcacccccaacucuaaaucccagauuaaucggcaagugaucgucgacagcggcaacagaucuggguacuccggaauuuucagcguggagggcaaguccugcaucaaucgcuguuuuuaugucgagcugauucgggggagaaaacaggaaacacgcgugugguggaccucuaacagcaucguuguguucugcggaacguccggcacauacgggaccggcucuuggccugauggagccaauaucaacuuuaugcccauuuga

SEQ ID NO: 206184 - RNA, 1410 nt, Artificial Sequence
  derived and/or modified CDS sequence (opt5) from neuraminidase__InfluenzaA__AAO46481
augaaccccaaucagaagaucauuaccaucggcagcgugucccugacaauugccacggucugcuuccucaugcaaaucgcuauucugguuaccacagugacccuucacuuuaaacaguacgagugugacucuccugccaacaaucaggugaugccgugcgaacccaucaucauugagagaaacaucacagaaauugucuaucugaccaauacaaccaucgagaaggaaauuuguccuaaacucguggaguaccggaacuggagcaagccccagugcaaaaucacgggguucgcgccuuuuuccaaggauaauucuauucgccugagcgcuggaggcgacaucuggguuaccagagagcccuauguguccugugauccugggaagugcuaccaauucgcccuuggacagggcacaacccuggacaacaaacauucuaaugauacaauccacgaccggauuccgcaucgcacccuccugaugaacgaacuggggguccccuuucaccucggaacgagacagguguguaucgccuggagcuccagcucuugccaugauggcaaggcuuggcugcacguuugugugacaggcgacgauaaaaaugccaccgcuuccuucauuuaugacgggcggcuugucgauagcaucggaucuuggucccagaacauucugcgcacacaagagagcgaaugcguguguaucaauggaaccugcaccguggucaugacagacgggucugccuccggcagagcggauacgcggauccucuuuauugaggagggcaagaucguucacauuagcccucuguccgggucugcccagcauguggaagagugcagcuguuacccccgcuauccuggagugagaugcaucugucgggacaacuggaaaggcuccaaucgccccgucguggacauuaacguuaaggauuacagcaucgacucuagauacgugugcuccggccuugucggggauaccccgcggaacaaugaccgcagcucuaacagcaauuguagaaacccuaauaacgaacggggaaaucacggcgugaaggggugggcuuucgaugacggaaacgauguuuggaugggcagaacaaucuccaaagacucucgcagcggguaugagaccuuuaaggugauuggaggcugguccacacccaauagcaaaucucagaucaaccggcaggucauuguggauuccgacaauagaagcggcuacucugggaucuucuccgucgaaagcaaguccugcauuaaccgcuguuuuuauguggagcugauccggggaagagagcaagaaacccgcguuugguggacgucuaauagcauuguggucuucugcggcacauccgggaccuacggaaccggcucuuggccugauggggccgacaucaaccucaugcccaucuga

SEQ ID NO: 206185 - RNA, 1410 nt, Artificial Sequence
  derived and/or modified CDS sequence (opt5) from neuraminidase__InfluenzaA__AAO46482
augaaccccaaucagaagaucauuaccaucggcagcgugucccugacaauugccacggucugcuuccucaugcaaaucgcuauucugguuaccacagugacccuucacuuuaaacaguacgagugugacucuccugccaacaaucaggugaugccgugcgaacccaugaucaucgagagaaacauuacagaaaucgucuaucugaccaauacaaccauugagaaggaaaucuguccuaaacucguggaguaccggaacuggagcaagccccagugcaaaauuacgggguucgcgccuuuuuccaaggauaauucuauccgccugagcgcuggaggcgacauuuggguuaccagagagcccuauguguccugugauccugggaagugcuaccaauucgcccuuggacagggcacaacccuggacaacaaacauucuaaugauacaauccacgaccggaucccgcaucgcacccuccugaugaacgaacuggggguccccuuucaccucggaacgagacagguguguauugccuggagcuccagcucuugccaugauggcaaggcuuggcugcacguuugugugacaggcgacgauaaaaaugccaccgcuuccuucaucuaugacgggcggcuugucgauagcauuggaucuuggucccagaacauccugcgcacacaagagagcgaaugcguguguauuaauggaaccugcaccguggucaugacagacgggucugccuccggcagagcggauacgcggauccucuuuaucgaggagggcaagauuguucacaucagcccucuguccgggucugcccagcauguggaagagugcagcuguuacccccgcuauccuggagugagaugcauuugucgggacaacuggaaaggcuccaaucgccccgucguggacaucaacguuaaggauuacagcauugacucuagauacgugugcuccggccuugucggggauaccccgcggaacaaugaccgcagcucuaacagcaauuguagaaacccuaauaacgauaagggaaaucacggcgugaaagggugggcuuucgacgauggaaacgacguuuggaugggccggacaaucuccaaggauucuagaagcggguaugaaaccuuuaaagugaucggaggcugguccacacccaauagcaagucucagauuaaccgccaggucaucguggacuccgauaaucggagcggcuacucugggauuuucuccgucgagggaaaaagcugcaucaacagauguuuuuauguggaacugauucgcggccgggagcaagagaccagaguuugguggacguccaauucuaucguggucuucugcgggacaagcggaaccuacggcaccggguccuggccugacggcgccgacauuaaccucaugcccaucuga

SEQ ID NO: 206186 - RNA, 1410 nt, Artificial Sequence
  derived and/or modified CDS sequence (opt5) from neuraminidase__InfluenzaA__AAO46483
augaaccccaaucagaagaucauuaccaucggcagcgugucccugacaauugccacggucugcuuccucaugcaaaucgcuauucugguuaccacagugacccuucacuuuagacaguacgagugugacucuccugccaacaaucaggugaugccgugcgaacccaucaucauugagcggaacaucacagaaauugucuaucugaauaacaccacaaucgagaaagaaauuuguccuaagcucguggaguaccgcaauuggagcaaaccccagugcaagaucaccggguucgcgccuuuuuccaaagauaacucuauuagacugagcgcuggaggcgacaucuggguuacgcgggagcccuauguguccugugauccugggaagugcuaccaauucgcccuuggacagggcaccacacuggacaauaagcauucuaacgauaccauccacgaccgcauuccgcauagaacacuccugaugaaugaacuggggguccccuuucaccucggaacccgccagguguguaucgccuggagcuccagcucuugccaugauggcaaggcuuggcugcacguuugugugacgggcgacgauaaaaacgccacagcuuccuucauuuaugacgggcggcuugucgauagcaucggaucuuggucccagaauauucugagaacccaagagagcgaaugcguguguaucaacggcacaugcaccguggucaugaccgacgggucugccuccggacgggcggauacacgcauccucuuuauugaggagggcaaaaucguucacauuagcccucuguccgggucugcccagcauguggaagagugcagcuguuaccccagauauccuggagugcggugcaucugucgcgacaauuggaagggcuccaacagacccgucguggacauuaacguugaagauuacagcaucgacucuuccuacgugugcagcggccuugucggggauacgccgcggaauaacgaccgcucuagcaauuccaacuguagaaauccuaacaaugagcggggaaaccacggcgugaaagggugggcuuucgaugacggaaaugauguuuggaugggcagaaccaucucuaaggaccugcgcagcggguaugaaacauuuaaggugauuggaggcugguccacccccaacagcaaaucucagaucaaucggcaggucauuguggauuccgacaacagaagcggcuacucugggaucuucuccgucgagggaaagagcugcauuaaucgcuguuuuuauguggagcucauccggggcagagaacaagagacacgcguuugguggaccuccaacucuauuguggucuucugcgggacgagcggaacauacggcaccggguccuggccugauggcgccgacaucaaucugaugcccaucuga

SEQ ID NO: 206187 - RNA, 1410 nt, Artificial Sequence
  derived and/or modified CDS sequence (opt5) from neuraminidase__InfluenzaA__AAO46485
augaaccccaaucagaagaucauuaccaucggcagcgugucccugacaauugccacggucugcuuccucaugcaaaucgcuauucugguuaccacagugacccuucacuuuaaacaguacgagugugacucuccugccaacaaucaggugaugccgugcgaacccaucaucauugagagaaacaucacagaaauugucuaucugaccaauacaaccaucgagaaggaaauuuguccuaaacucguggaguaccggaacuggagcaagccccagugcaaaaucacgggguucgcgccuuuuuccaaggauaauucuauucgccugagcgcuggaggcgacaucuggguuaccagagagcccuauguguccugugauccugggaagugcuaccaauucgcccuuggacagggcacaacccuggacaacaaacauucuaaugauacaauccacgaccggauuccgcaucgcacccuccugaugaacgaacuggggguccccuuucaccucggaacgagacagguguguaucgccuggagcuccagcucuugccaugauggcaaggcuuggcugcacguuugugugacaggcgacgauaaaaaugccaccgcuuccuucauuuaugacgggcggcuugucgauagcaucggaucuuggucccagaacauucugcgcacacaagagagcgaaugcguguguaucaauggaaccugcaccguggucaugacagacgggucugccuccggcagagcggauacgcggauccucuuuauugaggagggcaagaucguucacauuagcccucuguccgggucugcccagcauguggaagagugcagcuguuacccccgcuauccuggagugagaugcaucugucgggacaacuggaaaggcuccaaucgccccgucguggacauuaacguuaaggauuacagcaucgacucuagauacgugugcuccggccuugucggggauaccccgcggaacaaugaccgcagcucuaacagcaauuguagaaacccuaauaacgauaagggaaaucacggcgugaaagggugggcuuucgacgauggaaacgacguuuggaugggccggacaaucuccaaggauucuagaagcggguaugaaaccuuuaaagugauuggaggcugguccacacccaauagcaagucucagaucaaccgccaggucauuguggacuccgauaaucggagcggcuacucugggaucuucuccgucgagggaaaaagcugcauuaacagauguuuuuauguggaacugauccgcggccgggagcaagagaccagaguuugguggacguccaauucuauuguggucuucugcgggacaagcggaaccuacggcaccggguccuggccugacggcgccgacaucaaccucaugcccaucuga

SEQ ID NO: 206188 - RNA, 1410 nt, Artificial Sequence
  derived and/or modified CDS sequence (opt5) from neuraminidase__InfluenzaA__AAO46486
augaaccccaaucagaagaucauuaccaucggcagcgugucccugacaauugccacgaucugcuuccucaugcaaauugcuauccuggucaccacaguuacccuucacuuuaaacaguacgagugugacucuccugccaacaaucaggugaugccgugcgaacccaucauuaucgagagaaacauuacagaaaucguguaucugaccaauacaaccauugagaaggaaaucuguccuaaacucgucgaguaccggaacuggagcaagccccagugcaaaauuacgggguucgcgccuuuuuccaaggauaauucuauccgccugagcgcuggaggcgacaucugggugaccagagagcccuauguuuccugugauccugggaagugcuaccaauucgcccuuggacagggcacaacccuggacaacaaacauucuaaugauacaauucacgaccggaucccgcaucgcacccuccugaugaacgaacugggggugcccuuucaccucggaacgagacaggucuguauugccuggagcuccagcucuugccaugauggcaaggcuuggcugcacguguguguuacaggcgacgauaaaaaugccaccgcuuccuucaucuaugacgggcggcuuguggauagcauuggaucuuggucccagaacauccugcgcacacaagagagcgaaugcgucuguaucaauggaaccugcaccguggugaugacagacgggucugccuccggcagagcggauacgcggauucucuuuaucgaggagggcaagauuguccacaucagcccucuguccgggucugcccagcauguugaagagugcagcuguuacccccgcuauccuggagugagaugcauuugucgggacaacuggaaaggcuccaaucgccccguggucgacaucaacgugaaggauuacagcaucgacucuuccuacguuugcagcggccuugugggggauaccccgagaaacaaugaccggucuagcaacuccuauugucgcaauccuaacaaugaaagaggaaaccacggcgucaaggggugggcuuucgaugacggaaaugauguguggaugggccggacaauuucuaaagacagcagauccggguacgagaccuuuaagguuaucggaggcuggagcacacccaacucuaaaucccagauuaaucgccaggugaucgucgauagcgacaaccggucuggcuauuccgggauuuucagcguggaaggaaaguccugcaucaauagauguuuuuacgucgagcugauucgcggccgggagcaagaaaccagagugugguggacgucuaacagcaucguuguguucugcgggacauccggaaccuauggcaccgggucuuggccugauggcgccgacaucaaucucaugcccauuuga

SEQ ID NO: 206189 - RNA, 1410 nt, Artificial Sequence
  derived and/or modified CDS sequence (opt5) from neuraminidase__InfluenzaA__AAO46489
augaaccccaaucagaagaucauuaccaucggcagcgugucccugacaauugccacgaucugcuuccucaugcaaauugcuauccuggucaccacaguuacccuucacuuuaaacaguacgagugugacucuccugccaacaaucaggugaugccgugcgaacccaucauuaucgagagaaacauuacagaaaucguguaucugaccaauacaaccauugagaaggaaaucuguccuaaacucgucgaguaccggaacuggagcaagccccagugcaaaauuacgggguucgcgccuuuuuccaaggauaauucuauccgccugagcgcuggaggcgacaucugggugaccagagagcccuauguuuccugugauccugggaagugcuaccaauucgcccuuggacagggcacaacccugaacaauaaacauucuaacgacacaauucacgaucggaucccgcaucgcacccuccugaugaaugaacugggggugcccuuucaccucggaacgagacaggucuguauugccuggagcuccagcucuugccaugacggcaaggcuuggcugcacguguguguuacaggcgaugacaaaaacgccaccgcuuccuucaucuaugaugggcggcuuguggacagcauuggaucuuggucccagaauauccugcgcacacaagagagcgaaugcgucuguaucaacgggaccugcaccguggugaugacagauggcucugccuccggaaaggcggacacgcggauucucuuuaucgaggagggcaaaauuguccacaucagcccucuguccgggucugcccagcauguugaagagugcagcuguuaccccagauauccuggagugcgcugcauuuguagagauaauuggaagggcuccaaccggcccguggucgacaucaacgugaaggacuacagcaucgauucuuccuacguuugcagcggccuugugggggacaccccgcgcaauaacgauagaucuagcuccucuuauugucggaauccuaacaaugaacgcggaaaccacggcgucaaagggugggcuuucgacgauggaaaugacguguggaugggcagaacaauuagcaaggauucccggagcggguacgagaccuuuaaaguuaucggaggcuggucuacacccaacuccaagagccagauuaauagacaggugaucgucgacucugauaaccgcuccggcuauagcgggauuuucuccguggaaggaaaaucuugcaucaaucgguguuuuuacgucgagcugauuagaggccgcgagcaagaaacccgggugugguggacgagcaacuccaucguuguguucugcgggacaucuggaaccuauggcaccgggagcuggccugacggcgccgauaucaaucucaugcccauuuga

SEQ ID NO: 206190 - RNA, 1410 nt, Artificial Sequence
  derived and/or modified CDS sequence (opt5) from neuraminidase__InfluenzaA__AAO46491
augaaccccaaucagaagaucauuaccaucggcagcgugucccugacaauugccacgaucugcuuccucaugcaaauugcuauccuggucaccacaguuacccuucacuuuaaacaguacgagugugacucuccugccaacaaucaggugaugccgugcgaacccaucauuaucgagagaaacauuacagaaaucguguaucugaccaauacaaccauugagaaggaaaucuguccuaaacucgucgaguaccggaacuggagcaagccccagugcaaaauuacgggguucgcgccuuuuuccaaggauaauucuauccgccugagcgcuggaggcgacaucugggugaccagagagcccuauguuuccugugauccugggaagugcuaccaauucgcccuuggacagggcacaacccuggacaacaaacauucuaaugauacaauucacgaccggaccccgcaucgcacgcuccugaugaacgaacugggggugcccuuucaccucggaacaagacaggucuguaucgccuggagcuccagcucuugccaugauggcaaggcuuggcugcacguguguguuaccggcuaugacaaaaaugccacagcuuccuucauuuacgaugggcggcuuguggacagcaucggaucuuggucccagaacauucugcgcacccaagagagcgaaugcgucuguaucaauggaaccugcacaguggugaugacggaugggucugccuccggcagagcggacaccaagauccucuuuauugaggagggcaaaaucguccacauuagcccucuguccgggucugcccagcauguugaagagugcagcuguuauccccgguacccuggagugcgcugcaucuguagagauaacuggaagggcuccaaucggcccguggucgacauuaacgugaaggacuacagcaucgauucuuccuauguuugcagcggccuugugggggacacaccgcgcaacaaugauagaucuagcaacuccuacugucggaauccuaacaaugaaaaaggaaaccacggcgucaaggggugggcuuucgacgauggaaaugacguguggaugggccgcaccaucucugaggauagcagauccggguaugaaacauuuaaaguuauuggaggcuggagcacccccaacucuaagcugcagaucaauagacaggugauugucgacuccgauaaccggagcggcuacucugggaucuucuccguggagggaaaaagcugcauuaaucgcuguuuuuaugucgagcucauccggggcagagaacaagagacgcgcgugugguggacauccaacucuauuguuguguucugcgggaccagcggaaccuacggcacaggguccuggccugacggcgccgauaucaaucugaugcccaucuga

SEQ ID NO: 206191 - RNA, 1410 nt, Artificial Sequence; identical to SEQ ID NO: 206190
  derived and/or modified CDS sequence (opt5) from neuraminidase__InfluenzaA__AAO46492

SEQ ID NO: 206192 - RNA, 1410 nt, Artificial Sequence
  derived and/or modified CDS sequence (opt5) from neuraminidase__InfluenzaA__AAO88264
augaacaccaaucagagaaucauuacaaucggcacggugugccugauugucgggaucguuagccuccugcuucaaauuggaaacaucgugucccuguggaucucucacagcauucagaccggcaagaaaaauuacuccaagaucuguucuaaaagcgugauuacauaugagaacaauaccugggucaaccagacauacgugaauaucuccaacauuaauaucgccgacgggcagggaguuaacucuauuauccucgcuggcaauagcucccugugccccaucagcgggugggccauuuauucuaaggauaacuccauccggauuggaagcaaaggcgacaucuucgugauucgcgaaccuuuuaucucuuguucccaucuugagugcagaaccuucuuucugacacaaggcgcgcuccugaaugaucggcacagcaacgggaccgucaaggaccgcucuccguacagaacgcugauguccugucccaucggagaagcuccuagccccuauaauucccgguucgagucuguggccuggagcgccuccgcuugccaugauggcaugggguggcucaccauuggaaucagcggcccugacaacggggccguugcugugcugaaguacaacggaauuaucacagauaccauuaaaucuuggcgcaauaagauccuuagaacacaggaauccgagugugucugcaucaacggcagcuguuuuaccauuaugacggacggccccucuaaugggcaggccagcuauaaaaucuucaagauggagaaaggaaagauuaucaaguccguggaacuggaugcgccuaacuaccacuacgaggaaugcucuuguuauccggacacaggcaaaguggucugcguuugcagcgauaauuggcaugccuccaaccggcccugggugagcuuugaccagaaucucgauuaccaaauuggguauaucuguucuggaguguucggcgacaacccucgcuccaaugacgggagaggaaacugcggccccguccugagcaauggcgcuaacggggugaagggauuuucuuuccgguacggcaaugggguuuggauuggacgcaccaaauccaucagcuccagaucuggcuuugagaugaucugggauccuaacggguggacagagaccgacagcuccuucucuauuaagcaggaugugaucgcccuuaccgacuggagcggcuauuccggcagcuuuguccagcaccccgaacugacaggaaugaauuguauucggccgugcuucuggguggagcucauccgcgggcagccuaaagaaucuacgauuuggaccuccggaagcucuaucuccuucuguggcguugauagcgagacagcuucuuggagcuggcccgacggggccgaucugccuuuuaccaucgacaaguga

SEQ ID NO: 206193 - RNA, 1410 nt, Artificial Sequence
  derived and/or modified CDS sequence (opt5) from neuraminidase__InfluenzaA__AAQ10334
augaaccccaaucagaagaucauuaccaucggcagcgugucccugacaauugccacgaucugcuuccucaugcaaauugcuauccuggucaccacaguuacccuucacuuuaaacaguacgaguguaacccuccgcccaauaaccaggugaugcugugcgaaccuacaaucauugagagaaauaucaccgaaauuguguaucucacaaacaccacgaucgagaaggaaauuugucccaaacuggccgaguaccggaauuggucuaagccucagugcaaaaucaccggguucgcgcccuuuagcaaggacaacuccauucgccuuucugcuggaggcgauaucugggucacaagagagccuuaugugagcugugacccggggaagugcuaccaauucgcccugggacagggcaccacacucaauaaccggcauuccaaugauaccguucacgaccgcacgcccuauagaacacugcugaugaacgaacucggggugccuuuucaucugggaaccaaacaggucuguaucgccuggucuagcuccagcugccacgauggcaaggcuuggcuucauguguguguuacaggccacaaugagaacgccaccgcuucuuucauuuacaaugggcggcugguggacuccaucggaagcuggucuaaaaacauucuccgcacccaggaauccgagugcgucuguaucaacggcacaugcacgguggugaugaccgaugggagcgccucuggcagagcggacacaaagauucuguuuaucgaggaaggaaaaaucguccacauuagcccccuuuccggguccgcccaacauguugaggaaugcucuuguuauccucgguaccccggagugcgcugcguguguagagauaauuggaagggcagcaaccggccgaucgucgacauuaaugugaaggauuacuccaucguuagcucuuaugugugcuccggccuggucggggacaccccucgcaaaaacgauagcucuagcuccucuuacugucucaaucccaacaaugaggaaggaggccacggggugaagggaugggcuuucgacgacggcaacgauguuuggauggggagaacaauuagcgagaaacugcgguccggauaugagaccuuuaaggugaucggcggcuggagcaaaccuaauucuaagcugcagaucaaccgccaggucauuguggacagagggaaucgguccggauacagcggcaucuucucugucgaagggaaauccugcauuaacagauguuuuuauguggagcucauccgcggacggaagcaggaaacggagguuugguggacaagcaauuccauuguggucuucugcggcaccucugggaccuacggcacaggaagcuggcccgauggcgccgacaucaaccugaugcccauuuga

SEQ ID NO: 206194 - RNA, 1410 nt, Artificial Sequence; identical to SEQ ID NO: 206193
  derived and/or modified CDS sequence (opt5) from neuraminidase__InfluenzaA__AAQ10335

SEQ ID NO: 206195 - RNA, 1410 nt, Artificial Sequence
  derived and/or modified CDS sequence (opt5) from neuraminidase__InfluenzaA__AAQ10336
augaaccccaaucagaagaucauuaccaucggcagcgugucccugacaauugccacgaucugcuuccucaugcaaauugcuauccuggucaccacaguuacccuucacuuuaaacaguacgaguguaacccuccgcccaauaaccaggugaugcugugcgaaccuacaaucauugagagaaauaucaccgaaauuguguaucucacaaacaccacgaucgagaaggaaauuugucccaaacuggccgaguaccggaauuggucuaagccucagugcaaaaucaccggguucgcgcccuuuagcaaggacaacuccauucgccuuucugcuggaggcgauaucugggucacaagagagccuuaugugagcugugacccggggaagugcuaccaauucgcccugggacagggcaccacacucaauaaccggcauuccaaugauaccguucacgaccgcacgcccuauagaacacugcugaugaacgaacucggggugccuuuucaucugggaaccaaacaggucuguaucgccuggucuagcuccagcugccacgauggcaaggcuuggcuucauguguguguuacaggccacaaugagaacgccaccgcuucuuucauuuacaaugggcggcugguggacuccaucggaagcuggucuaaaaacauucuccgcacccaggaauccgagugcgucuguaucaacggcacaugcacgguggugaugaccgaugggagcgccucuggcagagcggacacaaagauucuguuuaucgaggaaggaaaaaucguccacauuagcccccuuuccggguccgcccaacauguugaggaaugcucuuguuauccucgguaccccggagugcgcugcguguguagagauaauuggaagggcagcaaccggccgaucgucgacauuaaugugaaggauuacuccaucguuagcucuuaugugugcuccggccuggucggggacaccccucgcaaaaacgauagcucuagcuccucuuacugucucaaucccaacaaugaggaaggaggccacggggugaagggaugggcuuucgacgacggcaacgauguuuggauggggagaacaauuagcgagaaacugcgguccggauaugagaccuuuaaggugaucggcggcuggagcaaaccuaauucuaagcugcagaucaaccgccaggucauuguggacagagggaaucgguccggauacagcggcaucuucucugucgaagggaaauccugcauuaacagauguuuuuauguggagcucauccgcggacggaagcaggaaacggagguuugguggacaagcaauuccauuguggucuucugcggcaccucugggaccuacggcacaggaagcuggcccgauggcgccgaaaucaaccugaugcccauuuga

SEQ ID NO: 206196 - RNA, 1410 nt, Artificial Sequence; identical to SEQ ID NO: 206193
  derived and/or modified CDS sequence (opt5) from neuraminidase__InfluenzaA__AAQ10337

SEQ ID NO: 206197 - RNA, 1410 nt, Artificial Sequence
  derived and/or modified CDS sequence (opt5) from neuraminidase__InfluenzaA__AAQ10339
augaaccccaaucagaagaucauuaccaucggcagcgugucccugacaauugccacgaucugcuuccucaugcaaauugcuauccuggucaccacaguuacccuucacuuuaaacaguacgaguguaacucuccuccgaauaaccaggugaugcugugcgaacccacaaucauugagagaaauaucaccgaaauuguguaucucacaaacaccacgaucgagaaggaaauuuguccuaaacuggccgaguaccggaauuggagcaagccccagugcaaaaucaccggguucgcgccuuuuuccaaggacaacucuauucgccuuagcgcuggaggcgauaucugggucacaagagagcccuauguguccugugacccugauaagugcuaccaauucgcccuggggcagggaaccacacucaauaaccggcauucuaaugacaccguucacgaucgcacgccguauagaacacugcugaugaacgaacucggcgugcccuuucaucuggggaccaaacaggucuguaucgccuggagcuccagcucuugccacgacggaaaggcuuggcuucauguguguguuacaggccacgaugagaaugccaccgcuuccuucauuuacgacggccggcugguggauagcaucgggucuugguccaaaaagauucuccgcacccaggaaagcgagugcgucuguaucaacggaacaugcacgguggugaugaccgacggcucugccuccgggagagcggauacaaaaauucuguuuaucgaggaaggaaagaucguccacauuagcccucuuuccggcucugcccaacauguugaggaaugcagcuguuauccccgguacccuggggugcgcugcguguguagagacaauuggaagggauccaaccggcccaucgucgauauuaacgugaaagacuacagcaucguuucuuccuaugugugcagcggccuggucggcgacaccccgcgcaagaaugauucuagcuccucuagccacugucucaacccuaauaacgaggaagggggacauggcgugaaagggugggcuuucgacgauggaaaugacguuuggaugggcagaacaauuuccgagacccugcggagcggguacgagacguuuaaggugaucgaaggauggucuaaacccaacuccaagcugcagaucaaucgccaggucauuguggauagaggcaaccggagcggcuauucugggaucuucuccgucgagggaaaaagcugcauuaauagauguuuuuacguggaacucauccgcggccggaagcaggagacagaaguuugguggaccuccaacucuauuguggucuucugcgggaccagcggaacauauggcaccggguccuggccugacggcgccgauaucaaucugaugcccauuuga

SEQ ID NO: 206198 - RNA, 1410 nt, Artificial Sequence
  derived and/or modified CDS sequence (opt5) from neuraminidase__InfluenzaA__AAQ10341
augaaccccaaucagaagaucauuaccaucggcagcgugucccugacaauugccacgaucugcuuccucaugcaaauugcuauccuggucaccacaguuacccuucacuuuaaacaguacgaguguaacucuccuccgaauaaccaggugaugcugugcgaacccacaaucauugagagaaauaucaccgaaauuguguaucucacaaacaccacgaucgagaaggaaauuuguccuaaacuggccgaguaccggaauuggagcaagccccagugcaaaaucaccggguucgcgccuuuuuccaaggacaacucuauucgccuuagcgcuggaggcgauaucugggucacaagagagcccuauguguccugugacccugauaagugcuaccaauucgcccuggggcagggaaccacacucaauaaccggcauucuaaugacaccguucacgaucgcacgccguauagaacacugcugaugaacgaacucggcgugcccuuucaucuggggaccaaacaggucuguaucgccuggagcuccagcucuugccacgacggaaaggcuuggcuucauguguguguuacaggccacgaugagaaugccaccgcuuccuucauuuacgacggccggcugguggauagcaucgggucuugguccaaaaagauucuccgcacccaggaaagcgagugcgucuguaucaacggaacaugcacgguggugaugaccgacggcucugccuccgggagagcggauacaaaaauucuguuuaucgaggaaggaaagaucguccacauuagcccucuuuccggcucugcccaacauguugaggaaugcagcuguuauccccgguacccuggggugcgcugcguguguagagacaauuggaagggauccaaccggcccaucgucgauauuaacgugaaagacuacagcaucguuucuuccuaugugugcagcggccuggucggcgacaccccgcgcaagaaugauucuagcuccucuagccacugucucaacccuaauaacgaggaagggggacauggcgugaaagggugggcuuucgacgauggaaaugacguuuggaugggcagaacaauuuccgagaagcugcggagcggguacgagaccuuuaaagugaucgaaggauggucuaagcccaacuccaaacugcagaucaaucgccaggucauuguggauagaggcaaccggagcggcuauucugggaucuucuccgucgagggaaagagcugcauuaauagauguuuuuacguggaacucauccgcggccggaagcaggagacggaaguuugguggacauccaacucuauuguggucuucugcgggaccagcggaaccuauggcacaggguccuggccugacggcgccgauaucaaucugaugcccauuuga

SEQ ID NO: 206199 - RNA, 1410 nt, Artificial Sequence
  derived and/or modified CDS sequence (opt5) from neuraminidase__InfluenzaA__AAQ10343
augaaccccaaucagaagaucauuaccaucggcagcgugucccugacaauugccacgaucugcuuccucaugcaaauugcuauccuggucaccacaguuacccuucacuuuaaacaguacgaguguucuagcccuccgaacaaucaggugaugcugugcgaacccacaaucauugagagaaacaucaccgaaauuguguaucucacaaauaccacgaucgagaaggaaauuuguccuaaacuggccgaguaccggaacugguccaagccccagugcaaaaucaccggguucgcgccuuuuucuaaggacaauagcauucgccuuuccgcuggaggcgauaucugggucacaagagagcccuaugugucuugugacccugauaagugcuaccaauucgcccuggggcagggaaccacacucaacaaucggcauagcaacgacaccguucacgaucgcacgccguauagaacacugcugaugaaugaacucggcgugcccuuucaucuggggaccaaacaggucuguaucgccugguccucuagcuccugccacgacggaaaggcuuggcuucauguguguguuacaggccacgaugagaacgccaccgcuagcuucauuuacgacggccggcugguggauucuaucggguccuggagcaaaaagauucuccgcacccaggaaucugagugcgucuguaucaauggaacaugcacgguggugaugaccgacggcuccgccagcgggagagcggauacaaaaauucuguuuaucgaggaaggaaagaucguccacauuuccccucuuucuggcagcgcccaacauguugaggaaugcuccuguuauccccgguacccuggggugcgcugcguguguagagacaacuggaagggaagcaaucggcccaucgucgauauuaacgugaaagacuacucuaucguuuccagcuaugugugcucuggccuggucggcgacaccccgcgcaagaacgauagcuccucuagcucccacugucucaauccuaacaaugaggaagggggacauggcgugaaagggugggcuuucgacgauggaaacgacguuuggaugggcagaacaauuagcgagaaguuucggucuggguacgagaccuucaaagugaucgaaggaugguccaagcccaauagcaaacugcagaucaaccgccaggucauuguggauagaggcaaucggucuggcuauuccgggaucuuuagcgucgagggaaaguccugcauuaacagauguuucuacguggaacugauccgcggccggaagcaggagacggaaguuugguggacaucuaauagcauuguggccuuuugcgggaccuccggaaccuauggcacagggucuuggccugacggcgcugauaucaaccucaugcccauuuga

SEQ ID NO: 206200 - RNA, 1191 nt, Artificial Sequence
  derived and/or modified CDS sequence (opt5) from neuraminidase__InfluenzaA__AAQ10344
augaaccccaaucagaagaucauuaccaucggcagcgugucccugacaauugccacgaucugcuuccucaugcaaauugcuauccuggucaccacaguuacccuucacuuuaaacaguacgaguguaacucuccuccgaauaaccaggccaugcugugcgaacccacaaucauugagagaaauaucaccgaaauuguguaucucacaaacaccacgaucgagaaggaaauuuguccuaaacuggcggaguaccggaauuggagcaagccccagugcaaaaucaccggguucgcuccuuuuuccaaggacaacucuauucgccuuagcgccggaggcgauaucugggugacaagagagcccuaugucuccugugacccugauaagugcuaccaauucgcccuggggcagggaaccacacucaauaaccggcauucuaaugacaccgugcacgaucgcacgccguauagaacacugcugaugaacgaacucggcguucccuuucaucuggggaccaaacagguguguaucgcuuggagcuccagcucuugccacgacggaaaggccuggcuucaugucugugugacaggccacgaugagaaugcuaccgccuccuucauuuacgacggccggcugguugauagcaucgggucuugguccaaaaagauucuccgcacccaggaaagcgagugcguguguaucaacggaacaugcacggucgugaugaccgacggcucugcguccgggagagccgauacaaaaauucuguuuaucgaggaaggaaagaucgugcacaccagcaaacuuuccggcucugcucaacaugucgaggaaugcagcuguuauccucgguaccccgggguucgcugcguguguagagacaauuggaagggauccaaccggccuauuguggauaucaacgucaaggacuacagcauugugucuuccuauguuugcagcggccuggugggcgacacaccccgcaaaaaugauucuagcuccucuagccacugucucaacccgaauaacgaggaagggggacauggcgucaaggggugggccuucgacgauggaaaugacguguggaugggcagaaccaucuccgagaaauuucggagcggguacgagacguucaagguuauugaaggauggucuaaaccuaacuccaagcugcagaucaauagcaagucuuga

SEQ ID NO: 206201 - RNA, 1416 nt, Artificial Sequence
  derived and/or modified CDS sequence (opt5) from neuraminidase__InfluenzaA__AAR11366
augaaccccaaucagaagcuguucgcccucagcggcguggcuaucgcccuguccguccuuaaccugcucauugggaucucuaauguuggacugaacgugagccuucaccugaaagagaagggcccuaaacaagaagagaaucugaccugcacaacgauuaaccagaauaacaccacaguggucgaaaauaccuacgugaacaauacaaccaucauuacaaaggggaccgaccucaaaacgccguccuaucugcuccugaacaagucucuuuguaauguugagggauggguggucaucgcgaaggauaacgcugugagauuuggcgaaagcgagcagaucauuguuacccgggagcccuacguguccugcgacccuacaggguguaaaauguaugcccugcaucagggaaccacaauccgcaauaagcacucuaacggcaccauucaugauagaacggccuuccggggccucaucagcacaccccuggggaccccucccacagucuccaacagcgacuuuaugugcgugggauggucuuccaccaccugucacgauggcauugcucgcaugacaaucugcauucaagggaauaacgacaaugccacggcuaccguguacuauaacagacggcuuacaaccacaaucaaaaccugggcccgcaauauccugagaacgcaggaaagcgagugugucugccauaacggaacaugugcgguugugaugaccgauggcucugccuccagccaggcuuacaccaaggugauguauuuccacaaagggcucgucgugaaggaagaggagcugcggggaucugcccgccacauugaagagugcuccuguuacggccauaaucagaagguuacaugcgugugcagagacaacuggcaaggcgcuaaucggccuaucauugaaaucgauaugaacacccuggagcacacaagccgcuacgucuguacggggauucucaccgacacauccagaccgggagauaaaucuagcggcgacugcuccaaucccaucaccgggagcccuggagcccccggcgugaagggguuuggauuccugaacggcgauaauacauggcuuggccggaccaucucuccucgcuccagaagcggguuugaaaugcugaaaauucccaacgcgggaacggacccuaauucucggaucgccgagagacaggagauuguugacaacaacaauuggagcggcuauuccgggucuuucaucgauuacuggaacgacaauagcgaauguuauaacccgugcuuuuacguggagcucauucgcggacggcccgaagaggcuaaguaugucugguggaccuccaauagccugaucgcccuuuguggcucuccuuuccccguggggcccggcuccuuuccugauggagcucagauccaguacuucagcuga

SEQ ID NO: 206202 - RNA, 1350 nt, Artificial Sequence
  derived and/or modified CDS sequence (opt5) from neuraminidase__InfluenzaA__AAS89005
augaaccccaauaagaaaaucauuaccaucggcagcauuugcauggugacagggauggucucccugaugcuccagaucggaaaccugauuucuaucuggguuagccacuccauccauacgggcaaucaacagaaggccgagccuauuucuaacaccaauuuccuuacagaaaaagcuguggccagcgugaagcuggcggggaacuccucucucuguccgaucaauggaugggcugucuacagcaaagacaacuccauuagaaucggcagcaagggggauguguuuguuauucgggagcccuucaucucuugcucccaccuggaaugucgcaccuuuuuccuuacacagggagcccugcucaaugacaagcauagcaacggcaccgugaaagauagaucuccucaccggacacugauguccugccccgucggcgaggccccuagccccuauaauucucgcuuugaauccguggcuuggagcgccuccgcuugucaugacgggaccucuuggcugacgauuggaaucagcggcccugauuccggggccguugcggugcucaaguacaacggaaucauuaccgacacaaucaaaagcuggagaaauaacauucugcggacccaggagucugagugcgccugugucaauggcuccugcuucacagugaugaccgaugggccgagcaacggacaggcuucucacaagaucuuuaaaauggaaaagggcaagguggucaaaagcguugagcuugacgcccccaacuaucacuacgaagaguguuccugcuauccugaugcuggcgagauuacgugugugugccgcgacaauuggcaugggucuaacagacccugggugagcuucaaucaaaaccuggaauaccagaucggauauaucugcuccggcgucuuuggggauaauccucggcccaacgacggaacaggcagcugugggccggugucuuccaauggagccuacggcguuaagggcuucagcuuuaaauacgggaacggaguguggauuggccgcaccaagucuacaaauuccagaagcggguucgagaugaucugggauccuaacggauggauugaaaccgacuccucuuuuagcgucaaacaggacaucguggcgauuaccgauugguccggcuauucugggagcuucguucaacaccccgagcucacaggccuggacugcauccggccuuguuucuggguggaacuuauccgcggaagacccaaggaguccacgauuuggaccagcgggucuuccaucagcuuuugcggcgucaauucugauacagugggaugguccuggcccgacggcgccgagcugccuuucaccauugauaaauga

SEQ ID NO: 206203 - RNA, 1350 nt, Artificial Sequence
  derived and/or modified CDS sequence (opt5) from neuraminidase__InfluenzaA__AAS89006
augaaccccaauaagaaaaucauuaccaucggcagcauuugcauggugacagggauggucucccugaugcuccagaucggaaaccugauuucuaucuggguuagccacuccauccauacgggcaaucaacacaaggccgagccuauuucuaacaccaauuuccuuacagaaaaagcuguggccagcgugaagcuggcggggaacuccucucucuguccgaucaauggaugggcugucuacagcaaagacaacuccauuagaaucggcagcaagggggauguguuuguuauucgggagcccuucaucucuugcucccaucuggaaugucgcaccuuuuuccuuacacagggagcccugcucaaugacaagcacagcaacggcaccgugaaagauagaucuccucaucggacacugauguccugccccgucggcgaggccccuagccccuauaauucucgcuuugaauccguggcuuggagcgccuccgcuugucacgacgggaccucuuggcugacgauuggaaucagcggcccugauaacggggccguugcggugcucaaguacaauggaaucauuaccgacacaaucaaauccuggagaaacaauauucugcggacccaggagagcgagugcgccugugucaacggcucuugcuucacagugaugaccgaugggccguccaacggacaggcuagccacaagaucuuuaaaauggaaaagggcaagguggucaaaucuguugagcuugacgcccccaauuaucauuacgaagaguguagcugcuauccugaugcuggcgagauuacgugugugugccgcgacaacuggcacggguccaauagacccugggugucuuucaaccaaaaucuggaauaccagaucggauauaucugcagcggcgucuuuggggauaacccucggcccaaugacggaacaggcuccugugggccggugagcucuaacggagccuacggcguuaagggcuucuccuuuaaauacgggaauggaguguggauuggccgcaccaagagcacaaacucuagauccggguucgagaugaucugggauccuaauggauggaccgaaaccgacagcuccuuuucugucaaacaggacauuguggcgaucacagauuggagcggcuauuccgggucuuucguucagcaucccgagcucacgggccuggacugcauucggccuuguuucuggguggaacuuauccgcggaagacccaaggagagcaccaucuggacauccggcagcucuauuuccuuuugcggggucaacagcgauaccgugggauggucuuggcccgacggcgccgagcugccuuucacaaucgauaaauga

SEQ ID NO: 206204 - RNA, 1410 nt, Artificial Sequence
  derived and/or modified CDS sequence (opt5) from neuraminidase__InfluenzaA__AAT38822
augaaccccaaucagaagaucauuaccaucggcguggucaacacaacgcugagcaccauugcccucuucaucgggguuggaaaucugguguuuaacacagugauucacgagaaaaucggcgaccaucaaaucgucacccacccuacaauuaugaccccggaagugcccaauugcuccgauacaaucauuaccuacaacaauacgguuaucaacaauauuaccacaaccaucauuacagaggcugaaagaccuuucaagucuccccuuccucugugucccuuucggggguucuuuccuuuccauaaagacaacgccauccgccucggagagaauaaggaugugaucgucaccagagaaccguaugugagcugcgacaacgauaauuguugguccuuugcgcuggcucagggcgcccuucuggggacgaaacacucuaacggaacaauuaaggaccggacccccuaccgcagccucaucagauucccuauuggcacagcccccguucugggcaauuauaaggagaucugcauugcuugguccucuagcuccuguuuugaugggaaagaguggaugcaugugugcaugaccggaaacgacaacgaugccagcgcucagaucaucuacggcgggcggaugaccgacucuauuaaguccuggcgcaaagauauccugagaacacaggaaagcgagugucaaugcauugacggaacgugugucguggccgugaccgauggcccugcggccaauucugcugaccaccgggucuauuggauccgcgaagggagaauuaucaaguacgagaacguucccaaaacaaagauccagcaccucgaggaaugcuccuguuauguggacauugauguguacugcaucugccgggacaauuggaagggaagcaaccgcccguggaugagaauuaauaacgagaccauccuggaaacaggcuacgucuguucuaaauuccauuccgauaccccucggcccgccgacccuagcauuauguccugcgauucucccagcaaugugaacggcgggcccggaguuaagggcuuuggguucaaagcuggaaaugacguguggcuuggccgcacggucuccacaagcgggagaucuggauuugagaucauuaaggugaccgaaggcuggaucaacuccccuaaucacguuaaaagcaucacccagacacuggugucuaacaaugauuggagcggcuauuccgggucuuucauugucaaggccaaagacuguuuccagccgugcuuuuacguggagcucauccggggaagacccaacaagaaugaugacgucagcuggaccuccaacagcauugugacauucuguggccuggauaacgagccugggucuggaaauuggcccgacggcuccaacaucggguuuaugccuaaguga

SEQ ID NO: 206205 - RNA, 1350 nt, Artificial Sequence; identical to SEQ ID NO: 206203
  derived and/or modified CDS sequence (opt5) from neuraminidase__InfluenzaA__AAV65827

SEQ ID NO: 206206 - RNA, 1410 nt, Artificial Sequence
  derived and/or modified CDS sequence (opt5) from neuraminidase__InfluenzaA__AAX11488
augaaccccaaucagaagaucauuaccaucggcagcgugucccugacaauugccgcuaucugcuuccucaugcaaauugccauccuggucacgaccguuacacuucacuuuaaacagcaugaguguaacucuccuccgaauaaccaggugaugcugugcgaacccaccaucauugagagaaauaucacagaaauuguguaccucaccaacacaaccaucgagaaggaaauuuguccuaaacuggcggaguaucggaauuggagcaagccccagugcaacaucacgggguucgcuccuuuuuccaaagacaauucuauucgccuuagcgccggaggcgauaucugggucaccagagagcccuacguguccugugacccugauaagugcuaucaauucgcccuggggcagggaacaacccucaacaauggccacucuaacgacacaguucaugaucggaccccguaccgcacgcugcugaugaaugaacucggggugcccuuucaccugggaacaagacaggucuguaucgcuuggagcuccagcucuugccaugacggcaaggccuggcuucacguguguguuaccggcgaugacaaaaacgcuacagccuccuucauuuauaaugggcggcugguggauagcaucggaucuugguccaagaaaauucuccgcacccaggagagcgaaugcgucuguaucaacgggaccugcacaguggugaugacggacggcucugcguccggaaaggccgauaccaaaauucuguuuaucgaggagggcaagaucguccacauuagcgcucuuuccgggucugcccaacauguugaagagugcagcuguuacccuagauaucccggagugcggugcgugugucgcgacaacuggaagggcuccaauagaccuaucgucgauauuaacgugaaagacuacagcaucguuucuuccuacgugugcagcggccuggucggggacacaccccggaagaaugauucuuucagcuccucucacugucucgacccgaacaaugaagagggaggccauggggugaaaggaugggcuuuugaugacggcaacgauguuuggauggggcgcaccauuagcgaaaagcugagauccggauaugagacauucaaagugaucgagggcuggagcaagccuaauucuaaacugcagaucaaccggcaggucauuguggaacgcggcaauagauccggguacagcggaaucuuuucugucgagggcaaguccugcauuaaccgguguuucuauguggaacucaucagagggcgcaaggaggaaaccgagguuugguggacgagcaauuccauuguggucuuuugcggaacaucuggcaccuacgggaccggcagcuggcccgacggagccgauaucaaccugaugccuauuuga

SEQ ID NO: 206207 - RNA, 1410 nt, Artificial Sequence
  derived and/or modified CDS sequence (opt5) from neuraminidase__InfluenzaA__AAX11508
augaaccccaaucagaagaucauuaccaucggcagcgugucccugacaauugccacgaucugcuuccucaugcaaauugcuauccuggucaccacaguuacccuucacuuuaaacagcaugaguguaacucuccuccgaauaaccaggugaugcugugcgaacccacaaucauugagagaaauaucaccgaaauuguguaccucacaaacaccacgaucgagaaggaaauuuguccuaaacuggccgaguaucggaauuggagcaagccccagugcaacaucaccggguucgcgccuuuuuccaaagacaauucuauucgccuuagcgcuggaggcgauaucugggucacaagagagcccuacguguccugugacccugauaagugcuaucaauucgcccuggggcagggaaccacacucaacaauggccacucuaacaauaccguucaugaccggacgccguaccgcacacugcugaugaacgaacucggggugcccuuucaccugggaaccagacaggucuguaucgccuggagcuccagcucuugccaugauggcaaggcuuggcuucacguguguguuacaggcgacgauaaaaaugccaccgcuuccuucauuuauaacgggcggcugguggacagcaucggaucuugguccaagaaaauucuccgcacccaggagagcgaaugcgucuguaucaacggcacaugcacgguggugaugaccgaugggucugccuccggaaaggcggacacaaaaauucuguuuaucgaggagggcaagaucguccacauuagcacccuuuccgggucugcccaacauguugaagagugcagcuguuacccuagauaucccggagugcggugcgugugucgcgauaauuggaagggcuccaacagaccuaucgucgacauuaaugugaaagauuacagcaucguuucuuccuacgugugcagcggccuggucggggacacaccccggaagaacgacucuuucagcuccucucacugucucgauccgaauaacgaagagggaggccauggggugaaaggaugggcuuuugacgauggcaaugacguuuggauggggcgcaccauuagcgaaaagcugagauccggauaugagacguucaaagugaucgagggcuggagcaagccuaacucuaaacugcagaucaaucggcaggucauuguggaacgcggcaacagauccggguacagcggaaucuuuucugucgagggcaaguccugcauuaaucgguguuucuauguggaacucaucagagggcgcaaggaggaaacagagguuugguggaccagcaacuccauuguggucuuuugcggaaccucuggcacauacgggaccggcagcuggcccgauggagccgacaucaaucugaugccuauuuga

SEQ ID NO: 206208 - RNA, 1410 nt, Artificial Sequence
  derived and/or modified CDS sequence (opt5) from neuraminidase__InfluenzaA__AAX11538
augaaccccaaucagaagaucauuaccaucggcagcgugucccugacaauugccacgaucugcuuccucaugcaaauugcuauccuggucaccacaguuacccuucacuuuaaacagcaugaguguaacucuccuccgaauaaccaggugaugcugugcgaacccacaaucauugagagaaauaucaccgaaauuguguaccucacaaacaccacgaucgagaaggaaauuuguccuaaacuggccgaguaucggaauuggagcaagccccagugcaacaucaccggguucgcgccuuuuuccaaagacaauucuauucgccuuagcgcuggaggcgauaucugggucacaagagagcccuacguguccugugacccugauaagugcuaucaauucgcccuggggcagggaaccacacucaacaauggccacucuaacgacaccguucaugaacggacgccguaccgcacacugcugaugaaugagcucggggugcccuuucaccugggaaccagacaggucuguaucgccuggagcuccagcucuugccaugauggcaaggcuuggcuucacguguguguuacaggcgacgauaaaaacgccaccgcuuccuucauuuauaaugggcggcugguggacagcaucggaucuugguccaagaaaauucuccgcacccaggaaagcgagugcgucuguaucaacggcacaugcacgguggugaugaccgaugggucugccuccggaaaggcggacacaaaaauucuguuuaucgaggaaggcaagaucguccacauuagcacccuuuccgggucugcccaacauguugaggaaugcagcuguuacccuagauaucccggagugcggugcgugugucgcgauaacuggaagggcuccaauagaccuaucgucgacauuaacgugaaagauuacagcaucguuucuuccuacgugugcagcggccuggucggggacacaccccggaagaaugacucuagcuccucuagccacugucucgauccgaacaaugaggaaggaggccauggggugaaaggaugggcuuucgacgauggcaacgacguuuggauggggcgcaccauuuccgagaagcugagaagcggauaugagacguuuaaagugaucgaaggcuggucuaagccuaauuccaaacugcagaucaaccggcaggucauuguggagcgcggcaauagaagcggguacucuggaaucuucuccgucgaaggcaagagcugcauuaaccgguguuuuuauguggagcucaucagagggcgcaaggaagagacagagguuugguggaccuccaauucuauuguggucuucugcggaaccagcggcacauacgggaccggcuccuggcccgauggagccgacaucaaccugaugccuauuuga

SEQ ID NO: 206209 - RNA, 1410 nt, Artificial Sequence
  derived and/or modified CDS sequence (opt5) from neuraminidase__InfluenzaA__AAX11548
augaaccccaaucagaagaucauuaccaucggcagcgugucccugacaauugccacgaucugcuuccucaugcaaauugcuauccuggucaccacaguuacccuucacuuuaaacagcaugaguguaacucuccuccgaauaaccaggugaugcugugcgaacccacaaucauugagagaaauaucaccgaaauuguguaccucacaaacaccacgaucgagaaggaaauuuguccuaaacuggccgaguaucggaauuggagcaagccccagugcaacaucaccggguucgcgccuuuuuccaaagacaauucuauucgccuuagcgcuggaggcgauaucugggucacaagagagcccuacguguccugugacccugauaagugcuaucaauucgcccuggggcagggaaccacacucaacaauggccacucuaacgacaccguucaugaucggacgccguaccgcacacugcugaugaaugaacucggggugcccuuucaccugggaaccagacaggucuguaucgccuggagcuccagcucuugccaugacggcaaggcuuggcuucacguguguguuacaggcgaugacaaaaacgccaccgcuuccuucauuuauaaugggcggcugguggauagcaucggaucuugguccaagaaaauucuccgcacccaggagagcgaaugcgucuguaucaacggcacaugcacgguggugaugaccgacgggucugccuccggaaaggcggauacaaaaauucuguuuaucgaggagggcaagaucguccacauuagcacccuuuccgggucugcccaacauguugaagagugcagcuguuacccuagauaucccggagugcggugcgugugucgcgacaacuggaagggcuccaauagaccuaucgucgauauuaacgugaaagacuacagcaucguuucuuccuacgugugcagcggccuggucggggacacaccccggaagaaugauucuagcuccucuagccacugucucgacccgaacaaugaagagggaggccauggggugaaaggaugggcuuucgaugacggcaacgauguuuggauggggcgcaccauuuccgaaaagcugagaagcggauaugagacguuuaaagugaucgagggcuggucuaagccuaauuccaaacugcagaucaaccggcaggucauuguggaacgcggcaauagaagcggguacucuggaaucuucuccgucgagggcaagagcugcauuaaccgguguuuuuauguggaacucaucagagggcgcaaggaggaaacagagguuugguggaccuccaauucuauuguggucuucugcggaaccagcggcacauacgggaccggcuccuggcccgacggagccgauaucaaccugaugccuauuuga

SEQ ID NO: 206210 - RNA, 1410 nt, Artificial Sequence; identical to SEQ ID NO: 206207
  derived and/or modified CDS sequence (opt5) from neuraminidase__InfluenzaA__AAX11558

SEQ ID NO: 206211 - RNA, 1410 nt, Artificial Sequence
  derived and/or modified CDS sequence (opt5) from neuraminidase__InfluenzaA__AAX11568
augaaccccaaucagaagaucauuaccaucggcagcgugucccugacaauugccacgaucugcuuccucaugcaaauugcuauccuggucaccacaguuacccuucacuuuaaacagcaugaguguuacucuccuccgaacaaucaggugaugcugugcgaacccacaaucauugagagaaacaucaccgaaauuguguaucucacaaauaccacgaucgagaaggaaauuuguccuaaacuggccgaguaccggaacuggagcaagccccagugcaauaucaccggguucgcgccuuuuuccaaagacaacucuauucgccuuagcgcuggaggcgauaucugggucacaagagagcccuauguguccugugacccugauaagugcuaccaauucgcccuggggcagggaaccacacucaauaacggccacucuaaugacaccguucaugaucggacgccguaucgcacacugcugaugaacgaacucggggugcccuuucaccugggaaccagacaggucuguaucgccuggagcuccagcucuugccaugacggcaaggcuuggcuucacguguguguuacaggcgaugacaaaaaugccaccgcuuccuucauuuacaacgggcggcugguggauagcaucggaucuugguccaagaaaauucuccgcacccaggagagcgaaugcgucuguaucaauggcacaugcacgguggugaugaccgacgggucugccuccggaaaggcggauacaaaaauucuguuuaucgaggagggcaagaucguccacauuagcacccuuuccgggucugcccaacauguugaagagugcagcuguuauccuagauaccccggagugcggugcgugugucgcgacaacuggaagggcuccaacagaccuaucgucgauauuaaugugaaagacuacagcaucguuucuuccuaugugugcagcggccuggucggggacacaccccggaagaacgauucuuucagcuccucucacugucucgacccgaauaacgaagagggaggccauggggugaaaggaugggcuuuugaugacggcaaugauguuuggauggggcgcaccauuagcgaaaagcugagauccggauacgagacguucaaagugaucgagggcuggagcaagccuaacucuaaacugcagaucaaucggcaggucauuguggaacgcggcaacagauccggguauagcggaaucuuuucugucgagggcaaguccugcauuaaucgguguuucuacguggaacucaucagagggcgcaaggaggaaacagagguuugguggaccagcaacuccauuguggucuuuugcggaaccucuggcacauaugggaccggcagcuggcccgacggagccgauaucaaucugaugccuauuuga

SEQ ID NO: 206212 - RNA, 1410 nt, Artificial Sequence; identical to SEQ ID NO: 206207
  derived and/or modified CDS sequence (opt5) from neuraminidase__InfluenzaA__AAX11578

SEQ ID NO: 206213 - RNA, 1410 nt, Artificial Sequence
  derived and/or modified CDS sequence (opt5) from neuraminidase__InfluenzaA__AAX11588
augaaccccaaucagaagaucauuaccaucggcagcgugucccugacaauugccgcuaucugcuuccucaugcaaauugccauccuggucacgaccguuacacuucacuuuaaacagcaugaguguaacucuccuccgaauaaccaggugaugcugugcgaacccaccaucauugagagaaauaucacagaaauuguguaccucaccaacacaaccaucgagaaggaaauuuguccuaaacuggcggaguaucggaauuggagcaagccccagugcaacaucacgggguucgcuccuuuuuccaaagacaauucuauucgccuuagcgccggaggcgauaucugggucaccagagagcccuacguguccugugacccugauaagugcuaucaauucgcccuggggcagggaacaacccucaacaauggccacucuaacgacacaguucaugaucggaccccguaccgcacgcugcugaugaaugaacucggggugcccuuucaccugggaacaagacaggucuguaucgcuuggagcuccagcucuugccaugacggcaaggccuggcuucacguguguguuaccggcgaugacaaaaacgcuacagccuccuucauuuauaaugggcggcugguggauagcaucggaucuugguccaagaaaauucuccgcacccaggagagcgaaugcaucuguauuaacgggaccugcacagucgugaugacggacggcucugcguccggaaaggccgauaccaaaauccuguuuaucgaggagggcaagauugugcacaucagcacacuuuccgggucugcucaacaugucgaagagugcagcuguuacccuagauaucccggaguucggugcgugugucgcgacaacuggaagggcuccaauagaccuauuguggauaucaacgucaaagacuacagcauugugucuuccuacguuugcagcggccuggugggggacacaccccggaagaaugauucuuucagcuccucucacugucucgacccgaacaaugaagagggaggccauggggucaaaggaugggccuuugaugacggcaacgauguguggauggggcgcaccaucagcgaaaagcugagauccggauaugagaccuucaaaguuaucgagggcuggagcaagccuaauucuaaacugcagauuaaccgccaggugaucgucgaacggggcaauagauccggguacagcggaaucuuuucuguggagggcaaguccugcauuaaccgguguuucuaugucgaacucauuagagggcgcaaggagaaaacggaagugugguggacaagcaauuccaucguuguguuuugcggaaccucuggcaccuacgggacaggcagcuggcccgacggagcugauauuaaccugaugccuaucuga

SEQ ID NO: 206214 - RNA, 1410 nt, Artificial Sequence; identical to SEQ ID NO: 206209
  derived and/or modified CDS sequence (opt5) from neuraminidase__InfluenzaA__AAX11598

SEQ ID NO: 206215 - RNA, 1410 nt, Artificial Sequence; identical to SEQ ID NO: 206209
  derived and/or modified CDS sequence (opt5) from neuraminidase__InfluenzaA__AAX11608

SEQ ID NO: 206216 - RNA, 1410 nt, Artificial Sequence
  derived and/or modified CDS sequence (opt5) from neuraminidase__InfluenzaA__AAX11618
augaaccccaaucagaagaucauuaccaucggcagcgugucccugacaauugccacgaucugcuuccucaugcaaauugcuauccuggucaccacaguuacccuucacuuuaaacagcaugaguguaacucuccuccgaauaaccaggugaugcugugcgaacccacaaucauugagagaaauaucaccgaaauuguguaccucacaaacaccacgaucgagaaggaaauuuguccuaaacuggccgaguaucggaauuggagcaagccccagugcaacaucaccggguucgcgccuuuuuccaaagacaauucuauucgccuuagcgcuggaggcgauaucugggucacaagagagcccuacguguccugugacccugauaagugcuaucaauucgcccuggggcagggaaccacacucaacaauggccacucuaacgacaccguucaugaucggacgccguaccgcacacugcugaugaaugaacucggggugcccuuucaccugggaaccagacaggucuguaucgccuggagcuccagcucuugccaugacggcaaggcuuggcuucacguguguguuacaggcgaugacaaaaacgccaccgcuuccuucauuuauaaugggcggcugguggauagcaucggaucuugguccaagaaaauucuccgcacccaggagagcgaaugcgucuguaucaacggcacaugcacgguggugaugaccgacgggucugccuccggaaaggcggauacaaaaauucuguuuaucgaggagggcaagaucguccacauuagcgcccuuuccgggucugcucaacauguugaagagugcagcuguuacccuagauaucccggagugcggugcgugugucgcgacaacuggaagggcuccaauagaccuaucgucgauauuaacgugaaagacuacagcaucguuucuuccuacgugugcagcggccuggucggggacacaccccggaagaaugauucuagcuccucuagccacugucucgacccgaacaaugaagagggaggccauggggugaaaggaugggccuucgaugacggcaacgauguuuggauggggcgcaccauuuccgaaaagcugagaagcggauaugagaccuuuaaagugaucgagggcuggucuaagccuaauuccaaacugcagaucaaccggcaggucauuguggaacgcggcaauagaagcggguacucuggaaucuucuccgucgagggcaagagcugcauuaaccgguguuuuuauguggaacucaucagagggcgcaaggaggaaacggagguuugguggacauccaauucuauuguggucuucugcggaaccagcggcaccuacgggacaggcuccuggcccgacggagcugauaucaaccugaugccuauuuga

SEQ ID NO: 206217 - RNA, 1410 nt, Artificial Sequence
  derived and/or modified CDS sequence (opt5) from neuraminidase__InfluenzaA__AAX12744
augaaccccaaucagaagaucauuaccaucggcagcgugucccugacaauugccacgaucugcuuccucaugcaaauugcuauccuggucaccacaguuacccuucacuuuaaacagcaugaguguaacucuccuccgaauaaccaggugaugcugugcgaacccacaaucauugagagaaauaucaccgaaauuguguaccucacaaacaccacgaucgagaaggaaauuuguccuaaacuggccgaguaucggaauuggagcaagccccagugcaacaucaccggguucgcgccuuuuuccaaagacaauucuauucgccuuagcgcuggaggcgauaucugggucacaagagagcccuacguguccugugacccugauaagugcuaucaauucgcccuggggcagggaaccacacucaacaauggccacucuaacgacaccguucaugaucggacgccguaccgcacacugcugaugaaugaacucggggugcccuuucaccugggaaccagacaggucuguaucgccuggagcuccagcucuugccaugacggcaaggcuuggcuucacguguguguuacaggcgaugacaaaaacgccaccgcuuccuucauuuauaaugggcggcugguggauagcaucggaucuugguccaagaaaauucuccgcacccaggagagcgaaugcgucuguaucaacggcacaugcacgguggugaugaccgacgggucugccuccggaaaggcggauacaaaaauucuguuuaucgaggagggcaagaucguccacauuagcacccuuuccgggucugcccaacauguugaagagugcagcuguuacccuagauaucccggagugcggugcgugugucgcgacaacuggaagggcuccaauagaccuaucgucgauauuaacgugaaagacuacagcaucguuucuuccuacgugugcagcggccuggucggggacacaccccggaagaaugauucuuucagcuccucucacugucucgacccgaacaaugaagagggaggccauggggugaaaggaugggcuuuugaugacggcaacgauguuuggauggggcgcaccauuagcgaaaagcugagauccggauaugagacguucaaagugaucgagggcuggagcaagccuaauucuaaacugcagaucaaccggcaggucauuguggaacgcggcaauagauccggguacagcggaaucuuuucugucgagggcaaguccugcauuaaccgguguuucuauguggaacucaucagagggcgcaaggaggaaacagagguuugguggaccagcaauuccauuguggucuuuugcggaaccucuggcacauacgggaccggcagcuggcccgacggagccgauaucaaccugaugccuauuuga

SEQ ID NO: 206218 - RNA, 1410 nt, Artificial Sequence; identical to SEQ ID NO: 206209
  derived and/or modified CDS sequence (opt5) from neuraminidase__InfluenzaA__AAX12754

SEQ ID NO: 206219 - RNA, 1410 nt, Artificial Sequence
  derived and/or modified CDS sequence (opt5) from neuraminidase__InfluenzaA__AAX12774
augaaccccaaucagaagaucauuaccaucggcagcgugucccugacaauugccacgaucugcuuccucaugcaaauugcuauccuggucaccacaguuacccuucacuuuaaacaguacgaguguaacucuccuccgaauaaccaggugaugcugugcgaacccgccaucauugagagaaauaucacagaaauuguguaucucaccaacacaaccaucgagaaggaaauuuguccuaaacuggcggaguaccggaauuggagcaagccccagugcaacaucacgggguucgcuccuuuuuccaaagacaauucuauucgccuuagcgccggaggcgauaucugggucaccagagagcccuauguguccugugacccugauaagugcuaccaauucgcccuggggcagggaacaacccucaacaauggccauucuaacgacacaguucacgaucggaccccguaucgcacgcugcugaugaaugaacucggggugcccuuucaucugggaacaagacaggucuguaucgcuuggagcuccagcucuugccacgacggcaaggccuggcuucauguguguguuaccggcgaugacaaaaacgcuacagccuccuucauuuacaaugggcggcugguggauagcaucggaucuugguccaagaaaauucuccgcacccaggagagcgaaugcgucuguaucaacgggaccugcacaguggugaugacggacggcucugcguccggaaaggccgauaccaaaauucuguuuaucgaggagggcaagaucgucaacauuagcacacuuuccgggucugcucaacacguugaagagugcagcuguuauccuagauaccccggagugcggugcgugugucgcgacaauuggaagggcuccaacagaccuaucgucgauauuaaugugaaagacuacagcaucguuucuuccuaugugugcagcggccuggucggggacacaccccggaagaacgauucuuucagcuccucucacugucucgacccgaauaacgaagagggaggccauggggugaaaggaugggccuuugaugacggcaaugauguuuggauggggcgcaccauuagcgaaaagcugagauccggauacgagaccuucaaagugaucgagggcuggagcaagccuaacucuaaacugcagaucaaucggcaggucauuguggaacgcggcaacagauccggguauagcggaaucuuuucugucgagggcaaguccugcauuaaucgguguuucuacguggaacucaucagagggcgcaaggaggaaacggagguuugguggacaagcaacuccauuguggucuuuugcggaaccucuggcaccuaugggacaggcagcuggcccgacggagcugauaucaaucugaugccuauuuga

SEQ ID NO: 206220 - RNA, 1410 nt, Artificial Sequence
  derived and/or modified CDS sequence (opt5) from neuraminidase__InfluenzaA__AAX12804
augaaccccaaucagaagaucauuaccaucggcagcgugucccugacaauugccacgaucugcuuccucaugcaaauugcuauccuggucaccacaguuacccuucacuuuaaacaguacgaguguaacucuccuccgaauaaccaggugaugcugugcgaacccacaaucauugagagaaauaucaccgaaauuguguaucucacaaacaccacgaucgagaaggaaauuuguccuaaacuggccgaguaccggaauuggagcaagccccagugcaacaucaccggguucgcgccuuuuuccaaagacaauucuauucgccuuagcgcuggaggcgauaucugggucacaagagagcccuauguguccugugacccugauaagugcuaccaauucgcccuggggcagggaaccacacucaacaauggccauucuaacgacaccguucacgaucggacgccguaucgcacacugcugaugaaugaacucggggugcccuuucaucugggaaccagacaggucuguaucgccuggagcuccagcucuugccacgacggcaaggcuuggcuucauguguguguuacaggcgaugacgagaacgccaccgcuuccuucauuuacaaugggcggcugguggauagcaucggaucuugguccaaaaagauucuccgcacccaggaaagcgagugcgucuguaucaacggcacaugcacgguggugaugaccgacgggucugccuccggaaaagcggauacaaagauucuguuuaucgaggaaggcaaaaucguccacauuagcacccuuuccgggucugcccaacacguugaggaaugcagcuguuauccuagauaccccggagugcggugcgugugucgcgacaacuggaagggcuccaauagaccuaucgucgauauuaacgugaaggacuacagcaucguuucuuccuaugugugcagcggccuggucggggacacaccccggaaaaaugauaacuucucuagcucccauugucucgacccgaauaacgaggaaggaggccacggggugaagggaugggcuuuugaugacggcaaugauguuuggauggggcgcaccauuucugagaaacugagaagcggauacgagacguucaaggugaucgaaggcugguccaaaccuaacagcaagcugcagacaaaucggcaggucaucguggagcgcggcaacagaucuggguauuccggaauuuuuagcgucgaaggcaaaucuugcaucaaucgguguuucuacguggagcucauuagagggcgcaaggaagagaccgagguuugguggaccuccaacagcaucguggucuuuugcggaacauccggcaccuaugggacaggcucuuggcccgacggagccgauauuaaucugaugccuaucuga

SEQ ID NO: 206221 - RNA, 1410 nt, Artificial Sequence
  derived and/or modified CDS sequence (opt5) from neuraminidase__InfluenzaA__AAX12814
augaaccccaaucagaagaucauuaccaucggcagcgugucccugacaauugccacgaucugcuuccucaugcaaauugcuauccuggucaccacaguuacccuucacuuuaaacaguacgaguguaacucuccuccgaauaaccaggugaugcugugcgaacccgccaucauugagagaaauaucacagaaauuguguaucucaccaacacaaccaucgagaaggaaauuuguccuaaacuggcggaguaccggaauuggagcaagccccagugcaacaucacgggguucgcuccuuuuuccaaagacaauucuauucgccuuagcgccggaggcgauaucugggucaccagagagcccuauguguccugugacccugauaagugcuaccaauucgcccuggggcagggaacaacccucaacaauggccauucuaacgacacaguucacgaucggaccccguaucgcacgcugcugaugaaugaacucggggugcccuuucaucugggaacaagacaggucuguaucgcuuggagcuccagcucuugccacgacggcaaggccuggcuucauguguguguuaccggcgaugacgagaacgcuacagccuccuucauuuacaaugggcggcugguggauagcaucggaucuugguccaaaaagauucuccgcacccaggaaagcgagugcgucuguaucaacgggaccugcacaguggugaugacggacggcucugcguccggaaaagccgauaccaagauucuguuuaucgaggaaggcaaaaucgucaacauuagcacacuuuccgggucugcucaacacguugaggaaugcagcuguuauccuagauaccccggagugcggugcgugugucgcgacaauuggaagggcuccaacagaccuaucgucgauauuaaugugaaggacuacagcaucguuucuuccuaugugugcagcggccuggucggggacacaccccggaaaaacgauucuuucagcuccucucacugucucgacccgaauaacgaggaaggaggccauggggugaagggaugggccuuugaugacggcaaugauguuuggauggggcgcaccauuagcgagaaacugagauccggauacgagaccuucaaggugaucgaaggcuggagcaaaccuaacucuaagcugcagaucaaucggcaggucauuguggagcgcggcaacagauccggguauagcggaaucuuuucugucgaaggcaaauccugcauuaaucgguguuucuacguggagcucaucagagggcgcaaggaagagacggagguuugguggacaagcaacuccauuguggucuuuugcggaaccucuggcaccuaugggacaggcagcuggcccgacggagcugauaucaaucugaugccuauuuga

SEQ ID NO: 206222 - RNA, 1410 nt, Artificial Sequence
  derived and/or modified CDS sequence (opt5) from neuraminidase__InfluenzaA__AAX34064
augaaccccaaucagaagaucauuaccaucggcagcgugucccugacaauugccacgaucugcuuccucaugcaaauugcuauccuggucaccacaguuacccuucacuuuaaacagcaugaguguaacucuccuccgaauaaccaggugaugcugugcgaacccacaaucauugagagaaauaucaccgaaauuguguaccucacaaacaccacgaucgagcgggaaauuuguccuaagcuggccgaguaucgcaauuggagcaaaccccagugcaacaucaccggguucgcgccuuuuuccaaggacaauucuauuagacuuagcgcuggaggcgauaucugggucacacgggagcccuacguguccugugacccugauaaaugcuaucaauucgcccuggggcagggaaccacacucaacaauggccacucuaacgacaccguucaugaucgcacgccguacagaacacugcugaugaaugaacucggggugcccuuucaccugggaacccggcaggucuguaucgccuggagcuccagcucuugccaugacggcaaggcuuggcuucacguguguguuacaggcgaugacaagaacgccaccgcuuccuucauuuauaaugggcgccugguggauagcaucggaucuugguccaaaaagauucucagaacccaggagagcgaaugcgucuguaucaacggcacaugcacgguggugaugaccgacgggucugccuccggaaaagcggauacaaagauucuguuuaucgaggagggcaaaaucguccacauuagcacccuuuccgggucugcccaacauguugaagagugcagcuguuacccucgguaucccggagugcgcugcguguguagagacaacuggaagggcuccaaucggccuaucgucgauauuaacgugaaggacuacagcaucguuucuuccuacgugugcagcggccuggucggggacacaccccgcaaaaaugauucuagcuccucuagccacugucucgacccgaacaaugaagagggaggccauggggugaagggaugggcuuucgaugacggcaacgauguuuggauggggagaaccauuuccgaaaaacugcggagcggauaugagacguuuaaggugaucgagggcuggucuaaaccuaauuccaagcugcagaucaaccgccaggucauuguggaaagaggcaaucggagcggguacucuggaaucuucuccgucgagggcaaaagcugcauuaacagauguuuuuauguggaacucauccgcgggcggaaggaggaaacagagguuugguggaccuccaauucuauuguggucuucugcggaaccagcggcacauacgggaccggcuccuggcccgacggagccgauaucaaccugaugccuauuuga

SEQ ID NO: 206223 - RNA, 1410 nt, Artificial Sequence
  derived and/or modified CDS sequence (opt5) from neuraminidase__InfluenzaA__AAX35824
augaaccccaaucagaagaucauuaccaucggcagcgugucccugacaauugccacgaucugcuuccucaugcaaauugcuauccuggucaccacaguuacccuucacuuuaaacaguacgaguguaacucuccuccgaauaaccaggugaugcugugcgaacccacaaucauugagagaaauaucaccgaaauuguguaucucgccaacacaaccaucgagaaggaaauuuguccuaaacuggcggaguaccggaauuggagcaagccccagugcaacaucacgggguucgcuccuuuuuccaaagacaauucuauucgccuuagcgccggaggcgauaucugggucaccagagagcccuauguguccugugacccugauaagugcuaccaauucgcccuggggcagggaacaacccucaacaauggccauucuaacgacacaguucacgaucggaccccguaucgcacgcugcugaugaaugaacucggggugcccuuucaucugggaacaagacaggucuguaucgcuuggagcuccagcucuugccacgacggcaaggccuggcuucauguguguguuaccggcgaugacaaaaacgcuacagccuccuucauuuacaaugggcggcugguggauagcaucggaucuugguccaagaaaauucuccgcacccaggagagcgaaugcgucuguaucaacgggaccugcacaguggugaugacggacggcucugcguccggaaaggccgauaccaaaauucuguuuaucgaggagggcaagaucauucacaucagcacacuuuccgggucugcucaacacgucgaagagugcagcuguuauccuagauaccccggaguucggugcgugugucgcgacaacuggaagggcuccaauagaccuauuguggauaucaacgucaaagacuacagcauugugucuuccuauguuugcagcggccuggugggggacacaccccggaagaaugauucuagcuccucuagccauugucucgacccgaacaaugaagagggaggccacggggucaaaggaugggccuucgaugacggcaacgauguguggauggggcgcaccaucuccgaaaagcugagaagcggauacgagaccuuuaaaguuaucgagggcuggucuaagccuaauuccaaacugcagauuaaccgccaggugaucgucgaacggggcaauagaagcggguauucuggaauuuucuccguggagggcaagagcugcaucaaccgguguuuuuacgucgaacucauuagagggcgcaaggaggaaacggaggugugguggacauccaauucuaucguuguguucugcggaaccagcggcaccuaugggacaggcuccuggcccgacggagcugauauuaaccugaugccuaucuga

SEQ ID NO: 206224 - RNA, 1410 nt, Artificial Sequence; identical to SEQ ID NO: 206207
  derived and/or modified CDS sequence (opt5) from neuraminidase__InfluenzaA__AAX35834

SEQ ID NO: 206225 - RNA, 1410 nt, Artificial Sequence
  derived and/or modified CDS sequence (opt5) from neuraminidase__InfluenzaA__AAX35844
augaaccccaaucagaagaucauuaccaucggcagcgugucccugacaauugccacgaucugcuuccucaugcaaauugcuauccuggucaccacaguuacccuucacuuuaaacaguacgaguguaacucuccuccgaauaaccaggugaugcugugcgaacccacaaucauugagagaaauaucaccgaaauuguguaucucacaaacaccacgaucgagaaggaaauuuguccuaaacuggccgaguaccggaauuggagcaagccccagugcaacaucaccggguucgcgccuuuuuccaaagacaauucuauucgccuuagcgcuggaggcgauaucugggucacaagagagcccuauguguccugugacccugauaagugcuaccaauucgcccuggggcagggaaccacacucaacaauggccauucuaacgacaccguucacgaucggacgccguaucgcacacugcugaugaaugaacucggggugcccuuucaucugggaaccagacaggucuguaucgccuggagcuccagcucuugccacgacggcaaggcuuggcuucauguguguguuacaggcgaugacgagaacgccaccgcuuccuucauuuacaaugggcggcugguggauagcaucggaucuugguccaaaaagauucuccgcacccaggaaagcgagugcgucuguaucaacggcacaugcacgguggugaugaccgacgggucugccuccggaaaagcggauacaaagauucuguuuaucgaggaaggcaaaaucguccacauuagcacccuuuccgggucugcccaacacguugaggaaugcagcuguuauccuagauaccccggagugcggugcgugugucgcgacaacuggaagggcuccaauagaccuaucgucgauauuaacgugaaggacuacagcaucguuucuuccuaugugugcagcggccuggucggggacacaccccggaaaaaugauucuuucagcaacucccauugucucgacccgaauaacgaggaaggaggccacggggugaagggaugggcuuuugaugacggcaaugauguuuggauggggcgcaccauuucugagaaacugagaagcggauacgagacguucaaggugaucgaaggcugguuuaaaccuaacuccaagcugcagaucaaucggcaggucauuguggagcgcggcaacagaagcggguauucuggaaucuucuccgucgaaggcaaaagcugcauuaaucgguguuuuuacguggagcucaucagagggcgcaaggaagagacagagguuugguggaccucuaacuccauuguggucuucugcggaaccagcggcacauaugggaccggcuccuggcccgacggagccgauaucaaucugaugccuauuuga

SEQ ID NO: 206226 - RNA, 1410 nt, Artificial Sequence
  derived and/or modified CDS sequence (opt5) from neuraminidase__InfluenzaA__AAX35854
augaaccccaaucagaagaucauuaccaucggcagcgugucccugacaauugccacgaucugcuuccucaugcaaauugcuauccuggucaccacaguuacccuucacuuuaaacaguacgaguguaacucuccuccgaauaaccaggugaugcugugcgaacccacaaucauugagagaaauaucaccgaaauuguguaucucacaaacaccacgaucgagaaggaaauuuguccuaaacuggccgaguaccggaauuggagcaagccccagugcaacaucaccggguucgcgccuuuuuccaaagacaauucuauucgccuuagcgcuggaggcgauaucugggucacaagagagcccuauguguccugugacccugauaagugcuaccaauucgcccuggggcagggaaccacacucaacaauggccauucuaacgacaccguucacgaucggacgccguaucgcacacugcugaugaaugaacucggggugcccuuucaucugggaaccagacaggucuguaucgccuggagcuccagcucuugccacgacggcaaggcuuggcuucauguguguguuacaggcgaugacgagaacgccaccgcuuccuucauuuacaaugggcggcugguggauagcaucggaucuugguccaaaaagauucuccgcacccaggaaagcgagugcgucuguaucaacggcacaugcacgguggugaugaccgacgggucugccuccggaaaagcggauacaaagauucuguuuaucgaggaaggcaaaaucguccacauuagcacccuuuccgggucugcccaacacguugaggaaugcagcuguuauccuagauaccccggagugcggugcgugugucgcgacaacuggaagggcuccaauagaccuaucgucgauauuaacgugaaggacuacagcaucguuucuuccuaugugugcagcggccuggucggggacacaccccggaaaaaugauucuuucagcuccucucauugucucgacccgaacaaugaggaaggaggccacggggugaagggaugggcuuuugaugacggcaacgauguuuggauggggcgcaccauuagcgagaaacugagauccggauacgagacguucaaggugaucgaaggcuggagcaaaccuaauucuaagcugcagaucaaccggcaggucauuguggagcgcggcaauagauccggguauagcggaaucuuuucugucgaaggcaaauccugcauuaaccgguguuucuacguggagcucaucagagggcgcaaggaagagacagagguuugguggaccagcaauuccauuguggucuuuugcggaaccucuggcacauaugggaccggcagcuggcccgacggagccgauaucaaccugaugccuauuuga

SEQ ID NO: 206227 - RNA, 1410 nt, Artificial Sequence
  derived and/or modified CDS sequence (opt5) from neuraminidase__InfluenzaA__AAX35864
augaaccccaaucagaagaucauuaccaucggcagcgugucccugacaauugccacgaucugcuuccucaugcaaauugcuauccuggucaccacaguuacccuucacuuuaaacaguacgaguguaacucuccuccgaauaaccaggugaugcugugcgaacccgccaucauugagagaaauaucacagaaauuguguaucucaccaacacaaccaucgagaaggaaauuuguccuaaacuggcggaguaccggaauuggagcaagccccagugcaacaucacgggguucgcuccuuuuuccaaagacaauucuauucgccuuagcgccggaggcgauaucugggucaccagagagcccuauguguccugugacccugauaagugcuaccaauucgcccuggggcagggaacaacccucaacaauggccauucuaacgacacaguucacgaucggaccccguaucgcacgcugcugaugaaugaacucggggugcccuuucaucugggaacaagacaggucuguaucgcuuggagcuccagcucuugccacgacggcaaggccuggcuucauguguguguuaccggcgaugacgagaacgcuacagccuccuucauuuacaaugggcggcugguggauagcaucggaucuugguccaaaaacauucuccgcacccaggaaagcgagugcgucuguaucaacgggaccugcacaguggugaugacggacggcucugcguccggaaaggccgauaccaaaauucuguuuaucgaggaaggcaagaucgucaauauuagcacacuuuccgggucugcucaacacguugaggaaugcagcuguuauccuagauaccccggagugcggugcgugugucgcgacaacuggaaaggcuccaauagaccuaucgucgauauuaacgugaaggacuacagcaucguuucuuccuaugugugcagcggccuggucggggacacaccccggaagaaugauucuuucagcuccucucacugucucgacccgaacaaugaggaaggaggccauggggugaaaggaugggccuuugaugacggcaacgauguuuggauggggcgcaccauuagcgagaagcugagauccggauacgagaccuucaaagugaucgaaggcuggagcaagccuaauucuaaacugcagaucaaccggcaggucauuguggagcgcggcaauagauccggguauagcggaaucuuuucugucgaaggcaaguccugcauuaaccgguguuucuacguggagcucaucagagggcgcaaagaagagacggagguuugguggacaagcaauuccauuguggucuuuugcggaaccucuggcaccuaugggacaggcagcuggcccgacggagcugauaucaaccugaugccuauuuga

SEQ ID NO: 206228 - RNA, 1410 nt, Artificial Sequence
  derived and/or modified CDS sequence (opt5) from neuraminidase__InfluenzaA__AAX47538
augaaccccaaucagaagaucauuaccaucggcagcgugucccugacaauugccacgaucugcuuccucaugcaaauugcuauccuggucaccacaguuacccuucacuuuaaacaguacgaguguaacucuccuccgaauaaccaggugaugcugugcgaacccgccaucauugagagaaauaucacagaaauuguguaucucaccaacacaaccaucgaggaagagauuuguccuaagcuggcggaguaccggaauuggagcaaaccccagugcaacaucacgggguucgcuccuuuuuccaaggacaauucuauucgccuuagcgccggaggcgauaucugggucaccagagaacccuauguguccugugacccugauaaaugcuaccaauucgcccuggggcagggaacaacccucaacaauggccauucuaacgacacaguucacgaucggaccccguaucgcacgcugcugaugaaugagcucggggugcccuuucaucugggaacaagacaggucuguaucgcuuggagcuccagcucuugccacgacggcaaggccuggcuucauguguguguuaccggcgaugacaagaacgcuacagccuccuucauuuacaaugggcggcugguggauagcaucggaucuugguccaaaaagauucuccgcacccaggaaagcgagugcgucuguaucaacgggaccugcacaguggugaugacggacggcucugcguccggaaaagccgauaccaagauucuguuuaucgaggaaggcaaaaucgucaacauuagcacacuuuccgggucugcucaacacguugaggaaugcagcuguuauccuagauaccccggagugcggugcgugugucgcgacaauuggaagggcuccaacagaccuaucgucgauauuaaugugaaggacuacagcaucguuucuuccuaugugugcagcggccuggucggggacacaccccggaaaaacgauucuuucagcuccucucacugucucgacccgaauaacgaggaaggaggccauggggugaagggaugggccuuugaugacggcaaugauguuuggauggggcgcaccauuagcgagaaacugagauccggauacgagaccuucaaggugaucgaaggcuggagcaaaccuaacucuaagcugcagaucaaucggcaggucauuguggagcgcggcaacagauccggguauagcggaaucuuuucugucgaaggcaaauccugcauuaaucgguguuucuacguggagcucaucagagggcgcaaggaagagacggagguuugguggacaagcaacuccauuguggucuuuugcggaaccucuggcaccuaugggacaggcagcuggcccgacggagcugauaucaaucugaugccuauuuga

SEQ ID NO: 206229 - RNA, 1410 nt, Artificial Sequence; identical to SEQ ID NO: 206207
  derived and/or modified CDS sequence (opt5) from neuraminidase__InfluenzaA__AAX56383

SEQ ID NO: 206230 - RNA, 1410 nt, Artificial Sequence
  derived and/or modified CDS sequence (opt5) from neuraminidase__InfluenzaA__AAX56393
augaaccccaaucagaagaucauuaccaucggcagcgugucccugacaauugccacgaucugcuuccucaugcaaauugcuauccuggucaccacaguuacccuucacuuuaaacagcaugaguguaacucuccuccgaauaaccaggugaugcugugcgaacccacaaucauugagagaaauaucaccgaaauuguguaccucacaaacaccacgaucgagaaggaaauuuguccuaaacuggccgaguaucggaauuggagcaagccccagugcaacaucaccggguucgcgccuuuuuccaaagacaauucuauucgccuuagcgcuggaggcgauaucugggucacaagagagcccuacguguccugugacccugauaagugcuaucaauucgcccuggggaagggaaccacacucaacaauggccacucuaacaauaccguucaugaccggacgccguaccgcacacugcugaugaacgaacucggggugcccuuucaccugggaaccagacaggucuguaucgccuggagcuccagcucuugccaugauggcaaggcuuggcuucacguguguguuacaggcgacgauaaaaaugccaccgcuuccuucauuuauaacgggcggcugguggacagcaucggaucuugguccaaaaagauucuccgcacccaggagagcgaaugcgucuguaucaacggcacaugcacgguggugaugaccgaugggucugccuccggaaaagcggacacaaagauucuguuuaucgaggagggcaagaucguccacauuagcacccuuuccgggucugcccagcauguugaagagugcagcuguuacccuagauaucccggagugcggugcgugugucgcgauaauuggaaaggcuccaacagaccuaucgucgacauuaaugugaaggauuacagcaucguuucuuccuacgugugcagcggccuggucggggacacaccccggaaaaacgacucuuucagcuccucucacugucucgauccgaauaacgaagagggaggccauggggugaagggaugggcuuuugacgauggcaaugacguuuggauggggcgcaccauuagcgaaaaacugagauccggauaugagacguucaaggugaucgagggcuggagcaaaccuaacucuaagcugcaaaucaaucggcaggucauuguggaacgcggcaacagauccggguacagcggaaucuuuucugucgagggcaaguccugcauuaaucgguguuucuauguggaacucaucagagggcgcaaagaggaaacagagguuugguggaccagcaacuccauuguggucuuuugcggaaccucuggcacauacgggaccggcagcuggcccgauggagccgacaucaaucugaugccuauuuga

SEQ ID NO: 206231 - RNA, 1410 nt, Artificial Sequence; identical to SEQ ID NO: 206207
  derived and/or modified CDS sequence (opt5) from neuraminidase__InfluenzaA__AAX56413

SEQ ID NO: 206232 - RNA, 1410 nt, Artificial Sequence; identical to SEQ ID NO: 206209
  derived and/or modified CDS sequence (opt5) from neuraminidase__InfluenzaA__AAX56423

SEQ ID NO: 206233 - RNA, 1410 nt, Artificial Sequence; identical to SEQ ID NO: 206207
  derived and/or modified CDS sequence (opt5) from neuraminidase__InfluenzaA__AAX56433

SEQ ID NO: 206234 - RNA, 1410 nt, Artificial Sequence; identical to SEQ ID NO: 206226
  derived and/or modified CDS sequence (opt5) from neuraminidase__InfluenzaA__AAX56443

SEQ ID NO: 206235 - RNA, 1410 nt, Artificial Sequence
  derived and/or modified CDS sequence (opt5) from neuraminidase__InfluenzaA__AAX56473
augaaccccaaucagaagaucauuaccaucggcagcgugucccugacaauugccacgaucugcuuccucaugcaaauugcuauccuggucaccacaguuacccuucacuuuaaacaguacgaguguaacucuccuccgaauaaccaggugaugcugugcgaacccacaaucauugagagaaauaucaccgaaauuguguaucucacaaacaccacgaucgagaaggaaauuuguccuaaacuggccgaguaccggaauuggagcaagccccagugcaacaucaccggguucgcgccuuuuuccaaagacaauucuauucgccuuagcgcuggaggcgauaucugggucacaagagagcccuauguguccugugacccugauaagugcuaccaauucgcccuggggcagggaaccacacucaacaauggccauucuaacgacaccguucacgaucggacgccguaucgcacacugcugaugaaugaacucggggugcccuuucaucugggaaccagacaggucuguaucgccuggagcuccagcucuugccacgacggcaaggcuuggcuucauguguguguuacaggcgaugacgagaacgccaccgcuuccuucauuuacaaugggcggcugguggauagcaucggaucuugguccaaaaagauucuccgcacccaggaaagcgagugcgucuguaucaacggcacaugcacgguggugaugaccgacgggucugccuccggaaaagcggauacaaagauucuguuuaucgaggaaggcaaaaucguccacauuagcacccuuuccgggucugcccaacacguugaggaaugcagcuguuauccuagauaccccggagugcggugcgugugucgcgacaacuggaagggcuccaauagaccuaucgucgauauuaacgugaaggacuacagcaucguuucuuccuaugugugcagcggccuggucggggacacaccccggaaaaaugauucuuucagcuccucucauugucucgacccgaacaaugaggaaggaggccacggggugaagggaugggcuuuugaugacggcaacgauguuuggauggggcgcaccauuagcgagaaacugagauccggauacgagacguucaaggugaucgaaggcuggagcaaaccuaauucuaagcugcagaucaaccggcaggucauuguggagcgcggcaauagauccggguauagcggaaucuuuucugucgaaggcaaaaacugcauuaaucgguguuucuacguggagcucaucagagggcgcaaggaagagacagagguuugguggaccuccaacagcauuguggucuuuugcggaaccuccggcacauaugggaccggcucuuggcccgacggagccgauaucaaucugaugccuauuuga

SEQ ID NO: 206236 - RNA, 1410 nt, Artificial Sequence
  derived and/or modified CDS sequence (opt5) from neuraminidase__InfluenzaA__AAX56483
augaaccccaaucagaagaucauuaccaucggcagcgugucccugacaauugccacgaucugcuuccucaugcaaauugcuauccuggucaccacaguuacccuucacuuuaaacaguacgagugugacucuccuccgaacaaucaggugaugcugugcgaacccacaaucauugagagaaacaucaccgaaauuguguaucucacaaauaccacgaucgagaaggaaauuuguccuaaacuggccgaguaccggaacuggagcaagccccagugcaauaucaccggguucgcgccuuuuuccaaagauaacucuauucgccuuagcgcuggaggcgacaucugggucacaagagagcccuauguguccugugauccugacaagugcuaccaauucgcccuggggcagggaaccacacucaauaacggccauucuaaugauaccguucacgaccggacgccguaucgcacacugcugaugaacgaacucggggugcccuuucaucugggaaccagacaggucuguaucgccuggagcuccagcucuugccacgauggcaaggcuuggcuucauguguguguuacaggcgacgaugagaaugccaccgcuuccuucauuuacaacgggcggcugguggacagcaucggaucuugguccaaaaagauucuccgcacccaggaaagcgagugcgucuguaucaauggcacaugcacgguggugaugaccgaugggucugccuccggaaaagcggacacaaagauucuguuuaucgaggaaggcaaaaucguccacauuagcacccuuuccgggucugcccaacacguugaggaaugcagcuguuauccuagauaccccggagugcggugcgugugucgcgauaacuggaagggcuccaacagaccuaucgucgacauuaaugugaaggacuacagcaucguuucuuccuaugugugcagcggccuggucggggauacaccccggaaaaacgacucuuucagcuccucucauugucucgauccgaauaacgaggaaggaggccacggggugaagggaugggcuuuugacgauggcaaugacguuuggauggggcgcaccauuagcgagaaacugagauccggauacgagacguucaaggugaucgaaggcuggagcaaaccuaacucuaagcugcagaucaaucggcaggucauuguggagcgcggcaacagauccggguauagcggaaucuuuucugucgaaggcaaauccugcauuaaucgguguuucuacguggagcucaucagagggcgcaaggaagagacagagguuugguggaccagcaacuccauuguggucuuuugcggaaccucuggcacauaugggaccggcagcuggcccgauggagccgacaucaaucugaugccuauuuga

SEQ ID NO: 206237 - RNA, 1410 nt, Artificial Sequence; identical to SEQ ID NO: 206236
  derived and/or modified CDS sequence (opt5) from neuraminidase__InfluenzaA__AAX56503

SEQ ID NO: 206238 - RNA, 1410 nt, Artificial Sequence
  derived and/or modified CDS sequence (opt5) from neuraminidase__InfluenzaA__AAX56513
augaaccccaaucagaagaucauuaccaucggcagcgugucccugacaauugccacgaucugcuuccucaugcaaauugcuauccuggucaccacaguuacccuucacuuuaaacaguacgaguguaacucuccuccgaauaaccaggugaugcugugcgaacccacaaucauugagagaaauaucaccgaaauuguguaucucacaaacaccacgaucgagaaggaaauuuguccuaaacuggccgaguaccggaauuggagcaagccccagugcaacaucaccggguucgcgccuuuuuccaaagacaauucuauucgccuuagcgcuggaggcgauaucugggucacaagagagcccuauguguccugugacccugauaagugcuaccaauucgcccuggggcagggaaccacacucaacaauggccauucuaacgacaccguucacgaucggacgccguaucgcacacugcugaugaaugaacucggggugcccuuucaucugggaaccagacaggucuguaucgccuggagcuccagcucuugccacgacggcaaggcuuggcuucauguguguguuacaggcgaugacgagaacgccaccgcuuccuucauuuacaaugggcggcugguggauagcaucggaucuugguccaaaaagauucuccgcacccaggaaagcgagugcgucuguaucaacggcacaugcacgguggugaugaccgacgggucugccuccggaaaagcggauacaaagauucuguuuaucgaggaaggcaaaaucguccacauuagcacccuuuccgggucugcccaacacguugaggaaugcagcuguuauccuagauaccccggagugcggugcgugugucgcgacaacuggaagggcuccaauagaccuaucgucgauauuaacgugaaggacuacagcaucguuucuuccuaugugugcagcggccuggucggggacacaccccggaaaaaugauucuuucagcuccucucauugucucgacccgaacaaugaggaaggaggccacggggugaagggaugggcuuuugaugacggcaacgauguuuggauggggcgcaccauuagcgagaaacugagauccggauacgagacguucaaggugaucgaaggcuggagcaaaccuaauucuaagcugcagacaaaccggcaggucaucguggagcgcggcaauagauccggguauagcggaaucuuuucugucgaaggcaaauccugcauuaaccgguguuucuacguggagcucauuagagggcgcaaggaagagaccgagguuugguggaccagcaauuccaucguggucuuuugcggaacaucuggcaccuaugggacaggcagcuggcccgacggagccgauauuaaccugaugccuaucuga

SEQ ID NO: 206239 - RNA, 1413 nt, Artificial Sequence
  derived and/or modified CDS sequence (opt5) from neuraminidase__InfluenzaA__AAX56533
augaaccccaaucagaagaucauuaccaucggcagcauuuccguggccaucgggauuaucucucugauccuccaaauuggaaacaucauuagcaucugggcuucccacucuauucagacaggcagccagaauuacacggggaucugcaaccagagaauuaucaccuaugagaaucggacaugggucaaccaaaccuacguuaauaucaacaauacaaacgugguggccggaaaagacaagaccuccaugacacuggcgggcaauucuagccuuuguccuauucgcgggugggcuaucuauaccaaagauaacuccauuagaaucggaagcaagggcgacgucuucgugauucgggaaccguuuaucucuugcucccaucuggagugucgcacguucuuucucacccagggcgcccugcuuaaugauaaacacagcaacgggacaaucaaggacagaucucccuuccgggcccugauguccugcccucucggagaagcucccagcccuuacaauucucgcuuugaguccguugccuggagcgcuuccgccugucaugauggccugggguggcugaccauuggaaucucuggccccgacaacggggcgguggccguccucaaguauaacggaauuaucacagaaaccauuaaaagcuggaagaaacagauccugagaacgcaggaguccgagugcguguguguuaauggcagcugcuucacaaucaugaccgauggcccuucuaaccgggcugccuccuaccgcauuuuuaagaucgaaaaagggagagugacaaagagcauugagcuugacgcuccgaauuaucacuacgaagaguguucuugcuaccccgauaccggaaccgucaugugugugugccgggacaacuggcauggcagcaaucgcccuuggguguccuucaaccaaaaucuggauuaucagaucggguacauuugcucuggagucuuuggcgacaaccccagaccuaaggauggggagggaagcuguaaucccguuacaguggacggcgccgacggcgugaaaggguucuccuaucgguacggaaacggcgucuggaucgggcgcaccaagagcaauagacuccggaaaggauuugaaaugauuugggauccgaacggcuggacggacacagauucugacuucuccaugaagcaggaugugguugcgaugaaugacuggagcggguauucuggcuccuuugugcagcacccugagcugaccggacuugauugcaugagacccuguuucugggucgaacuggugcgcggccucccucgggagaacacaaccaucuggacgagcggguccucuaucagcuucugcggaguuaauuccgaaacagccaacuggucuuggcccgacggcgcugagcugcccuuuaccauugauaaauga

SEQ ID NO: 206240 - RNA, 1410 nt, Artificial Sequence
  derived and/or modified CDS sequence (opt5) from neuraminidase__InfluenzaA__AAX56543
augaaccccaaucagaagaucauuaccaucggcagcgugucccugacaauugccacgaucugcuuccucaugcaaauugcuauccuggucaccacaguuacccuucacuuuaaacaguacgaguguaacucuccuccgaauaaccaggugaugcugugcgaacccacaaucauugagagaaauaucaccgaaauuguguaucucacaaacaccacgaucgagaaggaaauuuguccuaaacuggccgaguaccggaauuggagcaagccccagugcaacaucaccggguucgcgccuuuuuccaaagacaauucuauucgccuuagcgcuuccggagauaucugggucacaagagagcccuaugugucuugugacccugauaagugcuaccaauucgcccugggccaggggaccacacucaacaauggacauagcaacgacaccguucacgaucggacgccguaucgcacacugcugaugaaugaacucggcgugcccuuucaucuggggaccaagcaggucuguaucgccugguccucuagcuccugccacgacggaaaagccuggcuucauguguguguuacaggcgaugacgagaacgcuaccgcuagcuucauuuacaauggcagacugguggauucuaucggguccuggagcaagaaaauucuccggacccaggaaucugagugcgucuguaucaacggaacaugcacgguggugaugaccgacggcuccgccagcgggaaggcggauacaaaaauucuguuuaucgaggaaggaaagaucguccacaccuccucucuuagcggcuccgcccaacacguugaggaaugcagcuguuauccucgcuaccccggggugagaugcgugugucgggacaacuggaagggaucuaaucgcccuauugucgauaucaacgugaaagacuacuccauuguuagcucuuaugugugcagcggccuggucggcgacacacccagaaagaaugauuccucuagcuccagccauugucucgacccgaacaaugaggaagggggacacggcgugaaagggugggcuuucgaugacggaaacgauguuuggaugggccggaccaucucugaggagcugcgcuccggguacgaaacguuuaaggugauugagggauggagcaaaccuaauucuaagcugcagaucaacagacaggucaucguggaccggggcaaucgcuccggcuauagcgggauuuucuccgucgaaggaaaaucuugcaucaacagauguuuuuacguggagcucauucggggcagaaagcaggaaacagagguucuguggaccagcaauuccaucguggucuucugcgggaccucuggaacauauggcaccgggagcuggcccgauggcgccgacauuaaccuuaugccuaucuga

SEQ ID NO: 206241 - RNA, 1410 nt, Artificial Sequence; identical to SEQ ID NO: 206133
  derived and/or modified CDS sequence (opt5) from neuraminidase__InfluenzaA__AAX56553

SEQ ID NO: 206242 - RNA, 1410 nt, Artificial Sequence
  derived and/or modified CDS sequence (opt5) from neuraminidase__InfluenzaA__AAX56563
augaaccccaaucagaagaucauuaccaucggcagcgugucccugacaauugccgcuaucugcuuccucaugcaaauugccauccuggucacgaccguuacacuucacuuuaaacagcaugaguguaacucuccuccgaauaaccaggugaugcugugcgaacccaccaucauugagagaaauaucacagaaauuguguaccucaccaacacaaccaucgagaaggaaauuuguccuaaacuggcggaguaucggaauuggagcaagccccagugcaacaucacgggguucgcuccuuuuuccaaagacaauucuauucgccuuagcgccggaggcgauaucugggucaccagagagcccuacguguccugugacccugauaagugcuaucaauucgcccuggggcagggaacaacccucaacaauggccacucuaacgacacaguucaugaucggaccccguaccgcacgcugcugaugaaugaacucggggugcccuuucaccugggaacaagacaggucuguaucgcuuggagcuccagcucuugccaugacggcaaggccuggcuucacguguguguuaccggcgaugacaaaaacgcuacagccuccuucauuuauaaugggcggcugguggauagcaucggaucuugguccaagaaaauucuccgcacccaggagagcgaaugcgucuguaucaacgggaccugcacaguggugaugacggacggcucugcguccggaaaggccgauaccaaaauucuguuuaucgaggagggcaagaucguccacauuagcgcucuuuccgggucugcccaacauguugaagagugcagcuguuacccuagauaucccggagugcggugcgugugucgcgacaacuggaagggcuccaauagaccuaucgucgauauuaacgugaaagacuacagcaucguuucuuccuacgugugcagcggccuggucggggacacaccccggaagaaugauucuuucagcuccucucacugucucgacccgaacaaugaagagggaggccauggggugaaaggaugggcuuuugaugacggcaacgauguuuggauggggcgcaccauuagcgaaaagcugagauccggauaugagacauucaaagugaucgagggcuggagcaagccuaauucuaaacugcagaucaaccggcaggucauuguggaacgcgacaauagauccggcuacagcgggaucuuuucugucgagggaaaguccugcauuaaccgguguuucuauguggaacucaucagaggccgcaaggaggaaaccgagguuugguggacgagcaauuccauuguggucuuuugcgggacaucuggaaccuacggcaccgggagcuggcccgauggcgccgacaucaaccugaugccuauuuga

SEQ ID NO: 206243 - RNA, 1410 nt, Artificial Sequence
  derived and/or modified CDS sequence (opt5) from neuraminidase__InfluenzaA__AAX56573
augaaccccaaucagaagaucauuaccaucggcagcgugucccugacaauugccacgaucugcuuccucaugcaaauugcuauccuggucaccacaguuacccuucacuuuaaacaguacgaguguaacucuccuccgaauaaccaggugaugcugugcgaacccgccaucauugagagaaauaucacagaaauuguguaucucaccaacacaaccaucgagaaggaaauuuguccuaaacuggcggaguaccggaauuggagcaagccccagugcaacaucacgggguucgcuccuuuuuccaaagacaauucuauucgccuuagcgccggaggcgauaucugggucaccagagagcccuauguguccugugacccugauaagugcuaccaauucgcccuggggcagggaacaacccucaacaauggccauucuaacgacacaguucacgaucggaccccguaucgcacgcugcugaugaaugaacucggggugcccuuucaucugggaacaagacaggucuguaucgcuuggagcuccagcucuugccacgacggcaaggccuggcuucauguguguguuaccggcgaugacgagaacgcuacagccuccuucauuuacaaugggcggcugguggauagcaucggaucuugguccaaaaagauucuccgcacccaggaaagcgagugcgucuguaucaacgggaccugcacaguggugaugacggacggcucugcguccggaaaagccgauaccaagauucuguuuaucgaggaaggcaaaaucguccacauuagcacacuuuccgggucugcucaacacguugaggaaugcagcuguuauccuagauaccccggagugcggugcgugugucgcgacaacuggaagggcuccaauagaccuaucgucgauauuaacgugaaggacuacagcaucguuucuuccuaugugugcagcggccuggucggggacacaccccggaaaaaugauucuuucagcuccucucauugucucgacccgaacaaugaggaaggaggccacggggugaagggaugggccuuugaugacggcaacgauguuuggauggggcgcaccauuagcgagaaacugagauccggauacgagaccuucaaggugaucgaaggcuggagcaaaccuaauucuaagcugcagaucaaccggcaggucauuguggagcgcggcaauagauccggguauagcggaaucuuuucugucgaaggcaaauccugcauuaaccgguguuucuacguggagcucaucagagggcgcaaggaagagacggagguuugguggacaagcaauuccauuguggucuuuugcggaaccucuggcaccuaugggacaggcagcuggcccgacggagcugauaucaaccugaugccuauuuga

SEQ ID NO: 206244 - RNA, 1410 nt, Artificial Sequence
  derived and/or modified CDS sequence (opt5) from neuraminidase__InfluenzaA__AAX56583
augaaccccaaucagaagaucauuaccaucggcagcgugucccugacaauugccacgaucugcuuccucaugcaaauugcuauccuggucaccacaguuacccuucacuuuaaacaguacgaguguaacucuccuccgaauaaccaggugaugcugugcgaacccacaaucauugagagaaauaucaccgaaauuguguaucucacaaacaccacgaucgagaaggaaauuuguccuaaacuggccgaguaccggaauuggagcaagccccagugcaacaucaccggguucgcgccuuuuuccaaagacaauucuauucgccuuagcgcuggaggcgauaucugggucacaagagagcccuauguguccugugacccugauaagugcuaccaauucgcccuggggcagggaaccacacucaacaauggccauucuaacgacaccguucacgaucggacgccguaucgcacacugcugaugaaugaacucggggugcccuuucaucugggaaccagacaggucuguaucgccuggagcuccagcucuugccacgacggcaaggcuuggcuucauguguguguuacaggcgaugacgagaacgccaccgcuuccuucauuuacaaugggcggcugguggauagcaucggaucuugguccaaaaagauucuccgcacccaggaaagcgagugcgucuguaucaacggcacaugcacgguggugaugaccgacgggucugccuccggaaaagcggauacaaagauucuguuuaucgaggaaggcaaaaucguccacauuagcacccuuuccgggucugcccaacacguugaggaaugcagcuguuauccuagauaccccggagugcggugcgugugucgcgaccauuggaagggcuccaacagaccuaucgucgauauuaaugugaaggacuacagcaucguuucuuccuaugugugcagcggccuggucggggacacaccccggaaaaacgauucuuucagcuccucucacugucucgacccgaauaacgaggaaggaggccauggggugaagggaugggcuuuugaugacggcaaugauguuuggauggggcgcaccauuagcgagaaacugagauccggauacgagacguucaaggugaucgaaggcuggagcaaaccuaacucuaagcugcagacaaaucggcaggucaucguggagcgcggcaacagauccggguauagcggaaucuuuucugucgaaggcaaauccugcauuaaucgguguuucuacguggagcucauuagagggcgcaaggaagagaccgagguuugguggaccagcaacuccaucguggucuuuugcggaacaucuggcaccuaugggacaggcagcuggcccgacggagccgauauuaaucugaugccuaucuga

SEQ ID NO: 206245 - RNA, 1410 nt, Artificial Sequence
  derived and/or modified CDS sequence (opt5) from neuraminidase__InfluenzaA__AAX56593
augaaccccaaucagaagaucauuaccaucggcagcgugucccugacaauugccacgaucugcuuccucaugcaaauugcuauccuggucaccacaguuacccuucacuuuaaacaguacgaguguaacucuccuccgaauaaccaggugaugcugugcgaacccgccaucauugagagaaauaucacagaaauuguguaucucaccaacacaaccaucgagaaggaaauuuguccuaaacuggcggaguaccggaauuggagcaagccccagugcaacaucacgggguucgcuccuuuuuccaaagacaauucuauucgccuuagcgccggaggcgauaucugggucaccagagagcccuauguguccugugacccugauaagugcuaccaauucgcccuggggcagggaacaacccucaacaauggccauucuaacgacacaguucacgaucggaccccguaucgcacgcugcugaugaaugaacucggggugcccuuucaucugggaacaagacaggucuguaucgcuuggagcuccagcucuugccacgacggcaaggccuggcuucauguguguguuaccggcgaugacgagaacgcuacagccuccuucauuuacaaugggcggcugguggauagcaucggaucuugguccaaaaagauucuccgcacccaggaaagcgagugcgucuguaucaacgggaccugcacaguggugaugacggacggcucugcguccggaaaagccgauaccaagauucuguuuaucgaggaaggcaaaaucgucaacauuagcacacuuuccgggucugcucaacacguugaggaaugcagcuguuauccuagauaccccggagugcggugcgugugucgcgacaauuggaagggcuccaacagaccuaucgucgauauuaaugugaaggacuacagcaucguuucuuccuaugugugcagcggccuggucggggacacaccccggaaaaacgauucuuucagcuccucucacugucucgacccgaauaacgaggaaggaggccauggggugaagggaugggccuuugaugacggcaaugauguuuggauggggcgcaccauuagcgagaaauucagauccggauacgagaccuuuaaggugaucgaaggcuggagcaaaccuaacucuaagcugcagaucaaucggcaggucauuguggagcgcggcaacagauccggguauagcggaaucuucucugucgaaggcaaauccugcauuaaucgguguuuuuacguggagcugaucagagggcgcaaggaagagacggagguuugguggacaagcaacuccauuguggucuucugcggaaccucuggcaccuaugggacaggcagcuggcccgacggagcugauaucaaucucaugccuauuuga

SEQ ID NO: 206246 - RNA, 1410 nt, Artificial Sequence
  derived and/or modified CDS sequence (opt5) from neuraminidase__InfluenzaA__AAX56603
augaaccccaaucagaagaucauuaccaucggcagcgugucccugacaauugccgcuaucugcuuccucaugcaaauugccauccuggucacgaccguuacacuucacuuuaaacagcaugaguguaacucuccuccgaauaaccaggugaugcugugcgaacccaccaucauugagagaaauaucacagaaauuguguaccucaccaacacaaccaucgagaaggaaauuuguccuaaacuggcggaguaucggaauuggagcaagccccagugcaacaucacgggguucgcuccuuuuuccaaagacaauucuauucgccuuagcgccggaggcgauaucugggucaccagagagcccuacguguccugugacccugauaagugcuaucaauucgcccuggggcagggaacaacccucaacaauggccacucuaacgacacagcucaugaucggaccccguaccgcacgcugcugaugaaugaacucgggguucccuuucaccugggaacaagacagguguguaucgccuggagcuccagcucuugccaugacggcaaggcuuggcuucacgucugugugaccggcgaugacaaaaacgccacagcguccuucauuuauaaugggcggcugguugauagcaucggaucuugguccaagaaaauucuccgcacccaggagagcgaaugcguguguaucaacgggaccugcacagucgugaugacggacggcucugccuccggaaaggcugauaccaaaauucuguuuaucgaggagggcaagaucgugcacauuagcacacuuuccgggucugcccaacaugucgaagagugcagcuguuacccuagauaucccggaguucggugcgugugucgcgacaacuggaagggcuccaauagaccuaucguggauauuaacgucaaagacuacagcaucgugucuuccuacguuugcagcggccuggugggggacacaccccggaagaaugauucuuucagcuccucucacugucucgacccgaacaaugaagagggaggccauggggucaaaggaugggcuuuugaugacggcaacgauguguggauggggcgcaccauuagcgaaaagcugagauccggauaugagaccuucaaaguuaucgagggcuggagcaagccuaauucuaaacugcagaucaaccgccaggugauugucgaacggggcaauagauccggguacagcggaaucuuuucuguggagggcaaguccugcauuaaccgguguuucuaugucgaacucaucagagggcgcaaggaggaaacggaggugugguggacaagcaauuccauuguuguguuuugcggaaccucuggcaccuacgggacaggcagcuggcccgacggagccgauaucaaccugaugccuauuuga

SEQ ID NO: 206247 - RNA, 1410 nt, Artificial Sequence; identical to SEQ ID NO: 206217
  derived and/or modified CDS sequence (opt5) from neuraminidase__InfluenzaA__AAX57647

SEQ ID NO: 206248 - RNA, 1410 nt, Artificial Sequence; identical to SEQ ID NO: 206207
  derived and/or modified CDS sequence (opt5) from neuraminidase__InfluenzaA__AAX57657

SEQ ID NO: 206249 - RNA, 1410 nt, Artificial Sequence; identical to SEQ ID NO: 206245
  derived and/or modified CDS sequence (opt5) from neuraminidase__InfluenzaA__AAX57667

SEQ ID NO: 206250 - RNA, 1410 nt, Artificial Sequence; identical to SEQ ID NO: 206226
  derived and/or modified CDS sequence (opt5) from neuraminidase__InfluenzaA__AAX57677

SEQ ID NO: 206251 - RNA, 1410 nt, Artificial Sequence
  derived and/or modified CDS sequence (opt5) from neuraminidase__InfluenzaA__AAX57687
augaaccccaaucagaagaucauuaccaucggcagcgugucccugacaauugccacgaucugcuuccucaugcaaauugcuauccuggucaccacaguuacccuucacuuuaaacaguacgaguguaacucuccuccgaauaaccaggugaugcugugcgaacccgccaucauugagagaaauaucacagaaauuguguaucucaccaacacaaccaucgagaaggaaauuuguccuaaacuggcggaguaccggaauuggagcaagccccagugcaacaucacgggguucgcuccuuuuuccaaagacaauucuauucgccuuagcgccggaggcgauaucugggucaccagagagcccuauguguccugugacccugauaagugcuaccaauucgcccuggggcagggaacaacccucaacaauggccauucuaacgacacaguucacgaucggaccccguaucgcacgcugcugaugaaugaacucggggugcccuuucaucugggaacaagacaggucuguaucgcuuggagcuccagcucuugccacgacggcaaggccuggcuucauguguguguuaccggcgaugacgagaacgcuacagccuccuucauuuacgaugggcggcugguggacagcaucggaucuugguccaaaaagauucuccgcacccaggaaagcgagugcgucuguaucaaugggaccugcacaguggugaugacggauggcucugcguccggaaaagccgacaccaagauucuguuuaucgaggaaggcaaaaucgucaacauuagcacacuuuccgggucugcucaacacguugaggaaugcagcuguuauccuagauaccccggagugcggugcgugugucgcgauaacuggaagggcuccaauagaccuaucgucgacauuaacgugaaggacuacagcaucguuucuuccuaugugugcagcggccuggucggggauacaccccggaaaaaugacucuuucagcuccucucacugucucgauccgaacaaugaggaaggaggccauggggugaagggaugggccuuugacgauggcaacgacguuuggauggggcgcaccauuagcgagaaacugagauccggauacgagaccuucaaggugaucgaaggcuggagcaaaccuaauucuaagcugcagaucaaccggcaggucauuguggagcgcggcaauagauccggguauagcggaaucuuuucugucgaaggcaaauccugcauuaaccgguguuucuacguggagcucaucagagggcgcaaggaagagacggagguuugguggacaagcaauuccauuguggucuuuugcggaaccucuggcaccuaugggacaggcagcuggcccgauggagcugacaucaaccugaugccuauuuga

SEQ ID NO: 206252 - RNA, 1410 nt, Artificial Sequence
  derived and/or modified CDS sequence (opt5) from neuraminidase__InfluenzaA__AAX57697
augaaccccaaucagaagaucauuaccaucggcagcgugucccugacaauugccacgaucugcuuccucaugcaaauugcuauccuggucaccacaguuacccuucacuuuaaacaguacgaguguaacucuccuccgaauaaccaggugaugcugugcgaacccacaaucauugagagaaauaucaccgaaauuguguaucucacaaacaccacgaucgagaaggaaauuuguccuaaacuggccgaguaccggaauuggagcaagccccagugcaacaucaccggguucgcgccuuuuuccaaagacaauucuauucgccuuagcgcuggaggcgauaucugggucacaagagagcccuauguguccugugacccugauaagugcuaccaauucgcccuggggcagggaaccacacucaacaauggccauucuaacgacaccguucacgaucggacgccguaucgcacacugcugaugaaugaacucggggugcccuuucaucugggaaccagacaggucuguaucgccuggagcuccagcucuugccacgacggcaaggcuuggcuucauguguguguuacaggcgaugacgagaacgccaccgcuuccuucauuuacaaugggcggcugguggauagcaucggaucuugguccaaaaagauucuccgcacccaggaaagcgagugcgucuguaucaacggcacaugcacgguggugaugaccgacgggucugccuccggaaaagcggauacaaagauucuguuuaucgaggaaggcaaaaucguccacauuagcacccuuuccgggucugcccaacacguugaggaaugcagcuguuauccuagauaccccggagugcggugcgugugucgcgacaacuggaagggcuccaauagaccuaucgucgauauuaacgugaaggaccauagcaucguuucuuccuacgugugcagcggccuggucggggacacaccccggaaaaaugauucuuucagcuccucucacugucucgacccgaacaaugaggaaggaggccauggggugaagggaugggcuuuugaugacggcaacgauguuuggauggggcgcaccauuagcgagaaacugagauccggauaugagacguucaaggugaucgaaggcuggagcaaaccuaauucuaagcugcagaucaaccggcaggucauuguggagcgcggcaauagauccggguacagcggaaucuuuucugucgaaggcaaauccugcauuaaccgguguuucuauguggagcucaucagagggcgcaaggaagagacagagguuugguggaccagcaauuccauuguggucuuuugcggaaccucuggcacauacgggaccggcagcuggcccgacggagccgauaucaaccugaugccuauuuga

SEQ ID NO: 206253 - RNA, 1410 nt, Artificial Sequence
  derived and/or modified CDS sequence (opt5) from neuraminidase__InfluenzaA__AAX57707
augaaccccaaucagaagaucauuaccaucggcagcgugucccugacaauugccgcuaucugcuuccucaugcaaauugccauccuggucacgaccguuacacuucacuuuaaacagcaugaguguaacucuccuccgaauaaccaggugaugcugugcgaacccaccaucauugagagaaauaucacagaaauuguguaccucaccaacacaaccaucgagaaggaaauuuguccuaaacuggcggaguaucggaauuggagcaagccccagugcaacaucacgggguucgcuccuuuuuccaaagacaauucuauucgccuuagcgccggaggcgauaucugggucaccagagagcccuacguguccugugacccugauaagugcuaucaauucgcccuggggcagggaacaacccucaacaauggccacucuaacgacacaguucaugaucggaccccguaccgcacgcugcugaugaaugaacucggggugcccuuucaccugggaacaagacaggucuguaucgcuuggagcuccagcucuugccaugacggcaaggccuggcuucacguguguguuaccggcgaugacaaaaacgcuacagccuccuucauuuauaaugggcggcugguggauagcaucggaucuugguccaagaaaauucuccgcacccaggagagcgaaugcgucuguaucaacgggaccugcacaguggugaugacggacggcucugcguccggaaaggccgauaccaaaauucuguuuaucgaggagggcaagaucguccacauuagcacacuuuccgggucugcucaacauguugaagagugcagcuguuacccuagauaucccggagugcggugcgugugucgcgacaacuggaagggcuccaauagaccuaucgucgauauuaacgugaaagacuacagcaucguuucuuccuacgugugcagcggccuggucggggacacaccccggaagaaugaucgcuucucuagcucccacugucucgacccgaacaaugaagagggaggccauggggugaaaggaugggccuuugaugacggcaacgauguuuggauggggagaaccauuucugaaaagcugcggagcggauaugagaccuucaaagugaucgagggcugguccaagccuaauagcaaacugcagaucaaccgccaggucauuguggaaagaggcaaucggucuggguacuccggaaucuuuagcgucgagggcaagucuugcauuaacagauguuucuauguggaacucauccgcgggcggaaggaggaaacggagguuugguggacauccaauagcauuguggucuuuugcggaaccuccggcaccuacgggacaggcucuuggcccgacggagcugauaucaaccugaugccuauuuga

SEQ ID NO: 206254 - RNA, 1410 nt, Artificial Sequence; identical to SEQ ID NO: 206226
  derived and/or modified CDS sequence (opt5) from neuraminidase__InfluenzaA__AAX57717

SEQ ID NO: 206255 - RNA, 1410 nt, Artificial Sequence; identical to SEQ ID NO: 206245
  derived and/or modified CDS sequence (opt5) from neuraminidase__InfluenzaA__AAX57726

SEQ ID NO: 206256 - RNA, 1410 nt, Artificial Sequence; identical to SEQ ID NO: 206245
  derived and/or modified CDS sequence (opt5) from neuraminidase__InfluenzaA__AAX57737

SEQ ID NO: 206257 - RNA, 1410 nt, Artificial Sequence; identical to SEQ ID NO: 206133
  derived and/or modified CDS sequence (opt5) from neuraminidase__InfluenzaA__AAX57747

SEQ ID NO: 206258 - RNA, 1410 nt, Artificial Sequence; identical to SEQ ID NO: 206133
  derived and/or modified CDS sequence (opt5) from neuraminidase__InfluenzaA__AAX57757

SEQ ID NO: 206259 - RNA, 1410 nt, Artificial Sequence
  derived and/or modified CDS sequence (opt5) from neuraminidase__InfluenzaA__AAX57767
augaaccccaaucagaagaucauuaccaucggcagcgugucccugacaauugccacgaucugcuuccucaugcaaauugcuauccuggucaccacaguuacccuucacuuuaaacaguacgaguguaacccuccgcccaauaaccaggugaugcugugcgaaccuacaaucauugagagaaauaucaccgaaauuguguaucucacaaacaccacgaucgagaaggaaauuugucccaaacuggccgaguaccggaauuggucuaagccucagugcaacaucaccggguucgcgcccuuuagcaaagacaauuccauucgccuuucugcuggaggcgauaucugggucacaagagagccuuaugugagcugugacccggauaagugcuaccaauucgcccuggggcagggaaccacacucaacaauggccauuccaacgacaccguucacgaucggacgcccuaucgcacacugcugaugaaugaacucggggugccuuuucaucugggaaccaagcaggucuguaucgccuggucuagcuccagcugccacgacggcaaagccuggcuucauguguguguuacaggcgaugacgagaacgcuaccgcuucuuucauuuacaaugggagacugguggauuccaucggaagcuggucuaagaaaauucuccggacccaggaauccgagugcgucuguaucaacggcacaugcacgguggugaugaccgacgggagcgccucuggaaaggcggauacaaaaauucuguuuaucgaggaaggcaagaucguccacaccucccuucugagcggguccgcccaacacguugaggaaugcucuuguuauccccgcuacccuggagugagaugcgugugucgggacaacuggaagggcagcaaucgccccauugucgauaucaacgugaaagacuacuccauuguuagcucuuaugugugcuccggccucgucggggacacaccgagaaagaaugauagcucuagcuccucucauugucuggacccuaacaaugaggaaggaggccacggggugaaaggaugggcuuucgaugacggcaacgauguuuggauggggcggaccaucagcgagaagcugcgcuccggauacgagacguuuaaagugauugaaggcuggagcaagcccaauucuaaacuccagaucaacagacaggucaucguggaccggggcaaucgcuccggguauagcggaauuuucucugucgagggcaaguccugcaucaacagauguuuuuacguggaacugauucgggggagaaagcaggagacagaaguucuuuggaccagcaauuccaucguggucuucugcggaaccucuggcacauaugggaccggcagcuggccugauggagccgacauuaaccugaugcccaucuga

SEQ ID NO: 206260 - RNA, 1410 nt, Artificial Sequence
  derived and/or modified CDS sequence (opt5) from neuraminidase__InfluenzaA__AAX57777
augaaccccaaucagaagaucauuaccaucggcagcgugucccugauuaucgccacaauuugcuuccucaugcaaaucgcuauccuggucacgaccguuacacuucacuuuaaacaguacgaguguaacucuccuccgaauaaccaggugaugcugugcgaacccaccauuaucgagagaaauauuacagaaaucguguaucucaccaacacaaccauugagaaggaaaucuguccuaaacuggccgaguaccggaauuggagcaagccccagugcaacauuacgggguucgcgccuuuuuccaaagacaauucuauccgccuuagcgcuggaggcgauaucugggucaccagagagcccuauguguccugugacccugauaagugcuaccaauucgcccuggggcagggaacaacccucaacaauggccauucuaacgacacaguucacgaucggaccccguaucgcacgcugcugaugaaugaacucggggugcccuuucaucugggaacaaagcaggucuguauugccuggagcuccagcucuugccacgacggcaaagccuggcuucauguguguguuaccggcgaugacgagaacgcuacagcuuccuucaucuacaaugggagacugguggauagcauuggaucuugguccaagaaaauccuccggacccaggaaagcgagugcgucuguauuaacgggaccugcacaguggugaugacggacggcucugccuccggaaaggcggauaccaaaauccuguuuaucgaggaaggcaagauuguccacacaagcucccuuucugggagcgcccaacacguugaggaaugcuccuguuauccucgcuaccccggagugagaugcgugugucgggacaacuggaagggcagcaaucgcccuaucgucgauauuaacgugaaagacuacucuaucguuuccagcuaugugugcucuggccuggucggggacacccccagaaagaaugauagcuccucuagcucccauugucucgacccgaacaaugaggaaggaggccacggggugaaaggaugggcuuucgaugacggcaacgauguuuggauggggcggacaauuagcgagaagcugcgcucuggauacgagaccuuuaaagugaucgaaggcugguccaagccuaauagcaaacugcagaucaacagacaggucauuguggaccggggcaaucgcucuggguauuccggaaucuucagcgucgagggcaaguccugcauuaacagauguuuuuacguggaacucauccgggggagaaagcaggagacggaaguucuguggacaucuaauagcauuguggucuucugcggaaccuccggcaccuaugggacaggcucuuggcccgauggagccgacaucaaccuuaugccuauuuga

SEQ ID NO: 206261 - RNA, 1410 nt, Artificial Sequence
  derived and/or modified CDS sequence (opt5) from neuraminidase__InfluenzaA__AAX57787
augaaccccaaucagaagaucauuaccaucggcagcgugucccugacaauugccacgaucugcuuccucaugcaaauugcuauccuggucaccacaguuacccuucacuuuaaacaguacgaguguaacucuccuccgaauaaccaggugaugcugugcgaacccgccaucauugagagaaauaucacagaaauuguguaucucaccaacacaaccaucgagaaggaaauuuguccuaaacuggcggaguaccggaauuggagcaagccccagugcaacaucacgggguucgcuccuuuuuccaaagacaauucuauucgccuuagcgccggaggcgauaucugggucaccagagagcccuauguguccugugacccugauaagugcuaccaauucgcccuggggcagggaacaacccucaacaauggccauucuaacgacacaguucacgaucggaccccguaucgcacgcugcugaugaaugaacucggggugcccuuucaucugggaacaagacaggucuguaucgcuuggagcuccagcucuugccacgacggcaaggccuggcuucauguguguguuaccggcgaugacgagaacgcuacagccuccuucauuuacaaugggcggcugguggauagcaucggaucuugguccaaaaagauucuccgcacccaggaaagcgagugcgucuguaucaacgggaccugcacaguggugaugacggacggcucugcguccggaaaagccaacaccaagauucuguuuaucgaggaaggcaaaaucgucaauauuagcacacuuuccgggucugcucaacacguugaggaaugcagcuguuauccuagauaccccggagugcggugcgugugucgcgauaacuggaagggcuccaauagaccuaucgucgacauuaacgugaaggauuacagcaucguuucuuccuaugugugcagcggccuggucggggacacaccccggaaaaaugacucuuucagcuccucucacugucucgauccgaacaaugaggaaggaggccauggggugaagggaugggccuuugacgauggcaacgacguuuggauggggcgcaccauuagcgagaaauucagauccggauacgagaccuuuaaggugaucgaaggcuggagcaaaccuaauucuaagcugcagaucaaccggcaggucauuguggagcgcggcaauagauccggguauagcggaaucuucucugucgaaggcaaauccugcauuaaccgguguuuuuacguggagcugaucagagggcgcaaggaagagacggagguuugguggacaagcaauuccauuguggucuucugcggaaccucuggcaccuaugggacaggcagcuggcccgauggagcugacaucaaccucaugccuauuuga

SEQ ID NO: 206262 - RNA, 1410 nt, Artificial Sequence; identical to SEQ ID NO: 206133
  derived and/or modified CDS sequence (opt5) from neuraminidase__InfluenzaA__AAX57797

SEQ ID NO: 206263 - RNA, 1410 nt, Artificial Sequence; identical to SEQ ID NO: 206133
  derived and/or modified CDS sequence (opt5) from neuraminidase__InfluenzaA__AAX57807

SEQ ID NO: 206264 - RNA, 1410 nt, Artificial Sequence
  derived and/or modified CDS sequence (opt5) from neuraminidase__InfluenzaA__AAX57817
augaaccccaaucagaagaucauuaccaucggcagcgugucccugacaauugccacgaucugcuuccucaugcaaauugcuauccuggucaccacaguuacccuucacuuuaaacaguacgaguguaacucuccuccgaauaaccaggugaugcugugcgaacccacaaucauugagagaaauaucaccgaaauuguguaucucacaaacaccacgaucgagaaggaaauuuguccuaaacuggccgaguaccggaauuggagcaagccccagugcaacaucaccggguucgcgccuuuuuccaaagacaauucuauucgccuuagcgcuggaggcgauaucugggucacaagagagcccuauguguccugugacccugauaagugcuaccaauucgcccuggggcagggaaccacacucaacaauggccauucuaacgacaccguucacgaucggacgccguaucgcacacugcugaugaaugaacucggggugcccuuucaucugggaaccaagcaggucuguaucgccuggagcuccagcucuugccacgacggcaaagccuggcuucauguguguguuacaggcgaugacgagaacgcuaccgcuuccuucauuuacaaugggagacugguggauagcaucucuuccuggagcaagaaaauucuccggacccaggaaucugagugcgucuguaucaacggaacaugcacgguggugaugaccgacggcuccgccagcgggaaggcggauacaaaaauucuguuuaucgaggaaggaaagaucguccacaccuccucucuuagcggcuccgcccaacacguugaggaaugcagcuguuauccucgcuaccccggggugagaugcgugugucgggacaacuggaagggaucuaaucgcccuauugucgauaucaacgugaaagacuacuccauuguuagcucuuaugugugcagcggccuggucggcgacacacccagaaagaaugauuccucuagcuccagccauugucucgacccgaacaaugaggaagggggacacggcgugaaagggugggcuuucgaugacggaaacgauguuuggaugggccggaccaucucugagaagcugcgcuccggguacgagacguuuaaagugauugaaggauggagcaagccuaauucuaaacugcagaucaacagacaggucaucguggaccggggcaaucgcuccggcuauagcgggauuuucuccgucgagggaaagucuugcaucaacagauguuuuuacguggaacucauucggggcagaaagcaggagacagaaguucuguggaccagcaauuccaucguggucuucugcgggaccucuggaacauauggcaccgggagcuggcccgauggcgccgacauuaaccuuaugccuaucuga

SEQ ID NO: 206265 - RNA, 1410 nt, Artificial Sequence; identical to SEQ ID NO: 206133
  derived and/or modified CDS sequence (opt5) from neuraminidase__InfluenzaA__AAX57837

SEQ ID NO: 206266 - RNA, 1410 nt, Artificial Sequence
  derived and/or modified CDS sequence (opt5) from neuraminidase__InfluenzaA__AAX57847
augaaccccaaucagaagaucauuaccaucggcagcgugucccugacaauugccacgaucugcuuccucaugcaaauugcuauccuggucaccacaguuacccuucacuuuaaacaguacgaguguaacucuccuccgaauaaccaggugaugcugugcgaacccacaaucauugagagaaauaucaccgaaauuguguaucucacaaacaccacgaucgagaaggaaauuuguccuaaacuggccgaguaccggaauuggagcaagccccagugcaacaucaccggguucgcgccuuuuuccaaagacaauucuauucgccuuagcgcuggaggcgauaucugggucacaagagagcccuauguguccugugacccugauaagugcuaccaauucgcccuggggcagggaaccacacucaacaauggccauucuaacgacaccguucacgaucggacgccguaucgcacacugcugaugaaugaacucggggugcccuuucaucugggaaccaagcaggucuguaucgccuggagcuccagcucuugccacgacggcaaagccuggcuucauguguguguuacaggcgaugacgagaacgcuaccgcuuccuucauuuacaaugggagacugguggauagcaucggaucuugguccaagaaaauucuccggacccaggaaagcgagugcgucuguaucaacggcacaugcacgguggugaugaccgacgggucugccuccggaaaggcggauacaaaaauucuguuuaucgaggaaggcaagaucguccacaccagccuucuguccgggucugcccaacacguugaggaaugcagcuguuauccucgcuaccccggagugagaugcgugugucgggacaacuggaagggcuccaaucgcccuauugucgauaucaacgugaaagacuacagcauuguuucuuccuaugugugcagcggccucgucggggacacacccagaaagaaugauucuagcuccucuagccauugucuggacccgaacaaugaggaaggaggccacggggugaaaggaugggcuuucgaugacggcaacgauguuuggauggggcggaccaucuccgagaagcugcgcagcggauacgagacguuuaaagugauugaaggcuggucuaagccuaauuccaaacuccagaucaacagacaggucaucguggaccggggcaaucgcagcggguauucuggaauuuucuccgucgagagcaaguccugcaucaacagauguuuuuacguggaacugauucggggcagaaagcaggagacagaaguucuuuggaccucuaauagcaucguggucuucugcgggaccuccggaacauauggcaccgggucuuggcccgauggcgccgacauuaaccugaugccuaucuga

SEQ ID NO: 206267 - RNA, 1410 nt, Artificial Sequence
  derived and/or modified CDS sequence (opt5) from neuraminidase__InfluenzaA__AAX57857
augaaccccaaucagaagaucauuaccaucggcagcgugucccugacaauugccacgaucugcuuccucaugcaaauugcuauccuggucaccacaguuacccuucacuuuaaacaguacgaguguaacucuccuccgaauaaccaggugaugcugugcgaacccacaaccaucgagagaaauauuacagaaaucguguaucucaccaacacgaccauugagaaggaaaucuguccuaaacuggccgaguaccggaauuggagcaagccccagugcaacauuacaggguucgcgccuuuuuccaaagacaauucuauccgccuuagcgcuggaggcgauauuugggucaccagagagcccuauguguccugugacccugauaagugcuaccaauucgcccuggggcagggaacaacccucaacaauggccauucuaacgacacgguucacgaucggacaccguaucgcacccugcugaugaaugaacucggggugcccuuucaucugggaacaaagcaggucuguaucgccuggagcuccagcucuugccacgacggcaaagccuggcuucauguguguguuaccggcgaugacgagaacgcuaccgcuuccuucaucuacaaugggagacugguggauagcauuggaucuugguccaagaaaauccuccggacacaggaaagcgagugcgucuguauuaacggcacgugcaccguggugaugacagacgggucugccuccggaaaggcggauaccaaaauccuguuuauugaggaaggcaagaucguccacacaagcucccuuucugggagcgcccaacacguugaggaaugcuccuguuauccucgcuaccccggagugagaugcgugugucgggacaacuggaagggcagcaaucgcccuaucgucgauauuaacgugaaagacuacucuaucguuuccagcuaugugugcucuggccuggucggggacacccccagaaagaaugauagcuccucuagcucccauugucucgacccgaacaaugaggaaggaggccacggggugaaaggaugggcuuucgaugacggcaacgauguuuggauggggcggacgauuagcgagaagcugcgcucuggauacgagacauuuaaagugaucgaaggcugguccaagccuaauagcaaacugcagauuaacagacaggucaucguggaccggggcaaucgcucuggguauuccggaaucuucagcgucgagggcaaguccugcauuaacagauguuuuuacguggaacucauccgggggagaaagcaggagaccgaaguucuguggaccucuaauagcauuguggucuucugcggaacauccggcaccuaugggacaggcucuuggcccgauggagccgacaucaaccuuaugccuauuuga

SEQ ID NO: 206268 - RNA, 1410 nt, Artificial Sequence; identical to SEQ ID NO: 206133
  derived and/or modified CDS sequence (opt5) from neuraminidase__InfluenzaA__AAX57867

SEQ ID NO: 206269 - RNA, 1410 nt, Artificial Sequence
  derived and/or modified CDS sequence (opt5) from neuraminidase__InfluenzaA__AAX57877
augaaccccaaucagaagaucauuaccaucggcagcgugucccugacaauugccacgaucugcuuccucaugcaaauugcuauccuggucaccacaguuacccuucacuuuaaacaguacgaguguaacucuccuccgaauaaccaggugaugcugugcgaacccacaaucauugagagaaauaucaccgaaauuguguaucucacaaacaccacgaucgagaaggaaauuuguccuaaacuggccgaguaccggaauuggagcaagccccagugcaacaucaccggguucgcgccuuuuuccaaagacaauucuauucgccuuagcgcuggaggcgauaucugggucacaagagagcccuauguguccugugacccugauaagugcuaccaauucgcccuggggcagggaaccacacucaacaauggccauucuaacgacaccguucacgaucggacgccguaucgcacacugcugaugaaugaacucggggugcccuuucaucugggaaccaagcaggucuguaucgccuggagcuccagcucuugccacgacggcaaagccuggcuucauguguguguuacaggcgaugacgagaacgcuaccgcuuccuucauuuacaaugggagacugguggauagcaucggaucuugguccaagaaaauucuccggacccaggaaagcgagugcgucuguaucaacggcacaugcacgguggugaugaccgacgggucugccuccggaaaggcggauacaaaaauucuguuuaucgaggaaggcaagaucguccacaccagcucccuuucugggagcgcccaacacguugaggaaugcuccuguuauccucgcuaccccggagugagaugcgugugucgggacaacuggaagggcagcaaucgcccuauugucgauaucaacgugaaagacuacucuauuguuuccagcuaugugugcucuggccuggucggggacacacccagaaagaaugauagcuccucuagcucccauugucucgacccgaacaaugaggaaggaggccacggggugaaaggaugggcuuucgaugacggcaacgauguuuggauggggcggaccaucagcgagaagcugcgcucuggauacgagacguuuaaagugauugaaggcugguccaagccuaauagcaaacugcagaucaacagacaggucaucguggaccggggcaaucgcucuggguauuccggaauuuucagcgucgagggcaaguccugcaucaacagauguuuuuacguggaacucauucgggggagaaagcaggagacagaaguucuguggaccucuaauagcaucguggucuucugcggaaccuccggcacauaugggaccggcucuuggcccgauggagccgacauuaaccuuaugcauaucuga

SEQ ID NO: 206270 - RNA, 1410 nt, Artificial Sequence; identical to SEQ ID NO: 206133
  derived and/or modified CDS sequence (opt5) from neuraminidase__InfluenzaA__AAX57887

SEQ ID NO: 206271 - RNA, 1410 nt, Artificial Sequence
  derived and/or modified CDS sequence (opt5) from neuraminidase__InfluenzaA__AAX57897
augaaccccaaucagaagaucauuaccaucggcagcgugucccugacaauugccacgaucugcuuccucaugcaaauugcuauccuggucaccacaguuacccuucacuuuaaacaguacgaguguaacucuccuccgaauaaccaggugaugcugugcgaacccacaaucauugagagaaauaucaccgaaauuguguaucucacaaacaccacgaucgagaaggaaauuuguccuaaacuggccgaguaccggaauuggagcaagccccagugcaacaucaccggguucgcgccuuuuuccaaagacaauucuauucgccuuagcgcuggaggcgauaucugggucacaagagagcccuauguguccugugacccugauaagugcuaccaauucgcccuggggcagggaaccacacucaacaauggccauucuaacgacaccguucacgaucggacgccguaucgcacacugcugaugaaugaacucggggugcccuuucaucugggaaccaagcaggucuguaucgccuggagcuccagcucuugccacgacggcaaagccuggcuucauguguguguuacaggcgaugacgagaacgcuaccgcuuccuucauuuacaaugggagacugguggauagcaucggaucuugguccaagaaaauucuccggacccaggaaagcgagugcgucuguaucaacggcacaugcacgguggugaugaccgacgggucugccuccggaaaggcggauacaaaaauucuguuuaucgaggaaggcaagaucguccacaccagcucccuuucugggagcgcccaacacguugaggaaugcuccuguuauccucgcuaccccggagugagaugcgugugucgggacaacuggaagggcagcaaucgcccuauugucgauaucaacgugaaagacuacucuauuguuuccagcuaugugugcucuggccuggucggggacacacccagaaagaaugauagcuccucuagcucccauugucucgacccgaacaaugaggaaggaggccacggggugaaaggaugggcuuucgauagcggcaacgacguuuggauggggcggaccaucucugagaagcugcgcuccggauacgagacguuuaaagugauugaaggcuggagcaagccuaauucuaaacugcagaucaacagacaggucaucguggaucggggcaaucgcuccggguauagcggaauuuucuccgucgagggcaagucuugcaucaacagauguuuuuacguggaacucauucgggggagaaagcaggagacagaaguucuguggaccagcaauuccaucguggucuucugcggaaccucuggcacauaugggaccggcagcuggcccgacggagccgauauuaaccuuaugccuaucuga

SEQ ID NO: 206272 - RNA, 1410 nt, Artificial Sequence
  derived and/or modified CDS sequence (opt5) from neuraminidase__InfluenzaA__AAX57907
augaaccccaaucagaagaucauuaccaucggcagcgugucccugacaauugccacgaucugcuuccucaugcaaauugcuauccuggucaccacaguuacccuucacuuuaaacaguacgaguguaacucuccuccgaauaaccaggugaugcugugcgaacccacaaucauugagagaaauaucaccgaaauuguguaucucacaaacaccacgaucgagaaggaaauuuguccuaaacuggccgaguaccggaauuggagcaagccccagugcaacaucaccggguucgcgccuuuuuccaaagacaauucuauucgccuuagcgcuggaggcgauaucugggucacaagagagcccuauguguccugugacccugauaagugcuaccaauucgcccuggggcagggaaccacacucaacaauggccauucuaacgacaccguucacgaucggacgccguaucgcacacugcugaugaaugaacucggggugcccuuucaucugggaaccaagcaggucuguaucgccuggagcuccagcucuugccacgacggcaaagccuggcuucauguguguguuacaggcgaugacgagaacgcuaccgcuuccuucauuuacaaugggagacugguggauagcaucggaucuugguccaagaaaauucuccggacccaggaaagcgagugcgucuguaucaacggcacaugcacgguggugaugaccgacgggucugccuccggaaaggcggauacaaaaauucuguuuaucgaggaaggcaagaucguccacaccagcucccuuucugggagcgcccaacacguugaggaaugcuccuguuauccucgcuaccccggagugagaugcgugugucgggacaacuggaagggcagcaaucgcccuauugucgauaucaacgugaaagacuacucuauuguuuccagcuaugugugcucuggccuggucggggacacacccagaaagaaugauagcuccucuagcucccauugucucgacccgaacaaugaggaaggaggccacggggugaaaggaugggcuuucgaugacggcaacgauguuuggauggggcggaccaucagcgagaagcugcgcucuggauacgagacguuuaaagugauugaaggcugguccaagccuaauagcaaacugcagaugaacagacaggucaucguggaccggggcaaucgcucuggguauuccggaaucuucagcgucgagggcaaguccugcauuaacagauguuuuuacguggaacucauccgggggagaaagcaggagacagaaguucuguggaccucuaauagcauuguggucuucugcggaaccuccggcacauaugggaccggcucuuggcccgauggagccgacaucaaccuuaugccuauuuga

SEQ ID NO: 206273 - RNA, 1410 nt, Artificial Sequence; identical to SEQ ID NO: 206133
  derived and/or modified CDS sequence (opt5) from neuraminidase__InfluenzaA__AAX57917

SEQ ID NO: 206274 - RNA, 1410 nt, Artificial Sequence; identical to SEQ ID NO: 206133
  derived and/or modified CDS sequence (opt5) from neuraminidase__InfluenzaA__AAX57927

SEQ ID NO: 206275 - RNA, 1410 nt, Artificial Sequence
  derived and/or modified CDS sequence (opt5) from neuraminidase__InfluenzaA__AAX57937
augaaccccaaucagaagaucauuaccaucggcagcgugucccugacaauugccacgaucugcuuccucaugcaaauugcuauccuggucaccacaguuacccuucacuuuaaacaguacgaguguaacucuccuccgaauaaccaggugaugcugugcgaacccacaaucauugagagaaauaucaccgaaaugguguaucucacaaacaccacgauugagaaggaaaucuguccuaaacuggccgaguaccggaauuggagcaagccccagugcaacauuaccggguucgcgccuuuuuccaaagacaauucuauccgccuuagcgcuggaggcgauauuugggucacaagagagcccuauguguccugugacccugauaagugcuaccaauucgcccuggggcagggaaccacacucaacaauggccauucuaacgacaccguucacgaucggacgccguaucgcacacugcugaugaaugaacucggggugcccuuucaucugggaaccaagcaggucuguaucgccuggagcuccagcucuugccacgacggcaaagccuggcuucauguguguguuacaggcgaugacgagaacgcuaccgcuuccuucaucuacaaugggagacugguggauagcauuggaucuugguccaagaaaauccuccggacccaggaaagcgagugcgucuguauuaacggcacaugcacgguggugaugaccgacgggucugccuccggaaaggcggauacaaaaauccuguuuauugaggaaggcaagaucguccacaccagccuucuguccgggucugcccaacacguugaggaaugcagcuguuauccucgcuaccccggagugagaugcgugugucgggacaacuggaagggcuccaaucgcccuaucgucgauauuaacgugaaagacuacagcaucguuucuuccuaugugugcagcggccucgucggggacacacccagaaagaaugauucuagcuccucuagccauugucuggacccgaacaaugaggaaggaggccacggggugaaaggaugggcuuucgaugacggcaacgauguuuggauggggcggaccauuuccgagaagcugcgcagcggauacgagacguuuaaagugaucgaaggcuggucuaagccuaauuccaaacuccagauuaacagacaggucaucguggaccggggcaaucgcagcggguauucuggaaucuucuccgucgagggcaagagcugcauuaacagauguuuuuacguggaacugauccgggggagaaagcaggagacagaaguucuuuggaccuccaauucuauuguggucuucugcggaaccagcggcacauaugggaccggcuccuggcccgauggagccgacaucaaccugaugcgcauuuga

SEQ ID NO: 206276 - RNA, 1410 nt, Artificial Sequence
  derived and/or modified CDS sequence (opt5) from neuraminidase__InfluenzaA__AAX57947
augaaccccaaucagaagaucauuaccaucggcagcguuucccugacaauugccacgaucugcuuccucaugcaaauugcuauccuggucaccacaguuacccuucacuuuaaacaguacgaguguaacucuccuccgaauaaccaggugaugcugugcgaacccacaaucauugagagaaauaucaccgaaauuguguaucucacaaacaccacgaucgagaaggaaauuuguccuaaacuggccgaguaccggaauuggagcaagccccagugcaacaucaccggguucgcgccuuuuuccaaagacaauucuauucgccuuagcgcuggaggcgauaucugggucacaagagagcccuauguguccugugacccugauaagugcuaccaauucgcccuggggcagggaaccacacucaacaauggccauucuaacgacaccguucacgaucggacgccguaucgcacacugcugaugaaugaacucggggugcccuuucaucugggaaccagacaggucuguaucgccuggagcuccagcucuugccacgacggcaaggcuuggcuucauguguguguuacaggcgaugacgagaacgccaccgcuuccuucauuuacaaugggcggcugguggauagcaucggaucuuggucccgcaaaauucucagaacccaggaaagcgagugcgucuguaucaacggcacaugcacgguggugaugaccgacgggucugccuccggaaaggcggauacaaaaauucuguuuaucgaggaaggcaagaucguccacauuagcacccuuuccgggucugcccaacacguugaggaaugcagcuguuauccucgguaccccggagugcgcugcguguguagagacaacuggaaaggcuccaaucggccuaucgucgauauuaacgugaaggacuacagcaucgcuucuuccuauaugugcagcggccugguuggggacacaccccgcaagaaugauucuuucagcuccucucauugucucgacccgaacaaugaggaaggaggccacggggugaaaggaugggccuuugaugacggcaacgaugucuggauggggagaaccauuagcgagaagcugcgguccggauacgagacguucaaagugaucgaaggcuggagcaagccuaauucuaaacugcagaucaaccgccagguuauuguggagagaggcaaucgguccggguauagcggaaucuuuucugucgaaggcaaguccugcauuaacagauguuucuacguggagcucauccgcgggcggaaagaagagacagaggucugguggaccagcaauuccauugugguguuuugcggaaccucuggcacauaugggaccggcagcuggcccgacggagcugauaucaaccugaugccuauuuga

SEQ ID NO: 206277 - RNA, 1410 nt, Artificial Sequence; identical to SEQ ID NO: 206217
  derived and/or modified CDS sequence (opt5) from neuraminidase__InfluenzaA__AAX76626

SEQ ID NO: 206278 - RNA, 1410 nt, Artificial Sequence
  derived and/or modified CDS sequence (opt5) from neuraminidase__InfluenzaA__AAX76646
augaaccccaaucagaagaucauuaccaucggcagcgugucccugacaauugccacgaucugcuuccucaugcaaauugcuauccuggucaccacaguuacccuucacuuuaaacagcaugaguguaacucuccuccgaauaaccaggugaugcugugcgaacccacaaucauugagagaaauaucaccgaaauuguguaccucacaaacaccacgaucgagaaggaaauuuguccuaaacuggccgaguaucggaauuggagcaagccccagugcaacaucaccggguucgcgccuuuuuccaaagacaauucuauucgccuuagcgcuggaggcgauaucugggucacaagagagcccuacguguccugugacccugauaagugcuaucaauucgcccuggggcagggaaccacacucaacaauggccacucuaacaauaccguucaugaccggacgccguaccgcacacugcugaugaacgaacucggggugcccuuucaccugggaaccagacaggucuguaucgccuggagcuccagcggcugccaugauggcaaggcuuggcuucacguguguguuacaggggacgauaaaaaugccaccgcuucuuucauuuauaacggacggcugguggacuccaucggcagcuggucuaagaaaauucuccgcacccaggaguccgaaugcgucuguaucaacgggacaugcacgguggugaugaccgauggaagcgccucuggcaaggcggacacaaaaauucuguuuaucgaggaggggaagaucguccacauuuccacccuuagcggauccgcccaacauguugaagagugcucuuguuacccuagauaucccggcgugcggugcgugugucgcgauaauuggaagggcagcaacagaccuaucgucgacauuaaugugaaagauuacuccaucguuagcucuuacgugugcuccgggcuggucggagacacaccccggaagaacgacagcuucucuagcucccacugucucgauccgaauaacgaagagggcgggcauggagugaaaggcugggcuuuugacgaugggaaugacguuuggaugggacgcaccauuucugaaaagcugagaagcggcuaugagacguucaaagugaucgagggcugguccaagccuaacagcaaacugcagaucaaucggcaggucauuguggaacgcgggaacagaucuggauacuccggcaucuuuagcgucgaggggaagucuugcauuaaucgguguuucuauguggaacucaucagaggacgcaaggaggaaacagagguuugguggaccuccaacagcauuguggucuuuugcggcaccuccgggacauacggcaccggaucuuggcccgauggcgccgacaucaaucugaugccuauuuga

SEQ ID NO: 206279 - RNA, 1410 nt, Artificial Sequence; identical to SEQ ID NO: 206207
  derived and/or modified CDS sequence (opt5) from neuraminidase__InfluenzaA__AAX76656

SEQ ID NO: 206280 - RNA, 1410 nt, Artificial Sequence; identical to SEQ ID NO: 206252
  derived and/or modified CDS sequence (opt5) from neuraminidase__InfluenzaA__AAX76666

SEQ ID NO: 206281 - RNA, 1410 nt, Artificial Sequence; identical to SEQ ID NO: 206133
  derived and/or modified CDS sequence (opt5) from neuraminidase__InfluenzaA__AAX76696

SEQ ID NO: 206282 - RNA, 1410 nt, Artificial Sequence
  derived and/or modified CDS sequence (opt5) from neuraminidase__InfluenzaA__AAX76736
augaaccccaaucagaagaucauuaccaucggcagcgugucccugacaauugccacgaucugcuuccucaugcaaauugcuauccuggucaccacaguuacccuucacuuuaaacaguacgaguguaacucuccuccgaauaaccaggugaugcugugcgaacccacaaucauugagagaaauaucaccgaaauuguguaucucacaaacaccacgaucgagaaggaaauuuguccuaaacugagcgaguaccggaauugguccaagccccagugcaacaucaccggguucgccccuuuuucuaaagacaauagcauucgccuuuccgcgggaggcgauaucugggucacaagagagcccuaugugucuugugacccugauaagugcuaccaauucgcucuggggcagggaaccacacucaacaauggccauagcaacgacaccguucacgaucggacgccguaucgcacacugcugaugaaugaacucggggugcccuuucaucugggaaccaagcaggucuguaucgccugguccucuagcuccugccacgacggcaaagccuggcuucauguguguguuacaggcgaugacgagaacgcuaccgccagcuucauuuacaaugggagacugguggauucuaucggauccuggagcaagaaaauucuccggacccaggaaucugagugcgucuguaucaacggcacaugcacgguggugaugaccgacggguccgcuagcggaaaggccgauacaaaaauucuguuuaucgaggaaggcaagaucguccacauuuccacccuuucucgcagcgcgcaacacguugaggaaugcuccuguuauccuagauaccccggggugcggugcgugugucgcgacaacuggaagggaagcaauagaccuaucgucgauauuaacgugaaagaccauucuaucguuuccagcuacgugugcucuggccuggucggcgacacaccccggaagaaugauagcuucuccucuagccacugucucgacccgaacaaugaggaagggggacauggcgugaaagggugggccuuugaugacggaaacgauguuuggaugggccgcaccauuuccgagaagcugagaagcggguaugagacguucaaagugaucgaaggauggucuaagccuaauuccaaacugcagaucaaccggcaggucauuguggagcgcggcaauagaagcggcuacucugggaucuuuuccgucgaaggaaagagcugcauuaaccgguguuucuauguggagcucaucagaggccgcaaggaagagacagagguuugguggaccuccaauucuauuguggucuuuugcgggaccagcggaacauacggcaccggguccuggcccgacggcgcugauaucaaccugaugccuauuuga

SEQ ID NO: 206283 - RNA, 1410 nt, Artificial Sequence
  derived and/or modified CDS sequence (opt5) from neuraminidase__InfluenzaA__AAX76766
augaaccccaaucagaagaucauuaccaucggcagcgugucccugacaauugccacgaucugcuuccucaugcaaauugcuauccuggucaccacaguuacccuucacuuuaaacagcaugaguguaacucuccuccgaauaaccaggugaugcugugcgaacccacaaucauugagagaaauaucaccgaaauuguguaccucacaaacaccacgaucgagaaggaaauuuguccuaaacuggccgaguaucggaauuggagcaagccccagugcaacaucaccggguucgcgccuuuuuccaaagacaauucuauucgccuuagcgucggaggcgauaucugggugacaagagagcccuacguuuccugugacccugauaagugcuaucaauucgcucuggggcagggaaccacacucaacaauggccacucuaacgacaccgugcaugaucggacgccguaccgcacacugcugaugaaugaacucgggguccccuuucaccugggaaccagacagguguguaucgccuggagcuccagcucuugccaugacggcaaggccuggcuucacguuugugugacaggcgaugacaaaaacgcuaccgccuccuucauuuauaaugggcggcuggucgauagcaucggaucuugguccaagaaaauucuccgcacccaggagagcgaaugcguguguaucaacggcacaugcacgguggucaugaccgacgggucugcuuccggaaaggccgauacaaaaauucuguuuaucgaggagggcaagaucguucacauuagcacccuuuccgggucugcgcaacauguggaagagugcagcuguuacccuagauaucccggagugcggugcgucugucgcgacaacuggaagggcuccaauagaccuaucguggauauuaacguuaaagacuacagcaucgugucuuccuacgucugcagcggccuggugggggacacaccccggaagaaugauucuuucagcuccucucacugucucgacccgaacaaugaagagggaggccaugggguuaaaggaugggccuuugaugacggcaacgauguguggauggggcgcaccauuagcgaaaagcugagauccggauaugagacguucaaagucaucgagggcuggagcaagccuaauucuaaacugcagaucaaccgccaggugauugucgaacggggcaauagauccggguacagcggaaucuuuucuguggagggcaaguccugcauuaaccgguguuucuauguugaacucaucagagggcgcaaggaggaaacagaggugugguggaccagcaauuccauugucguguuuugcggaaccucuggcacauacgggaccggcagcuggcccgacggagcugauaucaaccugaugccuauuuga

SEQ ID NO: 206284 - RNA, 1410 nt, Artificial Sequence; identical to SEQ ID NO: 206209
  derived and/or modified CDS sequence (opt5) from neuraminidase__InfluenzaA__AAY18089

SEQ ID NO: 206285 - RNA, 1410 nt, Artificial Sequence
  derived and/or modified CDS sequence (opt5) from neuraminidase__InfluenzaA__AAY18099
augaaccccaaucagaagaucauuaccaucggcagcgugucccugacaauugccacgaucugcuuccucaugcaaauugcuauccuggucaccacaguuacccuucacuuuaaacagcaugaguguaacucuccuccgaauaaccaggugaugcugugcgaacccacaaucauugagagaaauaucaccgaaauuguguaccucacaaacaccacgaucgagaaggaaauuuguccuaaacuggccgaguaucggaauuggagcaagccccagugcaacaucaccggguucgcgccuuuuuccaaagacaauucuauucgccuuagcgcuggaggcgauaucugggucacaagagagcccuacguguccugugacccugauaagugcuaucaauucgcccuggggcagggaaccacacucaacaauggccacucuaacaauaccguucaugaccggacgccguaccgcacacugcugaugaacgaacucggggugcccuuucaccugggaaccagacaggucuguaucgccuggagcuccagcucuugccaugauggcaaggcuuggcuucacguguguguuacaggcgacgauaaaaaugccaccgcuuccuucauuuauaacgggcggcugguggacagcaucggaucuugguccaagaaaauucuccgcacccaggagagcgaaugcgucuguaucaacggcacaugcacgguggugaugaccgaugggucugccuccggaaaggcggacacaaaaauucuguuugucgaggagggcaagaucguucacaucagcacccuuuccgggucugcccaacauguggaagagugcagcuguuacccuagauaucccggagugcggugcgucugucgcgauaauuggaagggcuccaacagaccuauuguggacaucaauguuaaagauuacagcauugugucuuccuacgucugcagcggccuggugggggacacaccccggaagaacgacucuuucagcuccucucacugucucgauccgaauaacgaagagggaggccaugggguuaaaggaugggcuuuugacgauggcaaugacguguggauggggcgcaccaucagcgaaaagcugagauccggauaugagacguucaaagucauugagggcuggagcaagccuaacucuaaacugcagaucaaucgccaggugaucgucgaacggggcaacagauccggguacagcggaaucuuuucuguggagggcaaguccugcauuaaucgguguuucuauguugaacucauuagagggcgcaaggaggaaacagaggugugguggaccagcaacuccaucgucguguuuugcggaaccucuggcacauacgggaccggcagcuggcccgauggagccgacauuaaucugaugccuaucuga

SEQ ID NO: 206286 - RNA, 1410 nt, Artificial Sequence
  derived and/or modified CDS sequence (opt5) from neuraminidase__InfluenzaA__AAY18109
augaaccccaaucagaagaucauuaccaucggcagcgugucccugacaauugccacgaucugcuuccucaugcaaauugcuauccuggucaccacacuuacccugcacuuuaaacaguacgaguguaacucuccuccgaauaaccagguuaugcucugcgaacccgccaucauugagagaaauaucacagaaauuguguaucugaccaacacaaccaucgagaaggaaaaauguccuaaacuugcggaguaccggaauuggagcaagccccagugcaacauuacgggguucgcuccuuuuuccaaggacaauucuauccgccugagcgccggaggcgauauuugggugaccagagagcccuaugucuccugugacccugauaagugcuaccaauucgcccucgggcagggaacaacccugaacaauggccauucuaacgacacagugcacgaucggaccccguaucgcacgcugcucaugaaugaacuggggguucccuuucaucuuggaacaagacagguguguaucgcuuggagcuccagcucuugccacgacggcaaagccuggcugcaugucugugugaccggcgaugacgagaacgcuacagccuccuucaucuacaaugggcggcucguugauagcauuggaucuugguccaagaaaauccugcgcacccaggaaagcgagugcguguguauuaacgggaccugcacagucgugaugacggacggcucugcguccggaaaggccgauaccaaaauccuuuuuauugaggaaggcaagaucgugaacaucagcacacuguccgggucugcucaacacgucgaggaaugcagcuguuauccuagauaccccggaguucggugcgugugucgcgacaauuggaagggcuccaacagaccuauuguggauaucaaugucaaagacuacagcauugugucuuccuauguuugcagcggccucgugggggacacaccccggaagaacgauucuuucagcuccucucacugucuggacccgaauaacgaggaaggaggccauggggucaaaggaugggccuuugaugacggcaaugauguguggauggggcgcaccaucagcgagaagcugagauccggauacgagaccuucaaaguuauugaaggcuggagcaagccuaacucuaaacuccagaucaaucgccaggugaucgucgagcggggcaacagauccggguauagcggaaucuuuucuguggaaggcaaguccugcauuaaucgguguuucuacgucgagcugauuagagggcgcaaggaagagacggaggugugguggacaagcaacuccaucguuguguuuugcggaaccucuggcaccuaugggacaggcagcuggcccgacggagcugauauuaaucuuaugccuaucuga

SEQ ID NO: 206287 - RNA, 1410 nt, Artificial Sequence; identical to SEQ ID NO: 206245
  derived and/or modified CDS sequence (opt5) from neuraminidase__InfluenzaA__AAY18119

SEQ ID NO: 206288 - RNA, 1410 nt, Artificial Sequence
  derived and/or modified CDS sequence (opt5) from neuraminidase__InfluenzaA__AAY18129
augaaccccaaucagaagaucauuaccaucggcagcgugucccugacaauugccacgaucugcuuccucaugcaaauuaccauccuggucacaaccguuacacuucacuuuaaacaguacgaguguaacucuccuccgaauaaccaggugaugcugugcgaacccaccaucauugagagaaauaucacagaaauuguguaucucaccaacacgaccaucgagaaggaaauuuguccuaaacuggcugaguaccggaauuggagcaagccccagugcaacaucacaggguucgccccuuuuuccaaagacaauucuauucgccuuagcgcgggaggcgauaucugggucaccagagagcccuauguguccugugacccugauaagugcuaccaauucgcucuggggcagggaacaacccucaacaauggccauucuaacgacacgguucacgaucggacaccguaucgcacccugcugaugaaugaacucggggugcccuuucaucugggaacaagacaggucuguaucgccuggagcuccagcucuugccacgacggcaaggccuggcuucauguguguguuaccggcgaugacaaaaacgcuaccgccuccuucauuuacaaugggcggcugguggauagcaucggaucuugguccaagaaaauucuccgcacacaggagagcgaaugcgucuguaucaacggcacgugcaccguggugaugacagacgggucugcuuccggaaaggccgauaccaaaauucuguuuaucgaggagggcaagaucauucacaucagcacacuuuccgggucugcgcaacacgucgaagagugcagcuguuauccuagauaccccggaguucggugcgugugucgcgacaacuggaagggcuccaauagaccuauuguggauaucaacgucaaagacuacagcauugugucuuccuauguuugcagcggccuggugggggacacgccccggaagaaugauucuagcuccucuagccauugucucgacccgaacaaugaagagggaggccacggggucaaaggaugggccuucgaugacggcaacgauguguggauggggcgcaccaucuccgaaaagcugagaagcggauacgagacauuuaaaguuaucgagggcuggucuaaguccaauagcaaacugcagauuaaccgccaggugaucgucgaacggggcaauagaucuggguauuccggaauuuucagcguggagggcaaguccugcaucaaccgguguuuuuacgucgaacucauuagagggcgcaaggaggaaaccgaggugugguggaccucuaauagcaucguuguguucugcggaacauccggcaccuaugggacaggcucuuggccugacggagcugauauuaaccugaugcccaucuga

SEQ ID NO: 206289 - RNA, 1410 nt, Artificial Sequence
  derived and/or modified CDS sequence (opt5) from neuraminidase__InfluenzaA__AAY18139
augaaccccaaucagaagaucauuaccaucggcagcgugucccugacaauugccacgaucugcuuccucaugcaaauugcuauccuggucaccacaguuacccuucacuuuaaacagcaugaguguaacucuccuccgaauaaccaggugaugcugugcgaacccacaaucauugagagaaauaucaccgaaauuguguaccucacaaacaccacgaucgagcgggaaauuuguccuaagcuggccgaguaucgcaauuggagcaaaccccagugcaacaucaccggguucgcgccuuuuuccaaggacaauucuauuagacuuagcgcuggaggcgauaucugggucacacgggagcccuacguguccugugacccugauaaaugcuaucaauucgcccuggggcagggaaccacacucaacaaucgccacucuaacgacaccguucaugauagaacgccguaccggacacugcugaugaaugaacucggcgugcccuuucaccuggggacccgccaggucuguaucgccuggagcuccagcucuugccaugacggaaaggcuuggcuucacguguguguuacaggcgaugacaagaacgccaccgcuuccuucauuuauaauggcagacugguggauagcaucgggucuugguccaaaaagauucuccggacccaggagagcgaaugcgucuguaucaacggaacaugcacgguggugaugaccgacggcucugccuccgggaaagcggauacaaagauucuguuuaucgaggagggaaaaaucguccacauuagcacccuuuccggcucugcccaacauguugaagagugcagcuguuacccucgcuaucccggggugagaugcgugugucgggacaacuggaagggauccaaucgcccuaucgucgauauuaacgugaaggacuacagcaucguuucuuccuacgugugcagcggccuggucggcgacacaccccggaaaaaugauucuagcuccucuagccacugucucgacccgaacaaugaagaagggggacauggcgugaaggggugggcuuucgaugacggaaacgauguuuggaugggcagaaccauuuccgagaaacugcgcagcggguaugagacguuuaaggugaucgagggauggucuaaaccuaauuccaagcugcagaucaacagacaggucauuguggaacggggcaauagaagcggcuacucugggaucuucuccgucgagggaaaaagcugcauuaaccgcuguuuuuauguggaacucauccggggcagaaaggaggaaacagagguuugguggaccuccaauucuauuguggucuucugcgggaccagcggaacauacggcaccggguccuggcccgacggcgccgauaucaaccugaugccuauuuga

SEQ ID NO: 206290 - RNA, 1410 nt, Artificial Sequence
  derived and/or modified CDS sequence (opt5) from neuraminidase__InfluenzaA__AAY18149
augaaccccaaucagaagaucauuaccaucggcagcgugucccugacaauugccacgaucugcuuccucaugcaaauugcuauccuggucaccacaguuacccuucacuuuaaacagcaugaguguaacucuccuccgaauaaccaggugaugcugugcgaacccacaaucauugagagaaauaucaccgaaauuguguaccucacaaacaccacgaucgagaaggaaauuuguccuaaacuggccgaguaucggaauuggagcaagccccagugcaacaucaccggguucgcgccuuuuuccaaagacaauucuauucgccuuagcgcuggaggcgauaucugggucacaagagagcccuacguguccugugacccugauaagugcuaucaauucgcccuggggcagggaaccacacucaacaauggccacucuaacgacaccguucaugaucggacgccguaccgcacacugcugaugaaugaacucggggugcccuuucaccugggaaccagacaggucuguaucgccuggagcuccagcucuugccaugacggcaaggcuuggcuucacguguguguuacaggcgaugacaaaaacgccaccgcuuccuucauuuauaaugggcggcugguggauagcaucggaucuugguccaagaaaauucuccgcacccaggagagcgaaugcgucuguaucaacggcacaugcacgguggugaugaccgacgggucugccuccggaaaggcggauacaaaaauucuguuuaucgaggagggcaagaucguccacauuagcacccuuuccgggucugcccaacauguugaagagugcagcuguuacccuagauaucccggagugcggugcgugugucgcgacaacuggaagggcuccaauagaccuacagucgauaucaacgugaaagacuacagcauuguuucuuccuacgugugcagcggccuggucggggacacgccccggaagaaugauucuagcuccucuagccacugucucgacccgaacaaugaagagggaggccauggggugaaaggaugggcuuucgaugacggcaacgauguuuggauggggcgcaccaucuccgaaaagcugagaagcggauaugagacauuuaaagugauugagggcuggucuaagccuaauuccaaacugcagaucaaccggcaggucaucguggaacgcggcaauagaagcggguacucuggaauuuucuccgucgagggcaagagcugcaucaaccgguguuuuuauguggaacucauuagagggcgcaaggaggaaaccgagguuugguggaccuccaauucuaucguggucuucugcggaacaagcggcaccuacgggacaggcuccuggcccgacggagccgauauuaaccugaugccuaucuga

SEQ ID NO: 206291 - RNA, 1410 nt, Artificial Sequence
  derived and/or modified CDS sequence (opt5) from neuraminidase__InfluenzaA__AAY18159
augaaccccaaucagaagaucauuaccaucggcagcgugucccugauuaucgccacaauuugcuuccucaugcaaaucgcuauccuggucacgaccguuacacuucacuuuaaacaguacgaguguaacucuccuccgaauaaccaggugaugcugugcgaacccaccauuaucgagagaaauauuacagaaaucguguaucucaccaacacaaccauugagaaggaaaucuguccuaaacuggccgaguaccggaauuggagcaagccccagugcaacauuacgggguucgcgccuuuuuccaaagacaauucuauccgccuuagcgcuggaggcgauaucugggucaccagagagcccuauguguccugugacccugauaagugcuaccaauucgcccuggggcagggaacaacccucaacaauggccauucuaacgacacaguucacgaucggaccccguaucgcacgcugcugaugaaugaacucggggugcccuuucaucugggaacaaagcaggucuguauugccuggagcuccagcucuugccacgacggcaaagccuggcuucauguguguguuaccggcgaugacgagaacgcuacagcuuccuucaucuacaaugggagacugguggauagcauuggaucuugguccaagaaaauccuccggacccaggaaagcgagugcgucuguauuaacgggaccugcacaguggugaugacggacggcucugccuccggaaaggcggauaccaaaauccuguuuaucgaggaaggcaagauuguccacacaagcucccuuucugggagcgcccaacacguugaggaaugcuccuguuauccucgcuaccccggagugagaugcgugugucgggacaacuggaagggcagcaaucgcccuaucgucgauauuaacgugaaagacuacucuaucguuuccagcuaugugugcucuggccuggucggggacacccccagaaagaaugauagcuccucuagcucccauugucucgacccgaacaaugaggaaggaggccacggggugaaaggaugggcuuucgaugacggcaacgauguuuggauggggcggacaauuagcgagaagcugcgcucuggauacgagaccuuuaaagugaucgaaggcugguccaagccuaauagcaaacugcagaucaacagacaggucauuguggaccggggcaaucgcucuggguauuccggaaucuucagcgucgagggcaagaacugcauuaauagauguuuuuacguggaacucauccgggggagaaagcaggagacggaaguucuguggacauccaacucuauuguggucuucugcggaaccagcggcaccuaugggacaggcuccuggcccgauggagccgacaucaaucuuaugccuauuuga

SEQ ID NO: 206292 - RNA, 1410 nt, Artificial Sequence; identical to SEQ ID NO: 206133
  derived and/or modified CDS sequence (opt5) from neuraminidase__InfluenzaA__AAY18179

SEQ ID NO: 206293 - RNA, 1410 nt, Artificial Sequence; identical to SEQ ID NO: 206133
  derived and/or modified CDS sequence (opt5) from neuraminidase__InfluenzaA__AAY18189

SEQ ID NO: 206294 - RNA, 1410 nt, Artificial Sequence
  derived and/or modified CDS sequence (opt5) from neuraminidase__InfluenzaA__AAY18199
augaaccccaaucagaagaucauuaccaucggcagcgugucccugacaauuucuacgaucugcuucuuuaugcaaauugccauccucaucaccacagucacccugcacuucaaacaguacgaguuuaacagcccuccgaauaaccagguuaugcuuugugaacccacaauuaucgagagaaauauuaccgaaaucguguaucugacaaacaccacgauugagaaggaaaucugcccuaaacucgcugaguaccggaauugguccaagccccaguguaacauuaccggguucgccccuuuuucuaaagacaauagcauccgccuguccgcgggaggcgauaucugggugacaagagagcccuaugucucuugcgacccugauaaguguuaccaauucgcucuugggcagggaaccacacugaacaaugugcauagcaacgacaccguucacgaucggacgccguaucgcacacuccugaugaaugaacugggcgugcccuuucaucucgggaccaagcaggucugcauugccugguccucuagcuccugucacgacggaaaagccuggcugcaugugugcguuacaggcgaugacgagaacgcuaccgccagcuucaucuacaauggcagacuuguggauucuauugucuccuggagcaagaaaauccugcggacccaggaaucugagugugugugcauuaacgggacauguacgguggucaugaccgacggauccgcuagcggcaaggccgauacaaaaauccucuuuaucgaggaagggaagauuguucacaccuccacacugucuggaagcgcgcaacacguggaggaaugcuccugcuauccucgcuaccccggcgugagaugugucugccgggacaacuggaaggggagcaaucgcccuaucguggauauuaacaucaaagacuacucuauuguuuccagcuauguguguucuggacuugucggcgacacccccagaaagaaugauagcuccucuagcucccauugccuggacccgaacaaugaggaaggcgggcagggagugaaaggcugggccuucgaugacgggaacgauguuuggaugggacggacgaucagcgagaagcuccacucuggcuacgagacauuuaaagugaucgaagggugguccaauccuaacagcaagcugcagauuaaucgccaggucaucguggacagaggaaaccggucuggcuauuccggcauuuucagcgucgaggggaaauccuguaucaaucgcugcuuuuacguggaacugauuagaggacggaagcaagagaccgaaguucucuggaccucuaacagcaucguggucuucuguggcacauccgggaccuauggaacaggcucuuggcccgauggggcugacauuaaucugaugccuaucuga

SEQ ID NO: 206295 - RNA, 1410 nt, Artificial Sequence; identical to SEQ ID NO: 206236
  derived and/or modified CDS sequence (opt5) from neuraminidase__InfluenzaA__AAY18588

SEQ ID NO: 206296 - RNA, 1410 nt, Artificial Sequence; identical to SEQ ID NO: 206217
  derived and/or modified CDS sequence (opt5) from neuraminidase__InfluenzaA__AAY18614

SEQ ID NO: 206297 - RNA, 1410 nt, Artificial Sequence
  derived and/or modified CDS sequence (opt5) from neuraminidase__InfluenzaA__AAY27846
augaaccccaaucagaagaucauuaccaucggcagcgugucccugacaauugccgcuaucugcuuccucaugcaaauugccauccuggucacgaccguuacacuucacuuuaaacagcaugaguguaacucuccuccgaauaaccaggugaugcugugcgaacccaccaucauugagagaaauaucacagaaauuguguaccucaccaacacaaccaucgagaaggaaauuuguccuaaacuggcggaguaucggaauuggagcaagccccagugcaacaucacgggguucgcuccuuuuuccaaagacaauucuauucgccuuagcgccggaggcgauaucugggucaccagagagcccuacguguccugugacccugauaagugcuaucaauucgcccuggggcagggaacaacccucaacaauggccacucuaacgacacaguucaugaucggaccccguaccgcacgcugcugaugaaugaacucggggugcccuuucaccugggaacaagacaggucuguaucgcuuggagcuccagcucuugccaugacggcaaggccuggcuucacguguguguuaccggcgaugacaaaaacgcuacagccuccuucauuuauaaugggcggcugguggauagcaucggaucuugguccaagaaaauucuccgcacccaggagagcgaaugcgucuguaucaacgggaccugcacaguggugaugacggacggcucugcguccggaaaggccgauaccaaaauucuguuuaucgaggagggcaagaucguccacauuagcacacuuuccgggucugcucaacauguugaagagugcagcuguuacccuagauaucccggagugcggugcgugugucgcgacaacuggaagggcuccaauagaccuaucgucgauauuaacgugaaagacuacagcaucguuucuuccuacgugugcagcggccuggucggggacacaccccggaagaaugauucuuucagcuccucucacugucucgacccgaacaaugaagagggaggccauggggugaaaggaugggccuuugaugacggcaacgauguuuggauggggcgcaccauuagcgaaaagcugagauccggauaugagaccuucaaagugaucgagggcuggagcaagccuaauucuaaacugcagaucaaccggcaggucauuguggaacgcggcaauagauccggguacagcggaaucuuuucugucgagggcaaguccugcauuaaccgguguuucuauguggaacucaucagagggcgcaaggaggaaacggagguuugguggacaagcaauuccauuguggucuuuugcggaaccucuggcaccuacgggacaggcagcuggcccgacggagcugauaucaaccugaugccuauuuga

SEQ ID NO: 206298 - RNA, 1410 nt, Artificial Sequence
  derived and/or modified CDS sequence (opt5) from neuraminidase__InfluenzaA__AAY27856
augaaccccaaucagaagaucauuaccaucggcagcgugucccugacaauugccacgaucugcuuccucaugcaaauugcuauccuggucaccacaguuacccuucacuuuaaacagcaugaguguaacucuccuccgaauaaccaggugaugcugugcgaacccacaaucauugagagaaauaucaccgaaauuguguaccucacaaacaccacgaucgagaaggaaauuuguccuaaacuggccgaguaucggaauuggagcaagccccagugcaacaucaccggguucgcgccuuuuuccaaagacaauucuauucgccuuagcgcuggaggcgauaucugggucacaagagagcccuacguguccugugacccugggaagugcuaucaauucgcccugggacagggcaccacacucaacaaugggcacucuaacgauaccguucaugaccggacgccguaccgcacacugcugaugaaugaacucggagugcccuuucaccugggcaccagacaggucuguaucgccuggagcuccagcucuugccaugauggcaaggcuuggcuucacguguguguuacaggggacgauaaaaacgccaccgcuuccuucauuuauaauggacggcugguggacagcaucggcucuugguccaagaaaauucuccgcacccaggagagcgaaugcgucuguaucaacgggacaugcacgguggugaugaccgauggaucugccuccggcaaggcggacacaaaaauucuguuuaucgaggaggggaagaucguccacauuagcacccuuuccggaucugcccaacauguugaagagugcagcuguuacccuagauaucccggcgugcggugcgugugucgcgauaacuggaagggcuccaauagaccuaucgucgacauuaacgugaaagauuacagcaucguuucuuccuacgugugcagcgggcuggucggagacacaccccggaagaaugacucuagcuccucuagccacugucucgauccgaacaaugaagagggcgggcauggagugaaaggcugggcuuucgacgaugggaacgacguuuggaugggacgcaccauuuccgaaaagcugagaagcggcuaugagacguuuaaagugaucgagggcuggucuaagccuaauuccaaacugcagaucaaccggcaggucauuguggaacgcgggaauagaagcggauacucuggcaucuucuccgucgagggaaagagcugcauuaaccgguguuuuuauguggaacucaucagagggcgcaaggaggaaacagagguuugguggaccuccaauucuauuguggucuucugcggcaccagcgggacauacggcaccggauccuggcccgauggcgccgacaucaaccugaugccuauuuga

SEQ ID NO: 206299 - RNA, 1410 nt, Artificial Sequence; identical to SEQ ID NO: 206209
  derived and/or modified CDS sequence (opt5) from neuraminidase__InfluenzaA__AAY27866

SEQ ID NO: 206300 - RNA, 1410 nt, Artificial Sequence
  derived and/or modified CDS sequence (opt5) from neuraminidase__InfluenzaA__AAY27962
augaaccccaaucagaagaucauuaccaucggcagcgugucccugacaauugccacgaucugcuuccucaugcaaauugcuauccuggucaccacaguuacccuucacuuuaaacaguacgaguguaacucuccuccgaauaaccaggugaugcugugcgaacccacaaucauugagagaaauaucaccgaaauuguguaucucacaaacaccacgaucgagaaggaaauuuguccuaaacuggccgaguaccggaauuggagcaagccccagugcaacaucaccggguucgcgccuuuuuccaaagacaauucuauucgccuuagcgcuggaggcgauaucugggucacaagagagcccuauguguccugugacccugauaagugcuaccaauucgcccuggggcagggaaccacacucaacaauggccauucuaacgacaccguucacgaucggacgccguaucgcacacugcugaugaaugaacucggggugcccuuucaucugggaaccagacaggucuguaucgccuggagcuccagcucuugccacgacggcaaggcuuggcuucauguguguguuacaggcgaugacgagaacgccaccgcuuccuucauuuacaaugggcggcugguggauagcaucggaucuugguccaaaaagauucuccgcacccaggaaagcgagugcgucuguaucaacggcacaugcacgguggugaugaccgacgggucugccuccggaaaagcggauacaaagauucuguuuaucgaggaaggcaaaaucguccacauuagcacccuuuccgggucugcccaacacguugaggaaugcagcuguuauccuagauaccccggagugcggugcgugugucgcgacaacuggaagggcuccaauagaccuaucgucgauauuaacgugaaggacuacagcaucguuucuuccuaugugugcagcggccuggucggggacacaccccggaaaaaugauucuuucagcuccucucauugucucgacccgaacaaugaggaaggaggccacggggugaagggaugggcuuuugaugacggcaacaauguuuggauggggcgcaccauuagcgagaaacugagauccggauacgagacguucaaggugaucgaaggcuggagcaaaccuaacucuaagcugcagacaaaucggcaggucaucguggagcgcggcaacagauccggguauagcggaaucuuuucugucgaaggcaaauccugcauuaaucgguguuucuacguggagcucauuagagggcgcaaggaagagaccgagguuugguggaccagcaacuccaucguggucuuuugcggaacaucuggcaccuaugggacaggcagcuggcccgauggagccgacauuaaucugaugccuaucuga

SEQ ID NO: 206301 - RNA, 1410 nt, Artificial Sequence
  derived and/or modified CDS sequence (opt5) from neuraminidase__InfluenzaA__AAY27997
augaaccccaaucagaagaucauuaccaucggcagcgugucccugacaauugccacgaucugcuuccucaugcaaauugcuauccuggucaccacaguuacccuucacuuuaaacagcaugaguguaacucuccuccgaauaaccaggugaugcugugcgaacccacaaucauugagagaaauaucaccgaaauuguguaccucacaaacaccacgaucgagaaggaaauuuguccuaaacuggccgaguaucggaauuggagcaagccccagugcaacaucaccggguucgcgccuuuuuccaaagacaauucuauucgccuuagcgcuggaggcgauaucugggucacaagagagcccuacguguccugugacccugauaagugcuaucaauucgcccuggggcagggaaccacacucaacaauggccacucuaacaauaccguucaugaccggacgccguaccgcacacugcugaugaacgaaaugggggugcccuuucaccucggaaccagacaggucuguaucgccuggagcuccagcucuugccaugauggcaaggcuuggcugcacguguguguuacaggcgacgauaaaaaugccaccgcuuccuucauuuauaacgggcggcuuguggacagcaucggaucuugguccaagaaaauucugcgcacccaggagagcgaaugcgucuguaucaacggcacaugcacgguggugaugaccgaugggucugccuccggaaaggcggacacaaaaauucucuuuaucgaggagggcaagaucguccacauuagcacccuguccgggucugcccaacauguugaagagugcagcuguuacccuagauaucccggagugcggugcgugugucgcgauaauuggaagggcuccaacagaccuaucgucgacauuaaugugaaagauuacagcaucguuucuuccuacgugugcagcggccuugucggggacacaccccggaagaacgacucuuucagcuccucucacugucuggauccgaauaacgaagagggaggccauggggugaaaggaugggcuuuugacgauggcaaugacguuuggauggggcgcaccauuagcgaaaagcucagauccggauaugagacguucaaagugaucgagggcuggagcaagccuaacucuaaacugcagaucaaucggcaggucauuguggaacgcggcaacagauccggguacagcggaaucuuuucugucgagggcaaguccugcauuaaucgguguuucuauguggaacugaucagagggcgcaaggaggaaacagagguuugguggaccagcaacuccauuguggucuuuugcggaaccucuggcacauacgggaccggcagcuggcccgauggagccgacaucaaucucaugccuauuuga

SEQ ID NO: 206302 - RNA, 1410 nt, Artificial Sequence; identical to SEQ ID NO: 206207
  derived and/or modified CDS sequence (opt5) from neuraminidase__InfluenzaA__AAY28007

SEQ ID NO: 206303 - RNA, 1410 nt, Artificial Sequence; identical to SEQ ID NO: 206252
  derived and/or modified CDS sequence (opt5) from neuraminidase__InfluenzaA__AAY28017

SEQ ID NO: 206304 - RNA, 1410 nt, Artificial Sequence; identical to SEQ ID NO: 206207
  derived and/or modified CDS sequence (opt5) from neuraminidase__InfluenzaA__AAY28268

SEQ ID NO: 206305 - RNA, 1410 nt, Artificial Sequence
  derived and/or modified CDS sequence (opt5) from neuraminidase__InfluenzaA__AAY28278
augaaccccaaucagaagaucauuaccaucggcagcgugucccugacaauugccacgaucugcuuccucaugcaaauugcuauccuggucaccacaguuacccuucacuuuaaacaguacgaguguaacucuccuccgaauaaccaggugaugcugugcgaacccacaaucauugagagaaauaucaccgaaauuguguaucucacaaacaccacgaucgagaaggaaauuuguccuaaacuggccgaguaccggaauuggagcaagccccagugcaaaaucaccggguucgcgccuuuuuccaaggacaacucuauucgccuuagcgcuggaggcgauaucugggucacaagagagcccuauguguccugugacccugauaagugcuaccaauucgcccuggggcagggaaccacacucaauaaccggcauucuaaugacaccguucacgaucgcacgccguauagaacacugcugaugaacgaacucggcgugcccuuucaucuggggaccaaacaggucuguaucgccuggagcuccagcucuugccacgacggaaaggcuuggcuucauguguguguuacaggccacgaugagaaugccaccgcuuccuucauuuacgacggccggcugguggauagcaucgggucuugguccaaaaagauucuccgcacccaggaaagcgagugcgucuguaucaacggaacaugcacgguggugaugaccgacggcucugccuccgggagagcggauacaaaaauucuguuuaucgaggaaggaaagaucguccacaccagcaaacuuuccggcucugcccaacauguugaggaaugcagcuguuauccucgguaccccggggugcgcugcguguguagagacaauuggaagggauccaaccggccuauugucgauaucaacgugaaggacuacagcauuguuucuuccuaugugugcagcggccuggucggcgacacaccccgcaaaaaugauucuagcuccucuagccacugucucgacccgaacaaugaggaagggggacauggcgugaaggggugggcuuucgaugacggaaacgauguuuggaugggcagaaccaucuccgagaaaagccggucuggguacgagacguuuaaggugauugaaggaugguccaaaccuaauagcaagcugcagaucaaccgccaggucaucguggagagaggcaaucggucuggcuauuccgggauuuucagcgucgaaggaaaguccugcaucaacagauguuuuuacguggagcugauucgcggccggaaacccgaaacagagguuugguggaccucuaauagcaucguggucuucugcgggaccuccggaacauauggcaccgggucuuggccugacggcgccgauauuaaccucaugcccaucuga

SEQ ID NO: 206306 - RNA, 1410 nt, Artificial Sequence; identical to SEQ ID NO: 206221
  derived and/or modified CDS sequence (opt5) from neuraminidase__InfluenzaA__AAY28288

SEQ ID NO: 206307 - RNA, 1410 nt, Artificial Sequence
  derived and/or modified CDS sequence (opt5) from neuraminidase__InfluenzaA__AAY28298
augaaccccaaucagaagaucauuaccaucggcagcgugucccugacaauugccacgaucugcuuccucaugcaaauugcuauccuggucaccacaguuacccuucacuuuaaacagcaugaguguaacucuccuccgaauaaccaggugaugcugugcgaacccacaaucauugagagaaauaucaccgaaauuguguaccucacaaacaccacgaucgagaaggaaauuuguccuaaacuggccgaguaucggaauuggagcaagccccagugcaacaucaccggguucgcgccuuuuuccaaagacaauucuauucgccuuagcgcuggaggcgauaucugggucacaagagagcccuacguguccugugacccugauaagugcuaucaauucgcccuggggcagggaaccacacucaacaauggccacucuaacgacaccguucaugaucggacgccguaccgcacacugcugaugaaugaacucggggugcccuuucaccugggaaccagacaggucuguaucgccuggagcuccagcucuugccaugacggcaaggcuuggcuucacguguguguuacaggcgaugacaaaaacgccaccgcuuccuucauuuauaaugggcggcugguggauagcaucggaucuugguccaagaaaauucuccgcacccaggagagcgaaugcgucuguaucaacggcacaugcacgguggugaugaccgacgggucugccuccggaaaggcggauacaaaaauucuguuuaucgaggagggcaagaucguccacauuagcacccuuuccgggucugcccaacauguugaagagugcagcuguuacccuagauaucccggagugcggugcgugugucgcgacaacuggaagggcuccaauagaccuaucgucgauauuaacgugaaagacuacagcaucguuucuuccuacgugugcagcggccuggucggggacacaccccggaagaaugauucuagcuccucuagccacugucucgacccgaacaaugaagagggaggccauggggugaaaggaugggcuuucgaugacggcaacgauguuuggauggggcgcaccauuuccgaaaagcugagaagcggauaugagacguuuaaagugaucgagggcuggucucggccuaauuccaagcugcagaucaaccgccaggucauuguggaaagaggcaaucggagcggguacucuggaaucuucuccgucgagggcaaaagcugcauuaacagauguuuuuauguggaacucauccgcgggcggaaggaggaaacagagguuugguggaccuccaauucuauuguggucuucugcggaaccagcggcacauacgggaccggcuccuggcccgacggagccgauaucaaccugaugccuauuuga

SEQ ID NO: 206308 - RNA, 1410 nt, Artificial Sequence; identical to SEQ ID NO: 206238
  derived and/or modified CDS sequence (opt5) from neuraminidase__InfluenzaA__AAY28308

SEQ ID NO: 206309 - RNA, 1410 nt, Artificial Sequence
  derived and/or modified CDS sequence (opt5) from neuraminidase__InfluenzaA__AAY28318
augaaccccaaucagaagaucauuaccaucggcagcgugucccugacaauugccacgaucugcuuccucaugcaaauugcuauccuggucaccacaguuacccuucacuuuaaacaguacgaguguaacucuccuccgaauaaccaggugaugcugugcgaacccacaaucauugagagaaauaucaccgaaauuguguaucucacaaacaccacgaucgagaaggaaauuuguccuaaacuggccgaguaccggaauuggagcaagccccagugcaacaucaccggguucgcgccuuuuuccaaagacaauucuauucgccuuagcgcuggaggcgauaucugggucacaagagagcccuauguguccugugacccugauaagugcuaccaauucgcccuggggcagggaaccacacucaacaauggccauucuaacgacaccguucacgaucggacgccguaucgcacacugcugaugaaugaacucggggugcccuuucaucugggaaccagacaggucuguaucgccuggagcuccagcucuugccacgacggcaaggcuuggcuucauguguguguuacaggcgaugacgagaacgccaccgcuuccuucauuuacaaugggcggcugguggauagcaucggaucuugguccaaaaagauucuccgcacccaggaaagcgagugcgucuguaucaacggcacaugcgccguggugaugacggacgggucugcguccggaaaagccgauaccaagauucuguuuaucgaggaaggcaaaaucguccacauuagcacacuuuccgggucugcucaacacguugaggaaugcagcuguuauccuagauaccccggagugcggugcgugugucgcgacaacuggaagggcuccaauagaccuaucgucgauauuaacgugaaggacuacagcaucguuucuuccuaugugugcagcggccuggucggggacacaccccggaaaaaugauucuuucagcuccucucauugucucgacccgaacaaugaggaaggaggccacggggugaagggaugggccuuugaugacggcaacgauguuuggauggggcgcaccauuagcgagaaacugagauccggauacgagaccuucaaggugaucgaaggcuggagcaaaccuaauucuaagcugcagacgaaccggcaggucaucguggagcgcggcaauagauccggguauagcggaaucuuuucugucgaaggcaaauccugcauuaaccgguguuucuacguggagcucauuagagggcgcaaggaagagacagagguuugguggaccagcaauuccaucguggucuuuugcggaaccucuggcacauaugggaccggcagcuggcccgacggagcugauauuaaccugaugccuaucuga

SEQ ID NO: 206310 - RNA, 1410 nt, Artificial Sequence
  derived and/or modified CDS sequence (opt5) from neuraminidase__InfluenzaA__AAY28338
augaaccccaaucagaagaucauuaccaucggcagcgugucccugacaauugccacgaucugcuuccucaugcaaauugcuauccuggucaccacaguuacccuucacuuuaaacaguacgaguguaacucuccuccgaauaaccaggugaugcugugcgaacccgccaucauugagagaaauaucacagaaauuguguaucucaccaacacaaccaucgagaaggaaauucggccuaaacuggcggaguaccgcaauuggagcaagccccaguguaacaucacgggguucgcuccuuuuuccaaagacaauucuauuagacuuagcgccggaggcgauaucugggucacccgggagcccuauguguccugcgacccugauaaguguuaccaauucgcccuggggcagggaacaacccucaacaauggccauucuaacgacacaguucacgaucgcaccccguauagaacgcugcugaugaaugaacucggggugcccuuucaucugggaacacggcaggucugcaucgcuuggagcuccagcucuugucacgacggcaaggccuggcuucaugugugcguuaccggcgaugacgagaacgcuacagccuccuucauuuacaaugggcgccugguggauagcaucggaucuugguccaaaaagauucucagaacccaggaaagcgagugugucugcaucaacggcaccuguacaguggugaugacggacgggucugcguccggaaaagccgauaccaagauucuguuuaucgaggaaggcaaaaucgucaacauuagcacacuuuccgggucugcucaacacguugaggaaugcagcugcuauccucgguaccccggagugcgcugugugugcagagacaauuggaagggcuccaaccggccuaucgucgauauuaaugugaaggacuacagcaucguuucuuccuauguguguagcggccuggucggggacacaccccgcaaaaacgauucuuucagcuccucucacugccucgacccgaauaacgaggaaggaggccauggggugaagggaugggccuuugaugacggcaaugauguuuggauggggagaaccauuagcgagaaacugcgguccggauacgagaccuucaaggugaucgaaggcuggagcaaaccuaacucuaagcugcagaucaaucgccaggucauuguggagagaggcaaccgguccggguauagcggaaucuuuucugucgaaggcaaauccuguauuaauagaugcuucuacguggagcucauccgcgggcggaaggaagagacggagguuugguggacaagcaacuccauuguggucuuuuguggaaccucuggcaccuaugggacaggcagcuggcccgacggagcugauaucaaucugaugccuauuuga

SEQ ID NO: 206311 - RNA, 1410 nt, Artificial Sequence; identical to SEQ ID NO: 206217
  derived and/or modified CDS sequence (opt5) from neuraminidase__InfluenzaA__AAY28348

SEQ ID NO: 206312 - RNA, 1410 nt, Artificial Sequence; identical to SEQ ID NO: 206133
  derived and/or modified CDS sequence (opt5) from neuraminidase__InfluenzaA__AAY28358

SEQ ID NO: 206313 - RNA, 1410 nt, Artificial Sequence; identical to SEQ ID NO: 206217
  derived and/or modified CDS sequence (opt5) from neuraminidase__InfluenzaA__AAY28388

SEQ ID NO: 206314 - RNA, 1410 nt, Artificial Sequence; identical to SEQ ID NO: 206222
  derived and/or modified CDS sequence (opt5) from neuraminidase__InfluenzaA__AAY28398

SEQ ID NO: 206315 - RNA, 1410 nt, Artificial Sequence; identical to SEQ ID NO: 206236
  derived and/or modified CDS sequence (opt5) from neuraminidase__InfluenzaA__AAY28408

SEQ ID NO: 206316 - RNA, 1410 nt, Artificial Sequence; identical to SEQ ID NO: 206209
  derived and/or modified CDS sequence (opt5) from neuraminidase__InfluenzaA__AAY28505

SEQ ID NO: 206317 - RNA, 1410 nt, Artificial Sequence
  derived and/or modified CDS sequence (opt5) from neuraminidase__InfluenzaA__AAY28524
augaaccccaaucagaagaucauuaccaucggcagcgugucccugacaauugccacgaucugcuuccucaugcaaauugcuauccuggucaccacaguuacccuucacuuuaaacagcaugaguguaacucuccuccgaauaaccaggugaugcugugcgaacccacaaucauugagagaaauaucaccgaaauuguguaccucacaaacaccacgaucgagaaggaaauuuguccuaaacuggccgaguaucggaauuggagcaagccccagugcaacaucaccggguucgcgccuuuuuccaaagacaauucuauucgccuuagcgcuggaggcgauaucugggucacaagagagcccuacguguccugugacccugauaagugcuaucaauucgcccuggggcagggaaccacacucaacaauggccacucuaacuacaccguucaugaccggacgccguaucgcacacugcugaugaaugaacucggggugcccuuucaccugggaaccagacaggucuguaucgccuggagcuccagcucuugccaugauggcaaggcuuggcuucacguguguguuacaggcgacgauaaaaacgccaccgcuuccuucauuuacaaugggcggcugguggacagcaucggaucuugguccaagaaaauucuccgcacccaggagagcgaaugcgucuguaucaacggcacaugcacgguggugaugaccgaugggucugccuccggaaaggcggacacaaaaauucuguuuaucgaggagggcaagaucguccacauuagcacccuuuccgggucugcccaacauguugaagagugcagcuguuauccuagauaccccggagugcggugcgugugucgcgauaacuggaagggcuccaauagaccuaucgucgacauuaacgugaaagauuacagcaucguuucuuccuaugugugcagcggccuggucggggacacaccccggaagaaugacucuagcuccucuagccacugucucgauccgaacaaugaagagggaggccauggggugaaaggaugggcuuucgacgauggcaacgacguuuggauggggcgcaccauuuccgaaaagcugagaagcggauacgagacguuuaaagugaucgagggcuggucuaagccuaauuccaaacugcagaucaaccggcaggucauuguggaacgcggcaauagaagcggguauucuggaaucuucuccgucgagggcaagagcugcauuaaccgguguuuuuacguggaacucaucagagggcgcaaggaggaaacagagguuugguggaccuccaauucuauuguggucuucugcggaaccagcggcacauaugggaccggcuccuggcccgauggagccgacaucaaccugaugccuauuuga

SEQ ID NO: 206318 - RNA, 1410 nt, Artificial Sequence; identical to SEQ ID NO: 206207
  derived and/or modified CDS sequence (opt5) from neuraminidase__InfluenzaA__AAY28534

SEQ ID NO: 206319 - RNA, 1410 nt, Artificial Sequence
  derived and/or modified CDS sequence (opt5) from neuraminidase__InfluenzaA__AAY28544
augaaccccaaucagaagaucauuaccaucggcagcgugucccugacaauugccacgaucugcuuccucaugcaaauugcuauccuggucaccacaguuacccuucacuuuaaacagcaugaguguaacucuccuccgaauaaccaggugaugcugugcgaacccacaaucauugagagaaauaucaccgaaauuguguaccucacaaacaccacgaucgagaaggaaauuuguccuaaacuggccgaguaucggaauuggagcaagccccagugcaacaucaccggguucgcgccuuuuuccaaagacaauucuauucgccuuagcgcuggaggcgauaucugggucacaagagagcccuacguguccugugacccuaacaagugcuaucaauucgcccuggggcagggaaccacacucaauaacggccacucuaaugauaccguucaugaccggacgccguaccgcacacugcugaugaacgaacucggggugcccuuucaccugggaaccagacaggucuguaucgccuggagcuccagcucuugccaugauggcaaggcuuggcuucacguguguguuacaggcgacgauaaaaaugccaccgcuuccuucauuuauaacgggcggcugguggacagcaucggaucuugguccaagaaaauucuccgcacccaggagagcgaaugcgucuguaucaacggcacaugcacgguggugaugaccgaugggucugccuccggaaaggcggacacaaaaauucuguuuaucgaggagggcaagaucguccacauuagcacccuuuccgggucugcccaacauguugaagagugcagcuguuacccuagauaucccggagugcggugcgugugucgcgauaauuggaagggcuccaacagaccuaucgucgacauuaaugugaaagauuacagcaucguuucuuccuacgugugcagcggccuggucggggacacaccccggaagaacgacucuuucagcuccucucacugucucgauccgaauaacgaagagggaggccauggggugaaaggaugggcuuuugacgauggcaaugacguuuggauggggcgcaccauuagcgaaaagcugagauccggauaugagacguucaaagugaucgagggcuggagcaagccuaacucuaaacugcagaucaaucggcaggucauuguggaacgcggcaacagauccggguacagcggaaucuuuucugucgagggcaaguccugcauuaaucgguguuucuauguggaacucaucagagggcgcaaggaggaaacagagguuugguggaccagcaacuccauuguggucuuuugcggaaccucuggcacauacgggaccggcagcuggcccgauggagccgacaucaaucugaugccuauuuga

SEQ ID NO: 206320 - RNA, 1410 nt, Artificial Sequence; identical to SEQ ID NO: 206133
  derived and/or modified CDS sequence (opt5) from neuraminidase__InfluenzaA__AAY28554

SEQ ID NO: 206321 - RNA, 1410 nt, Artificial Sequence
  derived and/or modified CDS sequence (opt5) from neuraminidase__InfluenzaA__AAY28564
augaaccccaaucagaagaucauuaccaucggcagcgugucccugacaauugccacgaucugcuuccucaugcaaauugcuauccuggucaccacaguuacccuucacuuuaaacagcaugaguguaacucuccuccgaauaaccaggugaugcugugcgaacccacaaucauugagagaaauaucaccgaaauuguguaccucacaaacaccacgaucgagaaggaaauuuguccuaaacuggccgaguaucggaauuggagcaagccccagugcaacaucaccggguucgcgccuuuuuccaaagacaauucuauucgccuuagcgcuggaggcgauaucugggucacaagagagcccuacguguccugugacccugauaagugcuaucaauucgcccuggggcagggaaccacacucaacaauggccacucuaacgacaccguucaugaucggacgccguaccgcacacugcugaugaaugaacucggggugcccuuucaccugggaaccagacaggucuguaucgccuggagcuccagcucuugccaugacggcaaggcuuggcuucacguguguguuacaggcgaugacaaaaacgccaccgcuuccuucauuuauaaugggcggcugguggauagcaucggaucuugguccaagaaaauucuccgcacccaggagagcgaaugcgucuguaucaacggcacaugcacgguggugaugaccgacgggucugccuccggaaaggcggauacaaaaauucuguuuaucgaggagggcaagaucguccacauuagcacccuuuccgggucugcccaacauguugaagagugcagcuguuacccuagauaucccggagugcggugcgugugucgcgacaacuggaagggcuccaauagaccuaucgucgauauuaacgugaaagacuacagcaucguuucuuccuacgugugcagcggccuggucggggacacaccccggaagaaugauucuagcuccucuagccacugucucgacccgaacaaugaagagggaggccauggggugaaaggaugggcuuucgaugacggcaacgauguuuggauggggcgcaccauuuccgaaaagcugagaagcggauaugagacguuuaaagugaucgagggcuggucucggccuaauuccaagcugcagaucaaccgccaggucauuguggaaagaggcaaucggagcggguacucuggaaucuucuccgucgagagcaaauccugcauuaacagauguuuuuauguggaacucauccgcggccggaaggaggaaacagagguuugguggaccucuaauagcauuguggucuucugcgggaccuccggaacauacggcaccgggucuuggcccgacggcgccgauaucaaccugaugccuauuuga

SEQ ID NO: 206322 - RNA, 1410 nt, Artificial Sequence; identical to SEQ ID NO: 206207
  derived and/or modified CDS sequence (opt5) from neuraminidase__InfluenzaA__AAY28574

SEQ ID NO: 206323 - RNA, 1410 nt, Artificial Sequence; identical to SEQ ID NO: 206221
  derived and/or modified CDS sequence (opt5) from neuraminidase__InfluenzaA__AAY28584

SEQ ID NO: 206324 - RNA, 1410 nt, Artificial Sequence; identical to SEQ ID NO: 206133
  derived and/or modified CDS sequence (opt5) from neuraminidase__InfluenzaA__AAY28594

SEQ ID NO: 206325 - RNA, 1410 nt, Artificial Sequence
  derived and/or modified CDS sequence (opt5) from neuraminidase__InfluenzaA__AAY28611
augaaccccaaucagaagaucauuaccaucggcagcgugucccugacaauugccacgaucugcuuccucaugcaaauugcuauccuggucaccacaguuacccuucacuuuaaacaguacgaguguaacucuccuccgaauaaccaggugaugcugugcgaacccacaaucauugagagaaauaucaccgaaauuguguaucucacaaacaccacgaucgagaaggaaauuuguccuaaacuggccgaguaccggaauuggagcaagccccagugcaacaucaccggguucgcgccuuuuuccaaagacaauucuauucgccuuagcgcuggaggcgauaucugggucacaagagagcccuauguguccugugacccugauaagugcuaccaauucgcccuggggcagggaaccacacucaacaauggccauucuaacgacaccguucacgaucggacgccguaucgcacacugcugaugaaugaacucggggugcccuuucaucugggaaccaagcaggucuguaucgccuggagcuccagcucuugccacgacggcaaagccuggcuucauguguguguuacaggcgaugacgagaacgcuaccgcuuccuucauuuacaaugggagacugguggauagcaucggaucuugguccaagaaaauucuccggacccaggaaagcgagugcgucuguaucaacggcacaugcacgguggugaugaccgacgggucugccuccggaaaggcggauacaaaaauucuguuuaucgaggaaggcaagaucguccacaccagcucccuuucugggagcgcccaacacguugaggaaugcuccuguuauccucgcuaccccggagugagaugcgugugucgggacaacuggaagggcagcaaucgcccuauugucgauaucaacgugaaagacuacucuauuguuuccagcuaugugugcucuggccuggucggggacacacccagaaagaaugauagcuccucuagcucccauugucucgacccgaacaaugaggaaggaggccacggggugaaaggaugggcuuucgaugacggcaacgauguuuggauggggcggaccaucagcgagaagcugcgcucuggauacgagacguuuaaagugauugaaggcugguccaagccuaauagcaaacugcagaucaacagacaggucaucguggaccggggcaaucgcucuggguauuccggaauuuucagcgucgagggcaaguccugcaucaacagauguuuuuacguggaacucauucgggggagaaagcaggagacagaaguucuguggaccucuaauagcaucguggucuucugcggaaccuccggcacauaugggaccggcucuuggcccgauggagccgacauuaaccuuaugccuaucuga

SEQ ID NO: 206326 - RNA, 1410 nt, Artificial Sequence; identical to SEQ ID NO: 206238
  derived and/or modified CDS sequence (opt5) from neuraminidase__InfluenzaA__AAY28651

SEQ ID NO: 206327 - RNA, 1410 nt, Artificial Sequence
  derived and/or modified CDS sequence (opt5) from neuraminidase__InfluenzaA__AAY44613
augaaccccaaucagaagaucauuaccaucggcagcgugucccugacaauugccacgaucugcuuccucaugcaaauugcuauccuggucaccacaguuacccuucacuuuaaacagcaugaguguaacucuccuccgaauaaccaggugaugcugugcgaacccacaaucauugagagaaauaucaccgaaauuguguaccucacaaacaccacgaucgagaaggaaauuuguccuaaaaucgccgaguaucggaauuggagcaagccccagugcaacauuaccggguucgcgccuuuuuccaaagacaauucuauccgccugagcgcuggaggcgauaucugggucacaagagagcccuacguguccugugacccugauaagugcuaucaauucgcccuugggcagggaaccacacugaacaauggccacucuaacgacaccguucaugaucggacgccguaccgcacacuccugaugaaugaacugggggugcccuuucaccucggaaccagacaggucuguauugccuggagcuccagcucuugccaugacggcaaggcuuggcugcacguguguguuacaggcgaugacaaaaacgccaccgcuuccuucaucuauaaugggcggcuuguggauagcauuggaucuugguccaagaaaauccugcgcacccaggagagcgaaugcgucuguauuaacggcacaugcacgguggugaugaccgacgggucugccuccggaaaggcggauacaaaaauccucuuuaucgaggagggcaagauuguccacaucagcacccuguccgggucugcccaacauguugaagagugcagcuguuacccuagauaucccggagugcggugcgugugucgcgacaacuggaagggcuccaauagaccuauugucgauaucaacgugaaagacuacagcauuguuucuuccuacgugugcagcggccuugucggggacacaccccggaagaaugauucuagcuccucuagccacugucuggacccgaacaaugaagagggaggccauggggugaaaggaugggcuuucgaugacggcaacgauguuuggauggggcgcaccaucuccgaaaagcucagaagcggauaugagacguuuaaagugaucgagggcuggucuaagccuaauuccaaacugcagauuaaccggcaggucaucguggaacgcggcaauagaagcggguacucuggaauuuucuccgucgagggcaagagcugcaucaaccgguguuuuuauguggaacugauuagagggcgcaaggaggaaacagagguuugguggaccuccaauucuaucguggucuucugcggaaccagcggcacauacgggaccggcuccuggcccgacggagccgauauuaaccucaugccuaucuga

SEQ ID NO: 206328 - RNA, 1410 nt, Artificial Sequence; identical to SEQ ID NO: 206221
  derived and/or modified CDS sequence (opt5) from neuraminidase__InfluenzaA__AAY44624

SEQ ID NO: 206329 - RNA, 1410 nt, Artificial Sequence; identical to SEQ ID NO: 206243
  derived and/or modified CDS sequence (opt5) from neuraminidase__InfluenzaA__AAY44634

SEQ ID NO: 206330 - RNA, 1410 nt, Artificial Sequence; identical to SEQ ID NO: 206236
  derived and/or modified CDS sequence (opt5) from neuraminidase__InfluenzaA__AAY44644

SEQ ID NO: 206331 - RNA, 1410 nt, Artificial Sequence
  derived and/or modified CDS sequence (opt5) from neuraminidase__InfluenzaA__AAY44654
augaaccccaaucagaagaucauuaccaucggcagcgugucccugacaauugccacgaucugcuuccucaugcaaauugcuauccuggucaccacaguuacccuucacuuuaaacaguacgaguguaacucuccuccgaauaaccaggugaugcugugcgaacccacaaucauugagagaaauaucaccgaaauuguguaucucacaaacaccacgaucgagaaggaaauuuguccuaaacuggccgaguaccggaauuggagcaagccccagugcaacaucaccggguucgcgccuuuuuccaaagacaauucuauucgccuuagcgcuggaggcgauaucugggucacaagagagcccuauguguccugugacccugauaagugcuaccaauucgcccuggggcagggaaccacacucaacaauggccauucuaacgacaccguucacgaucggacgccguaucgcacacugcugaugaaugaacucggggugcccuuucaucugggaaccaagcaggucuguaucgccuggagcuccagcucuugccacgacggcaaagccuggcuucauguguguguuacaggcgaugacgagaacgcuaccgcuuccuucauuuacaaugggagacugguggauagcaucggaucuugguccaagaaaauucuccggacccaggaaagcgagugcgucuguaucaacggcacaugcacgguggugaugaccgacgggucugccuccggaaaggcggauacaaaaauucuguuuaucgaggaaggcaagaucguccacaccagcucccuuucugggagcgcccaacacguugaggaaugcuccuguuauccucgcuaccccggagugagaugcgugugucgggacaacuggaagggcagcaaucgcccuauugucgauaucaacgugaaagacuacucuauuguuuccagcuaugugugcucuggccuggucggggacacacccagaaagaaugauagcuccucuagcucccauugucucgacccgaacaaugaggaaggaggccacggggugaaaggaugggcuuucgaugacggcaacgauguuuggauggggcggaccaucagcgagaagcugcgcucuggauacgagacguuuaaagugauugaaggcugguccaagccuaauagcaaacugcagauccauagacaggucaucguggaccggggcaaccgcucuggguauuccggaauuuucagcgucgagggcaaguccugcaucaauagauguuuuuacguggaacucauucgggggagaaagcaggagacagaaguucuguggaccucuaacagcaucguggucuucugcggaaccuccggcacauaugggaccggcucuuggcccgauggagccgacauuaaucuuaugccuaucuga

SEQ ID NO: 206332 - RNA, 1410 nt, Artificial Sequence
  derived and/or modified CDS sequence (opt5) from neuraminidase__InfluenzaA__AAY44758
augaaccccaaucagaagaucauuaccaucggcagcgugucccugacaauugccacgaucugcuuccucaugcaaauugcuauccuggucaccacaguuacccuucacuuuaaacaguacgaguguaacucuccuagcaauaaccaggugaugcugugcgaaccgacaaucauugagagaaauaucaccgaaauuguguaucucacaaacaccacgaucgagaaggaaauuugucccaaacuggccgaguaccggaauugguccaagccucagugcaaaaucaccggguucgcgcccuuuucuaaggacaacagcauucgccuuuccgcuggaggcgauaucugggucacaagagagccuuaugugucuugugaccccgauaagugcuaccaauucgcccuggggcagggaaccacacucaauaaccggcauagcaaugacaccguucacgaucgcacgccuuauagaacacugcugaugaacgaacucggcgugccguuucaucuggggaccaaacaggucuguaucgccugguccucuucuuccugccacgacggaaaggcuuggcuucauguguguguuacaggccacgaugagaaugccaccgcuagcuucauuuacgacggccggcugguggauucuaucggguccuggagcaaaaagauucuccgcacccaggaaucugagugcgucuguaucaacggaacaugcacgguggugaugaccgacggcuccgccagcgggagagcggauacaaaaauucuguuuaucgaggaaggaaagaucguccacaccuccaaacuuucuggcagcgcccaacauguugaggaaugcuccuguuauccccgguacccuggggugcgcugcguguguagagacaauuggaagggaagcaaccggcccauugucgauaucaacgugaaggacuacucuauuguuuccagcuaugugugcucuggccuggucggcgacacaccucgcaaaaaugauagcuccucuagcucccacugucucgaccccaacaaugaggaagggggacauggcgugaaggggugggcuuucgaugacggaaacgauguuuggaugggcagaaccaucagcgagaaaucucgguccggguacgagacguuuaaggugauugaaggauggagcaaaccgaauagcaagcugcagaucaaccgccaggucaucguggagagaggcaaucgguccggcuauagcgggauuuucuccgucgaaggaaagucuugcaucaacagauguuuuuacguggagcugauucgcggccggaaaccugaaacagagguuugguggaccagcaauuccaucguggucuucugcgggaccucuggaacauauggcaccgggagcuggcccgacggcgccgauauuaaccucaugccuaucuga

SEQ ID NO: 206333 - RNA, 1410 nt, Artificial Sequence; identical to SEQ ID NO: 206133
  derived and/or modified CDS sequence (opt5) from neuraminidase__InfluenzaA__AAY44778

SEQ ID NO: 206334 - RNA, 1410 nt, Artificial Sequence
  derived and/or modified CDS sequence (opt5) from neuraminidase__InfluenzaA__AAY44788
augaaccccaaucagaagaucauuaccaucggcagcgugucccugacaauugccacgaucugcuuccucaugcaaauugcuauccuggucaccacaguuacccuucacuuuaaacaguacgaguguaacucuccuccgaauaaccaggugaugcugugcgaacccacaaucauugagagaaauaucaccgaaauuguguaucucacaaacaccacgaucgagaaggaaauuuguccuaaacuggccgaguaccggaauuggagcaagccccagugcaacaucaccggguucgcgccuuuuuccaaagacaauucuauucgccuuagcgcuggaggcgauaucugggucacaagagagcccuauguguccugugacccugauaagugcuaccaauucgcccuggggcagggaaccacacucaacaauggccauucuaacgacaccguucacgaucggacgccguaucgcacacugcugaugaaugaacucggggugcccuuucaucugggaaccaagcaggucuguaucgccuggagcuccagcucuugccacgacggcaaagccuggcuucauguguguguuacaggcgaugacgagaacgcuaccgcuuccuucauuuacaaugggagacugguggauagcaucggaucuugguccaagaaaauucuccggacccaggaaagcgagugcgucuguaucaacggcacaugcacgguggugaugaccgacgggucugccuccggaaaggcggauacaaaaauucuguuuaucgaggaaggcaagaucguccacaccagccuucuguccgggucugcccaacacguugaggaaugcagcuguuauccucgcuaccccggagugagaugcgugugucgggacaacuggaagggcuccaaucgcccuauugucgauaucaacgugaaagacuacagcauuguuucuuccuaugugugcagcggccucgucggggacacacccagaaagaaugauucuagcuccucuagccauugucuggacccgaacaaugaggaaggaggccacggggugaaaggaugggcuuucgaugacggcaacgauguuuggauggggcggaccaucuccgagaagcugcgcagcggauacgagauuuuuaaagugaucgaaggcuggucuaagccuaauuccaaacuccagaucaacagacaggucauuguggaccggggcaaucgcagcggguauucuggaaucuucuccgucgagggcaagagcugcauuaacagauguuuuuacguggaacugauccgggggagaaagcaggagacggaaguucuuuggacauccaauucuauuguggucuucugcggaaccagcggcaccuaugggacaggcuccuggcccgauggagccgacaucaaccugaugccuauuuga

SEQ ID NO: 206335 - RNA, 1410 nt, Artificial Sequence; identical to SEQ ID NO: 206209
  derived and/or modified CDS sequence (opt5) from neuraminidase__InfluenzaA__AAY44909

SEQ ID NO: 206336 - RNA, 1410 nt, Artificial Sequence; identical to SEQ ID NO: 206236
  derived and/or modified CDS sequence (opt5) from neuraminidase__InfluenzaA__AAY45649

SEQ ID NO: 206337 - RNA, 1410 nt, Artificial Sequence
  derived and/or modified CDS sequence (opt5) from neuraminidase__InfluenzaA__AAY46374
augaaccccaaucagaagaucauuaccaucggcagcgugucccugacaauugccacgaucugcuuccucaugcaaauugcuauccuggucaccacaguuacccuucacuuuaaacaguacgaguguaacucuccuccgaauaaccaggugaugcugugcgaacccacaaucauugagagaaauaucaccgaaauuguguaucucacaaacaccacgaucgagaaggaaauuuguccuaaacuggccgaguaccggaauuggagcaagccccagugcaaaaucaccggguucgcgccuuuuuccaaggacaacucuauucgccuuagcgcuggaggcgauaucugggucacaagagagcccuauguguccugugacccuuacaagugcuaucaauucgcccuggggcagggaaccacacucaauaaccggcauucuaaugauaccguucacgaccgcacgccguacagaacacugcugaugaacgaacucggcgugcccuuucaucuggggaccaaacaggucuguaucgccuggagcuccagcucuugccacgauggaaaggcuuggcuucauguguguguuacaggccacgacgagaaugccaccgcuuccuucauuuaugauggccggcugguggacagcaucgggucuugguccaaaaagauucuccgcacccaggaaagcgagugcgucuguaucaacggaacaugcacgguggugaugaccgauggcucugccuccgggagagcggacacaaaaauucuguuuaucgaggaaggaaagaucguccacaccagcaaacuuuccggcucugcccaacauguugaggaaugcagcuguuacccucgguaccccggggugcgcugcguguguagagauaauuggaagggauccaaccggccuauugucgacaucaacgugaaggauuauagcauuguuucuuccuacgugugcagcggccuggucggcgacacaccccgcaaaaaugacucuagcuccucuagccacugucucgauccgaacaaugaggaagggggacauggcgugaaggggugggcuuucgacgauggaaacgacguuuggaugggcagaaccaucuccgagaaaagccggucuggguaugagacguuuaaggugauugaaggaugguccaaaccuaauagcaagcugcagaucaaccgccaggucaucguggagagaggcaauaugucuggcuacuccgggauuuucagcgucgaaggaaaguccugcaucaaccgguguuuuuauguggagcugauuagaggccgcaaacaggaaacagagguuugguggaccucuaauagcaucguggucuucugcgggaccuccggaacauacggcaccgggucuuggcccgauggcgccgacauuaaccucaugccuaucuga

SEQ ID NO: 206338 - RNA, 1410 nt, Artificial Sequence
  derived and/or modified CDS sequence (opt5) from neuraminidase__InfluenzaA__AAY46384
augaaccccaaucagaagaucauuaccaucggcagcgugucccugacaauugccacgaucugcuuccucaugcaaauugcuauccuggucaccacaguuacccuucacuuuaaacagcaugaguguaacucuccuccgaauaaccaggugaugcugugcgaacccacaaucauugagagaaauaucaccgaaauuguguaccucacaaacaccacgaucgagaaggaaauuuguccuaaacuggccgaguaucggaauuggagcaagccccagugcaacaucaccggguucgcgccuuuuuccaaagacaauucuauucgccuuagcgcuggaggcgauaucugggucacaagagagcccuacguguccugugacccugauaagugcuaucaauucgcccuggggcagggaaccacacucaacaauggccacucuaacgacgccguucaugaucggaccccguaccgcacgcugcugaugaaugaacucggggugcccuuucaccugggaacaagacaggucuguaucgcuuggagcuccagcucuugccaugacggcaaggccuggcuucacguguguguuaccggcgaugacaaaaacgcuacagccuccuucauuuauaaugggcggcugguggauagcaucggaucuugguccaagaaaauucuccgcacccaggagagcgaaugcgucuguaucaacgggaccugcacaguggugaugacggacggcucugcguccggaaaggccgauaccaaaauucuguuuaucgaggagggcaagaucguccacauuagcacacuuuccgggucugcucaacauguugaagagugcagcuguuacccuagauaucccggagugcggugcgugugucgcgacaacuggaagggcuccaauagaccuaucgucgauauuaacgugaaagacuacagcaucguuucuuccuacgugugcagcggccuggucggggacacaccccggaagaaugauucuuucagcuccucucacugucucgacccgaacaaugaagagggaggccauggggugaaaggaugggccuuugaugacggcaacgauguuuggauggggcgcaccauuagcgaaaagcugagauccggauaugagaccuucaaagugaucgagggcuggagcaagccuaauucuaaacugcagaucaaccggcaggucauuguggaacgcggcaauagauccggguacagcggaaucuuuucugucgagggcaaguccugcauuaaccgguguuucuauguggaacucaucagagggcgcaaggaggaaacggagguuugguggacaagcaauuccauuguggucuuuugcggaaccucuggcaccuacgggacaggcagcuggcccgacggagcugauaucaaccugaugccuauuuga

SEQ ID NO: 206339 - RNA, 1410 nt, Artificial Sequence
  derived and/or modified CDS sequence (opt5) from neuraminidase__InfluenzaA__AAY46394
augaaccccaaucagaagaucauuaccaucggcagcgugucccugacaauugccacgaucugcuuccucaugcaaauugcuauccugaucaccacagucacccuucacuuuaaacaguacgaguguaacucuccuccgaauaaccagguuaugcugugcgaacccacaauuaucgagagaaauauuaccgaaaucguguaucucacaaacaccacgauugagaaggaaaucuguccuaaacuggccgaguaccggaauuggagcaagccccagugcaacauuaccggguucgcgccuuuuuccaaagacaauucuauccgccuuagcgcuggaggcgauaucugggugacaagagagcccuaugucuccugugacccugauaagugcuaccaauucgcccuggggcagggaaccacacucaacaauggccauucuaacgacaccgugcacgaucggacgccguaucgcacacugcugaugaaugaacucgggguucccuuucaucugggaaccaaacagguguguauugccuggagcuccagcucuugccacgacggcaaggcuuggcuucaugucugugugacaggcgaugacgagaacgccaccgcuuccuucaucuacaaugggagacugguugauagcauuggaucuugguccaagaaaauccuccggacccaggaaagcgagugcguguguauuaacggcacaugcacggucgugaugaccgacgggucugccuccggaaaggcggauacaaaaauccuguuuaucgaggaaggcaagauugugcacaccagcucccuuucugggagcgcccaacacgucgaggaaugcuccuguuauccucgcuaccccggaguuagaugcgugugucgggacaacuggaagggcagcaaucgcccuaucguggauauuaacgucaaagacuacucuaucguguccagcuauguuugcucuggccuggugggggacacacccagaaagaaugauagcuccucuagcucccauugucucgacccgaacaaugaggaaggaggccacggggucaaaggaugggcuuucgaugacggcaacgauguguggauggggcggaccauuagcgagaagcugcgcucuggauacgagacguuuaaaguuaucgaaggcugguccaagccuaauagcaaacugcagaucaacagacaggugauugucgaccggggcaaucgcucuggguauuccggaaucuucagcguggagggcaaguccugcauuaacagauguuuuuacgucgaacucauccgggggagaaagcaggagacagaagugcuguggaccucuaauagcauuguuguguucugcggaaccuccggcacauaugggaccggcucuuggcccgauggagccgacaucgaucuuaugccuauuuga

SEQ ID NO: 206340 - RNA, 1410 nt, Artificial Sequence
  derived and/or modified CDS sequence (opt5) from neuraminidase__InfluenzaA__AAY46419
augaaccccaaucagaagaucauuaccaucggcagcgugucccugacaauugccacgaucugcuuccucaugcaaauugcuauccuggucaccacaguuacccuucacuuuaaacaguacgaguguaacucucugccuaauaaccaggugaugcucugcgaaccgacaauccuggagagaaauauuaccgaaaucguguaucuuacaaacaccacgauugagaaggaaaucugucccaaacuggccgaguaccggaauuggagcaagccucagugcaaaauuaccggguucgcgcccuuuuccaaggacaacucuauccgccucagcgcuggaggcgauauuugggucacaagagagccuuauguguccugugaccccgauaagugcuaccaauucgcccuggggcagggaaccacacugaauaaccggcauucuaaugacaccguucacgaucgcacgccuuauagaacacuccugaugaacgaacuuggcgugccguuucaucuggggaccaaacaggucuguaucgccuggagcuccagcucuugccacgacggaaaggcuuggcuccauguguguguuacaggccacaaugagaacgccaccgcuuccuucaucuacggcgggcggcugguggauagcauuggaucuugguccaaaaagauccuucgcacccaggaaagcgagugcgucuguauuaauggcacaugcacgguggugaugaccgacgggucugccuccggcagagcggauacaaaaauccuguuuauugaggaaggaaagaucauccacauuagccaacucuccgggucugcccagcaugucgaggaaugcagcuguuauccccgguacccuggaguucgcugcguguguagagacaacuggaagggcuccaaccggcccaucguggauauuaaugucaaagacuacagcaucgugucuuccuauguuugcagcggccuggugggggauaccccucgcaagaacgacucuagcuccucuagccacugucugaaucccaacaaugaggaaggaggccauggggucaaaggaugggcuuucgacgauggcaacgacguguggauggggagaacaauuuccgagaaguuucggagcggauacgagaccuucaaaguuaucgaaggcuggucuaagccuaauuccaaacuccagaucaaccgccaggugauugucgauagagacaaucggagcggcuauucugggaucuuuuccguggagggaaagagcugcauuaacagauguuucuacgucgaacugauccgcggccggaagcaagagacggaagugugguggacauccaauucuauuguuguguuuugcgggaccagcggaaccuauggcacaggguccuggccggauggcgccgacaucaaccuuaugcccauuuga

SEQ ID NO: 206341 - RNA, 1410 nt, Artificial Sequence
  derived and/or modified CDS sequence (opt5) from neuraminidase__InfluenzaA__AAY47016
augaaccccaaucagaagaucauuaccaucggcagcgugucccugacaauugccacgaucugcuuccucaugcaaauugcuauccuggucaccacaguuacccuucacuuuaaacaguacgaguguaacucuccuccgaauaaccaggugaugcugugcgaacccacaaucauugagagaaauaucaccgaaauuguguaucucacaaacaccacgaucgagaaggaaauuuguccuaaacuggccgaguaccggaauuggagcaagccccagugcaacaucaccggguucgcgccuuuuuccaaagacaauucuauucgccuuagcgcuggaggcgauaucugggucacaagagagcccuauguguccugugacccugauaagugcuaccaauucgcccuggggcagggaaccacacucaacaauggccauucuaacgacaccguucacgaucggacgccguaucgcacacugcugaugaaugaacucggggugcccuuucaucugggaaccagacaggucuguaucgccuggagcuccagcucuugccacgacggcaaggcuuggcuucauguguguguuacaggcgaugacgagaacgccaccgcuuccuucauuuacaaugggcggcugguggauagcaucggaucuugguccaaaaagauucuccgcacccaggaaagcgagugcgucuguaucaacggcacaugcacgguggugaugaccgacgggucugccuccggaaaagcggauacaaagauucuguuuaucgaggaaggcaaaaucguccacauuagcacccuuuccgggaacgcccaacacguugaggaaugcucuuguuauccuagauaccccggagugcggugcgugugucgcgacaauuggaagggcagcaacagaccuaucgucgauauuaaugugaaggacuacuccaucguuagcucuuaugugugcuccggccuggucggggacacaccccggaaaaacgauagcuucucuagcucccauugucucgacccgaacucugaggaaggaggccacggggugaagggaugggcuuuugaugacggcaaugauguuuggauggggcgcaccauuagcgagaaacugagauccggauacgagacguucaaggugaucgaaggcuggagcaaaccuaauucuaagcugcagaucaaccggcaggucauuguggagcgcggcaauagauccggguauagcggaaucuuuucugucgaaggcaaauccugcauuaaccgguguuucuacguggagcucaucagagggcgcaaggaagagacagagguuugguggaccagcaauuccauuguggucuuuugcggaaccucuggcacauaugggaccggcagcuggcccgacggagccgauaucaaccugaugccuauuuga

SEQ ID NO: 206342 - RNA, 1410 nt, Artificial Sequence
  derived and/or modified CDS sequence (opt5) from neuraminidase__InfluenzaA__AAY47055
augaaccccaaucagaagaucauuaccaucggcagcgugucccugacaauugccacgaucugcuuccucaugcaaauugcuauccuggucaccacaguuacccuucacuuuaaacaguacgaguguaacucuccuccgaauaaccaggugaugcugugcgaacccacaaucauugagagaaauaucaccgaaauuguguaucucacaaacaccacgaucgagaaggaaauuuguccuaaacuggccgaguaccggaauuggagcaagccccagugcaacaucaccggguucgcgccuuuuuccaaagacaauucuauucgccuuagcgcuggaggcgauaucugggucacaagagagcccuauguguccugugacccugauaagugcuaccaauucgcccuggggcagggaaccacacucaacaauggccauucuaacgacaccguucacgaucggacgccguaucgcacacugcugaugaaugaacucggggugcccuuucaucugggaaccaagcaggucuguaucgccuggagcuccagcucuugccacgacggcaaagccuggcuucauguguguguuacaggcgaugacgagaacgcuaccgcuuccuucauuuacaaugggagacugguggauagcaucggaucuugguccaagaaaauucuccggacccaggaaagcgagugcgucuguaucaacggcacaugcacgguggugaugaccgacgggucugccuccggaaaggcggauacaaaaauucuguuuaucgaggaaggcaagaucguccacaccagccuucuguccgggucugcccaacacguugaggaaugcagcuguuauccucgcuaccccggagugagaugcgugugucgggacaacuggaagggcuccaaucgcccuauugucgauaucaacgugaaagacuacagcauuguuucuuccuaugugugcagcggccucgucggggacacacccagaaagaaugauucuagcuccucuagccauugucuggacccgaacaaugaggaaggaggccacggggugaaaggaugggcuuucgaugacggcaacgauguuuggauggggcggaccaucuccgagaagcugcgcagcggauacgagacguuuaaagugauugaaggcuggucuaagccuaauuccaaacuccagaucaacagacaggucaucguggaccggggcaaucgcagcggguauucuggaauuuucuccgucgagggcaagagcugcaucaacagauguuuuuacguggaacugauucgggggagaaagcaggagacagaaguucuuuggaccuccaauucuaucguggucuucugcggaaccagcggcacauaugggaccggcuccuggcccgauggagccgacauuaaccuguuuccuaucuga

SEQ ID NO: 206343 - RNA, 1410 nt, Artificial Sequence
  derived and/or modified CDS sequence (opt5) from neuraminidase__InfluenzaA__AAY47078
augaaccccaaucagaagaucauuaccaucggcagcgugucccugacaauugccacgaucugcuuccucaugcaaauugcuauccuggucaccacaguuacccuucacuuuaaacaguacgaguguaacucuccuccgaauaaccaggugaugcugugcgaacccacaaucauugagagaaauaucaccgaaauuguguaucucacaaacaccacgaucgagaaggaaauuuguccuaaacuggccgaguaccggaauuggagcaagccccagugcaacaucaccggguucgcgccuuuuuccaaagacaauucuauucgccuuagcgcuggaggcgauaucugggucacaagagagcccuauguguccugugaccaugauaagugcuaccaauucgcccuggggcagggaaccacacucaacaauggccacucuaacgacaccguucaugaucggacgccuuaucgcacacugcugaugaaugaacucggggugccguuucaccugggaaccaagcaggucuguaucgccuggagcuccagcucuugccaugacggcaaagccuggcuucacguguguguuacaggcgaugacgagaacgcuaccgcuuccuucauuuacaaugggagacugguggauagcaucggaucuugguccaagaaaauucuccggacccaggaaagcgagugcgucuguaucaacggcacaugcacgguggugaugaccgacgggucugccuccggaaaggcggauacaaaaauucuguuuaucgaggaaggcaagaucguccacauuagcacccuuuccgggucugcccaacauguugaggaaugcagcuguuauccccgcuacccuggagugagaugcgugugucgggacaacuggaagggcuccaaucgccccaucgucgauauuaacgugaaagacuacagcaucguuucuuccuaugugugcagcggccuggucggggacacaccuagaaagaaugauucuuucagcuccucucacugucucgaccccaacaaugaggaaggaggccauggggugaaaggaugggcuuuugaugacggcaacgauguuuggauggggcggaccauuagcgagaagcugcgcuccggauacgagacguucaaagugaucgaaggcuggagcaagccuaauucuaaacugcagaucaacagacaggucauuguggagcggggcaaucgcuccggguauagcggaaucuuuucugucgaaggcaaguccugcauuaacagauguuucuacguggagcucauccgggggagaaaggaagagacagagguuugguggaccagcaauuccauuguggucuuuugcggaaccucuggcacauaugggaccggcagcuggccggacggagccgauaucaaccugaugcccauuuga

SEQ ID NO: 206344 - RNA, 1410 nt, Artificial Sequence
  derived and/or modified CDS sequence (opt5) from neuraminidase__InfluenzaA__AAY47088
augaaccccaaucagaagaucauuaccaucggcagcgugucccugacaauuucuacgaucugcuucuuuaugcaaauugccauccucaucaccacagucacccugcacuucaaacaguacgaguuuaacagcccuccgaauaaccagguuaugcuuugugaacccacaauuaucgagagaaauauuaccgaaaucguguaucugacaaacaccacgauugagaaggaaaucugcccuaaacucgcugaguaccggaauugguccaagccccaguguaacauuaccggguucgccccuuuuucuaaagacaauagcauccgccuguccgcgggaggcgauaucugggugacaagagagcccuaugucucuugcgacccugauaaguguuaccaauucgcucuugggcagggaaccacacugaacaaugugcauagcaacgacaccguucacgaucggacgccguaucgcacacuccugaugaaugaacugggcgugcccuuucaucucgggaccaagcaggucugcauugccugguccucuagcuccugucacgacggaaaagccuggcugcaugugugcguuacaggcgaugacgagaacgcuaccgccagcuucaucuacaauggcagacuuguggauucuauugucuccuggagcaagaaaauccugcggacccaggaaucugagugugugugcauuaacgggacauguacgguggucaugaccgacggauccgcuagcggcaaggccgauacaaaaauccucuuuaucgaggaagggaagauuguucacaccuccacacugucuggaagcgcgcaacacguggaggaaugcuccugcuauccucgcuaccccggcgugagaugugucugccgggacaacuggaaggggagcaaucgcccuaucguggauauuaacaucaaagaccauucuauuguuuccagcuacguguguucuggacuugucggcgacacccccagaaagaaugauagcuccucuagcucccacugccuggacccgaacaaugaggaaggcgggcauggagugaaaggcugggccuucgaugacgggaacgauguuuggaugggacggacgaucagcgagaagcuccgcucuggcuaugagacauuuaaagugaucgaagggugguccaauccuaacagcaagcugcagauuaauagacaggucaucguggaccggggaaaccgcucuggcuacuccggcauuuucagcgucgaggggaaauccuguaucaauagaugcuuuuauguggaacugauucggggaagaaagcaggagaccgaaguucucuggaccucuaacagcaucguggucuucuguggcacauccgggaccuacggaacaggcucuuggcccgauggggcugacauuaaucugaugccuaucuga

SEQ ID NO: 206345 - RNA, 1410 nt, Artificial Sequence; identical to SEQ ID NO: 206209
  derived and/or modified CDS sequence (opt5) from neuraminidase__InfluenzaA__AAY58319

SEQ ID NO: 206346 - RNA, 1392 nt, Artificial Sequence
  derived and/or modified CDS sequence (opt5) from neuraminidase__InfluenzaA__AAY59038
augaaccccaaucagaagaucauuaccaucggcagcgugucccugacaauugccacgaucugcuuccucaugcaaauugcuauccuggucaccacaguuacccuucacuuuaaacaguacgaguguaacucuccuccgaauaaccaggugaugcugugcgaacccacaaucauugagagaaauaucaccgaaauuguguaucucacaaacaccacgaucgagaaggaaauuuguccuaaacuggccgaguaccggaauuggagcaagccccagugcaacaucaccggguucgcgccuuuuuccaaagacaauucuauucgccuuagcgcuggaggcgauaucugggucacaagagagcccuauguguccugugacccugauaagugcuaccaauucgcccuggggcagggaaccacaaacgacaccguucaugaucggacgccguaucgcacacuccugaugaaugaacugggcgugcccuuucaccucgggaccaagcaggucuguaucgccuggucuagcuccagcugccaugacggaaaagccuggcugcacguguguguuacaggcgaugacgagaacgcuaccgcuucuuucauuuacaauggcagacuuguggauuccaucgggagcuggucuaagaaaauucugcggacccaggaauccgagugcgucuguaucaacggaacaugcacgguggugaugaccgacggcagcgccucugggaaggcggauacaaaaauucucuuuaucgaggaaggaaagaucguccauaccuccccucugagcggcuccgcccaacacguugaggaaugcucuuguuauccccgcuacccuggggugagaugcgugugucgggacaauuggaagggaagcaaccgccccauugucgauaucaacgugaaagacuacuccauuguuagcucuuaugugugcuccggccuugucggcgacacaccgagaaagaaugauagcucuagcuccucucacugucuggacccuaacaaugaggaagggggacauggcgugaaagggugggcuuucgaugacggaaacgauguuuggaugggccggaccaucagcgagaagcuccgcuccggguacgagacguuuaaagugauugaaggauggagcaagcccaauucuaaacugcagaucaacagacaggucaucguggaccggggcaaucgcuccggcuauagcgggauuuucucugucgagggaaaguccugcaucaacagauguuuuuacguggaacugauucggggcagaaagcaggagacagaaguucucuggaccagcaauuccaucguggucuucugcgggaccucuggaacauauggcaccgggagcuggccugauggcgccgacauuaaccugaugcccaucuga

SEQ ID NO: 206347 - RNA, 1410 nt, Artificial Sequence
  derived and/or modified CDS sequence (opt5) from neuraminidase__InfluenzaA__AAY64195
augaaccccaaucagaagaucauuaccaucggcagcgugucccugacaauugccacgaucugcuuccucaugcaaauugcuauccuggucaccacaguuacccuucacuuuaaacaguacgaguguaacucucugccuaauaaccaggugaugcucugcgaaccgacaaucauugagagaaauaucaccgaaauuguguaucugacaaacaccacgaucgagaaggaaauuugucccaaacuugccgaguaccggaauuggagcaagccucagugcaaaaucaccggguucgcgcccuuuuccaaggacaacucuauucgccugagcgcuggaggcgauaucugggucacaagagagccuuauguguccugugaccccgauaagugcuaccaauucgcccucgggcagggaaccacacugaauaaccggcauucuaaugacaccguucacgaucgcacgccuuauagaacacugcucaugaacgaacugggcgugccguuucaucuugggaccaaacaggucuguaucgccuggagcuccagcucuugccacgacggaaaggcuuggcugcauguguguguuacaggccacgaugagaaugccaccgcuuccuucauuuacgacggccggcucguggauagcaucgggucuugguccaaaaagauucugcgcacccaggaaagcgagugcgucuguaucaacggaacaugcacgguggugaugaccgacggcucugccuccgggagagcggauacaaaaauucuuuuuaucgaggaaggaaagaucauucacaucagccaacuguccggcucugcccagcaugucgaggaaugcagcuguuauccccgguacccugggguucgcugcguguguagagacaauuggaagggauccaaccggcccauuguggauaucaacgucaaagacuacagcauugugucuuccuauguuugcagcggccucgugggcgacaccccucgcaagaaugauucuagcuccucuagccacugucugaaccccaauaacgaggaagggggacauggcgucaaagggugggcuuucgacgauggaaaugacguguggaugggcagaacaaucuccgagaaguuucggagcggguacgagaccuucaaaguuaucgaaggauggucuaagccgaacuccaaacugcagauuaaucgccaggugaucgucgauagagacaaccggagcggcuauucuggcauuuuuagcguggaggggaaguccugcaucaauagauguuucuacgucgaacucauucgcggacggaagcaagaggccgaagugugguggacguccaacucuaucguuguguuuugcggcacaagcgggaccuauggaaccggcuccuggccugauggggcugacauuaaucugaugcccaucuga

SEQ ID NO: 206348 - RNA, 1410 nt, Artificial Sequence; identical to SEQ ID NO: 206207
  derived and/or modified CDS sequence (opt5) from neuraminidase__InfluenzaA__AAY64205

SEQ ID NO: 206349 - RNA, 1410 nt, Artificial Sequence; identical to SEQ ID NO: 206133
  derived and/or modified CDS sequence (opt5) from neuraminidase__InfluenzaA__AAY64215

SEQ ID NO: 206350 - RNA, 1410 nt, Artificial Sequence
  derived and/or modified CDS sequence (opt5) from neuraminidase__InfluenzaA__AAY64225
augaaccccaaucagaagaucauuaccaucggcagcgugucccugacaauugccacgaucugcuuccucaugcaaauuaccauccuggucacaaccguuacacuucacuuuaaacaguacgaguguaacccuccgcccaauaaccaggugaugcugugcgaaccuaccaucauugagagaaauaucacagaaauuguguaucucaccaacacgaccaucgagaaggaaauuugucccaaacuggcugaguaccggaauuggucuaagccucagugcaacaucacaggguucgcccccuuuagcaaagacaauuccauucgccuuucugcgggaggcgauaucugggucaccagagagccuuaugugagcugugacccggauaagugcuaccaauucgcucuggggcagggaacaacccucaacaauggccauuccaacgacacgguucacgaucggacacccuaucgcacccugcugaugaaugaacucggggugccuuuucaucugggaacaagacaggucuguaucgccuggucuagcuccagcugccacgacggcaaggccuggcuucauguguguguuaccggcgaugacgagaacgcuaccgccucuuucauuuacaaugggcggcugguggauuccaucggaagcuggucuaaaaagauucuccgcacacaggaauccgagugcgucuguaucaacggcacgugcaccguggugaugacagacgggagcgcuucuggaaaagccgauaccaagauucuguuuaucgaggaaggcaaaaucguccacauuuccacacuuagcggguccgcgcaacacguugaggaaugcucuuguuaucccagauacccuggagugcggugcgugugucgcgacaacuggaagggcagcaauagacccaucgucgauauuaacgugaaggacuacuccaucguuagcucuuaugugugcuccggccuggucggggacaccccgcggaaaaaugauagcuucucuagcucccauugucucgacccuaacaaugaggaaggaggccacggggugaagggaugggccuuugaugacggcaacgauguuuggauggggcgcacgauuucugagaaacugagaagcggauacgagacauucaaggugaucgaaggcugguccaaacccaauagcaagcugcagaucaaccggcaggucauuguggagcgcggcaauagaucuggguauuccggaaucuuuagcgucgaaggcaaaucuugcauuaaccgguguuucuacguggagcucaucagagggcgcaaggaagagaaugagguuugguggaccuccaacagcauuguggucuuuugcggaaccuccggcacauaugggaccggcucuuggccugacggagcugauaucaaucugaugcccauuuga

SEQ ID NO: 206351 - RNA, 1410 nt, Artificial Sequence
  derived and/or modified CDS sequence (opt5) from neuraminidase__InfluenzaA__AAY64245
augaaccccaaucagaagaucauuaccaucggcagcgugucccugacaauugccacgaucugcuuccucaugcaaauugcuauccuggucaccacaguuacccuucacuuuaaacaguacgaguguaacucucugccuaauaaccaggugaugcucugcgaaccgacaauccuggagagaaauauuaccgaaaucguguaucuuacaaacaccacgauugagaaggaaaucugucccaaacuggccgaguaccggaauuggagcaagccucagugcaaaauuaccggguucgcgcccuuuuccaaggacaacucuauccgccucagcgcuggaggcgauauuugggucacaagagagccuuauguguccugugaccccgauaagugcuaccaauucgcccuggggcagggaaccacacugaauaaccggcauucuaaugacaccguucacgaucgcacgccuuauagaacacuccugaugaacgaacuuggcgugccguuucaucuggggaccaaacaggucuguaucgccuggagcuccagcucuugccacgacggaaaggcuuggcuccauguguguguuacaggccacgaugagaaugccaccgcuuccuucaucuacggcgggcggcugguggacagcauuggaucuugguccaaaaagauccuucgcacccaggaaagcgagugcgucuguauuaacggcacaugcacgguggugaugaccgaugggucugccuccggcagagcggacacaaaaauccuguuuauugaggaaggaaagaucauccacauuagccaacucuccgggucugcccagcaugucgaggaaugcagcuguuauccccgguacccuggaguucgcugcguguguagagauaauuggaagggcuccaaccggcccaucguggacauuaacgucaaagauuacagcaucgugucuuccuauguuugcagcggccuggugggggacaccccucgcaagaaugacucuagcuccucuagccacugucugaaccccaauaacgaggaaggaggccauggggucaaaggaugggcuuucgaugacggcaaugauguguggauggggagaacaauuuccgagaaguuucggagcggauacgagaccuucaaaguuaucgaaggcuggucuaagccgaacuccaaacuccagaucaaucgccaggugauugucgacagagauaaccggagcggcuauucugggaucuuuuccguggagggaaagagcugcauuaauagauguuucuacgucgaacugauccgcggccggaagcaagagacggaagugugguggacauccaacucuauuguuguguuuugcgggaccagcggaaccuauggcacaggguccuggccugacggcgccgauaucaaucuuaugcccauuuga

SEQ ID NO: 206352 - RNA, 1410 nt, Artificial Sequence; identical to SEQ ID NO: 206133
  derived and/or modified CDS sequence (opt5) from neuraminidase__InfluenzaA__AAY64255

SEQ ID NO: 206353 - RNA, 1410 nt, Artificial Sequence; identical to SEQ ID NO: 206351
  derived and/or modified CDS sequence (opt5) from neuraminidase__InfluenzaA__AAY64265

SEQ ID NO: 206354 - RNA, 1410 nt, Artificial Sequence; identical to SEQ ID NO: 206351
  derived and/or modified CDS sequence (opt5) from neuraminidase__InfluenzaA__AAY64285

SEQ ID NO: 206355 - RNA, 1410 nt, Artificial Sequence
  derived and/or modified CDS sequence (opt5) from neuraminidase__InfluenzaA__AAY64295
augaaccccaaucagaagaucauuaccaucggcagcgugucccugacaauugccacgaucugcuuccucaugcaaauugcuauccuggucaccacaguuacccuucacuuuaaacaguacgaguguaacucuccuccgaauaaccaggugaugcugugcgaacccacaaucauugagagaaauaucaccgaaauuguguaucucacaaacaccacgaucgagaaggaaauuuguccuaaacugagcgaguaccggaauugguccaagccccagugcaacaucaccggguucgccccuuuuucuaaagacaauagcauucgccuuuccgcgggaggcgauaucugggucacaagagagcccuaugugucuugugacccugauaagugcuaccaauucgcucuggggcagggaaccacacucaacaauggccauagcaacgacaccguucacgaucggacgccguaucgcacacugcugaugaaugaacucggggugcccuuucaucugggaaccaagcaggucuguaucgccugguccucuagcuccugccacgacggcaaagccuggcuucauguguguguuacaggcgaugacgagaacgcuaccgccagcuucauuuacaaugggagacugguggauucuaucggauccuggagcaagaaaauucuccggacccaggaaucugagugcgucuguaucaacggcacaugcacgguggugaugaccgacggguccgcuagcggaaaggccgauacaaaaauucuguuuaucgaggaaggcaagaucguccacauuuccacccuuucugggagcgcgcaacacguugaggaaugcuccuguuauccucgcuaccccggagugagaugcgugugucgggacaacuggaagggcagcaaucgcccuaucgucgauauuaacgugaaagaccauucuaucguuuccagcuacgugugcucuggccuggucggggacacacccagaaagaaugauagcuucuccucuagccacugucucgacccgaacaaugaggaaggaggccauggggugaaaggaugggccuuugaugacggcaacgauguuuggauggggcggaccauuuccgagaagcugcgcagcggauaugagacguucaaagugaucgaaggcuggucuaagccuaauuccaaacugcagaucaacagacaggucauuguggagcggggcaaucgcagcggguacucuggaaucuuuuccgucgaaggcaagagcugcauuaacagauguuucuauguggagcucauccgggggagaaaggaagagacagagguuugguggaccuccaauucuauuguggucuuuugcggaaccagcggcacauacgggaccggcuccuggcccgacggagcugauaucaaccugaugccuauuuga

SEQ ID NO: 206356 - RNA, 1410 nt, Artificial Sequence
  derived and/or modified CDS sequence (opt5) from neuraminidase__InfluenzaA__AAY64305
augaaccccaaucagaagaucauuaccaucggcagcgugucccugacaauugccacgaucugcuuccucaugcaaauugcuauccuggucaccacaguuacccuucacuuuaaacaguacgaguguaacucuccuccgaauaaccaggugaugcugugcgaacccacaaucauugagagaaauaucaccgaaauuguguaucucacaaacaccacgaucgagaaggaaauuuguccuaaacuggccgaguaccggaauuggagcaagccccagugcaaaaucaccggguucgcgccuuuuuccaaggacaacucuauucgccuuagcgcuggaggcgauaucugggucacaagagagcccuauguguccugugacccugauaagugcuaccaauucgcccuggggcagggaaccacacucaauaaccggcauucuaaugacaccguucacgaucgcacgccguauagaacacugcugaugaacgaacucggcgugcccuuucaucuggggaccaaacaggucuguaucgccuggagcuccagcucuugccacgacggaaaggcuuggcuucauguguguguuacaggccacgaugagaaugccaccgcuuccuucauuuacgacggccggcugguggauagcaucgggucuugguccaaaaagauucuccgcacccaggaaagcgagugcgucuguaucaacggaacaugcacgguggugaugaccgacggcucugccuccgggagagcggauacaaaaauucuguuuaucgaggaaggaaagaucguccacaccagcaaacuuuccggcucugcccaacauguugaggaaugcagcuguuauccucgguaccccggggugcgcugcguguguagagacaauuggaagggauccaaccggccuauugucgauaucaacgugaaggacuacagcauuguuucuuccuaugugugcagcggccuggucggcgacacaccccgcaaaaaugauucuagcuccucuagccacugucucgacccgaacaaugaggaagggggacauggcgugaaggggugggcuuucgaugacggaaacgauguuuggaugggcagaaccaucuccgagaaaagccggucuggguacgagacguuuaaggugauugaaggaugguccaaaccuaauagcaagcugcagaucaaccgccaggucaucguggagagaggcaauaugucuggcuauuccgggauuuucagcgucgaaggaaaguccugcaucaaccgguguuuuuacguggagcugauuagaggccgcaaacaggaaacagagguuugguggaccucuaauagcaucguggucuucugcgggaccuccggaacauauggcaccgggucuuggcccgacggcgccgauauuaaccucaugccuaucuga

SEQ ID NO: 206357 - RNA, 1410 nt, Artificial Sequence; identical to SEQ ID NO: 206207
  derived and/or modified CDS sequence (opt5) from neuraminidase__InfluenzaA__AAY64335

SEQ ID NO: 206358 - RNA, 1410 nt, Artificial Sequence; identical to SEQ ID NO: 206222
  derived and/or modified CDS sequence (opt5) from neuraminidase__InfluenzaA__AAY64365

SEQ ID NO: 206359 - RNA, 1410 nt, Artificial Sequence
  derived and/or modified CDS sequence (opt5) from neuraminidase__InfluenzaA__AAY64385
augaaccccaaucagaagaucauuaccaucggcagcgugucccugacaauugccacgaucugcuuccucaugcaaauugcuauccuggucaccacaguuacccuucacuuuaaacaguacgaguguaacucucugccuaauaaccaggugaugcucugcgaaccgacaauccuggagagaaauauuaccgaaaucguguaucuuacaaacaccacgauugagaaggaaaucugucccaaacuggccgaguaccggaauuggagcaagccucagugcaaaauuaccggguucgcgcccuuuuccaaggacaacucuauccgccucagcgcuggaggcgauauuugggucacaagagagccuuauguguccugugaccccgauaagugcuaccaauucgcccuggggcagggaaccacacugaauaaccggcauucuaaugacaccguucacgaucgcacgccuuauagaacacuccugaugaacgaacuuggcgugccguuucaucuggggaccaaacaggucuguaucgccuggagcuccagcucuugccacgacggaaaggcuuggcuccauguguguguuacaggccacgaugagaaugccaccgcuuccuucaucuacggcgggcggcugguggacagcauuggaucuugguccaaaaagauccuucgcacccaggaaagcgagugcgucuguauuaacggcacaugcacgguggugaugaccgaugggucugccuccggcagagcggacacaaaaauccuguuuauugaggaaggaaagaucauccacauuagccaacucuccgggucugcccagcaugucgaggaaugcagcuguuauccccgguacccuggaguucgcugcguguguagagauaauuggaagggcuccaaccggcccaucguggacauuaacgucaaagauuacagcaucgugucuuccuauguuugcagcggccuggugggggacaccccucgcaagaaugacucuagcuccucuagccacugucugaaccccaauaacgaggaaggaggccauggggucaaaggaugggcuuucgaugacggcaaugauguguggauggggagaacaauuuccgaaaagagccggucuggauacgagaccuuuaaaguuaucgagggcugguccaagccgaacagcaaacuccagaucaaucgccaggugauugucgacagagauaaccggucuggcuauuccgggaucuucagcguggagggaaaguccugcauuaauagauguuuuuacgucgaacugauccgcggccggaagcaagagacggaagugugguggacaucuaacagcauuguuguguucugcgggaccuccggaaccuauggcacagggucuuggccugacggcgccgauaucaaucuuaugcccauuuga

SEQ ID NO: 206360 - RNA, 1410 nt, Artificial Sequence
  derived and/or modified CDS sequence (opt5) from neuraminidase__InfluenzaA__AAY64395
augaaccccaaucagaagaucauuaccaucggcagcgugucccugauuaucucuacaauuugcuucuuuaugcaaaucgccauccucauuacgaccgucacacugcacuucaaacaguacgaguuuaacagcccuccgaauaaccagguuaugcuuugugaacccaccaucauugagagaaauaucacagaaauuguguaucugaccaacacaaccaucgagaaggaaauuugcccuaaacucgcugaguaccggaauugguccaagccccagugugacaucacgggguucgccccuuuuucuaaagauaacagcauccgccuguccgcgggaggcgacauuugggugaccagagagcccuaugucucuugcgauccugacaaguguuaccaauucgcucuugggcagggaacaacccugaauaacgugcauagcaaugauacaguucacgaccggaccccguaucgcacgcuccugaugaacgaacugggcgugcccuuucaucucgggacaaagcaggucugcaucgccugguccucuagcuccugucacgauggaaaagccuggcugcaugugugcguuaccggcgacgaugagaaugcuacagccagcuucauuuacaacggcagacuuguggacucuaucgucuccuggagcaagaaaauucugcggacccaggaaucugagugugugugcaucaaugggaccuguacaguggucaugacggauggauccgcuagcggcaaggccgacaccaaaauccucuuuauuaaggaggggaagaucguucacacauccacccugucuggaagcgcgcaacacguggaagagugcuccugcuauccucgcuaccccggcgugagaugugucugccgggauaacuggaaagggagcaaccgcccuauuguggacaucaauauuaaggacuacucuaucguuuccagcuauguguguucuggacuugucggcgauacaccccggaaaaacgacagcuccucuagcucccauugccuggauccgaauaacgaagagggcgggcacggagugaagggcugggccuucgacgaugggaaugacguuuggaugggaagaaccaucagcgaaaaacuccgcucuggcuacgagacguuuaaggugauugaggggugguccaacagcaauucuaaacugcagaucaacagacaggucauuguggaucggggaaaucgcuccggcuauagcggcaucuucuccgucgaagggaagucuuguauuaacagaugcuuuuacguggagcugauccggggaagaaaggaagagacagaaguucucuggaccagcaauuccauuguggucuucuguggcaccucugggacauauggaaccggcagcuggccugacggggcugauaucaaccugaugcccaucuga

SEQ ID NO: 206361 - RNA, 1410 nt, Artificial Sequence; identical to SEQ ID NO: 206356
  derived and/or modified CDS sequence (opt5) from neuraminidase__InfluenzaA__AAY64405

SEQ ID NO: 206362 - RNA, 1410 nt, Artificial Sequence; identical to SEQ ID NO: 206351
  derived and/or modified CDS sequence (opt5) from neuraminidase__InfluenzaA__AAY98040

SEQ ID NO: 206363 - RNA, 1410 nt, Artificial Sequence; identical to SEQ ID NO: 206351
  derived and/or modified CDS sequence (opt5) from neuraminidase__InfluenzaA__AAY98050

SEQ ID NO: 206364 - RNA, 1410 nt, Artificial Sequence; identical to SEQ ID NO: 206243
  derived and/or modified CDS sequence (opt5) from neuraminidase__InfluenzaA__AAY98060

SEQ ID NO: 206365 - RNA, 1410 nt, Artificial Sequence
  derived and/or modified CDS sequence (opt5) from neuraminidase__InfluenzaA__AAY98070
augaaccccaaucagaagaucauuaccaucggcagcgugucccugacaauugccacgaucugcuuccucaugcaaauugcuauccuggucaccacaguuacccuucacuuuaaacaguacgaguguaacucuccuccgaauaaccaggugaugcugugcgaacccacaaucauugagagaaauaucaccgaaauuguguaucucacaaacaccacgaucgagaaggaaauuuguccuaaacuggccgaguaccggaauuggagcaagccccagugcaacaucaccggguucgcgccuuuuuccaaagacaauucuauucgccuuagcgcuggaggcgauaucugggucacaagagagcccuauguguccugugacccugauaagugcuaccaauucgcccuggggcagggaaccacacucaacaauggccauucuaacgacaccguucacgaucggacgccguaucgcacacugcugaugaaugaacucggggugcccuuucaucugggaaccagacaggucuguaucgccuggagcuccagcucuugccacgacggcaaggcuuggcuucauguguguguuacaggcgaugacgagaacgccaccgcuuccuucauuuacaaugggcggcugguggauagcaucggaucuugguccaaaaagauucuccgcacccaggaaagcgagugcgucuguaucaacggcacaugcacgguggugaugaccgacgggucugccuccggaaaagcggauacaaagauucuguuuaucgaggaaggcaaaaucguccacauuagcacccuuuccgggucugcccaacacguugaggaaugcagcuguuauccuagauaccccggagugcggugcgugugucgcgacaacuggaagggcuccaauagaccuaucgucgauauuaacgugaaggaccauagcaucguuucuuccuacgugugcagcggccuggucggggacacaccccggaaaaaugauucuuucagcuccucucacugucucgacccgaacaaugaggaaggaggccauggggugaagggaugggcuuuugaugacggcaacgauguuuggauggggcgcaccauuagcgagaaacugagauccggauaugagaucuucaaggugaucgaaggcuggagcaaaccuaauucuaagcugcagauuaaccggcaggucaucguggagcgcggcaauagauccggguacagcggaaucuuuucugucgaaggcaaauccugcauuaaccgguguuucuauguggagcucauuagagggcgcaaggaagagacggagguuugguggacaagcaauuccaucguggucuuuugcggaaccucuggcaccuacgggacaggcagcuggcccgacggagccgauauuaaccugaugccuaucuga

SEQ ID NO: 206366 - RNA, 1410 nt, Artificial Sequence; identical to SEQ ID NO: 206251
  derived and/or modified CDS sequence (opt5) from neuraminidase__InfluenzaA__AAY98080

SEQ ID NO: 206367 - RNA, 1410 nt, Artificial Sequence
  derived and/or modified CDS sequence (opt5) from neuraminidase__InfluenzaA__AAY98090
augaaccccaaucagaagaucauuaccaucggcagcgugucccugacaauugccacgaucugcuuccucaugcaaauugcuauccuggucaccacaguuacccuucacuuuaaacaguacgaguguaacucucugccuaauaaccaggugaugcucugcgaaccgacaaucauugagagaaauaucaccgaaauuguguaucugacaaacaccacgaucgagaaggaaauuugucccaaacuugccgaguaccggaauuggagcaagccucagugcaaaaucaccggguucgcgcccuuuuccaaggacaacucuauucgccugagcgcuggaggcgauaucugggucacaagagagccuuauguguccugugaccccgauaagugcuaccaauucgcccucgggcagggaaccacacugaauaaccggcauucuaaugacaccguucacgaucgcacgccuuauagaacacugcucaugaacgaacugggcgugccguuucaucuugggaccaaacaggucuguaucgccuggagcuccagcucuugccacgacggaaaggcuuggcugcauguguguguuacaggccacgaugagaaugccaccgcuuccuucauuuacgacggccggcucguggauagcaucgggucuugguccaaaaagauucugcgcacccaggaaagcgagugcgucuguaucaacggaacaugcacgguggugaugaccgacggcucugccuccgggaaagcggauacaaagauucuuuuuaucgaggaaggaaagaucauucacaucagccaacuguccggcucugcccagcaugucgaggaaugcagcuguuaucccagauacccugggguucggugcgugugucgcgacaauuggaaaggauccaacagacccauuguggauaucaacgucaaggacuacagcauugugucuuccuauguuugcagcggccucgugggcgacaccccucggaaaaaugauucuagcuccucuagccacugucugaaccccaauaacgaggaagggggacauggcgucaaggggugggcuuucgacgauggaaaugacguguggaugggccgcacaaucuccgagaaauuuagaagcggguacgagaccuucaagguuaucgaaggauggucuaaaccgaacuccaagcugcagauuaaucgccaggugaucgucgaucgggacaacagaagcggcuauucuggcauuuuuagcguggaggggaaguccugcaucaaucgguguuucuacgucgaacucauuagaggacgcaaacaagagacggaagugugguggacauccaacucuaucguuguguuuugcggcaccagcgggaccuauggaacaggcuccuggccugauggggccgacauuaaucugaugcccaucuga

SEQ ID NO: 206368 - RNA, 1410 nt, Artificial Sequence; identical to SEQ ID NO: 206351
  derived and/or modified CDS sequence (opt5) from neuraminidase__InfluenzaA__AAY98100

SEQ ID NO: 206369 - RNA, 1410 nt, Artificial Sequence; identical to SEQ ID NO: 206351
  derived and/or modified CDS sequence (opt5) from neuraminidase__InfluenzaA__AAY98110

SEQ ID NO: 206370 - RNA, 1410 nt, Artificial Sequence; identical to SEQ ID NO: 206351
  derived and/or modified CDS sequence (opt5) from neuraminidase__InfluenzaA__AAY98120

SEQ ID NO: 206371 - RNA, 1410 nt, Artificial Sequence; identical to SEQ ID NO: 206351
  derived and/or modified CDS sequence (opt5) from neuraminidase__InfluenzaA__AAY98130

SEQ ID NO: 206372 - RNA, 1410 nt, Artificial Sequence; identical to SEQ ID NO: 206351
  derived and/or modified CDS sequence (opt5) from neuraminidase__InfluenzaA__AAY98150

SEQ ID NO: 206373 - RNA, 1410 nt, Artificial Sequence
  derived and/or modified CDS sequence (opt5) from neuraminidase__InfluenzaA__AAY98160
augaaccccaaucagaagaucauuaccaucggcagcgugucccugacaauugccacgaucugcuuccucaugcaaauugcuauccuggucaccacaguuacccuucacuuuaaacaguacgaguguaacucucugccuaauaaccaggugaugcucugcgaaccgacaauccuggagagaaauauuaccgaaaucguguaucuuacaaacaccacgauugagaaggaaaucugucccaaacuggccgaguaccggaauuggagcaagccucagugcaaaauuaccggguucgcgcccuuuuccaaggacaacucuauccgccucagcgcuggaggcgauauuugggucacaagagagccuuauguguccugugaccccgauaagugcuaccaauucgcccuggggcagggaaccacacugaauaaccggcauucuaaugacaccguucacgaucgcacgccuuauagaacacuccugaugaacgaacuuggcgugccguuucaucuggggaccaaacaggucuguaucgccuggagcuccagcucuugccacgacggaaaggcuuggcuccauguguguguuacaggccacgaugagaaugccaccgcuuccuucaucuacggcgggcggcugguggacagcauuggaucuugguccaaaaagauccuucgcacccaggaaagcgagugcgucuguauuaacggcacaugcacgguggugaugaccgaugggucugccuccggcagagcggacacaaaaauccuguuuauugaggaaggaaagaucauccacauuagccaacucuccgggaaugcccagcaugucgaggaaugcucuuguuauccccgguacccuggaguucgcugcguguguagagauaacuggaagggcagcaaccggcccaucguggacauuaaugucaaagauuacuccaucgugagcucuuauguuugcuccggccuggugggggacaccccucgcaagaacgacagcucuagcuccucuaauugucugaaccccaauaacgaggaaggaggccacggggucaaaggaugggcuuucgaugacggcaaugauguguggauggggagaacaauuagcgagaaguuucgguccggauacgagaccuucaaaguuaucgaaggcuggagcaagccgaacucuaaacuccagaucaaucgccaggugauugucgacagagauaaccgguccggcuauagcgggaucuuuucuguggagggaaaguccugcauuaauagauguuucuacgucgaacugauccgcggccggaagcaagagacggaagugugguggacaagcaacuccauuguuguguuuugcgggaccucuggaaccuauggcacagggagcuggccugacggcgccgauaucaaucuuaugcccauuuga

SEQ ID NO: 206374 - RNA, 1410 nt, Artificial Sequence; identical to SEQ ID NO: 206351
  derived and/or modified CDS sequence (opt5) from neuraminidase__InfluenzaA__AAY98170

SEQ ID NO: 206375 - RNA, 1410 nt, Artificial Sequence; identical to SEQ ID NO: 206351
  derived and/or modified CDS sequence (opt5) from neuraminidase__InfluenzaA__AAY98180

SEQ ID NO: 206376 - RNA, 1410 nt, Artificial Sequence; identical to SEQ ID NO: 206351
  derived and/or modified CDS sequence (opt5) from neuraminidase__InfluenzaA__AAY98200

SEQ ID NO: 206377 - RNA, 1410 nt, Artificial Sequence; identical to SEQ ID NO: 206351
  derived and/or modified CDS sequence (opt5) from neuraminidase__InfluenzaA__AAY98210

SEQ ID NO: 206378 - RNA, 1410 nt, Artificial Sequence; identical to SEQ ID NO: 206356
  derived and/or modified CDS sequence (opt5) from neuraminidase__InfluenzaA__AAY98220

SEQ ID NO: 206379 - RNA, 1410 nt, Artificial Sequence; identical to SEQ ID NO: 206351
  derived and/or modified CDS sequence (opt5) from neuraminidase__InfluenzaA__AAY98230

SEQ ID NO: 206380 - RNA, 1410 nt, Artificial Sequence
  derived and/or modified CDS sequence (opt5) from neuraminidase__InfluenzaA__AAY98250
augaaccccaaucagaagaucauuaccaucggcagcgugucccugacaauugccacgaucugcuuccucaugcaaauugcuauccuggucaccacaguuacccuucacuuuaaacaguacgaguguaacucucugccuaauaaccaggugaugcucugcgaaccgacaauccuggagagaaauauuaccgaaaucguguaucuuacaaacaccacgauugagaaggaaaucugucccaaacuggccgaguaccggaauuggagcaagccucagugcaaaauuaccggguucgcgcccuuuuccaaggacaacucuauccgccucagcgcuggaggcgauauuugggucacaagagagccuuauguguccugugaccccgauaagugcuaccaauucgcccuggggcagggaaccacacugaauaaccggcauucuaaugacaccguucacgaucgcacgccuuauagaacacuccugaugaacgaacuuggcgugccguuucaucuggggaccaaacaggucuguaucgccuggagcuccagcucuugccacgacggaaaggcuuggcuccauguguguguuacaggccacgaugagaaugccaccgcuuccuucaucuacggcgggcggcugguggacagcauuggaucuugguccaaaaagauccuucgcacccaggaaagcgagugcgucuguauuaacggcacaugcacgguggugaugaccgaugggucugccuccggcagagcggacacaaaaauccuguuuauugaggaaggaaagaucauccacauuagccaacucuccgggucugcccagcaugucgaggaaugcagcuguuauccccgguacccuggaguucgcugcguguguagagauaauuggaagggcuccaaccggcccaucguggacauuaacgucaaagauuacagcaucgugucuuccuauguuugcagcggccuggugggggacaccccucgcaagaaugacucuagcuccucuagccacugucugaaccccaauaacgaggaaggaggccauggggucaaaggaugggcuuucgaugacggcaaugauguguggauggggagaacaauuuccgagaaguuucggagcggauacgagaccuucaaaguuaucgaaggcuggucuaagccgaacuccaaacuccagaucaaucgccaggugauugucgacagagauaaccggagcggcuauucugggaucuuuuccguggaggacaagagcugcauuaauagauguuucuacgucgaacugauccgcggacggaagcaagagacggaagugugguggacauccaacucuauuguuguguuuugcggcaccagcgggaccuauggaacaggcuccuggccugauggggccgacaucaaucuuaugcccauuuga

SEQ ID NO: 206381 - RNA, 1410 nt, Artificial Sequence; identical to SEQ ID NO: 206351
  derived and/or modified CDS sequence (opt5) from neuraminidase__InfluenzaA__AAY98322

SEQ ID NO: 206382 - RNA, 1410 nt, Artificial Sequence; identical to SEQ ID NO: 206356
  derived and/or modified CDS sequence (opt5) from neuraminidase__InfluenzaA__AAY98332

SEQ ID NO: 206383 - RNA, 1410 nt, Artificial Sequence; identical to SEQ ID NO: 206351
  derived and/or modified CDS sequence (opt5) from neuraminidase__InfluenzaA__AAY98342

SEQ ID NO: 206384 - RNA, 1410 nt, Artificial Sequence; identical to SEQ ID NO: 206351
  derived and/or modified CDS sequence (opt5) from neuraminidase__InfluenzaA__AAY98359

SEQ ID NO: 206385 - RNA, 1410 nt, Artificial Sequence; identical to SEQ ID NO: 206356
  derived and/or modified CDS sequence (opt5) from neuraminidase__InfluenzaA__AAY98369

SEQ ID NO: 206386 - RNA, 1410 nt, Artificial Sequence
  derived and/or modified CDS sequence (opt5) from neuraminidase__InfluenzaA__AAY98379
augaaccccaaucagaagaucauuaccaucggcagcgugucccugacaauugccacgaucugcuuccucaugcaaauugcuauccuggucaccacaguuacccuucacuuuaaacaguacgaguguaacucucugccuaauaaccaggugaugcucugcgaaccgacaaucauugagagaaauaucaccgaaauuguguaucugacaaacaccacgaucgagaaggaaauuugucccaaacuugccgaguaccggaauuggagcaagccucagugcaaaaucaccggguucgcgcccuuuuccaaggacaacucuauucgccugagcgcuggaggcgauaucugggucacaagagagccuuauguguccugugaccccgauaagugcuaccaauucgcccucgggcagggaaccacacugaauaaccggcauucuaaugacaccguucacgaucgcacgccuuauagaacacugcucaugaacgaacugggcgugccguuucaucuugggaccaaacaggucuguaucgccuggagcuccagcucuugccacgacggaaaggcuuggcugcauguguguguuacaggccacgaugagaaugccaccgcuuccuucauuuacggcgggcggcucguggacagcaucggaucuugguccaaaaagauucugcgcacccaggaaagcgagugcgucuguaucaacggcacaugcacgguggugaugaccgaugggucugccuccggcagagcggacacaaaaauucuuuuuaucgaggaaggaaagaucauucacaucagccaacuguccgggucugcccagcaugucgaggaaugcagcuguuauccccgguacccuggaguucgcugcguguguagagauaauuggaagggcuccaaccggcccauuguggacaucaacgucaaagauuacagcauugugucuuccuauguuugcagcggccucgugggggacaccccucgcaagaaugacucuagcuccucuagccacugucugaaccccaauaacgaggaaggaggccauggggucaaaggaugggcuuucgaugacggcaaugauguguggauggggagaacaaucuccgagaaguuucggagcggauacgagaccuucaaaguuaucgaaggcuggucuaagccgaacuccaaacugcagauuaaucgccaggugaucgucgacagaaacaaucggagcggcuauucugggaucuuuuccguggagggaaagagcugcauuaacagauguuucuacgucgaacucauucgcggccggaagcaagagacggaagugugguggacauccaauucuaucguuguguuuugcgggaccagcggaaccuauggcacaggguccuggccugauggcgccgacauuaaccugaugcccaucuga

SEQ ID NO: 206387 - RNA, 1410 nt, Artificial Sequence
  derived and/or modified CDS sequence (opt5) from neuraminidase__InfluenzaA__AAY98389
augaaccccaaucagaagaucauuaccaucggcagcgugucccugacaauugccacgaucugcuuccucaugcaaauugcuauccuggucaccacaguuacccuucacuuuaaacaguacgaguguaacucucugccuaauaaccaggugaugcucugcgaaccgacaaucauugagagaaauaucaccgaaauuguguaucugacaaacaccacgaucgagaaggaaauuugucccaaacuugccgaguaccggaauuggagcaagccucagugcaaaaucaccggguucgcgcccuuuuccaaggacaacucuauucgccugagcgcuggaggcgauaucugggucacaagagagccuuauguguccugugaccccgauaagugcuaccaauucgcccucgggcagggaaccacacugaauaaccggcauucuaaugacaccguucacgaucgcacgccuuauagaacacugcucaugaacgaacugggcgugccguuucaucuugggaccaaacaggucuguaucgccuggagcuccagcucuugccacgacggaaaggcuuggcugcauguguguguuacaggccacgaugagaaugccaccgcuuccuucauuuacggcgggcggcucguggacagcaucggaucuugguccaaaaagauucugcgcacccaggaaagcgagugcgucuguaucaacggcacaugcacgguggugaugaccgaugggucugccuccggcagagcggacacaaaaauucuuuuuaucgaggaaggaaagaucauucacaucagccaacuguccgggucugcccagcaugucgaggaaugcagcuguuauccccgguacccuggaguucgcugcguguguagagauaauuggaagggcuccaaccggcccauuguggacaucaacgucaaagauuacagcauugugucuuccuauguuugcagcggccucgugggggacaccccucgcaagaaugacucuagcuccucuagccacugucugaaccccaauaacgaggaaggaggccauggggucaaaggaugggcuuucgaugacggcaaugauguguggauggggagaacaaucuccgagaaguuucggagcggauacgagaccuucaaaguuaucgaaggcuggucuaagccgaacuccaaacugcagauuaaucgccaggugaucgucgacagagauaaccggagcggcuauucugggaucuuuuccguggagggaaagagcugcauuaauagauguuucuacgucgaacucauucgcggccggaagcaagagacggaagugugguggacauccaacucuaucguuguguuuugcgggaccagcggaaccuauggcacaggguccuggccugacggcgccgauauuaaucugaugcccaucuga

SEQ ID NO: 206388 - RNA, 1410 nt, Artificial Sequence; identical to SEQ ID NO: 206351
  derived and/or modified CDS sequence (opt5) from neuraminidase__InfluenzaA__AAY98399

SEQ ID NO: 206389 - RNA, 1410 nt, Artificial Sequence; identical to SEQ ID NO: 206351
  derived and/or modified CDS sequence (opt5) from neuraminidase__InfluenzaA__AAY98409

SEQ ID NO: 206390 - RNA, 1410 nt, Artificial Sequence; identical to SEQ ID NO: 206351
  derived and/or modified CDS sequence (opt5) from neuraminidase__InfluenzaA__AAY98773

SEQ ID NO: 206391 - RNA, 1410 nt, Artificial Sequence
  derived and/or modified CDS sequence (opt5) from neuraminidase__InfluenzaA__AAZ32955
augaaccccaaucagaagaucauuaccaucggcagcgugucccugacaauuucuacgaucugcuucuuuaugcaaauugccauccucaucaccacagucacccugcacuucaaacaguacgaguuuaacagcccuccgaauaaccagguuaugcuuugugaacccacaauuaucgagagaaauauuaccgaaaucguguaucugacaaacaccacgauugagaaggaaaucugcccuaaacucgcugaguaccggaauugguccaagccccaguguaacauuaccggguucgccccuuuuucuaaagacaauagcauccgccuguccgcgggaggcgauaucugggugacaagagagcccuaugucucuugcgacccugauaaguguuaccaauucgcucuugggcagggaaccacacugaacaaugugcauagcaacgacauuguucacgaacggaccccguaucgcacgcuccugaugaaugagcugggcgugcccuuucaucucgggacaaagcaggucugcaucgccugguccucuagcuccugucacgauggaaaagccuggcugcaugugugcguuaccggcgacgaugaaaacgcuacagccagcuucauuuacaauggcagacuuguggacucuaucgucuccuggagcaagaaaauucugcggacccaggagucugagugugugugcaucaacgggaccuguacaguggucaugacggauggauccgcuagcggcaaggccgacaccaaaauccucuuuauugaagaggggaagaucguucacacauccacccugucuggaagcgcgcaacacguggaagagugcuccugcuauccucgcuaccccggcgugagaugugucugccgggauaacuggaaggggagcaaucgcccuauuguggacaucaacauuaaagauuacucuaucguuuccagcuauguguguucuggacuugucggcgacacacccagaaagaaugacagcuccucuagcucccauugccuggauccgaacaaugaagagggcgggcacggagugaaaggcugggccuucgacgaugggaacgacguuuggaugggacggaccaucagcgagaagcuccgcucuggcuacgaaacguuuaaagugauugaggggugguccaauccuaacagcaagcugcagaucaauagacaggucauuguggaucggggaaaccgcucuggcuauuccggcaucuucagcgucgaagggaaauccuguauuaauagaugcuuuuacguggagcugauccggggaagaaagcaggaaacagagguucucuggaccucuaacagcauuguggucuucuguggcaccuccgggacauauggaaccggcucuuggcccgacggggcugauaucaaucugaugccuaucuga

SEQ ID NO: 206392 - RNA, 1344 nt, Artificial Sequence
  derived and/or modified CDS sequence (opt5) from neuraminidase__InfluenzaA__AAZ32957
augaaccccaaucagaagaucauuaccaucggcagcgugucccugacaauuucuacgaucugcuucuuuaugcaaauugccauccucaucaccacagucacccugauugagagaaacaucacagaaauuguuuaccuuaccaauacaaccaucgagaaagaaauuuguccuaagcuggcugaguaucggaacuggagcaaaccgcagugcaauaucacgggguucgcccccuuuuccaaggacaacucuauucgccucagcgcgggaggcgauaucugggugaccagagaaccuuacguguccugugaccccgauaaaugcuaucaguucgcucuggggcagggaacaacccuuaauaacguccacucuaaugacacagugcaugaucggaccccuuaccgcacgcugcucaugaacgagcugggcguucccuuucaccuggggacaaagcaaguguguaucgccuggagcuccagcucuugccaugacggaaaggccuggcuccacgucugugugaccggcgaugacgagaaugcuacagccuccuucauuuauaacggcagacugguugauagcaucgugucuugguccaaaaagauucuucggacccaggaaagcgagugcgucuguaucaaugggaccugcacaguggugaugacggacggaaacgcuucuggcaaagccgauaccaagauucuguuuaucgaagaggggaaaaucguccauacauccacccucagcggauccgcgcagcacguugaggaauguucuugcuacccucgcuauccgggcgugagaugcgugugucgggacaauuggaaggggagcaaccgccccauugucgauaucaacauuaaggacuacuccaucgugagcucuuacguuugcuccggacuggugggcgacacaccucggaaaaaugauagcucuagcuccucucacugucuugaccccaacaaugaggaaggcgggcauggagucaagggcugggccuucgaugacgggaacgauguguggaugggaagaaccauuagcgagaaacugcgcuccggcuaugaaacguuuaagguuaucgagggguggagcaauccuaacucuaaacuccagaucaauagacaagugauugucgaccggggaaaccgcuccggcuacagcggcaucuucucuguggaggggaaguccugcauuaauagauguuuuuaugucgaacugauccggggaagaaaacaggagacagaagugcuguggaccagcaacuccauuguuguguucugcggcaccucugggacauacggaaccggcagcuggcccgauggggcugacaucaaucucaugccgauuuga

SEQ ID NO: 206393 - RNA, 1344 nt, Artificial Sequence; identical to SEQ ID NO: 206392
  derived and/or modified CDS sequence (opt5) from neuraminidase__InfluenzaA__AAZ32958

SEQ ID NO: 206394 - RNA, 1344 nt, Artificial Sequence; identical to SEQ ID NO: 206392
  derived and/or modified CDS sequence (opt5) from neuraminidase__InfluenzaA__AAZ32959

SEQ ID NO: 206395 - RNA, 1410 nt, Artificial Sequence; identical to SEQ ID NO: 206356
  derived and/or modified CDS sequence (opt5) from neuraminidase__InfluenzaA__AAZ38465

SEQ ID NO: 206396 - RNA, 1410 nt, Artificial Sequence; identical to SEQ ID NO: 206356
  derived and/or modified CDS sequence (opt5) from neuraminidase__InfluenzaA__AAZ38476

SEQ ID NO: 206397 - RNA, 1410 nt, Artificial Sequence
  derived and/or modified CDS sequence (opt5) from neuraminidase__InfluenzaA__AAZ38487
augaaccccaaucagaagaucauuaccaucggcagcgugucccugacaauugccacgaucugcuuccucaugcaaauugcuauccuggucaccacaguuacccuucacuuuaaacaguacgaguguaacucucugccuaauaaccaggugaugcucugcgaaccgacaauccuggagagaaauauuaccgaaaucguguaucuuacaaacaccacgauugagaaggaaaucugucccaaacuggccgaguaccggaauuggagcaagccucagugcaaaauuaccggguucgcgcccuuuuccaaggacaacucuauccgccucagcgcuggaggcgauauuugggucacaagagagccuuauguguccugugaccccgauaagugcuaccaauucgcccuggggcagggaaccacacugaauaaccggcauucuaaugacaccguucacgaucgcacgccuuauagaacacuccugaugaacgaacuuggcgugccguuucaucuggggaccaaacaggucuguaucgccuggagcuccagcucuugccacgacggaaaggcuuggcuccauguguguguuacaggccacgaugagaaugccaccgcuuccuucaucuacggcgggcggcugguggacagcauuggaucuugguccaaaaagauccuucgcacccaggaaagcgagugcgucuguauuaacggcacaugcacgguggugaugaccgaugggucugccuccggcagagcggacacaaaaauccuguuuauugaggaaggaaagaucauccacauuagccaacucuccgggucugcccagcaugucgaggaaugcagcuguuauccccgguacccuggaguucgcugcguguguagagauaauuggaagggcuccaaccggcccaucguggacauuaacgucaaagauuacagcaucgugucuuccuauguuugcagcggccuggugggggacaccccucgcaagaaugacucuagcuccucuagcaacugucugaaucccaacaaugaggaaggaggccacggggucaaaggaugggcuuucgaugacggcaacgauguguggauggggagaacaauuuccgagaaguuucggagcggauacgagaccuucaaaguuaucgaaggcuggucuaagccuaauuccaaacuccagaucaaccgccaggugauugucgacagagauaaucggagcggcuauucugggaucuuuuccguggagggaaagagcugcauuaacagauguuucuacgucgaacugauccgcggccggaagcaagagacggaagugugguggacauccaauucuauuguuguguuuugcgggaccagcggaaccuauggcacaggguccuggccggacggcgccgauaucaaccuuaugcccauuuga

SEQ ID NO: 206398 - RNA, 1410 nt, Artificial Sequence
  derived and/or modified CDS sequence (opt5) from neuraminidase__InfluenzaA__AAZ38509
augaaccccaaucagaagaucauuaccaucggcagcgugucccugacaauuucuacgaucugcuucuuuaugcaaauugccauccucaucaccacagucacccugcacuucaaacaguacgaguuuaacagcccuccgaauaaccagguuaugcuuugugaacccacaauuaucgagagaaauauuaccgaaaucguguaucugacaaacaccacgauugagaaggaaaucugcccuaaacucgcugaguaccggaauugguccaagccccagugugacauuaccggguucgccccuuuuucuaaagauaacagcauccgccuguccgcgggaggcgacaucugggugacaagagagcccuaugucucuugcgauccugacaaguguuaccaauucgcucuugggcagggaaccacacugaauaacgugcauagcaaugauaccguucacgaccggacgccguaucgcacacuccugaugaacgaacugggcgugcccuuucaucucgggaccaagcaggucugcauugccugguccucuagcuccugucacgauggaaaagccuggcugcaugugugcguuacaggcgacgauaagaaugcuaccgccagcuucaucuacaacggcagacuuguggacucuauugucuccuggagcaaagagauccugcggacccaggaaucugagugugugugcauuaaugggacauguacgguggucaugaccgauggauccgcuagcggcaaggccgacacaaaaauccucuuuaucgaggaagggaagauuguucacaccuccacacugucuggaagcgcgcaacacguggaggaaugcuccugcuauccucgcuaccccggcgugagaugugucugccgggauaacuggaaggggagcaaccgcccuaucguggacauuaauaucaaagacuacucuauuguuuccagcuauguguguucuggacuugucggcgauacccccagaaagaacgacagcuccucuagcucccauugccuggauccgaauaacgaggaaggcgggcacggagugaaaggcugggccuucgacgaugggaaugacguuuggaugggacggacgaucagcgagaagcuccgcucuggcuacgagacauuuaaagugaucgaagggugguccaacagcaauucuaagcugcagauuaacagacaggucaucguggaucggggaaaucgcuccggcuauagcggcauuuucuccgucgaggggaaaucuuguaucaacagaugcuuuuacguggaacugauucggggaagaaaggaggaaaccgagguucucuggaccagcaauuccaucguggucuucuguggcacaucugggaccuauggaacaggcagcuggccugacggggcugauauuaaccugaugcccaucuga

SEQ ID NO: 206399 - RNA, 1410 nt, Artificial Sequence
  derived and/or modified CDS sequence (opt5) from neuraminidase__InfluenzaA__AAZ38586
augaaccccaaucagaagaucauuaccaucggcagcgugucccugacaauuucuacgaucugcuucuuuaugcaaauugccauccucaucaccacagucacccugcacuucaaacaguacgaguuuaacagcccuccgaauaaccagguuaugcuuugugaacccacaauuaucgagagaaauauuaccgaaaucguguaucugacaaacaccacgauugagaaggaaaucugcccuaaacucgcugaguaccggaauugguccaagccccagugugacauuaccggguucgccccuuuuucuaaagauaacagcauccgccuguccgcgggaggcgacaucugggugacaagagagcccuaugucucuugcgauccugacaaguguuaccaauucgcucuugggcagggaaccacacugaauaacgugcauagcaaugauaccguucacgaccggacgccguaucgcacacuccugaugaacgaacugggcgugcccuuucaucucgggaccaagcaggucugcauugccugguccucuagcuccugucacgauggaaaagccuggcugcaugugugcguuacaggcgacgauaagaaugcuaccgccagcuucaucuacaacggcagacuuguggacucuauugucuccuggagcaaagagauccugcggacccaggaaucugagugugugugcauuaaugggacauguacgguggucaugaccgauggauccgcuagcggcaaggccgacacaaaaauccucuuuaucgaggaagggaagauuguucacaccuccacacugucuggaagcgcgcaacacguggaggaaugcuccugcuauccucgcuaccccggcgugagaugugucugccgggauaacuggaaggggagcaaccgcccuaucguggacauuaauaucaaagacuacucuauuguuuccagcuauguguguucuggacuugucggcgauacccccagaaagaacgacagcuccucuagcucccauugccuggauccgaauaacgaggaaggcgggcacggagugaaaggcugggccuucgacgaugggaaugacguuuggaugggacggacgaucagcgagaagcuccgcucuggcuacgagacauuuaaagugaucgaagggugguccaacccuaauagcaagcugcagauuaacagacaggucaucguggaucggggaaaucgcucuggcuauuccggcauuuucagcgucgaggggaaauccuguaucaacagaugcuuuuacguggaacugauucggggaagaaaggaggaaaccgagguucucuggaccucuaauagcaucguggucuucuguggcacauccgggaccuauggaacaggcucuuggcccgacggggcugauauuaaccugaugccuaucuga

SEQ ID NO: 206400 - RNA, 1410 nt, Artificial Sequence; identical to SEQ ID NO: 206399
  derived and/or modified CDS sequence (opt5) from neuraminidase__InfluenzaA__AAZ38597

SEQ ID NO: 206401 - RNA, 1410 nt, Artificial Sequence
  derived and/or modified CDS sequence (opt5) from neuraminidase__InfluenzaA__AAZ38608
augaaccccaaucagaagaucauuaccaucggcagcgugucccugacaauuucuacgaucugcuucuuuaugcaaauugccauccucaucaccacagucacccugcacuucaaacaguacgaguuuaacagcccuccgaauaaccagguuaugcuuugugaacccacaauuaucgagagaaauauuaccgaaaucguguaucugacaaacaccacgauugagaaggaaaugugcccuaaacucgcugaguaccggaauugguccaagccccagugugacaucaccggguucgccccuuuuucuaaagauaacagcauucgccuguccgcgggaggcgacaucugggugacaagagagcccuaugucucuugcgauccugacaaguguuaccaauucgcucuugggcagggaaccacacugaauaacgugcauagcaaugauaccguucacgaccggacgccguaucgcacacuccugaugaacgaacugggcgugcccuuucaucucgggaccaagcaggucugcaucgccugguccucuagcuccugucacgauggaaaagccuggcugcaugugugcguuacaggcgacgauaagaaugcuaccgccagcuucauuuacaacggcagacuuguggacucuaucgucuccuggagcaaaaagauucugcggacccaggagucugaaugugugugcaucaaugggacauguacgguggucaugaccgauggauccgcuagcggcaaagccgacacaaagauucucuuuaucgaggaggggaagaucauucacaccuccacacugucuggaagcgcgcaacacguugaagagugcuccugcuauccucgcuaccccggcgugagaugugugugccgggauaacuggaaagggagcaaccgcccuaucgucgacauuaauaucaaggacuacucuauuguguccagcuauguuuguucuggacuugugggcgauacccccagaaagaacgacagcuccucuagcucccauugccuggauccgaauaacgaagagggcgggcacggagucaaaggcugggccuucgacgaugggaaugacguguggaugggacggacgaucagcgaaaaacuccgcucuggcuacgagacauuuaagguuaucgaggggugguccaaaccuaacagcaagcugcagauuaauagacaggugaucgucgaucggggaaaccgcucuggcuauuccggcauuuucagcguggaagggaaguccuguaucaauagaugcuuuuacgucgagcugauucggggaagaaaagaagagaccgaagugcucuggaccucuaacagcaucguuguguucuguggcacauccgggaccuauggaacaggcucuuggcccgacggggcugauacgaaucugaugccuauuuga

SEQ ID NO: 206402 - RNA, 1410 nt, Artificial Sequence
  derived and/or modified CDS sequence (opt5) from neuraminidase__InfluenzaA__AAZ38619
augaaccccaaucagaagaucauuaccaucggcagcgugucccugacaauuucuacgaucugcuucuuuaugcaaauugccauccucaucaccacagucacccugcacuucaaacaguacgaguuuaacagcccuccgaauaaccagguuaugcuuugugaacccacaauuaucgagagaaauauuaccgaaaucguguaucugacaaacaccacgauugagaaggaaaugugcccuaaacucgcugaguaccggaauugguccaagccccagugugacaucaccggguucgccccuuuuucuaaagauaacagcauucgccuguccgcgggaggcgacaucugggugacaagagagcccuaugucucuugcgauccugacaaguguuaccaauucgcucuugggcagggaaccacacugaauaacgugcauagcaaugauaccguucacgaccggacgccguaucgcacacuccugaugaacgaacugggcgugcccuuucaucucgggaccaagcaggucugcaucgccugguccucuagcuccugucacgauggaaaagccuggcugcaugugugcguuacaggcgacgauaagaaugcuaccgccagcuucauuuacaacggcagacuuguggacucuaucgucuccuggagcaaaaagauucugcggacccaggagucugaaugugugugcaucaaugggacauguacgguggucaugaccgauggauccgcuagcggcaaagccgacacaaagauucucuuuaucgaggaggggaagaucauucacaccuccacacugucuggaagcgcgcaacacguugaagagugcuccugcuauccucgcuaccccggcgugagaugugugugccgggauaacuggaaagggagcaaccgcccuaucgucgacauuaauaucaaggacuacucuauuguguccagcuauguuuguucuggacuugugggcgauacccccagaaagaacgacagcuccucuagcucccauugccuggauccgaauaacgaagagggcgggcacggagucaaaggcugggccuucgacgaugggaaugacguguggaugggacggacgaucagcgaaaaacuccgcucuggcuacgagacauuuaagguuaucgaggggugguccaaaccuaacagcaagcugcagauuaauagacaggugaucgucgaucggggaaaccgcucuggcuauuccggcauuuucagcguggaagggaaguccuguaucaauagaugcuuuuacgucgagcugauucggggaagaaaagaagagaccgaagugcucuggaccucuaacagcaucguuguguucuguggcacauccgggaccuauggaacaggcucuuggcccgacggggcugauauuaaucugaugccuaucuga

SEQ ID NO: 206403 - RNA, 1410 nt, Artificial Sequence; identical to SEQ ID NO: 206399
  derived and/or modified CDS sequence (opt5) from neuraminidase__InfluenzaA__AAZ38641

SEQ ID NO: 206404 - RNA, 1410 nt, Artificial Sequence; identical to SEQ ID NO: 206399
  derived and/or modified CDS sequence (opt5) from neuraminidase__InfluenzaA__AAZ38653

SEQ ID NO: 206405 - RNA, 1410 nt, Artificial Sequence; identical to SEQ ID NO: 206190
  derived and/or modified CDS sequence (opt5) from neuraminidase__InfluenzaA__AAZ43386

SEQ ID NO: 206406 - RNA, 1410 nt, Artificial Sequence
  derived and/or modified CDS sequence (opt5) from neuraminidase__InfluenzaA__AAZ43397
augaaccccaaucagaagaucauuaccaucggcagcgugucccugacaauugccacgaucugcuuccucaugcaaauugcuauccuggucaccacaguuacccuucacuuuaaacagcaugaguguaacucuccuccgaauaaccaggugaugcugugcgaacccacaaucauugagagaaauaucaccgaaauuguguaccucacaaacaccacgaucgagcgggaaauuuguccuaagcuggccgaguaucgcaauuggagcaaaccccagugcaacaucaccggguucgcgccuuuuuccaaggacaauucuauuagacuuagcgcuggaggcgauaucugggucacacgggagcccuacguguccugugacccugauaaaugcuaucaauucgcccuggggcagggaaccacacucaacaauggccacucuaacgacaccguucaugaucgcacgccguacagaacacugcugaugaaugaacucggggugcccuuucaccugggaacccggcaggucuguaucgccuggagcuccagcucuugccaugacggcaaggcuuggcuucacguguguguuacaggcgaugacaagaacgccaccgcuuccuucauuuauaaugggcgccugguggauagcaucggaucuugguccaaaaagauucucagaacccaggagagcgaaugcgucuguaucaacggcacaugcacgguggugaugaccgacgggucugccuccggaaaagcggauacaaagauucuguuuaucgaggagggcaaaaucguccacauuagcacccuuuccgggucugcccaacauguugaagagugcagcuguuacccucgguaucccggagugcgcugcguguguagagacaacuggaagggcuccaaucggccuaucgucgauauuaacgugaaggacuacagcaucguuucuuccuacgugugcagcggccuggucggggacacaccccgcaaaaaugauucuagcuccucuagccacugucucgacccgaacaaugaagagggaggccauggggugaagggaugggcuuucgaugacggcaacgauguuuggauggggagaaccauuuccgaaaaacugcggagcggauaugagacguuuaaggugaucgagggcuggucuaaaccuaauuccaagcugcagacaaaccgccaggucaucguggaaagaggcaaucggagcggguacucuggaauuuucuccgucgagggcaaaagcugcaucaacagauguuuuuauguggaacucauucgcgggcggaaggaggaaaccgagguuugguggaccuccaauucuaucguggucuucugcggaacaagcggcaccuacgggacaggcuccuggcccgacggagccgauauuaaccugaugccuaucuga

SEQ ID NO: 206407 - RNA, 1410 nt, Artificial Sequence
  derived and/or modified CDS sequence (opt5) from neuraminidase__InfluenzaA__AAZ43408
augaaccccaaucagaagaucauuaccaucggcagcgugucccugacaauugccacgaucugcuuccucaugcaaauugcuauccuggucaccacaguuacccuucacuuuaaacaguacgaguguaacucuccuccgaauaaccaggugaugcugugcgaacccacaaugaucgagagaaauauuaccgaaaucguguaucucacaaacaccacgauugagaaggaaaucuguccuaaacuggccgaguaccggaauuggagcaagccccagugcaacauuaccggguucgcgccuuuuuccaaagacaauucuauccgccuuagcgcuggaggcgauauuugggucacaagagagcccuauguguccugugacccugauaagugcuaccaauucgcccuggggcagggaaccacacucaacaauggccauucuaacgacaccguucacgaucggacgccguaucgcacacugcugaugaaugaacucggggugcccuuucaucugggaaccaagcaggucuguaucgccuggagcuccagcucuugccacgacggcaaagccuggcuucauguguguguuacaggcgaugacgagaacgcuaccgcuuccuucaucuacaaugggagacugguggauagcauuggaucuugguccaagaaaauccuccggacccaggaaagcgagugcgucuguauuaacggcacaugcacgguggugaugaccgacgggucugccuccggaaaggcggauacaaaaauccuguuuauugaggaaggcaagaucguccacaccagcucccuuucugggagcgcccaacacguugaggaaugcuccuguuauccucgcuaccccggagugagaugcgugugucgggacaacuggaagggcagcaaucgcccuaucgucgauauuaacgugaaagacuacucuaucguuuccagcuaugugugcucuggccuggucggggacacacccagaaagaaugauagcuccucuagcucccauugucucgacccgaacaaugaggaaggaggccacggggugaaaggaugggcuuucgaugacggcaacgauguuuggauggggcggaccauuagcgagaagcugcgcucuggauacgagacguuuaaagugaucgaaggcugguccaagccuaauagcaaacugcagauuaacagacaggucaucguggaccggggcaaucgcucuggguauuccggaaucuucagcgucgaguccaagucuugcauuaacagauguuuuuacguggaacucauccggggcagaaagcaggagacagaaguucuguggaccagcaauuccauuguggucuucugcgggaccucuggaacauauggcaccgggagcuggcccgauggcgccgacaucaaccuuaugccuauuuga

SEQ ID NO: 206408 - RNA, 1410 nt, Artificial Sequence
  derived and/or modified CDS sequence (opt5) from neuraminidase__InfluenzaA__AAZ74355
augaaccccaaucagaagaucauuaccaucggcagcgugucccugacaauugccacgaucugcuuccucaugcaaauugcuauccuggucaccacaguuacccuucacuuuaaacagcaugaguguaacucuccuccgaauaaccaggccaugcccugcgaaccugcgaucauugagagaaauacaaccgaaacaguguaccugaccaacacgaccaucgagaaggaaauuugucccaaacucgcugaguaucggaauuggagcaagccucagugcaacaucacaggguucgcccccuuuuccaaagacaauucuauucgccugagcgccggaggcgauaucugggugaccagagagccuuacgucuccugugacccggauaagugcuaucaauucgcucuugggcagggaacaacccugaacaauggccacucuaacgacacggugcaugaucggacacccuaccgcacccuccugaugaaugaacuggggguuccuuuucaccucggaacaagacagguguguauugccuggagcuccagcucuugccaugacggcaaggcuuggcugcacgucugugugaccggcgaugacgagaacgccaccgcguccuucaucuauaaugggcggcuuguugauagcaucggaucuugguccaaaaagauucugcgcacacaggaaagcgagugcguguguaucaacggcacgugcaccgucgugaugacagacgggucugccuccggaaaagcugauaccaagauucucuuuaucgaggaaggcaaaauugugcacaucagcacacuguccgggucugcccaacaugucgaggaaugcagcuguuaccccagauauccuggaguucggugcgugugucgcgacaacuggaagggcuccaauagacccaucguggauauuaacgucaaggacuacagcaucgugucuuccuacguuugcagcggccuugugggggacaccccgcggaaaaaugauucuuucagcuccucucacugucuggacccuaacaaugaggaaggaggccauggggucaagggaugggcuuuugaugacggcaacgauguguggauggggcgcacgauuagcgagaaacucagauccggauaugagacauucaagguuaucgaaggcuggagcaaacccaauucuaagcugcagauuaaccgccaggugaucgucgagcggggcaauagauccggguacagcggaaucuuuucuguggaaggcaaauccugcauuaaccgguguuucuaugucgagcugaucagagggcgcaaggaagagaccgaggugugguggaccagcaauuccauuguuguguuuugcggaacaucuggcaccuacgggacaggcagcuggccugacggagccgauaucaaccucaugcccauuuga

SEQ ID NO: 206409 - RNA, 1410 nt, Artificial Sequence
  derived and/or modified CDS sequence (opt5) from neuraminidase__InfluenzaA__AAZ74366
augaaccccaaucagaagaucauuaccaucggcagcgugucccugacaauugccacgaucugcuuccucaugcaaauugcuauccuggucaccacaguuacccuucacuuuaaacaguacgaguguaacucucugccuaauaaccaggugaugcucugcgaaccgacaaucauugagagaaauaucaccgaaauuguguaucugacaaacaccacgaucgagaaggaaauuugucccaaacuugccgaguaccggaauuggagcaagccucagugcaaaaucaccggguucgcgcccuuuuccaaggacaacucuauucgccugagcgcuggaggcgauaucugggucacaagagagccuuauguguccugugaccccgauaagugcuaccaauucgcccucgggcagggaaccacacugaauaaccggcauucuaaugacaccguucacgaucgcacgccuuauagaacacugcucaugaacgaacugggcgugccguuucaucuugggaccaaacaggucuguaucgccuggagcuccagcucuugccacgacggaaaggcuuggcugcauguguguguuacaggccacgaugagaaugccaccgcuuccuucauuuacgacggccggcucguggauagcaucgggucuugguccaaaaagauucugcgcacccaggaaagcgagugcgucuguaucaacggaacaugcacgguggugaugaccgacggcucugccuccgggaaagcggauacaaagauucuuuuuaucgaggaaggaaagaucauucacaucagccaacuguccggcucugcccagcaugucgaggaaugcagcuguuaucccagauacccugggguucggugcgugugucgcgacaauuggaaaggauccaacagacccauuguggauaucaacgucaaggacuacagcauugugucuuccuauguuugcagcggccucgugggcgacaccccucggaaaaaugauucuagcuccucuagccacugucugaaccccaauaacgaggaagggggacauggcgucaaggggugggcuuucgacgauggaaaugacguguggaugggccgcacaaucuccgagaaauuuagaagcggguacgagaccuucaagguuaucgaaggauggucuaaaccgaacuccaagcugcagauuaaucgccaggugaucgucgauaaggacaaccggagcggcuauucuggcaucuuuuccguggaggggaaaagcugcauuaauagauguuucuacgucgaacucauucggggaagaaagcaagagacggaagugugguggacauccaacucuaucguuguguuuugcggcaccagcgggaccuauggaacaggcuccuggccugauggggccgacauuaaucugaugcccaucuga

SEQ ID NO: 206410 - RNA, 1410 nt, Artificial Sequence
  derived and/or modified CDS sequence (opt5) from neuraminidase__InfluenzaA__AAZ74377
augaaccccaaucagaagaucauuaccaucggcagcgugucccugacaauugccacgaucugcuuccucacccaaauugcuauccuggucacaaccguuacacuucacuuuaaacaguacgaguguaacucuccuccgaauaaccaggugaugcugugcgaacccaccaucauugagagaaauaucacagaaauuguguaucucaccaacacgaccaucgagaaggaaauuuguccuaaacuggccgaguaccggaauuggagcaagccccagugcaacaucacaggguucgcgccuuuuuccaaagacaauucuauucgccuuagcgcuggaggcgauaucugggucaccagagagcccuauguguccugugacccugauaagugcuaccaauucgcccuggggcagggaacaacccucaacaauggccauucuaacgacacgguucacgaucggacaccguaucgcacccugcugaugaaugaacucggggugcccuuucaucugggaacaaagcaggucuguaucgccuggagcuccagcucuugccacgacggcaaggcuuggcuucauguguguguuaccggcgaugacaaaaacgccaccgcuuccuucauuuacaaugggagacugguggauagcaucggaucuugguccaaaaagauucuccggacacaggagagcgaaugcgucuguaucaacggcacgugcaccguggugaugacagacgggucugccuccggaaaagcggauaccaagauucuguuuaucgaggagggcaagaucguccacacaagccuucuguccgggucugcccaacacguugaagagugcagcuguuauccucgcuaccccggagugagaugcgugugucgggacaacuggaaaggcuccaaucgcccuauugucgauaucaacgugaaggacuacagcauuguuucuuccuaugugugcagcggccucgucggggacacccccagaaagaaugauucuagcuccucuagccauugucuggacccgaacaaugaagagggaggccacggggugaaaggaugggcuuucgaugacggcaacgauguuuggauggggcggacgauccgcgaaaaacugagauccggauacgagacauuuaaggugauugagggcuggagcaaaccuaauucuaagcuccagaucaaccggcaggucaucguggaccgcgauaauagauccggcuauagcgggauuuucucugucgaaggaaaguccugcaucaaccgguguuuuuacguggagcugauuagaggccgcaaucaggaaaccgagguucuuuggaccagcaacuccaucguggucuucugcgggacaucuggaaccuauggcacagggagcuggcccgacggcgccgauauuaaucugaugccuaucuga

SEQ ID NO: 206411 - RNA, 1410 nt, Artificial Sequence
  derived and/or modified CDS sequence (opt5) from neuraminidase__InfluenzaA__AAZ74400
augaaccccaaucagaagaucauuaccaucggcagcgugucccugacaauugccacgaucugcuuccucaugcaaauugcuauccuggucaccacaguuacccuucacuuuaaacaguacgaguguaacucuccuccgaauaaccaggugaugcugugcgaacccacaaucauugagagaaauaucaccgaaauuguguaucucacaaacaccacgaucgagaaggaaauuuguccuaaacuggccgaguaccggaauuggagcaagccccagugcaaaaucaccggguucgcgccuuuuuccaaggacaacucuauucgccuuagcgcuggaggcgauaucugggucacaagagagcccuauguguccugugacccugauaagugcuaccaauucgcccuggggcagggaaccacacucaauaaccggcauucuaaugacaccguucacgaucgcacgccguauagaacacugcugaugaacgaacucggcgugcccuuucaucuggggaccaaacaggucuguaucgccuggagcuccagcucuugccacgacggaaaggcuuggcuucauguguguguuacaggccacgaugagaaugccaccgcuucccugauuuacgacggccggcucguggauagcaucgggucuugguccaaaaagauucugcgcacccaggaaagcgagugcgucuguaucaacggaacaugcacgguggugaugaccgacggcucugccuccgggagagcggauacaaaaauucuuuucaucgaggaaggaaagaucguccacaccagcaagcuguccggcucugcccaacauguugaggaaugcagcuguuauccucgguaccccggggugcgcugcguguguagagacaauuggaaaggauccaaccggccuauugucgauaucaacgugaaggacuacagcauuguuucuuccuaugugugcagcggccucgucggcgacacaccccgcaaaaaugauucuagcuccucuagccacugucuggacccgaacaaugaggaagggggacauggcgugaaggggugggcuuuugaugacggaaacgauguuuggaugggcagaaccaucuccgagaaaagccggucuggguacgagacguucaaggugauugaaggaugguccaaaccuaauagcaagcugcagaucaaccgccaggucaucguggagagaggcaauaugucuggcuauuccgggauuuuuagcgucgaaggaaaguccugcaucaaccgguguuucuacguggagcucauuagaggccgcaaacaggaaacagagguuugguggaccucuaauagcaucguggucuuuugcgggaccuccggaacauauggcaccgggucuuggcccgacggcgccgauauuaaccugaugccuaucuga

SEQ ID NO: 206412 - RNA, 1410 nt, Artificial Sequence; identical to SEQ ID NO: 206351
  derived and/or modified CDS sequence (opt5) from neuraminidase__InfluenzaA__AAZ74411

SEQ ID NO: 206413 - RNA, 1410 nt, Artificial Sequence
  derived and/or modified CDS sequence (opt5) from neuraminidase__InfluenzaA__AAZ74422
augaaccccaaucagaagaucauuaccaucggcagcgugucccugacaauuucuacgaucugcuucuuuaugcaaauugccauccucaucaccacagucacccugcacuucaaacaguacgaguuuaacagcccuccgaauaaccagguuaugcuuugugaacccacaauuaucgagagaaauauuaccgaaaucguguaucugacaaacaccacgauugagaaggaaaucugcccuaaacccgcugaguaccggaauugguccaagccucagugugacauuaccggguucgcccccuuuucuaaagauaacagcauccgccucuccgcgggaggcgacaucugggugacaagagagccuuaugucucuugcgauccggacaaguguuaccaauucgcucuggggcagggaaccacacuuaauaacgugcauagcaaugauaccguucacgaccggacgcccuaucgcacacugcucaugaacgaacugggcgugccuuuucaucuggggaccaagcaggucugcauugccugguccucuagcuccugucacgauggaaaagccuggcuccaugugugcguuacaggcgacgauaagaaugcuaccgccagcuucaucuacaacggcagacugguggacucuauugucuccuggagcaaagagauccuucggacccaggaaucugagugugugugcauuaaugggacaugugcuguggucaugacggauggauccgccagcggcaaggcggacaccaaaauccuguuuaucgaggaagggaagauuguucacacauccaagcucucuggaagcgcccaacacguggaggaaugcuccugcuauccccgcuacccuggcaucagaugugugugccgggauaacuggaaagggagcaaccgccccauugucgacaucaauauuaaggacuacucuaucguguccagcuauguuuguucuggacuggugggcgauaccccgcggaaaaacgacagcuccucuagcucccauugccuugauccuaauaacgaggaaggcgggcacggagucaagggcugggcuuucgacgaugggaaugacguguggaugggaagaacaaucagcgagaaacugcgcucuggcuacgagaccuuuaagguuauugaagggugguccaaccccaauagcaaacuccagaucaacagacaggugauugucgaucggggaaaucgcucuggcuauuccggcaucuucagcguggaggggaaguccuguauuaacagaugcuuuuacgucgaacugauccggggaagaaaggaggaaacggaggugcuguggacaucuaauagcauuguuguguucuguggcaccuccgggaccuauggaacaggcucuuggccugacggggccgauaucaaccucaugcccaucuga

SEQ ID NO: 206414 - RNA, 1410 nt, Artificial Sequence; identical to SEQ ID NO: 206399
  derived and/or modified CDS sequence (opt5) from neuraminidase__InfluenzaA__AAZ74444

SEQ ID NO: 206415 - RNA, 1410 nt, Artificial Sequence
  derived and/or modified CDS sequence (opt5) from neuraminidase__InfluenzaA__AAZ74455
augaaccccaaucagaagaucauuaccaucggcagcgugucccugacaauuucuacgaucugcuucuuuaugcaaauugccauccucaucaccacagucacccugcacuucaaacaguacgaguuuaacagcccuccgaauaaccagguuaugcuuugugaacccacaauuaucgagagaaauauuaccgaaaucguguaucugacaaacaccacgauugagaaggaaaucugcccuaaacucgcugaguaccggaauugguccaagccccagugugacauuaccggguucgccccuuuuucuaaagauaacagcauccgccuguccgcgggaggcgacaucugggugacaagagagcccuaugucucuugcgauccugacaaguguuaccaauucgcucuugggcagggaaccacacugaauaacgugcauagcaaugauaccguucacgaccggacgccguaucgcacacuccugaugaacgaacugggcgugcccuuucaucucgggaccaagcaggucugcauugccugguccucuagcuccugucacgauggaaaagccuggcugcaugugugcguuacaggcgacgauaagaaugcuaccgccagcuucaucuacaacggcagacuuguggacucuauugucuccuggagcaaagauauccugcggacccaggagucugaaugugugugcauuaaugggacauguacgguggucaugaccgacggauccgcuagcggcaaggccgauacaaaaauccucuuuaucgaggaggggaagauuguucacaccuccacacugucuggaagcgcgcaacacguggaagagugcuccugcuauccucgcuaccccggcgugagaugugucugccgggacaacuggaaggggagcaaccgcccuaucguggacauuaauaucaaagauuacucuauuguuuccagcuauguguguucuggacuugucggcgacacccccagaaagaacgauagcuccucuagcucccauugccuggacccgaauaacgaagagggcgggcacggagugaaaggcugggccuucgaugacgggaaugauguuuggaugggacggacgaucagcgaaaagcuccgccugggcuacgagacauuuaaagugaucgagggguggucuaacccuaauuccaagcugcagauuaacagacaggucaucguggaacggggaaaucgcagcggcuauucuggcauuuucuccgucgaggggaaaagcuguaucaacagaugcuuuuacguggaacucauucggggaagaaaggaggaaaccgagguucuguggaccuccaauucuaucguggucuucuguggcacaagcgggaccuauggaacaggcuccuggcccgacggggcugauauuaaccuuaugccuaucuga

SEQ ID NO: 206416 - RNA, 1410 nt, Artificial Sequence; identical to SEQ ID NO: 206399
  derived and/or modified CDS sequence (opt5) from neuraminidase__InfluenzaA__AAZ74477

SEQ ID NO: 206417 - RNA, 1410 nt, Artificial Sequence; identical to SEQ ID NO: 206415
  derived and/or modified CDS sequence (opt5) from neuraminidase__InfluenzaA__AAZ74488

SEQ ID NO: 206418 - RNA, 1410 nt, Artificial Sequence
  derived and/or modified CDS sequence (opt5) from neuraminidase__InfluenzaA__AAZ74499
augaaccccaaucagaagaucauuaccaucggcagcgugucccugacaauuucuacgaucugcuucuuuaugcaaauugccauccucaucaccacagucacccugcacuucaaacaguacgaguuuaacagcccuccgaauaaccagguuaugcuuugugaacccacaauuaucgagagaaauauuaccgaaaucguguaucugacaaacaccacgauugagaaggaaaucugcccuaaacucgcugaguaccggaauugguccaagccccagugugacauuaccggguucgccccuuuuucuaaagauaacagcauccgccuguccgcgggaggcgacaucugggugacaagagagcccuaugucucuugcgauccugacaaguguuaccaauucgcucuugggcagggaaccacacugaauaacgugcauagcaaugauaccguucacgaccggacgccguaucgcacacuccugaugaacgaacugggcgugcccuuucaucucgggaccaagcaggucugcauugccugguccucuagcuccugucacgauggaaaagccuggcugcaugugugcguuacaggcgacgauaagaaugcuaccgccagcuucaucuacaacggcagacuuguggacucuauugucuccuggagcaaagagauccugcggacccaggaaucugagugugugugcauuaaugggacaugugcuguggucaugacggauggauccgccagcggcaaggcggacaccaaaauccucuuuaucgaggaagggaagauuguucacacauccaagcugucuggaagcgcccaacacguggaggaaugcuccugcuauccucgcuaccccggcaucagaugugugugccgggauaacuggaaagggagcaaccgcccuauugucgacaucaauauuaaggacuacucuaucguguccagcuauguuuguucuggacuugugggcgauacccccagaaagaacgacagcuccucuagcucccauugccuggauccgaauaacgaggaaggcgggcacggagucaaaggcugggcuuucgacgaugggaaugacguguggaugggacggacaaucagcgagaaacuccgcucuggcuacgagaccuuuaagguuauugaagggugguccaacccuaauagcaaacugcagaucaacagacaggugauugucgaucggggaaaucgcucuggcuauuccggcaucuucagcguggaggggaaguccuguauuaacagaugcuuuuacgucgaacugauccggggaagaaaggaggaaacggaggugcucuggacaucuaauagcauuguuguguucuguggcaccuccgggaccuauggaacaggcucuuggcccgacggggccgauaucaaccugaugccuaucuga

SEQ ID NO: 206419 - RNA, 1410 nt, Artificial Sequence; identical to SEQ ID NO: 206415
  derived and/or modified CDS sequence (opt5) from neuraminidase__InfluenzaA__AAZ74510

SEQ ID NO: 206420 - RNA, 1410 nt, Artificial Sequence; identical to SEQ ID NO: 206418
  derived and/or modified CDS sequence (opt5) from neuraminidase__InfluenzaA__AAZ74521

SEQ ID NO: 206421 - RNA, 1410 nt, Artificial Sequence
  derived and/or modified CDS sequence (opt5) from neuraminidase__InfluenzaA__AAZ74532
augaaccccaaucagaagaucauuaccaucggcagcgugucccugacaauuucuacgaucugcuucuuuaugcaaauugccauccucaucaccacagucacccugcacuucaaacaguacgaguuuaacagcccuccgaauaaccagguuaugcuuugugaacccacaauuaucgagagaaauauuaccgaaaucguguaucugacaaacaccacgauugagaaggaaaucugcccuaaacucgcugaguaccggaauugguccaagccccagugugacauuaccggguucgccccuuuuucuaaagauaacagcauccgccuguccgcgggaggcgacaucugggugacaagagagcccuaugucucuugcgauccugacaaguguuaccaauucgcucuugggcagggaaccacacugaauaacgugcauagcaaugauaccguucacgaccggacgccguaucgcacacuccugaugaacgaacugggcgugcccuuucaucucgggaccaagcaggucugcauugccugguccucuagcuccugucacgauggaaaagccuggcugcaugugugcguuacaggcgacgauaagaaugcuaccgccagcuucaucuacaacggcagacuuguggacucuauugucuccuggagcaaagauauccugcggacccaggagucugaaugugugugcauuaaugggacauguacgguggucaugaccgacggauccgcuagcggcaaggccgauacaaaaauccucuuuaucgaggaggggaagauuguucacaccuccacacugucuggaaacgcgcaacacguggaagagugcagcugcuauccucgcuaccccggcgugagaugugucugccgggacaacuggaagggguccaaucgcccuaucguggacauuaacaucaaagauuacagcauuguuucuuccuauguguguagcggacuugucggcgacacccccagaaagaaugauucuagcuccucuagccauugccuggacccgaacaaugaagagggcgggcacggagugaaaggcugggccuucgaugacgggaacgauguuuggaugggacggacgaucuccgaaaagcuccgccugggcuacgagacauuuaaagugaucgagggguggagcaauccuaacucuaagcugcagauuaauagacaggucaucguggaacggggaaaccgcuccggcuauagcggcauuuucucugucgaggggaaauccuguaucaauagaugcuuuuacguggaacucauucggggaagaaaggaggaaaccgagguucuguggaccagcaacuccaucguggucuucuguggcacaucugggaccuauggaacaggcagcuggcccgacggggcuaauauuaaccuuaugccuaucuga

SEQ ID NO: 206422 - RNA, 1410 nt, Artificial Sequence; identical to SEQ ID NO: 206399
  derived and/or modified CDS sequence (opt5) from neuraminidase__InfluenzaA__AAZ74543

SEQ ID NO: 206423 - RNA, 1410 nt, Artificial Sequence; identical to SEQ ID NO: 206351
  derived and/or modified CDS sequence (opt5) from neuraminidase__InfluenzaA__AAZ74565

SEQ ID NO: 206424 - RNA, 1410 nt, Artificial Sequence; identical to SEQ ID NO: 206399
  derived and/or modified CDS sequence (opt5) from neuraminidase__InfluenzaA__AAZ74598

SEQ ID NO: 206425 - RNA, 1410 nt, Artificial Sequence
  derived and/or modified CDS sequence (opt5) from neuraminidase__InfluenzaA__AAZ74609
augaaccccaaucagaagaucauuaccaucggcagcgugucccugacaauugccacgaucugcuuccucaugcaaauugcuauccuggucaccacaguuacccuucacuuuaaacaguacgaguguaacucuccuccgaauaaccaggugaugcugugcgaacccaucauuaucgagagaaauauuacagaaaucguguaucucaccaacacaaccauugagaaggaaaucuguccuaaacuggccgaguaccggaauuggagcaagccccagugcaaaauuacgggguucgcgccuuuuuccaaggacaacucuauccgccuuagcgcuggaggcgauaucugggucaccagagagcccuauguguccugugacccugauaagugcuaccaauucgcccuggggcagggaacaacccucaauaaccggcauucuaaugacacaguucacgaucgcaccccguauagaacgcugcugaugaacgaacucggcgugcccuuucaucuggggacaaaacaggucuguauugccuggagcuccagcucuugccacgacggaaaggcuuggcuucauguguguguuaccggccacgaugagaaugccacagcuuccuucaucuacgacggccggcugguggauagcauuucuuccuggagcaaaaacauccuccgcacccaggaaucugagugcgucuguauuaaugggaccugcacaguggugaugacggacggauccgccagcgagagagcggauaccaagauccuguuuaucgaagagggcaaaauuguccacaucuccccucuuucugggagcgcccaacauguugaagagugcuccuguuauccccgguacccuggagugcgcugcguguguagagacaacuggaagggcagcaaccggcccauugucgauaucaaugugaaggacuacucuauuguuuccagcuaugugugcucugggcuggucggagacacaccgcgcaaaaacgauagcuccucuagcuccuacugucucaauccuaacaaugaagagggcggccacggggugaagggaugggcuuucgacgauggcaacgacguuuggauggggagaaccaucagcgagaaacugcggucuggauaugaaacauuuaaggugaucggcgggugguccaaacccaauagcaagcugcagauuaaccgccaggucaucguggauagaggaaaucggucuggcuacuccggcauuuucagcgucgaggggaaauccugcgugaacagauguuuuuauguugaacucauccgcggacggaagcaggagaccgaagugugguggacgucuaauagcauugucguguucugcggcacauccgggaccuacggaaccggcucuuggccugacggggccgauaucaaccugaugcccauuuga

SEQ ID NO: 206426 - RNA, 1410 nt, Artificial Sequence; identical to SEQ ID NO: 206133
  derived and/or modified CDS sequence (opt5) from neuraminidase__InfluenzaA__AAZ74620

SEQ ID NO: 206427 - RNA, 1410 nt, Artificial Sequence; identical to SEQ ID NO: 206245
  derived and/or modified CDS sequence (opt5) from neuraminidase__InfluenzaA__AAZ79508

SEQ ID NO: 206428 - RNA, 1410 nt, Artificial Sequence
  derived and/or modified CDS sequence (opt5) from neuraminidase__InfluenzaA__AAZ79519
augaaccccaaucagaagaucauuaccaucggcagcgugucccugacaauugccacgaucugcuuccucaugcaaauugcuauccuggucaccacaguuacccuucacuuuaaacaguacgaguguaacucuccuccgaauaaccaggugaugcugugcgaacccacaauccucgagagaaauauuaccgaaaucguguaucugacaaacaccacgauugagaaggaaaucuguccuaaacuugccgaguaccggaauuggagcaagccccagugcaaaauuaccggguucgcgccuuuuuccaaggacaacucuauccgccugagcgcuggaggcgauauuugggucacaagagagcccuauguguccugugacccugauaagugcuaccaauucgcccucgggcagggaaccacacugaauaaccggcauucuaaugacaccguucacgaucgcacgccguauagaacacugcucaugaacgaacugggcgugcccuuucaucuugggaccaaacaggucuguaucgccuggagcuccagcucuugccacgacggaaaggcuuggcugcauguguguguuacaggccacgauaaaaaugccaccgcuuccuucaucuacggcgggcggcucguggacagcauuggaucuugguccaagaaaauccugcgcacccaggagagcgaaugcgucuguauuaacggcacaugcacgguggugaugaccgaugggucugccuccggcagagcggacacaaagauccuuuuuauugaggagggaaagaucauccacauuagccaacuguccgggucugcccagcaugucgaagagugcagcuguuauccucgguaccccggaguucgcugcguguguagagauaauuggaaaggcuccaaccggccuaucguggacauuaacgucaaggauuacagcaucgugucuuccuauguuugcagcggccucgugggggacacaccccgcaaaaaugacucuagcuccucuagccacugucugaacccgaauaacgaagagggaggccauggggucaagggaugggcuuucgaugacggcaaugauguguggauggggagaaccauuuccgaaaaauuucggagcggauacgagaccuucaagguuaucgagggcuggucucgcccuaacuccaaacugcagaucaauagacaggugauugucgaccgggauaacagaagcggcuauucugggaucuuuuccguggaaggaaagagcugcauuaaucgcuguuucuacgucgagcucauccggggcagaaagcaagaaacggaggugugguggacauccaacucuauuguuguguuuugcgggaccagcggaaccuauggcacaggguccuggcccgacggcgccgauaucaaucugaugccuauuuga

SEQ ID NO: 206429 - RNA, 1410 nt, Artificial Sequence; identical to SEQ ID NO: 206209
  derived and/or modified CDS sequence (opt5) from neuraminidase__InfluenzaA__AAZ79530

SEQ ID NO: 206430 - RNA, 1410 nt, Artificial Sequence
  derived and/or modified CDS sequence (opt5) from neuraminidase__InfluenzaA__AAZ79552
augaaccccaaucagaagaucauuaccaucggcagcgugucccugacaauugccacgaucugcuuccucaugcaaauugcuauccuggucaccacaguuacccuucacuuuaaacaguacgaguguaacucuccuccgaauaaccaggugaugcugugcgaacccacaaucauugagagaaauaucaccgaaauuguguaucucacaaacaccacgaucgagaaggaaauuuguccuaaacuggccgaguaccggaauuggagcaagccccagugcaacaucaccggguucgcgccuuuuuccaaagacaauucuauucgccuuagcgcuggaggcgauaucugggucacaagagagcccuauguguccugugacccugauaagugcuaccaauucgcccuggggcagggaaccacacucaacaauggccauucuaacgacaccguucacgaucggacgccgcaucgcacacugcugaugaaugaacucggggugcccuuucaccugggaaccaagcaggucuguaucgccuggagcuccagcucuugccaugacggcaaggcuuggcuucacguguguguuacaggcgaugacaaaaacgccaccgcuuccuucauuuauaaugggagacugguggauagcaucggaucuugguccaaaaagauucuccggacccaggagagcgaaugcgucuguaucaacggcacaugcacgguggugaugaccgacgggucugccuccggaaaagcggauacaaagauucuguuuaucgaggagggcaagaucguccacaccagccuucuguccgggucugcccaacauguugaagagugcagcuguuacccucgcuaucccggagugagaugcgugugucgggacaacuggaaaggcuccaaucgcccuauugucgauaucaacgugaaggacuacagcauuguuucuuccuacgugugcagcggccucgucggggacacaccccggaaaaaugauucuagcuccucuagccacugucuggacccgaacaaugaagagggaggccauggggugaagggaugggcuuucgaugacggcaacgauguuuggauggggagaaccaucuccgaaaaacugcgcagcggauaugagacguuuaaggugauugagggcuggucuaaaccuaauuccaagcuccagaucaacagacaggucaucguggaccgggauaaucgcagcggcuacucugggauuuucuccgucgaaggaaagagcugcaucaacagauguuuuuauguggagcugauucggggcagaaaucaggaaacagagguucuuuggaccuccaacucuaucguggucuucugcgggaccagcggaacauacggcaccggguccuggcccgacggcgccgauauuaaucugaugccuaucuga

SEQ ID NO: 206431 - RNA, 1410 nt, Artificial Sequence; identical to SEQ ID NO: 206351
  derived and/or modified CDS sequence (opt5) from neuraminidase__InfluenzaA__AAZ79563

SEQ ID NO: 206432 - RNA, 1410 nt, Artificial Sequence; identical to SEQ ID NO: 206351
  derived and/or modified CDS sequence (opt5) from neuraminidase__InfluenzaA__AAZ79574

SEQ ID NO: 206433 - RNA, 1410 nt, Artificial Sequence; identical to SEQ ID NO: 206351
  derived and/or modified CDS sequence (opt5) from neuraminidase__InfluenzaA__AAZ79585

SEQ ID NO: 206434 - RNA, 1410 nt, Artificial Sequence; identical to SEQ ID NO: 206418
  derived and/or modified CDS sequence (opt5) from neuraminidase__InfluenzaA__AAZ79618

SEQ ID NO: 206435 - RNA, 1410 nt, Artificial Sequence; identical to SEQ ID NO: 206399
  derived and/or modified CDS sequence (opt5) from neuraminidase__InfluenzaA__AAZ79633

SEQ ID NO: 206436 - RNA, 1410 nt, Artificial Sequence; identical to SEQ ID NO: 206418
  derived and/or modified CDS sequence (opt5) from neuraminidase__InfluenzaA__AAZ79945

SEQ ID NO: 206437 - RNA, 1410 nt, Artificial Sequence; identical to SEQ ID NO: 206415
  derived and/or modified CDS sequence (opt5) from neuraminidase__InfluenzaA__AAZ79966

SEQ ID NO: 206438 - RNA, 1410 nt, Artificial Sequence; identical to SEQ ID NO: 206399
  derived and/or modified CDS sequence (opt5) from neuraminidase__InfluenzaA__AAZ79977

SEQ ID NO: 206439 - RNA, 1410 nt, Artificial Sequence; identical to SEQ ID NO: 206399
  derived and/or modified CDS sequence (opt5) from neuraminidase__InfluenzaA__AAZ79988

SEQ ID NO: 206440 - RNA, 1410 nt, Artificial Sequence
  derived and/or modified CDS sequence (opt5) from neuraminidase__InfluenzaA__AAZ79999
augaaccccaaucagaagaucauuaccaucggcagcgugucccugacaauuucuacgaucugcuucuuuaugcaaauugccauccucaucaccacagucacccugcacuucaaacaguacgaguuuaacagcccuccgaauaaccagaugaugcuuugugaacccacaauuaucgagagaaauauuaccgaaaucguuuaucugacaaacaccacgauugagaaggaaaucugcccuaaacucgcugaguaccggaauugguccaagccccagugugacauuaccggguucgccccuuuuucuaaagauaacagcauccgccuguccgcgggaggcgacaucugggugacaagagagcccuaugugucuugcgauccugacaaguguuaccaauucgcucuugggcagggaaccacacugaauaacguccauagcaaugauaccgugcacgaccggacgccguaucgcacacuccugaugaacgaacugggcguucccuuucaucucgggaccaaacaggugugcauugccugguccucuagcuccugucacgauggaaaggccuggcugcaugucugcgugacaggcgacgauaagaaugcuaccgccagcuucaucuacaacggcagacuuguugacucuauuguguccuggagcaaagauauccugcggacccaggagucugaaugugucugcauuaaugggacauguacgguggugaugaccgacggauccgcuagcggcaaggccgauacaaaaauccucuuuaucgaggaggggaagauuguccacaccuccacacugucuggaagcgcgcaacacguugaagagugcuccugcuauccucgcuaccccggcgugagaugugugugccgggacaacuggaaggggagcaaccgcccuaucgucgacauuaauaucaaagauuacucuauuguguccagcuauguuuguucuggacuugugggcgacacccccagaaagaacgauagcuccucuagcucccauugccuggacccgaauaacgaagagggcgggcacggagucaaaggcugggccuucgaugacgggaaugauguguggaugggacggacgaucagcgaaaagcuccgccugggcuacgagacauuuaaaguuaucgagggguggucuaacccuaauuccaagcugcagauuaacagacaggugaucgucgaacggggaaaucgcagcggcuauucuggcauuuucuccguggaggggaaaagcuguaucaacagaugcuuuuacgucgaacucauucggggaagaaaggaggaaaccgaggugcuguggaccuccaauucuaucguuguguucuguggcacaagcgggaccuauggaacaggcuccuggcccgacggggcugauauuaaccuuaugccuaucuga

SEQ ID NO: 206441 - RNA, 1410 nt, Artificial Sequence; identical to SEQ ID NO: 206187
  derived and/or modified CDS sequence (opt5) from neuraminidase__InfluenzaA__AAZ80010

SEQ ID NO: 206442 - RNA, 1410 nt, Artificial Sequence
  derived and/or modified CDS sequence (opt5) from neuraminidase__InfluenzaA__AAZ80021
augaaccccaaucagaagaucauuaccaucggcagcgugucccugacaauuucuacgaucugcuucuuuaugcaaauugccauccucaucaccacagucacccugcacuucaaacaguacgaguuuaacagcccuccgaauaaccagguuaugcuuugugaacccacaauuaucgagagaaauauuaccgaaaucguguaucugacaaacaccacgauugagaaggaaaucugcccuaaacucgcugaguaccggaauugguccaagccccagugugacauuaccggguucgccccuuuuucuaaagauaacagcauccgccuguccgcgggaggcgacaucugggugacaagagagcccuaugucucuugcgauccugacaaguguuaccaauucgcucuugggcagggaaccacacugaauaacgugcauagcaaugauaccguucgggaccgcacgccguauagaacacuccugaugaacgaacugggcgugcccuuucaccucgggaccaagcaggucugcauugccugguccucuagcuccugucaugauggaaaagccuggcugcacgugugcguuacaggcgacgauaagaaugcuaccgccagcuucaucuacaacggccggcuuguggacucuauugucuccuggagcaaagagauccugcgcacccaggaaucugagugugugugcauuaaugggacaugugcuguggucaugacggauggauccgccagcggcaaggcggacaccaaaauccucuuuaucgaggaagggaagauuguucauacauccaagcugucuggaagcgcccaacacguggaggaaugcuccugcuauccuagauaccccggcauccggugugugugccgcgauaacuggaaagggagcaacagaccuauugucgacaucaauauuaaggacuacucuaucguguccagcuauguuuguucuggacuugugggcgauacaccccggaaaaacgacagcuccucuagcucccacugccuggauccgaauaacgaggaaggcgggcauggagucaagggcugggcuuucgacgaugggaaugacguguggaugggacgcaccaucagcgagaaacucagaucuggcuacgagaccuuuaagguuauugaagggugguccaacccuaauagcaaacugcagaucaaccgccaggugauugucgaucggggaaauagaucuggcuauuccggcaucuucagcguggaggggaaguccuguauuaaccggugcuuuuacgucgaacugaucagaggacgcaaggaggaaacggaggugcucuggacaucuaauagcauuguuguguucuguggcaccuccgggaccuauggaacaggcucuuggcccgacggggccgauaucaaccugaugccuaucuga

SEQ ID NO: 206443 - RNA, 1410 nt, Artificial Sequence
  derived and/or modified CDS sequence (opt5) from neuraminidase__InfluenzaA__AAZ83245
augaaccccaaucagaagaucauuaccaucggcagcgugucccugacaauuucuacgaucugcuucuuuaugcaaauugccauccucaucaccacagucacccugcacuucaaacaguacgaguuuaacccuccgcccaauaaccagguuaugcuuugugaaccuacaauuaucgagagaaauauuaccgaaaucguguaucugacaaacaccacgauugagaaggaaaucugccccaaacucgcugaguaccggaauuggagcaagccucaguguaacauuaccggguucgcccccuuuuccaaagacaauucuauccgccugagcgcgggaggcgauaucugggugacaagagagccuuaugucuccugcgacccggauaaguguuaccaauucgcucuugggcagggaaccacacugaacaaugugcauucuaacgacaccguucacgaucggacgcccuaucgcacacuccugaugaaugaacugggcgugccuuuucaucucgggaccaagcaggucugcauugccuggagcuccagcucuugucacgacggaaaagccuggcugcaugugugcguuacaggcgaugacgagaacgcuaccgccuccuucaucuacaauggcagacuuguggauagcauugucucuugguccaagaaaauccugcggacccaggaaagcgagugugugugcauuaacgggacauguacgguggucaugaccgacggaucugcuuccggcaaggccgauacaaaaauccucuuuaucgaggaagggaagauuguucacaccagcacacuguccggaucugcgcaacacguggaggaaugcagcugcuauccccgcuacccuggcgugagaugugucugccgggacaacuggaagggguccaaucgccccaucguggauauuaacaucaaagacuacagcauuguuucuuccuauguguguagcggacuugucggcgacaccccgagaaagaaugauucuagcuccucuagccauugccuggacccuaacaaugaggaaggcgggcacggagugaaaggcugggccuucgaugacgggaacgauguuuggaugggacggacgaucuccgagaagcuccgcagcggcuacgagacauuuaaagugaucgaaggguggucuaaucccaacuccaagcugcagauuaauagacaggucaucguggaccgggauaaccgcagcggauauucuggcauuuucuccgucgagggcaaaagcuguaucaauagaugcuuuuacguggaacugauucgggggagaaaccaggagaccgaaguucucuggaccuccaauucuaucguggucuucuguggaacaagcggcaccuaugggacaggauccuggccugacggcgcugauauuaaccugaugcccaucuga

SEQ ID NO: 206444 - RNA, 1413 nt, Artificial Sequence
  derived and/or modified CDS sequence (opt5) from neuraminidase__InfluenzaA__AAZ83256
augaaccccaaucagaagaucauuaccaucggcagcauuuccaucgccauugggaucaucucucugaugcuccaaauuggaaacaucauuagcaucugggcuucccacucuauucagacaggcagccagaaucauacggggaucugcaaccagagaauuaucaccuacgaaaauuccacaugggugaaccacaccuaugucaauaucaacaauacaaacguuguggccggaaaagacaagaccucugugacacuggcgggcaauagcucccuuuguagcauuucugggugggcuaucuacaccaaagauaacuccauucggaucggaagcaagggcgacgucuucgugauucgcgagccuuuuaucucuugcucccaucuggaguguagaacguucuuucucacccaaggcgcccugcuuaaugauaaacacagcaacgggacaguuaaggaccggucuccguaucgcgcccugauguccugcccccucggagaagcuccuagccccuacaauuccaaguucgagucuguggccuggagcgcuuccgccugucaugauggcaugggguggcugaccaucggaauuagcggcccugacaacggggcggucgccgugcugaaauauaacggaaucauuacagaaaccaucaagucuuggaaaaagcggauucucagaacgcaggaguccgagugcguuugugugaauggcagcugcuuuacaaucaugaccgauggccccucuaacggggcugccagcuacaaaaucuucaagauugaaaagggaaaagucacaaaguccaucgagcugaaugcuccuaacuuucacuaugaagaguguucuugcuacccggacaccggcaccgugaugugugugugccgcgauaauuggcacgggagcaacagacccugggucuccuucaaucagaaccuugacuaccagauuggauauaucugcagcggcguuuuuggggauaauccucggcccaaagacggaaagggcucuuguaacccugugacaguggauggcgccgacggggucaaaggauucuccuacaaguauggcaaugggguguggauuggacgcacgaaaagcaacagacugcggaagggcuuugagaugaucugggaccccaauggguggaccgauacagacucugauuucuccguuaagcaagacguggucgcgauuaccgauuggagcggcuacuccggaucuuuugugcagcauccggaacucacaggccuggacugcauccgcccuuguuucuggguugagcuugugagagggcugccccgggaaaacaccacgaucuggacaagcggauccucuauuagcuucugcggcaucgauuccgacaccgccaauuggagcuggccugauggggcugagcuccccuuuaccauugacaaauga

SEQ ID NO: 206445 - RNA, 1410 nt, Artificial Sequence; identical to SEQ ID NO: 206351
  derived and/or modified CDS sequence (opt5) from neuraminidase__InfluenzaA__AAZ83269

SEQ ID NO: 206446 - RNA, 1410 nt, Artificial Sequence; identical to SEQ ID NO: 206351
  derived and/or modified CDS sequence (opt5) from neuraminidase__InfluenzaA__AAZ83280

SEQ ID NO: 206447 - RNA, 1410 nt, Artificial Sequence; identical to SEQ ID NO: 206325
  derived and/or modified CDS sequence (opt5) from neuraminidase__InfluenzaA__AAZ83291

SEQ ID NO: 206448 - RNA, 1413 nt, Artificial Sequence
  derived and/or modified CDS sequence (opt5) from neuraminidase__InfluenzaA__AAZ83302
augaaccccaaucagaagaucauuaccaucggcagcauuuccaucgccauugggaucaucucucugaugcuccaaauuggaaacaucauuagcaucugggcuucccacucuauucagacaggcagccagaaucauacgggggugugcaaccagagaaucauuaccuacgagaauagcacaugggucaaccacaccuauguuaauaucaacaauacaaacgugaucgccggaaaagacaaggcgucugugacccuggcuggcaauagcucccuuuguagcauuucugggugggccaucuacacaaaagauaacuccauucggaucggaagcaagggcgacgucuucgugauucgcgaaccuuuuaucucuugcucccauagcgaguguagaaccuucuuucugacgcaaggcgcccuccugaaugauaaacacucuaacgggaccguuaaggaccgguccccguaucgcgcucuuaugagcugcccccugggagaagccccuucccccuacaauucuaaguucgagagcguggcuugguccgccagcgcgugucaugauggcaugggguggcucacaaucggaauuucuggcccugacaacggggccgucgcugugcugaaauauaacggaaucauuaccgaaacaaucaaguccuggaaaaagcagauucugagaacccaggagagcgagugcguuugugugaauggcucuugcuuuacgaucaugacagauggccccagcaacggggccgcuuccuacaaaaucuucaagauugaaaagggaaaagucaccaagucuaucgagcucaaugccccuaacuuucacuaugaagaguguagcugcuacccggacacaggcaccgugaugugugugugccgggauaauuggcacggguccaaccgccccugggucagcuucaaucagaaccuggacuaccaaauuggauauaucugcucuggcguuuuuggggauaauccuagacccaaagacggagagggcuccuguaacccugugaccguggauggcgcgaauggggucaagggauucagcuacaaauauggcaacgggguguggauuggacggacaaagucuaaucgccuuagaaaaggcuuugaaaugaucugggaccccaacggguggacggacaccgauuccgacuucagcguuaagcaggauguggucgccauuacagacugguccggcuacucuggauccuuugugcagcauccggagcugaccggccucgauugcauccggccuuguuucuggguugaacuggugcgcgggcuucccaaggagaauacaaccaucuggacguccggaucuagcauuuccuucugcggcgucaacagcgacacagcuaacuggucuuggccugauggggccgaacugcccuuuaccaucgacaaauga

SEQ ID NO: 206449 - RNA, 1410 nt, Artificial Sequence
  derived and/or modified CDS sequence (opt5) from neuraminidase__InfluenzaA__AAZ83315
augaaccccaaucagaagaucauuaccaucggcagcguuucccugacaauugccacgaucugcuuccucaugcaaauugcuauccuggucaccacaguuacccuucacuuuaaacaguacgaguguaacucucugccuaauaaccaggugaugcucugcgaaccgacaaucauugagagaaauaucaccgaaauuguguaucugacaaacaccacgaucgagaaggaaauuugucccaaacuugccgaguaccggaauuggagcaagccucagugcaaaaucaccggguucgcgcccuuuuccaaggacaacucuauucgccugagcgcuggaggcgauaucugggucacaagagagccuuauguguccugugaccccgauaagugcuaccaauucgcccucgggcagggaaccacacugaauaaccggcauucuaaugacaccguucacgaucgcacgccuuauagaacacugcucaugaacgaacugggcgugccguuucaucuugggaccaaacaggucuguaucgccuggagcuccagcucuugccacgacggaaaggcuuggcugcauguguguguuacaggccacgaugagaaugccaccgcuuccuucauuuacgacggccggcucguggauagcaucgggucuugguccaaaaagauucugcgcacccaggaaagcgagugcgucuguaucaacggaacaugcacgguggugaugaccgacggcucugccuccgggagagcgaauacaaaaauucuuuuuaucgaggaaggaaagaucauucacaucagccaacuguccggcucugcccagcaugucgaggaaugcagcuguuauccccgguacccugggguucgcugcguguguagagauaacuggaagggauccaaccggcccauuguggacaucaaugucaaagauuacagcauugcuucuuccuaugugugcagcggccucguuggcgacaccccucgcaagaacgacucuagcuccucuagccacugucugaaucccaacaaugaggaagggggacauggcgugaaagggugggccuucgaugacggaaacgaugucuggaugggcagaacaaucuccgagaaguuucggagcggguacgagaccuucaaagugaucgaaggauggucuaagccuaauuccaaacugcagauuaaccgccagguuaucguggacagagauaaucggagcggcuauucuggcauuuuuagcgucgaggggaaguccugcaucaacagauguuucuacguggaacucauucgcggacggaagcaagagacggaagucugguggacauccaauucuaucgugguguuuugcggcaccagcgggaccuauggaacaggcuccuggccggacggggcugauauuaaccugaugcccaucuga

SEQ ID NO: 206450 - RNA, 1410 nt, Artificial Sequence
  derived and/or modified CDS sequence (opt5) from neuraminidase__InfluenzaA__AAZ83326
augaaccccaaucagaagaucauuaccaucggcagcgugucccugacaauugccacgaucugcuuccucaugcaaauugcuauccuggucaccacaguuacccuucacuuuaaacaguacgagugugacucucugccuaacaaucaggugaugcucugcgaaccgacaaucauugagagaaacaucaccgaaauuguguaucugacaaauaccacgaucgagaaggaaauuugucccaaacuugccgaguaccggaacuggagcaagccucagugcaaaaucaccggguucgcgcccuuuuccaaggauaauucuauucgccugagcgcuggaggcgacaucugggucacaagagagccuuauguguccugugaucccgacaagugcuaccaauucgcccucgggcagggaaccacacugaacaaucggcauucuaacgauaccguucacgaccgcacgccuuauagaacacugcucaugaaugaacugggcgugccguuucaucuugggaccaaacaggucuguaucgccuggagcuccagcucuugccacgauggaaaggcuuggcugcauguguguguuacaggccacgacgagaacgccaccgcuuccuucauuuacgauggccggcucguggacagcaucgggucuugguccaaaaagauucugcgcacccaggaaagcgagugcgucuguaucaauggaacaugcacgguggugaugaccgauggcucugccuccgggagagcggacacaaaaauucuuuuuaucgaggaaggaaagaucauucacaucagccaacuguccggcucugcccagcaugucgaggaaugcagcuguuauccccgguacccugggguucgcugcguguguagagauaacuggaagggauccaaucggcccauuguggacaucaacgucaaagacuacagcauugugucuuccuauguuugcagcggccucgugggcgauaccccucgcaagaacgacucuagcuccucuagccacugucugaaucccaacaaugaggaagggggacauggcgucaaagggugggcuuucgaugacggaaacgauguguggaugggcagaacaaucuccgagaaguuucggagcggguacgagaccuucaaaguuaucgaaggauggucuaagccuaauuccaaacugcagauuaaccgccaggugaucgucgacagagauaaucggagcggcuauucuggcauuuuuagcguggaggggaaguccugcaucaacagauguuucuacgucgaacucauucgcggacggaagcaagagacggaagugugguggacauccaauucuaucguuguguuuugcggcaccagcgggaccuauggaacaggcuccuggccggacggggccgauauuaaccugaugcccaucuga

SEQ ID NO: 206451 - RNA, 1410 nt, Artificial Sequence
  derived and/or modified CDS sequence (opt5) from neuraminidase__InfluenzaA__AAZ83374
augaaccccaaucagaagaucauuaccaucggcagcgugucccugacaauuucuacgaucugcuucuuuaugcaaauugccauccucaucaccacagucacccugcacuucaaacaguacgaguuuaacagcccuccgaauaaccagguuaugcuuugugaacccacaauuaucgagagaaauauuaccgaaaucguguaucugacaaacaccacgauugagaaggaaaucugcccuaaacucgcugaguaccggaauugguccaagccccagugugacauuaccggguucgccccuuuuucuaaagauaacagcauccgccuguccgcgggaggcgacaucugggugacaagagagcccuaugucucuugcgauccugacaaguguuaccaauucgcucuugggcagggaaccacacugaauaacgugcauagcaaugauaccguucacgaccggacgccguaucgcacacuccugaugaacgaacugggcgugcccuuucaucucgggaccaagcaggucugcauugccugguccucuagcuccugucacgauggaaaagccuggcugcaugugugcguuacaggcgacgauaagaaugcuaccgccagcuucaucuacaacggcagacuuguggacucuauugucuccuggagcaaagagauccugcggacccaggaaucugagugugugugcauuaaugggacauguacgguggucaugaccgauggauccgcuagcggcaaggccgacacaaaaauccucuuuaucgaggaagggaagauuguucacaccuccacacugucuggaagcgcgcaacacguggaggaaugcuccugcuauccucgcuaccccggcgugagaugugucugccgggauaacuggaaggggagcaaccgcccuaucguggacauuaauaucaaagacuacucuauuguuuccagcuauguguguucuggacuugucggcgauacccccagaaagaacgacagcuccucuagcucccauugccuggauccgaauaacgaggaaggcgggcacggagugaaaggcugggccuucgacgaugggaaugacguuuggaugggacggacgaucagcgagaagcuccgcacaggcuacgagaccuuuaaagugaucgaaggguggucuaacccuaauuccaagcugcagauuaacagacaggucaucguggaucggggaaaucgcagcggcuauucuggcauuuucuccgucgaggggaaaagcuguaucaacagaugcuuuuacguggaacugauucggggaagaaaggaggaaaccgagguucucuggacauccaauucuaucguggucuucuguggcaccagcgggacauauggaacgggcuccuggcccgacggggcugauauuaaccugaugccuaucuga

SEQ ID NO: 206452 - RNA, 1410 nt, Artificial Sequence; identical to SEQ ID NO: 206418
  derived and/or modified CDS sequence (opt5) from neuraminidase__InfluenzaA__AAZ83385

SEQ ID NO: 206453 - RNA, 1413 nt, Artificial Sequence
  derived and/or modified CDS sequence (opt5) from neuraminidase__InfluenzaA__AAZ85129
augaacaccaaucagaagaucauuacaaucggcagcauuuccaucgccauugggaucaucucucugaugcuccaaauuggaaacaucauuagcaucugggcuucccacucuauucagacgggcagccagaaucauaccggggugugcaaccagagaaucauuacauacgaaaauuccaccugggucaaccacacauauguuaauaucaacaauaccaacgugaucgccggaaaagacaagacaucugugacccuggcgggcaauagcucccuuuguagcauuucugggugggcuaucuacacgaaagauaacuccauucggaucggaagcaagggcgacgucuucgugauucgcgagcccuuuaucucuugcucccaucuggaguguagaaccuucuuucucacacaaggcgcccugcuuaaugauaaacacagcaacgggaccguuaaggaccggucuccuuaucgcgcccugauguccugcccgcucggagaagcucccagcccuuacaauuccaaguucgagucuguggccuggagcgcuuccgccugucaugauggcaugggguggcugacaaucggaauuagcggccccgacaacggggcggucgccgugcugaaauauaacggaaucauuaccgaaacgaucaagucuuggaaaaagcagauucucagaacacaggaguccgagugcguuugugugaauggcagcugcuuuaccaucaugacagauggcccuucuaacggggcugccagcuacaaaaucuucaagauugaaaagggaaaagucaccaaguccaucgagcugaaugcucccaacuuucacuaugaagaguguucuugcuacccugacaccggcacagugaugugugugugccgggauaauuggcacgggagcaaccgcccgugggucuccuucaaucagaaccuugacuaccaaauuggauauaucugcagcggcguuuuuggggauaaucccagaccuaaagacggagagggcucuuguaaccccgugacgguggauggcgccaauggggucaagggauucuccuacaaauauggcaacgggguguggauuggacggaccaagagcaaucgccugagaaaaggcuuugaaaugaucugggacccuaacggguggacagacaccgauucugacuucuccguuaagcaggauguggucgcgauuacagacuggagcggcuacuccggaucuuuugugcagcaucccgagcucaccggccuggauugcauccggccguguuucuggguugaacuugugcgcgggcugccuaaggagaauacgacaaucuggaccagcggauccucuauuagcuucugcggcgucaacuccgacaccgccaacuggagcuggcccgauggggcugaacucccuuuuacaaucgacaaauga

SEQ ID NO: 206454 - RNA, 1410 nt, Artificial Sequence
  derived and/or modified CDS sequence (opt5) from neuraminidase__InfluenzaA__ABA06513
augaaccccaaucagaagaucauuaccaucggcagcgugucccugacaauugccacgaucugcuuccucacccaaauugcuauccuggucacaaccguuacacuucacuuuaaacaguacgaguguaacucuccuccgaauaaccaggugaugcugugcgaacccaccaucauugagagaaauaucacagaaauuguguaucucaccaacacgaccaucgagaaggaaauuuguccuaaacuggccgaguaccggaauuggagcaagccccagugcaacaucacaggguucgcgccuuuuuccaaagacaauucuauucgccuuagcgcuggaggcgauaucugggucaccagagagcccuauguguccugugacccugauaagugcuaccaauucgcccuggggcagggaacaacccucaacaauggccauucuaacgacacgguucacgaucggacaccguaucgcacccugcugaugaaugaacucggggugcccuuucaucugggaacaaagcaggucuguaucgccuggagcuccagcucuugccacgacggcaaggcuuggcuucauguguguguuaccggcgaugacaaaaacgccaccgcuuccuucauuuacaaugggagacugguggauagcaucggaucuugguccaaaaagauucuccggacacaggagagcgaaugcgucuguaucaacggcacgugcaccguggugaugacagacgggucugccuccggaaaagcggauaccaagauucuguuuaucgaggagggcaagaucguccacacaagccuucuguccgggucugcccaacacguugaagagugcagcuguuauccucgcuaccccggagugagaugcgugugucgggacaacuggaaaggcuccaaucgcccuauugucgauaucaacgugaaggacuacagcauuguuucuuccuaugugugcagcggccucgucggggacacccccagaaagaaugauucuagcuccucuagccauugucuggacccgaacaaugaagagggaggccacggggugaaaggaugggcuuucgaugacggcaacgauguuuggauggggcggacgaucuccgaaaaacugcgcagcggauacgagacauuuaaggugauugagggcuggucuaaaccuaauuccaagcuccagaucaacagacaggucaucguggaccgggauaaucgcagcggcuauucugggauuuucuccgucgaaggaaagagcugcaucaacagauguuuuuacguggagcugauucggggcagaaaucaggaaaccgagguucuuuggaccuccaacucuaucguggucuucugcgggacaagcggaaccuauggcacaggguccuggcccgacggcgccgauauuaaucugaugccuaucuga

SEQ ID NO: 206455 - RNA, 1410 nt, Artificial Sequence; identical to SEQ ID NO: 206454
  derived and/or modified CDS sequence (opt5) from neuraminidase__InfluenzaA__ABA06545

SEQ ID NO: 206456 - RNA, 1413 nt, Artificial Sequence
  derived and/or modified CDS sequence (opt5) from neuraminidase__InfluenzaA__ABA08478
augaacaccaaucagaagaucauuacaaucggcagcauuuccaucgccauugggaucaucucucugaugcuccaaauuggaaacaucauuagcaucugggcuucccacucuauucagacgggcagccagaaucauaccgggaucugcaaccagagaauuaucacauacgaaaauuccaccugggugaaccacacauaugucaauaucaacaauaccaacguuguggccggaaaagacaagacaucugugacccuggcgggcaauagcucccuuuguagcauuucugggugggcuaucuacacgaaagauaacuccauucggaucggaagcaagggcgacgucuucgugauucgcgagcccuuuaucucuugcucccaucuggaguguagaaccuucuuucucacacaaggcgcccugcuuaaugauaaacacagcaacgggaccguuaaggaccggucuccuuaucgcgcccugauguccugcccgcucggagaagcucccagcccuuacaauuccaaguucgagucuguggccuggagcgcuuccgccugucaugauggcaugggguggcugacaaucggaauuagcggccccgacaacggggcggucgccgugcugaaauauaacggaaucauuaccgaaacgaucaagucuuggaaaaagcggauucucagaacacaggaguccgagugcguuugugugaauggcagcugcuuuaccaucaugacagauggcccuucuaacggggcugccagcuacaaaaucuucaagauugaaaagggaaaagucaccaaguccaucgagcugaaugcucccaacuuucacuaugaagaguguucuugcuacccugacaccggcacagugaugugugugugccgcgauaauuggcacgggagcaacagaccgugggucuccuucaaucagaaccuugacuaccagauuggauauaucugcagcggcguuuuuggggauaauccccggccuaaagacggaaagggcucuuguaaccccgugacgguggauggcgccgacggggucaaaggauucuccuacaaguauggcaaugggguguggauuggacgcaccaaaagcaacagacugcggaagggcuuugagaugaucugggacccuaauggguggacagauaccgacucugauuucuccguuaagcaagacguggucgcgauuacagauuggagcggcuacuccggaucuuuugugcagcaucccgaacucaccggccuggacugcauccgcccguguuucuggguugagcuugugagagggcugccucgggaaaacacgacaaucuggaccagcggauccucuauuagcuucugcggcgucgauuccgacaccgccaauuggagcuggcccgauggggcugagcucccuuuuacaaucgacaaauga

SEQ ID NO: 206457 - RNA, 1410 nt, Artificial Sequence; identical to SEQ ID NO: 206454
  derived and/or modified CDS sequence (opt5) from neuraminidase__InfluenzaA__ABA08511

SEQ ID NO: 206458 - RNA, 1413 nt, Artificial Sequence
  derived and/or modified CDS sequence (opt5) from neuraminidase__InfluenzaA__ABA12699
augaaccccaaucagaagaucauuaccaucggcagcauuuccaucgccauugggaucaucucucugaugcuccaaauuggaaacaucauuagcaucugggcuucccacucuauucagacaggcagccagaaucauacggggaucugcaaccagagaauuaucaccuacgaaaauuccacaugggugaaccacaccuaugucaauaucaacaauacaaacguuguggccggaaaagacaagaccucugugacacuggcgggcaauagcucccuuuguagcauuucugggugggcuaucuacaccaaagauaacuccauucggaucggaagcaagggcgacgucuucgugauucgcgagccuuuuaucucuugcucccaucuggaguguagaacguucuuucucacccaaggcgcccugcuuaaugauaaacacagcaacgggacaguuaaggaccggucuccguaucgcgcccugauguccugcccccucggagaagcuccuagccccuacaauuccaaguucgagucuguggccuggagcgcuuccgccugucaugauggcaugggguggcugaccaucggaauuagcggcccugacaacggggcggucgccgugcugaaauauaacggaaucauuacagaaaccaucaagucuuggaaaaagcggauucucagaacgcaggaguccgagugcguuugugugaauggcagcugcuuuacaaucaugaccgauggccccucuaacggggcugccagcuacaaaaucuucaagauugaaaagggaaaagucacaaaguccaucgagcugaaugcuccuaacuuucacuaugaagaguguucuugcuacccggacaccggcaccgugaugugugugugccgcgauaauuggcacgggagcaacagacccugggucuccuucaaucagaaccuugacuaccagauuggauauaucugcagcggcguuuuuggggauaauccucggcccaaagacggaaagggcucuuguaacccugugacaguggauggcgccgacggggucaaaggauucuccuacaaguauggcaaugggguguggauuggacgcacgaaaagcaacagacugcggaagggcuuugagaugaucugggaccccaauggguggaccgauacagacucugauuucuccguuaagcaagacguggucgcgauuaccgauuggagcggcuacuccggaucuuuugugcagcauccggaacucacaggccuggacugcauccgcccuuguuucuggguugagcuugugagagggcugccccgggaaaacaccacgaucuggacaagcggauccucuauuagcuucugcggcgucgauuccgacaccgccaauuggagcuggccugauggggcugagcuccccuuuaccaucgacaaauga

SEQ ID NO: 206459 - RNA, 1413 nt, Artificial Sequence; identical to SEQ ID NO: 206458
  derived and/or modified CDS sequence (opt5) from neuraminidase__InfluenzaA__ABA12710

SEQ ID NO: 206460 - RNA, 1413 nt, Artificial Sequence
  derived and/or modified CDS sequence (opt5) from neuraminidase__InfluenzaA__ABA12721
augaaccccaaucagaagaucauuaccaucggcagcauuuccaucgccauugggaucaucucucugaugcuccaaauuggaaacaucauuagcaucugggcuucccacucuauucagacaggcagccagaaucauacgggggugugcaaccagagaaucauuaccuacgaaaauuccacaugggucaaccacaccuauguuaauaucaacaauacaaacgugaucgccggaaaagacaagaccucugugacacuggcgggcaauagcucccuuuguagcauuucugggugggcuaucuacaccaaagauaacuccauucggaucggaagcaagggcgacgucuucgugauucgcgagccuuuuaucucuugcucccaucuggaguguagaacguucuuucucacccaaggcgcccugcuuaaugauaaacacagcaacgggacaguuaaggaccggucuccguaucgcgcccugauguccugcccccucggagaagcuccuagccccuacaauuccaaguucgagucuguggccuggagcgcuuccgccugucaugauggcaugggguggcugaccaucggaauuagcggcccugacaacggggcggucgccgugcugaaauauaacggaaucauuacagaaaccaucaagucuuggaaaaagcagauucucagaacgcaggaguccgagugcguuugugugaauggcagcugcuuuacaaucaugaccgauggccccucuaacggggcugccagcuacaaaaucuucaagauuggaaagggcaaagucacaaaguccaucgaacugaaugcuccuaacuuucacuaugaggaauguucuugcuacccggacaccgggaccgugaugugugugugccgggauaauuggcacggaagcaaccgccccugggucuccuucaaucagaaccuugacuaccaaauuggcuauaucugcagcgggguuuuuggagauaauccuagaccccgggacggcgagggcucuuguaacccugugacaguggauggggccaauggagucaaaggcuucuccuacaaguaugggaacggaguguggauuggccgcacgaaaagcaauagacugcggaagggguuugagaugaucugggaccccaacggcuggaccgacacagauucugacuucuccguuaaacaggauguggucgcgauuaccgacuggagcggauacuccggcucuuuugugcagcauccggaacucacagggcuggauugcauccgcccuuguuucuggguugagcuugugagaggacugccccgggaaaauaccacgaucuggacaagcggcuccucuauuagcuucugcggggucaacuccgacaccgccaacuggagcuggccugauggagcugagcuccccuuuaccaucgacaaguga

SEQ ID NO: 206461 - RNA, 1413 nt, Artificial Sequence; identical to SEQ ID NO: 206458
  derived and/or modified CDS sequence (opt5) from neuraminidase__InfluenzaA__ABA12732

SEQ ID NO: 206462 - RNA, 1410 nt, Artificial Sequence; identical to SEQ ID NO: 206399
  derived and/or modified CDS sequence (opt5) from neuraminidase__InfluenzaA__ABA12743

SEQ ID NO: 206463 - RNA, 1410 nt, Artificial Sequence; identical to SEQ ID NO: 206415
  derived and/or modified CDS sequence (opt5) from neuraminidase__InfluenzaA__ABA12754

SEQ ID NO: 206464 - RNA, 1410 nt, Artificial Sequence; identical to SEQ ID NO: 206418
  derived and/or modified CDS sequence (opt5) from neuraminidase__InfluenzaA__ABA12765

SEQ ID NO: 206465 - RNA, 1410 nt, Artificial Sequence; identical to SEQ ID NO: 206190
  derived and/or modified CDS sequence (opt5) from neuraminidase__InfluenzaA__ABA12776

SEQ ID NO: 206466 - RNA, 1410 nt, Artificial Sequence; identical to SEQ ID NO: 206399
  derived and/or modified CDS sequence (opt5) from neuraminidase__InfluenzaA__ABA12786

SEQ ID NO: 206467 - RNA, 1410 nt, Artificial Sequence; identical to SEQ ID NO: 206418
  derived and/or modified CDS sequence (opt5) from neuraminidase__InfluenzaA__ABA18029

SEQ ID NO: 206468 - RNA, 1413 nt, Artificial Sequence
  derived and/or modified CDS sequence (opt5) from neuraminidase__InfluenzaA__ABA18040
augaaccccaaucagaagaucauuaccaucggcagcauuuccaucgccauugggaucaucucucugaugcuccaaauuggaaacaucauuagcaucugggcuucccacucuauucagacaggcagccagaaucauacgggggugugcaaccagagaaucauuaccuacgagaauagcacaugggucaaccacaccuauguuaauaucaacaauacaaacgugaucgccggaaaagacaagaccucugugacacuggcgggcaauagcucccuuuguagcauuucugggugggcuaucuacaccaaagauaacuccauucggaucggaagcaagggcgacgucuucgugauucgcgaaccuuuuaucucuugcucccaucuggaguguagaacguucuuucucacccaaggcgcccugcuuaaugauaaacacagcaacgggacaguuaaggaccggucuccguaucgcgcccugauguccugcccccucggagaagcuccuagccccuacaauuccaaguucgagucuguggccuggagcgcuuccgccugucaugauggcaugggguggcugaccaucggaauuagcggcccugacaacggggcggucgccgugcugaaauauaacggaaucauuacagaaaccaucaagucuuggaaaaagcagauucucagaacgcaggaguccgagugcguuugugugaauggcagcugcuuuacaaucaugaccgauggccccucuaacggggcugccagcuacaaaaucuucaagauugaaaagggaaaagucacaaaguccaucgagcugaaugcuccuaacuuucacuaugaagaguguucuugcuacccggacaccggcaccgugaugugugugugccgggauaauuggcacgggagcaaccgccccugggucuccuucaaucagaaccuugacuaccaaauuggauauaucugcagcggcguuuuuggggauaauccuagacccaaagacggagagggcucuuguaacccugugacaguggauggcgccaauggggucaagggauucuccuacaaauauggcaacgggguguggauuggacggacgaaguccaaucgccugagaaaaggcuuugaaaugaucugggaccccaacggguggaccgacacagauucugacuucuccguuaagcaggauguggucgcgauuaccgacuggagcggcuacuccggaucuuuugugcagcauccggagcucacaggccuggauugcauccggccuuguuucuggguugaacuugugcgcgggcugcccaaggagaauaccacgaucuggacaagcggauccucuauuagcuucugcggcgucaacuccgacaccgccaacuggagcuggccugauggggcugaacuccccuuuaccaucgacaaauga

SEQ ID NO: 206469 - RNA, 1410 nt, Artificial Sequence
  derived and/or modified CDS sequence (opt5) from neuraminidase__InfluenzaA__ABA18126
augaaccccaaucagaagaucauuaccaucggcagcgugucccugacaauugccacgaucugcuuccucaugcaaauugcuauccuggucaccacaguuacccuucacuuuaaacaguacgaguguaacucuccuccgaauaaccaggugaugcugugcgaacccacaaucauugagagaaauaucaccgaaauuguguaucucacaaacaccacgaucgagaaggaaauuuguccuaaacuggccgaguaccggaauuggagcaagccccagugcaacaucaccggguucgcgccuuuuuccaaagacaauucuauucgccuuagcgcuggaggcgauaucugggucacaagagagcccuauguguccugugacccugauaagugcuaccaauucgcccuggggcagggaaccacacucaacaauggccauucuaacgacaccguucacgaucggacgccguaucgcacacugcugaugaaugaacucggggugcccuuucaucugggaaccaagcaggucuguaucgccuggagcuccagcucuugccacgacggcaaagccuggcuucauguguguguuacaggcgaugacgagaacgcuaccgcuuccuucauuuacaaugggagacugguggauagcaucggaucuugguccaagaaaauucuccggacccaggaaagcgagugcgucuguaucaacggcacaugcacgguggugaugaccgacgggucugccuccggaaaggcggauacaaaaauucuguuuaucgaggaaggcaagaucguccacauuagcacccuuuccgggucugcccaacacguugaggaaugcagcuguuauccucgcuaccccggagugagaugcgugugucgggacaacuggaagggcuccaaucgcccuaucgucgauauuaacgugaaagacuacagcaucguuucuuccuaugugugcagcggccuggucggggacacacccagaaagaaugauucuuucagcuccucucauugucucgacccgaacaaugaggaaggaggccacggggugaaaggaugggcuuuugaugacggcaacgauauguggauggggcggaccauuagcgagaagcugcgcuccggauacgagacguucaaaguuaucgaaggcuggagcaagccuaauucuaaacugcagaucaacagacaggugauugucgagcggggcaaucgcuccggguauagcggaaucuuuucuguggaaggcaaguccugcauuaacagauguuucuacgucgagcucauccgggggagaaaggaagagacagaggugugguggaccagcaauuccauuguuguguuuugcggaaccucuggcacauaugggaccggcagcuggcccgacggagccgauaucaaccugaugccuauuuga

SEQ ID NO: 206470 - RNA, 1413 nt, Artificial Sequence; identical to SEQ ID NO: 206458
  derived and/or modified CDS sequence (opt5) from neuraminidase__InfluenzaA__ABA18148

SEQ ID NO: 206471 - RNA, 1410 nt, Artificial Sequence
  derived and/or modified CDS sequence (opt5) from neuraminidase__InfluenzaA__ABA18159
augaaccccaaucagaagaucauuaccaucggcagcgugucccugacaauuucuacgaucugcuucuuuaugcaaauugccauccucaucaccacagucacccugcacuucaaacaguacgaguuuaacagcccuccgaauaaccagguuaugcuuugugaacccacaauuaucgagagaaauauuaccgaaaucguguaucugacaaacaccacgauugagaaggaaaucugcccuaaacucgcugaguaccggaauugguccaagccccagugugacauuaccggguucgccccuuuuucuaaagauaacagcauccgccuguccgcgggaggcgacaucugggugacaagagagcccuaugucucuugcgauccugacaaguguuaccaauucgcucuugggcagggaaccacacugaauaacgugcauagcaaugauaccguucacgaccggacgccguaucgcacacuccugaugaacgaacugggcgugcccuuucaucucgggaccaagcaggucugcauugccugguccucuagcuccugucacgauggaaaagccuggcugcaugugugcguuacaggcgacgauaagaaugcuaccgccagcuucaucuacaacggcagacuuguggacucuauugucuccuggagcaaagagauccugcggacccaggaaucugagugugugugcauuaaugggacaugugcuguggucaugacggauggauccgccagcggcaaggcggacaccaaaauccucuuuaucgaggaagggaagauuguucacacauccaagcugucuggaagcgcccaacacguggaggaaugcuccugcuauccucgcuaccccggcaucagaugugugugccgggauaacuggaaagggagcaaccgcccuauugucgacgugaauaucaaggacuacucuauuguuuccagcuauguguguucuggacuugucggcgauacccccagaaagaacgacagcuccucuagcucccauugccuggauccgaauaacgaggaaggcgggcacggagugaaaggcugggcuuucgacgaugggaaugacguuuggaugggacggacaaucagcgagaaacuccgcucuggcuacgagaccuuuaaggugaucgaagggugguccaacccuaauagcaaacugcagauuaacagacaggucaucguggaucggggaaaucgcucuggcuauuccggcauuuucagcgucgaggggaaguccuguaucaacagaugcuuuuacguggaacugauucggggaagaaaggaggaaacggagguucucuggacaucuaauagcaucguggucuucuguggcaccuccgggaccuauggaacaggcucuuggcccgacggggccgauauuaaccugaugccuaucuga

SEQ ID NO: 206472 - RNA, 1410 nt, Artificial Sequence; identical to SEQ ID NO: 206399
  derived and/or modified CDS sequence (opt5) from neuraminidase__InfluenzaA__ABA26703

SEQ ID NO: 206473 - RNA, 1410 nt, Artificial Sequence; identical to SEQ ID NO: 206399
  derived and/or modified CDS sequence (opt5) from neuraminidase__InfluenzaA__ABA26714

SEQ ID NO: 206474 - RNA, 1410 nt, Artificial Sequence; identical to SEQ ID NO: 206399
  derived and/or modified CDS sequence (opt5) from neuraminidase__InfluenzaA__ABA26736

SEQ ID NO: 206475 - RNA, 1410 nt, Artificial Sequence; identical to SEQ ID NO: 206399
  derived and/or modified CDS sequence (opt5) from neuraminidase__InfluenzaA__ABA26747

SEQ ID NO: 206476 - RNA, 1410 nt, Artificial Sequence; identical to SEQ ID NO: 206399
  derived and/or modified CDS sequence (opt5) from neuraminidase__InfluenzaA__ABA26758

SEQ ID NO: 206477 - RNA, 1410 nt, Artificial Sequence; identical to SEQ ID NO: 206399
  derived and/or modified CDS sequence (opt5) from neuraminidase__InfluenzaA__ABA26769

SEQ ID NO: 206478 - RNA, 1410 nt, Artificial Sequence; identical to SEQ ID NO: 206399
  derived and/or modified CDS sequence (opt5) from neuraminidase__InfluenzaA__ABA26780

SEQ ID NO: 206479 - RNA, 1410 nt, Artificial Sequence; identical to SEQ ID NO: 206399
  derived and/or modified CDS sequence (opt5) from neuraminidase__InfluenzaA__ABA26791

SEQ ID NO: 206480 - RNA, 1410 nt, Artificial Sequence; identical to SEQ ID NO: 206399
  derived and/or modified CDS sequence (opt5) from neuraminidase__InfluenzaA__ABA26802

SEQ ID NO: 206481 - RNA, 1413 nt, Artificial Sequence
  derived and/or modified CDS sequence (opt5) from neuraminidase__InfluenzaA__ABA42250
augaaccccaaucagaagaucauuaccaucggcagcauuuccaucgccauugggaucaucucucugaugcuccaaauuggaaacaucauuagcaucugggcuucccacucuauucagacaggcagccagaaucauacggggaucugcaaccagagaauuaucaccuacgaaaauuccacaugggugaaccacaccuaugucaauaucaacaauacaaacguuguggccggaaaagacaagaccucugugacacuggcgggcaauagcucccuuuguagcauuucugggugggcuaucuacaccaaagauaacuccauucggaucggaagcaagggcgacgucuucgugauucgcgagccuuuuaucucuugcucccaucuggaguguagaacguucuuucucacccaaggcgcccugcuuaaugauaaacacagcaacgggacaguuaaggaccggucuccguaucgcgcccugauguccugcccccucggagaagcuccuagccccuacaauuccaaguucgagucuguggccuggagcgcuuccgccugucaugauggcaugggguggcugaccaucggaauuagcggcccugacaacggggcggucgccgugcugaaauauaacggaaucauuacagaaaccaucaagucuuggaaaaagcggauucucagaacgcaggaguccgagugcguuugugugaauggcagcugcuuuacaaucaugaccgauggccccucuaacggggcugccagcuacaaaaucuucaagauugaaaagggaaaagucacaaaguccaucgagcugaaugcuccuaacuuucacuaugaagaguguucuugcuacccggacaccggcaccgugaugugugugugccgcgauaauuggcacgggagcaacagacccugggucuccuucaaucagaaccuugacuaccagauuggauauaucugcagcggcguuuuuggggauaauccucggcccaaagacggaaagggcucuuguaacccugugacaguggauggcgccgacggggucaaaggauucuccuacaaguauggcgacgggguguggauuggacgcacgaaaagcaauagacugcggaagggcuuugagaugaucugggaucccaacggguggaccgacacagauucugacuucuccguuaagcaagauguggucgcgauuaccgacuggagcggcuacuccggaucuuuugugcagcauccggaacucacaggccuggauugcauccgcccuuguuucuggguugagcuugugagagggcugccccgggaaaauaccacgaucuggacaagcggauccucuauuagcuucugcggcgucgacuccgauaccgccaacuggagcuggccugacggggcugagcuccccuuuaccaucgauaaauga

SEQ ID NO: 206482 - RNA, 1413 nt, Artificial Sequence; identical to SEQ ID NO: 206468
  derived and/or modified CDS sequence (opt5) from neuraminidase__InfluenzaA__ABA42261

SEQ ID NO: 206483 - RNA, 1410 nt, Artificial Sequence
  derived and/or modified CDS sequence (opt5) from neuraminidase__InfluenzaA__ABA42272
augaaccccaaucagaagaucauuaccaucggcagcgugucccugacaauuucuacgaucugcuucuuuaugcaaauugccauccucaucaccacagucacccugcacuucaaacaguacgaguuuaacagcccuccgaauaaccagguuaugcuuugugaacccacaauuaucgagagaaauauuaccgaaaucguguaucugacaaacaccacgauugagaaggaaaucugcccuaaacucgcugaguaccggaauugguccaagccccagugugacauuaccggguucgccccuuuuucuaaagauaacagcauccgccuguccgcgggaggcgacaucugggugacaagagagcccuaugucucuugcgauccugacaaguguuaccaauucgcucuugggcagggaaccacacugaauaacgugcauagcaaugauaccguucacgaccggacgccguaucgcacacuccugaugaacgaacugggcgugcccuuucaucucgggaccaagcaggucugcauugccugguccucuagcuccugucacgauggaaaagccuggcugcaugugugcguuacaggcgacgauaagaaugcuaccgccagcuucaucuacaacggcagacuuguggacucuauugucuccuggagcaaagauauccugcggacccaggagucugaaugugugugcauuaaugggacauguacgguggucaugaccgacggauccgcuagcggcaaggccgauacaaaaauccucuuuaucgaggaggggaagauuguucacaccuccacacugucuggaagcgcgcaacacguggaagagugcuccugcuauccucgcuaccccggcgugagaugugucugccgggacaacuggaaggggagcaaccgcccuaucguggacauuaauaucaaagauuacucuauuguuuccagcuauguguguucuggacuugucggcgacacccccagaaagaacgauagcuccucuagcucccauugccuggacccgaauaacgaagagggcgggcacggagugaaaggcugggccuucgaugacgggaaugauguuuggaugggacggacgaucaacgaaaagcuccgccugggcuacgagacauuuaaagugaucgagggguggagcaauccuaacucuaagcugcagauuaauagacaggucaucguggaacggggaaaccgcuccggcuauagcggcauuuucucugucgaggggaaauccuguaucaauagaugcuuuuacguggaacucauucggggaagaaaggaggaaaccgagguucuguggaccagcaacuccaucguggucuucuguggcacaucugggaccuauggaacaggcagcuggcccgacggggcugauauuaaucuuaugccuaucuga

SEQ ID NO: 206484 - RNA, 1410 nt, Artificial Sequence; identical to SEQ ID NO: 206399
  derived and/or modified CDS sequence (opt5) from neuraminidase__InfluenzaA__ABA42294

SEQ ID NO: 206485 - RNA, 1410 nt, Artificial Sequence; identical to SEQ ID NO: 206226
  derived and/or modified CDS sequence (opt5) from neuraminidase__InfluenzaA__ABA42305

SEQ ID NO: 206486 - RNA, 1410 nt, Artificial Sequence; identical to SEQ ID NO: 206236
  derived and/or modified CDS sequence (opt5) from neuraminidase__InfluenzaA__ABA42316

SEQ ID NO: 206487 - RNA, 1413 nt, Artificial Sequence
  derived and/or modified CDS sequence (opt5) from neuraminidase__InfluenzaA__ABA42327
augaaccccaaucagaagaucauuaccaucggcagcauuuccaucgccauugggaucaucucucugaugcuccaaauuggaaacaucauuagcaucugggcuucccacucuauucagacaggcagccagaaucauacggggaucugcaaccagagaauuaucaccuacgagaauagcacaugggugaaccacaccuaugucaauaucaacaauacaaacguuguggccggaaaagacaagaccucugugacacuggcgggcaauagcucccuuuguagcauuucugggugggcuaucuacaccaaagauaacuccauucggaucggaagcaagggcgacgucuucgugauucgcgaaccuuuuaucucuugcucccaucuggaguguagaacguucuuucucacccaaggcgcccugcuuaaugauaaacacagcaacgggacaguuaaggaccggucuccguaucgcgcccugauguccugcccccucggagaagcuccuagccccuacaauuccaaguucgagucuguggccuggagcgcuuccgccugucaugauggcaugggguggcugaccaucggaauuagcggcccugacaacggggcggucgccgugcugaaauauaacggaaucauuacagaaaccaucaagucuuggaaaaagcggauucucagaacgcaggaguccgagugcguuugugugaauggcagcugcuuuacaaucaugaccgauggccccucuaacggggcugccagcuacaaaaucuucaagauugaaaagggaaaagucacaaaguccaucgagcugaaugcuccuaacuuucacuaugaagaguguucuugcuacccggacaccggcaccgugaugugugugugccgcgauaauuggcacgggagcaacagacccugggucuccuucaaucagaaccuugacuaccagauuggauauaucugcagcggcguuuuuggggauaauccucggcccaaagacggagagggcucuuguaacccugugacaguggauggcgccgacggggucaagggauucuccuacaaauauggcaaugggguguggauuggacgcacgaaguccaacagacugcggaaaggcuuugaaaugaucugggaccccaauggguggaccgauacagacucugauuucuccguuaagcaagacguggucgcgauuaccgauuggagcggcuacuccggaucuuuugugcagcauccggagcucacaggccuggacugcauccgcccuuguuucuggguugaacuugugagagggcugccccgggagaacaccacgaucuggacaagcggauccucuauuagcuucugcggcgucaauuccgauaccgccaacuggagcuggccugacggggcugaacuccccuuuaccaucgauaaguga

SEQ ID NO: 206488 - RNA, 1410 nt, Artificial Sequence; identical to SEQ ID NO: 206221
  derived and/or modified CDS sequence (opt5) from neuraminidase__InfluenzaA__ABA42338

SEQ ID NO: 206489 - RNA, 1410 nt, Artificial Sequence
  derived and/or modified CDS sequence (opt5) from neuraminidase__InfluenzaA__ABA42349
augaaccccaaucagaagaucauuaccaucggcagcgugucccugacaauugccacgaucugcuuccucaugcaaauugcuauccuggucaccacaguuacccuucacuuuaaacaguacgagugugacucuccuccgaacaaucaggugaugcugugcgaacccacaaucauugagagaaacaucaccgaaauuguguaucucacaaauaccacgaucgagaaggaaauuuguccuaaacuggccgaguaccggaacuggagcaagccccagugcaauaucaccggguucgcgccuuuuuccaaagauaacucuauucgccuuagcgcuggaggcgacaucugggucacaagagagcccuauguguccugugauccugacaagugcuaccaauucgcccuggggcagggaaccacacucaauaacggccauucuaaugauaccguucacgaccggacgccguaucgcacacugcugaugaacgaacucggggugcccuuucaucugggaaccagacaggucuguaucgccuggagcuccagcucuugccacgauggcaaggcuuggcuucauguguguguuacaggcgacgaugagaaugccaccgcuuccuucauuuacaacgggaaacugguggacagcaucggaucuugguccaagaaaauucuccggacccaggaaagcgagugcgucuguaucaauggcacaugcacgguggugaugaccgaugggucugccuccggaaaggcggacacaaaaauucuguuuaucgaggaaggcaagaucguccacauuagcacccuuuccgggucugcccaacacguugaggaaugcagcuguuauccucgcuaccccggagugagaugcgugugucgggauaacuggaagggcuccaaccgcccuaucgucgacauuaaugugaaagacuacagcaucguuucuuccuaugugugcagcggccuggucggggauacacccagaaagaacgacucuuucagcuccucucauugucucgauccgaauaacgaggaaggaggccacggggugaaaggaugggcuuuugacgauggcaaugacguuuggauggggcggaccauuagcgagaagcugcgcuccggauacgagacguucaaagugaucgaaggcuggagcaagccuaacucuaaacugcagaucaauagacaggucauuguggagcggggcaaccgcuccggguauagcggaaucuuuucugucgaaggcaaguccugcauuaauagauguuucuacguggagcucauccgggggagaaaggaagagacagagguuugguggaccagcaacuccauuguggucuuuugcggaaccucuggcacauaugggaccggcagcuggcccgauggagccgacaucaaucugaugccuauuuga

SEQ ID NO: 206490 - RNA, 1410 nt, Artificial Sequence; identical to SEQ ID NO: 206226
  derived and/or modified CDS sequence (opt5) from neuraminidase__InfluenzaA__ABA42360

SEQ ID NO: 206491 - RNA, 1410 nt, Artificial Sequence; identical to SEQ ID NO: 206221
  derived and/or modified CDS sequence (opt5) from neuraminidase__InfluenzaA__ABA42371

SEQ ID NO: 206492 - RNA, 1410 nt, Artificial Sequence; identical to SEQ ID NO: 206236
  derived and/or modified CDS sequence (opt5) from neuraminidase__InfluenzaA__ABA42382

SEQ ID NO: 206493 - RNA, 1410 nt, Artificial Sequence; identical to SEQ ID NO: 206221
  derived and/or modified CDS sequence (opt5) from neuraminidase__InfluenzaA__ABA42393

SEQ ID NO: 206494 - RNA, 1410 nt, Artificial Sequence
  derived and/or modified CDS sequence (opt5) from neuraminidase__InfluenzaA__ABA42404
augaaccccaaucagaagaucauuaccaucggcagcgugucccugacaauugccacgaucugcuuccucaugcaaauugcuauccuggucaccacaguuacccuucacuuuaaacaguacgaguguaacucuccuccgaauaaccaggugaugcugugcgaacccgccaucauugagagaaauaucacagaaauuguguaucucaccaacacaaccaucgagaaggaaauuuguccuaaacuggcggaguaccggaauuggagcaagccccagugcaacaucacgggguucgcuccuuuuuccaaagacaauucuauucgccuuagcgccggaggcgauaucugggucaccagagagcccuauguguccugugacccugauaagugcuaccaauucgcccuggggcagggaacaacccucaacaauggccauucuaacgacacaguucacgaucggaccccguaucgcacgcugcugaugaaugaacucggggugcccuuucaucugggaacaagacaggucuguaucgcuuggagcuccagcucuugccacgacggcaaggccuggcuucauguguguguuaccggcgaugacgagaacgcuacagccuccuucauuuacaaugggcggcugguggauagcaucggaucuugguccaaaaagauucuccgcacccaggaaagcgagugcgucuguaucaacgggaccugcacaguggugaugacggacggcucugcguccggaaaagccgauaccaagauucuguuuaucgaggaaggcaaaaucgucaacauuagcacacuuccuggguccgcucaacacguugaggaaugcucuuguuaucccagauacccuggagugcggugcgugugucgcgacaauuggaagggcagcaacagacccaucgucgauauuaaugugaaggacuacuccaucguuagcucuuaugugugcuccggccuggucggggacaccccgcggaaaaacgauagcuucucuagcucccacugucucgacccuaauaacgaggaaggaggccauggggugaagggaugggccuuugaugacggcaaugauguuuggauggggcgcacaauuucugagaaacugagaagcggauacgagaccuucaaggugaucgaaggcugguccaaacccaacagcaagcugcagaucaaucggcaggucauuguggagcgcggcaacagaucuggguauuccggaaucuuuagcgucgaaggcaaaucuugcauuaaucgguguuucuacguggagcucaucagagggcgcaaggaagagacggagguuugguggacauccaacagcauuguggucuuuugcggaaccuccggcaccuaugggacaggcucuuggccugacggagcugauaucaaucugaugcccauuuga

SEQ ID NO: 206495 - RNA, 1410 nt, Artificial Sequence; identical to SEQ ID NO: 206236
  derived and/or modified CDS sequence (opt5) from neuraminidase__InfluenzaA__ABA42415

SEQ ID NO: 206496 - RNA, 1410 nt, Artificial Sequence; identical to SEQ ID NO: 206243
  derived and/or modified CDS sequence (opt5) from neuraminidase__InfluenzaA__ABA42446

SEQ ID NO: 206497 - RNA, 1410 nt, Artificial Sequence
  derived and/or modified CDS sequence (opt5) from neuraminidase__InfluenzaA__ABA42457
augaaccccaaucagaagaucauuaccaucggcagcgugucccugacaauugccacgaucugcuuccucaugcaaauugcuauccuggucaccacaguuacccuucacuuuaaacaguacgaguguaacucuccuccgaauaaccaggugaugcugugcgaacccacaaucauugagagaaauaucaccgaaauuguguaucucacaaacaccacgaucgagaaggaaauuuguccuaaacuggccgaguaccggaauuggagcaagccccagugcaacaucaccggguucgcgccuuuuuccaaagacaauucuauucgccuuagcgcuggaggcgauaucugggucacaagagagcccuauguguccugugacccugauaagugcuaccaauucgcccuggggcagggaaccacacucaacaauggccauucuaacgacaccguucacgaucggacgccguaucgcacacugcugaugaaugaacucggggugcccuuucaucugggaaccagacaggucuguaucgccuggagcuccagcucuugccacgacggcaaggcuuggcuucauguguguguuacaggcgaugacgagaacgccaccgcuuccuucauuuacaaugggcggcugguggauagcaucggaucuugguccaaaaagauucuccgcacccaggaaagcgagugcgucuguaucaacggcacaugcacgguggugaugaccgacgggucugccuccggaaaagcggauacaaagauucuguuuaucgaggaaggcaaaaucguccacauuagcacccuuuccgggucugcccaacacguugaggaaugcagcuguuauccuagauaccccggagugcggugcgugugucgcgacaacuggaagggcuccaauagaccuaucgucgauauuaacgugaaggacuacagcaucguuucuuccuaugugugcagcggccuggucggggacacaccccggaaaaaugauucuuucagcuccucucauugucucgacccgaacaaugaggaaggaggccacggggugaagggaugggcuuuugaugacggcaacgauguuuggauggggcgcaccauuagcgagaaacugagauccggauacgagacguucaaggugaucgaaggcuggagcaaaccuaauucuaagcugcagaucaaccggcaggucauuguggagcgcggcaauagauccggguauagcggaaucuuuucugucgaauccaaaagcugcauuaaccgguguuucuacguggagcucaucagaggccgcaaggaagagacagagguuugguggaccuccaauucuauuguggucuuuugcgggaccagcggaacauauggcaccggguccuggcccgacggcgccgauaucaaccugaugccuauuuga

SEQ ID NO: 206498 - RNA, 1410 nt, Artificial Sequence; identical to SEQ ID NO: 206243
  derived and/or modified CDS sequence (opt5) from neuraminidase__InfluenzaA__ABA42468

SEQ ID NO: 206499 - RNA, 1410 nt, Artificial Sequence
  derived and/or modified CDS sequence (opt5) from neuraminidase__InfluenzaA__ABA42479
augaaccccaaucagaagaucauuaccaucggcagcgugucccugacaauugccacgaucugcuuccucaugcaaauugcuauccuggucaccacaguuacccuucacuuuaaacaguacgagugugacucuccuccgaacaaucaggugaugcugugcgaacccacaaucauugagagaaacaucaccgaaauuguguaucucacaaauaccacgaucgagaaggaaauuuguccuaaacuggccgaguaccggaacuggagcaagccccagugcaauaucaccggguucgcgccuuuuuccaaagauaacucuauucgccuuagcgcuggaggcgacaucugggucacaagagagcccuauguguccugugauccugacaagugcuaccaauucgcccuggggcagggaaccacacucaauaacggccauucuaaugauaccguucacgaccggacgccguaucgcacacugcugaugaacgaacucggggugcccuuucaucugggaaccagacaggucuguaucgccuggagcuccagcucuugccacgauggcaaggcuuggcuucauguguguguuacaggcgacgaugagaaugccaccgcuuccuucauuuacaacgggcggcugguggacagcaucggaucuugguccaaaaagauucuccgcacccaggaaagcgagugcgucuguaucaauggcacaugcacgguggugaugaccgaugggucugccuccggaaaagcggacacaaagauucuguuuaucgaggaaggcaaaaucguccacauuagcacccuuuccgggucugcccaacacguugaggaaugcagcuguuauccuagauaccccggagugcggugcgugugucgcgauaacuggaagggcuccaacagaccuaucgucgacauuaaugugaaggacuacagcaucguuucuuccuaugugugcagcggccuggucggggauacaccccggaaaaacgacucuuucagcuccucucauugucucgauccgaauaacgaggacggaggccacggggugaagggaugggcuuuugaugacggcaaugauguuuggauggggcgcaccauuagcgaaaaacugagauccggauacgagacguucaaggugaucgagggcuggagcaaaccuaacucuaagcugcagaucaaucggcaggucauuguggaacgcggcaacagauccggguauagcggaaucuuuucugucgagggcaaauccugcauuaaucgguguuucuacguggaacucaucagagggcgcaaggaggaaacagagguuugguggaccagcaacuccauuguggucuuuugcggaaccucuggcacauaugggaccggcagcuggcccgacggagccgauaucaaucugaugccuauuuga

SEQ ID NO: 206500 - RNA, 1410 nt, Artificial Sequence
  derived and/or modified CDS sequence (opt5) from neuraminidase__InfluenzaA__ABA42490
augaaccccaaucagaagaucauuaccaucggcagcgugucccugacaauugccacgaucugcuuccucaugcaaauugcuauccuggucaccacaguuacccuucacuuuaaacaguacgaguguaacucuccuccgaauaaccaggugaugcugugcgaacccacaaucauugagagaaauaucaccgaaauuguguaucucacaaacaccacgaucgagaaggaaauuuguccuaaacuggccgaguaccggaauuggagcaagccccagugcaacaucaccggguucgcgccuuuuuccaaagacaauucuauucgccuuagcgcuggaggcgauaucugggucacaagagagcccuauguguccugugacccugauaagugcuaccaauucgcccuggggcagggaaccacacucaacaauggccauucuaacgacaccguucacgaucggacgccguaucgcacacugcugaugaaugaacucggggugcccuuucaucugggaaccagacaggucuguaucgccuggagcuccagcucuugccacgacggcaaggcuuggcuucauguguguguuacaggcgaugacgagaacgccaccgcuuccuucauuuacaaugggcggcugguggauagcaucggaucuugguccaaaaagauucuccgcacccaggaaagcgagugcgucuguaucaacggcacaugcacgguggugaugaccgacgggucugccuccggaaaagcggauacaaagauucuguuuaucgaggaaggcaaaaucguccacauuagcaaacuuuccgggucugcccaacacguugaggaaugcagcuguuauccuagauaccccggagugcggugcgugugucgcgacaacuggaagggcuccaauagaccuaucgucgauauuaacgugaaggacuacagcaucguuucuuccuaugugugcagcggccuggucggggacacaccccggaagaaugauucuuucagcuccucucauugucucgacccgaacaaugaggaaggaggccacggggugaaaggaugggcuuuugaugacggcaacgauguuuggauggggcgcaccauuagcgagaagcugagauccggauacgagaccuucaaagugaucaagggcuggagcaaaccuaauucuaagcugcagaucaaccggcaggucauuguggaacgcggcaauagauccggguauagcggaaucuuuucugucgagggcaaguccugcauuaaccgguguuucuacguggaacucaucagagggcgcaaagaggaaacggagguuugguggacaagcaauuccauuguggucuuuugcggaaccucuggcaccuaugggacaggcagcuggcccgacggagccgauaucaaccugaugccuauuuga

SEQ ID NO: 206501 - RNA, 1410 nt, Artificial Sequence; identical to SEQ ID NO: 206243
  derived and/or modified CDS sequence (opt5) from neuraminidase__InfluenzaA__ABA42501

SEQ ID NO: 206502 - RNA, 1410 nt, Artificial Sequence
  derived and/or modified CDS sequence (opt5) from neuraminidase__InfluenzaA__ABA42512
augaaccccaaucagaagaucauuaccaucggcagcgugucccugacaauugccacgaucugcuuccucaugcaaauugcuauccuggucaccacaguuacccuucacuuuaaacaguacgaguguaacucuccuccgaauaaccaggugaugcugugcgaacccacaaucauugagagaaauaucaccgaaauuguguauccuacaaacaccacgaucgagaaggaaauuugucccaaacucgccgaguaccggaauuggagcaagccucagugcaacaucaccggguucgcgcccuuuuccaaagacaauucuauucgccugagcgcuggaggcgauaucugggucacaagagagccuuauguguccugugacccggauaagugcuaccaauucgcccuugggcagggaaccacacugaacaauggccauucuaacgacaccguucacgaucggacgcccuaucgcacacuccugaugaaugaacugggggugccuuuucaucucggaaccaagcaggucuguaucgccuggagcuccagcucuugccacgacggcaaagccuggcugcauguguguguuacaggcgaugacgagaacgcuaccgcuuccuucauuuacaaugggagacuuguggauagcaucggaucuugguccaagaaaauucugcggacccaggaaagcgagugcgucuguaucaacggcacaugcacgguggugaugaccgacgggucugccuccggaaaggcggauacaaaaauucucuuuaucgaggaaggcaagaucguccacaccagcucccugucugggagcgcccaacacguugaggaaugcuccuguuauccccgcuacccuggagugagaugcgugugucgggacaacuggaagggcagcaaucgccccauugucgauaucaacgugaaagacuacucuauuguuuccagcuaugugugcucuggccuugucggggacacaccgagaaagaaugauagcuccucuagcucccauugucuggacccuaacaaugaggaaggaggccacggggugaaaggaugggcuuucgaugacggcaacgauguuuggauggggcggaccaucagcgagaagcuccgcucuggauacgagacguuuaaagugauugaaggcugguccaagcccaauagcaaacugcagaucaacagacaggucaucguggaccggggcaaucgcucuggguauuccggaauuuucagcgucgagggcaaguccugcaucaacagauguuuuuacguggaacugauucgggggagaaagcaggagacagaaguucucuggaccucuaauagcaucguggucuucugcggaaccuccggcacauaugggaccggcucuuggccugauggagccgacauuaaccugaugcccaucuga

SEQ ID NO: 206503 - RNA, 1410 nt, Artificial Sequence; identical to SEQ ID NO: 206133
  derived and/or modified CDS sequence (opt5) from neuraminidase__InfluenzaA__ABA42523

SEQ ID NO: 206504 - RNA, 1410 nt, Artificial Sequence; identical to SEQ ID NO: 206133
  derived and/or modified CDS sequence (opt5) from neuraminidase__InfluenzaA__ABA42534

SEQ ID NO: 206505 - RNA, 1410 nt, Artificial Sequence; identical to SEQ ID NO: 206325
  derived and/or modified CDS sequence (opt5) from neuraminidase__InfluenzaA__ABA42545

SEQ ID NO: 206506 - RNA, 1410 nt, Artificial Sequence
  derived and/or modified CDS sequence (opt5) from neuraminidase__InfluenzaA__ABA42556
augaaccccaaucagaagaucauuaccaucggcagcgugucccugacaauugccacgaucugcuuccucaugcaaauugcuauccuggucaccacaguuacccuucacuuuaaacaguacgaguguaacucuccuccgaauaaccaggugaugcugugcgaacccacaaucauugagagaaauaucaccgaaauuguguaucucacaaacaccacgaucgagaaggaaauuuguccuaaacuggccgaguaccggaauuggagcaagccccagugcaacaucaccggguucgcgccuuuuuccaaagacaauucuauucgccuuagcgcuggaggcgauaucugggucacaagagagcccuauguguccugugacccugauaagugcuaccaauucgcccuggggcagggaaccacacucaacaauggccauucuaacgacaccguucacgaucggacgccguaucgcacacugcugaugaaugaacucggggugcccuuucaucugggaaccaagcaggucuguaucgccuggagcuccagcucuugccacgacggcaaagccuggcuucauguguguguuacaggcgaugacgagaacgcuaccgcuuccuucauuuacaaugggagacugguggauagcaucggaucuugguccaagaaaauucuccggacccaggaaagcgagugcgucuguaucaacggcacaugcacgguggugaugaccgacgggucugccuccggaaaggcggauacaaaaauucuguuuaucgaggaaggcaagaucguccacaccagccuucuguccgggucugcccaacacguugaggaaugcagcuguuauccucgcuaccccggagugagaugcgugugucgggacaacuggaagggcuccaaucgcccuauugucgauaucaacgugaaagacuacagcauuguuucuuccuaugugugcagcggccucgucggggacacacccagaaagaaugauucuagcuccucuagccauugucuggacccgaacaaugaggaaggaggccacggggugaaaggaugggcuuucgaugacggcaacgauguuuggauggggcggaccaucuccgagaagcugcgcagcggauacgagacguuuaaagugauugaaggcuggucuaagccuaauuccaaacuccagaucaacagacaggucaucguggaccggggcaaucgcagcggguauucuggaauuuucuccgucgagggcaagagcugcaucaacagauguuuuuacguggaacugauucgggggagaaagcaggaggccgaaguucuuuggacauccaauucuaucguggucuucugcggaaccagcggcaccuaugggacaggcuccuggcccgauggagcugacauuaaccugaugccuaucuga

SEQ ID NO: 206507 - RNA, 1410 nt, Artificial Sequence; identical to SEQ ID NO: 206133
  derived and/or modified CDS sequence (opt5) from neuraminidase__InfluenzaA__ABA42567

SEQ ID NO: 206508 - RNA, 1410 nt, Artificial Sequence
  derived and/or modified CDS sequence (opt5) from neuraminidase__InfluenzaA__ABA42931
augaaccccaaucagaagaucauuaccaucggcagcgugucccugacaauugccacgaucugcucucucaugcaaauugcuauccuggucaccacaguuacccuucacuucaaacaguacgaguguaacagcccuccgaauaaccaggugaugcugugcgaacccacaaucauugagagaaauaucaccgaaauuguguaucucacaaacaccacgaucgagaaggaaauuuguccuaaacuggccgaguaccggaauugguccaagccccagugcaacaucaccggguuugcgccuuucucuaaagacaauagcauucgccuuuccgcuggaggcgauaucugggucacaagagagcccuaugugucuugugacccugauaagugcuaccaauuugcccuggggcagggaaccacacucaacaauggccauagcaacgacaccguucacgaucggacgccguaucgcacacugcugaugaaugaacucggggugcccuuccaucugggaaccaagcaggucuguaucgccugguccucuagcuccugccacgacggcaaagccuggcuucauguguguguuacaggcgaugacgagaacgcuaccgcuagcuuuauuuacaaugggagacugguggauucuaucggauccuggagcaagaaaauucuccggacccaggaaucugagugcgucuguaucaacggcacaugcacgguggugaugaccgacggguccgccagcggaaaggcggauacaaaaauucuguucaucgaggaaggcaagaucguccacaccucccuucugucugggagcgcccaacacguugaggaaugcuccuguuauccucgcuaccccggagugagaugcgugugucgggacaacuggaagggcagcaaucgcccuauugucgauaucaacgugaaagacuacucuauuguuuccagcuaugugugcucuggccucgucggggacacacccagaaagaaugauagcuccucuagcucccauugucuggacccgaacaaugaggaaggaggccacggggugaaaggaugggcuuuugaugacggcaacgauguuuggauggggcggaccaucagcgagaagcugcgcucuggauacgagacguucaaagugauugaaggcugguccaagccuaauagcaaacuccagaucaacagacaggucaucguggaccggggcaaucgcucuggguauuccggaauuuuuagcgucgagggcaaguccugcaucaacagauguuucuacguggaacugauucgggggagaaagcaggagacagaaguucuuuggaccucuaauagcaucguggucuuuugcggaaccuccggcacauaugggaccggcucuuggcccgauggagccgacauuaaccugaugccuaucuga

SEQ ID NO: 206509 - RNA, 1410 nt, Artificial Sequence; identical to SEQ ID NO: 206133
  derived and/or modified CDS sequence (opt5) from neuraminidase__InfluenzaA__ABA42942

SEQ ID NO: 206510 - RNA, 1410 nt, Artificial Sequence; identical to SEQ ID NO: 206133
  derived and/or modified CDS sequence (opt5) from neuraminidase__InfluenzaA__ABA42981

SEQ ID NO: 206511 - RNA, 1410 nt, Artificial Sequence; identical to SEQ ID NO: 206221
  derived and/or modified CDS sequence (opt5) from neuraminidase__InfluenzaA__ABA42992

SEQ ID NO: 206512 - RNA, 1413 nt, Artificial Sequence
  derived and/or modified CDS sequence (opt5) from neuraminidase__InfluenzaA__ABA43192
augaaccccaaucagaagaucauuaccaucggcagcauuuccaucgccauugggaucaucucucugaugcuccaaauuggaaacaucauuagcaucugggcuucccacucuauucagacaggcagccagaaucauacgggggugugcaaccagagaaucauuaccuacgagaauagcacaugggucaaccacaccuauguuaauaucaacaauacaaacgugaucgccggaaaagacaagaccucugugauucuggcgggcaauagcucccuuuguagcaucucugggugggcuauuuacacaaaagauaacuccauccggauuggaagcaagggcgacgucuucgugauccgcgaaccuuuuaucucuugcucccaucuggaguguagaaccuucuuucucacgcaaggcgcccugcuuaaugauaaacacagcaacgggaccguuaaggaccggucuccguaucgcgcccugauguccugcccccucggagaagcuccuagccccuacaauuccaaguucgagucuguggccuggagcgcuuccgccugucaugauggcaugggguggcugacaauuggaaucagcggcccugacaacggggcggucgccgugcugaaauauaacggaauuaucaccgaaacaauuaagucuuggaaaaagcagauccucagaacccaggaguccgagugcguuugugugaauggcagcugcuuuacgaucaugacagauggccccucuaacggggcugccagcuacaaaauuuucaagaucgaaaagggaaaagucaccaaguccauugagcugaaugcuccuaacuuucacuaugaagaguguucuugcuacccggacacaggcaccgugaugugugugugccgggauaauuggcacgggagcaaccgccccugggucuccuucaaucagaaccuugacuaccaaaucggauauauuugcagcggcguuuuuggggauaauccuagacccaaagacggagagggcucuuguaacccugugaccguggauggcgccaauggggucaagggauucuccuacaaauauggcaacgggguguggaucggacggacaaagagcaaucgccugagaaaaggcuuugaaaugauuugggaccccaacggguggacggacaccgauucugacuucuccguuaagcaggauguggucagcaucacagacugguccggcuacucuggauccuuugugcagcauccggagcucaccggccuggauugcauccggccuuguuucuggguugaacuugugcgcgggcugcccaaggagaauacaaccauuuggacguccggaucuagcaucuccuucugcggcgucaacagcgacacagcgaacuggucuuggccugauggggccgaacuccccuuuaccauugacaaauga

SEQ ID NO: 206513 - RNA, 1410 nt, Artificial Sequence; identical to SEQ ID NO: 206418
  derived and/or modified CDS sequence (opt5) from neuraminidase__InfluenzaA__ABA43203

SEQ ID NO: 206514 - RNA, 1410 nt, Artificial Sequence
  derived and/or modified CDS sequence (opt5) from neuraminidase__InfluenzaA__ABA43339
augaaccccaaucagaagaucauuaccaucggcagcgugucccugucuauugccacaaucugcuuccucaugcaaauugcuauccuggucacgaccguuacacuucacuuuaaacaguacgaguguagcuccccuccgaacaaucaggugaugcccugcgaaccuaccaucauugagagaaacaucacagaaauuguguaucugaccaauacaaccaucgagaaggaaauuugucccaaacucgucgaguaccggaacuggucuaagccucagugcaaaaucacgggguucgcccccuuuagcaaggacaauuccauucgccugucugcgggaggcgauaucugggugaccagagagccuuauguuagcugugacccggggaagugcuaccaauucgcucuuggacagggcacaacccugaacaaucggcauuccaacgauacagugcacgaccgcacccccuauagaacgcuccugaugaaugaacugggggucccuuuucaucucggaacaaaacagguguguauggccuggucuagcuccagcugccacgauggcaaggccuggcugcauguuugugugaccggccacgacgagaacgcuacagccucuuucaucuacgaugggcggcuugucgacuccauuggaagcuggucuaaaaauauccugcgcacccaggaauccgagugcguguguauuaacgggaccugcacaguggucaugacggauggcagcgcuuccgagagagccgacaccaagauccucuuuauugaagagggaaaaaucguucacaucucuccccugagcggcuccgcgcaacauguggaagagugcagcuguuauccucgguaccccggggugcgcugcgucuguagagauaauuggaagggaucuaaccggccgauuguggacaucaacguuaaggauuacuccauugugagcucuuaugucugcagcggccuugugggcgacacaccucgcaaaaaugacagauccucuagcuccuacugucggaaccccaauaacgaaaaggggagccacggaguuaaaggcugggccuucgaugacgggaaugauguguggaugggacgcaccaucggcgaggagcugagaucuggguaugaaacauuuaaggucauuggaggcugguccaccccuaacagcaaacuccagaucaauagacaggugaucgucgacucuggcaaccgguccggguacagcggaauuuucuccguggagggcaagucuugcaucaaucgcuguuuuuauguugaacugauucgggggagaaaacaggagacgcgcgugugguggacaagcaacuccaucgucguguucugcggaaccucuggcaccuacgggacaggcagcuggcccgauggagcugacauuaaucugaugcccaucuga

SEQ ID NO: 206515 - RNA, 1410 nt, Artificial Sequence
  derived and/or modified CDS sequence (opt5) from neuraminidase__InfluenzaA__ABA54916
augaaccccaaucagaagaucauuaccacaggcagcaucugcauggugauugggauggucucccugaugcuccaaaucggaaacauuaucucuaucuggguuagccacuccauucagacgggcacccagcauagagccgagccuuguaaucggucuaucauuaacuacgaaaauaacacaugggugaaucagaccuaugugaaaaucagcaacacaaauuuccugaccgagaaggcugucgccuccgugcgccuuguugggaacucuagccugugcccgauuuccggaugggcgguguacagcaaagacaauucuaucagaauuggcuccaagggggaugucuuugugauccgggaacccuucaucagcuguucucaccucgagugccgcacauuuuuccugacccaaggagcccuucugaacgacaaacauuccaauggcacgguuaaggauagaagcccuuaucggacccucaugucuugucccgugggcgaagcuccuucccccuacaacagccgcuuugaguccgucgccuggucugcuagcgccugccacgacgggacauccuggcugaccauuggaaucagcggcccugauaauggggcuguggccgugcugaaguauaacggaauuaucacagacaccauuaaaucuuggagaaacaauauccuccgggcgcaggaguccgaaugugccugcgucaacggcagcuguuucacgguuaugacagaugggccgucuaauggacaggcuagcuacaagaucuuuaaaauugagaagggcaaaguggugaaguccgucgaacugaacgcccccaauuaucauuacgaggagugcucuuguuacccugacgcuggcgaaauuaccugcgugugccgcgauaacuggcacgggagcaauagacccuggguuuccuucaaccagaaucuugaguaucaaaucggauacaucuguagcggcguguuuggggacaacccucggcccaaugauggaacaggcucuugcgggccggucuccccuaacggagccuauggcgugaagggcuucagcuuuaaauacgggaauggaguuuggauuggccgcaccaagucuaccaacuccagaagcggguucgaaaugaucugggaccccaauggauggacaggcacggauuccaacuuuucugugaaacaggacaucgucgcgauuaccgacuggagcggguauuccggcucuuucgugcagcacccugagcugacaggacucgauuguauccggcccugcuucugggucgaacugauucgcggcagacccaaggagagcaccaucuggacauccgggagcucuauuuccuuuuguggagugaacagcgacaccguuggcuggucuuggccugauggggccgagcuuccguucacgaucgacaaauga

SEQ ID NO: 206516 - RNA, 1413 nt, Artificial Sequence
  derived and/or modified CDS sequence (opt5) from neuraminidase__InfluenzaA__ABA87048
augaaccccaaucagaagaucauuaccaucggcagcauuuccaucgccauugggaucaucucucugaugcuccaaauuggaaacaucauuagcaucugggcuucccacucuauucagacaggcagccagaaucauacgggggugugcaaccagagaaucauuaccuacgagaauagcacaugggucaaccacaccuauguuaauaucaacaauacaaacgugaucgccggaaaagacaagaccucugugacacuggcgggcaauagcucccuuuguagcauuucugggugggcuaucuacaccaaagauaacuccauucggaucggaagcaagggcgacgucuucgugauucgcgaaccuuuuaucucuugcucccaucuggaguguagaacguucuuucucacccaaggcgcccugcuuaaugauaaacacagcaacgggacaguuaaggaccggucuccguaucgcgcccugauguccugcccccucggagaagcuccuagccccuacaauuccaaguucgagucuguggccuggagcgcuuccgccugucaugauggcaugggguggcugaccaucggaauuagcggcccugacaacggggcggucgccgugcugaaauauaacggaaucauuacagaaaccaucaagucuuggaaaaagcagauucucagaacgcaggaguccgagugcguuugugugaauggcagcugcuuuacaaucaugaccgauggccccucuaaccgggcugccagcuacaaaaucuucaagauugaaaaggggaaagucacaaaguccguggagcugaaugcuccuaacuuucacuaugaagaguguucuugcuacccggacaccggaaccgugaugugugucugccgcgauaauuggcacggcagcaacagacccuggguuuccuucaaucagaaccuugacuaccaaaucggguauauuugcagcggaguguuuggcgauaauccucggcccaaagacggggagggaucuuguaacccugugacagucgauggcgccaauggcgugaagggguucuccuacaaauauggaaacggcguuuggaucgggcgcacgaaguccaauagacugcggaaaggauuugaaaugauuugggaccccaacggcuggaccgacacagauucugacuucuccgugaagcaggaugucguggcgaucaccgacuggagcggguacuccggcucuuuuguucagcauccggagcucacaggacuggauugcauucgcccuuguuucuggguggaacuugucagaggccugcccaaggagaauaccacgaucuggacaagcggguccucuaucagcuucugcggagugaacuccgacaccgccaacuggagcuggccugauggcgcugaacuccccuuuaccauugacaaauga

SEQ ID NO: 206517 - RNA, 1413 nt, Artificial Sequence
  derived and/or modified CDS sequence (opt5) from neuraminidase__InfluenzaA__ABA87060
augaaccccaaucagaagaucauuaccaucggcagcauuuccaucgccauugggaucaucucucugaugcuccaaauuggaaacaucauuagcaucugggcuucccacucuauucagacaggcagccagaaucauacggggaucugcaaccagagaauuaucaccuacgagaauagcacaugggugaaccacaccuaugucaauaucaacaauacaaacguuguggccggaaaagacaagaccucugugacacuggcgggcaauagcucccuuuguagcauuucugggugggcuaucuacaccaaagauaacuccauucggaucggaagcaagggcgacgucuucgugauucgcgaaccuuuuaucucuugcucccaucuggaguguagaacguucuuucucacccaaggcgcccugcuuaaugauaaacacagcaacgggacaguuaaggaccggucuccguaucgcgcccugauguccugcccccucggagaagcuccuagccccuacaauuccaaguucgagucuguggccuggagcgcuuccgccugucaugauggcaugggguggcugaccaucggaauuagcggcccugacaacggggcggucgccgugcugaaauauaacggaaucauuacagaaaccaucaagucuuggaaaaagcggauucucagaacgcaggaguccgagugcguuugugugaauggcagcugcuuuacaaucaugaccgauggccccucuaacgggacagcuagcuacaaaaucuucaagauugaaaagggaaaagucaccaaguccaucgagcugaaugccccuaacuuucacuaugaagaguguucuugcuacccggacaccggcacagugaugugugugugccgcgauaauuggcacgggagcaacagacccugggucuccuucaaucagaaccuugacuaccagauuggauauaucugcagcggcguuuuuggggauaauccucggcccaaagacggaaagggcucuuguuccccugugacgguggauggcgcugacggggucaaaggauucagcuacaaguauggcaacgggguguggauuggacgcaccaaaucuaauagacugcggaagggcuuugagaugaucugggaccccaacggguggacagauaccgacuccgauuucagcguuaagcaagacguggucgccauuacagauugguccggcuacucuggauccuuugugcagcauccggaacucaccggccuggacugcauccgcccuuguuucuggguugagcuugugagagggcugccccgggaaaauacgacaaucuggaccuccggaucuagcauuuccuucugcggcgucgauagcgacaccgcgaacuggucuuggccugauggggccgagcuccccuuuacaaucgacaaauga

SEQ ID NO: 206518 - RNA, 1413 nt, Artificial Sequence
  derived and/or modified CDS sequence (opt5) from neuraminidase__InfluenzaA__ABA87083
augaaccccaaucagaagaucauuaccaucggcagcauuuccaucgccauugggaucaucucucugaugcuccaaauuggaaacaucauuagcaucugggcuucccacucuauucagacaggcagccagaaucauacggggaucugcaaccagaaaauuaucaccuacaagaauagcacaugggugaaccacaccuaugugaauaucaacaauacaaacguuguggccggaaaagacaagaccucugugacacuggcgggcaauagcucccuuuguagcauuucugggugggcuaucuacaccaaagauaacuccauuagaaucggaagcaagggcgacgucuucgugauucgggagccuuuuaucucuugcucccaucuggaaugucgcacguucuuucucacccaaggcgcccugcuuaaugauaagcacagcaacgggacaguuaaagacagaucuccguaucgggcccugauguccugcccccucggagaggcuccuagccccuacaauuccaaguucgaaucuguggccuggagcgcuuccgccugucaugauggcaugggguggcugaccaucggaauuagcggcccugacaacggggcggucgccgugcugaaauauaacggaaucauuacagagaccaucaagucuuggaaaaagcgcauucucagaacgcaggaauccgagugcguuugugugaauggcagcugcuuuacaaucaugaccgauggccccucuaacggggcugccagcuacaagaucuucaaaauugagaagggaaaagucacaaaguccaucgaacugaaugcuccuaacuuucacuaugaggaauguucuugcuacccggacaccggcaccgugaugugugugugccgggauaauuggcacgggagcaaccgccccugggucuccuucaaucagaaccuugacuaccagauuggauauaucugcagcggcguuuuuggggauaauccuagacccaaagacggagagggcucuuguaacccugugacaguggauggcgccgacggggucaagggauucuccuacaaauauggcaaugggguguggauuggacggacgaaguccaaccgccugagaaagggcuuugagaugaucugggaccccaauggguggaccgauacagacucuguuuucuccgugaaacaagaugucguggcgauuaccgacuggagcggcuacuccggaucuuuuguucagcauccggaacucacaggccuggauugcauccggccuuguuucuggguggagcuuguccgcgggcugcccagagaaaacaccacgaucuggacaagcggauccucuauuagcuucugcggcgucaauuccgacaccgccaacuggagcuggccugauggggcugagcuccccuuuaccaucgacaaguga

SEQ ID NO: 206519 - RNA, 1413 nt, Artificial Sequence
  derived and/or modified CDS sequence (opt5) from neuraminidase__InfluenzaA__ABA87234
augaacagcaaucagaagaucauuaccaucggcuccauuucuaucgccauugggaucaucagccugaugcuccaaauuggaaacaucauuuccaucugggcuucucacagcauucagacaggcucccagaaucauacgggggugugcaaccagagaaucauuaccuacgagaauagcacaugggucaaccacaccuauguuaauaucaacaauacaaacgugaucgccggaaaagacaagaccagcgugacacuggcgggcaauuccagccuuuguucuauuuccgggugggcuaucuacaccaaagauaacagcauucggaucggaucuaagggcgacgucuucgugauucgcgaacccuuuaucuccugcagccaucuggaguguagaacguucuuucucacccaaggcgcccugcuuaaugauaaacacucuaacgggacaguuaaggaccgguccccuuaucgcgcccugaugagcugcccgcucggagaagcucccuccccuuacaauucuaaguucgagagcguggccugguccgcuagcgccugucaugauggcaugggguggcugaccaucggaauuucuggccccgacaacggggcggucgccgugcugaaauauaacggaaucauuacagaaaccaucaaguccuggaaaaagcagauucucagaacgcaggagagcgagugcguuugugugaauggcucuugcuuuacaaucaugaccgauggcccuagcaacggggcugccuccuacaaaaucuucaagauugaaaagggaaaagucaucaagucuauugagcugaaugcucccaacuuucacuaugaagaguguagcugcuacccugacacaggcaccgugaugugugugugccgggauaauuggcacggguccaaccgcccgugggucagcuucaaucagaaccuugacuaccaaaucggauauauuugcucuggcguuuuuggggauaaucccagaccuaaagacggagagggcuccuguaaccccgugaccguggauggcgccaauggggucaagggauucagcuacaaauauggcaacgggguguggaucggacggacaaagucuaaucgccugagaaaaggcuuugaaaugauuugggacccuaacggguggacggacaccgauuccgacuucagcguuaagcaggauguggucgcgaucacagacugguccggcuacucuggaucuuuugugcagcaucccgagcucaccggccuggauugcauccggccguguuucuggguugaacuugugcgcgggcugccuaaggagaauacaaccauuuggacguccggaucuagcaucuccuucugcggcgucaacagcgacacagccaacuggucuuggcccgauggggcugaacucccuuuuaccauugacaaauga

SEQ ID NO: 206520 - RNA, 1410 nt, Artificial Sequence; identical to SEQ ID NO: 206454
  derived and/or modified CDS sequence (opt5) from neuraminidase__InfluenzaA__ABB02784

SEQ ID NO: 206521 - RNA, 1413 nt, Artificial Sequence; identical to SEQ ID NO: 206458
  derived and/or modified CDS sequence (opt5) from neuraminidase__InfluenzaA__ABB02795

SEQ ID NO: 206522 - RNA, 1413 nt, Artificial Sequence; identical to SEQ ID NO: 206458
  derived and/or modified CDS sequence (opt5) from neuraminidase__InfluenzaA__ABB02806

SEQ ID NO: 206523 - RNA, 1413 nt, Artificial Sequence
  derived and/or modified CDS sequence (opt5) from neuraminidase__InfluenzaA__ABB02817
augaaccccaaucagaagaucauuaccaucggcagcauuuccaucgccauugggaucaucucucugaugcuccaaauuggaaacaucauuagcaucugggcuucccacucuauucagacaggcagccagaaucauacgggggugugcaaccagagaaucauuaccuacgagaauagcacaugggucaaccacaccuauguuaauaucaacaauacaaacgugaucgccggaaaagacaagaccucugugacacuggcgggcaauagcucccuuuguagcauuucugggugggcuaucuacaccaaagauaacuccauucggaucggaagcaagggcgacgucuucgugauucgcgaaccuuuuaucucuugcucccaucuggaguguagaacguucuuucucacccaaggcgcccugcuuaaugauaaacacagcaacgggacaguuaaggaccggucuccguaucgcgcccugauguccugcccccucggagaagcuccuagccccuacaauuccaaguucgagucuguggccuggagcgcuuccgccugucaugauggcaugggguggcugaccaucggaauuagcggcccugacaacggggcggucgccgugcugaaauauaacggaaucauuacagaaaccaucaagucuuggaaaaagcagauucucagaacgcaggaguccgagugcguuugugugaauggcagcugcuuuacaaucaugaccgauggccccucuaacggggcugccagcuacaaaaucuucaagauugaaaagggaaaagucacaaaguccguggagcugaaugcuccuaacuuucacuaugaagaguguucuugcuacccggacaccggcaccgugaugugugucugccgggauaauuggcacgggagcaaccgccccuggguuuccuucaaucagaaccuugacuaccaaaucggauauauuugcagcggcguguuuggggauaauccuagacccaaagacggagagggcucuuguaacccugugacagucgauggcgccaauggggugaagggauucuccuacaaauauggcaacgggguuuggaucggacggacgaaguccaaucgccugagaaaaggcuuugaaaugauuugggaccccaacggguggaccgacacagauucugacuucuccgugaagcaggaugucguggcgaucaccgacuggagcggcuacuccggaucuuuuguucagcauccggagcucacaggccuggauugcauucggccuuguuucuggguggaacuuguccgcgggcugcccaaggagaauaccacgaucuggacaagcggauccucuaucagcuucugcggcgugaacuccgacaccgccaacuggagcuggccugauggggcugaacuccccuuuaccauugacaaauga

SEQ ID NO: 206524 - RNA, 1413 nt, Artificial Sequence; identical to SEQ ID NO: 206523
  derived and/or modified CDS sequence (opt5) from neuraminidase__InfluenzaA__ABB02828

SEQ ID NO: 206525 - RNA, 1410 nt, Artificial Sequence
  derived and/or modified CDS sequence (opt5) from neuraminidase__InfluenzaA__ABB02839
augaaccccaaucagaagaucauuaccaucggcagcgugucccugacaauuucuacgaucugcuucuuuaugcaaauugccauccucaucaccacagucacccugcacuucaaacaguacgaguuuaacagcccuccgaauaaccagguugugcuuugugaacccacaauuaucgagagaaauauuaccgaaaucguguaucugacaaacaccacgauugagaaggaaaucugcccuaaacucgcugaguaccggaauugguccaagccccagugugacauuaccggguucgccccuuuuucuaaagauaacagcauccgccuguccgcgggaggcgacaucugggucacaagagagcccuaugugucuugcgauccugacaaguguuaccaauucgcucuugggcagggaaccacacugaauaacguucauagcaaugauaccgugcacgaccggacgccguaucgcacacuccugaugaacgaacugggcguccccuuucaucucgggaccaaacaggugugcauugccugguccucuagcuccugucacgauggaaaggccuggcugcauguuugcgugacaggcgacgauaagaaugcuaccgccagcuucaucuacaacggcagacuugucgacucuauuguguccuggagcaaagagauccugcggacccaggaaucugagugugugugcauuaaugggacauguacggucguuaugaccgauggauccgcuagcggcaaggccgacacaaaaauccucuuuaucgaggaagggaagauugugcacaccuccacacugucuggaagcgcgcaacacguggaggaaugcuccugcuauccucgcuaccccggcgucagaugugugugccgggauaacuggaaggggagcaaccgcccuaucguugacauuaauaucaaagacuacucuauuguguccagcuaugucuguucuggacuugugggcgauacccccagaaagaacgacagcuccucuagcucccauugccuggauccgaauaacgaggaaggcgggcacggaguuaaaggcugggccuucgacgaugggaaugacguguggaugggacggacgaucagcgagaagcuccgcucuggcuacgagacauuuaaagucaucgaagggugguccaacccuaauagcaagcugcagauuaacagacaggugaucgucgaucggggaaaucgcucuggcuauuccggcauuuucagcguggaggggaaauccuguaucaacagaugcuuuuacguugaacugauucggggaagaaaggaggaaaccgaggugcucuggaccucuaauagcaucgucguguucuguggcacauccgggaccuauggaacaggcucuuggcccgacggggcugauauuaaccugaugccuaucuga

SEQ ID NO: 206526 - RNA, 1410 nt, Artificial Sequence
  derived and/or modified CDS sequence (opt5) from neuraminidase__InfluenzaA__ABB02850
augaaccccaaucagaagaucauuaccaucggcagcgugucccugacaauuucuacgaucugcuucuuuaugcaaauugccauccucaucaccacagucacccugcacuucaaacaguacgaguuuaacagcccuccgaauaaccagguuaugcuuugugaacccacaauuaucgagagaaauauuaccgaaaucguguaucugacaaacaccacgauugagaaggaaaucugcccuaaacccgcugaguaccggaauugguccaagccucagugugacauuaccggguucgcccccuuuucuaaagauaacagcauccgccucuccgcgggaggcgacaucugggugacaagagagccuuaugucucuugcgauccggacaaguguuaccaauucgcucuggggcagggaaccacacuuaauaacgugcauagcaaugauaccguucacgaccggacgcccuaucgcacacugcucaugaacgaacugggcgugccuuuucaucuggggaccaagcaggucugcauugccugguccucuagcuccugucacgauggaaaagccuggcuccaugugugcguuacaggcgacgauaagaaugcuaccgccagcuucaucuacaacggcagacugguggacucuauugucuccuggagcaaagagauccuucggacccaggaaucugagugugugugcauuaaugggacaugugcuguggucaucacggauggauccgccagcggcaaggcggacaccaaaauccuguuuauugaggaagggaagaucguucacacauccaagcucucuggaagcgcccaacacguggaggaaugcuccugcuauccccgcuacccuggcauuagaugugugugccgggauaacuggaaagggagcaaccgccccaucgucgacauuaauaucaaggacuacucuaucguguccagcuauguuuguucuggacuggugggcgauaccccgcggaaaaacgacagcuccucuagcucccuuugccuggauccuaauaacgaggaaggcgggcauggagucaagggcugggcuuucgacgaugggaaugacguguggaugggaagaacaauuagcgagaaacuccgcucuggcuacgagaccuuuaagguuaucgaagggugguccaaccccaauagcaaacugcagauuaacagacaggugaucgucgaucggggaaaucgcucuggcuauuccggcauuuucagcguggaggggaaguccuguaucaacagaugcuuuuacgucgaacugauucggggaagaaaggaggaaacggaggugcucuggacaucuaauagcaucguuguguucuguggcaccuccgggaccuauggaacaggcucuuggccugacggggccgauaucaaccugaugcccauuuga

SEQ ID NO: 206527 - RNA, 1410 nt, Artificial Sequence
  derived and/or modified CDS sequence (opt5) from neuraminidase__InfluenzaA__ABB02861
augaaccccaaucagaagaucauuaccaucggcagcgugucccugacaauugccacgaucugcuuccucaugcaaauugcuauccuggucaccacaguuacccuucacuuuaaacaguacgaguguaacucuccuccgaauaaccaggugaugcugugcgaacccgccaucauugagagaaauaucacagaaauuguguaucucaccaacacaaccaucgagaaggaaauuuguccuaaacuggcggaguaccggaauuggagcaagccccagugcaacaucacgggguucgcuccuuuuuccaaagacaauucuauucgccuuagcgccggaggcgauaucugggucaccagagagcccuauguguccugugacccugauaagugcuaccaauucgcccuggggcagggaacaacccucaacaauggccauucuaacgacacaguucacgaucggaccccguaucgcacgcugcugaugaaugaacucggggugcccuuucaucugggaacaagacaggucuguaucgcuuggagcuccagcucuugccacgacggcaaggccuggcuucauguguguguuaccggcgaugacgagaacgcuacagccuccuucauuuacgaugggcggcugguggacagcaucggaucuugguccaaaaagauucuccgcacccaggaaagcgagugcgucuguaucaaugggaccugcacaguggugaugacggauggcucugcguccggaaaagccgacaccaagauucuguuuaucgaggaaggcaaaaucgucaacauuagcacacuuuccgggucugcucaacacguugaggaaugcagcuguuauccuagauaccccggagugcggugcgugugucgcgauaacuggaagggcuccaauagaccuaucgucgacauuaacgugaaggacuacagcaucguuucuuccuaugugugcagcggccuggucggggauacaccccggaaaaaugacucuuucagcuccucucacugucucgauccgaacaaugaggaaggaggccauggggugaagggaugggccuuugacgauggcaacgacguuuggauggggcgcaccauuagcgagaaacugagauccggauacgagaccuucaaggugaucgaaggcuggagcaaaccuaauucuaagcugcagaucaaccggcaggucauuguggagcgcggcaauagauccggguauagcggaaucuuuucugucgaaggcaaauccugcauuaaccgguguuucuacguggagcucaucagagggcgcaaggaagagacggagguuugguggacaagcaauuccauuguggucuuuugcggaaccucuggcaccuaugggacaggcagcuggcccgauggagcugacaucgaucugaugccuauuuga

SEQ ID NO: 206528 - RNA, 1410 nt, Artificial Sequence; identical to SEQ ID NO: 206325
  derived and/or modified CDS sequence (opt5) from neuraminidase__InfluenzaA__ABB02872

SEQ ID NO: 206529 - RNA, 1410 nt, Artificial Sequence; identical to SEQ ID NO: 206325
  derived and/or modified CDS sequence (opt5) from neuraminidase__InfluenzaA__ABB02883

SEQ ID NO: 206530 - RNA, 1410 nt, Artificial Sequence
  derived and/or modified CDS sequence (opt5) from neuraminidase__InfluenzaA__ABB02894
augaaccccaaucagaagaucauuaccaucggcagcgugucccugacaauugccacgaucugcuuccucaugcaaauugcuauccuggucaccacaguuacccuucacuuuaaacaguacgaguguaacucuccuccgaauaaccaggugaugcugugcgaacccacaaucauugagagaaauaucaccgaaaugguguaucucacaaacaccacgauugagaaggaaaucuguccuaaacuggccgaguaccggaauuggagcaagccccagugcaacauuaccggguucgcgccuuuuuccaaagacaauucuauccgccuuagcgcuggaggcgauauuugggucacaagagagcccuauguguccugugacccugauaagugcuaccaauucgcccuggggcagggaaccacacucaacaauggccauucuaacgacaccguucacgaucggacgccguaucgcacacugcugaugaaugaacucggggugcccuuucaucugggaaccaagcaggucuguaucgccuggagcuccagcucuugccacgacggcaaagccuggcuucauguguguguuacaggcgaugacgagaacgcuaccgcuuccuucaucuacaaugggagacugguggauagcauuggaucuugguccaagaaaauccuccggacccaggaaagcgagugcgucuguauuaacggcacaugcacgguggugaugaccgacgggucugccuccggaaaggcggauacaaaaauccuguuuauugaggaaggcaagaucguccacaccagccuucuguccgggucugcccaacacguugaggaaugcagcuguuauccucgcuaccccggagugagaugcgugugucgggacaacuggaagggcuccaaucgcccuaucgucgauauuaacgugaaagacuacagcaucguuucuuccuaugugugcagcggccucgucggggacacacccagaaagaaugauucuagcuccucuagccauugucuggacccgaacaaugaggaaggaggccacggggugaaaggaugggcuuucgaugacggcaacgauguuuggauggggcggaccauuuccgagaagcugcgcagcggauacgagacguuuaaagugaucgaaggcuggucuaagccuaauuccaaacuccagauuaacagacaggucaucguggaccggggcaaucgcagcggguauucuggaaucuucuccgucgagggcaagagcugcauuaacagauguuuuuacguggaacugauccgggggagaaagcaggagacagaaguucuuuggaccuccaauucuauuguggucuucugcggaaccagcggcacauaugggaccggcuccuggcccgauggagccgacaucaaccugaugccuauuuga

SEQ ID NO: 206531 - RNA, 1410 nt, Artificial Sequence; identical to SEQ ID NO: 206133
  derived and/or modified CDS sequence (opt5) from neuraminidase__InfluenzaA__ABB02905

SEQ ID NO: 206532 - RNA, 1413 nt, Artificial Sequence
  derived and/or modified CDS sequence (opt5) from neuraminidase__InfluenzaA__ABB02916
augaaccccaaucagaagaucauuaccaucggcagcauuuccaucgccauugggaucaucucucugaugcuccaaauuggaaacaucauuagcaucugggcuucccacucuauucagacaggcagccagaaucauacgggggugugcaaccagagaaucauuaccuacgaaaauuccacaugggucaaccacaccuauguuaauaucaacaauacaaacgugaucgccgagaaagacaagaccucugugacacuggcgggaaauagcucccuuuguagcauuucuggcugggcuaucuacaccaaagauaacuccauucggaucgggagcaagggagacgucuucgugauucgcgagccuuuuaucucuugcucccaucuggaauguagaacguucuuucucacccaaggcgcccugcuuaaugauaaacacagcaacggcacaguuaaggaccggucuccguaucgcgcccugauguccugcccccucggggaggcuccuagccccuacaauuccaaguucgaaucuguggccuggagcgcuuccgccugucaugauggaaugggcuggcugaccaucgggauuagcggaccugacaacggcgcggucgccgugcugaaauauaacgggaucauuacagagaccaucaagucuuggaaaaagcagauucucagaacgcaggaguccgaaugcguuugugugaauggaagcugcuuuacaaucaugaccgauggccccucuaacggcgcugccagcuacaaaaucuucaagauugagaaggggaaagucacaaaguccaucgaacugaaugcuccuaacuuucacuaugaggaguguucuugcuacccggacaccggaaccgugaugugugugugccgggauaauuggcacggcagcaaccgccccugggucuccuucaaucagaaccuugacuaccaaauuggguauaucugcagcggaguuuuuggcgauaauccuagaccccgggacggggaaggaucuuguaacccugugacaguggauggcgccaauggcgucaaaggguucuccuacaaguauggaaacggcguguggauugggcgcacgaaaagcaauagacugcggaagggauuugagaugaucugggaccccaacggcuggaccgacacagauucugacuucuccguuaaacaggauguggucgcgauuaccgacuggagcggguacuccggcucuuuugugcagcauccggaacucacaggacuggauugcauccgcccuuguuucuggguugagcuugugagaggccugccccgggaaaauaccacgaucuggacaagcggguccucuauuagcuucugcggagucaacuccgacaccgccaacuggagcuggccugauggcgcugagcuccccuuuaccaucgacaaguga

SEQ ID NO: 206533 - RNA, 1413 nt, Artificial Sequence
  derived and/or modified CDS sequence (opt5) from neuraminidase__InfluenzaA__ABB02927
augaaccccaaucagaagaucauuaccaucggcagcauuuccaucgccauugggaucaucucucugaugcuccaaauuggaaacaucauuagcaucugggcuucccacucuauucagacaggcagccagaaucauacggggaucugcaaccagagaauuaucaccuacgagaauagcacaugggugaaccacaccuaugucaauaucaacaauacaaacguuguggccggaaaagacaagaccucugugacacuggcgggcaauagcucccuuuguagcauuucugggugggcuaucuacaccaaagauaacuccauucggaucggaagcaagggcgacgucuucgugauucgcgaaccuuuuaucucuugcucccaucuggaguguagaacguucuuucucacccaaggcgcccugcuuaaugauaaacacagcaacgggacaguuaaggaccggucuccguaucgcgcccugauguccugcccccucggagaagcuccuagccccuacaauuccaaguucgagucuguggccuggagcgcuuccgccugucaugauggcaugggguggcugaccaucggaauuagcggcccugacaacggggcggucgccgugcugaaauauaacggaaucauuacagaaaccaucaagucuuggaaaaagcggauucucagaacgcaggaguccgagugcguuugugugaauggcagcugcuuuacaaucaugaccgauggccccucuaacggggcugccagcuacaaaaucuucaagauugaaaagggaaaagucacaaaguccaucgagcugaaugcuccuaacuuucacuaugaagaguguucuugcuacccggacaccggcaccgugaugugugugugccgcgauaauuggcacgggagcaacagacccugggucuccuucaaucagaaccuugacuaccagauuggauauaucugcagcggcguuuuuggggauaauccucggcccaaagacggagagggcucuuguaacccugugacaguggauggcgccgacggggucaagggauucuccuacaaauauggcaaugggguguggauuggacgcacgaaguccaacaaacugagaaagggcuuugaaaugaucugggaccccaauggguggaccgauacagacucugauuucuccguuaagcaagacguggucgcgauuaccgauuggagcggcuacuccggaucuuuugugcagcauccggagcucacaggccuggacugcauccggccuuguuucuggguugaacuugugcgcgggcugcccagagagaacaccacgaucuggacaagcggauccucuauuagcuucugcggcgucaauuccgauaccgccaacuggagcuggccugacggggcugaacuccccuuuaccaucgauaaauga

SEQ ID NO: 206534 - RNA, 1413 nt, Artificial Sequence
  derived and/or modified CDS sequence (opt5) from neuraminidase__InfluenzaA__ABB02939
augaaccccaaucagaagaucauuaccaucggcagcauuuccaucgccauugggaucaucucucugaugcuccaaauuggaaacaucauuagcaucugggcuucccacucuauucagacaggcagccagaaucauacgggggugugcaaccagagaaucauuaccuacgagaauagcacauggaugaaccacaccuaugucaauaucaacaauacaaacguuaucgccggaaaagacaagaccucugugacacuggcgggcaauagcucccuuuguagcauuucugggugggcuaucuacaccaaagauaacuccauucggaucggaagcaagggcgacguguucgucauucgcgaaccuuuuaucucuugcucccaucuggaguguagaacguucuuucucacccaaggcgcccugcuuaaugauaaacacagcaacgggacagugaaggaccggucuccguaucgcgcccugauguccugcccccucggagaagcuccuagccccuacaauuccaaguucgagucuguugccuggagcgcuuccgccugucaugauggcaugggguggcugaccaucggaauuagcggcccugacaacggggcgguggccguccugaaauauaacggaaucauuacagaaaccaucaagucuuggaaaaagcagauucucagaacgcaggaguccgagugcguguguguuaauggcagcugcuuuacaaucaugaccgauggccccucuaacggggcugccagcuacaaaaucuucaagauugaaaagggaaaagugacaaaguccauggagcugaaugcuccuaacuuucacuaugaagaguguucuugcuacccggacaccggcaccgucaugugugugugccgggauaauuggcacgggagcaaccgccccuggguguccuucaaucagaaccuugacuaccaaaucggauauauuugcagcggcgucuuuggggauaauccuagacccaaagacggagagggcucuuguaacccuguuacaguggauggcgccaauggggugaagggauucuccuacaaauauggcaacggggucuggaucggacggacgaaguccaaucgccugagaaaaggcuuugaaaugauuugggaccccaacggguggaccgacacagauucugacuucuccgugaagcaggauguuguggcgaucaccgacuggagcggcuacuccggaucuuuuguccagcauccggagcucacaggccuggauugcauucggccuuguuucuggguggaacuuguucgcgggcugcccaaggagaauaccacgaucuggacaagcggauccucuaucagcuucugcggcgugaacuccgacaccgccaacuggagcuggccugauggggcugaacuccccuuuaccauugacaaauga

SEQ ID NO: 206535 - RNA, 1410 nt, Artificial Sequence; identical to SEQ ID NO: 206450
  derived and/or modified CDS sequence (opt5) from neuraminidase__InfluenzaA__ABB02950

SEQ ID NO: 206536 - RNA, 1410 nt, Artificial Sequence; identical to SEQ ID NO: 206351
  derived and/or modified CDS sequence (opt5) from neuraminidase__InfluenzaA__ABB02961

SEQ ID NO: 206537 - RNA, 1410 nt, Artificial Sequence; identical to SEQ ID NO: 206351
  derived and/or modified CDS sequence (opt5) from neuraminidase__InfluenzaA__ABB02972

SEQ ID NO: 206538 - RNA, 1410 nt, Artificial Sequence; identical to SEQ ID NO: 206351
  derived and/or modified CDS sequence (opt5) from neuraminidase__InfluenzaA__ABB02983

SEQ ID NO: 206539 - RNA, 1410 nt, Artificial Sequence; identical to SEQ ID NO: 206351
  derived and/or modified CDS sequence (opt5) from neuraminidase__InfluenzaA__ABB02994

SEQ ID NO: 206540 - RNA, 1410 nt, Artificial Sequence; identical to SEQ ID NO: 206351
  derived and/or modified CDS sequence (opt5) from neuraminidase__InfluenzaA__ABB03005

SEQ ID NO: 206541 - RNA, 1410 nt, Artificial Sequence; identical to SEQ ID NO: 206356
  derived and/or modified CDS sequence (opt5) from neuraminidase__InfluenzaA__ABB03016

SEQ ID NO: 206542 - RNA, 1410 nt, Artificial Sequence; identical to SEQ ID NO: 206351
  derived and/or modified CDS sequence (opt5) from neuraminidase__InfluenzaA__ABB03027

SEQ ID NO: 206543 - RNA, 1410 nt, Artificial Sequence; identical to SEQ ID NO: 206356
  derived and/or modified CDS sequence (opt5) from neuraminidase__InfluenzaA__ABB03038

SEQ ID NO: 206544 - RNA, 1410 nt, Artificial Sequence; identical to SEQ ID NO: 206351
  derived and/or modified CDS sequence (opt5) from neuraminidase__InfluenzaA__ABB03049

SEQ ID NO: 206545 - RNA, 1410 nt, Artificial Sequence
  derived and/or modified CDS sequence (opt5) from neuraminidase__InfluenzaA__ABB03060
augaaccccaaucagaagaucauuaccaucggcagcgugucccugacaauuucuacgaucugcuucuuuaugcaaauugccauccucaucaccacagucacccugcacuucaaacaguacgaguuuaacagcccuccgaauaaccagguuaugcuuugugaacccacaauuaucgagagaaauauuaccgaaaucguguaucugacaaacaccacgauugagaaggaaaucugcccuaaacucgcugaguaccggaauugguccaagccccagugugacauuaccggguucgccccuuuuucuaaagauaacagcauccgccuguccgcgggaggcgacaucugggugacaagagagcccuaugucucuugcgauccugacaaguguuaccaauucgcucuugggcagggaaccacacugaauaacgugcauagcaaugauaccguucacgaccggacgccguaucgcacacuccugaugaacgaacugggcgugcccuuucaucucgggaccaagcaggucugcauugccugguccucuagcuccugucacgauggaaaagccuggcugcaugugugcguuacaggcgacgauaagaaugcuaccgccagcuucaucuacaacggcagacuuguggacucuauugucuccuggagcaaagagauccugcggacccaggaaucugagugugugugcauuaaugggacauguacgguggucaugaccgauggauccgcuagcggcaaggccgacacaaaaauccucuuuaucgaggaagggaagauuguucacaccuccacacugucuggaagcgcgcaacacguggaggaaugcuccugcuauccucgcuaccccggcaucagaugugugugccgggauaacuggaaggggagcaaccgcccuauugucgacaucaauauuaaagacuacucuaucguguccagcuauguuuguucuggacuugugggcgauacccccagaaagaacgacagcuccucuagcucccauugccuggauccgaauaacgaggaaggcgggcacggagucaaaggcugggccuucgacgaugggaaugacguguggaugggacggacgaucagcgagaagcuccgcucuggcuacgagacauuuaaaguuauugaagggugguccaacccuaauagcaagcugcagaucaacagacaggugauugucgaucggggaaaucgcucuggcuauuccggcaucuucagcguggaggggaaauccuguauuaacagaugcuuuuacgucgaacugauccggggaagaaaggaggaaaccgaggugcucuggaccucuaauagcauuguuguguucuguggcacauccgggaccuauggaacaggcucuuggcccgacggggcugauaucaaccugaugccuaucuga

SEQ ID NO: 206546 - RNA, 1410 nt, Artificial Sequence
  derived and/or modified CDS sequence (opt5) from neuraminidase__InfluenzaA__ABB03071
augaaccccaaucagaagaucauuaccaucggcagcgugucccugacaauuucuacgaucugcuucuuuaugcaaauugccauccucaucaccacagucacccugcacuucaaacaguacgaguuuaacagcccuccgaauaaccagguuaugcuuugugaacccacaauuaucgagagaaauauuaccgaaaucguguaucugacaaacaccacgauugagaaggaaaucugcccuaaacucgcugaguaccggaauugguccaagccccagugugggauuaccggauucgccccuuuuucuaaagacaacagcauccgccuguccgcgggcggggauaucugggugacaagagagcccuaugucucuugcgacccugauaaguguuaccaauucgcucuuggacagggcaccacacugaauaacgugcauagcaaugacaccguucacgaucggacgccguaucgcacacuccugaugaacgaacugggggugcccuuucaucucggaaccaagcaggucugcauugccugguccucuagcuccugucacgacggcaaagccuggcugcaugugugcguuacaggcgaugacaagaaugcuaccgccagcuucaucuacaacgggagacuuguggauucuauugucuccuggagcaaagagauccugcggacccaggaaucugagugugugugcauuaauggaacauguacgguggucaugaccgacggcuccgcuagcgggaaggccgauacaaaaauccucuuuaucgaggaaggaaagauuguucacaccuccacacugucuggcagcgcgcaacacguggaggaaugcuccugcuauccucgcuaccccggggugagaugugucugccgggacaacuggaagggaagcaaccgcccuaucguggauauuaauaucaaagacuacucuauuguuuccagcuauguguguucuggccuugucggcgacacccccagaaagaacgauagcuccucuagcucccauugccuggacccgaauaacgaggaagggggacacggcgugaaagggugggccuucgaugacggaaaugauguuuggaugggccggacgaucagcgagaagcuccgcucuggguacgagacauuuaaagugaucgaaggaugguccaacccuaauagcaagcugcagauuaacagacaggucaucguggacaaaggcaaucggucuggcuauuccgggauuuucagcgucgagggaaaguccuguaucaaccgcugcuuuuacguggaacugauuagaggccggaaggaggaaaccgagguucucuggaccucuaauagcaucguggucuucugugggacauccggaaccuauggcacagggucuuggcccgauggcgcugacauuaaccugaugccuaucuga

SEQ ID NO: 206547 - RNA, 1410 nt, Artificial Sequence
  derived and/or modified CDS sequence (opt5) from neuraminidase__InfluenzaA__ABB03093
augaaccccaaucagaagaucauuaccaucggcagcgugucccugacaauuucuacgaucugcuucuuuaugcaaauugccauccucaucaccacagucacccugcacuucaaacaguacgaguuuaacagcccuccgaauaaccagguuaugcuuugugaacccacaauuaucgagagaaauauuaccgaaaucguguaucugacaaacaccacgauugagaaggaaaucugcccuaaacucgcugaguaccggaauugguccaagccccagugugacauuaccggguucgccccuuuuucuaaagauaacagcauccgccuguccgcgggaggcgacaucugggugacaagagagcccuaugucucuugcgauccugacaaguguuaccaauucgcucuugggcagggaaccacacugaauaacgugcauagcaaugauaccguucacgaccggacgccguaucgcacacuccugaugaacgaacugggcgugcccuuucaucucgggaccaagcaggucugcauugccugguccucuagcuccugucacgauggaaaagccuggcugcaugugugcguuacaggcgacgauaagaaugcuaccgccagcuucaucuacaacggcagacuuguggacucuauugucuccuggagcaaagagauccugcggacccaggaaucugagugugugugcauuaaugggacauguacgguggucaugaccgauggauccgcuagcggcaaggccgacacaaaaauccucuuuaucgaggaagggaagauuguucacaccuccacacugucuggaagcgcgcaacacaucgaggaaugcuccugcuauccucgcuaccccggcgugagaugugugugccgggauaacuggaaggggagcaaccgcccuauugucgacaucaauauuaaagacuacucuaucguguccagcuauguuuguucuggacuugugggcgauacccccagaaagaacgacagcuccucuagcucccauugccuggauccgaauaacgaggaaggcgggcacggagucaaaggcugggccuucgacgaugggaaugacguguggaugggacggacgaucagcgagaagcuccgcucuggcuacgagacauuuaaaguuauugaagggugguccaacccuaauagcaagcugcagaucaacagacaggugauugucgaucggggaaaucgcucuggcuauuccggcaucuucagcguggaggggaaauccuguauuaacagaugcuuuuacgucgaacugauccggggaagaaaggaggaaaccgaggugcucuggaccucuaauagcauuguuguguucuguggcacauccgggaccuauggaacaggcucuuggcccgacggggcugauaucaaccugaugccuaucuga

SEQ ID NO: 206548 - RNA, 1410 nt, Artificial Sequence; identical to SEQ ID NO: 206454
  derived and/or modified CDS sequence (opt5) from neuraminidase__InfluenzaA__ABB03104

SEQ ID NO: 206549 - RNA, 1410 nt, Artificial Sequence
  derived and/or modified CDS sequence (opt5) from neuraminidase__InfluenzaA__ABB03115
augaaccccaaucagaagaucauuaccaucggcagcgugucccugacaauuucuacgaucugcuucuuuaugcaaauugccauccucaucaccacagucacccugcacuucaaacaguacgaguuuaacagcccuccgaauaaccagguuaugcuuugugaacccacaauuaucgagagaaauauuaccgaaaucguguaucugacaaacaccacgauugagaaggaaaucugcccuaaacucgcugaguaccggaauugguccaagccccaguguaacauuaccggguucgccccuuuuucuaaagacaauagcauccgccuguccgcgggaggcgauaucugggugacaagagagcccuaugucucuugcgacccugauaaguguuaccaauucgcucuugggcagggaaccacacugaacaaugugcauagcaacgacaccguucacgaucggacgccguaucgcacacuccugaugaaugaacugggcgugcccuuucaucucgggaccaagcaggucugcauugccugguccucuagcuccugucacgacggaaaagccuggcugcaugugugcguuacaggcgaugacgagaacgcuaccgccagcuucaucuacaauggcagacuuguggauucuauugucuccuggagcaagaaaauccugcggacccaggaaucugagugugugugcauuaacgggacauguacgguggucaugaccgacggauccgcuagcggcaaggccgauacaaaaauccucuuuaucgaggaagggaagauuguucacaccuccacacugucuggaagcgcgcaacacguggaggaaugcuccugcuauccucgcuaccccggcgugagaugugucugccgggacaacuggaaggggagcaaucgcccuaucguggauauuaacaucaaagacuacucuauuguuuccagcuauguguguucuggacuugucggcgacacccccagaaagaaugauagcuccucuagcucccauugccuggacccgaacaaugaggaaggcgggcacggagugaaaggcugggccuucgaugacgggaacgauguuuggaugggacggacgaucagcgagaagcuccgcucuggcuacgagacauuuaaagugaucgaagggugguccaauccuaacagcaagcugcagauuaauagacaggucaucguggaccggggaaaccgcucuggcuauuccggcauuuucagcgucgaggggaaauccuguaucaauagaugcuuuuacguggaacugauucggggaagaaagcaggagaacgaaguucucuggaccucuaauagcaucguggucuucuguggcaccuccgggacauauggaaccggcucuuggcccgauggggcugacauuaaccugaugccuaucuga

SEQ ID NO: 206550 - RNA, 1413 nt, Artificial Sequence; identical to SEQ ID NO: 206458
  derived and/or modified CDS sequence (opt5) from neuraminidase__InfluenzaA__ABB03126

SEQ ID NO: 206551 - RNA, 1413 nt, Artificial Sequence
  derived and/or modified CDS sequence (opt5) from neuraminidase__InfluenzaA__ABB03148
augaaccccaaucagaagaucauuaccaucggcagcauuuccaucgccauugggacaaucucucugaugcuccaaaucggaaacauuaucagcauuugggcuucccacucuauccagacgggcagccagaaucauaccgggauuugcaaccagagaaucauuacauacgaaaauuccaccugggugaaccacacauaugucaauaucaacaauaccaacguuguggccggaaaagacaagacaucugugacccuggcgggcaauagcucccuuuguagcaucucugggugggcuauuuacacgaaagauaacuccauccggauuggaagcaagggcgacgucuucgugauccgcgagccuuuuauuucuugcucccaucuggaguguagaaccuucuuucucacacaaggcgcccugcuuaaugauaaacacagcaacgggaccguuaaggaccggucuccguaucgcgcccugauguccugcccccucggagaagcuccuagccccuacaauuccaaguucgagucuguggccuggagcgcuuccgccugucaugauggcaugggguggcugacaaucggaaucagcggcccugacaacggggcggucgccgugcugaaauauaacggaauuaucaccgaaacgauuaagucuuggaaaaagagaauccuccggacacaggaguccgagugcguuugugugaauggcagcugcuuuaccauuaugacagauggccccucuaacggggcugccagcuacaaaaucuucaagaucgaaaagggaaaagucaccaaguccauugagcugaaugcuccuaacuuucacuaugaagaguguucuugcuacccggacaccggcacagugaugugugugugccgcgauaauuggcacgggagcaacagacccugggucuccuucaaucagaaccuugacuaccagaucggauauauuugcagcggcguuuuuggggauaauccucggcccaaagacggaaagggcucuuguaacccugugacgguggauggcgccgacggggucaaaggauucuccuacaaguauggcaaugggguguggaucggacgcaccaaaagcaacagacugcggaagggcuuugagaugauuugggaccccaauggguggacagauaccgacucugauuucuccguuaagcaagacguggucgcgaucacagauuggagcggcuacuccggaucuuuugugcagcauccggaacucaccggccuggacugcauucgcccuuguuucuggguugagcuugugagagggcugccccgggaaaacacgacaaucuggaccagcggauccucuaucagcuucugcggcgucgauuccgacaccgccaauuggagcuggccugauggggcugagcuccccuuuacaauugacaaauga

SEQ ID NO: 206552 - RNA, 1410 nt, Artificial Sequence
  derived and/or modified CDS sequence (opt5) from neuraminidase__InfluenzaA__ABB04286
augaaccccaaucagaagaucauuaccaucggcagcgugucccugacaauugccacgaucugcuuccucaugcaaauugcuauccuggucaccacaguuacccuucacuuuaaacaguacgaguguucuagcccuccgaacaaucaggugaugcccugcgaaccuaucauuaucgagagaaacauuacagaaaucguguaucugaccaauacaaccauugagaaggaaaucugucccaaacucgucgaguaccggaacugguccaagccucagugcaaaauuacgggguucgcccccuuuucuaaggacaauagcauccgccuguccgcgggaggcgauaucugggugaccagagagccuuauguuucuugugacccggggaagugcuaccaauucgcucuuggacagggcacaacccuggauaacaaacauagcaaugacacaauucacgaucggacgccccaucgcacccuccugaugaacgaacugggggugccuuuucaccucggaacaagacaggucuguaucgccugguccuccucuuccugccaugacggcaaggccuggcugcacguguguguuaccggcuaugauaaaaaugcuacagccagcuucauuuacgacgggcggcuuguggauucuaucggauccuggagcaagaacauucugcgcacccaggagucugaaugcgucuguaucaaugggaccugcacaguggugaugacggacggcuccgcuagcgagagagccgauaccaaaauccucuuuauugaggaaggaaagaucguccacauuagcccccugucuggcagcgcgcaacauguugaggaaugcuccuguuauccucgguaccccggggugcgcugcguguguagagacaacuggaagggaagcaaucggccggucguggauaucaacguuaaagacuacucuauuguguccagcuaugucugcucuggccuugugggcgacacaccucgcaagaacgauagaagcuccucuagcuacugucggaaucccaacaaugagaaagggaaccacggaguuaagggcugggccuucgacgaugggaaugacguguggaugggacgcaccaucuccgaagagagcagaucuggcuaugagacauuuaaagucaucgggggaugguccaccccuaacagcaagucucagauuaauagacaggugaucgucgauuccggcaaccggagcggcuacuccgggauuuucucuguggaaggaaaaagcugcaucaaucgcuguuuuuauguugagcugauucggggcagagaacaggagacgcgcgugugguggacauccaacucuaucgucguguucugcgggaccagcggaaccuacggcacaggguccuggcccgacggcgcugauauuaaucucaugcccaucuga

SEQ ID NO: 206553 - RNA, 1410 nt, Artificial Sequence
  derived and/or modified CDS sequence (opt5) from neuraminidase__InfluenzaA__ABB04297
augaaccccaaucagaagaucauuaccaucggcagcgugucccugacaauugccacgaucugcuuccucaugcaaauugcuauccuggucaccacaguuacccuucacuuuaaacaguacgagugugacucuccugccaacaaucaggugaucccgugcgaacccauuacaaucgagagaaacauuaccgaaaucguguaucugacaaauaccacgauugagaaggaaaucuguccuaaacucgucgaguaccggaacuggagcaagccccagugcaaaauuaccggguucgcgccuuuuuccaaggauaauucuauccgccugagcgcuggaggcgacaucugggugacaagagagcccuauguuuccugugauccugggaagugcuaccaauucgcccuuggacagggcaccacacuggacaacaaacauucuaaugauaccauucacgaccggacgccgcaucgcacacuccugaugaacgaacugggggugcccuuucaccucggaaccagacaggucuguaucgccuggagcuccagcucuugccaugauggcaaggcuuggcugcacguguguguuacaggcuaugacaaaaaugccaccgcuuccuucauuuacgaugggcggcuuguggacagcaucggaucuuggucccagaacauucugcgcacccaagagagcgaaugcgucuguaucaauggcacaugcacgguggugaugaccgaugggucugccuccggacgggcggacacaaagauccucuuuauugaggagggcaaaaucguccacauuagcccucuguccgggucugcccagcauguugaagagugcagcuguuauccccgguacccuggagugcgcugcaucuguagagauaacuggaagggcuccaaucggcccguggucgacauuaacgugaaggacuacagcaucgauucuuccuauguuugcagcggccuugugggggacaccccgcgcaacaaugauagaucuagcaacuccuacugucggaauccuaacaaugaaaaaggaaaccacggcgucaaggggugggcuuucgacgauggaaaugacguguggaugggccgcacaaucucugaggauagcagauccggguaugaaaccuuuaaaguuauuggaggcuggagcacgcccaacucuaagcugcagaucaauagacaggugauugucgacuccgauaacagaagcggcuacucugggaucuucuccguggagggaaaaagcugcauuaaucgcuguuuuuaugucgagcucauccggggcagagaacaagagacacgcgugugguggaccuccaacucuauuguuguguucugcgggaccagcggaacauacggcaccggguccuggccugacggcgccgauaucaaucugaugcccaucuga

SEQ ID NO: 206554 - RNA, 1410 nt, Artificial Sequence
  derived and/or modified CDS sequence (opt5) from neuraminidase__InfluenzaA__ABB04319
augaaccccaaucagaagaucauuaccaucggcagcgugucccugacaauugccacgaucugcuuccucaugcaaauugcuauccuggucaccacaguuacccuucacuuuaaacaguacgaguguucuagcccuccgaacaaucaggugaugcccugcgaaccuacaaucauugagagaaacaucaccgaaauuguguaucugacaaauaccacgaucgagaaggaaauuugucccaaacucgucgaguaccggaacugguccaagccucagugcaaaaucaccggguucgcccccuuuucuaaggacaauagcauucgccuguccgcgggaggcgauaucugggugacaagagagccuuauguuucuugugacccggggaagugcuaccaauucgcucuuggacagggcaccacacugaacaaucggcauagcaacgauaccgugcacgaccgcacgcccuauagaacacuccugaugaaugaacugggggucccuuuucaucucggaaccaaacagguguguaucgccugguccuccucuuccugccacgauggcaaggccuggcugcauguuugugugacaggccacgacaaaaacgcuaccgccagcuucauuuacaaugggcggcuugucgauucuaucggauccuggagcaagaacauucugcgcacccaggagucugaaugcguguguaucaauggcacaugcacgguggucaugaccgacggguccgcuagcgagagagccgauacaaaaauucucuuuaucgaggaaggaaagaucguucacauuagcccccugucuggcagcgcgcaacauguggaggaaugcuccuguuauccucgguaccccggggugcgcugcgucuguagagacaacuggaagggaagcaaccggccgaucguggauauuaauguuaaagacuacucuaucguguccagcuaugucugcucuggccuugugggcgauaccccucgcaagaacgacagaagcuccucuagcuacugucagaaucccaacaaugagaaagggucccacggaguuaagggcugggccuucgacgaugggaacgacguguggaugggacggacaauuggcgaggaacugcgcagcggguaugagaccuuuaaagucaucggaggcuggucuacgccuaauuccaagcuccagaucaacagacaggugauugucgauagcggcaaucggucuggguacuccggaaucuucagcguggaaggcaaauccugcauuaacagauguuuuuauguugagcugauccgcgggcggaagcaagaaacaagagugugguggaccucuaauagcauugucguguucugcggaaccuccggcacauacgggaccggcucuuggcccgacggagcugauaucaaccugaugcccauuuga

SEQ ID NO: 206555 - RNA, 1410 nt, Artificial Sequence
  derived and/or modified CDS sequence (opt5) from neuraminidase__InfluenzaA__ABB04341
augaaccccaaucagaagaucauuaccaucggcagcgugucccugacaauugccacgaucugcuuccucaugcaaauugcuauccuggucaccacaguuacccuucacuuuaaacaguacgagugugacucuccugccaacaaucaggugaugccgugcgaacccaucauuaucgagagaaacauuacagaaaucguguaucugaccaauacaaccauugagaaggaaaucuguccuaaacucgucgaguaccggaacuggagcaagccccagugcaaaauuacgggguucgcgccuuuuuccaaggauaauucugugcgccugagcgcuggaggcgacaucuggguuaccagagagcccuauguguccugugauccugggaagugcuaccaauucgcccuuggacagggcacaacccuggacaacaaacauucuaaugauacaauccacgaccggaccccgcaucgcacgcuccugaugaacgaacuggggguccccuuucaccucggaacaagacagguguguauugccuggagcuccagcucuugccaugauggcaaggcuuggcugcacguuugugugaccggcuaugacaaaaaugccacagcuuccuucaucuacgaugggcggcuugucgacagcauuggaucuuggucccagaacauccugcgcacccaagagagcgaaugcguguguauuaauggaaccugcacaguggucaugacggaugggucugccuccggcagagcggacaccaagauccucuuuaucgaggagggcaaaauuguucacaucagcccucuguccgggucugcccagcauguggaagagugcagcuguuauccccgguacccuggagugcgcugcauuuguagagauaacuggaagggcuccaaucggcccgucguggacaucaacguuaaggacuacagcauugauucuuccuaugugugcagcggccuugucggggacacaccgcgcaaaaacgauagaucuagcaauuccuacugucggaacccuaauaacgaaaagggaaaucacggcgugaaagggugggcuuucgacgauggaaacgacguuuggaugggccgcaccaucucugaggauagcagauccggguaugaaacauuuaaggugaucggaggcuggagcacccccaauucuaaacugcagauuaaccggcaggucaucguggacuccgauaauagaagcggcuacucugggauuuucuccgucgagggaaagagcugcaucaaccgcuguuuuuauguggagcucauucggggcagagaacaagagacgcgcguuugguggacauccaauucuaucguggucuucugcgggaccagcggaaccuacggcacaggguccuggccugacggcgccgauauuaaccugaugcccaucuga

SEQ ID NO: 206556 - RNA, 1410 nt, Artificial Sequence
  derived and/or modified CDS sequence (opt5) from neuraminidase__InfluenzaA__ABB04352
augaaccccaaucagaagaucauuaccaucggcagcgugucccugacaauugccacgaucugcuuccucaugcaaauugcuauccuggucaccacaguuacccuucacuuuaaacaguacgaguguucuagcccuccgaacaaucaggugaugcccugcgaaccuaucauuaucgagagaaacauuacagaaaucguguaucugaccaauacaaccauugagaaggaaaucugucccaaacucgucgaguaccggaacugguccaagccucagugcaaaauuacgggguucgcccccuuuucuaaggacaauagcauccgccuguccgcgggaggcgauaucugggugaccagagagccuuauguuucuugugacccggggaagugcuaccaauucgcucuuggacagggcacaacccugaacaauaaacauagcaacgauacagugcacgaccggacccccuaucgcacgcuccugaugaaugaacugggggucccuuuucaucucggaacaaaacagguguguauugccugguccuccucuuccugccacgauggcaaggccuggcugcauguuugugugaccggccacgacaagaacgcuacagccagcuucaucuacgaugggagacuugucgacucuauuggauccuggagcaaaaauauccugcggacccaggagucugaaugcguguguauuaacgggaccugcacaguggucaugacggauggcuccgcuagcgagcgcgccgacaccaagauccucuuuaucgaggaaggaaagauuguucacaucagcccccugucuggcagcgcgcaacauguggaggaaugcuccuguuauccuagauaccccggggugcggugcgucugucgcgauaauuggaaaggaagcaacagaccgauuguggacaucaacguuaaggauuacucuauuguguccagcuaugucugcucuggccuugugggcgacacaccucggaaaaaugaccgcagcuccucuagcuacuguagaaaccccaauaacgagaaggggucccacggaguuaaaggcugggccuucgaugacgggaaugauguguggaugggacggaccaucggcgaggaacugcgcagcggguaugagacauuuaaggucaucggaggcuggucuaccccuaacuccaaacuccagauuaauagacaggugaucgucgacagcggcaaccggucuggguacuccggaauuuucagcguggaaggcaaguccugcaucaauagauguuuuuauguugagcugauucgcgggcgggaacaggagacgagagugugguggacaucuaacagcaucgucguguucugcggaaccuccggcaccuacgggacaggcucuuggcccgauggagcugacauuaaucugaugcccaucuga

SEQ ID NO: 206557 - RNA, 1410 nt, Artificial Sequence
  derived and/or modified CDS sequence (opt5) from neuraminidase__InfluenzaA__ABB04374
augaaccccaaucagaagaucauuaccaucggcagcgugucccugacaauugccacggucugcuuccucaugcaaaucgcuauucugguuaccacagugacccuucacuuuaaacaguacgagugugacucuccugccaacaaucaggugaugccgugcgaacccaucaucauugagagaaacaucacagaaauugucuaucugaccaauacaaccaucgagaaggaaauuuguccuaaacucguggaguaccggaacuggagcaagccccagugcaaaaucacgggguucgcgccuuuuuccaaggauaauucuauucgccugagcgcuggaggcgacaucuggguuaccagagagcccuauguguccugugauccugggaagugcuaccaauucgcccuuggacagggcacaacccuggacaacaaacauucuaaugauacaauccacgaccggauuccgcaucgcacccuccugaugaacgaacuggggguccccuuucaccucggaacgagacagguguguaucgccuggagcuccagcucuugccaugauggcaaggcuuggcugcacguuugugugacaggcgacgaugagaaugccaccgcuuccuucauuuaugacgggcggcuugucgauagcaucggaucuuggucccagaacauucugcgcacacaagaaagcgagugcguguguaucaauggaaccugcaccguggucaugacagacgggucugccuccggcagagcggauacgcggauccucuuuauugaggaaggcaaaaucguucacauuagcccucuguccgggucugcccagcauguggaggaaugcagcuguuacccccgcuauccuggagugagaugcaucugucgggacaacuggaagggcuccaaucgccccgucguggacauuaacguuaaagauuacagcaucgacucuagauacgugugcuccggccuugucggggauaccccgcggaacaaugacaagagcucuaacagcaauugucgcaacccuaauaacgauaagggaaaucacggcgugaaagggugggcuuucgacgauggaaacgacguuuggaugggcagaacaaucuccaaggauucucggagcggguaugagaccuuuaaagugauuggaggcugguccacacccaauagcaagucucagaucaacagacaggucauuguggacuccgauaaucgcagcggcuacucugggaucuucuccgucgaaggaaaaagcugcauuaaccgguguuuuuauguggagcugaucagaggccgcgagcaagaaaccaagguuugguggacguccaauucuauuguggucuucugcgggacaagcggaaccuacggcaccggguccuggccugacggcgccgacaucaaccucaugcccaucuga

SEQ ID NO: 206558 - RNA, 1410 nt, Artificial Sequence
  derived and/or modified CDS sequence (opt5) from neuraminidase__InfluenzaA__ABB04931
augaaccccaaucagaagaucauuaccaucggcagcgugucccugacaauugccacgaucugcuuccucaugcaaauugcuauccuggucaccacaguuacccuucacuuuaaacaguacgagugugacucuccugccaacaaucaggugaugccgugcgaacccaucauuaucgagagaaacauuacagaaaucguguaucugaccaauacaaccauugagaaggaaaucuguccuaaacucgucgaguaccggaacuggagcaagccccagugcaaaauuacgggguucgcgccuuuuuccaaggauaauucuauccgccugagcgcuggaggcgacaucugggugaccagagagcccuauguuuccugugauccugggaagugcuaccaauucgcccuuggacagggcacaacccuggacaacaaacauucuaaugauacaauucacgaccggaccccgcaucgcacgcuccugaugaacgaacugggggugcccuuucaccucggaacaagacaggucuguaucgccuggagcuccagcucuugccaugauggcaaggcuuggcugcacguguguguuaccggcuaugacaaaaaugccacagcuuccuucauuuacgaugggcggcuuguggacagcaucggaucuuggucccagaacauucugcgcacccaagagagcgaaugcgucuguaucaauggaaccugcacaguggugaugacggaugggucugccuccggcagagcggacaccaagauccucuuuauugaggagggcaaaaucguccacauuagcccucuguccgggucugcccagcauguugaagagugcagcuguuauccccgguacccuggagugcgcugcaucuguagagauaacuggaagggcuccaaucggcccguggucgacauuaacgugaaggacuacagcaucgauucuuccuauguuugcagcggccuugugggggacacaccgcgcaacaaugauagaucuagcuccucuuacugucggaacccuaauaacgaaaaaggaaagcacggcgucaaagggugggcuuucgacgauggaaaugacguguggaugggccgcaccaucagcgaggauuccagaagcggguaugaaacauuuaagguuauuggaggcuggucuacccccaacuccaaacugcagaucaauagacaggugauugucgacagcgauaaccggucuggcuacuccgggaucuucagcguggagggaaaguccugcauuaaucgcuguuuuuaugucgagcucauccggggcagagaacaagagacgcgcgugugguggacaucuaacagcauuguuguguucugcgggaccuccggaaccuacggcacagggucuuggccugacggcgccgauaucaaucugaugcccaucuga

SEQ ID NO: 206559 - RNA, 1410 nt, Artificial Sequence
  derived and/or modified CDS sequence (opt5) from neuraminidase__InfluenzaA__ABB04942
augaaccccaaucagaagaucauuaccaucggcagcgugucccugacaauugccacgaucugcuuccucaugcaaauugcuauccuggucaccacaguuacccuucacuuuaaacaguacgaguguucuagcccuccgaacaaucaggugaugcccugcgaaccuaucauuaucgagagaaacauuacagaaaucguguaucugaccaauacaaccauugagaaggaaaucugucccaaacucgucgaguaccggaacugguccaagccucagugcaaaauuacgggguucgcccccuuuucuaaggacaauagcauccgccuguccgcgggaggcgauaucugggugaccagagagccuuauguuucuugugacccggggaagugcuaccaauucgcucuuggacagggcacaacccugaacaauaaacauagcaacgauacaauucacgaccggacccccuaucgcacgcuccugaugaaugaacugggggugccuuuucaucucggaacaaagcaggucuguaucgccugguccuccucuuccugccacgauggcaaagccuggcugcauguguguguuaccggccacgacaagaacgcuacagccagcuucauuuacgaugggagacuuguggacucuaucggauccuggagcaaaaauauucugcggacccaggagucugaaugcgucuguaucaacgggaccugcacaguggugaugacggauggcuccgcuagcgagcgcgccgacaccaagauccucuuuauugaggaaggaaagaucguccacauuagcccccugucuggcagcgcgcaacauguugaggaaugcuccuguuauccuagauaccccggggugcggugcgugugucgcgauaauuggaaaggaagcaacagaccgaucgucgacauuaacgugaaggauuacucuaucguuuccagcuaugugugcucuggccuugucggcgacacaccucggaaaaaugaccgcagcuccucuagcuacuguagaaaccccaauaacgagaaggggaaucacggagugaaaggcugggccuucgaugacgggaacgauguuuggaugggacggaccaucggcgaggaacugcgcuccggguaugagacauuuaaggugauuggaggcuggagcaccccuaauucuaaacuccagaucaacagacaggucauuguggacuccgauaaucggagcggcuacucugggaucuucuccgucgaaggaaagagcugcauuaacagauguuuuuauguggagcugauccgcggccgggaacaggagacgagaguuugguggacauccaauucuauuguggucuucugcgggaccagcggaaccuacggcacaggguccuggcccgacggcgcugauaucaaccugaugcccaucuga

SEQ ID NO: 206560 - RNA, 1410 nt, Artificial Sequence; identical to SEQ ID NO: 206556
  derived and/or modified CDS sequence (opt5) from neuraminidase__InfluenzaA__ABB04953

SEQ ID NO: 206561 - RNA, 1410 nt, Artificial Sequence; identical to SEQ ID NO: 206454
  derived and/or modified CDS sequence (opt5) from neuraminidase__InfluenzaA__ABB04975

SEQ ID NO: 206562 - RNA, 1410 nt, Artificial Sequence; identical to SEQ ID NO: 206252
  derived and/or modified CDS sequence (opt5) from neuraminidase__InfluenzaA__ABB04986

SEQ ID NO: 206563 - RNA, 1410 nt, Artificial Sequence
  derived and/or modified CDS sequence (opt5) from neuraminidase__InfluenzaA__ABB04997
augaaccccaaucagaagaucauuaccaucggcagcgugucccugacaauugccacgaucugcuuccucaugcaaauugcuauccuggucaccacaguuacccuucacuuuaaacaguacgaguguaacucuccuccgaauaaccaggugaugcugugcgaacccacaaucauugagagaaauaucaccgaaauugugcaucucacaaacaccacgaucgagaaggaaauuuguccuaaacuggccgaguaucggaauuggagcaagccccagugcaacaucaccggguucgcgccuuuuuccaaagacaauucuauucgccuuagcgcuggaggcgauaucugggucacaagagagcccuacguguccugugacccugauaagugcuaucaauucgcccuggggcagggaaccacacucaacaauggccacucuaacgacaccguucaugaucggacgccguaccgcacacugcugaugaaugaacucggggugcccuuucaccugggaaccaagcaggucuguaucgccuggagcuccagcucuugccaugacggcaaagccuggcuucacguguguguuacaggcgaugacgagaacgcuaccgcuuccuucauuuauaaugggagacugguggauagcaucggaucuugguccaagaaaauucuccggacccaggaaagcgagugcgucuguaucaacggcacaugcacgguggugaugaccgacgggucugccuccggaaaggcggauacaaaaauucuguuuaucgaggaaggcaagaucguccacaccagccuucuguccgggucugcccaacauguugaggaaugcagcuguuacccucgcuaucccggagugagaugcgugugucgggacaacuggaagggcuccaaucgcccuauugucgauaucaacgugaaagacuacagcauuguuucuuccuacgugugcagcggccucgucggggacacacccagaaagaaugauucuagcuccucuagccacugucuggacccgaacaaugaggaaggaggccauggggugaaaggaugggcuuucgaugacggcaacgauguuuggauggggcggaccaucuccgagaagcugcgcagcggauaugagacguuuaaagugauugaaggcuggucuaagccuaauuccaaacuccagaucaacagacaggucaucguggaccggggcaaucgcagcggguacucuggaauuuucuccgucgagggcaagagcugcaucaacagauguuuuuauguggaacugauucgggggagaaagcaggagacagaaguucuuuggaccuccaauucuaucguggucuucugcggaaccagcggcacauacgggaccggcuccuggcccgauggagccgacauuaaccugaaaccuaucuga

SEQ ID NO: 206564 - RNA, 1410 nt, Artificial Sequence; identical to SEQ ID NO: 206325
  derived and/or modified CDS sequence (opt5) from neuraminidase__InfluenzaA__ABB05008

SEQ ID NO: 206565 - RNA, 1410 nt, Artificial Sequence; identical to SEQ ID NO: 206133
  derived and/or modified CDS sequence (opt5) from neuraminidase__InfluenzaA__ABB05186

SEQ ID NO: 206566 - RNA, 1410 nt, Artificial Sequence; identical to SEQ ID NO: 206325
  derived and/or modified CDS sequence (opt5) from neuraminidase__InfluenzaA__ABB05219

SEQ ID NO: 206567 - RNA, 1410 nt, Artificial Sequence
  derived and/or modified CDS sequence (opt5) from neuraminidase__InfluenzaA__ABB46395
augaaccccaaucagaagaucauuaccaucggcagcgugucccugacaauugccacgaucugcuuccucaugcaaauugcuauccuggucaccacaguuacccuucacuuuaaacaguacgagugugacucuccugccaacaaacaggugaugccgugcgaacccaucauuaucgagagaaauauuacagaaaucguguaucugaccaacacaaccauugagaaagaaaucuguccuaagcucgucgaguaccggaauuggagcaaaccccagugcaagauuacgggguucgcgccuuuuuccaaggauaacucuauccgccugagcgcuggaggcgacaucugggugaccagagagcccuauguuuccugugauccugggaaaugcuaccaauucgcccuuggacagggcacaacccuggacaauaagcauucuaacgauacaauucacgaccggaccccgcaucgcacgcuccugaugaaugaacugggggugcccuuucaccucggaacaagacaggucuguaucgccuggagcuccagcucuugccaugauggcaaggcuuggcugcacguguguguuaccggcuaugacaagaacgccacagcuuccuucauuuacgaugggcggcuuguggacagcaucggaucuuggucccagaauauucugcgcacccaagagagcgaaugcgucuguaucaacggaaccugcacaguggugaugacggaugggucugccuccggcagagcggacaccaaaauccucuuuauugaggagggcaagaucguccacauuagcccucuguccgggucugcccagcauguugaagagugcagcuguuauccccgguacccuggagugcgcugcaucuguagagauaauuggaagggcuccaaccggcccguggucgacauuaaugugaaagacuacagcaucgauucuuccuauguuugcagcggccuugugggggacacaccgcgcaacaacgauagaucuagcuccucuuacugucggaauccuaacaaugaaaagggaacccacggcgucaaagggugggcuuucgacgauggaaacgacguguggaugggccgcacaaucagcgaggauuccagaagcggguaugaaaccuuuaagguuauuggaggcuggucuacgcccaauuccaaacugcagaucaacagacaggugauugucgacagcgauaaucggucuggcuacuccgggaucuucagcguggagggaaaguccugcauuaaccgcuguuuuuaugucgagcucauccggggcagagaacaagagacacgcgugugguggaccucuaauagcauuguuguguucugcgggaccuccggaacauacggcaccgggucuuggccugacggcgccgauaucaaccugaugcccaucuga

SEQ ID NO: 206568 - RNA, 1410 nt, Artificial Sequence; identical to SEQ ID NO: 206112
  derived and/or modified CDS sequence (opt5) from neuraminidase__InfluenzaA__ABB46417

SEQ ID NO: 206569 - RNA, 1410 nt, Artificial Sequence
  derived and/or modified CDS sequence (opt5) from neuraminidase__InfluenzaA__ABB46428
augaaccccaaucagaagaucauuaccaucggcagcgugucccugacaauugccacgaucugcuuccucaugcaaauugcuauccuggucaccacaguuacccuucacuuuaaacaguacgaguguaacucuccuccgaauaaccaggugaugcugugcgaacccacaaucauugagagaaauaucaccgaaauuguguaucucacaaacaccacgaucgagaaggaaauuuguccuaaacuggccgaguaccggaauuggagcaagccccagugcaacaucaccggguucgcgccuuuuuccaaagacaauucuauucgccuuagcgcuggaggcgauaucugggucacaagagagcccuauguguccugugacccugauaagugcuaccaauucgcccuggggcagggaaccacacucaacaauggccauucuaacgacaccguucacgaucggacgccguaucgcacacugcugaugaaugaacucggggugcccuuucaucugggaaccaagcaggucuguaucgccuggagcuccagcucuugccacgacggcaaagccuggcuucauguguguguuacaggcgaugacgagaacgcuaccgcuuccuucauuuacaaugggagacugguggauagcaucggaucuugguccaagaaaauucuccggacccaggaaagcgagugcgucuguaucaacggcacaugcacgguggugaugaccgacgggucugccuccggaaaggcggauacaaaaauucuguuuaucgaggaaggcaagaucguccacauuagcccucuuuccgggucugcccaacacguugaggaaugcagcuguuauccccgcuacccuggagugagaugcgugugucgggacaacuggaagggcuccaaucgccccaucgucgauauuaacgugaaagacuacagcaucguuucuuccuaugugugcagcggccuggucggggacaccccgagaaagaaugauucuuucagcuccucucauugucucgacccuaacaaugaggaaggaggccacggggugaaaggaugggcuuuugaugacggcaacgauguuuggauggggcggacaauuagcgagaagcugcgcuccggauacgagaccuucaaagugaucgaaggcuggagcaagcccaauucuaaacugcagaucaacagacaggucauuguggaccggggcaaucgcuccggguauagcggaaucuuuucugucgagggcaaguccugcauuaacagauguuucuacguggaacucauccgggggagaaaggaggaaacggagguuugguggacaagcaauuccauuguggucuuuugcggaaccucuggcaccuaugggacaggcagcuggccugauggagccgacaucaaccugaugcccauuuga

SEQ ID NO: 206570 - RNA, 1410 nt, Artificial Sequence
  derived and/or modified CDS sequence (opt5) from neuraminidase__InfluenzaA__ABB46439
augaaccccaaucagaagaucauuaccaucggcagcgugucccugacaauuucuacgaucugcuucuuuaugcaaauugccauccucaucaccacagucacccugcacuucaaacaguacgaguuuaacagcccuccgaauaaccagguuaugcuuugugaacccacaauuaucgagagaaauauuaccgaaaucguguaucugacaaacaccacgauugagaaggaaaucugcccuaaacucgcugaguaccggaauugguccaagccccagugugacauuaccggguucgccccuuuuucuaaagauaacagcauccgccuguccgcgggaggcgacaucugggugacaagagagcccuaugucucuugcgauccugacaaguguuaccaauucgcucuugggcagggaaccacacugaauaacgugcauagcaaugauaccguucacgaccggacgccguaucgcacacuccugaugaacgaacugggcgugcccuuucaucucgggaccaagcaggucugcauugccugguccucuagcuccugucacgauggaaaagccuggcugcaugugugcguuacaggcgacgauaagaaugcuaccgccagcuucaucuacaacggcagacuuguggacucuauugucuccuggagcaaagagauccugcggacccaggaaucugagugugugugcauuaauggggcuuguacaguggucaugacggauggauccgccagcggcaaggcggacaccaaaauccucuuuaucgaggaacgcagaauuguucacacauccacccugucugggagcgcccaacacguggaggaaugcuccugcuauccucgguaccccggagugcgcugugucugcagagauaacuggaagggcagcaaccggccuaucguggacauuaauaucaaggacuacucuauuguuuccagcuauguguguucugggcuugucggagauacaccccgcaaaaacgacagcuccucuagcuccaauugccuggauccgaacaaugaggaaggcggccauggggugaagggaugggcuuucgacgauggcaacgacguuuggauggggagaaccaucagcgagaaacuccggucuggauacgagacguuuaaggugaucgaaggcugguccaauccuaacagcaaacugcagauuaaucgccaggucaucguggauagagggaaccggucuggauauuccggcauuuucagcgucgagggcaaguccuguaucaauagaugcuuuuacguggaacugauucgcgggcggaaagaggaaacagagguucucuggaccucuaacagcaucguggucuucuguggaaccuccggcgccuaugggacaggaucuuggcccgacggcgcugauauuaaucugaugccuaucuga

SEQ ID NO: 206571 - RNA, 1410 nt, Artificial Sequence; identical to SEQ ID NO: 206418
  derived and/or modified CDS sequence (opt5) from neuraminidase__InfluenzaA__ABB46450

SEQ ID NO: 206572 - RNA, 1410 nt, Artificial Sequence; identical to SEQ ID NO: 206399
  derived and/or modified CDS sequence (opt5) from neuraminidase__InfluenzaA__ABB46461

SEQ ID NO: 206573 - RNA, 1410 nt, Artificial Sequence
  derived and/or modified CDS sequence (opt5) from neuraminidase__InfluenzaA__ABB46550
augaaccccaaucagaagaucauuaccaucggcagcgugucccugacaauugccacgaucugcuuccucaugcaaauugcuauccuggucaccacaguuacccuucacuuuaaacaguacgaguguucuagcccuccgaacaaucaggugaugcccugcgaaccuaucauuaucgagagaaacauuacagaaaucguguaucugaccaauacaaccauugagaaggaaaucugucccaaacucgucgaguaccggaacugguccaagccucagugcaaaauuacgggguucgcccccuuuucuaaggacaauagcauccgccuguccgcgggaggcgauaucugggugaccagagagccuuauguuucuugugacccggggaagugcuaccaauucgcucuuggacagggcacaacccuggauaacaaacauagcaaugacacaauucacgaucggacgccccaucgcacccuccugaugaacgaacugggggugccuuuucaccucggaacaagacaggucuguaucgccugguccuccucuuccugccaugacggcaaggccuggcugcacguguguguuaccggcuaugauaaaaaugcuacagccagcuucauuuacgacgggcggcuuguggauucuaucggauccuggagcaagaacauucugcgcacccaggagucugaaugcgucugugugaaugggaccugcacaguggucaugacggacggcuccgcuagcgagagagccgauaccaaaauccucuuuaucgaggaaggaaagauuguucacaucagcccccugucuggcagcgcgcaacauguggaggaaugcuccuguuauccucgguaccccggggugcgcugcgucuguagagacaacuggaagggaagcaaucggccggugguugauauuaacgugaaagacuacucuaucgucuccagcuaugugugcucuggccuuguuggcgacacaccucgcaagaacgauagaagcuccucuagcuacugucggaaucccaacaaugagaaagggaaccacggagugaagggcugggccuucgacgaugggaaugacgucuggaugggacgcaccauuuccgaagagagcagaucuggcuaugagacauuuaaagugaucgggggaugguccaccccuaacagcaagucucagaucaaucggcaggucauuguggauuccggcaacagaagcggcuacuccgggaucuucucuguugaaggaaaaagcugcauuaaucgcuguuuuuauguggagcugauccggggcagagaacaggagacgcgcgucugguggacauccaacucuauugugguuuucugcgggaccagcggaaccuacggcacaggguccuggcccgacggcgcugauaucaaucucaugcccauuuga

SEQ ID NO: 206574 - RNA, 1410 nt, Artificial Sequence
  derived and/or modified CDS sequence (opt5) from neuraminidase__InfluenzaA__ABB51955
augaaccccaaucagaagaucauuaccaucggcagcgugucccugacaauuucuacgaucugcuucuuuaugcaaauugccauccucgucaccacaguuacccugcacuucaaacaguacgaguguaacagcccuccgaauaaccaggugaugcuuugcgaacccacaaucauugagagaaauaucaccgaaauuguguaucugacaaacaccacgaucgagaaggaaauuuguccuaaacucgcugaguaccggaauugguccaagccccagugcaacaucaccggguuugccccuuucucuaaagacaauagcauucgccuguccgcgggaggcgauaucugggucacaagagagcccuaugugucuugugacccugauaagugcuaccaauuugcucuugggcagggaaccacacugaacaauggccauagcaacgacaucguucacgaucggaccccguaucgcacgcuccugaugaaugaacugggggugcccuuccaucucggaacaaagcaggucuguauugccugguccucuagcuccugccacgacggcaaagccuggcugcauguguguguuaccggcgaugacgagaacgcuacagccagcuuuaucuacaaugggagacuuguggauucuauuggauccuggagcaagaaauucuuucggacccaggaaucugagugcgucuguauccacgggaccugcacaguggugaugacggacggcuccgcuagccgcaaggccgauaccaaaauucuguucaucgaggaaggaaagaucguccacacauccacccucucuggcagcgcgcaacauguugaggaaugcuccuguuauccuagauaccccggggugcggugcgugugucgcgacaacuggaagggaagcaacagaccuauugucgauaucaauauuaaagacuacucuaucguguccagcuauguuugcucuggccuggugggcgacacaccccggaagaacgauagcuccucuagcucccacugucuugacccgaauaacgaggaagggggacauggcgucaaagggugggccuuugaugacggaaaugauguguggaugggccgcaccauuagcgagaagcugagaucuggguacgagacguucaaaguuaucgaaggaugguccaagccuaacagcaaacuccagaucaaucgccaggugauugucgaccggggcaacagaucuggcuauuccgggaucuuuagcguggagggaaaguccugcauuaaucgguguuucuacgucgaacugaucagaggccgcaagcaggagacagaagugcuguggaccucuaacagcauuguuguguucugcgggaccuccggaacauauggcaccgggucuuggcccgauggcgcugacaucaaucucaugccuauuuga

SEQ ID NO: 206575 - RNA, 1413 nt, Artificial Sequence
  derived and/or modified CDS sequence (opt5) from neuraminidase__InfluenzaA__ABB51956
augaaccccaaucagaagaucauuaccaucggcagcauuuccaucgccauugggaucaucucucugaugcuccaaauuggaaacaucauuagcaucugggcuucccacucuauucagacaggcagccagaaucauacgggggugugcaaccagagaaucauuaccuacgagaauagcacaugggugaaccacaccuauguuaauaucaacaauacaaacgugaucgccggaaaagacaagaccucugugacagucgcgggcaauagcucccuguguagcauuucugggugggcuaucuacaccaaagauaacuccauucggaucggaagcaagggcgacguguucguuauucgcgaaccuuuuaucucuugcucccaucuugaguguagaacguucuuucugacccaaggcgcccuccugaaugauaaacacagcaacgggacagugaaggaccggucuccguaucgcgcccuuauguccugcccccugggagaagcuccuagccccuacaauuccaaguucgagucugucgccuggagcgcuuccgccugucaugauggcaugggguggcucaccaucggaauuagcggcccugacaacggggcgguggccguucugaaauauaacggaaucauuacagaaaccaucaagucuuggaaaaagcccauucugggcacgcaggaguccgagugggugugcgucaauggcagcuguuuuacaaucaugaccgaugacccuucuuacgaagcugccagcuauaaaaucuucaagauugagagagaacgggugacaaaguccaucgagcucaacgcuccgaauuuucacuacgaggaaugcucuuguuaccccgauaccgggaccgugaugugcgucugucgcgacaacuggcacggaagcaauagaccuuggguuuccuucaaccagaaucuggauuaucagauuggcuacaucugcagcgggguguuuggagacaacccccggccuaaagauggcgaggggucuugcaaucccgugacagucgacggagccaacggcgugaagggcuucuccuauaaauacgggaauggaguuuggauuggccgcacgaaguccaacagacuucggaaaggguuugaaaugaucugggacccgaauggauggaccgauacagacucugauuucuccgugaagcaagacgucguggcgauuaccgauuggagcggcuauuccgggucuuuuguucagcauccugagcugacaggccucgacuguauccgccccugcuucuggguggaacuggucagaggacuuccuaaagagaacaccacgaucuggacaagcggcuccucuauuagcuucuguggggucaauuccgauaccgccaacuggagcuggcccgacggagcugagcugcccuuuaccaucgauaaguga

SEQ ID NO: 206576 - RNA, 1410 nt, Artificial Sequence
  derived and/or modified CDS sequence (opt5) from neuraminidase__InfluenzaA__ABB51957
augaaccccaaucagaagaucauuaccaucggcagcgugucccugacaauugccacgaucugcuuccucaugcaaauugcuauccuggucaccacaguuacccuucacuuuaaacagcaugaguguaacucuccuccgaauaaccaggugaugcugugcgaacccacaaucauugagagaaauaucaccgaaauuguguaccucacaaacaccacgaucgagaaggaaauuuguccuaaacuggccgaguaucggaauuggagcaagccccagugcaacaucaccggguucgcgccuuuuuccaaagacaauucuauucgccuuagcgcuggaggcgauaucugggucacaagagagcccuacguguccugugacccugauaagugcuaucaauucgcccuggggcagggaaccacacucaacaauggccacucuaacgacaccguucgggaucgcacgccguacagaacacugcugaugaaugaacucggggugcccuuucaucugggaacccggcaggucuguaucgccuggagcuccagcucuugccacgacggcaaggcuuggcuucauguguguguuacaggcgaugacaaaaacgccaccgcuuccuucauuuauaaugggcgccugguggauagcaucggaucuugguccaagaaaauuuuuagaacccagaaguucgagugcgucuguauccacuggacaugcacgguggugaugaccgacggcagcgccucugggaaagcggauacaaagauucucuuuaucgaagagggaaagaucguccacauuuccacccugagcggcuccgcccaacauguugaggaaugcucuuguuacccucgguaucccggggugcgcugcguguguagagacaacuggaaaggaagcaaccggccuaucgucgauauuaaugugaaggacuacuccaucguuagcucuuacgugugcuccggccuugucggcgacacaccccgcaaaaacgauagcuucucuagcucccacugucuggacccgaauaacgaggaagggggacauggcgugaaggggugggcuuuugaugacggaaaugauguuuggaugggcagaaccauuucugagaaacuccggagcggguaugaaacguucaaggugaucgagggaugguccaaaccuaacagcaagcugcagaucaaucgccaggucauuguggagagaggcaaccggucuggcuacuccgggaucuuuagcgucgaaggaaagucuugcauuaauagauguuucuauguggagcugauccgcggccggaaagaagagacagaaguuugguggaccuccaacagcauuguggucuucugcgggaccuccggaacauacggcaccgggucuuggcccgacggcgccgauaucaaucucaugccuauuuga

SEQ ID NO: 206577 - RNA, 1413 nt, Artificial Sequence
  derived and/or modified CDS sequence (opt5) from neuraminidase__InfluenzaA__ABB51958
augaaccccaaucagaagaucauuaccaucggcagcauuuccaucgccauugggaucaucucucugaugcuccaaauuggaaacaucauuagcaucugggcuucccacucuauucagacaggcagccagaaucauacgggggugugcaaccagagaaucauuaccuacgaaaauuccacaugggucaaccacaccuauguuucuaucaauaacacaaaugugaucgccggaaaagacaagaccagcgugacacuggcgggcaacuccagccuuuguccuauucgggggugggcuaucuacaccaaaggaaauucuauucgcaucggcuccaagggcgaugucuucgugauuagagagccguuuaucagcugcucucaucuggagugucggacguucuuucucacccaaggggcccugcuuaacgacaaacacuccaauggaacaguuaaggaucgcagccccuauagagcccugaugucuugcccucucggcgaagcucccuccccuuacaacagcaaguucgaguccguggccuggucugcuagcgccugucaugacgggaugggauggcugaccaucggcauuuccgggcccgauaauggagcggucgccgugcugaaauauaacggcaucauuacagaaaccaucaagagcuggaaaaagcagauucuccggacgcaggagucugagugcguuugugugaacggcuccugcuuuacaaucaugaccgacgggccuagcaauggagcugccucuuacaaaaucuucaagauugaaaagggcaaagucacaaagagcaucgagcugaacgcuccgaauuuucacuaugaagaguguucccgcuaccccgauaccgggaccgugaugugcguguguagagacaacuggcacggaucuaaucggccuugggucagcuucaaccagaaucuugauuaccaaauuggcuauaucugcuccgggguuuuuggagacaacccccgcccuaaagauggcgagggcagcugcaaucccgugacaguggacggggccaacggagucaagggcuucucuuacaaauaugggaauggagugggcauugggagaacgaucuccaaccggcugcgcaagggcuuugaaaugauuugggauccgaauggauggaccgacacagacagcgauuucucuguuaaacaggacguggucgcgaucaccgauugguccggcuacagcggguccuuugugcagcauccugagcucacaggacuggacuguaucagacccugcuucuggguugaacuugugcggggccugccuaaggagaacaccacgauuuggacaucugggagcuccaucucuuucuguggagucaauagcgauaccgccaacugguccuggcccgacggcgcugaacuccccuuuaccauugauaaguga

SEQ ID NO: 206578 - RNA, 1410 nt, Artificial Sequence
  derived and/or modified CDS sequence (opt5) from neuraminidase__InfluenzaA__ABB51959
augaaccccaaucagaagaucauuaccaucggcagcgugucccugacaauuucuacgaucugcuucuuuaugcaaauugccauccucaucaccacagucacccugcacuucaaacaguacgaguuuaacagcccuccgaauaaccagguuaugcuuugugaacccacaauuaucgagagaaauauuaccgaaaucguguaucugacaaacaccacgauugagaaggaaaucugcccuaaacucgcugaguaccggaauugguccaagccccagugugacauuaccggguucgccccuuuuucuaaagauaacagcauccgccuguccgcgggaggcgacaucugggugacaagagagcccuaugucucuugcgauccugacaaguguuaccaauucgcucuugggcagggaaccacacugaauaacgugcauagcaaugauaccguucacggccggacgccguaucgcacacuccugaugaacgaacugggggugcccuuucaucucggaaccaagcaggucugcauugccugguccucuagcuccugucacgacggcaaagccuggcugcaugugugcguuacaggcgaugacaagaaugcuaccgccagcuucaucuacaacgggagacuuguggauucuauugucuccuggagcaaagagauccugcggacccaggaaucugagugugugugcauuaauggaacauguacgguggucaugaccgacggcuccgcuagcgggaaggccgauacaaaaauccucuuuaacgaggaaggaaagaucguucacaccuccacaugcucuggcagcgcgcaacacguggaggaaugcuccuguuauagccgcuacccuggggugagaugcgucugucgggacaacuggaagggaucuaaucgccccauuguggauaucaacauuaaagacuacuccaucguuagcucuuaugugugcagcggccuggucggcgacaccccuagaaagaaugauuccucuagcuccagccauugucuugaccccaacaaugaggaagggggacacggcgugaaagggcgggccuucgaugacggaaacgauguuuggaugggccgcacgauuucugagaagcugagauccggguacgagacauuuaaagugaucgaaggauggagcaauccgaacucuaagcuccagaucaaucggcaggucauuguggaccgcggcaacagauccggcuauagcgggaucuucuccgucgagggaaaaucuugcauuaaucgguguuuuuacguggaacugaucagaggccgcaaggaggaaaccgagguucuguggaccagcaacuccauuguggucuucugcgggacaucuggaaccuauggcacagggagcuggccugauggcgcugacaucaaucucaugcccauuuga

SEQ ID NO: 206579 - RNA, 1413 nt, Artificial Sequence
  derived and/or modified CDS sequence (opt5) from neuraminidase__InfluenzaA__ABB51960
augaaccccaaucagaagaucauuaccaucggcagcauuuccaucgccauugggaucaucucucugaugcuccaaauuggaaacaucauuccuaucugggcuagccacuccauucagacaggcucucagaaucauacgggggugugcaaccagagaaucauuaccuacgagaauagcacaugggucaaccacaccuauguuaauaucaacaauacaaacgugaucgccggaaaagacaagaccuccgugacacuggcgggcaauucuagccuuuguuccauuagcgggugggcuaucuacaccaaagauaacucuauucggaucggauccaagggcgacgucuucgugauucgcgaaccguuuaucagcugcucucaucuggaguguagaacguucuuucucacccaaggcgcccugcuuaaugauaaacacuccaacgggacaguuaaggaccggagccccuaucgcgcccugaugucuugcccucucggagaagcucccuccccuuacaauagcgaguucgaauccguggccuggucugcuagcgccugucaugauggcaugggguggcugaccaucggaauuuccggccccgacaacggggcggucgccgugcugaaguauaacggaaucauuacagagaccaucaaaagcuggaagaaacagauucucagaacgcaggagucugaaugcguuugugugaauggcuccugcuuuacaaucaugaccgauggcccuagcaacggggcugccucuuacaagaucuucaaaauugagaagggaaagaucacaaaaagcauugaacugaaugcuccgaacucccacuaugaggaguguucuugcuaccccgacaccggcaccgucaugugugugugccgggauagcuggcacggguccaaucgcccuugggugagcuuuaaccagaaucuugacuaccaaaucggauauauuugcucuggcgucuucggggauaaccccagaccuaaggacggagaaggcuccuguaaucccguuacaguggauggcgccaacggggugaaaggauuuagcuacgaguauggcaauggggacuggaucggacggacgaagucuaaccgccugagaaaaggcuucgaaaugauuugggacccggauggguggaccgacacaaauuccgauuuuagcgucaagcaggacgugguugcgaucaccgauugguccggcuacucuggcagcuucgugcagcauccugagcucacaggacuggucugcauccggcccuguuuuuggguggaacuuguucgcgggcugccuaaagagaacaccacgauuuggacauccggaucuagcaucuccuucugcggcgugaauagcgacaccgccaacuggucuuggcccgauggggcugagcuccccuucaccauugacaaguga

SEQ ID NO: 206580 - RNA, 1410 nt, Artificial Sequence; identical to SEQ ID NO: 206415
  derived and/or modified CDS sequence (opt5) from neuraminidase__InfluenzaA__ABB53617

SEQ ID NO: 206581 - RNA, 1410 nt, Artificial Sequence
  derived and/or modified CDS sequence (opt5) from neuraminidase__InfluenzaA__ABB53721
augaaccccaaucagaagaucauuaccaucggcagcgugucccugacaauuucuacgaucugcuucuuuaugcaaauugccauccucaucaccacagucacccugcacuucaaacaguacgaguuuaacagcccuccgaauaaccagguuaugcuuugugaacccacaauuaucgagagaaauauuaccgaaaucguguaucugacaaacaccacgauugagaaggaaaucugcccuaaacucgcugaguaccggaauugguccaagccccagugugacauuaccggguucgccccuuuuucuaaagauaacagcauccgccuguccucuggaggcgacaucugggugacaagagagcccuaugucagcugcgauccugacaaguguuaccaauucgcgcuugggcagggaaccacacugaauaacgugcauuccaaugauaccguucacgaccggacgccguaucgcacacuccugaugaacgaacugggcgugcccuuucaucucgggaccaagcaggucugcauugcuuggucuagcuccagcugucacgauggaaaagccuggcugcaugugugcguuacaggcgacgauaagaaugccaccgcuucuuucaucuacaacggcagacuuguggacuccauugucagcuggucuaaagagauccugcggacccaggaauccgagugugugugcauuaaugggacauguacgguggucaugaccgauggaagcgccuccggcaaggcugacacaaaaauccucuuuaucgaggaagggaagauuguucacaccucuacacugagcggauccgcccaacacguggaggaaugcagcugcuauccucgcuaccccggcgugagaugugucugccgggauaacuggaaggggucuaaccgcccuaucguggacauuaauaucaaagacuacuccauuguuagcucuuauguguguagcggacuugucggcgauacccccagaaagaacgacuccucuagcuccagccauugccuggauccgaauaacgaggaaggcgggcacggagugaaaggcugggcguucgacgaugggaaugacguuuggaugggacggacgaucucugagaagcuccgcuccggcuacgagacauuuaaagugaucgaaggguggagcaacccuaauucuaagcugcagauuaacagacaggucaucguggaucggggaaaucgcuccggcuauagcggcauuuucuccgucgaggggaaaucuuguaucaacagaugcuuuuacguggaacugauucggggaagaaaggaggaaaccgagguucucuggaccagcaauuccaucguggucuucuguggcacaucugggaccuauggaacaggcagcuggcccgacggggccgauauuaaccugaugccuaucuga

SEQ ID NO: 206582 - RNA, 1410 nt, Artificial Sequence
  derived and/or modified CDS sequence (opt5) from neuraminidase__InfluenzaA__ABB53754
augaaccccaaucagaagaucauuaccaucggcagcgugucccugacaauugccacgaucugcuuccucaugcaaauugcuauccuggucaccacaguuacccuucacuuuaaacaguacgaguguucuagcccuccgaacaaucaggugaugcccugcgaaccuaucauuaucgagagaaacauuacagaaaucguguaucugaccaauacaaccauugagaaggaaaucugucccaaacucgucgaguaccggaacugguccaagccucagugcaaaauuacgggguucgcccccuuuucuaaggacaauagcauccgccuguccgcgggaggcgauaucugggugaccagagagccuuauguuucuugugacccggggaagugcuaccaauucgcucuuggacagggcacaacccuggauaacaaacauagcaaugacacaauucacgaucggacgccccaucgcacccuccugaugaacgaacugggggugccuuuucaccucggaacaagacaggucuguaucgccugguccuccucuuccugccaugacggcaaggccuggcugcacguguguguuaccggcuaugauaaaaaugcuacagccagcuucauuuacgacgggcggcuuguggauucuaucggauccuggagcaagaacauucugcgcacccaggagucugaaugcgucuguaucaaugggaccugcacaguggugaugacggacggcuccgcuagcgagagagccgauaccaaaauccucuuuauugaggaaggaaagaucguccacauuagcccccugucuggcagcgcgcaacauguugaggaaugcuccuguuauccucgguaccccggggugcgcugcguguguagagacaacuggaagggaagcaaucggccggucguggauaucaacguuaaagacuacucuauuguguccagcuaugucugcucuggccuugugggcgacacaccucgcaagaacgauagaagcuccucuagcuacugucggaaucccaacaaugagaaagggaaccacggaguuaagggcugggccuucgacgaugggaaugacguguggaugggacgcaccaucuccgaagagagcagaucuggcuaugagacauuuaaagucaucgggggaugguccaccccuaacagcaagcugcagauuaauagacaggugaucgucgauucugacaaccgguccggcuacagcggcauuuucuccguggaagggaaaucuugcaucaaucgcuguuuuuauguugagcucauucggggaagagaacaggagacgcgcgugugguggacaagcaacuccaucgucguguucugcggcaccucugggaccuacggaacaggcagcuggcccgauggggcugacauuaaucugaugcccaucuga

SEQ ID NO: 206583 - RNA, 1410 nt, Artificial Sequence; identical to SEQ ID NO: 206175
  derived and/or modified CDS sequence (opt5) from neuraminidase__InfluenzaA__ABB54517

SEQ ID NO: 206584 - RNA, 1410 nt, Artificial Sequence
  derived and/or modified CDS sequence (opt5) from neuraminidase__InfluenzaA__ABB59999
augaaccccaaucagaagaucauuaccaucggcagcgugucccugacaauugccacgaucugcuuccucaugcaaauugcuauccuggucaccacaguuacccuucacuuuaaacaguacgaguguucuagcccuccgaacaaucaggugaugcugugcgaacccacaaucauugagagaaacaucaccgaaauuguguaucucacaaauaccacgaucgagaaggaaauuuguccuaaacuggccgaguaccggaacugguccaagccccagugcaaaaucaccggguucgcgccuuuuucuaaggacaauagcauucgccuuuccgcuggaggcgauaucugggucacaagagagcccuaugugucuugugacccugauaagugcuaccaauucgcccuggggcagggaaccacacucaacaaucggcauagcaacgacaccguucacgaucgcacgccguauagaacacugcugaugaaugaacucggcgugcccuuucaucuggggaccaaacaggucuguaucgccugguccucuagcuccugccacgacggaaaggcuuggcuucauguguguguuacaggccacgaugagaacgccaccgcuagcuucauuuacgacggccggcugguggauucuaucggguccuggagcaaaaagauucuccgcacccaggaaucugagugcgucuguaucaauggaacaugcacgguggugaugaccgacggcuccgccagcgggagagcggauacaaaaauucuguuuaucgaggaaggaaagaucguccacauuuccccucuuucuggcagcgcccaacauguugaggaaugcuccuguuauccccgguacccuggggugcgcugcguguguagagacaacuggaagggaagcaaucggcccaucgucgauauuaacaucaaagacuacucuauuguguccagcuauguuugcucuggccuggugggcgacaccccgcgcaagaacgauagcuccucuagcucccacugucucaauccuaacaaugaggaagggggacauggcgucaaagggugggcuuucgacgauggaaacgacguguggaugggcagaacaaucagcgagaaguuucggucuggguacgagaccuucaaaguuaucgaaggaugguccaagcccaauagcaaacugcagauuaaccgccaggugaucgucgauagaggcaaucggucuggcuauuccgggauuuuuagcguggagggaaaguccugcaucaacagauguuucuacgucgaacugauucgcggccggaagcaggagacggaagugugguggacaucuaauagcaucguuaccuuuugcgggaccuccggaacauauggcaccgggucuuggccugacggcgccgauauuaaccucaugcccaucuga

SEQ ID NO: 206585 - RNA, 1410 nt, Artificial Sequence
  derived and/or modified CDS sequence (opt5) from neuraminidase__InfluenzaA__ABB60010
augaaccccaaucagaagaucauuaccaucggcagcgugucccugacaauugccacgaucugcuuccucaugcaaauugcuauccuggucaccacaguuacccuucacuuuaaacaguacgaguauucuagcccuccgaacaaucaggugaugcugugugaacccacaaucauugagagaaacaucaccgaaauuguguaccucacaaauaccacgaucgagaaggaaauuugcccuaaacuggccgaguaucggaacugguccaagccccaguguaaaaucaccggguucgcgccuuuuucuaaggacaauagcauucgccuuuccgcuggaggcgauaucugggucacaagagagcccuacgugucuugcgacccugauaaguguuaucaauucgcccuggggcagggaaccacacucaacaaucggcauagcaacgacaccguucacgaucgcacgccguacagaacacugcugaugaaugaacucggcgugcccuuucaucuggggaccaaacaggucugcaucgccugguccucuagcuccugucacgacggaaaggcuuggcuucaugugugcguuacaggccacgaugagaacgccaccgcuagcuucauuuaugacggccggcugguggauucuaucggguccuggagcaaaaagauucuccgcacccaggaaucugagugugucugcaucaauggaacauguacgguggugaugaccgacggcuccgccagcgggagagcggauacaaaaauucuguuuaucgaggaaggaaagaucguccacauuuccccucuuucuggcagcgcccaacauguugaggaaugcuccugcuacccccgguacccuggggugcgcugugugugcagagacaacuggaagggaagcaaucggcccaucgucgauauuaacgugaaagacuauucuaucguuucccgcuacguguguagcggccuggucggcgacaccccgagaaagaacgauucuagcuccucuagccacugccucaauccuaacaaugaggaagggggacauggcgugaaagggugggcuuucgacgauggaaacgacguuuggaugggccggacaauuuccgagaaguuucgcagcggguaugagaccuucaaagugaucgaaggauggucuaagcccaauuccaaacugcagaucaacagacaggucauuguggaucggggcaauagaagcggcuacucugggaucuuuuccgucgagggaaagagcuguauuaaccgcugcuucuauguggaacugauccggggcagaaagcaggagacggaaguuugguggacauccaauucuauuguggucuuuugugggaccagcggaaccuacggcacaggguccuggccugacggcgccgauaucaaccucaugcccauuuga

SEQ ID NO: 206586 - RNA, 1410 nt, Artificial Sequence
  derived and/or modified CDS sequence (opt5) from neuraminidase__InfluenzaA__ABB77867
augaaccccaaucagaagaucauuaccaucggcagcgugucccugacaauugccacgaucugcuuccucaugcaaauugcuauccuggucaccacaguuacccuucacuuuaaacaguacgaguguaacucuccuccgaauaaccaggugaugcugugcgaacccacaaucauugagagaaauaucaccgaaauuguguaucucacaaacaccacgaucgagaaggaaauuuguccuaaacuggccgaguaccggaauuggagcaagccccagugcaaaaucaccggguucgcgccuuuuuccaaggacaacucuauucgccuuagcgcuggaggcgauaucugggucacaagagagcccuauguguccugugacccugauaagugcuaccaauucgcccuggggcagggaaccacacucaauaacggccauucuaaugacaccguucacgaucggacgccguaucgcacacugcugaugaacgaacucggggugcccuuucaucugggaaccaaacaggucuguaucgccuggagcuccagcucuugccacgacggcaaggcuuggcuucauguguguguuacaggccacgaugagaaugccaccgcuuccuucauuuacgacgggagacugguggauagcaucggaucuugguccaaaaagauucuccggacccaggaaagcgagugcgucuguaucaacggcacaugcacgguggugaugaccgacgggucugccuccggacgcgcggauacaaaaauucuguuuaucgaggaaggcaagaucguccacauuagccaacuuuccgggucugcccagcauguugaggaaugcagcuguuauccuagauaccccggagugcggugcgugugucgcgacaauuggaagggcuccaacagaccuaucgucgauauuaacgugaaagaccacagcaucguuucuuccuacgugugcagcggccuggucggggacacaccccggaagaaugauucuagcuccucuagccauugucucaacccgaauaacgaggaaggaggccacggggugaaaggaugggcuuucgacgauggcaaugacguuuggauggggcgcaccauuuccgagaagcugagaagcggauaugagaccuuuaaagugaucgaaggcuggucuaagccuaacuccaaacugcagaucaaucggcaggucauuguggaucgcggcaacagaagcggguacucuggaaucuucuccgucgagggcaagagcugcauuaaucgguguuuuuauguggaacucaucagagggcgcaagcaagagacggaaguuugguggacauccaacucuauuguggucuucugcggaaccagcggcaccuacgggacaggcuccuggcccgacggagccgauaucaaucugaugccuauuuga

SEQ ID NO: 206587 - RNA, 1410 nt, Artificial Sequence; identical to SEQ ID NO: 206586
  derived and/or modified CDS sequence (opt5) from neuraminidase__InfluenzaA__ABB79719

SEQ ID NO: 206588 - RNA, 1410 nt, Artificial Sequence
  derived and/or modified CDS sequence (opt5) from neuraminidase__InfluenzaA__ABB79734
augaaccccaaucagaagaucauuaccaucggcagcgugucccugacacucucuacgauuugcuucuuuaugcaaaucgccauucugaucaccacagucacccuucacuucaaacaguacgaguuuaacagcccuccgaauaaccagguuaugcugugugaacccacaaucauugagagaaauaucaccgaaauuguguaucucacaaacaccacgaucgagaaggaaauuugcccuaaacuggcugaguaccggaauugguccaagccccagugugacaucaccggguucgccccuuuuucuaaagauaacagcauucgccuuuccgcgggaggcgacaucugggugacaagagagcccuaugucucuugcgauccugacaaguguuaccaauucgcucuggggcagggaaccacacucaauaacgugcauagcaaugauaccguucacgaccggacgccguaucgcacacugcugaugaacgaacucggcgugcccuuucaucuggggaccaagcaggucugcaucgccugguccucuagcuccugucacgauggaaaagccuggcuucaugugugcguuacaggcgacgauaagaaugcuaccgccagcuucauuuacaacggcagacugguggacucuaucgucuccuggagcaaaaagauucuccggacccaggagucugaaugugugugcaucaaugggacauguacgguggucaugaccgauggauccgcuagcggcaaagccgacacaaagauucuguuuaucgaggaggggaagaucguucacaccuccacacuuucuggaagcgcgcaacacguggaagagugcuccugcuauccucgcuaccccggcgugagaugugucugccgggauaacuggaaagggagcaaccgcccuauuguggacaucaauauuaaggacuacucuaucguuuccagcuauguguguucuggacuggucggcgauacccccagaaagaacgacagcuccucuagcucccauugccucgauccgaauaacgaagagggcgggcacggagugaaaggcugggccuucgacgaugggaaugacguuuggaugggacggacgauuagcgaaaaacugcgcucuggcuacgagacauuuaaggugaucgaggggugguccaacccuaauagcaaacugcagaucaacagacaggucauuguggaucggggaaaucgcucuggcuauuccggcaucuucagcgucgaagggaaguccuguauuaacagaugcuuuuacguggagcucauccggggaagaaaggaagagaccgaaguucuguggaccucuaauagcauuguggucuucuguggcacauccgggaccuauggaacaggcucuuggcccgacggggcugauaucaaccuuaugccuauuuga

SEQ ID NO: 206589 - RNA, 1410 nt, Artificial Sequence; identical to SEQ ID NO: 206559
  derived and/or modified CDS sequence (opt5) from neuraminidase__InfluenzaA__ABB79791

SEQ ID NO: 206590 - RNA, 1410 nt, Artificial Sequence
  derived and/or modified CDS sequence (opt5) from neuraminidase__InfluenzaA__ABB79802
augaaccccaaucagaagaucauuaccaucggcagcgugucccugacaauugccacgaucugcuuccucaugcaaauugcuauccuggucaccacaguuacccuucacuuuaaacaguacgaguguucuagcccuccgaacaaucaggugaugcccugcgaaccuaucauuaucgagagaaacauuacagaaaucguguaucugaccaauacaaccauugagaaggaaaucugucccaaacucgucgaguaccggaacugguccaagccucagugcaaaauuacgggguucgcccccuuuucuaaggacaauagcauccgccuguccgcgggaggcgauaucugggugaccagagagccuuauguuucuugugacccggggaagugcuaccaauucgcucuuggacagggcacaacccugaacaauaaacauagcaacgauacaauucacgaccggacccccuaucgcacgcuccugaugaaugaacugggggugccuuuucaucucggaacaaagcaggucuguaucgccugguccuccucuuccugccacgauggcaaagccuggcugcauguguguguuaccggccacgacgagaacgcuacagccagcuucauuuacgaugggagacuuguggacucuaucggauccuggagcaagaauauucugcggacccaggaaucugagugcgucuguaucaacgggaccugcacaguggugaugacggauggcuccgcuagcgagcgcgccgacaccaaaauccucuuuauugaagagggaaagaucguccacauuagcccccugucuggcagcgcgcaacauguugaagagugcuccuguuauccuagauaccccggggugcggugcgugugucgcgauaauuggaagggaagcaacagaccgaucgucgacauuaacgugaaagauuacucuaucguuuccagcuaugugugcucuggccuugucggcgacacaccucggaagaaugaccgcagcuccucuagcuacuguagaaaccccaauaacgaaaaagggucccacggagugaagggcugggccuucgaugacgggaaugauguuuggaugggacggaccaucggcgaggagcugcgcagcggguaugaaacauuuaaagugauuggaggcuggucuaccccuaacuccaagcuccagaucaauagacaggucauuguggacagcggcaaccggucuggguacuccggaaucuucagcgucgagggcaaauccugcauuaauagauguuuuuauguggaacugauccgcgggcgggagcaggaaacgagaguuugguggacaucuaacagcauuguggucuucugcggaaccuccggcaccuacgggacaggcucuuggcccgauggagcugacaucaaucugaugcccaucuga

SEQ ID NO: 206591 - RNA, 1410 nt, Artificial Sequence
  derived and/or modified CDS sequence (opt5) from neuraminidase__InfluenzaA__ABB79813
augaaccccaaucagaagaucauuaccaucggcagcgugucccugacaauugccacgaucugcuuccucaugcaaauugcuauccuggucaccacaguuacccuucacuuuaaacaguacgaguguaacucuccuccgaauaaccaggugaugcugugcgaacccacaaucauugagagaaauaucaccgaaauuguguaucucacaaacaccacgaucgagaaggaagucuguccuaaacuggccgaguaccggaauuggagcaagccccagugcaaaauuaccggguucgcgccuuuuuccaaggacaacucuauccgccuuagcgcuggaggcgauauuugggugacaagagagcccuauguuuccugugacccugggaagugcuaccaauucgcccugggacagggcaccacacucaauaaccggcauucuaaugauaccgugcacgaccgcacgccguauagaacacugcugaugaacgaacucgggguccccuuucaucugggaaccaaacagguguguaucgccuggagcuccagcucuugccacgauggcaaggcuuggcuucauguuugugugacaggccacgacgagaaugccaccgcuuccuucaucuacgaugggcggcuggucgacagcauuggaucuugguccaaaaacauccuccgcacccaggaaagcgagugcguguguauuaauggcacaugcacgguggucaugaccgaugggucugccuccgagagagcggacacaaagauccuguuuauugaagagggaaaaaucguucacaucagcccucuuuccggcucugcccaacauguggaagagugcagcuguuauccccgguacccuggggugcgcugcgucuguagagauaacuggaagggauccaaccggcccauuguggacaucaauguuaaggauuacagcauugugucuuccuaugucugcagcggccuggugggcgacaccccgcgcaaaaacgacucuagcuccucuagcuacuguagaaauccuaacaaugaaaaggggucccacggaguuaaaggcugggcuuucgaugacgggaacgauguguggaugggacggacaaucagcgaggagcuccgcucuggcuaugaaaccuuuaaggucauugggggaugguccaaacccaauagcaagcugcagaucaacagacaggugaucgucgaccggggcaauagaucuggcuacuccgggauuuucagcguggagggaaaauccugcaucaaccgcuguuuuuauguugaacugauucggggcagaaagcaggagacggaagugugguggacaucuaauagcaucgucguguucugcgggaccuccggaaccuacggcacagggucuuggccugauggcgccgacauuaaccucaugcccaucuga

SEQ ID NO: 206592 - RNA, 1410 nt, Artificial Sequence; identical to SEQ ID NO: 206591
  derived and/or modified CDS sequence (opt5) from neuraminidase__InfluenzaA__ABB79960

SEQ ID NO: 206593 - RNA, 1410 nt, Artificial Sequence; identical to SEQ ID NO: 206591
  derived and/or modified CDS sequence (opt5) from neuraminidase__InfluenzaA__ABB79971

SEQ ID NO: 206594 - RNA, 1413 nt, Artificial Sequence
  derived and/or modified CDS sequence (opt5) from neuraminidase__InfluenzaA__ABB79982
augaacgccaaucagaagaucauuaccaucggcagcauuuccaucgcuauugggaucaucucucugaugcuccaaauuggaaacaucauuagcaucugggccucccacucuauucagacaggcagccagaaucauacgggggugugcaaccagagaaucauuaccuacgagaauagcacaugggucaaccacaccuauguuaauaucaacaauacaaacgugaucgcgggaaaagacaagaccucugugacacuggcuggcaauagcucccuuuguagcauuucugggugggccaucuacaccaaagauaacuccauucggaucggaagcaagggcgacgucuucgugauucgcgaacccuuuaucucuugcucccaucuggaguguagaacguucuuucucacccaaggcgcccugcuuaaugauaaacacagcaacgggacaguuaaggaccggucuccuuaucgcgcucugauguccugcccgcucggagaagcccccagcccuuacaauuccaaguucgagucuguggcuuggagcgccuccgcgugucaugauggcaugggguggcugaccaucggaauuagcggccccgacaacggggccgucgcugugcugaaauauaacggaaucauuacagaaaccaucaagucuuggaaaaagcagauucucagaacgcaggaguccgagugcguuugugugaauggcagcugcuuuacaaucaugaccgauggcccuucuaacggggccgcuagcuacaaaaucuucaagauugaaaagggaaaagucacaaaguccaucgagcugaaugcccccaacuuucacuaugaagaguguucuugcuacccugacaccggcaccgugaugugugugugccgggauaauuggcacgggagcaaccgcccgugggucuccuucaaucagaaccuugacuaccaaauuggauauaucugcagcggcguuuuuggggauaaucccagaccuaaagacggagagggcucuuguaaccccgugacaguggauggcgcgaauggggucaagggauucuccuacaaauauggcaacgggguguggauuggacggacgaaguccaaucgccugagaaaaggcuuugaaaugaucugggacccuaacggguggaccgacacagauucugacuucuccguuaagcaggauguggucgccauuaccgacuggagcggcuacuccggaucuuuugugcagcaucccgagcucacaggccuggauugcauccggccguguuucuggguugaacuugugcgcgggcugccuaaggagaauaccacgaucuggacaagcggauccucuauuagcuucugcggcgucaacuccgacaccgcuaacuggagcuggcccgauggggccgaacucccuuuuaccaucgacaaauga

SEQ ID NO: 206595 - RNA, 1413 nt, Artificial Sequence; identical to SEQ ID NO: 206523
  derived and/or modified CDS sequence (opt5) from neuraminidase__InfluenzaA__ABB79993

SEQ ID NO: 206596 - RNA, 1410 nt, Artificial Sequence
  derived and/or modified CDS sequence (opt5) from neuraminidase__InfluenzaA__ABB80004
augaaccccaaucagaagaucauuaccaucggcagcgugucccugacaauuucuacgaucugcuucuuuaugcaaauugccauccucaucaccacagucacccugcacuucaaacaguacgaguuuaacagcccuccgaauaaccagguuaugcuuugugaacccacaauuaucgagagaaauauuaccgaaaucguguaucugacaaacaccacgauugagaaggaaaucugcccuaaacucgcugaguaccggaauugguccaagccccagugugacauuaccggguucgccccuuuuucuaaagauaacagcauccgccuguccgcgggaggcgacaucugggugacaagagagcccuaugucucuugcgauccugacaaguguuaccaauucgcucuugggcagggaaccacacugaauaacgugcauagcaaugauaccguucacgaccggacgccguaucgcacacuccugaugaacgaacugggcgugcccuuucaucucgggaccaagcaggucugcauugccugguccucuagcuccugucacgauggaaaagccuggcugcaugugugcguuacaggcgacgauaagaaugcuaccgccagcuucaucuacaacggcagacuuguggacucuauugucuccuggagcaaagagauccugcggacccaggaaucugagugugugugcauuaaugggacauguacgguggucaugaccgauggauccgcuagcggcaaggccgacacaaaaauccucuuuaucgaggaagggaagauuguucacaccuccacacugucuggaagcgcgcaacacguggaggaaugcuccugcuauccucgcuaccccggcgugagaugugucugccgggauaacuggaaggggagcaaccgcccuaucguggacauuaauaucaaagacuacucuaccguuuccagcuauguguguucuggacuugucggcgauacgcccagaaagaacgacagcuccucuagcucccauugccuggauccgaauaacgaggaaggcgggcacggagugaaaggcugggccuucgacgaugggaaugacguuuggaugggacggacaauuagcgagaagcuccgcucuggcuacgagaccuuuaaagugaucgaagggugguccaacccuaauagcaagcugcagaucaacagacaggucauuguggaucggggaaaucgcucuggcuauuccggcaucuucagcgucgaggggaaauccuguauuaacagaugcuuuuacguggaacugauccggggaagaaaggaggaaaccgagguucucuggacaucuaauagcauuguggucuucuguggcaccuccgggacauauggaacgggcucuuggcccgacggggcugauaucaaccugaugccuauuuga

SEQ ID NO: 206597 - RNA, 1410 nt, Artificial Sequence; identical to SEQ ID NO: 206581
  derived and/or modified CDS sequence (opt5) from neuraminidase__InfluenzaA__ABB80015

SEQ ID NO: 206598 - RNA, 1410 nt, Artificial Sequence
  derived and/or modified CDS sequence (opt5) from neuraminidase__InfluenzaA__ABB80037
augaaccccaaucagaagaucauuaccaucggcagcgugucccugacaauugccacggucugcuuccucaugcaaaucgcuauucugguuaccacagugacccuucacuuuaaacaguacgagugugacucuccugccaacaaucaggugaugccgugcgaacccaucaucauugagagaaacaucacagaaauugucuaucugaauaacaccacaaucgagaaggaaauuuguccuaaacucguggaguaccggaauuggagcaagccccagugcaaaaucaccggguucgcgccuuuuuccaaggauaacucuauucgccugagcgcuggaggcgacaucuggguuacgagagagcccuauguguccugugauccugggaagugcuaccaauucgcccuuggacagggcaccacacuggacaauaaacauucuaacgauaccauccacgaccggauuccgcaucgcacacuccugaugaaugaacuggggguccccuuucaccucggaaccagacagguguguaucgccuggagcuccagcucuugccaugauggcaaggcuuggcugcacguuugugugacgggcgacgauaaaaacgccacagcuuccuucauuuaugacgggcggcuugucgauagcaucggaucuuggucccagaauauucugcgcacccaagagagcgaaugcguguguaucaacggcacaugcaccguggucaugaccgacgggucugccuccggcagagcggauacacggauccucuuuauugaggagggaaagaucguucacauuagcccucuguccgggucugcccagcauguggaagagugcagcuguuacccccgcuauccuggagugagaugcaucugucgggacaauuggaaaggcuccaaccgccccgucguggacauuaacguugaagauuacagcaucgacucuuccuacgugugcagcggccuugucggggauacgccgagaaauaacgaccggucuagcaauuccaacugucgcaauccuaacaaugagagaggaaaccacggcgugaaggggugggcuuucgaugacggaaaugauguuuggaugggccggaccaucucuaaggaccugagaagcggguaugaaacauuuaaagugauuggaggcugguccacccccaacagcaagucucagaucaaucgccaggucauuguggauuccgacaaccggagcggcuacucugggaucuucuccgucgagggaaaaagcugcauuaauagauguuuuuauguggagcucauccgcggccgggaacaagagacaagaguuugguggaccuccaacucuauuguggucuucugcgggacgagcggaacauacggcaccggguccuggccugauggcgccgacaucaaucugaugcccaucuga

SEQ ID NO: 206599 - RNA, 1413 nt, Artificial Sequence
  derived and/or modified CDS sequence (opt5) from neuraminidase__InfluenzaA__ABB80048
augaaccccaaucagaagaucauuaccaucggcagcauuuccaucgccauugggaucaucucucugaugcuccaaauuggaaacaucauuagcaucugggcuucccacucuauucagacaggcagccagaaucauacgggggugugcaaccagagaaucauuaccuacgagaauagcacaugggucaaccacaccuauguuaauaucaacaauacaaacgugaucgccggaaaagacaagaccucugugacacuggcgggcaauagcucccuuuguagcauuucugggugggcuaucuacaccaaagauaacuccauucggaucggaagcaagggcgacgucuucgugauucgcgaaccuuuuaucucuugcucccaucuggaguguagaacguucuuucucacccaaggcgcccugcuuaaugauaaacacagcaacgggacaguuaaggaccggucuccguaucgcgcccugauguccugcccccucggagaagcuccuagccccuacaauuccaaguucgagucuguggccuggagcgcuuccgccugucaugauggcaugggguggcugaccaucggaauuagcggcccugacaacggggcggucgccgugcugaaauauaacggaaucauuacagaaaccaucaagucuuggaaaaagcagauucucagaacgcaggaguccgagugcguuugugugaauggcagcugcuuuacaaucaugaccgauggccccucuaacggggcugccagcuacaaaaucuucaagauugaaaagggaaaagucacaaaguccguggagcugaaugcuccuaacuuucacuaugaagaguguucuugcuacccggacaccggcaccgugaugugugucugccgggauaauuggcacgggagcaaccgccccuggguuuccuucaaucagaaccuugacuaccaaaucggauauauuugcagcggcguguuuggggauaauccuagacccaaagacggagagggcucuuguaacccugugacagucgauggcgccaauggggugaagggauucuccuacaaauauggcaacgggguuuggaucggacggacgaaguccaaucgccugagaaaaggcuuugaaaugauuugggaccccaacggguggaccgacacagauucugacuucuccgugaagcaggaugucguggcgaucaccgacuggagcggcuacuccggaucuuuuguucagcauccggagcucacaggccuggauugcauucggccuuguuucuggguggaacuuguccgcgggcugcccaaggagaauaccacgaucuggacaagcggauccucuaucagcuucugcggcgugaacggggacaccgccaacugguccuggccugauggagcugaacuccccuuuaccauugacaaauga

SEQ ID NO: 206600 - RNA, 1410 nt, Artificial Sequence
  derived and/or modified CDS sequence (opt5) from neuraminidase__InfluenzaA__ABB80084
augaaccccaaucagaagaucauuaccaucggcagcgugucccugacaauugccacgaucugcuuccucaugcaaauugcuauccuggucaccacaguuacccuucacuuuaaacaguacgaguguaacucuccuagcaauaaccaggugaugcugugcgaaccgacaaucauugagagaaauaucaccgaaauuguguaucucacaaacaccacgaucgagaaggaaauuugucccaaacuggccgaguaccggaauugguccaagccucagugcaaaaucaccggguucgcgcccuuuucuaaggacaacagcauucgccuuuccgcuggaggcgauaucugggucacaagagagccuuaugugucuugugaccccgauaagugcuaccaauucgcccuggggcagggaaccacacucaauaacggccauagcaaugacaccguucacgaucggacgccuuaucgcacacugcugaugaacgaacucggggugccguuucaucugggaaccaaacaggucuguaucgccugguccucuagcuccugccacgacggcaaggcuuggcuucauguguguguuacaggccacgaugagaaugccaccgcuagcuucauuuacgacgggagacugguggauucuaucggauccuggagcaaaaagauucuccggacccaggaaucugagugcgucuguaucaacggcacaugcacgguggugaugaccgacggguccgccagcggacgcgcggauacaaaaauucuguuuaucgaggaaggcaagaucguccacauuucccaacuuucugggagcgcccagcauguugaggaaugcuccuguuaucccagauacccuggagugcggugcgugugucgcgacaauuggaagggcagcaacagacccaucgucgauauuaacgugaaagaccacucuaucguuuccagcuacgugugcucuggccuggucggggacaccccucggaagaaugauagcuccucuagcucccauugucucaaccccaauaacgaggaaggaggccacggggugaaaggaugggcuuucgacgauggcaaugacguuuggauggggcgcacaauuagcgagaagcugagaucuggauaugagaccuuuaaagugaucgaaggcugguccaagccgaacagcaaacugcagaucaaucggcaggucauuguggaucgcggcaacagaucuggguacuccggaaucuucagcgucgagggcaaguccugcauuaaucgguguuuuuauguggaacucaucagagggcgcaagcaagagacggaaguuugguggacaucuaacagcauuguggucuucugcggaaccuccggcaccuacgggacaggcucuuggccugacggagccgauaucaaucugaugcccauuuga

SEQ ID NO: 206601 - RNA, 1410 nt, Artificial Sequence; identical to SEQ ID NO: 206586
  derived and/or modified CDS sequence (opt5) from neuraminidase__InfluenzaA__ABB80095

SEQ ID NO: 206602 - RNA, 1410 nt, Artificial Sequence; identical to SEQ ID NO: 206586
  derived and/or modified CDS sequence (opt5) from neuraminidase__InfluenzaA__ABB80162

SEQ ID NO: 206603 - RNA, 1410 nt, Artificial Sequence; identical to SEQ ID NO: 206586
  derived and/or modified CDS sequence (opt5) from neuraminidase__InfluenzaA__ABB80199

SEQ ID NO: 206604 - RNA, 1410 nt, Artificial Sequence
  derived and/or modified CDS sequence (opt5) from neuraminidase__InfluenzaA__ABB80210
augaaccccaaucagaagaucauuaccaucggcagcgugucccugacaauugccacgaucugcuuccucaugcaaauugcuauccuggucaccacaguuacccuucacuuuaaacaguacgaguguucuagcccuccgaacaaucaggugaugcugugcgaacccacaaucauugagagaaacaucaccgaaauuguguaucucacaaauaccacgaucgagaaggaaauuuguccuaaacuggccgaguaccggaacugguccaagccccagugcaaaaucaccggguucgcgccuuuuucuaaggacaauagcauucgccuuuccgcuggaggcgauaucugggucacaagagagcccuaugugucuugugacccugauaagugcuaccaauucgcccuggggcagggaaccacacucaacaaucggcauagcaacgacaccguucacgaucgcacgccguauagaacacugcugaugaaugaacucggcgugcccuuucaucuggggaccaaacaggucuguaucgccugguccucuagcuccugccacgacggaaaggcuuggcuucauguguguguuacaggccacgaugagaacgccaccgcuagcuucauuuacgacggccggcugguggauucuaucggguccuggagcaaaaagauucuccgcacccaggaaucugagugcgucuguaucaauggaacaugcacgguggugaugaccgacggcuccgccagcgggagagcggauacaaaaauucuguuuaucgaggaaggaaagaucguccacauuuccccucuuucuggcagcgcccaacauguugaggaaugcuccuguuauccccgguacccuggggugcgcugcguguguagagacaacuggaagggaagcaaucggcccaucgucgauauuaacgugaaagacuacucuaucguuuccagcuaugugugcucuggccuggucggcgacaccccgcgcaagaacgauagcuccucuagcucccacugucucaauccuaacaaugaggaagggggacauggcgugaaagggugggcuuucgacgauggaaacgacguuuggaugggcagaacaauuagcgagaaguuucggucuggguacgagaccuucaaagugaucgaaggaugguccaagcccaauagcaaacugcagaucaaccgccaggucauuguggauagaggcaaucggucuggcuauuccgggaucuuuagcgucgagggaaaguccugcauuaacagauguuucuacguggaacugauccgcggccggaagcaggagacggaaguuugguggacaucuaauagcauuguggucuuuugcgggaccuccggaaccuauggcacagggucuuggccugacggcgccgauaucggacucaugcccauuuga

SEQ ID NO: 206605 - RNA, 1410 nt, Artificial Sequence
  derived and/or modified CDS sequence (opt5) from neuraminidase__InfluenzaA__ABB80232
augaaccccaaucagaagaucauuaccaucggcagcgugucccugacaauugccacgaucugcuuccucaugcaaauugcuauccuggucaccacaguuacccuucacuuuaaacaguacgaguguaacucuccuccgaauaaccaggugaugcugugcgaacccacaaucauugagagaaauaucaccgaaauuguguaucucacaaacaccacgaucgagaaggaaauuuguccuaaacuggccgaguaccggaauuggagcaagccccagugcaaaaucaccggguucgcgccuuuuuccaaggacaacucuauucgccuugcugccggaggcgauaucugggucacaagagagcccuaugugagcugugacccugauaagugcuaccaauucgcccuggggcagggaaccacacucaauaaccggcauuccaaugacaccguucacgaucgcacgccguauagaacacugcugaugaacgaacucggcgugcccuuucaucuggggaccaaacaggucuguaucgcuuggucuagcuccagcugccacgacggaaaggccuggcuucauguguguguuacaggccacgaugagaaugcuaccgccucuuucauuuacgacggccggcugguggauuccaucgggagcuggucuaaaaagauucuccgcacccaggaauccgagugcgucuguaucaacggaacaugcacgguggugaugaccgacggcagcgcgucugggagagccgauacaaaaauucuguuuaucgaggaaggaaagaucguccacauuucccaacuuagcggcuccgcucagcauguugaggaaugcucuuguuauccucgguaccccggggugcgcugcguguguagagacaauuggaagggaagcaaccggccuaucgucgauauuaacgugaaagacuacuccaucguuagcucuuaugugugcuccggccuggucggcgacacaccccgcaagaaugauagcucuagcuccucucacugucucaacccgaauaacgaggaagggggacauggcgugaaagggugggccuucgacgauggagacgauguuuggaugggcagaaccauuagcgagaagcugcgguccggguacgagaccuuuaaagugaucgaaggauggagcaagccuaauucuaaacugcagaucaaccgccaggucauuguggacagaggcaaucgguccggcuauagcgggaucuucucugucgagggaaaguccugcauuaacagauguuuuuacguggaacucauccgcggccggaagcaagagacggaaguuugguggacaagcaauuccauuguggucuucugcgggaccucuggaaccuauggcacagggagcuggcccgauggcgcugacaucaaccugaugccuauuuga

SEQ ID NO: 206606 - RNA, 1410 nt, Artificial Sequence
  derived and/or modified CDS sequence (opt5) from neuraminidase__InfluenzaA__ABB80243
augaaccccaaucagaagaucauuaccaucggcagcgugucccugacaauugccacgaucugcuuccucaugcaaauugcuauccuggucaccacaguuacccuucacuuuaaacaguacgaguguaacucuccuccgaauaaccaggugaugcugugcgaacccacaaucauugagagaaauaucaccgaaauuguguaucucacaaacaccacgaucgagaaggaaauuuguccuaaacuggccgaguaccggaauuggagcaagccccagugcaaaaucaccggguucgcgccuuuuuccaaggacaacucuauucgccuuagcgcuggaggcgauaucugggucacaagagagcccuauguguccugugacccugauaagugcuaccaauucgcccuggggcagggaaccacacucaauaacggccauucuaaugacaccguucacgaucggacgccguaucgcacacugcugaugaacgaacucggggugcccuuucaucugggaaccaaacaggucuguaucgccuggagcuccagcucuugccacgacggcaaggcuuggcuucauguguguguuacaggccacgaugagaaugccaccgcuuccuucauuuacgacgggagacugguggauagcaucggaucuugguccaaaaagauucuccggacccaggaaagcgagugcgucuguaucaacggcacaugcacgguggugaugaccgacgggucugccuccggacgcgcggauacaaaaauucuguuuaucgaggaaggcaagaucguccacauuagccaacuuuccgggucugcccagcauguugaggaaugcagcuguuauccuagauaccccggagugcggugcgugugucgcgacaauuggaagggcuccaacagaccuaucgucgauauuaacgugaaagaccacagcaucguuucuuccuacgugugcagcggccuggucggggacacaccccggaagaaugauucuagcuccucuagccauugucucaacccgaauaacgaggaaggaggccacggggugaaaggaugggcuuucgacgauggcaaugacguuuggauggggcgcaccauuuccgagaagcugagaagcggauaugagaccuuuaaagugaucgaaggcuggucuaagccuaacuccaaacugcagaucaaucggcaggucauuguggaucgcggcaacagaagcggguacucuggaaucuucuccgucgagggcaagagcugcauuaaucgguguuuuuauguggaacucaucagagggcgcaagaaagagaacgaaguuugguggacguccaauucuauuguggucuucugcggaacaagcggcaccuacgggaccggcuccuggcccgacggagccgauaucaaccugaugccuauuuga

SEQ ID NO: 206607 - RNA, 1410 nt, Artificial Sequence
  derived and/or modified CDS sequence (opt5) from neuraminidase__InfluenzaA__ABB80254
augaaccccaaucagaagaucauuaccaucggcagcgugucccugacaauugccacgaucugcuuccucaugcaaauugcuauccuggucaccacaguuacccuucacuuuaaacaguacgaguguucuagcccuccgaacaaucaggugaugcugugcgaacccacaaucauugagagaaacaucaccgaaauuguguaucucacaaauaccacgaucgagaaggaaauuuguccuaaacuggccgaguaccggaacugguccaagccccagugcaaaaucaccggguucgcgccuuuuucuaaggacaauagcauucgccuuuccgcuggaggcgauaucugggucacaagagagcccuaugugucuugugggccugacaagugcuaccaauucgcccugggacagggcaccacacucaacaaucggcauagcaacgauaccguucacgaccgcacgccguauagaacacugcugaugaaugaacucggggugcccuuucaucugggaaccaaacaggucuguaucgccugguccucuagcuccugccacgauggcaaggcuuggcuucauguguguguuacaggccacgacgagaacgccaccgcuagcuucauuuacgaugggcggcugguggacucuaucggauccuggagcaaaaagauucuccgcacccaggaaucugagugcgucuguaucaauggcauuugcacaguggugaugacggauggguccgccagcggcagagcggacaccaaaauccuguuuaucgaggaaggaaagauuguccacaucuccccucuuucugggagcgcccaacauguugaggaaugcuccuguuauccccgguacccuggagugcgcugcguguguagagauaacuggaagggcagcaaucggcccauugucgacaucaacgugaaagauuacucuauuguuuccagcuaugugugcucuggccuggucggggacacaccgcgcaagaacgacagcuccucuagcucccacugucucaauccuaacaaugaggaaggaggccauggggugaaaggaugggcuuucgaugacggcaacgauguuuggauggggagaaccaucagcgagaaguuucggucuggauacgagacauucaaagugaucgaaggcugguccaagcccaauagcaaacugcagauuaaccgccaggucaucguggacagaggcaaucggucuggguauuccggaauuuuuagcgucgagggcaaguccugcaucaacagauguuucuacguggaacugauucgcgggcggaagcaggagaccgaaguuugguggacgucuaauagcaucguggucuuuugcggaacauccggcaccuaugggaccggcucuuggccugauggagccgacauuaaccucaugcccaucuga

SEQ ID NO: 206608 - RNA, 1410 nt, Artificial Sequence; identical to SEQ ID NO: 206199
  derived and/or modified CDS sequence (opt5) from neuraminidase__InfluenzaA__ABB80495

SEQ ID NO: 206609 - RNA, 1410 nt, Artificial Sequence; identical to SEQ ID NO: 206586
  derived and/or modified CDS sequence (opt5) from neuraminidase__InfluenzaA__ABB80506

SEQ ID NO: 206610 - RNA, 1410 nt, Artificial Sequence; identical to SEQ ID NO: 206586
  derived and/or modified CDS sequence (opt5) from neuraminidase__InfluenzaA__ABB80517

SEQ ID NO: 206611 - RNA, 1410 nt, Artificial Sequence; identical to SEQ ID NO: 206586
  derived and/or modified CDS sequence (opt5) from neuraminidase__InfluenzaA__ABB80532

SEQ ID NO: 206612 - RNA, 1410 nt, Artificial Sequence
  derived and/or modified CDS sequence (opt5) from neuraminidase__InfluenzaA__ABB80644
augaaccccaaucagaagaucauuaccaucggcagcgugucccugacaauugccacgaucugcuuccucaugcaaauugcuauccuggucaccacaguuacccuucacuuuaaacaguacgaguguucuagcccuccgaacaaucaggugaugcugugcgaacccacaaucauugagagaaacaucaccgaaauuguguaucucacaaauaccacgaucgagaaggaaauuuguccuaaacuggccgaguaccggaacugguccaagccccagugcaaaaucaccggguucgcgccuuuuucuaaggacaauagcauucgccuuuccgcuggaggcgauaucugggucacaagagagcccuaugugucuugugacccugauaagugcuaccaauucgcccuggggcagggaaccacacucaacaaucggcauagcaacgacaccguucacgaucgcacgccguauagaacacugcugaugaaugaacucggcgugcccuuucaucuggggaccaaacaggucuguaucgccugguccucuagcuccugccacgacggaaaggcuuggcuucauguguguguuacaggccacgaugagaacgccaccgcuagcuucauuuacgacggccggcugguggauucuaucggguccuggagcaauaaaauucuccgcacccaggaaucugagugcgucuguaucaacggaacaugcacgguggugaugaccgacggcuccgccagcgggagagcggauacaaagauucuguuuaucgaggaaggaaaaaucguccacauuuccccucuuucuggcagcgcccaacauguugaggaaugcuccuguuauccccgguacccuggggugcgcugcguguguagagacaauuggaagggaagcaaccggcccaucgucgauauuaacgugaaggacuacucuaucguuuccagcuaugugugcucuggccuggucggcgacaccccgcgcaaaaaugauagcuccucuagcucccacugucucaacccuaauaacgaggaagggggacauggcgugaaggggugggcuuucgacgauggaaaugacguuuggaugggcagaacaauuagcgagaaauuucggucuggguacgagaccuucaaggugaucgaaggaugguccaaacccaacagcaagcugcagaucaaucgccaggucauuguggauagaggcaaccggucuggcuauuccgggaucuuuagcgucgagggaaaauccugcauuaauagauguuucuacguggaacugauccgcggccggaagcaggagacggaaguuugguggacaucuaacagcauuguggucuuuugcgggaccuccggaaccuauggcacagggucuuggccugacggcgccgauaucaaucucaugcccauuuga

SEQ ID NO: 206613 - RNA, 1410 nt, Artificial Sequence
  derived and/or modified CDS sequence (opt5) from neuraminidase__InfluenzaA__ABB80664
augaaccccaaucagaagaucauuaccaucggcagcgugucccugacaauugccacgaucugcuuccucaugcaaauugcuauccuggucaccacaguuacccuucacuuuaaacaguacgaguguucuagcccuccgaacaaucaggugaugcugugcgaacccacaaucauugagagaaacaucaccgaaauuguguaucucacaaauaccacgaucgagaaggaaauuuguccuaaacuggccgaguaccggaacugguccaagccccagugcaaaaucaccggguucgcgccuuuuucuaaggacaauagcauucgccuuuccgcuggaggcgauaucugggucacaagagagcccuaugugucuugugacccugauaagugcuaccaauucgcccuggggcagggaaccacacucaacaaucggcauagcaacgacaccguucacgaucgcacgccguauagaacacugcugaugaaugaacucggcgugcccuuucaucuggggaccaaacaggucuguaucgccugguccucuagcuccugccacgacggaaaggcuuggcuucauguguguguuacaggccacgaugagaacgccaccgcuagcuucauuuacgacggccggcugguggauucuaucggguccuggagcaaaaagauucuccgcacccaggaaucugagugcgucuguaucaauggaacaugcacgguggugaugaccgacggcuccgccagcgggagagcggauacaaaaguccuguuuauugaggaaggaaagaucguucacaucuccccucuuucuggcagcgcccaacauguggaggaaugcuccuguuauccccgguacccuggggugcgcugcgucuguagagacaacuggaagggaagcaaucggcccauuguggauaucaacguuaaagacuacucuauuguguccagcuaugucugcucuggccuggugggcgacaccccgcgcaagaacgauagcuccucuagcucccacugucucaauccuaacaaugaggaagggggacauggcguuaaagggugggcuuucgacgauggaaacgacguguggaugggcagaacaaucagcgagaaguuucggucuggguacgagaccuucaaagucauugaaggaugguccaagcccaauagcaaacugcagaucaaccgccaggugaucgucgauagaggcaaucggucuggcuauuccgggauuuuuagcguggagggaaaguccugcaucaacagauguuucuacguugaacugauucgcggccggaagcaggagacggaagugugguggacaucuaauagcaucgucguguuuugcgggaccuccggaaccuauggcacagggucuuggccugacggcgccgauauuaaccucaugcccaucuga

SEQ ID NO: 206614 - RNA, 1410 nt, Artificial Sequence
  derived and/or modified CDS sequence (opt5) from neuraminidase__InfluenzaA__ABB80675
augaaccccaaucagaagaucauuaccaucggcagcgugucccugacaauugccacgaucugcuuccucaugcaaauugcuauccuggucaccacaguuacccuucacuuuaaacaguacgaguguaacucuccuccgaauaaccaggugaugcugugcgaacccacaaucauugagagaaauaucaccgaaauuguguaucucacaaacaccacgaucgagaaggaaauuuguccuaaacuggccgaguaccggaauuggagcaagccccagugcaaaaucaccggguucgcgccuuuuuccaaggacaacucuauucgccuugcugccggaggcgauaucugggucacaagagagcccuaugugagcugugacccugauaagugcuaccaauucgcccuggggcagggaaccacacucaauaaccggcauuccaaugacaccguucacgaucgcacgccguauagaacacugcugaugaacgaacucggcgugcccuuucaucuggggaccaaacaggucuguaucgcuuggucuagcuccagcugccacgacggaaaggccuggcuucauguguguguuacaggccacgaugagaaugcuaccgccucuuucauuuacgacggccggcugguggauuccaucgggagcuggucuaaaaagauucuccgcacccaggaauccgagugcgucuguaucaacggaacaugcacgguggugaugaccgacggcagcgcgucugggagagccgauacaaaaauucuguuuaucgaggaaggaaagaucguccacauuucccaacuuagcggcuccgcucagcauguugaggaaugcucuuguuauccucgguaccccggggugcgcugcguguguagagacaauuggaagggaagcaaccggccuaucgucgauauuaacgugaaagacuacuccaucguuagcucuuaugugugcuccggccuggucggcgacacaccccgcaagaaugauagcucuagcuccucuuacugucucaacccgaauaacgaggaagggggacacggcgugaaagggugggccuucgacgauggagacgauguuuggaugggcagaaccauuagcgagaagcugcgguccggguaugagaccuuuaaagugaucgaaggauggagcaagccuaauucuaaacugcagaucaaccgccaggucauuguggacagaggcaaucgguccggcuacagcgggaucuucucugucgagggaaaguccugcauuaacagauguuuuuauguggaacucauccgcggccggaagcaagagacggaaguuugguggacaagcaauuccauuguggucuucugcgggaccucuggaaccuacggcacagggagcuggcccgauggcgcugacaucaaccugaugccuauuuga

SEQ ID NO: 206615 - RNA, 1410 nt, Artificial Sequence
  derived and/or modified CDS sequence (opt5) from neuraminidase__InfluenzaA__ABB80685
augaaccccaaucagaagaucauuaccaucggcagcgugucccugacaauugccacgaucugcuuccucaugcaaauugcuauccuggucaucaccguuacacuucacuuuaaacaguacgaguguaacucuccuccgaauaaccaggugaugcugugcgaacccaccauuaucgagagaaauauuacagaaaucguguaucucaccaacacaaccauugagaaggaaaucuguccuaaacuggccgaguaccggaauuggagcaagccccagugcaaaauuacgggguucgcgccuuuuuccaaggacaacucuauccgccuuagcgcuggaggcgauaucugggucaccagagagcccuauguguccugugacccugauaagugcuaccaauucgcccuggggcagggaacaacccucaauaacggccauucuaaugacacaguucacgaucggaccccguaucgcacgcugcugaugaacgaacucggggugcccuuucaucugggaacaaaacaggucuguauugccuggagcuccagcucuugccacgacggcaaggcuuggcuucauguguguguuaccggccacgaugagaaugccacagcuuccuucaucuacgacgggagacugguggauagcauuggaucuugguccaaaaagauccuccggacccaggaaagcgagugcgucuguauuaacgggaccugcacaguggugaugacggacggcucugccuccggacgcgcggauaccaaaauccuguuuaucgaggaaggcaagauuguccacaucagccaacuuuccgggucugcccagcauguugaggaaugcagcuguuauccuagauaccccggagugcggugcgugugucgcgacaauuggaagggcuccaacagaccuauugucgauaucaacgugaaagaccacagcauuguuucuuccuacgugugcagcggccuggucggggacacaccccggaagaaugauucuagcuccucuagccauugucucaacccgaauaacgaggaaggaggccacggggugaaaggaugggcuuucgacgauggcaaugacguuuggauggggcgcaccaucuccgagaagcugagaagcggauaugagacauuuaaagugaucgaaggcuggucuaagccuaacuccaaacugcagauuaaucggcaggucaucguggaucgcggcaacagaagcggguacucuggaauuuucuccgucgagggcaagagcugcaucaaucgguguuuuuauguggaacucauuagagggcgcaagcaagagaccgaaguuugguggacguccaacucuaucguggucuucugcggaacaagcggcaccuacgggaccggcuccuggcccgacggagccgauauuaaucugaugccuaucuga

SEQ ID NO: 206616 - RNA, 1410 nt, Artificial Sequence; identical to SEQ ID NO: 206586
  derived and/or modified CDS sequence (opt5) from neuraminidase__InfluenzaA__ABB80696

SEQ ID NO: 206617 - RNA, 1410 nt, Artificial Sequence
  derived and/or modified CDS sequence (opt5) from neuraminidase__InfluenzaA__ABB80707
augaaccccaaucagaagaucauuaccaucggcagcgugucccugacaauugccacgaucugcuuccucaugcaaauugcuauccuggucaccacaguuacccuucacuuuaaacaguacgaguguucuagcccuccgaacaaucaggugaugcugugcgaacccacaaucauugagagaaacaucaccgaaauuguguaucucacaaauaccacgaucgagaaggaaauuuguccuaaacuggccgaguaccggaacugguccaagccccagugcaaaaucaccggguucgcgccuuuuucuaaggacaauagcauucgccuuuccgcuggaggcgauaucugggucacaagagagcccuaugugucuugugggccugacaagugcuaccaauucgcccugggacagggcaccacacucaacaaucggcauagcaacgauaccguucacgaccgcacgccguauagaacacugcugaugaaugaacucggggugcccuuucaucugggaaccaaacaggucuguaucgccugguccucuagcuccugccacgauggcaaggcuuggcuucauguguguguuacaggccacgacgagaacgccaccgcuagcuucauuuacgaugggcggcugguggacucuaucggauccuggagcaaaaagauucuccgcacccaggaaucugagugcgucuguaucaauggcacaugcacgguggugaugaccgauggguccgccagcggcagagcggacacaaaaauucuguuuaucgaggaaggaaagaucguccacauuuccccucuuucugggagcgcccaacauguugaggaaugcuccuguuauccccgguacccuggagugcgcugcguguguagagauaacuggaagggcagcaaucggcccaucgucgacauuaacgugaaagauuacucuaucguuuccagcuaugugugcucuggccuggucggggacaccccgcgcaagaacgacagcuccucuagcucccacugucucaauccuaacaaugaggaaggaggccauggggugaaaggaugggcuuucgaugacggcaacgauguuuggauggggagaacaauuagcgagaaguuucggucuggauacgagaccuucaaagugaucgaaggcugguccaagcccaauagcaaacugcagaucaaccgccaggucauuguggacagaggcaaucggucuggguauuccggaaucuuuagcgucgagggcaaguccugcauuaacagauguuucuacguggaacugauccgcgggcggaagcaggagacggaaguuugguggacaucuaauagcauuguggucuuuugcggaaccuccggcaccuaugggacaggcucuuggccugauggagccgacaucaaccucaugcccauuuga

SEQ ID NO: 206618 - RNA, 1410 nt, Artificial Sequence; identical to SEQ ID NO: 206586
  derived and/or modified CDS sequence (opt5) from neuraminidase__InfluenzaA__ABB80716

SEQ ID NO: 206619 - RNA, 1410 nt, Artificial Sequence
  derived and/or modified CDS sequence (opt5) from neuraminidase__InfluenzaA__ABB80725
augaaccccaaucagaagaucauuaccaucggcagcgugucccugacaauugccacgaucugcuuccucaugcaaauugcuauccuggucaccacaguuacccuucacuuuaaacaguacgaguguucuagcccuccgaacaaucaggugaugcugugcgaacccacagugaucgagagaaacauuaccgaaaucgucuaucucacaaauaccacgauugagaaggaaaucuguccuaaacuggccgaguaccggaacugguccaagccccagugcaaaauuaccggguucgcgccuuuuucuaaggacaauagcauccgccuuuccgcuggaggcgauauuugggugacaagagagcccuauguuucuugugacccugauaagugcuaccaauucgcccuggggcagggaaccacacucaacaaucggcauagcaacgacaccgugcacgaucgcacgccguauagaacacugcugaugaaugaacucggcguccccuuucaucuggggaccaaacagguguguaucgccugguccucuagcuccugccacgacggaaaggcuuggcuucauguuugugugacaggccacgaugagaacgccaccgcuagcuucaucuacgacggccggcuggucgauucuauuggguccuggagcaaaaagauccuccgcacccaggaaucugagugcguguguauuaauggaacaugcacgguggucaugaccgacggcuccgccagcgggagagcggauacaaaaauccuguuuauugaggaaggaaagaucguucacaucuccccucuuucuggcagcgcccaacauguggaggaaugcuccuguuauccccgguacccuggggugcgcugcgucuguagagacaacuggaagggaagcaaucggcccauuguggauaucaacguuaaagacuacucuauuguguccagcuaugucugcucuggccuggugggcgacaccccgcgcaagaacgauagcuccucuagcucccacugucucaauccuaacaaugaggaagggggacauggcguuaaagggugggcuuucgacgauggaaacgacguguggaugggcagaacaaucagcgagaaguuucggucuggguacgagaccuucaaagucauugaaggaugguccaagcccaauagcaaacugcagaucaaccgccaggugaucgucgauagaggcaaucggucuggcuauuccgggauuuuuagcguggagggaaaguccugcaucaacagauguuucuacguugaacugauucgcggccggaagcaggagacggaagugugguggacaucuaauagcaucgucgccuuuugcgggaccuccggaaccuauggcacagggucuuggccugacggcgcugauauuaaccucaugcccaucuga

SEQ ID NO: 206620 - RNA, 1410 nt, Artificial Sequence
  derived and/or modified CDS sequence (opt5) from neuraminidase__InfluenzaA__ABB80740
augaaccccaaucagaagaucauuaccaucggcagcgugucccugacaauugccacgaucugcuuccucaugcaaauugcuauccuggucaccacaguuacccuucacuuuaaacaguacgaguguugcucuccuccgaacaaucaggugaugcugugugaacccacaaucauugagagaaacaucaccgaaauuguguaucucacaaauaccacgaucgagaaggaaauuugcccuaaacuggccgaguaccggaacuggagcaagccccaguguaaaaucaccggguucgcgccuuuuuccaaggacaauucuauucgccuuagcgcuggaggcgauaucugggucacaagagagcccuauguguccugcgacccugauaaguguuaccaauucgcccuggggcagggaaccacacucaacaaucggcauucuaacgacaccguucacgaucgcacgccguauagaacacugcugaugaaugaacucggcgugcccuuucaucuggggaccaaacaggucugcaucgccuggagcuccagcucuugucacgacggaaaggcuuggcuucaugugugcguuacaggccacgaugagaacgccaccgcuuccuucauuuacgacggccggcugguggauagcaucgggucuugguccaaaaagauucuccgcacccaggaaagcgagugugucugcaucaauggaacaugcacgguggugaugaccgacggcucugccuccgggagagcggauacaaaaauucuguuuaucgaggaaggaaagaucguccacauuagcccucuuuccggcucugcccaacauguugaggaauguagcugcuauccccgguacccuggggugcgcugugugugcagagacaacuggaagggauccaaucggcccaucgucgauauuaacgugaaagacuacagcaucguuucuuccuauguguguagcggccuggucggcgacaccccgcgcaagaacgauucuagcuccucuagccacugccucaauccuaacaaugaggaagggggacauggcgugaaagggugggcuuucgacgauggaaacgacguuuggaugggcagaacaauuuccgagaaguuucggagcggguacgagaccuucaaagugaucgaaggauggucuaagcccaauuccaaacugcagaucaaccgccaggucauuguggauagaggcaaucggagcggcuauucugggaucuuuuccgucgagggaaagagcuguauuaacagaugcuucuacguggaacugauccgcggccggaagcaggagacggaaguuugguggacauccaauucuauuguggccuuuugugggaccagcggaaccuauggcacaggguccuggccugacggcgcugauaucaaccucaugcccauuuga

SEQ ID NO: 206621 - RNA, 1410 nt, Artificial Sequence; identical to SEQ ID NO: 206586
  derived and/or modified CDS sequence (opt5) from neuraminidase__InfluenzaA__ABB80751

SEQ ID NO: 206622 - RNA, 1410 nt, Artificial Sequence; identical to SEQ ID NO: 206305
  derived and/or modified CDS sequence (opt5) from neuraminidase__InfluenzaA__ABB82186

SEQ ID NO: 206623 - RNA, 1413 nt, Artificial Sequence; identical to SEQ ID NO: 206468
  derived and/or modified CDS sequence (opt5) from neuraminidase__InfluenzaA__ABB82197

SEQ ID NO: 206624 - RNA, 1413 nt, Artificial Sequence; identical to SEQ ID NO: 206458
  derived and/or modified CDS sequence (opt5) from neuraminidase__InfluenzaA__ABB82208

SEQ ID NO: 206625 - RNA, 1413 nt, Artificial Sequence
  derived and/or modified CDS sequence (opt5) from neuraminidase__InfluenzaA__ABB82219
augaaccccaaucagaagaucauuaccaucggcagcauuuccaucgccauugggaucaucucucugaugcuccaaauuggaaacaucauuagcaucugggcuucccacucuauucagacaggcagccagaaucauacggggaucugcaaccagagaauuaucaccuacgagaauagcacaugggugaaccacaccuaugucaauaucaacaauacaaacguuauugccgaaaaagacaagaccucugugacacuggcgggaaauagcucccuuuguagcaucucuggcugggcuauuuacaccaaagauaacuccauccggauugggagcaagggagacguguucgucauccgcgagccuuuuaucucuugcuccaaucuggaauguagaacguucuuucucacccaaggcgcccugcuuaacgauaaacauagcaauggcacagugaaggaccggucuccguaucgcgcccugauguccugcccccucggggaggcuccuagccccuacaacuccaaguucgaaucuguugccuggagcgcuuccgccugucacgauggaaugggcuggcugaccauugggaucagcggaccugacaacggcgcgguggccguccugaaauauaaugggauuaucacagagaccauuaagucuuggaaaaagagaauccuccggacgcaggaguccgaaugcguguguguuaacggaagcugcuuuacaaucaugaccgauggccccucuaauggcgcugccagcuacaaaauuuucaagaucgagaaggggaaagugacaaaguccauugaacugaacgcuccuaauuuucauuaugaggaguguucuugcuacccggacaccggaaccgucaugugugugugccgcgauaacuggcacggcagcaauagacccuggguguccuucaaccagaaucuugacuaccagaucggguauauuugcagcggagucuuuggcgauaacccucggcccaaagacggggaaggaucuuguaauccuguuacaguggauggcgccgacggcgugaagggguucuccuacaaauauggaaacggcgucuggaucgggcgcacgaaguccaauagacugcggaaaggauuugagaugauuugggaccccaacggcuggaccgauacagacucugauuucuccgugaagcaagacguuguggcgaucaccgauuggagcggguacuccggcucuuuuguccagcacccggaacucacaggacuggacugcauccgcccuuguuucuggguggagcuuguuagaggccugccccgggaaaauaccacgauuuggacaagcggguccucuaucagcuucugcggagugaacuccgaugccgcugacuggagcuggccugauggcgccgagcuccccuuuaccauugacaaguga

SEQ ID NO: 206626 - RNA, 1410 nt, Artificial Sequence
  derived and/or modified CDS sequence (opt5) from neuraminidase__InfluenzaA__ABB82230
augaaccccaaucagaagaucauuaccaucggcagcgugucccugacaauugccacggucugcuuccucaugcaaaucgcuauucugguuaccacagugacccuucacuuuaaacaguacgagugugacucuccugccaacaaucaggugaugccgugcgaacccaucaucauugagagaaacaucacagaaauugucuaucugaccaauacaaccaucgagaaggaaauuuguccuaaacucguggaguaccggaacuggagcaagccccagugcaaaaucacgggguucgcgccuuuuuccaaggauaauucuauucgccugagcgcuggaggcgacaucuggguuaccagagagcccuauguguccugugauccugggaagugcuaccaauucgcccuuggacagggcacaacccuggacaacaaacauucuaaugauacaauccacgaccggauuccgcaucgcacccuccugaugaacgaacuggggguccccuuucaccucggaacgagacagguguguaucgccuggagcuccagcucuugccaugauggcaaggcuuggcugcacguuugugugacaggcgacgauaaaaaugccaccgcuuccuucauuuaugacgggcggcuugucgauagcaucggaucuuggucccagaacauucugcgcacacaagagagcgaaugcguguguaucaauggaaccugcaccguggucaugacagacgggucugccuccggcagagcggauacgcggauccucuuuauugaggagggcaagaucguucacauuagcccucuguccgggucugcccagcauguggaagagugcagcuguuacccccgcuauccuggagugagaugcaucugucgggacaacuggaaaggcuccaaucgccccauugucgacaucaacgugaaggauuacagcaucgacucuagauacguuugcuccggccuugugggggauaccccgcggaacaaugaccgcagcucuaacagcaauuguagaaacccuaauaacgauaagggaaaucacggcgucaaagggugggcuuucgacgauggaaacgacguguggaugggccggacaauuuccaaggauucuagaagcggguaugaaaccuuuaaaguuaucggaggcugguccacacccaauagcaagucucagauuaaccgccaggugaucgucgacuccgauaaucggagcggcuacucugggauuuucuccguggagggaaaaagcugcaucaacagauguuuuuaugucgaacugauucgcggccgggagcaagagaccagagugugguggacguccaauucuaucguuguguucugcgggacaagcggaaccuacggcaccggguccuggccugacggcgccgacaucaaccucaugcccauuuga

SEQ ID NO: 206627 - RNA, 1410 nt, Artificial Sequence
  derived and/or modified CDS sequence (opt5) from neuraminidase__InfluenzaA__ABB83018
augaaccccaaucagaagaucauuaccaucggcagcgugucccugacaauugccacgaucugcuuccucacccaaauugcuauccuggucacaaccguuacacuucacuuuaaacaguacggguguaacucuccuccgaauaaccaggugaugcugugcgagcccaccaucauugaaagaaauaucacagagauuguguaucucaccaacacgaccaucgaaaaggagauuuguccuaaacuggccgaauaccggaauuggagcaagccccagugcaacaucacaggauucgcgccuuuuuccaaagacaauucuauucgccuuagcgcuggcggggauaucugggucaccagagagcccuauguguccugugacccugauaagugcuaccaauucgcccugggacagggcacaacccucaacaaugggcauucuaacgacacgguucacgaucggacaccguaucgcacccugcugaugaaugagcucggagugcccuuucaucugggcacaaagcaggucuguaucgccuggagcuccagcucuugccacgacggcaaggcuuggcuucauguguguguuaccggggaugacaagaacgccaccgcuuccuucauuuacaauggaagacugguggauagcaucggcucuugguccaaaaagauucuccggacacaggaaagcgagugcgucuguaucaacgggacgugcaccguggugaugacagacggaucugccuccggcaaagcggauaccaagauucuguuuaucgaagaggggaagaucguccacacaagccuucuguccggaucugcccaacacguugaggaaugcagcuguuauccucgcuaccccggcgugagaugcgugugucgggacaacuggaaaggcuccaaucgcccuauugucgauaucaacgugaaggacuacagcauuguuucuuccuaugugugcagcgggcucgucggagacacccccagaaagaaugauucuagcuccucuagccauugucuggacccgaacaaugaggaaggcgggcacggagugaaaggcugggcuuucgaugacgggaacgauguuuggaugggacggacgaucuccgagaaacugcgcagcggcuacgaaacauuuaaggugauugagggcuggucuaaaccuaauuccaagcuccagaucaacagacaggucaucguggaccgggggaaucgcagcggauauucuggcauuuucuccgucgaggggaaaagcugcaucaacagauguuuuuacguggaacugauucggggaagaaaucaggagaccgaaguucuuuggaccuccaacucuaucguggucuucugcggcacaagcgggaccuauggcacaggauccuggcccgauggcgccgacauuaaucugaugccuaucuga

SEQ ID NO: 206628 - RNA, 1410 nt, Artificial Sequence; identical to SEQ ID NO: 206627
  derived and/or modified CDS sequence (opt5) from neuraminidase__InfluenzaA__ABB83029

SEQ ID NO: 206629 - RNA, 1410 nt, Artificial Sequence; identical to SEQ ID NO: 206454
  derived and/or modified CDS sequence (opt5) from neuraminidase__InfluenzaA__ABB83130

SEQ ID NO: 206630 - RNA, 1410 nt, Artificial Sequence
  derived and/or modified CDS sequence (opt5) from neuraminidase__InfluenzaA__ABB83141
augaaccccaaucagaagaucauuaccaucggcagcgugucccugacaauugccacgaucugcuuccucucucaaauugcuauccuggucaccacaguuacccuucacuuuaaacaguacgaguguaacagcccuccgaauaaccaggugaugcugugcgaacccacaaucauugagagaaauaucaccgaaauuguguaucucacaaacaccacgaucgagaaggaaauuuguccuaaacuggccgaguaccggaauugguccaagccccagugcaacaucaccggguucgcgccuuuuucuaaagacaauagcauucgccuuuccgcuggaggcgauaucugggucacaagagagcccuaugugucuugugacccugauaagugcuaccaauucgcccuggggcagggaaccacacucaacaauggccauagcaacgacaccguucacgaucggacgccguaucgcacacugcugaugaaugaacucggggugcccuuucaucugggaaccaagcaggucuguaucgccugguccucuagcuccugccacgacggcaaggcuuggcuucauguguguguuacaggcgaugacaaaaacgccaccgcuagcuucauuuacaaugggagacugguggauucuaucggauccuggagcaaaaagauucuccggacccaggagucugaaugcgucuguaucaacggcacaugcacgguggugaugaccgacggguccgccagcggaaaagcggauacaaagauucuguuuaucgaggagggcaagaucguccacaccucccuucugucugggagcgcccaacacguugaagagugcuccuguuauccucgcuaccccggagugagaugcgugugucgggacaacuggaaaggcagcaaucgcccuauugucgauaucaacgugaaggacuacucuauuguuuccagcuaugugugcucuggccucgucggggacacaccccggaaaaaugauagcuccucuagcucccauugucuggacccgaacaaugaagagggaggccacggggugaagggaugggcuuucgaugacggcaacgauguuuggauggggagaaccaucagcgaaaaacugcgcucuggauacgagacguuuaaggugauugagggcugguccaaaccuaauagcaagcuccagaucaacagacaggucaucguggaccgggauaaucgcucuggcuauuccgggauuuucagcgucgaaggaaaguccugcaucaacagauguuuuuacguggagcugauucggggcagaaaucaggaaacagagguucuuuggaccucuaacagcaucguggucuucugcgggaccuccggaacauauggcaccgggucuuggcccgacggcgccgauauuaaucugaugccuaucuga

SEQ ID NO: 206631 - RNA, 1410 nt, Artificial Sequence
  derived and/or modified CDS sequence (opt5) from neuraminidase__InfluenzaA__ABB86876
augaacaccaaucagagaaucauuacaaucggcacggugugccugauugucgggaucauuagccuccugcuucaaaucggaaacaucguuucccuguggauuucucacagcauccagaccggcgggaagaaucauuccgagauguguaaccagaaugugauuacauacgugaacaauaccugggucaaccggacauaugugaauaucucuaacaccaauauugccacaguucaggacgugaccagcgucauccucgcuggaaacuccucucugugcagcguguccggcugggccauuuacagcaaagauaauucuauccgcaucggguccaagggagacauuuucguuaucagagaacccuuuauuagcuguucucaccuugagugccggacguucuuucugacccaaggcgcgcuccugaacgauaaacauuccaauggcacagugaaggaccgcagcccuuauagaacccugaugucuuguccgaucggggaagcucccuccccuuacaacagccgguucgaguccgucgccuggucugccagcgcuugccacgauggaaugggcuggcucacaauugggaucuccggacccgacaacggcgccguggcugugcugaaauauaaugggaucauuaccgauacgaucaagagcuggcgcaacaagauucuuagaacacaggaaucugagugugucugcaugaauggauccuguuuuaccguucugacagacggcccuagcaacggccaggccucuuacaaaaucuucaagguggagaaagggaagauuaucaaaagcaucgaacucgaugcgcccaauuaucauuacgaggaaugcuccuguuacccugacaccggaaaggugaugugcgucugccgggauaacuggcacgccucuaaucgcccgugggugagcuuugaccagaaccuggauuaucaaauuggcuacaucuguuccgggguuuucggagacaaucccagaagcaacgacggcaaggggaauugcggaccugugcuuucuaacggcgcuaauggcgucaaaggguuuuccuuccgguauggaaacggcguguggauugggcgcaccaagagcaucaauucuagauccggauuugagaugauuugggaucccaacggcuggacagggacggacagcuccuucucuaugaaacaggauaucauugcccugaccgacuggagcggcuacuccggaucuuuuguucagcacccugagcucacaggcaugaacuguauccggcccugcuucuggguggaacugauccgcgggcagccgaaggagagcaccauuugggcuuccggaagcucuaucuccuucuguggcgucgauagcgaaacaaccucuugguccuggccugacggggccgaucugcccuuuacgauugacaaauga

SEQ ID NO: 206632 - RNA, 1410 nt, Artificial Sequence
  derived and/or modified CDS sequence (opt5) from neuraminidase__InfluenzaA__ABB86886
augaacaccaaucagagaaucauuacaaucggcacggccugccuggcuauugggaucgugagccuccugcuucaaauuggaaacaucgucucccuguggaucucucacagcauucagaccgaggaaaagaaucauuccgagacauguucucagaacuucaucacccacgaaaauaacacauggguuaaucagaccuacauuaacaucagcaauacaaacaauguggugggccaaggggucaccuccauuaugcucgccggaaacucuagccugugccccaucuccggcugggcgauuuauagcaaagacaauucuauccggaucggguccaagggagauauuuuugugauccgcgagccuuucauuagcuguucucaucuugaaugcagaacguuuuuccugacccagggcgcucuccugaacgacaaacacuccaauggcacaguuaaggaucggagcccguaccgcacccugaugucuugucccaucggggaggccccuucccccuauaacagcagauuugaguccguggccuggucugcuagcgccugccaugacggaaugggcuggcucacaauugggaucuccggaccugauaacggcgcugucgccguguucaaauacaaugggaucauuaccgacacgaucaagagcuggcggaacaagauucugcgcacacaggaaucugaguguguuugcaucaauggauccuguuuuaccauuaugacagauggccccagcaacggccaggcgucuuauaaaaucuucaagauggaaaaagggaagaucauuaaaagcguggagcuugacgccccuaauuaccacuaugaggaauccucuugcuacccggauaccggaaaggucgugugugugugcagagacaacuggcacgcuagcaaucggcccugggucuccuuugaucaaaaccuggacuaccagaucggcuauauuugcagcgggguuuucggagauaauccucgcucuaacgacggcaaggggaauuguggacccgugcucuccaacggcgccaauggcgugaaagaggucagcuuuagauacgggaacggaguguggaucggccggaccaagucuauuuccagccgcuccggguucgaaaugaucugggacccuaauggauggacagagacggauucuagcuuuuccauuaaacaggacaucaucgcucugaccgauuggucuggcuauagcggguccuucguucagcaucccgaacuuacaggcaugaacugcauuaagccguguuucuggguggagcugaucagaggacaaccuaaagagagcaccauuuggacaucuggcuccagcaucucuuuuugcggggucgacuccgaaaccgccagcuggucuuggcccgauggagcggaccucccuuucacgauugauaaguga

SEQ ID NO: 206633 - RNA, 1410 nt, Artificial Sequence
  derived and/or modified CDS sequence (opt5) from neuraminidase__InfluenzaA__ABB86898
augaaccccaaucagaagaucauuaccaucggcagcgugucccugacacucgccacgauuugcuuccugaugcaaaucgcuauucuugucaccacaguuacccugcacuuuaaacagcaggaguguaacucuccuccgaauaaccaggugaugcucugcgaacccacaaucaucgagagaaauauuaccgaaaucguguaccugacaaacaccacgauugagaaggaaaucuguccuaaacuugccgaguaucggaauuggagcaagccccaaugcaacauuaccggguucgcgccuuuuuccaaagacaauucuauccgccugagcgcuggaggcgauauuugggucacaagagagcccuacguguccugugacccugauaagugcuaucaguucgcccucgggcagggaaccacacugaacaauggccauucuaacaauaccguucacgaccggacgccguaccgcacacugcucaugaacgaacugggggugcccuuucaucuuggaaccagacaggucuguaucgccuggagcuccagcucuugccacgauggcaaggcuuggcugcauguguguaucacaggcgacgauaaaaaugccaccgcuuccuucauuuauaacgggcggcucguugacagcaucggaucuugguccaagaaaauucugcgcacccaagagagcgaaugcguguguaucaacggcacaugcacggucgugaugaccgaugggucugccuccggaaaggcggacacaaaaauucuuuuuaucgaggagggcaagaucgugcacauuagcacccuguccgggucugcccagcacgucgaagagugcagcuguuacccuagauaucccggaguucggugcgugugucgcgauaauuggaagggcuccaacagaccuaucguggacauuaaugucaaagauuacagcaucgugucuuccuacguuugcagcggccucgugggggacacaccccggaagaacgacucuuucagcuccucucauugucuggauccgaauaacgaagagggaggccacggggucaaaggaugggcuuuugacgauggcaaugacguguggauggggcgcaccauuagcgaaaagcugagauccggauaugagacguucaaaguuaucgagggcuggagcaagccuaacucuaaacuccagaucaaucgccaggugauugucgaacggggcuccagaagcggguacucuggaaucuuuuccguggagggcaagagcugcauuaaccgguguuucuaugucgaacugaucagagggcgcaaggaggaaacaaaagugugguggaccuccaauucuauuguuguguuuugcggaaccagcggcacauacgggaccggcuccuggcccgauggagccgacaucaaccuuaugccuauuuga

SEQ ID NO: 206634 - RNA, 1410 nt, Artificial Sequence
  derived and/or modified CDS sequence (opt5) from neuraminidase__InfluenzaA__ABB86906
augaacaccaaucagagaaucauuacaaucggcacggugugccugauugucgggaucauuagccuccugcuucaaaucggaaacaucguuucccuguggauuucucacagcauccagaccggcgggaagaaucauuccgagauguguaaccagaaugugauuacauacgugaacaauaccugggucaaccggacauaugugaauaucucuaacaccaauauugccacaguucaggacgugaccagcgucauccucgcuggaaacuccucucugugcagcguguccggcugggccauuuacagcaaagauaauucuauccgcaucggguccaagggagacauuuucguuaucagagaacccuuuauuagcuguucucaccuugagugccggacguucuuucugacccaaggcgcgcuccugaacgauaaacauuccaauggcacagugaaggaccgcagcccuuauagaacccugaugucuuguccgaucggggaagcucccuccccuuacaacagccgguucgaguccgucgccuggucugccagcgcuugccacgauggaaugggcuggcucacaauugggaucuccggacccgacaacggcgccguggcugugcugaaauauaaugggaucauuaccgauacgaucaagagcuggcgcaacaagauucuuagaacacaggaaucugagugugucugcaugaauggauccuguuuuaccguucugacagacggcccuagcaacggccaggccucuuacgagaucuucaaaguggaaaaggggaaaauuaucaagagcaucgagcucgaugcgcccaauuaucauuacgaagagugcuccuguuacccugacaccggaaaagugaugugcgucugccgggauaacuggcacgccucuaaucgcccgugggugagcuuugaccagaaccugaauuaucaaauuggcuacaucuguuccgggguuuucggagauaaccccagaagcaaugacggcaaggggaacugcggaccugugcuuucuaauggcgcuaacggcgucaagggguuuuccuuccgguauggaaauggcguguggauugggcgcaccaaaagcaucucuuccagaagcggauuugagaugguuugggaccccaacggcuggacagggacggauucccgguucucuaugaagcaggacauuaucgcccugaccgauuggagcggcuacuccggaucuuuugugcagcacccugaacucacaggcaugaacuguauucgccccugcuucugggucgagcugaucagagggcagccgaaagaaagcaccaucugggcuuccggaagcucuauuuccuucuguggcgugaauagcgagacagccucuugguccuggccugacggggcggaucugcccuuuaccaucgacaaguga

SEQ ID NO: 206635 - RNA, 1410 nt, Artificial Sequence
  derived and/or modified CDS sequence (opt5) from neuraminidase__InfluenzaA__ABB86916
augaaccccaaucagaagaucauuaccaucggcagcgugucccugacaauugccacgaucugcuuccucacccaaauugcuauccuggucacaaccguuacacuucacuuuaaacaguacgaguguaacucuccuccgaauaaccaggugaugcugugcgaacccaccaucauugagagaaauaucacagaaauuguguaucucaccaacacgaccaucgagaaggaaauuuguccuaaacuggccgaguaccggaauuggagcaagccccagugcaacaucacaggguucgcgccuuuuuccaaagacaauucuauucgccuuagcgcuggaggcgauaucugggucaccagagagcccuauguguccugugacccugauaagugcuaccaauucgcccuggggcagggaacaacccucaacaauggccauucuaacgacacgguucacgaucggacaccguaucgcacccugcugaugaaugaacucggggugcccuuucaucugggaacaaagcaggucuguaucgccuggagcuccagcucuugccacgacggcaaggcuuggcuucauguguguauuaccggcgaugacaaaaacgccaccgcuuccuucaucuacaaugggagacugguugauagcauuucuuccuggagcaaaaagauccuccggacacaggagucugaaugcguguguauuaacggaacgugcaccgucgugaugacagacggcuccgccagcgggaaagcggauaccaagauccuguuuaucgaggagggaaagauugugcacacaucccuucugucuggcagcgcccaacacgucgaagagugcuccuguuauccucgcuaccccgggguuagaugcgugugucgggacaacuggaaaggaagcaaucgcccuaucguggauauuaacgucaaggacuacucuaucguguccagcuauguuugcucuggccucgugggcgacacccccagaaagaaugauagcuccucuagcucccauugucuggacccgaacaaugaagaagggggacacggcgucaaagggugggcuuucgaugacggaaacgauguguggaugggccggacgauuagcgagaaacugcgcucuggguacgagacauuuaagguuaucgagggaugguccaaaccuaauagcaagcuccagaucaacagacaggugauugucgaccgggauaaucgcucuggcuauuccggcaucuucagcguggaagggaaguccugcauuaacagauguuuuuacgucgagcugauccggggaagaaaucaggaaaccgaggugcuuuggaccucuaacagcauuguuguguucugcggcacauccgggaccuauggaacaggcucuuggcccgacggggccgauaucaaucugaugccuauuuga

SEQ ID NO: 206636 - RNA, 1410 nt, Artificial Sequence
  derived and/or modified CDS sequence (opt5) from neuraminidase__InfluenzaA__ABB86928
augaaccccaaucagaagaucauuaccaucggcagcgugucccugacaauugccacgaucugcuuccucaugcaaauugcuauccuggucaccacaguuacccuucacuuuaaacaguacgaguguaacucuccuccgaauaaccaggugaugcugugcgaacccacaaucauugagagaaauaucaccgaaauuguguaucucacaaacaccacgaucgagaaggaaauuuguccuaaacuggccgaguaccggaauuggagcaagccccagugcaacaucaccggguucgcgccuuuuuccaaagacaauucuauucgccuuagcgcuggaggcgauaucugggucacaagagagcccuauguguccugugacccugauaagugcuaccaauucgcccuggggcagggaaccacacucaacaauggccauucuaacgacaccguucacgaucggacgccguaucgcacacugcugaugaaugaacucggggugcccuuucaucugggaaccagacaggucuguaucgccuggagcuccagcucuugccacgacggcaaggcuuggcuucauguguguauuacaggcgaugacaaaaacgccaccgcuuccuucaucuacaaugggcggcugguugauagcauuggaucuugguccaagaaaauccuccgcacccaggagagcgaaugcguguguauuaacggcacaugcacggucgugaugaccgacgggucugccuccggaaaggcggauacaaaaauccuguuuaucgaggagggcaagauugugcacaucagcacccuuuccgggucugcccaacacgucgaagagugcagcuguuauccuagauaccccggaguucggugcgugugucgcgacaacuggaagggcuccaauagaccuauuguggauaucaacgucaaagacuacagcauugugucuuccuauguuugcagcggccuggugggggacacaccccggaagaaugauucuuucagcuccucucauugucucaacccgaauaacgaagagggaggccacggggucaaaggaugggcuuuugacgauggcaaugacguguggauggggcgcaccaucagcgaaaagcugagauccggauacgagacguucaaaguuaucgagggcuggagcaagccuaacucuaaacugcagauuaaucggcagguuaucgucgaacgcggcaacagauccggguauagcggaaucuuuucuauugagggcaaguccugcauuaaucgguguuucuacguggaacucaucagagggcgcaaggaggaaacaaaagucugguggaccagcaacuccauugugguguuuugcggaaccucuggcacauaugggaccggcagcuggcccgauggagccgacaucaaucugaugccuaucuga

SEQ ID NO: 206637 - RNA, 1410 nt, Artificial Sequence
  derived and/or modified CDS sequence (opt5) from neuraminidase__InfluenzaA__ABB86936
augaacaccaaucagagaaucauuacaaucggcacggugugccugauugucgggaucauuagccuccugcuucaaaucggaaacaucguuucccuguggauuaaucacucuauccagaccgagggcaagaaccauagcgaaauguguaaucagaacgugauuacauacgugaauaacaccugggucaaucggacauaugugaacaucuccaauaccaacauugccacaguucaggacgugaccucugucauccucgcugggaauagcucccugugccccgugucuggaugggccauuuacagcaaagauaacuccauccgcaucggcagcaagggggacauuuucguuaucagagagccuuuuauuucuuguucccaccuugaaugccggacguucuuucugacccaaggagcgcuccugaaugauaaacauagcaacggcacagugcgcgacagaucuccguaucggacccugauguccugucccacaggcgaggcuccuagccccuacaacucucgcuucgaauccgucgccuggagcgccuccgcuugccacgaugggaugggauggcucaccaucggcauuucugggccugacaauggagccguggcugugcugaaguauaacggcaucaucacggauacaauuaaaagcuggagaaauaagauccuucggacccaggaguccgagugugucugcaugaacgggagcuguuuuacaguucugaccgacggacccucuaauggccaggccuccuacaagauuuucaaaguggaaaagggcaaaaucauuaagagcaucgagcucgaugcgccuaacuaucauuacgaagagugcucuuguuacccggacaccgggaaagugaugugcgucugccgcgauaauuggcacgccagcaacagacccuggaucuauuuugaccagaaucuggauuaccaaauuggauauaucuguuccggcguguucggggacaacccucggucuaaugacggaaagggcaacugcgggcccguucuuagcaauggagcuaacggcgugaagggcuuuuccuuccgcuacgggaauggagucuggauuggcagaacaaaaagcaucaacucucgguccggguuugagaugauuugggauccuaacggauggacgggcaccgacagcucuuucuccaugaagcaggauauccuggccacaaccgacuggagcggguauuccggcucuuuugugcagcaccccgaacucacaggaaugaauuguauucgcccgugcuucuggguugagcugaucagaggccagccuaaagaaagcaccaucugggcuuccgggucuagcauuuccuucuguggagugaacagcgagacggccaauuggucuuggcccgauggcgcggaccugccuuuuacaaucgauaaguga

SEQ ID NO: 206638 - RNA, 1410 nt, Artificial Sequence
  derived and/or modified CDS sequence (opt5) from neuraminidase__InfluenzaA__ABB86947
augaacaccaaucagagaaucauuacaaucggcacggugugccugauuguggggaucauuagccuccugucccaaaucggaaacaucguuucucuuuggauuauccacagcauucagaccggcgggaagaaucauuccgagauguguaaccagaaugugaucacauacgugaacaauaccugggucaaccggacauauauuaauaucucuaacaccaauauugccacagugaaagacguuaccagcgugauccuggcuggaaacuccucucucugccccgucagcggcugggccaucuacuccaaggauaauagcauucgcaucgggucuaaaggagacauuuucgugaucagagaaccuuuuauuuccuguagccaccuggagugccggacguucuuucuuacccagggcgcgcugcucaacgauaagcauucuaauggcacaguuaaagaccgcuccccguauagaacccugaugagcugucccaucggggaagcuccuucucccuacaacucccgguucgagagcguggccugguccgccucugcuugccacgauggaaugggcuggcugacaaucgggauuagcggaccugacaacggcgccgucgcugugcucaaguauaaugggaucauuaccgauacgaucaaguccuggcgcaacaaaauucugagaacacaagaaagcgagugugugugcaugaauggaucuuguuuuaccguccuuacagacggccccuccaacggccaggccagcuacaagaucuucaaaguugagaaggggaaaaucauuaagucuaucgaacuggaugcgccuaauuaucauuacgaggaaugcagcuguuacccggacgccggaaaggugaugugcgugugccgggauaacuggcacgcuuccaaucgccccugggucucuuuugaccagaaccucgauuaucagaugggcuacauuuguagcgggguguucggagacaauccuagauccaacgacggcaaagggaauugcggacccguucugagcaacggcgccaauggcgugaagggguuuucuuuccgguauggaaacggcgucuggaucgggcgcaccaaauccauuaauagcagaucuggauuugagaugaucugggauccuaacggcuggaccgggacagacuccagcuucuccaugaagcaagauauuaucgcucuuacggacuggucuggcuacagcggauccuuugugcagcaccccgagcugaccggcaugaacuguauccggccgugcuucuggguugaacucauucgcgggcagccuaaagagucuacaaucugggccagcggauccagcauuucuuucuguggcgucaauuccgaaaccgcgagcuggucuuggcccgauggggccgaccugccuuuuacaaucgauaaguga

SEQ ID NO: 206639 - RNA, 1410 nt, Artificial Sequence
  derived and/or modified CDS sequence (opt5) from neuraminidase__InfluenzaA__ABB86957
augaacaccaaucagagaaucauuacagugggcacggucugccugaucguugggauugugagccuccugcuucaaaucggaaacauugugucccuguggaucucucacagcauccagaccggcgagaagaaucauuccgaagucuguaaccagaauauuaucacauacgagaacaaaaccugggugaaucagacauauguuaacauuucuaauaccaacaucgccgaagggcaaggagugacaagcauuaucauggcuggcaauuccucucucugccccgucagcgggugggccauuuacuccaaggacaacagcauccggaucggaucuaaaggcgauauuuucgugauccgcgagccuuuuauuuccuguagccaccuggaaugcagaaccuucuuucuuacgcagggcgcgcugcucaaugaccggcauucuaacgggaccguuaaggaucgcuccccguauagaacacugaugagcugucccaucggagaggcuccuucucccuacaauucccgguucgagagcguggccugguccgccucugcuugccacgacggcaugggguggcugaccauuggaaucagcggcuccgauaacgaagccgucgcugugcucaaauauaacgggaucauuacagacaccaucaagagcuggcgcaauaagauucugagaacgcaggagucugaaugugugugcaucaacggauccuguuuuacaauuaugaccgauggcccuagcaauggccaggccucuuacaaaaucuucaagauggagaaagggaagaucauuaaaagcgucgagcuugaagcgcccaacuaucauuacgaggaaugcuccuguuacccugacacaggaaagguugugugcgugugccgggauaauuggcacgccucuaaccgcccgugggucagcuuuaaucaaaaccuggacuaucagaucggcuacauuuguuccgggguguucggagauaaucccagaagcaacgacggcaaggggaauugcggaccuguucccucuaacggcgcuaauggcgugaaaggguuuuccuuccgguauggaaacggcgucuggaucgggcgcaccaagagcaucuuuucuagauccggauucgagaugauuugggauccuaauggcuggaccgaaacagacagcuccuuuucuauuaaacaggacaucaucgcccucacggauuggagcggguacuccggcucuuucgugcagcaccccgagcugaccggaaugaacuguauucggccgugcuucuggguugagcuuauccgcggccaaccuaaggaaagcacaauuuggaccuccgggagcucuaucuccuuuuguggaguggacagcgagacagcuucuugguccuggcccgauggcgccgaccugccuuucaccauugauaaauga

SEQ ID NO: 206640 - RNA, 1410 nt, Artificial Sequence
  derived and/or modified CDS sequence (opt5) from neuraminidase__InfluenzaA__ABB96333
augaaccccaaucagaagaucauuaccaucggcagcgugucccugacaauugccacgaucugcuuccucaugcaaauugcuauccuggucaccacaguuacccuucacuuuaaacaguacgacugugauucuccugccaacaaucaggugaugccgugcgagcccaucauuaucgaaagaaacauuacagagaucguguaucugaccaauacaaccauugaaaaggagaucuguccuaaacucgucgaauaccggaacuggagcaagccccagugcaaaauuacgggguucgcgccuuuuuccaaggacaauucuauccgccugagcgcuggaggcgauaucugggugaccagagagcccuauguuuccugugacccugggaagugcuaccaauucgcccuuggacagggcacaacccuggauaacaaacauucuaaugacacaauucacgaucggaccccgcaucgcacgcuccugaugaacgagcugggggugcccuuucaccucggaacaagacaggucuguaucgccuggagcuccagcucuugccaugacggcaaggcuuggcugcacguguguguuaccggcuaugauaaaaaugccacagcuuccuucauuuacgacgggcggcuuguggauagcaucggaucuugguccaagaacauucugcgcacccaggaaagcgagugcgucuguaucaaugggaccugcacaguggugaugacggacggcucugccuccgaaagagcggauaccaaaauccucuuuauugaggagggaaagaucguccacauuagcccucuguccggcucugcccaacauguugaagagugcagcuguuauccccgguacccuggggugcgcugcguguguagagacaacuggaagggauccaaucggcccgucguggacaucaacguuaaagauuacagcauugcuucuuccuaugugugcagcggccuugucggcgacacaccgcgcaagaacgauagauacucuagcuccuauugucggaauccuaacaaugaaaaagggaaccacggagugaagggcugggccuucgacgaugggaaugacguuuggaugggacgcaccaucucugaugagagcagauccggcuacgaaacauuuaaagugaucgggggauggagcacccccaacucuaagcugcagauuaaucggcaggucaucguggacuccgauaacagaagcggcuauucuggcauuuucuccgucgaggggaaaagcugcaucaaucgcuguuuuuacguggagcucauucggggaagagaacaggagacgcgcguuugguggacauccaacucuaucguggucuucugcggcaccagcgggaccuauggaacaggcuccuggccugacggggcugauauuaaucugaugcccaucuga

SEQ ID NO: 206641 - RNA, 1410 nt, Artificial Sequence
  derived and/or modified CDS sequence (opt5) from neuraminidase__InfluenzaA__ABB96344
augaaccccaaucagaagaucauuaccaucggcagcgugucccugacaauugccacgaucugcuuccucaugcaaauugcuauccuggucaccacaguuacccuucacuuuaaacaguacgagugugacucuccugccaacaaucaggugaugccgugcgaacccaucauuaucgagagaaacauuacagaaaucguguaucugaccaauacaaccauugagaaggaaaucuguccuaaacucgucgaguaccggaacuggagcaagccccagugcaaaauuacgggguucgcgccuuuuuccaaggauaauucuauccgccugagcgcuggaggcgacaucugggugaccagagagcccuauguuuccugugauccugggcggugcuaccaauucgcccuuggacagggcacaacccuggacaacaagcauucuaaugauacaauucacgaccgcaccccgcauagaacgcuccugaugaacgaacugggggugcccuuucaccucggaacacggcaggucuguaucgccuggagcuccagcucuugccaugauggcaaggcuuggcugcacguguguguuaccggcuaugacaaaaaugccacagcuuccuucauuuacgaugggcgccuuguggacagcaucggaucuugguccaaaaacauucugagaacccaggagagcgaaugcgucuguaucaaugggaccugcacaguggugaugacggaugggucugccuccgagcgggcggacaccaagguccucuuuaucgaggaaggaaaaauuguucacaucagcccucuguccggcucugcccaacauguggaggaaugcagcuguuauccccgcuacccuggggugagaugcgucugucgggauaacuggaagggauccaaucgccccgugguugacauuaacgugaaggacuacagcaucgcuucuuccuaugucugcagcggccuugugggcgauacaccgcggaaaaacgacagauacucuagcuccuauugucgcaauccuaacaaugagaaggggaaccacggaguuaaaggcugggccuucgaugacgggaaugauguguggaugggaagaaccauuucugacgaaagccgguccggcuacgagacauuuaaggucaucgggggauggagcacccccaacucuaaacugcagaucaauagacaggugauugucgauuccgacaaccgcagcggcuauucuggcaucuucuccguggagggcaagagcugcauuaaucgguguuuuuacguugaacucaucagaggacgcgagcaggaaacgcgggugugguggacauccaacucuauugucguguucugcggcaccagcgggaccuauggaacaggcuccuggccugauggggcugacaucaaucugaugcccauuuga

SEQ ID NO: 206642 - RNA, 1410 nt, Artificial Sequence
  derived and/or modified CDS sequence (opt5) from neuraminidase__InfluenzaA__ABB96398
augaaccccaaucagaagaucauuaccaucggcagcgugucccugacaauugccacgaucugcuuccucaugcaaauugcuauccuggucaccacaguuacccuucacuuuaaacaguacgagugugacucuccugccaacaaucaggugaugccgugcgaacccaucauuaucgagagaaacauuacagaaaucguguaucugaccaauacaaccauugagaaggaaacguguccuaaacucgucgaguaccggaacuggagcaagccccagugcaaaaucaccggguucgcgccuuuuuccaaggauaauucuauucgccugagcgcuggaggcgacaucugggugacaagagagcccuauguuuccugugauccugggaagugcuaccaauucgcccuuggacagggcaccacacuggacaacaaacauucuaaugauaccauccacgaccggacgccguaucgcacacuccugaugaacgaacugggggugcccuuucaucucggaaccagacaggucuguauugccuggagcuccagcucuugccacgauggcaaggcuuggcugcauguguguguuacaggcuacgacaaaaaugccaccgcuuccuucaucuaugaugggcggcuuguggacagcauuggaucuugguccaagaacauccugcgcacccaggagagcgaaugcgucuguauuaauggcacaugcacgguggugaugaccgaugggucugccuccgagagagcggacacaaaaauccucuuuaucgaggaaggaaagauuguccacaucagcccucuguccggcucugcccaacacguugaggaaugcagcuguuacccccgguacccuggggugcgcugcguguguagagauaacuggaagggauccaaucggcccgucguggacauuaacguuaaagacuauagcaucgcuucuuccuacgugugcagcggccuugucggcgauaccccgcgcaagaacgacagaucuagcuccucuuauugucggaauccuaacaaugagaaagggaaccauggagugaagggcugggccuucgaugacgggaaugauguuuggaugggacgcacaauuagcgaagaguccagaagcggcuacgagaccuuuaaagugaucgggggauggucuacgcccaacuccaagcugcagaucaaucggcaggucauuguggacagcgauaacagaucuggcuauuccggcaucuucagcgucgaagggaaauccugcauuaaucgcuguuuuuacguggagcucauccggggaagagaacaggagacacgcguuugguggaccucuaacagcauuguggucuucugcggcaccuccgggacauauggaaccggcucuuggccugacggggcugauaucaaucugaugcccauuuga

SEQ ID NO: 206643 - RNA, 1410 nt, Artificial Sequence; identical to SEQ ID NO: 206454
  derived and/or modified CDS sequence (opt5) from neuraminidase__InfluenzaA__ABB96490

SEQ ID NO: 206644 - RNA, 1410 nt, Artificial Sequence
  derived and/or modified CDS sequence (opt5) from neuraminidase__InfluenzaA__ABB96501
augaaccccaaucagaagaucauuaccaucggcagcgugucccugacaauugccacgaucugcuuccucaugcaaauugcuauccuggucaccacaguuacccuucacuuuaaacaguacgaguguucuagcccuccgaacaaucaggugaugcccugcgaaccuaucauuaucgagagaaacauuacagaaaucguguaucugaccaauacaaccauugagaaggaaaucugucccaaacucgucgaguaccggaacugguccaagccucagugcaaaauuacgggguucgcccccuuuucuaaggacaauagcauccgccuguccgcgggaggcgauaucugggugaccagagagccuuauguuucuugugacccgagcaagugcuaccaauucgcucuugggcagggaacaacccuggauaacaaacauuccaaugacacaauucacgaucggacgccccaucgcacccuccugaugaacgaacugggcgugccuuuucaccucgggacaagacaggucuguaucgccuggucuagcuccagcugccaugacggaaaggccuggcugcacguguguguuaccggcuaugauaaaaaugcuacagccucuuucauuuacgacggccggcuuguggauuccaucgggagcuggucuaagaacauucugcgcacccaggaguccgaaugcgucuguaucaauggaaccugcacaguggugaugacggacggcagcgcuuccgagagagccgauaccaaaauccucuuuauugaggaagggaagaucguccacauuucuccccugagcggauccgcgcaacauguugaggaaugcagcuguuauccucgguaccccggcgugcgcugcguguguagagacaacuggaaggggucuaaucggccggucguggauaucaacguuaaagacuacuccauugugagcucuuaugucugcagcggacuugugggcgacacaccucgcaagaacgauagauccucuagcuccuacugucggaaucccaacaaugagaaaggcaaccacgggguuaagggaugggccuucgacgauggcaaugacguguggauggggcgcaccaucagcgaagagucuagauccggauaugagacauuuaaagucaucggcggguggagcaccccuaacucuaagucccagauuaauagacaggugaucgucgauagcggaaaccgguccggcuacucuggcauuuucagcguggaagggaaauccugcaucaaucgcuguuuuuauguugagcugauucggggaagagaacaggagacgcgcgugugguggacaucuaacagcaucgucguguucugcggcaccuccgggaccuacggaacaggcagcuggcccgacggggcugauauuaaucucaugcccaucuga

SEQ ID NO: 206645 - RNA, 1410 nt, Artificial Sequence
  derived and/or modified CDS sequence (opt5) from neuraminidase__InfluenzaA__ABB96534
augaaccccaaucagaagaucauuaccaucggcagcgugucccugacaauugccacgaucugcuuccucaugcaaauugcuauccuggucaccacaguuacccuucacuuuaaacaguacgaguguucuagcccuccgaacaaucaggugaugcugugcgaacccacaaucauugagagaaacaucaccgaaauuguguaucucacaaauaccacgaucgagaaggaaauuuguccuaaacuggccgaguaccggaacugguccaagccccagugcaaaaucaccggguucgcgccuuuuucuaaggacaauagcauucgccuuuccgcuggaggcgauaucugggucacaagagagcccuaugugucuugugacccugauaagugcuaccaauucgcccuggggcagggaaccacacucaacaaucggcauagcaacgacaccguucacgaucgcacgccguauagaacacugcugaugaaugaacucggcgugcccuuucaucuggggaccaaacaggucuguaucgccugguccucuagcuccugccacgacggaaaggcuuggcuucauguguguguuacaggccacgaugagaacgccaccgcuagcuucauuuacgacggccggcugguggauucuaucggguccuggagcaaaaagauucuccgcacccaggaaucugagugcgucuguaucaauggaacaugcacgguggugaugaccgacggcuccgccagcgggagagcggauacaaaaauucuguuuaucgaggaaggaaagaucguccacauuuccccucuuucuggcagcgcccaacauguugaggaaugcuccuguuauccccgguacccuggggugcgcugcguguguagagacaacuggaagggaagcaaucggcccaucgucgauauuaacgugaaagacuacucuaucguuuccagcuaugugugcucuggccuggucggcgacaccccgcgcaagaacgauagcuccucuagcucccacugucucaauccuaacaaugaggaagggggacauggcgugaaagggugggcuuucgacgauggaaacgacguuuggaugggcagaacaauuagcgagaaguuucggucuggguacgagaccuucaaagugaucgaaggaugguccaagcccaauagcaaacugcagaucaaccgccaggucauuguggauagaggcaaucggucuggcuauuccgggaucuuuagcgucgagggaaaguccugcauuaacagauguuucuacguggaacugauccgcggccggaagcaggagacggaaguuugguggacaucuaauagcauuguggucuuuugcgggaccuccggaaccuauggcacagggucuuggccugacggcgccgauaucaaccucaugcccauuuga

SEQ ID NO: 206646 - RNA, 1410 nt, Artificial Sequence
  derived and/or modified CDS sequence (opt5) from neuraminidase__InfluenzaA__ABC02237
augaaccccaaucagaagaucauuaccaucggcagcgugucccugacaauugccacgaucugcuuccucaugcaaauugcuauccuggucaccacaguuacccuucacuuuaaacaguacgaguguucuagcccuccgaacaaucaggugaugcugugcgaacccacaaucauugagagaaacaucaccgaaauuguguaucucacaaauaccacgaucgagaaggaaauuuguccuaaacuggccgaguaccggaacugguccaagccccagugcaaaaucaccggguucgcgccuuuuucuaaggacaauagcauucgccuuuccgcuggaggcgauaucugggucacaagagagcccuaugugucuugugacccugauaagugcuaccaauucgcccuggggcagggaaccacacucaacaaucggcauagcaacgacaccguucacgaucgcacgccguauagaacacugcugaugaaugaacucggcgugcccuuucaucuggggaccaaacaggucuguaucgccugguccucuagcuccugccacgacggaaaggcuuggcuucauguguguguuacaggccacgaugagaacgccaccgcuagcuucauuuacgacggccggcugguggauucuaucggguccuggagcaaaaagauucuccgcacccaggaaucugagugcgucuguaucaauggaacaugcacgguggugaugaccgacggcuccgccagcgggagagcggauacaaaaauucuguuuaucgaggaaggaaagaucguccacauuucccaacuuucuggcagcgcccagcauguugaggaaugcuccuguuauccucgguaccccggggugcgcugcguguguagagacaacuggaagggaagcaaucggccuaucgucgauauuaacaucaaagacuacucuauuguguccagcuauguuugcucuggccuggugggcgacacaccccgcaagaacgauagcuccucuagcucccacugucucaauccgaacaaugaggaagggggacauggcgucaaagggugggcuuucgacgauggaaacgacguguggaugggcagaaccaucagcgagaaguuucggucuggguacgagaccuucaaaguuaucgaaggaugguccaagccuaauagcaaacugcagauuaaccgccaggugaucgucgauagaggcaaucggucuggcuauuccgggauuuuuagcguggagggaaaguccugcaucaacagauguuucuacgucgaacugauucgcggccggaagcaagagacggaagugugguggacaucuaauagcaucguugccuuuugcgggaccuccggaaccuauggcacagggucuuggcccgacggcgcugauauuaaccucaugccuaucuga

SEQ ID NO: 206647 - RNA, 1410 nt, Artificial Sequence
  derived and/or modified CDS sequence (opt5) from neuraminidase__InfluenzaA__ABC02258
augaaccccaaucagaagaucauuaccaucggcagcgugucccugacaauugccacgaucugcuuccucaugcaaauugcuauccuggucaccacaguuacccuucacuuuaaacaguacgagugugacucuccugccaacaaucagaucaugccgugcgaacccacaauuaucgagagaaacauuaccgaaaucguguaucugacaaauauuaccaucgagaaggaaauuuguccuaaacucguggaguaccggaacuggagcaagccccagugcaaaaucacgggguucgcgccuuuuuccaaggauaauucuauccgccugagcgcuggaggcgacauuugggucaccagagagcccuauguguccugugauccuucuaagugcuaccaauucgcccuugggcagggaacaacccuggacaacaaacauagcaaugauacaauccacgaccggaccccgcaucgcacgcuccugaugaacgaacugggcguucccuuucaccucgggacaagacagguguguauugccugguccucuagcuccugccaugauggaaaggcuuggcugcacgucugugugaccggcuaugacaaaaaugccacagcuagcuucaucuacgauggccggcuuguugacucuauuggguccuggagccagaacauccugcgcacccaagagucugaaugcguguguaucaauggaaccugcacagucgugaugacggauggcuccgccagcgggagagcggacaccaagauucucuuuaucgaggagggaaaaauugugcacaucuccccucugucuggcagcgcccagcaugucgaagagugcuccuguuauccccgguacccugggguucgcugcauuuguagagauaacuggaagggaagcaaucggcccgugguggacaucaacgucaaggacuacucuaucgauuccagcuaugugugcucuggccuuguuggcgacacaccgcgcaaaaacgauagaagcuccaauucuuacugucggaacccuaauaacgaaaaggggaaucacggagugaaaggcugggcuuucgacgaugggaacgacgucuggaugggacgcaccauuagcgaggauuccagaagcggcuaugaaacauuuaaggugaucgggggauggucuacccccaauuccaaacugcagauuaaccggcagguuaucguggacagcgauaauagaucuggcuacuccggcauuuucagcgucgaggggaaguccugcaucaaccgcuguuuuuauguggagcucauucggggaagagaacaagagacgcgcgucugguggacaucuaauagcaucgugguuuucugcggcaccuccgggaccuacggagccggcucuuggccugacggggcugauaucaaccugaugcccauuuga

SEQ ID NO: 206648 - RNA, 1410 nt, Artificial Sequence
  derived and/or modified CDS sequence (opt5) from neuraminidase__InfluenzaA__ABC02269
augaaccccaaucagaagaucauuaccaucggcagcgugucccugacaauugccacgaucugcuuccucaugcaaauugcuauccuggucaccacaguuacccuucacuuuaaacaguacgagugugacucuccugccaacaaucaggugaugccgugcgaacccaucauuaucgagagaaacauuacagaaaucguguaucugaccaauacaaccauugagaaggaaaucuguccuaaacucgucgaguaccggaacuggagcaagccccagugcaaaauuacgggguucgcgccuuuuuccaaggauaauucuauccgccugagcgcuggaggcgacaucugggugaccagagagcccuauguuuccugugauccugggaagugcuaccaauucgcccuuggacagggcacaacccuggacaacaaacauucuaaugauacaauucacgaccggaccccgcaucgcacgcuccugaugaacgaacugggggugcccuuucaccucggaacaagacaggucuguaucgccuggagcuccagcucuugccaugauggcaaggcuuggcugcacguguguguuaccggcuaugacaaaaaugccacagcuuccuucauuuacgaugggcggcuuguggacagcaucggaucuuggucccagaacauucugcgcacccaagagagcgaaugcgucuguaucaauggaaccugcacaguggugaugacggaugggucugccuccggcagagcggacaccaagauccucuuuauugaggagggcaaaaucguccacacaagcccucuguccgggucugcccagcauguugaagagugcagcuguuauccccgguacccuggagugcgcugcauuuguagagauaacuggaagggcuccaaucggcccguggucgacaucaacgugaaggacuacagcauugauucuuccuauguuugcagcggccuugugggggacaccccgcgcaacaaugauagaucuagcuccucuuacugucggaacccuaauaacgaaaaaggaacacacggcgucaaggggugggcuuucgacgauggaaaugacguguggaugggccgcaccaucagcgaggauuccagaagcggguaugaaacguuuaaaguuaucggaggcuggucuacacccaacuccaagcugcagauuaauagacaggugaucgucgacagcgauaaccggucuggcuacuccgggauuuucagcguggagggaaaauccugcaucaaucgcuguuuuuaugucgagcucauucggggcagagaacaagagacccgcgugugguggaccucuaacagcaucguuguguucugcgggacauccggaaccuacggcacagggucuuggccugacggcgccgauauuaaucugaugcccaucuga

SEQ ID NO: 206649 - RNA, 1413 nt, Artificial Sequence
  derived and/or modified CDS sequence (opt5) from neuraminidase__InfluenzaA__ABC02280
augaaccccaaucagaagaucauuaccaucggcagcauuuccaucgccauugggaucaucucucugaugcuccaaauuggaaacaucauuagcaucugggcuucccacucuauucagacaggcagccagaaucauacgggggugugcaaccagagaaucauuaccuacgagaauagcacaugggucaaccacaccuauguuaauaucaacaauacaaacgugaucgccggaaaagacaagaccucugugacacuggcgggcaauagcucccuuuguagcauuucugggugggcuaucuacaccaaagauaacuccauucggaucggaagcaagggcgacgucuucgugauucgcgaaccuuuuaucucuugcucccaucuggaguguagaacguucuuucucacccaaggcagccugcuuaaugauaaacacucuaacgggacaguuaaggaccgguccccguaucgcgcccugaugagcugcccccucggagaagccccuucccccuacaauucuaaguucgagagcguggcuugguccgccagcgcuugucaugauggcaugggguggcugaccaucggaauuucuggcccugacaacggggccgucgcggugcugaaauauaacggaaucauuacagaaaccaucaaguccuggaaaaagcagauucucagaacgcaggagagcgagugcguuugugugaauggcucuugcuuuacaaucaugaccgauggccccagcaacggggccgcuuccuacaaaaucuucaagauugaaaagggaaaagucacaaagucuaucgagcugaaugccccuaacuuucacuaugaagaguguagcugcuacccggacaccggcaccgugaugugugugugccgggauaauuggcacggguccaaccgccccugggucagcuucaaucagaaccuugacuaccaaauuggauauaucugcucuggcguuuuuggggauaauccuagacccaaagacggagagggcuccuguaacccugugacaguggauggcgcuaauggggucaagggauucagcuacaaauauggcaacgggguguggauuggacggacgaagucuaaucgccugagaaaaggcuuugaaaugaucugggaccccaacggguggaccgacacagauuccgacuucagcguuaagcaggauguggucgccauuaccgacugguccggcuacucuggauccuuugugcagcauccggagcucacaggccuggauugcauccggccuuguuucuggguugaacuugugcgcgggcugcccaaggagaauaccacgaucuggacauccggaucuagcauuuccuucugcggcgucaacagcgacaccgcgaacuggucuuggccugauggggccgaacuccccuuuaccaucgacaaauga

SEQ ID NO: 206650 - RNA, 1410 nt, Artificial Sequence; identical to SEQ ID NO: 206645
  derived and/or modified CDS sequence (opt5) from neuraminidase__InfluenzaA__ABC02302

SEQ ID NO: 206651 - RNA, 1410 nt, Artificial Sequence; identical to SEQ ID NO: 206642
  derived and/or modified CDS sequence (opt5) from neuraminidase__InfluenzaA__ABC02313

SEQ ID NO: 206652 - RNA, 1410 nt, Artificial Sequence; identical to SEQ ID NO: 206647
  derived and/or modified CDS sequence (opt5) from neuraminidase__InfluenzaA__ABC02324

SEQ ID NO: 206653 - RNA, 1410 nt, Artificial Sequence
  derived and/or modified CDS sequence (opt5) from neuraminidase__InfluenzaA__ABC02335
augaaccccaaucagaagaucauuaccaucggcagcgugucccugacaauugccacgaucugcuuccucaugcaaauugcuauccuggucaccacaguuacccuucacuuuaaacaguacgagugugacucuccugccaacaaucaggugaugccgugcgaacccaucauuaucgagagaaacauuacagaaaucguguaucugaccaauacaaccauugagaaggaaaucuguccuaaacucgucgaguaccggaacuggagcaagccccagugcaaaauuacgggguucgcgccuuuuuccaaggauaauucuauccgccugagcgcuggaggcgacaucugggugaccagagagcccuauguuuccugugauccugggaagugcuaccaauucgcccuuggacagggcacaacccuggacaacaaacauucuaaugauacaauucacgaccggaccccgcaucgcacgcuccugaugaacgaacugggggugcccuuucaccucggaacaagacaggucuguaucgccuggagcuccagcucuugccaugauggcaaggcuuggcugcacguguguguuaccggcuaugacaaaaaugccacagcuuccuucauuuacgaugggcggcuuguggacagcaucggaucuuggucccagaacauucugcgcacccaagagagcgaaugcgucuguaucaauggaaccugcacaguggugaugacggaugggucugccuccggcagagcggacaccaagauccucuuuauuaaagagggcaagaucguccacauuagcccucuguccgggucugcccagcauguugaggaaugcagcuguuauccccgguacccuggagugcgcugcaucuguagagauaacuggaagggcuccaaucggcccguggucgacauuaacgugaaagacuacagcaucgauucuuccuauguuugcagcggccuugugggggacacaccgcgcaacaaugauagaucuagcaacuccuacugucggaauccuaacaaugagaagggaaaccacggcgucaaagggugggcuuucgacgauggaaaugacguguggaugggccgcaccaucucugaagauagcagauccggguaugagacauuuaagguuauuggaggcuggagcacccccaacucuaaacugcagaucaauagacaggugauugucgacuccgauaaccggagcggcuacucugggaucuucuccguggaaggaaagagcugcauuaaucgcuguuuuuaugucgagcucauccggggcagagagcaagaaacgcgcgugugguggacauccaacucuauuguuguguucugcgggaccagcggaaccuacggcacaggguccuggccugacggcgccgauaucaaucugaugcccaucuga

SEQ ID NO: 206654 - RNA, 1410 nt, Artificial Sequence
  derived and/or modified CDS sequence (opt5) from neuraminidase__InfluenzaA__ABC39808
augaaccccaaucagaagaucauuaccaucggcagcgugucccugacaauugccacgaucugcuuccucaugcaaauugcuauccuggucaccacaguuacccuucacuuuaaacaguacgaguguucuagcccuccgaacaaucaggugaugcccugcgaaccuaucauuaucgagagaaacauuacagaaaucguguaucugaccaauacaaccauugagaaggaaaucugucccaaacucgucgaguaccggaacugguccaagccucagugcaaaauuacgggguucgcccccuuuucuaaggacaauagcauccgccuguccgcgggaggcgauaucugggugaccagagagccuuauguuucuugugacccgagcaagugcuaccaauucgcucuugggcagggaacaacccuggauaacaaacauuccaaugacacaauucacgaucggacgccccaucgcacccuccugaugaacgaacugggcgugccuuuucaccucgggacaagacaggucuguaucgccuggucuagcuccagcugccaugacggaaaggccuggcugcacguguguguuaccggcuaugauaaaaaugcuacagccucuuucauuuacgacggccggcuuguggauuccaucgggagcuggucuaagaacauucugcgcacccaggaguccgaaugcgucuguaucaauggaaccugcacaguggugaugacggacggcagcgcuuccgagagagccgauaccaaaauccucuuuauugaggaagggaagaucguccacauuucuccccugagcggauccgcgcaacauguugaggaaugcagcuguuauccucgguaccccggcgugcgcugcguguguagagacaacuggaaggggucuaaucggccggucguggauaucaacguuaaagacuacuccauugugagcucuuaugucugcagcggacuugugggcgacacaccucgcaagaacgauagauccucuagcuccuacugucggaaucccaacaaugagaaaggcgaccacgggguuaagggaugggccuucgaugacggcaacgauguguggauggggcgcaccaucagcgaagagucuagauccggauaugagacauuuaaagucaucggcggguggagcaccccuaauucuaagucccagauuaacagacaggugaucgucgacagcggaaaucgguccggcuacucuggcauuuucagcguggaagggaaauccugcaucaaccgcuguuuuuauguugagcugauucggggaagaaagcaggaaacgcgcgugugguggacaucuaauagcaucgucguguucugcggcaccuccgggaccuacggaacaggcagcuggcccgauggggcugacauuaaccucaugcccaucuga

SEQ ID NO: 206655 - RNA, 1410 nt, Artificial Sequence; identical to SEQ ID NO: 206454
  derived and/or modified CDS sequence (opt5) from neuraminidase__InfluenzaA__ABC40525

SEQ ID NO: 206656 - RNA, 1413 nt, Artificial Sequence
  derived and/or modified CDS sequence (opt5) from neuraminidase__InfluenzaA__ABC40536
augaaccccaaucagaagaucauuaccaucggcagcauuuccaucgccauugggaucaucucucugaugcuccaaauuggaaacaucauuagcaucugggcuucccacucuauucagacaggcagccagaaucauacgggggugugcaaccagagaaucauuaccuacgaaaauuccacaugggucaaccacaccuauguuaauaucaacaauacaaacgugaucgccggaaaagacaagaccucugugacacuggcgggcaauagcucccuuuguagcauuucugggugggcuaucuacaccaaagauaacuccauucggaucggaagcaagggcgacgucuucgugauucgcgagccuuuuaucucuugcucccaucuggaguguagaacguucuuucucacccaaggcgcccugcuuaaugauaaacacagcaacgggacaguuaaggaccggucuccguaucgcgcccugauguccugcccccucggagaagcuccuagccccuacaauuccaaguucgagucuguggccuggagcgcuuccgccugucaugauggcaugggguggcugaccaucggaauuagcggcccugacaacggggcggucgccgugcugaaauauaacggaaucauuacagaaaccaucaagucuuggaaaaagcagauucucagaacgcaggaguccgagugcguuugugugaauggcagcugcuuuacaaucaugaccgauggccccucuaacggggcugccagcuacaaaaucuucaagauugaaaagggaaaagucaucaaguccauugagcugaaugcuccuaacuuucacuaugaagaguguucuugcuacccggacacaggcaccgugaugugugugugccgggauaauuggcacgggagcaaccgccccugggucuccuucaaucagaaccuugacuaccaaaucggauauauuugcagcggcguuuuuggggauaauccuagacccaaagacggagagggcucuuguaacccugugaccguggauggcgccaauggggucaagggauucuccuacaaauauggcaacgggguguggaucggacggacaaagagcaaucgccugagaaaaggcuuugaaaugauuugggaccccaacggguggacggacaccgauucugacuucuccguuaagcaggauguggucgcgaucacagacuggagcggcuacuccggaucuuuugugcagcauccggagcucaccggccuggauugcauccggccuuguuucuggguugaacuugugcgcgggcugcccaaggagaauacaaccauuuggacgagcggauccucuaucagcuucugcggcgucaacuccgacacagccaacuggagcuggccugauggggcugaacuccccuuuaccauugacaaauga

SEQ ID NO: 206657 - RNA, 1410 nt, Artificial Sequence; identical to SEQ ID NO: 206648
  derived and/or modified CDS sequence (opt5) from neuraminidase__InfluenzaA__ABC40547

SEQ ID NO: 206658 - RNA, 1410 nt, Artificial Sequence
  derived and/or modified CDS sequence (opt5) from neuraminidase__InfluenzaA__ABC40558
augaaccccaaucagaagaucauuaccaucggcagcgugucccugacaauugccacgaucugcuuccucaugcaaauugcuauccuggucaccacaguuacccuucacuuuaaacaguacgaguguucuagcccuccgaacaaucaggugaugcccugcgaaccuaucauuaucgagagaaacauuacagaaaucguguaucugaccaauacaaccauugagaaggaaaucugucccaaacucgucgaguaccggaacugguccaagccucagugcaaaauuacgggguucgcccccuuuucuaaggacaauagcauccgccuguccgcgggaggcgauaucugggugaccagagagccuuauguuucuugugacccggggaagugcuaccaauucgcucuuggacagggcacaacccuggauaacaaacauagcaaugacacaauucacgaucggacccccuaucgcacgcuccugaugaacgaacugggggugccuuuucaucucggaacaagacaggucuguaucgccugguccucuagcuccugccacgacggcaaggccuggcugcauguguguguuaccggccacgauaaaaaugcuacagccagcuucauuuacgacgggcggcuuguggauucuaucggauccuggagcaagucuauucugcgcacccaggaguccgaaugcgucuguaucaacgggaccugcacaguggugaugacggacggcagcgcuuccgagagagccgauaccaaaauccucuuuauugaggaaggaaagaucguccacauuucuccccugagcggcuccgcgcaacauguugaggaaugcagcuguuauccucgguaccccggggugcgcugcguguguagagacaauuggaagggaucuaaccggccggucguggauaucaauguuaaagacuacuccauugugagcucuuaugucugcagcggccuugugggcgacacaccucgcaagaacgauagauccucuagcuccuacugucagaaccccaauaacgagaaagggaaucacggaguuaagggcugggccuucgacgaugggaacgacguguggaugggacggaccaucagcgaagagucucgcuccggcuaugagacauuuaaagucaucgggggauggagcaccccuaauucuaagcugcagauuaacagacaggugaucgucgauauugacaaucgguccggcuacagcggcaucuucuccguggaagggaaaucuugcauuaacagauguuuuuauguugagcucauccgcggacgggaacaagagacgagagugugguggacaagcaauuccauugucguguucugcggcaccucugggaccuacggaacaggcagcuggcccgauggggcugacaucaaccugaugcccaucuga

SEQ ID NO: 206659 - RNA, 1410 nt, Artificial Sequence
  derived and/or modified CDS sequence (opt5) from neuraminidase__InfluenzaA__ABC40611
augaaccccaaucagaagaucauuaccaucggcagcauuucccugacaaucgccacgauuugcuuccucaugcaaaucgcuauccugguuaccacagucacccuucacuuuaaacaguacgaguguaacucucugccuaauaaccagguuaugcucugcgaaccgacaauuaucgagagaaauauuaccgaaaucguguaucugacaaacaccacgauugagaaggaaaucugucccaaacuugccgaguaccggaauuggagcaagccucagugcaaaauuaccggguucgcgcccuuuuccaaggacaacucuauccgccugagcgcuggaggcgauaucugggugacaagagagccuuaugucuccugugaccccgauaagugcuaccaauucgcccucgggcagggaaccacacugaauaaccggcauucuaaugacaccgugcacgaucgcacgccuuauagaacacugcucaugaacgaacugggcguuccguuucaucuugggaccaaacagguguguauugccuggagcuccagcucuugccacgacggaaaggcuuggcugcaugucugugugacaggccacgaugagaaugccaccgcuuccuucaucuacgacggccggcucguugauagcauugggucuugguccaaaaagauccugcgcacccaggaaagcgagugcguguguauuaacggaacaugcacggucgugaugaccgacggcucugccuccgggagagcggauacaaaaauccuuuuuaucgaggaaggaaagauuauccacauuagccaacuguccggcucugcccagcauguggaggaaugcagcuguuauccccgguacccugggguccgcugcguuuguagagacaauuggaagggauccaaccggcccaucguggauauuaacgugaaagacuacagcaucgucucuuccuaugugugcagcggccucguuggcgacaccccucgcaagaaugauucuagcuccucuagccacugucugaaccccaauaacgaggaagggggacauggcgugaaagggugggcuuucgacgauggaaaugacgucuggaugggcagaacaaucuccgagaaguuucggagcggguacgagaccuucaaagugauugaaggauggucuaagccgaacuccaaacugcagaucaaucgccagguuauuguggauagagacaaccggagcggcuauucuggcaucuuuuccgucgagggaaagagcugcauuaauagauguuucuacguggaacucauccgcgggcggaagcaagagacggaagucugguggacauccaacucuauugugguguuuugcggcaccagcgggaccuauggaacaggcuccuggccugauggggccgacaucaaucugaugcccaucuga

SEQ ID NO: 206660 - RNA, 1410 nt, Artificial Sequence
  derived and/or modified CDS sequence (opt5) from neuraminidase__InfluenzaA__ABC40622
augaaccccaaucagaagaucauuaccaucggcagcgugucccugacaauugccacgaucugcuuccucaugcaaauugcuauccuggucaccacaguuacccuucacuuuaaacaguacgagugugacucuccugccaacaaucaggugaugccgugcgaacccaucauuaucgagagaaacauuacagaaaucguguaucugaccaauacaaccauugagaaggaaaucuguccuaaacucgucgaguaccggaacuggagcaagccccagugcaaaauuacgggguucgcgccuuuuuccaaggauaauucuauccgccugagcgcuggaggcgacaucugggugaccagagagcccuauguuuccugugauccugggaagugcuaccaauucgcccuuggacagggcacaacccuggacaacaaacauucuaaugauacaauucacgaccggaccccgcaucgcacgcuccugaugaacgaacugggggugcccuuucaccucggaacaagacaggucuguaucgccuggagcuccagcucuugccaugauggcaaggcuuggcugcacguguguguuaccggcuaugacaaaaaugccacagcuuccuucauuuacgaugggcggcuuguggacagcaucggaucuuggucccagaacauucugcgcacccaagagagcgaaugcgucuguaucaauggaaccugcacaguggugaugacggaugggaacgccucuggcagagcggacaccaagauccucuuuauugaggagggcaaaaucguccacauuuccccucugagcggguccgcccagcauguugaagagugcucuuguuauccccgguacccuggagugcgcugcaucuguagagauaauuggaagggcagcaaccggcccguggucgacauuaacgugaaggacuacuccaucgauagcucuuauguuugcuccggccuugugggggacacaccgcgcaauaacgauagaagcucuaauagcuacugucggaacccuaauaacgaaaaaggaaaucacggcgucaaggggugggcuuucgacgauggaaacgacguguggaugggccgcaccaucuccgaggauucuagaagcggguaugaaacauuuaaaguuauuggaggcugguccacccccaauagcaagcugcagaucaacagacaggugauugucgacucugauaaucgguccggcuacagcgggaucuucucuguggagggaaaauccugcauuaaccgcuguuuuuaugucgagcucauccggggcagagaacaagagacgcgcgugugguggacaagcaauuccauuguuguguucugcgggaccucuggaaccuacggcacagggagcuggccugacggcgccgauaucaaccugaugcccaucuga

SEQ ID NO: 206661 - RNA, 1410 nt, Artificial Sequence
  derived and/or modified CDS sequence (opt5) from neuraminidase__InfluenzaA__ABC40634
augaaccccaaucagaagaucauuaccaucggcagcgugucccugacaauugccacgaucugcuuccucacccaaauugcuauccuggucacaaccguuacacuucacuuuaaacaguacgaguguaacucuccuccgaauaaccaggugaugcugugcgaacccaccaucauugagagaaauaucacagaaauuguguaucucaccaacacgaccaucgagaaggaaauuuguccuaaacuggccgaguaccggaauuggagcaagccccagugcaacaucacaggguucgcgccuuuuuccaaagacaauucuauucgccuuagcgcuggaggcgauaucugggucaccagagagcccuauguguccugugacccugauaagugcuaccaauucgcccuggggcagggaacaacccucaacaauggccauucuaacgacacgguucacgaucggacaccguaucgcacccugcugaugaaugaacucggggugcccuuucaucugggaacaaagcaggucuguaucgccuggagcuccagcucuugccacgacggcaaggcuuggcuucauguguguguuaccggcgaugacaaaaacgccaccgcuuccuucauuuacaaugggagacugguggauagcaucggaucuugguccaaaaagauucuccggacacaggagagcgaaugcgucuguaucgacggcacgugcaccguggugaugacagaugggucugccuccggaaaagcggacaccaagauucuguuuaucgaggagggcaagaucguccacacaagccuucuguccgggucugcccaacacguugaagagugcagcuguuauccucgcuaccccggagugagaugcgugugucgggauaacuggaaaggcuccaaccgcccuauugucgacaucaaugugaaggacuacagcauuguuucuuccuaugugugcagcggccucgucggggauacccccagaaagaacgacucuagcuccucuagccauugucuggauccgaauaacgaagagggaggccacggggugaaaggaugggcuuucgacgauggcaaugacguuuggauggggcggacgaucuccgaaaaacugcgcagcggauacgagacauuuaaggugauugagggcuggucuaaaccuaacuccaagcuccagaucaauagacaggucaucguggaucggggcaaccgcagcggguauucuggaauuuucuccgucgaaggcaagagcugcaucaauagauguuuuuacguggagcugauucgggggagaaaccaggaaaccgagguucuuuggaccuccaauucuaucguggucuucugcggaacaagcggcaccuaugggacaggcuccuggcccgacggagccgauauuaaccugaugccuaucuga

SEQ ID NO: 206662 - RNA, 1410 nt, Artificial Sequence
  derived and/or modified CDS sequence (opt5) from neuraminidase__InfluenzaA__ABC40645
augaaccccaaucagaagaucauuaccaucggcagcgugucccugacaauuucuacgaucugcuucuuuaugcaaauugccauccucaucaccacagucacccugcacuucaaacaguacgaguuuaacagcccuccgaauaaccagguuaugcuuugugaacccacaauuaucgagagaaauauuaccgaaaucguguaucugacaaacaccacgauugagaaggaaaucugcccuaaacucgcugaguaccggaauugguccaagccccaguguaacauuaccggguucgccccuuuuucuaaagacaauagcauccgccuguccgcgggaggcgauaucugggugacaagagagcccuaugucucuugcgacccugauaaguguuaccaauucgcucuugggcagggaaccacacugaacaaugugcauagcaacgacaccguucacgaucggacgccguaucgcacacuccugaugaaugaacugggcgugcccuuucaucucgggaccaagcaggucugcauugccugguccucuagcuccugucacgacggaaaagccuggcugcaugugugcguuacaggcgaugacgagaacgcuaccgccagcuucaucuacaauggcagacuuguggauucugucguguccuggagcaagaaaauucugcggacccaggaaucugagugugugugcaucaacgggacauguacggucguuaugaccgacggauccgcuagcggcaaggccgauacaaaaauucucuuuaucgaggaagggaagaucgugcacaccuccacacugucuggaagcgcgcaacacguggaggaaugcuccugcuauccucgcuaccccggcgucagaugugugugccgggacaacuggaaggggagcaaucgcccuauuguugauaucaacauuaaagacuacucuaucguguccagcuaugucuguucuggacuugugggcgacacccccagaaagaaugauagcuccucuagcucccauugccuggacccgaacaaugaggaaggcgggcacggaguuaaaggcugggccuucgaugacgggaacgauguguggaugggacggacgauuagcgagaagcuccgcucuggcuacgagacauuuaaagucaucgaagggugguccaauccuaacagcaagcugcagaucaauagacaggugauugucgaccggggaaaccgcucuggcuauuccggcaucuucagcguggaggggaaauccuguauuaauagaugcuuuuacguugaacugauccggggaagaaagcaggagaccgaagugcucuggaccucuaacagcauugucguguucuguggcacauccgggaccuauggaacaggcucuuggcccgauggggcugacaucaaucugaugccuauuuga

SEQ ID NO: 206663 - RNA, 1410 nt, Artificial Sequence
  derived and/or modified CDS sequence (opt5) from neuraminidase__InfluenzaA__ABC41706
augaaccccaaucagaagaucauuaccaucggcagcgugucccugacaauugccacgaucugcuuccucaugcaaauugcuauccuggucaccacaguuacccuucacuuuaaacagcaugaguguaacucuccuccgaauaaccaggugaugcugugcgaacccacaaucauugagagaaauaucaccgaaauuguguaccucacaaacaccacgaucgagaaggaaauuuguccuaaacuggucgaguaucggaauuggagcaagccccagugcaacaucaccggguucgccccuuuuuccaaagacaauucuauucgccuuagcgcgggaggcgauaucugggugacaagagagcccuacguuuccugugacccugauaagugcuaucaauucgcucuggggcagggaaccacacucaacaauggccacucuaacgacaccgugcaugaucggacgccguaccgcacacugcugaugaaugaacucgggguccccuuucaccugggaaccagacagguguguaucgccuggagcuccagcucuugccaugacggcaaggccuggcuucacguuugugugacaggcgaugacaaaaacgcuaccgccuccuucauuuauaaugggcggcuggucgauagcaucggaucuugguccaagaaaauucuccgcacccaggagagcgaaugcguguguaucaacggcacaugcacgguggucaugaccgacgggucugcuuccggaaaggccgauacaaaaauucuguuuaucgaggagggcaagaucguucacauuagcacccuuuccgggucugcgcaacauguggaagagugcagcuguuacccuagauaucccggagugcggugcgucugucgcgacaacuggaagggcuccaauagaccuaucguggauauuaacguuaaagacuacagcaucgugucuuccuacgucugcagcggccuggugggggacacaccccggaagaaugauucuuucagcuccucucacugucucgacccgaacaaugaagagggaggccaugggguuaaaggaugggccuuugaugacggcaacgauguguggauggggcgcaccauuagcgaaaagcugagauccggauaugagacguucaaagucaucgagggcuggagcaagccuaauucuaaacugcagaucaaccgccaggugauugucgaacggggcaauagauccggguacagcggaaucuuuucuguggagggcaaguccugcauuaaccgguguuucuauguugaacucaucagagggcgcaaggaggaaacagaggugugguggaccagcaauuccauugucguguuuugcggaaccucuggcacauacgggaccggcagcuggcccgacggagcugauaucaaccugaugccuauuuga

SEQ ID NO: 206664 - RNA, 1413 nt, Artificial Sequence
  derived and/or modified CDS sequence (opt5) from neuraminidase__InfluenzaA__ABC41717
augaaccccaaucagaagaucauuaccaucggcagcauuuccaucgccauugggaucaucucucugaugcuccaaauuggaaacaucauuagcaucugggcuucccacucuauucagacaggcagccagaaucauacggggaucugcaaccagagaauuaucaccuacgaaaauuccacaugggugaaccacaccuaugucaauaucaacaauacaaacguuguggccggaaaagacaagaccucugugacacuggcgggcaauagcucccuuuguagcauuucugggugggcuaucuacaccaaagauaacuccauucggaucggaagcaagggcgacgucuucgugauucgcgagccuuuuaucucuugcucccaucuggaguguagaacguucuuucucacccaaggcgcccugcuuaaugauaaacacagcaacgggacaguuaaggaccggucuccguaucgcgcccugauguccugcccccucggagaagcuccuagccccuacaauuccaaguucgagucuguggccuggagcgcuuccgccugucaugauggcaugggguggcugaccaucggaauuagcggcccugacaacggggcggucgccgugcugaaauauaacggaaucauuacagaaaccaucaagucuuggaaaaagcggauucucagaacgcaggaguccgagugcguuugugugaauggcagcugcuuuacaaucaugaccgauggccccucuaacggggcugccagcuacaaaaucuucaagauugaaaagggaaaagucacaaaguccaucgagcugaaugcuccuaacuuucacuaugaagaguguucuugcuacccggacaccggcaccgugaugugugugugccgcgauaauuggcacgggagcaacagacccugggucuccuucaaucagaaccuugacuaccagauuggauauaucugcagcggcguuuuuggggauaauccucggcccaaagacggaaagggcucuuguaacccugugacaguggauggcgccgacggggucaaaggauucuccuacaaguauggcaaugggguguggauuggacgcacgaaaagcaacagacugcggaagggcuuugagaugaucugggaccccaauggguggaccgauacagacucugauuucuccguuaagcaagacguggucgcggugaccgauuggagcggcuacuccggaucuuuuguucagcauccggaacucacaggccuggacugcauucgcccuuguuucuggguggagcuugucagagggcugccccgggaaaacaccacgaucuggacaagcggauccucuaucagcuucugcggcguggauuccgacaccgccaauuggagcuggccugauggggcugagcuccccuuuaccauugacaaauga

SEQ ID NO: 206665 - RNA, 1410 nt, Artificial Sequence
  derived and/or modified CDS sequence (opt5) from neuraminidase__InfluenzaA__ABC41728
augaaccccaaucagaagaucauuaccaucggcagcgugucccugacaauugccacgaucugcuuccucaugcaaauugcuauccuggucaccacaguuacccuucacuuuaaacagcaugaguguaacucuccuccgaauaaccaggugaugcugugcgaacccacaaucauugagagaaauaucaccgaaauuguguaccucacaaacaccacgaucgagaaggaaauuuguccuaaacuggucgaguaucggaauuggagcaagccccagugcaacaucaccggguucgccccuuuuuccaaagacaauucuauucgccuuagcgcgggaggcgauaucugggugacaagagagcccuacguuuccugugacccugauaagugcuaucaauucgcucuggggcagggaaccacacucaacaauggccacucuaacgacaccgugcaugaucggacgccguaccgcacacugcugaugaaugaacucgggguccccuuucaccugggaaccagacagguguguaucgccuggagcuccagcucuugccaugacggcaaggccuggcuucacguuugugugacaggcgaugacaaaaacgcuaccgccuccuucauuuauaaugggcggcuggucgauagcaucggaucuugguccaagaacauucuccgcacccaggagagcgaaugcguguguaucaacggcacaugcacgguggucaugaccgacgggucugcuuccggaaaagccgauacaaagauucuguuuaucgaggagggcaaaaucguucacauuagcacccuuuccgggucugcgcaacauguggaagagugcagcuguuacccuagauaucccggagugcggugcgucugucgcgacaauuggaagggcuccaacagaccuaucguggauauuaauguuaaggacuacagcaucgugucuuccuacgucugcagcggccuggugggggacacaccccggaaaaacgauucuuucagcuccucucacugucucgacccgaauaacgaagagggaggccaugggguuaagggaugggccuuugaugacggcaaugauguguggauggggcgcaccauuagcgaaaaacugagauccggauaugagacguucaaggucaucgagggcuggagcaaaccuaacucuaagcugcagaucaaucgccaggugauugucgaacggggcaacagauccggguacagcggaaucuuuucuguggagggcaaauccugcauuaaucgguguuucuauguugaacucaucagagggcgcaaggaggaaacagaggugugguggaccagcaacuccauugucguguuuugcggaaccucuggcacauacgggaccggcagcuggcccgacggagcugauaucaaucugaugccuauuuga

SEQ ID NO: 206666 - RNA, 1410 nt, Artificial Sequence; identical to SEQ ID NO: 206663
  derived and/or modified CDS sequence (opt5) from neuraminidase__InfluenzaA__ABC41742

SEQ ID NO: 206667 - RNA, 1410 nt, Artificial Sequence; identical to SEQ ID NO: 206663
  derived and/or modified CDS sequence (opt5) from neuraminidase__InfluenzaA__ABC41956

SEQ ID NO: 206668 - RNA, 1410 nt, Artificial Sequence; identical to SEQ ID NO: 206663
  derived and/or modified CDS sequence (opt5) from neuraminidase__InfluenzaA__ABC41967

SEQ ID NO: 206669 - RNA, 1410 nt, Artificial Sequence; identical to SEQ ID NO: 206663
  derived and/or modified CDS sequence (opt5) from neuraminidase__InfluenzaA__ABC42017

SEQ ID NO: 206670 - RNA, 1410 nt, Artificial Sequence; identical to SEQ ID NO: 206663
  derived and/or modified CDS sequence (opt5) from neuraminidase__InfluenzaA__ABC42117

SEQ ID NO: 206671 - RNA, 1410 nt, Artificial Sequence; identical to SEQ ID NO: 206663
  derived and/or modified CDS sequence (opt5) from neuraminidase__InfluenzaA__ABC42128

SEQ ID NO: 206672 - RNA, 1410 nt, Artificial Sequence; identical to SEQ ID NO: 206663
  derived and/or modified CDS sequence (opt5) from neuraminidase__InfluenzaA__ABC42139

SEQ ID NO: 206673 - RNA, 1410 nt, Artificial Sequence
  derived and/or modified CDS sequence (opt5) from neuraminidase__InfluenzaA__ABC42150
augaaccccaaucagaagaucauuaccaucggcagcgugucccugacaauugccacgaucugcuuccucaugcaaauugcuauccuggccaccacagucacccuucacuuuaaacagcaugaguguaacucuccuccgaauaaccagguuaugcugugcgaacccacaaucauugagagaaauaucaccgaaauuguguaccucacaaacaccacgaucgagaaggaaauuuguccuaaacugguggaguaucggaauuggagcaagccccagugcaacaucaccggguucgcgccuuuuuccaaagacaauucuauucgccuuagcgcuggaggcgauaucugggucacaagagagcccuacguguccugugacccugauaagugcuaucaauucgcccuggggcagggaaccacacucaacaauggccacucuaacgacaccguucaugaucggacgccguaccgcacacugcugaugaaugaacucggggugcccuuucaccugggaaccagacaggucuguaucgccuggagcuccagcucuugccaugacggcaaggcuuggcuucacguguguguuacaggcgaugacaaaaacgccaccgcuuccuucauuuauaaugggcggcugguggauagcaucggaucuugguccaagaaaauucuccgcacccaggagagcgaaugcgucuguaucaacggcacaugcacgguggugaugaccgacgggucugccuccggaaaggcggauacaaaaauucuguuuaucgaggagggcaagaucguccacauuagcacccuuuccgggucugcccaacauguugaagagugcagcuguuacccuagauaucccggagugcggugcgugugucgcgacaacuggaagggcuccaauagaccuaucgucgauauuaacgugaaagacuacagcaucguuucuuccuacgugugcagcggccuggucggggacacaccccggaagaaugauucuuucagcuccucucacugucucgacccgaacaaugaagagggaggccauggggugaaaggaugggcuuuugaugacggcaacgauguuuggauggggcgcaccauuagcggaaagcugagauccggcuaugaaacguucaaagugaucgagggcuggagcaagccuaauucuaaacugcagaucaaccggcaggucauuguggagcgcgggaauagauccggauacagcggcaucuuuucugucgaagggaaguccugcauuaaccgguguuucuauguggagcucaucagaggacgcaaggaagagacagaaguuugguggaccagcaauuccauuguggucuuuugcggcaccucugggacauacggcaccggaagcuggcccgacggcgccgauaucaaccugaugccuauuuga

SEQ ID NO: 206674 - RNA, 1410 nt, Artificial Sequence; identical to SEQ ID NO: 206663
  derived and/or modified CDS sequence (opt5) from neuraminidase__InfluenzaA__ABC42161

SEQ ID NO: 206675 - RNA, 1410 nt, Artificial Sequence
  derived and/or modified CDS sequence (opt5) from neuraminidase__InfluenzaA__ABC42172
augaaccccaaucagaagaucauuaccaucggcagcgugucccugacaauugccacgaucugcucucucaugcaaauugcuauccuggucaccacaguuacccuucacuucaaacagcaugaguguaacagcccuccgaauaaccaggugaugcugugcgaacccacaaucauugagagaaauaucaccgaaauuguguaccucacaaacaccacgaucgagaaggaaauuuguccuaaacuggucgaguaucggaauugguccaagccccagugcaacaucaccggguuugccccuuucucuaaagacaauagcauucgccuuuccgcgggaggcgauaucugggugacaagagagcccuacguuucuugugacccugauaagugcuaucaauuugcucuggggcagggaaccacacucaacaauggccacagcaacgacaccgugcaugaucggacgccguaccgcacacugcugaugaaugaacucgggguccccuuccaccugggaaccagacagguguguaucgccugguccucuagcuccugccaugacggcaaggccuggcuucacguuugugugacaggcgaugacaaaaacgcuaccgccagcuuuauuuauaaugggcggcuggucgauucuaucggauccuggagcaagaaaauucuccgcacccaggagucugaaugcguguguaucaacggcacaugcacgguggucaugaccgacggguccgcuagcggaaaggccgauacaaaaauucuguucaucgaggagggcaagaucguucacauuuccacccuuucugggagcgcgcaacauguggaagagugcuccuguuacccuagauaucccggagugcggugcgucugucgcgacaacuggaagggcagcaauagaccuaucguggauauuaacguuaaagacuacucuaucguguccagcuacgucugcucuggccuggugggggacacaccccggaagaaugauagcuuuuccucuagccacugucucgacccgaacaaugaagagggaggccaugggguuaaaggaugggccuucgaugacggcaacgauguguggauggggcgcaccauuuccgaaaagcugagaagcggauaugagacguuuaaagucaucgagggcuggucuaagccuaauuccaaacugcagaucaaccgccaggugauugucgaacggggcaauagaagcggguacucuggaaucuucuccguggagggcaagagcugcauuaaccgguguuuuuauguugaacucaucagagggcgcaaggaggaaacagaggugugguggaccuccaauucuauugucguguucugcggaaccagcggcacauacgggaccggcuccuggcccgacggagcugauaucaaccugaugccuauuuga

SEQ ID NO: 206676 - RNA, 1410 nt, Artificial Sequence; identical to SEQ ID NO: 206663
  derived and/or modified CDS sequence (opt5) from neuraminidase__InfluenzaA__ABC42183

SEQ ID NO: 206677 - RNA, 1410 nt, Artificial Sequence; identical to SEQ ID NO: 206663
  derived and/or modified CDS sequence (opt5) from neuraminidase__InfluenzaA__ABC42195

SEQ ID NO: 206678 - RNA, 1410 nt, Artificial Sequence; identical to SEQ ID NO: 206663
  derived and/or modified CDS sequence (opt5) from neuraminidase__InfluenzaA__ABC42310

SEQ ID NO: 206679 - RNA, 1410 nt, Artificial Sequence; identical to SEQ ID NO: 206663
  derived and/or modified CDS sequence (opt5) from neuraminidase__InfluenzaA__ABC42321

SEQ ID NO: 206680 - RNA, 1410 nt, Artificial Sequence; identical to SEQ ID NO: 206663
  derived and/or modified CDS sequence (opt5) from neuraminidase__InfluenzaA__ABC42349

SEQ ID NO: 206681 - RNA, 1410 nt, Artificial Sequence; identical to SEQ ID NO: 206663
  derived and/or modified CDS sequence (opt5) from neuraminidase__InfluenzaA__ABC42464

SEQ ID NO: 206682 - RNA, 1410 nt, Artificial Sequence; identical to SEQ ID NO: 206663
  derived and/or modified CDS sequence (opt5) from neuraminidase__InfluenzaA__ABC42497

SEQ ID NO: 206683 - RNA, 1410 nt, Artificial Sequence; identical to SEQ ID NO: 206663
  derived and/or modified CDS sequence (opt5) from neuraminidase__InfluenzaA__ABC42508

SEQ ID NO: 206684 - RNA, 1410 nt, Artificial Sequence; identical to SEQ ID NO: 206663
  derived and/or modified CDS sequence (opt5) from neuraminidase__InfluenzaA__ABC42519

SEQ ID NO: 206685 - RNA, 1410 nt, Artificial Sequence; identical to SEQ ID NO: 206663
  derived and/or modified CDS sequence (opt5) from neuraminidase__InfluenzaA__ABC42530

SEQ ID NO: 206686 - RNA, 1410 nt, Artificial Sequence; identical to SEQ ID NO: 206663
  derived and/or modified CDS sequence (opt5) from neuraminidase__InfluenzaA__ABC42577

SEQ ID NO: 206687 - RNA, 1410 nt, Artificial Sequence; identical to SEQ ID NO: 206663
  derived and/or modified CDS sequence (opt5) from neuraminidase__InfluenzaA__ABC42588

SEQ ID NO: 206688 - RNA, 1410 nt, Artificial Sequence; identical to SEQ ID NO: 206399
  derived and/or modified CDS sequence (opt5) from neuraminidase__InfluenzaA__ABC42599

SEQ ID NO: 206689 - RNA, 1410 nt, Artificial Sequence; identical to SEQ ID NO: 206399
  derived and/or modified CDS sequence (opt5) from neuraminidase__InfluenzaA__ABC42610

SEQ ID NO: 206690 - RNA, 1410 nt, Artificial Sequence; identical to SEQ ID NO: 206399
  derived and/or modified CDS sequence (opt5) from neuraminidase__InfluenzaA__ABC42621

SEQ ID NO: 206691 - RNA, 1410 nt, Artificial Sequence; identical to SEQ ID NO: 206399
  derived and/or modified CDS sequence (opt5) from neuraminidase__InfluenzaA__ABC42632

SEQ ID NO: 206692 - RNA, 1410 nt, Artificial Sequence; identical to SEQ ID NO: 206399
  derived and/or modified CDS sequence (opt5) from neuraminidase__InfluenzaA__ABC42643

SEQ ID NO: 206693 - RNA, 1410 nt, Artificial Sequence; identical to SEQ ID NO: 206399
  derived and/or modified CDS sequence (opt5) from neuraminidase__InfluenzaA__ABC42654

SEQ ID NO: 206694 - RNA, 1410 nt, Artificial Sequence; identical to SEQ ID NO: 206399
  derived and/or modified CDS sequence (opt5) from neuraminidase__InfluenzaA__ABC42665

SEQ ID NO: 206695 - RNA, 1410 nt, Artificial Sequence; identical to SEQ ID NO: 206399
  derived and/or modified CDS sequence (opt5) from neuraminidase__InfluenzaA__ABC42676

SEQ ID NO: 206696 - RNA, 1410 nt, Artificial Sequence; identical to SEQ ID NO: 206399
  derived and/or modified CDS sequence (opt5) from neuraminidase__InfluenzaA__ABC42687

SEQ ID NO: 206697 - RNA, 1410 nt, Artificial Sequence; identical to SEQ ID NO: 206399
  derived and/or modified CDS sequence (opt5) from neuraminidase__InfluenzaA__ABC42698

SEQ ID NO: 206698 - RNA, 1410 nt, Artificial Sequence; identical to SEQ ID NO: 206399
  derived and/or modified CDS sequence (opt5) from neuraminidase__InfluenzaA__ABC42709

SEQ ID NO: 206699 - RNA, 1410 nt, Artificial Sequence; identical to SEQ ID NO: 206399
  derived and/or modified CDS sequence (opt5) from neuraminidase__InfluenzaA__ABC42720

SEQ ID NO: 206700 - RNA, 1410 nt, Artificial Sequence
  derived and/or modified CDS sequence (opt5) from neuraminidase__InfluenzaA__ABC42742
augaaccccaaucagaagaucauuaccaucggcagcgugucccugacaauuucuacgaucugcuucuuuaugcaaauugccauccucaugaccacagucacccugcacuucaaacaguacgaguuuaacagcccuccgaauaaccagguuaugcuuugugaacccacaaucauugagagaaauaucaccgaaauuguguaucugacaaacaccacgaucgagaaggaaauuugcccuaaacucgcugaguaccggaauugguccaagccccagugugacaucaccggguucgccccuuuuucuaaagauaacagcauucgccuguccgcgggaggcgacaucugggugacaagagagcccuaugucucuugcgauccugacaaguguuaccaauucgcucuugggcagggaaccacacugaauaacgugcauagcaaugauaccguucacgaccggacgccguaucgcacacuccugaugaacgaacugggcgugcccuuucaucucgggaccaagcaggucugcaucgccugguccucuagcuccugucacgauggaaaagccuggcugcaugugugcguuacaggcgacgauaagaaugcuaccgccagcuucauuuacaacggcagacuuguggacucuaucgucuccuggagcaaagagauucugcggacccaggaaucugagugugugugcaucaaugggacauguacgguggucaugaccgauggauccgcuagcggcaaggccgacacaaaaauucucuuuaucgaggaagggaagaucguucacaccuccacacugucuggaagcgcgcaacacguggaggaaugcuccugcuauccucgcuaccccggcgugagaugugucugccgggauaacuggaaggggagcaaccgcccuauuguggacaucaauauuaaagacuacucuaucguuuccagcuauguguguucuggacuugucggcgauacccccagacggaacgacagcuccucuagcucccauugccuggauccgaauaacgaggaaggcgggcacggagugaagggcugggccuucgacgaugggaaugacguuuggaugggacgcacgauuagcgagaaacucagaucuggcuacgagacauuuaaggugaucgaagggugguccaacccuaauagcaaacugcagaucaaccggcaggucauuguggaucgcggaaauagaucuggcuauuccggcaucuucagcgucgaggggaaguccuguauuaaccggugcuuuuacguggaacugaucagaggacgcaaagaggaaaccgagguucucuggaccucuaauagcauuguggucuucuguggcacauccgggaccuauggaacaggcucuuggcccgacggggcugauaucaaccugaugccuauuuga

SEQ ID NO: 206701 - RNA, 1410 nt, Artificial Sequence; identical to SEQ ID NO: 206399
  derived and/or modified CDS sequence (opt5) from neuraminidase__InfluenzaA__ABC42764

SEQ ID NO: 206702 - RNA, 1410 nt, Artificial Sequence; identical to SEQ ID NO: 206399
  derived and/or modified CDS sequence (opt5) from neuraminidase__InfluenzaA__ABC42775

SEQ ID NO: 206703 - RNA, 1410 nt, Artificial Sequence; identical to SEQ ID NO: 206399
  derived and/or modified CDS sequence (opt5) from neuraminidase__InfluenzaA__ABC42786

SEQ ID NO: 206704 - RNA, 1410 nt, Artificial Sequence; identical to SEQ ID NO: 206399
  derived and/or modified CDS sequence (opt5) from neuraminidase__InfluenzaA__ABC42797

SEQ ID NO: 206705 - RNA, 1410 nt, Artificial Sequence; identical to SEQ ID NO: 206399
  derived and/or modified CDS sequence (opt5) from neuraminidase__InfluenzaA__ABC42808

SEQ ID NO: 206706 - RNA, 1410 nt, Artificial Sequence; identical to SEQ ID NO: 206399
  derived and/or modified CDS sequence (opt5) from neuraminidase__InfluenzaA__ABC42819

SEQ ID NO: 206707 - RNA, 1410 nt, Artificial Sequence
  derived and/or modified CDS sequence (opt5) from neuraminidase__InfluenzaA__ABC42841
augaaccccaaucagaagaucauuaccaucggcagcgugucccugacaauuucuacgaucugcuucuuuaugcaaauugccauccucaucaccacagucacccugcacuucaaacaguacgaguuuaacagcccuccgaauaaccagguuaugcuuugugaacccacaauuaucgagagaaauauuaccgaaaucguguaucugacaaacaccacgauugagaaggaaaucugcccuaaacucgcugaguaccggaauugguccaagccccagugugacauuaccggguucgccccuuuuucuaaagauaacagcauccgccuguccgcgggaggcgacaucugggugacaagagagcccuaugucucuugcgauccugacaaguguuaccaauucgcucuugggcagggaaccacacugaauaacgugcauagcaaugauaccguucacgaccggacgccguaucgcacacuccugaugaacgaacugggcgugcccuuucaucucgggaccaagcaggucugcauugccugguccucuagcuccugucacgauggaaaagccuggcugcaugugugcguuacaggcgacgauaagaaugcuaccgccagcuucaucuacaacggcagacuuguggacucuauugucuccuggagcaaagagauccugcggacccaggaaucugagugugugugcauuaaugggacauguacgguggucaugaccgauggauccgcuagccgcaaggccgacacaaaaauccucuuuaucgaggaaggcaagauuguucacaccuccacacugucugggagcgcgcaacacguggaggaaugcuccugcuauccuagauaccccggagugcggugugucugccgcgauaacuggaagggcagcaacagaccuaucguggacauuaauaucaaagacuacucuauuguuuccagcuauguguguucugggcuugucggagauacgccccggaagaacgacagcuccucuagcucccauugccuggauccgaauaacgaggaaggcggccacggggugaaaggaugggccuucgacgauggcaaugacguuuggauggggcgcaccaucagcgagaagcucagaucuggauacgagacauuuaaagugaucgaaggcugguccaacccuaauagcaagcugcagauuaaccggcaggucaucguggaucgcgggaauagaucuggauauuccggcauuuucagcgucgagggcaaauccuguaucaaccggugcuuuuacguggaacugauuagagggcgcaaggaggaaaccgagguucucuggaccucuaauagcaucguggucuucuguggaacauccggcaccuaugggacaggaucuuggcccgacggcgcugauauuaaccugaugccuaucuga

SEQ ID NO: 206708 - RNA, 1410 nt, Artificial Sequence; identical to SEQ ID NO: 206399
  derived and/or modified CDS sequence (opt5) from neuraminidase__InfluenzaA__ABC42852

SEQ ID NO: 206709 - RNA, 1410 nt, Artificial Sequence; identical to SEQ ID NO: 206399
  derived and/or modified CDS sequence (opt5) from neuraminidase__InfluenzaA__ABC42863

SEQ ID NO: 206710 - RNA, 1410 nt, Artificial Sequence; identical to SEQ ID NO: 206238
  derived and/or modified CDS sequence (opt5) from neuraminidase__InfluenzaA__ABC42874

SEQ ID NO: 206711 - RNA, 1410 nt, Artificial Sequence; identical to SEQ ID NO: 206238
  derived and/or modified CDS sequence (opt5) from neuraminidase__InfluenzaA__ABC42885

SEQ ID NO: 206712 - RNA, 1410 nt, Artificial Sequence; identical to SEQ ID NO: 206238
  derived and/or modified CDS sequence (opt5) from neuraminidase__InfluenzaA__ABC42896

SEQ ID NO: 206713 - RNA, 1410 nt, Artificial Sequence; identical to SEQ ID NO: 206663
  derived and/or modified CDS sequence (opt5) from neuraminidase__InfluenzaA__ABC42914

SEQ ID NO: 206714 - RNA, 1410 nt, Artificial Sequence; identical to SEQ ID NO: 206663
  derived and/or modified CDS sequence (opt5) from neuraminidase__InfluenzaA__ABC42932

SEQ ID NO: 206715 - RNA, 1410 nt, Artificial Sequence
  derived and/or modified CDS sequence (opt5) from neuraminidase__InfluenzaA__ABC42943
augaaccccaaucagaagaucauuaccaucggcagcgugucccugacaauugccacgaucugcuuccucaugcaaauugcuauccuggucaccacaguuacccuucacuuuaaacagcaugaguguaacucuccuccgaauaaccaggugaugcugugcgaacccacaaucauugagagaaauaucaccgaaauuguguaccucacaaacaccacgaucgagaaggaaauuuguccuaaacuggucggguaucggaauuggagcaagccccagugcaacaucaccggauucgccccuuuuuccaaagacaauucuauucgccuuagcgcgggcggggauaucugggugacaagagagcccuacguuuccugugacccugauaagugcuaucaauucgcucugggacagggcaccacacucaacaaugggcacucuaacgacaccgugcaugaucggacgccguaccgcacacugcugaugaaugagcucggaguccccuuucaccugggcaccagacagguguguaucgccuggagcuccagcucuugccaugacggcaaggccuggcuucacguuugugugacaggggaugacaaaaacgcuaccgccuccuucauuuauaauggacggcuggucgauagcaucggcucuugguccaagaaaauucuccgcacccaggaaagcgagugcguguguaucaacgggacaugcacgguggucaugaccgacggaucugcuuccggcaaggccgauacaaaaauucuguuuaucgaagaggggaagaucguucacauuagcacccuuuccggaucugcgcaacauguggaggaaugcagcuguuacccuagauaucccggcgugcggugcgucugucgcgacaacuggaagggcuccaauagaccuaucguggauauuaacguuaaagacuacagcaucgugucuuccuacgucugcagcgggcuggugggagacacaccccggaagaaugauucuuucagcuccucucacugucucgacccgaacaaugaggaaggcgggcauggaguuaaaggcugggccuuugaugacgggaacgauguguggaugggacgcaccauuagcgagaagcugagauccggcuaugaaacguucaaagucaucgagggcuggagcaagccuaauucuaaacugcagaucaaccgccaggugauugucgagcgggggaauagauccggauacagcggcaucuuuucuguggaagggaaguccugcauuaaccgguguuucuauguugagcucaucagaggacgcaaggaagagacagaagugugguggaccagcaauuccauugucguguuuugcggcaccucugggacauacggcaccggaagcuggcccgacggcgcugauaucaaccugaugccuauuuga

SEQ ID NO: 206716 - RNA, 1410 nt, Artificial Sequence; identical to SEQ ID NO: 206663
  derived and/or modified CDS sequence (opt5) from neuraminidase__InfluenzaA__ABC42954

SEQ ID NO: 206717 - RNA, 1410 nt, Artificial Sequence; identical to SEQ ID NO: 206663
  derived and/or modified CDS sequence (opt5) from neuraminidase__InfluenzaA__ABC42965

SEQ ID NO: 206718 - RNA, 1410 nt, Artificial Sequence
  derived and/or modified CDS sequence (opt5) from neuraminidase__InfluenzaA__ABC42976
augaaccccaaucagaagaucauuaccaucggcagcgugucccugacaauugccacgaucugcuuccucaugcaaauugcuauccuggucaccacaguuacccuucacuuuaaacagcaugaguguaacucuccuccgaauaaccaggccaugcugugcgaacccacaaucauugagagaaauaucaccgaaauuguguaccucacaaacaccacgaucgagaaggaaauuuguccuaaacugguggaguaucggaauuggagcaagccccagugcaacaucaccggguucgcgccuuuuuccaaagacaauucuauucgccuuagcgcuggaggcgauaucugggucacaagagagcccuacguguccugugacccugauaagugcuaucaauucgcccuggggcagggaaccacacucaacaauggccacucuaacgacaccguucaugaucggacgccguaccgcacacugcugaugaaugaacucggggugcccuuucaccugggaaccagacaggucuguaucgccuggagcuccagcucuugccaugacggcaaggcuuggcuucacguguguguuacaggcgaugacaaaaacgccaccgcuuccuucauuuauaaugggcggcugguggauagcaucggaucuugguccaagaaaauucuccgcacccaggagagcgaaugcgucuguaucaacggcacaugcacgguggugaugaccgacgggucugccuccggaaaggcggauacaaaaauucuguuuaucgaggagggcaagaucguccacauuagcacccuuuccgggucugcccaacauguugaagagugcagcuguuacccuagauaucccggagugcggugcgugugucgcgacaacuggaagggcuccaauagaccuaucgucgauauuaacgugaaagacuacagcaucguuucuuccuacgugugcagcggccuggucggggacacaccccggaagaaugauucuuucagcuccucucacugucucgacccgaacaaugaagagggaggccauggggugaaaggaugggcuuuugaugacggcaacgauguuuggauggggcgcaccauuagcgaaaagcugagauccggauaugagacguucaaagugaucgagggcuggagcaagccuaauucuaaacugcagaucaaccggcaggucauuguggaacgcggcaauagauccggguacagcggaaucuuuucugucgagggcaaguccugcauuaaccgguguuucuauguggaacucaucagagggcgcaaggaggaaacagagguuugguggaccagcaauuccauuguggucuuuugcggaaccucuggcacauacgggaccggcagcuggcccgacggagccgauaucaaccugaugccuauuuga

SEQ ID NO: 206719 - RNA, 1410 nt, Artificial Sequence; identical to SEQ ID NO: 206663
  derived and/or modified CDS sequence (opt5) from neuraminidase__InfluenzaA__ABC42987

SEQ ID NO: 206720 - RNA, 1410 nt, Artificial Sequence; identical to SEQ ID NO: 206663
  derived and/or modified CDS sequence (opt5) from neuraminidase__InfluenzaA__ABC42998

SEQ ID NO: 206721 - RNA, 1410 nt, Artificial Sequence; identical to SEQ ID NO: 206663
  derived and/or modified CDS sequence (opt5) from neuraminidase__InfluenzaA__ABC43009

SEQ ID NO: 206722 - RNA, 1410 nt, Artificial Sequence; identical to SEQ ID NO: 206663
  derived and/or modified CDS sequence (opt5) from neuraminidase__InfluenzaA__ABC43020

SEQ ID NO: 206723 - RNA, 1410 nt, Artificial Sequence
  derived and/or modified CDS sequence (opt5) from neuraminidase__InfluenzaA__ABC43042
augaaccccaaucagaagaucauuaccaucggcagcgugucccugacaauugccacgaucugcuuccucaugcaaauugcuauccuggucaccacaguuacccuucacuuuaaacagcaugaguguaacucuccuccgaauaaccaggugaugcugugcgaacccacaaucauugagagaaauaucaccgaaauuguguaccucacaaacaccacgaucgagaaggaaauuuguccuaaacuggucgaguaucggaauuggagcaagccccagugcaacaucaccggguucgccccuuuuuccaaagacaauucuauucgccuuagcgcgggaggcgauaucugggugacaagagagcccuacguuuccugugacccugauaagugcuaucaauucgcucuggggcagggaaccacacucaacaauggccacucuaacgacaccgugcaugaucggacgccguaccgcacacugcugaugaaugaacucgggguccccuuucaccugggaaccagacagguguguaucgccuggagcuccagcucuugccaugacggcaaggccuggcuucacguuugugugacaggcgaugacaaaaacgcuaccgccuccuucauuuauaaugggcggcuggucgauagcaucggaucuugguccaagaaaauucuccgcacccaggagagcgaaugcguguguaucaacggcacaugcacgguggucaugaccgacgggucugcuuccggaaaggccgauacaaaaauucuguuuaucgaggagggcaagaucguucacauuagcacccuuuccgggucugcgcaacauguggaagagugcagcuguuacccuagauaucccggagugcggugcgucugucgcgacaacuggaagggcuccaauagaccuaucguggauauuaacguuaaagacuacagcaucgugucuuccuacgucugcagcggccuggugggggacacaccccggaagaaugauucuuucagcuccucucacugucucgacccgaacaaugaagagggaggccaugggguuaaaggaugggccuuugaugacggcaacgauguguggauggggcgcaccauuagcgaaaagcugagauccggauaugagacguucaaagucaucgagggcuggagcaagccuaauucuaaacugcagaucaaccgccaggugauugucgaacggggcaauagauccggguacagcggaaucuuuucuguggagggcaaguccugcauuaaccgguguuucuauguugaacucaucagagggcgcaaggaggaaacagaggugugguggaccagcaauuccauugucguguuuugcggaaccucuggcacauacgggaccggcagcuggcccgacggagcugauaucaaccugauguccauuuga

SEQ ID NO: 206724 - RNA, 1410 nt, Artificial Sequence; identical to SEQ ID NO: 206663
  derived and/or modified CDS sequence (opt5) from neuraminidase__InfluenzaA__ABC43053

SEQ ID NO: 206725 - RNA, 1410 nt, Artificial Sequence
  derived and/or modified CDS sequence (opt5) from neuraminidase__InfluenzaA__ABC43064
augaaccccaaucagaagaucauuaccaucggcagcgugucccugacaauugccacgaucugcuuccucaugcaaauugcuauccuggucaccacaguuacccuucacuuuaaacagcaugaguguaacucuccuccgaauaaccaggugaugcugugcgaacccacaaucauugagagaaauaucaccgaaauuguguaccucacaaacaccacgaucgagaaggaaauuuguccuaaacuggucgaguaucggaauuggagcaagccccagugcaacaucaccggguucgccccuuuuuccaaagacaauucuauucgccuuagcgcgggaggcgauaucugggugacaagagagcccuacguuuccugugacccugauaagugcuaucaauucgcucuggggcagggaaccacacucaacaauggccacucuaacgacaccgugcaugaucggacgccguaccgcacacugcugaugaaugaacucgggguccccuuucaccugggaaccagacagguguguaucgccuggagcuccagcucuugccaugacggcaaggccuggcuucacguuugugugacaggcgaugacaaaaacgcuaccgccuccuucauuuauaaugggcggcuggucgauagcaucggaucuugguccaagaaaauucuccgcacccaggagagcgaaugcguguguaucaacggcacaugcacgguggucaugaccgacgggucugcuuccggaaaggccgauacaaaaauucuguuuaucgaggagggcaagaucguucacauuagcacccuuuccgggucugcgcaacauguggaagagugcagcuguuacccuagauaucccggagugcggugcgucugucgcgacaacuggaagggcuccaauagaccuaucguggauauuaacguuaaagacuacagcaucgugucuuccuacgucugcagcggccuggugggggacacaccccggaagaaugauucuuucagcuccucucacugucucgacccgaacaaugaagagggaggccaugggguuaaaggaugggccuuugaugacggcaacgauguguggauggggcgcaccauuagcgaaaagcugagauccggauaugagacguucaaagucaucgagggcuggagcaagccuaauucuaaacugcagaucaaccgccaggugauugucgaacggggcaauagauccggguacagcggaaucuuuucuguggagggcaaguccugcauuaaccgguguuucuauguugaacucaucagagggcgcaaggagaaaacagaagugugguggaccagcaauuccauugucguguuuugcggaaccucuggcacauacgggaccggcagcuggcccgacggagcugauaucaaccugaugccuauuuga

SEQ ID NO: 206726 - RNA, 1410 nt, Artificial Sequence; identical to SEQ ID NO: 206663
  derived and/or modified CDS sequence (opt5) from neuraminidase__InfluenzaA__ABC43075

SEQ ID NO: 206727 - RNA, 1410 nt, Artificial Sequence
  derived and/or modified CDS sequence (opt5) from neuraminidase__InfluenzaA__ABC43086
augaaccccaaucagaagaucauuaccaucggcagcgugucccugauuaucgccacaauuugcuuccucaugcaaaucgcuauccuggucacgaccguuacacuucacuuuaaacagcaugaguguaacucuccuccgaauaaccaggugaugcugugcgaacccaccauuaucgagagaaauauuacagaaaucguguaccucaccaacacaaccauugagaaggaaaucuguccuaaacuggucgaguaucggaauuggagcaagccccagugcaacauuacgggguucgccccuuuuuccaaagacaauucuauccgccuuagcgcgggaggcgauaucugggugaccagagagcccuacguuuccugugacccugauaagugcuaucaauucgcucuggggcagggaacaacccucaacaauggccacucuaacgacacagugcaugaucggaccccguaccgcacgcugcugaugaaugaacucgggguccccuuucaccugggaacaagacagguguguauugccuggagcuccagcucuugccaugacggcaaggccuggcuucacguuugugugaccggcgaugacaaaaacgcuacagccuccuucaucuauaaugggcggcuggucgauagcauuggaucuugguccaagaaaauccuccgcacccaggagagcgaaugcguguguauuaacgggaccugcacaguggucaugacggacggcucugcuuccggaaaggccgauaccaaaauccuguuuaucgaggagggcaagauuguucacaucagcacacuuuccgggucugcgcaacauguggaagagugcagcuguuacccuagauaucccggagugcggugcgucugucgcgacaacuggaagggcuccaauagaccuauuguggauaucaacguuaaagacuacagcauugugucuuccuacgucugcagcggccuggugggggacacaccccggaagaaugauucuuucagcuccucucacugucucgacccgaacaaugaagagggaggccaugggguuaaaggaugggccuuugaugacggcaacgauguguggauggggcgcaccaucagcgaaaagcugagauccggauaugagaccuucaaagucaucgagggcuggagcaagccuaauucuaaacugcagauuaaccgccaggugaucgucgaacggggcaauagauccggguacagcggaaucuuuucuguggagggcaaguccugcauuaaccgguguuucuauguugaacucauuagagggcgcaaggaggaaacggaggugugguggacaagcaauuccaucgucguguuuugcggaaccucuggcaccuacgggacaggcagcuggcccgacggagcugauauuaaccugaugccuaucuga

SEQ ID NO: 206728 - RNA, 1410 nt, Artificial Sequence; identical to SEQ ID NO: 206663
  derived and/or modified CDS sequence (opt5) from neuraminidase__InfluenzaA__ABC43097

SEQ ID NO: 206729 - RNA, 1410 nt, Artificial Sequence; identical to SEQ ID NO: 206663
  derived and/or modified CDS sequence (opt5) from neuraminidase__InfluenzaA__ABC43108

SEQ ID NO: 206730 - RNA, 1410 nt, Artificial Sequence; identical to SEQ ID NO: 206663
  derived and/or modified CDS sequence (opt5) from neuraminidase__InfluenzaA__ABC43119

SEQ ID NO: 206731 - RNA, 1410 nt, Artificial Sequence; identical to SEQ ID NO: 206399
  derived and/or modified CDS sequence (opt5) from neuraminidase__InfluenzaA__ABC43130

SEQ ID NO: 206732 - RNA, 1410 nt, Artificial Sequence; identical to SEQ ID NO: 206399
  derived and/or modified CDS sequence (opt5) from neuraminidase__InfluenzaA__ABC43141

SEQ ID NO: 206733 - RNA, 1410 nt, Artificial Sequence; identical to SEQ ID NO: 206399
  derived and/or modified CDS sequence (opt5) from neuraminidase__InfluenzaA__ABC43152

SEQ ID NO: 206734 - RNA, 1410 nt, Artificial Sequence; identical to SEQ ID NO: 206399
  derived and/or modified CDS sequence (opt5) from neuraminidase__InfluenzaA__ABC43163

SEQ ID NO: 206735 - RNA, 1410 nt, Artificial Sequence; identical to SEQ ID NO: 206399
  derived and/or modified CDS sequence (opt5) from neuraminidase__InfluenzaA__ABC43174

SEQ ID NO: 206736 - RNA, 1410 nt, Artificial Sequence
  derived and/or modified CDS sequence (opt5) from neuraminidase__InfluenzaA__ABC43185
augaaccccaaucagaagaucauuaccaucggcagcgugucccugacaauuucuacgaucugcuucuuuaugcaaauugccauccucaucaccacagucacccugcacuucaaacaguacgaguuuaacagcccuccgaauaaccagguuaugcuuugugaacccacaauuaucgagagaaauauuaccgaaaucguguaucugacaaacaccacgauugagaaggaaaucugcccuaaacucgcugaguaccggaauugguccaagccccagugugacauuaccggguucgccccuuuuucuaaagauaacagcauccgccuguccgcgggaggcgacaucugggugacaagagagcccuaugucucuugcgauccugacaaguguuaccaauucgcucuugggcagggaaccacacugaauaacgugcauagcaaugauaccguucacgaccggacgccguaucgcacacuccugaugaacgaacugggcgugcccuuucaucucgggaccaagcaggucugcauugccugguccucuagcuccugucacgauggaaaagccuggcugcaugugugcguuacaggcgacgauaagaaugcuaccgccagcuucaucuacaacggcagacuuguggacucuauugucuccuggagcaaagagauccugcggacccaggaaucugagugugugugcauuaaugggacauguacgguggucaugaccgauggauccgcuagcggcaaggccgacacacgcauccucuuuaucgaggaagggaaaauuguucacaccuccacacugucuggaagcgcgcaacacguggaggaaugcuccugcuauccuagauaccccggcgugcggugugucugccgcgauaacuggaaggggagcaacagaccuaucguggacauuaauaucaaggacuacucuauuguuuccagcuauguguguucuggacuugucggcgauacgccccggaaaaacgacagcuccucuagcucccauugccuggauccgaauaacgaggaaggcgggcacggagugaagggcugggccuucgacgaugggaaugacguuuggaugggacgcaccaucagcgagaaacucagaucuggcuacgagacauuuaaggugaucgaagggugguccaacccuaauagcaaacugcagauuaaccggcaggucaucguggaucgcggaaauagaucuggcuauuccggcauuuucagcgucgaggggaaguccuguaucaaccggugcuuuuacguggaacugauuagaggacgcaaagaggaaaccgagguucucuggaccucuaauagcaucguggucuucuguggcacauccgggaccuauggaacaggcucuuggcccgacggggcugauauuaaccugaugccuaucuga

SEQ ID NO: 206737 - RNA, 1410 nt, Artificial Sequence; identical to SEQ ID NO: 206399
  derived and/or modified CDS sequence (opt5) from neuraminidase__InfluenzaA__ABC43478

SEQ ID NO: 206738 - RNA, 1410 nt, Artificial Sequence; identical to SEQ ID NO: 206399
  derived and/or modified CDS sequence (opt5) from neuraminidase__InfluenzaA__ABC43489

SEQ ID NO: 206739 - RNA, 1410 nt, Artificial Sequence; identical to SEQ ID NO: 206399
  derived and/or modified CDS sequence (opt5) from neuraminidase__InfluenzaA__ABC43500

SEQ ID NO: 206740 - RNA, 1410 nt, Artificial Sequence
  derived and/or modified CDS sequence (opt5) from neuraminidase__InfluenzaA__ABC43511
augaaccccaaucagaagaucauuaccaucggcagcgugucccugacaauuucuacgaucugcuucuuuaugcaaauugccauccucaucaccacagucacccugcacuucaaacaguacgaguuuaacagcccuccgaauaaccagguuaugcuuugugaaacaaccauuaucgagagaaauauuacagaaaucguguaucugaccaacacgaccauugagaaggaaaucugccccaaacucgcugaguaccggaauugguccaagccucagugugacauuacaggguucgcccccuuuucuaaagauaacagcauccgccuguccgcgggaggcgacaucugggugaccagagagccuuaugucucuugcgaucccgacaaguguuaccaauucgcucuugggcagggaacaacccugaauaacgugcauagcaaugauacgguucacgaccggacaccuuaucgcacccuccugaugaacgaacugggcgugccguuucaucucgggacaaagcaggucugcauugccugguccucuagcuccugucacgauggaaaagccuggcugcaugugugcguuaccggcgacgauaagaaugcuaccgccagcuucaucuacaacggcagacuuguggacucuauugucuccuggagcaaagagauccugcggacacaggaaucugagugugugugcauuaaugggacguguaccguggucaugacagauggauccgcuagcggcaaggccgacaccaaaauccucuuuaucgaggaagggaagauuguucacacauccacccugucuggaagcgcgcaacacguggaggaaugcuccugcuauccccgcuacccuggcgugagaugugucugccgggauaacuggaaggggagcaaccgccccaucguggacauuaauaucaaagacuacucuauuguuuccagcuauguguguucuggacuugucggcgauacgccuagaaagaacgacagcuccucuagcucccauugccuggaucccaauaacgaggaaggcgggcacggagugaaaggcugggccuucgacgaugggaaugacguuuggaugggacggacaaucagcgagaagcuccgcucuggcuacgagaccuuuaaagugaucgaagggugguccaacccgaauagcaagcugcagauuaacagacaggucaucguggaucggggaaaucgcucuggcuauuccggcauuuucagcgucgaggggaaauccuguaucaacagaugcuuuuacguggaacugauucggggaagaaaggaggaaaccgagguucucuggacaucuaauagcaucguggucuucuguggcaccuccgggacauauggaacgggcucuuggccugacggggcugauauuaaccugaugcccaucuga

SEQ ID NO: 206741 - RNA, 1410 nt, Artificial Sequence; identical to SEQ ID NO: 206399
  derived and/or modified CDS sequence (opt5) from neuraminidase__InfluenzaA__ABC43522

SEQ ID NO: 206742 - RNA, 1410 nt, Artificial Sequence; identical to SEQ ID NO: 206399
  derived and/or modified CDS sequence (opt5) from neuraminidase__InfluenzaA__ABC43533

SEQ ID NO: 206743 - RNA, 1410 nt, Artificial Sequence; identical to SEQ ID NO: 206399
  derived and/or modified CDS sequence (opt5) from neuraminidase__InfluenzaA__ABC43544

SEQ ID NO: 206744 - RNA, 1410 nt, Artificial Sequence; identical to SEQ ID NO: 206399
  derived and/or modified CDS sequence (opt5) from neuraminidase__InfluenzaA__ABC43555

SEQ ID NO: 206745 - RNA, 1410 nt, Artificial Sequence; identical to SEQ ID NO: 206642
  derived and/or modified CDS sequence (opt5) from neuraminidase__InfluenzaA__ABC46557

SEQ ID NO: 206746 - RNA, 1410 nt, Artificial Sequence
  derived and/or modified CDS sequence (opt5) from neuraminidase__InfluenzaA__ABC46579
augaaccccaaucagaagaucauuaccaucggcagcgugucccugacaauugccacgaucugcuuccucaugcaaauugcuauccuggucaccacaguuacccuucacuuuaaacaguacgaguguucuagcccuccgaacaaucaggugaugcccugcgaaccuaucauuaucgagagaaacauuacagaaaucguguaucugaccaauacaaccauugagaaggaaaucugucccaaacucgucgaguaccggaacugguccaagccucagugcaaaauuacgggguucgcccccuuuucuaaggacaauagcauccgccuguccgcgggaggcgauaucugggugaccagagagccuuauguuucuugugacccggggaagugcuaccaauucgcucuuggacagggcacaacccuggauaacaaacauagcaaugacacaauucacgaucggacccccuaucgcacgcuccugaugaacgaacugggggugccuuuucaucucggaacaagacaggucuguaucgccugguccuccucuuccugccacgacggcaaggccuggcugcauguguguguuaccggccacgauaaaaaugcuacagccagcuucauuuacgacgggcggcuuguggauucuaucggauccuggagcaagaacauucugcgcacccaggagucugaaugcgucuguaucaaugggaccugcacaguggugaugacggacggcuccgcuagcgagagagccgauaccaaaauccucuuuauugaggaaggaaagaucguccacauuagcccccugucuggcagcgcgcaacauguugaggaaugcuccuguuauccucgguaccccggggugcgcugcguguguagagacaacuggaagggaagcaaucggccggucguggauaucaacguuaaagacuacucuauuguguccagcuaugucugcucuggccuugugggcgacacaccucgcaagaacgauagaagcuccucuagcuacugucggaaucccaacaaugagaaagggaaccacggaguuaagggcugggccuucgacgaugggaaugacguguggaugggacgcaccaucuccgaagagagcagaucuggcuaugagacauuuaaagucaucgggggaugguccaccccuaacagcaagcugcagauuaauagacaggugaucgucgauucugacaaccgguccggcuacagcggcauuuucuccguggaagggaaaucuugcaucaaucgcuguuuuuauguugagcucauucggggaagagaacaggagacgcgcgugugguggacaagcaacuccaucgucguguucugcggcaccucugggaccuacggaacaggcagcuggcccgauggggcugacauuaaucugaugcccaucuga

SEQ ID NO: 206747 - RNA, 1410 nt, Artificial Sequence; identical to SEQ ID NO: 206586
  derived and/or modified CDS sequence (opt5) from neuraminidase__InfluenzaA__ABC50170

SEQ ID NO: 206748 - RNA, 1410 nt, Artificial Sequence; identical to SEQ ID NO: 206586
  derived and/or modified CDS sequence (opt5) from neuraminidase__InfluenzaA__ABC50181

SEQ ID NO: 206749 - RNA, 1410 nt, Artificial Sequence; identical to SEQ ID NO: 206586
  derived and/or modified CDS sequence (opt5) from neuraminidase__InfluenzaA__ABC50192

SEQ ID NO: 206750 - RNA, 1410 nt, Artificial Sequence; identical to SEQ ID NO: 206238
  derived and/or modified CDS sequence (opt5) from neuraminidase__InfluenzaA__ABC50203

SEQ ID NO: 206751 - RNA, 1410 nt, Artificial Sequence
  derived and/or modified CDS sequence (opt5) from neuraminidase__InfluenzaA__ABC50214
augaaccccaaucagaagaucauuaccaucggcagcgugucccugacaauugccacgaucugcuuccucaugcaaauugcuauccuggucaccacaguuacccuucacuuuaaacaguacgaguguaacucuccuccgaauaaccaggugaugcugugcgaacccacaaucauugagagaaauaucaccgaaauuguguaucucacaaacaccacgaucgagaaggaaauuuguccuaaacuggccgaguaccggaauuggagcaagccccagugcaacaucaccggguucgcgccuuuuuccaaagacaauucuauucgccuuagcgcuggaggcgauaucugggucacaagagagcccuauguguccugugacccugauaagugcuaccaauucgcccuggggcagggaaccacacucaacaauggccauucuaacgacaccguucacgaucggacgccguaucgcacacugcugaugaaugaacucggggugcccuuucaucugggaaccagacaggucuguaucgccuggagcuccagcucuugccacgacggcaaggcuuggcuucauguguguguuacaggcgaugacgagaacgccaccgcuuccuucauuuacaaugggcggcugguggauagcaucggaucuugguccaaaaagauucuccgcacccaggaaagcgagugcgucuguaucaacggcacaugcacgguggugaugaccgacgggucugccuccggaaaagcggauacaaagauucuguuuaucgaggaaggcaaaaucguccacauuagcacccuuuccgggucugcccaacacguugaggaaugcagcuguuauccuagauaccccggagugcggugcgugugucgcgacaacuggaagggcuccaauagaccuaucauugauaucaacgucaaggacuacagcauugugucuuccuauguuugcagcggccuggugggggacacaccccggaaaaaugauucuuucagcuccucucauugucucgacccgaacaaugaggaaggaggccacggggucaagggaugggcuuuugaugacggcaacgauguguggauggggcgcaccaucagcgagaaacugagauccggauacgagacguucaagguuaucgaaggcuggagcaaaccuaaucccaagcugcagacaaaccgccaggugauugucgagcggggcaauagaucuggguauuccggaaucuuuagcguggaaggcaaaucuugcauuaaccgguguuucuacgucgagcucaucagagggcgcaaggaagagaccgaggugugguggaccuccaauagcauuguuguguuuugcggaacauccggcaccuaugggacaggcucuuggccugacggagccgauaucaaccugaugcccauuuga

SEQ ID NO: 206752 - RNA, 1410 nt, Artificial Sequence; identical to SEQ ID NO: 206238
  derived and/or modified CDS sequence (opt5) from neuraminidase__InfluenzaA__ABC50225

SEQ ID NO: 206753 - RNA, 1410 nt, Artificial Sequence; identical to SEQ ID NO: 206238
  derived and/or modified CDS sequence (opt5) from neuraminidase__InfluenzaA__ABC50247

SEQ ID NO: 206754 - RNA, 1410 nt, Artificial Sequence
  derived and/or modified CDS sequence (opt5) from neuraminidase__InfluenzaA__ABC50258
augaaccccaaucagaagaucauuaccaucggcagcgugucccugacaauugccacgaucugcuuccucaugcaaauugcuauccuggucaccacaguuacccuucacuuuaaacaguacgaguguaacucuccuccgaauaaccaggugaugcugugcgaacccacaaucauugagagaaauaucaccgaaauuguguaucucacaaacaccacgaucgagaaggaaauuuguccuaaacuggccgaguaccggaauuggagcaagccccagugcaacaucaccggguucgcgccuuuuuccaaagacaauucuauucgccuuagcgcuggaggcgauaucugggucacaagagagcccuauguguccugugacccugauaagugcuaccaauucgcccuggggcagggaaccacacucaacaauggccauucuaacgacaccguucacgaucggacgccguaucgcacacugcugaugaaugaacucggggugcccuuucaucugggaaccagacaggucuguaucgccuggagcuccagcucuugccacgacggcaaggcuuggcuucauguguguguuacaggcgaugacgagaacgccaccgcuuccuucauuuacaaugggcggcugguggauagcaucggaucuugguccaaaaagauucuccgcacccaggaaagcgagugcgucuguaucaacggcacaugcacgguggugaugaccgacgggucugccuccggaaaagcggauacaaagauucuguuuaucgaggaaggcaaaaucguccacauuagcacccuuuccgggucugcccaacacguugaggaaugcagcuguuauccuagauaccccggagugcggugcgugugucgcgacaacuggaagggcuccaauagaccuaucauugauaucaacgucaaggacuacagcauugugucuuccuauguuugcagcggccuggugggggacacaccccggaaaaaugauucuuucagcuccucucauugucucgacccgaacaaugaggaaggaggccacggggucaagggaugggcuuuugaugacggcaacgauguguggauggggcgcaccaucagcgagaaacugagauccggauacgagacguucaagguuaucgaaggcuggagcaaaccuaauucuaagcugcagacaaaccggcagguuauugucgagcgcggcaauagauccggguauagcggaaucuuuucuauugaaggcaaauccugcaucaaccgguguuucuacguggagcucauuagagggcgcaaggaagagaccgaggucugguggaccagcaauuccaucgugguguuuugcggaacaucuggcaccuaugggacaggcagcuggcccgacggagccgauauuaaccugaugccuaucuga

SEQ ID NO: 206755 - RNA, 1410 nt, Artificial Sequence; identical to SEQ ID NO: 206238
  derived and/or modified CDS sequence (opt5) from neuraminidase__InfluenzaA__ABC50280

SEQ ID NO: 206756 - RNA, 1410 nt, Artificial Sequence; identical to SEQ ID NO: 206238
  derived and/or modified CDS sequence (opt5) from neuraminidase__InfluenzaA__ABC50291

SEQ ID NO: 206757 - RNA, 1410 nt, Artificial Sequence
  derived and/or modified CDS sequence (opt5) from neuraminidase__InfluenzaA__ABC50302
augaaccccaaucagaagaucauuaccaucggcagcgugucccugacaauugccacgaucugcuuccucaugcaaauugcuauccugaucaccacagucacccuucacuuuaaacaguacgaguguaacucuccuccgaauaaccagguuaugcugugcgaacccacaauuaucgagagaaauauuaccgaaaucguguaucucacaaacaccacgauugagaaggaaaucuguccuaaacuggccgaguaccggaauuggagcaagccccagugcaacauuaccggguucgcgccuuuuuccaaagacaauucuauccgccuuagcgcuggaggcgauaucugggugacaagagagcccuaugucuccugugacccugauaagugcuaccaauucgcccuggggcagggaaccacacucaacaauggccauucuaacgacaccgugcacgaucggacgccguaucgcacacugcugaugaaugaacucgggguucccuuucaucugggaaccagacagguguguauugccuggagcuccagcucuugccacgacggcaaggcuuggcuucaugucugugugacaggcgaugacgagaacgccaccgcuuccuucaucuacaaugggcggcugguugauagcauuggaucuugguccaaaaagauccuccgcacccaggaaagcgagugcguguguauuaacggcacaugcacggucgugaugaccgacgggucugccuccggaaaagcggauacaaagauccuguuuaucgaggaaggcaaaauugugcacaucagcacccuuuccgggucugcccaacacgucgaggaaugcagcuguuauccuagauaccccggaguucggugcgugugucgcgacaacuggaagggcuccaauagaccuauuguggauaucaacgucaaggacuacagcauugugucuuccuauguuugcagcggccuggugggggacacaccccggaaaaaugauucuuucagcuccucucauugucucgacccgaacaaugaggaaggaggccacggggucaagggaugggcuuuugaugacggcaacgauguguggauggggcgcaccaucagcgagaaacugagauccggauacgagacguucaagguuaucgaaggcuggagcaaaccuaauucuaagcugcagacaaaccgccaggugauugucgagcggggcaauagauccggguauagcggaaucuuuucuguggaaggcaaauccugcauuaaccgguguuucuacgucgagcucaucagagggcgcaaggaagagaccgaggugugguggaccagcaauuccauuguuguguuuugcggaacaucuggcaccuaugggacaggcagcuggcccgacggagccgauaucaaccugaugccuauuuga

SEQ ID NO: 206758 - RNA, 1410 nt, Artificial Sequence
  derived and/or modified CDS sequence (opt5) from neuraminidase__InfluenzaA__ABC50313
augaaccccaaucagaagaucauuaccaucggcagcgugucccugacaauugccacgaucugcuuccucaugcaaauugcuauccuggucaccacaguuacccuucacuuuaaacagcaugaguguaacucuccuccgaauaaccaggugaugcugugcgaacccacaaucauugagagaaauaucaccgaaauuguguaccucacaaacaccacgaucgagaaggaaauuuguccuaaacuggccgaguaucggaauuggagcaagccccagugcaacaucaccggguucgcgccuuuuuccaaagacaauucuauucgccuuagcgcuggaggcgauaucugggucacaagagagcccuacguguccugugacccugauaagugcuaucaauucgcccuggggcagggaaccacacucaacaauggccacucuaacgacaccguucaugaucggacgccguaccgcacacugcugaugaaugaacucggggugcccuuucaccugggaaccagacaggucuguaucgccuggagcuccagcucuugccaugacggcaaggcuuggcuucacguguguguuacaggcgaugacgagaacgccaccgcuuccuucauuuauaaugggcggcugguggauagcaucggaucuugguccaaaaagauucuccgcacccaggaaagcgagugcgucuguaucaacggcacaugcacgguggugaugaccgacgggucugccuccggaaaagcggauacaaagauucuguuuaucgaggaaggcaaaaucguccacauuagcacccuuuccgggucugcccaacauguugaggaaugcagcuguuacccuagauaucccggagugcggugcgugugucgcgacaacuggaagggcuccaauagaccuaucgucgauauuaacgugaaggacuacagcaucguuucuuccuacgugugcagcggccuggucggggacacaccccggaaaaaugauucuuucagcuccucucacugucucgacccgaacaaugaggaaggaggccauggggugaagggaugggcuuuugaugacggcaacgauguuuggauggggcgcaccauuagcgagaaacugagauccggauaugagacguucaaggugaucgaaggcuggagcaaaccuaauucuaagcugcagacaaaccggcaggucaucguggagcgcggcaauagauccggguacagcggaaucuuuucugucgaaggcaaauccugcauuaaccgguguuucuauguggagcucauuagagggcgcaaggaagagaccgagguuugguggaccagcaauuccaucguggucuuuugcggaacaucuggcaccuacgggacaggcagcuggcccgacggagccgauauuaaccugaugccuaucuga

SEQ ID NO: 206759 - RNA, 1410 nt, Artificial Sequence; identical to SEQ ID NO: 206238
  derived and/or modified CDS sequence (opt5) from neuraminidase__InfluenzaA__ABC50324

SEQ ID NO: 206760 - RNA, 1410 nt, Artificial Sequence; identical to SEQ ID NO: 206226
  derived and/or modified CDS sequence (opt5) from neuraminidase__InfluenzaA__ABC50335

SEQ ID NO: 206761 - RNA, 1410 nt, Artificial Sequence
  derived and/or modified CDS sequence (opt5) from neuraminidase__InfluenzaA__ABC50346
augaaccccaaucagaagaucauuaccaucggcagcgugucccugacaauugccacgaucugcuuccucaugcaaauugcuauccuggucaccacaguuacccuucacuuuaaacaguacgaguguaacucuccuccgaauaaccaggugaugcugugcgaacccacaaucauugagagaaauaucaccgaaauuguguaucucacaaacaccacgaucgagaaggaaauuuguccuaaacuggccgaguaccggaauuggagcaagccccagugcaacaucaccggguucgcgccuuuuuccaaagacaauucuauucgccuuagcgcuggaggcgauaucugggucacaagagagcccuauguguccugugacccugauaagugcuaccaauucgcccuggggcagggaaccacacucaacaauggccauucuaacgacaccguucacgaucggacgccguaucgcacacugcugaugaaugaacucggggugcccuuucaucugggaaccagacaggucuguaucgccuggagcuccagcucuugccacgacggcaaggcuuggcuucauguguguguuacaggcgaugacgagaacgccaccgcuuccuucauuuacaaugggcggcugguggauagcaucggaucuugguccaaaaagauucuccgcacccaggaaagcgagugcgucuguaucaacggcacaugcacgguggugaugaccgacgggucugccuccggaaaagcggauacaaagauucuguuuaucgaggaaggcaaaaucguccacauuagcacccuuuccgggucugcccaacacguugaggaaugcagcuguuauccuagauaccccggagugcggugcgugugucgcgacaacuggaagggcuccaauagaccuaucauugauaucaacgucaaggacuacagcauugugucuuccuauguuugcagcggccuggugggggacacaccccggaaaaaugauucuuucagcuccucucauugucucgacccgaacaaugaggaaggaggccacggggucaagggaugggcuuuugaugacggcaacgauguguggauggggcgcaccaucagcgagaaacugagauccggauacgagacguucaagguuaucgaaggcuggagcaaaccuaauucuaagcugcagacaaaccgccaggugauugucgagcggggcaauagauccggguauagcggaaucuuuucuguggaaggcaaauccugcauuaaccgguguuucuacgucgagcucaucagagggcgcaaggaagagaccgaggugugguggaccagcaauuccauuguuguguuuugcggaacaucuggcaccuaugggacaggcagcuggcccgacggagccgauaucaaccugaugccuauuuga

SEQ ID NO: 206762 - RNA, 1410 nt, Artificial Sequence; identical to SEQ ID NO: 206238
  derived and/or modified CDS sequence (opt5) from neuraminidase__InfluenzaA__ABC50357

SEQ ID NO: 206763 - RNA, 1410 nt, Artificial Sequence; identical to SEQ ID NO: 206238
  derived and/or modified CDS sequence (opt5) from neuraminidase__InfluenzaA__ABC50368

SEQ ID NO: 206764 - RNA, 1410 nt, Artificial Sequence; identical to SEQ ID NO: 206238
  derived and/or modified CDS sequence (opt5) from neuraminidase__InfluenzaA__ABC50379

SEQ ID NO: 206765 - RNA, 1410 nt, Artificial Sequence; identical to SEQ ID NO: 206238
  derived and/or modified CDS sequence (opt5) from neuraminidase__InfluenzaA__ABC50390

SEQ ID NO: 206766 - RNA, 1410 nt, Artificial Sequence
  derived and/or modified CDS sequence (opt5) from neuraminidase__InfluenzaA__ABC50412
augaaccccaaucagaagaucauuaccaucggcagcgugucccugacaauuucuacgaucugcuucuuuaugcaaauugccauccucaucaccacagucacccugcacuucaaacaguacgaguuuaacagcccuccgaauaaccagguuaugcuuugugaacccacaauuaucgagagaaauauuaccgaaaucguguaucugacaaacaccacgauugagaaggaaaucugcccuaaacucgcugaguaccggaauugguccaagccccagugugacauuaccggguucgccccuuuuucuaaagauaacagcauccgccuguccgcgggaggcgacaucugggugacaagagagcccuaugucucuugcgauccugacaaguguuaccaauucgcucuugggcagggaaccacacugaauaacgugcauagcaaugauaccguucacgaccggacgccguaucgcacacuccugaugaacgaacugggcgugcccuuucaucucgggaccaagcaggucugcauugccugguccucuagcuccugucacgauggaaaagccuggcugcaugugugcguuacaggcgacgauaagaaugcuaccgccagcuucaucuacaacggcagacuuguggacucuauugucuccuggagcaaagagauccugcggacccaggaaucugagugugugugcauuaaugggacauguacgguggucaugaccgauggauccgcuagcggcaaggccgacacaaaaauccucuuuaucgaggaagggaagauuguucacaccuccacacugucuggaagcgcgcaacacguggaggaaugcuccugcuauccucgcuaccccggcgugagaugugucugccgggauaacuggaaggggagcaaccgcccuaucguggacauuaauaucaaagacuacucuauuguuuccagcuauguguguucuggacuugucggcgauacccccagaaagaacgacagcuccucuagcucccauugccuggauccgaauaacgaggaaggcgggcacggagugaaaggcugggccuucgacgaugggaaugacguuuggaugggacggacgaucagcgagaagcuccgccugggcuacgagacauuuaaagugaucgaaggguggucuaacccuaauuccaagcugcagauuaacagacaggucaucguggaucggggaaaucgcagcggcuauucuggcauuuucuccgucgaggggaaaagcuguaucaacagaugcuuuuacguggaacucauucggggaagaaaggaggaaaccgagguucuguggaccuccaauucuaucguggucuucuguggcacaagcgggaccuauggaacaggcuccuggcccgacggggcugauauuaaccuuaugccuaucuga

SEQ ID NO: 206767 - RNA, 1410 nt, Artificial Sequence; identical to SEQ ID NO: 206766
  derived and/or modified CDS sequence (opt5) from neuraminidase__InfluenzaA__ABC50423

SEQ ID NO: 206768 - RNA, 1410 nt, Artificial Sequence; identical to SEQ ID NO: 206351
  derived and/or modified CDS sequence (opt5) from neuraminidase__InfluenzaA__ABC54671

SEQ ID NO: 206769 - RNA, 1410 nt, Artificial Sequence; identical to SEQ ID NO: 206483
  derived and/or modified CDS sequence (opt5) from neuraminidase__InfluenzaA__ABC54682

SEQ ID NO: 206770 - RNA, 1410 nt, Artificial Sequence; identical to SEQ ID NO: 206663
  derived and/or modified CDS sequence (opt5) from neuraminidase__InfluenzaA__ABC67322

SEQ ID NO: 206771 - RNA, 1410 nt, Artificial Sequence; identical to SEQ ID NO: 206238
  derived and/or modified CDS sequence (opt5) from neuraminidase__InfluenzaA__ABC67474

SEQ ID NO: 206772 - RNA, 1410 nt, Artificial Sequence; identical to SEQ ID NO: 206761
  derived and/or modified CDS sequence (opt5) from neuraminidase__InfluenzaA__ABC67546

SEQ ID NO: 206773 - RNA, 1410 nt, Artificial Sequence
  derived and/or modified CDS sequence (opt5) from neuraminidase__InfluenzaA__ABC67557
augaaccccaaucagaagaucauuaccaucggcagcgugucccugacaauuucuacgaucugcuucuuuaugcaaauugccauccucgucaccacaguuacccugcacuucaaacaguacgaguuuaacagcccuccgaauaaccaggugaugcuuugugaacccacaaucauugagagaaauaucaccgaaauuguguaucugacaaacaccacgaucgagaaggaaauuugcccuaaacucgcugaguaccggaauugguccaagccccagugugacaucaccggguucgccccuuuuucuaaagauaacagcauucgccuguccgcgggaggcgacaucugggucacaagagagcccuaugugucuugcgauccugacaaguguuaccaauucgcucuugggcagggaaccacacugaauaacguucauagcaaugauaccgugcacgaccggacgccguaucgcacacuccugaugaacgaacugggcguccccuuucaucucgggaccaaacaggugugcaucgccugguccucuagcuccugucacgauggaaaagccuggcugcauguuugcgugacaggcgacgauaagaaugcuaccgccagcuucauuuacaacggcagacuugucgacucuaucguguccuggagcaaaaagauucugcggacccaggagucugaaugugugugcaucaaugggacauguacggucguuaugaccgauggauccgcuagcggcaaagccgacacaaagauucucuuuaucgaggaggggaagaucgugcacaccuccacacugucuggaagcgcgcaacacguggaagagugcuccugcuauccucgcuaccccggcgucagaugugugugccgggauaacuggaaagggagcaaccgcccuauuguugacaucaauauuaaggacuacucuaucguguccagcuaugucuguucuggacuugugggcgauacccccagaaagaacgacagcuccucuagcucccauugccuggauccgaauaacgaagagggcgggcacggaguuaagggcugggccuucgacgaugggaaugacguguggaugggacggacgauuagcgaaaaacuccgcucuggcuacgagacauuuaaggucaucgaggggugguccaacccuaauagcaaacugcagaucaacagacaggugauugucgaucggggaaaucgcucuggcuauuccggcaucuucagcguggaagggaaguccuguauuaacagaugcuuuuacguugagcugauccggggaagaaaggaagagaccgaagugcucuggaccucuaauagcauugucguguucuguggcacauccgggaccuauggaacaggcucuuggcccgacggggcugauaucaaccugaugccuauuuga

SEQ ID NO: 206774 - RNA, 1410 nt, Artificial Sequence
  derived and/or modified CDS sequence (opt5) from neuraminidase__InfluenzaA__ABC67568
augaaccccaaucagaagaucauuaccaucggcagcgugucccugacaauugccacgaucugcuuccucaugcaaauugcuauccuggucaccacaguuacccuucacuuuaaacaguacgagugugacucuccugccaacaaucaggugaugccgugcgaacccaucauuaucgagagaaacauuacagaaaucguguaucugaccaauacaaccauugagaaggaaaucuguccuaaacucgucgaguaccggaacuggagcaagccccagugcaaaauuacgggguucgcgccuuuuuccaaggauaauucuauccgccugagcgcuggaggcgacaucugggugaccagagagcccuauguuuccugugauccugggaagugcuaccaauucgcccuuggacagggcacaacccuggacaacaaacauucuaaugauacaauucacgaccggaccccgcaucgcacgcuccugaugaacgaacugggggugcccuuucaccucggaacaagacaggucuguaucgccuggagcuccagcucuugccaugauggcaaggcuuggcugcacguguguguuaccggcuaugacaaaaaugccacagcuuccuucauuuacgaugggcggcuuguggacagcaucggaucuuggucccagaacauucugcgcacccaagagagcgaaugcgucuguaucaauggaaccugcacaguggugaugacggaugggucugccuccggcagagcggacaccaagauccucuuuauugaggagggcaaaaucguccacauuagcccucuguccgggucugcccagcauguugaagagugcagcuguuauccccgguacccuggagugcgcugcaucuguagagauaacuggaagggcuccaaucggcccguggucgacauuaacgugaaggacuacagcaucgauucuuccuauguuugcagcggccuugugggggacacaccgcgcaacaaugauagaucuagcaacuccuacugucggaauccuaacaaugaaaaaggaaaccacggcgucaaggggugggcuuucgacgauggaaaugacguguggaugggccgcaccaucucugaggauagcagauccggguaugaaacauuuaaaguuauuggaggcuggagcacccccaacucuaagcugcagaucaauagacaggugauugucgacuccgauaaccggagcggcuacucugggaucuucuccguggagggaaaaagcugcauuaaucgcuguuuuuaugucgagcucauccggggcagagaacaagagacgcgcgugugguggacauccaacucuauuguuguguucugcgggaccagcggaaccuacggcacaggguccuggccugacggcgccaauaucaaccugaugcccaucuga

SEQ ID NO: 206775 - RNA, 1410 nt, Artificial Sequence
  derived and/or modified CDS sequence (opt5) from neuraminidase__InfluenzaA__ABC67579
augaaccccaaucagaagaucauuaccaucggcagcgugucccugacaauugccacgaucugcuuccucaugcaaauugcuauccuggucaccacaguuacccuucacuuuaaacaguacgaguguaacucuccuccgaauaaccaggugaugcugugcgaacccacaaucauugagagaaauaucaccgaaauuguguaucucacaaacaccacgaucgagaaggaaauuuguccuaaacccgccgaguaccggaauuggagcaagccucagugcaaaaucaccggguucgcgcccuuuuccaaggacaacucuauucgccugagcgcuggaggcgauaucugggucacaagagagccuuauguguccugugacccggauaagugcuaccaauucgcccuugggcagggaaccacacugaauaacggccauucuaaugacaccguucacgaucggacgcccuaucgcacacuccugaugaacgaacugggggugccuuuucaucucggaaccaaacaggucuguaucgccuggagcuccagcucuugccacgacggcaaggcuuggcugcauguguguguuacaggccacgaugagaaugccaccgcuuccuucauuuacgacgggagacuuguggauagcaucggaucuugguccaaaaagauucugcggacccaggaaagcgagugcgucuguaucaacggcacaugcacgguggugaugaccgacgggucugccuccggacgcgcggauacaaaaauucucuuuaucgaggaaggcaagaucguccacauuagccaacuguccgggucugcccagcauguugaggaaugcagcuguuaucccagauacccuggagugcggugcgugugucgcgacaauuggaagggcuccaacagacccaucgucgauauuaacgugaaagaccacagcaucguuucuuccuacgugugcagcggccuugucggggacaccccgcggaagaaugauucuagcuccucuagccauugucugaacccuaauaacgaggaaggaggccacggggugaaaggaugggcuuucgacgauggcaaugacguuuggauggggcgcacaauuuccgagaagcucagaagcggauaugagaccuuuaaagugaucgaaggcuggucuaagcccaacuccaaacugcagaucaaucggcaggucauuguggaucgcggcaacagaagcggguacucuggaaucuucuccgucgagggcaagagcugcauuaaucgguguuuuuauguggaacugaucagagggcgcaagcaagagacggaaguuugguggacauccaacucuauuguggucuucugcggaaccagcggcaccuacgggacaggcuccuggccugacggagccgauaucaaucucaugcccauuuga

SEQ ID NO: 206776 - RNA, 1410 nt, Artificial Sequence; identical to SEQ ID NO: 206399
  derived and/or modified CDS sequence (opt5) from neuraminidase__InfluenzaA__ABC67590

SEQ ID NO: 206777 - RNA, 1410 nt, Artificial Sequence; identical to SEQ ID NO: 206399
  derived and/or modified CDS sequence (opt5) from neuraminidase__InfluenzaA__ABC67601

SEQ ID NO: 206778 - RNA, 1410 nt, Artificial Sequence; identical to SEQ ID NO: 206238
  derived and/or modified CDS sequence (opt5) from neuraminidase__InfluenzaA__ABC67612

SEQ ID NO: 206779 - RNA, 1410 nt, Artificial Sequence; identical to SEQ ID NO: 206238
  derived and/or modified CDS sequence (opt5) from neuraminidase__InfluenzaA__ABC67623

SEQ ID NO: 206780 - RNA, 1410 nt, Artificial Sequence
  derived and/or modified CDS sequence (opt5) from neuraminidase__InfluenzaA__ABC67634
augaaccccaaucagaagaucauuaccaucggcagcgugucccugacaauugccacgaucugcuuccucaugcaaauugcuauccuggucaccacaguuacccuucacuuuaaacaguacgaguguaacccuccgcccaauaaccaggugaugcugugcgaaccuacaaucauugagagaaauaucaccgaaauuguguaucucacaaacaccacgaucgagaaggaaauuugucccaaacuggccgaguaccggaauuggucuaagccucagugcaacaucaccggguucgcgcccuuuagcaaagacaauuccauucgccuuucugcuggaggcgauaucugggucacaagagagccuuaugugagcugugacccggauaagugcuaccaauucgcccuggggcagggaaccacacucaacaauggccauuccaacgacaccguucacgaucggacgcccuaucgcacacugcugaugaaugaacucggggugccuuuucaucugggaaccagacaggucuguaucgccuggucuagcuccagcugccacgacggcaaggcuuggcuucauguguguguuacaggcgaugacgagaacgccaccgcuucuuucauuuacaaugggcggcugguggauuccaucggaagcuggucuaaaaagauucuccgcacccaggaauccgagugcgucuguaucaacggcacaugcacgguggugaugaccgacgggagcgccucuggaaaagcggauacaaagauucuguuuaucgaggaaggcaaaaucguccacauuuccacccuuagcggguccgcccaacacguugaggaaugcucuuguuaucccagauacccuggagugcggugcgugugucgcgacaacuggaagggcagcaauagacccaucgucgauauuaacgugaaggacuacuccaucguuagcucuuaugugugcuccggccuggucggggacacaccgcggaaaaaugauagcuucucuagcucccauugucucgacccuaacaaugaggaaggaggccacggggugaagggaugggcuuuugaugacggcaacgauguuuggauggggcgcaccauuucugagaaacugagaagcggauacgagacguucaaggugaucgaaggcugguccaaacccaauagcaagcugcagacaaaccggcaggucaucguggagcgcggcaauagaucuggguauuccggaauuuuuagcgucgaaggcaaaucuugcaucaaccgguguuucuacguggagcucauuagagggcgcaaggaagagaccgagguuugguggaccuccaauagcaucguggucuuuugcggaacauccggcaccuaugggacaggcucuuggccugacggagccgauauuaaccugaugcccaucuga

SEQ ID NO: 206781 - RNA, 1410 nt, Artificial Sequence; identical to SEQ ID NO: 206238
  derived and/or modified CDS sequence (opt5) from neuraminidase__InfluenzaA__ABC67645

SEQ ID NO: 206782 - RNA, 1410 nt, Artificial Sequence; identical to SEQ ID NO: 206238
  derived and/or modified CDS sequence (opt5) from neuraminidase__InfluenzaA__ABC67656

SEQ ID NO: 206783 - RNA, 1410 nt, Artificial Sequence
  derived and/or modified CDS sequence (opt5) from neuraminidase__InfluenzaA__ABC67700
augaaccccaaucagaagaucauuaccaucggcagcgugucccugacaauuucuacgaucugcuucuuuaugcaaauugccauccucaucaccacagucacccugcacuucaaacaguacgaguuuaacagcccuccgaauaaccagguuaugcuuugugaacccacaauuaucgagagaaauauuaccgaaaucguguaucugacaaacaccacgauugagaaggaaaucugcccuaaacucgcugaguaccggaauugguccaagccccaguguaacauuaccggguucgccccuuuuucuaaagacaauagcauccgccuguccgcgggaggcgauaucugggugacaagagagcccuaugucucuugcgacccugauaaguguuaccaauucgcucuugggcagggaaccacacugaacaaugugcauagcaacgacaccguucacgaucggacgccguaucgcacacuccugaugaaugaacugggcgugcccuuucaucucgggaccaagcaggucugcauugccugguccucuagcuccugucacgacggaaaagccuggcugcaugugugcguuacaggcgaugacaagaacgcuaccgccagcuucaucuacaauggcagacuuguggauucuauugucuccuggagcaaagagauccugcggacccaggaaucugagugugugugcauuaacgggacauguacgguggucaugaccgacggauccgcuagcggcaaggccgauacaaaaauccucuuuaucgaggaagggaagauuguucacaccuccacacugucuggaagcgcgcaacacguggaggaaugcuccugcuauccucgcuaccccggcgugagaugugucugccgggacaacuggaaggggagcaaucgcccuaucguggauauuaacaucaaagacuacucuauuguuuccagcuauguguguucuggacuugucggcgacacccccagaaagaaugauagcuccucuagcucccauugccuggacccgaacaaugaggaaggcgggcacggagugaaaggcugggccuucgaugacgggaacgauguuuggaugggacggacgaucagcgagaagcuccgcucuggcuacgagacauuuaaagugaucgaagggugguccaauagcaacucuaagcugcagauuaauagacaggucaucguggaccggggaaaccgcuccggcuauagcggcauuuucuccgucgaggggaaaucuuguaucaauagaugcuuuuacguggaacugauucggggaagaaaggaggaaaccgagguucucuggaccagcaacuccaucguggucuucuguggcacaucugggaccuauggaacaggcagcuggccugauggggcugacauuaaucugaugcccaucuga

SEQ ID NO: 206784 - RNA, 1410 nt, Artificial Sequence
  derived and/or modified CDS sequence (opt5) from neuraminidase__InfluenzaA__ABC67711
augaaccccaaucagaagaucauuaccaucggcagcgugucccugacaauuucuacgaucugcuucuuuaugcaaauugccauccucaucaccacagucacccugcacuucaaacaguacgaguuuaacagcccuccgaauaaccagguuaugcuuugugaacccacaauuaucgagagaaauauuaccgaaaucguguaucugacaaacaccacgauugagaaggaaaucugcccuaaacucgcugaguaccggaauugguccaagccccaguguaacauuaccggguucgccccuuuuucuaaagacaauagcauccgccuguccgcgggaggcgauaucugggugacaagagagcccuaugucucuugcgacccugauaaguguuaccaauucgcucuugggcagggaaccacacugaacaaugugcauagcaacgacaccguucacgaucggacgccguaucgcacacuccugaugaaugaacugggcgugcccuuucaucucgggaccaagcaggucugcauugccugguccucuagcuccugucacgacggaaaagccuggcugcaugugugcguuacaggcgaugacaagaacgcuaccgccagcuucaucuacaauggcagacuuguggauucuauugucuccuggagcaaagagauccugcggacccaggaaucugagugugugugcauuaacgggacauguacgguggucaugaccgacggauccgcuagcggcaaggccgauacaaaaauccucuuuaucgaggaagggaagauuguucacaccuccacacugucuggaagcgcgcaacacguggaggaaugcuccugcuauccucgcuaccccggcgugagaugugucugccgggacaacuggaaggggagcaaucgcccuaucguggauauuaacaucaaagacuacucuauuguuuccagcuauguguguucuggacuugucggcgacacccccagaaagaaugauagcuccucuagcucccauugccuggacccgaacaaugaggaaggcgggcacggagugaaaggcugggccuucgaugacgggaacgauguuuggaugggacggacgaucagcgagaagcuccgcucuggcuacgagacauuuaaagugaucgaagggugguccaauccuaacagcaagcugcagauuaauagacaggucaucguggaccggggaaaccgcucuggcuauuccggcauuuucagcgucgaggggaaauccuguaucaauagaugcuuuuacguggaacugauucggggaagaaaggaggaaaccgagguucucuggaccucuaacagcaucguggucuucuguggcacauccgggaccuauggaacaggcucuuggcccgauggggcugacauuaaucugaugccuaucuga

SEQ ID NO: 206785 - RNA, 1410 nt, Artificial Sequence
  derived and/or modified CDS sequence (opt5) from neuraminidase__InfluenzaA__ABC67736
augaaccccaaucagaagaucauuaccaucggcagcgugucccugacaauuucuacgaucugcuucuuuaugcaaauugccauccucaucaccacagucacccugcacuucaaacaguacgaguuuaacagcccuccgaauaaccagguuaugcuuugugaacccacaauuaucgagagaaauauuaccgaaaucguguaucugacaaacaccacgauugagaaggaaaucugcccuaaacucgcugaguaccggaauugguccaagccccaguguaacauuaccggguucgccccuuuuucuaaagacaauagcauccgccuguccgcgggaggcgauaucugggugacaagagagcccuaugucucuugcgacccugauaaguguuaccaauucgcucuugggcagggaaccacacugaacaaugugcauagcaacgacaccguucacgaucggacgccguaucgcacacuccugaugaaugaacugggcgugcccuuucaucucgggaccaagcaggucugcguggccugguccucuagcuccugucacgacggaaaagccuggcugcauguuugcgugacaggcgaugacaagaacgcuaccgccagcuucauuuacaauggcagacuugucgauucuaucguguccuggagcaaagagauucugcggacccaggaaucugagugugugugcaucaacgggacauguacggucguuaugaccgacggauccgcuagcggcaaggccgauacaaaaauucucuuuaucgaggaagggaagaucgugcacaccuccacacugucuggaagcgcgcaacacguggaggaaugcuccugcuauccucgcuaccccggcgucagaugugugugccgggacaacuggaaggggagcaaucgcccuauuguugauaucaacauuaaagacuacucuaucguguccagcuaugucuguucuggacuugugggcgacacccccagaaagaaugauagcuccucuagcucccauugccuggacccgaacaaugaggaaggcgggcacggaguuaaaggcugggccuucgaugacgggaacgauguguggaugggacggacgauuagcgagaagcuccgcucuggcuacgagacauuuaaagucaucgaagggugguccaauccuaacagcaagcugcagaucaauagacaggugauugucgaccggggaaaccgcucuggcuauuccggcaucuucagcguggaggggaaauccuguauuaauagaugcuuuuacguugaacugauccggggaagaaaggaggaaaccgaggugcucuggaccucuaacagcauugucguguucuguggcacauccgggaccuauggaacaggcucuuggcccgauggggcugacaucaaucugaugccuauuuga

SEQ ID NO: 206786 - RNA, 1410 nt, Artificial Sequence
  derived and/or modified CDS sequence (opt5) from neuraminidase__InfluenzaA__ABC67809
augaaccccaaucagaagaucauuaccaucggcagcgugucccugacaauuucuacgaucugcuucuuuaugcaaauugccauccucaucaccacagucacccugcacuucaaacaguacgaguuuaacagcccuccgaauaaccagguuaugcuuugugaacccacaauuaucgagagaaauauuaccgaaaucguguaucugacaaacaccacgauugagaaggaaaucugcccuaaacucgcugaguaccggaauugguccaagccccagugugacauuaccggguucgccccuuuuucuaaagauaacagcauccgccuguccgcgggaggcgacaucugggugacaagagagcccuaugucucuugcgauccugacaaguguuaccaauucgcucuugggcagggaaccacacugaauaacgugcauagcaaugauaccguucacgaccggacgccguaucgcacacuccugaugaacgaacugggcgugcccuuucaucucgggaccaagcaggucugcauugccugguccucuagcuccugucacgauggaaaagccuggcugcaugugugcguuacaggcgacgauaagaaugcuaccgccagcuucaucuacaacggcagacuuguggacucuauugucuccuggagcaaaaagauccugcggacccaggagucugaaugugugugcauuaaugggacauguacgguggucaugaccgauggauccgcuagcggcaaagccgacacaaagauccucuuuaucgaggaggggaagauuguucacaccuccacacugucuggaagcgcgcaacacguggaagagugcuccugcuauccucgcuaccccggcgugagaugugucugccgggauaacuggaaagggagcaaccgcccuaucguggacauuaauaucaaggacuacucuauuguuuccagcuauguguguucuggacuugucggcgauacccccagaaagaacgacagcuccucuagcucccauugccuggauccgaauaacgaagagggcgggcacggagugaaaggcugggccuucgacgaugggaaugacguuuggaugggacggacgaucagcgaaaaacuccgcucuggcuacgagacauuuaaggugaucgaggggugguccaacccuaauagcaaacugcagauuaacagacaggucaucguggaucggggaaaucgcucuggcuauuccggcauuuucagcgucgaagggaaguccuguaucaacagaugcuuuuacguggagcugauucggggaagaaaggaagagaccgaaguucucuggaccucuaauagcaucguggucuucuguggcacauccgggaccuauggaacaggcucuuggcccgacggggcugauauuaaccugaugccuaucuga

SEQ ID NO: 206787 - RNA, 1410 nt, Artificial Sequence; identical to SEQ ID NO: 206663
  derived and/or modified CDS sequence (opt5) from neuraminidase__InfluenzaA__ABC67820

SEQ ID NO: 206788 - RNA, 1410 nt, Artificial Sequence; identical to SEQ ID NO: 206642
  derived and/or modified CDS sequence (opt5) from neuraminidase__InfluenzaA__ABC67842

SEQ ID NO: 206789 - RNA, 1410 nt, Artificial Sequence; identical to SEQ ID NO: 206238
  derived and/or modified CDS sequence (opt5) from neuraminidase__InfluenzaA__ABC67853

SEQ ID NO: 206790 - RNA, 1410 nt, Artificial Sequence; identical to SEQ ID NO: 206642
  derived and/or modified CDS sequence (opt5) from neuraminidase__InfluenzaA__ABC67864

SEQ ID NO: 206791 - RNA, 1410 nt, Artificial Sequence; identical to SEQ ID NO: 206761
  derived and/or modified CDS sequence (opt5) from neuraminidase__InfluenzaA__ABC67886

SEQ ID NO: 206792 - RNA, 1410 nt, Artificial Sequence; identical to SEQ ID NO: 206238
  derived and/or modified CDS sequence (opt5) from neuraminidase__InfluenzaA__ABC67897

SEQ ID NO: 206793 - RNA, 1410 nt, Artificial Sequence; identical to SEQ ID NO: 206238
  derived and/or modified CDS sequence (opt5) from neuraminidase__InfluenzaA__ABC67970

SEQ ID NO: 206794 - RNA, 1410 nt, Artificial Sequence
  derived and/or modified CDS sequence (opt5) from neuraminidase__InfluenzaA__ABC67981
augaaccccaaucagaagaucauuaccaucggcagcgugucccugacaauugccacgaucugcuuccucaugcaaauugcuauccuggucaccacaguuacccuucacuuuaaacaguacgaguguaacucuccuccgaauaaccaggugaugcugugcgaacccacaaucauugagagaaauaucaccgaaauuguguaucucacaaacaccacgaucgagaaggaaauuuguccuaaacuggccgaguaccggaauuggagcaagccccagugcaacaucaccggguucgcgccuuuuuccaaagacaauucuauucgccuuagcgcuggaggcgauaucugggucacaagagagcccuauguguccugugacccugauaagugcuaccaauucgcccuggggcagggaaccacacucaacaauggccauucuaacgacaccguucacgaucggacgccguaucgcacacugcugaugaaugaacucggggugcccuuucaucugggaaccagacaggucuguaucgccuggagcuccagcucuugccacgacggcaaggcuuggcuucauguguguguuacaggcgaugacgagaacgccaccgcuuccuucauuuacaaugggcggcugguggauagcaucggaucuugguccaaaaagauucuccgcacccaggaaagcgagugcgucuguaucaacggcacaugcacgguggugaugaccgacgggucugccuccggaaaagcggauacaaagauucuguuuaucgaggaaggcaaaaucguccacauuagcacccuuuccgggucugcccaacacguugaggaaugcagcuguuauccucaguaccccggagugagaugcgugugucgggacaacuggaagggcuccaaucgcccuaucgucgauauuaacgugaaggacuacagcaucguuucuuccuaugugugcagcggccuggucggggacacaccccggaaaaaugauucuuucagcuccucucauugucucgacccgaacaaugaggaaggaggccacggggugaagggaugggcuuuugaugacggcaacgauguuuggauggggagaaccauuagcgagaaacugcgcuccggauacgagacguucaaggugaucgaaggcuggagcaaaccuaauucuaagcugcagacaaacagacaggucaucguggagcggggcaaucgcuccggguauagcggaaucuuuucugucgaaggcaaauccugcauuaacagauguuucuacguggagcucauucgggggagaaaggaagagaccgagguuugguggaccagcaauuccaucguggucuuuugcggaacaucuggcaccuaugggacaggcagcuggcccgacggagccgauauuaaccugaugccuaucuga

SEQ ID NO: 206795 - RNA, 1410 nt, Artificial Sequence
  derived and/or modified CDS sequence (opt5) from neuraminidase__InfluenzaA__ABC67992
augaaccccaaucagaagaucauuaccaucggcagcgugucccugacaauugccacgaucugcuuccucaugcaaauugcuauccuggucaccacaguuacccuucacuuuaaacaguacgaguguaacucuccuccgaauaaccaggugaugcugugcgaacccacaaucauugagagaaauaucaccgaaauuguguaucucacaaacaccacgaucgagaaggaaauuuguccuaaacuggccgaguaccggaauuggagcaagccccagugcaacaucaccggguucgcgccuuuuuccaaagacaauucuauucgccuuagcgcuggaggcgauaucugggucacaagagagcccuauguguccugugacccugauaagugcuaccaauucgcccuggggcagggaaccacacucaacaauggccauucuaacgacaccguucacgaucggacgccguaucgcacacugcugaugaaugaacucggggugcccuuucaucugggaaccagacaggucuguaucgccuggagcuccagcucuugccacgacggcaaggcuuggcuucauguguguguuacaggcgaugacgagaacgccaccgcuuccuucauuuacaaugggcggcugguggauagcaucggaucuugguccaaaaagauucuccgcacccaggaaagcgagugcgucuguaucaacggcacaugcacgguggugaugaccgacgggucugccuccggaaaagcggauacaaagauucuguuuaucgaggaaggcaaaaucguccacauuagcacccuuuccgggucugcccaacacguugaggaaugcagcuguuauccuagauaccccggagugcggugcgugugucgcgacaacuggaagggcuccaauagaccuaucgucgauauuaacgugaaggacuacagcaucguuucuuccuaugugugcagcggccuggucggggacacaccccggaaaaauaacucuuucagcuccucucauugucucgauccgaauaacgaggaaggaggccacggggugaagggaugggcuuuugacgauggcaaugacguuuggauggggcgcaccauuagcgagaaacugagauccggauacgagacguucaaggugaucgaaggcuggagcaaaccuaacucuaagcugcagacaaaucggcaggucaucguggagcgcggcaacagauccggguauagcggaaucuuuucugucgaaggcaaauccugcauuaaucgguguuucuacguggagcucauuagagggcgcaaggaagagaucgagguuugguggaccagcaacuccauuguggucuuuugcggaaccucuggcacauaugggaccggcagcuggcccgauggagccgacaucaaucugaugccuauuuga

SEQ ID NO: 206796 - RNA, 1410 nt, Artificial Sequence; identical to SEQ ID NO: 206761
  derived and/or modified CDS sequence (opt5) from neuraminidase__InfluenzaA__ABC68003

SEQ ID NO: 206797 - RNA, 1410 nt, Artificial Sequence
  derived and/or modified CDS sequence (opt5) from neuraminidase__InfluenzaA__ABC68052
augaaccccaaucagaagaucauuaccaucggcagcgugucccugacaauugccacgaucugcuuccucaugcaaauugcuauccuggucaccacaguuacccuucacuuuaaacaguacgaguguaacucuccuccgaauaaccaggugaugcugugcgaacccacaaucauugagagaaauaucaccgaaauuguguaucucacaaacaccacgaucgagaaggaaauuuguccuaaacuggccgaguaccggaauuggagcaagccccagugcaacaucaccggguucgcgccuuuuuccaaagacaauucuauucgccuuagcgcuggaggcgauaucugggucacaagagagcccuauguguccugugacccugauaagugcuaccaauucgcccuggggcagggaaccacacucaacaauggccauucuaacgacaccguucacgaucggacgccguaucgcacacugcugaugaaugaacucggggugcccuuucaucugggaaccagacaggucuguaucgccuggagcuccagcucuugccacgacggcaaggcuuggcuucauguguguguuacaggcgaugacgagaacgccaccgcuuccuucauuuacaaugggcggcugguggauagcaucggaucuugguccaaaaagauucuccgcacccaggaaagcgagugcgucuguaucaacggcacaugcacgguggugaugauugacgggucugccuccggaaaagcggauaccaagauccuguuuaucgaggaaggcaaaauuguccacaucagcacacuuuccgggucugcccaacacguugaggaaugcagcuguuauccuagauaccccggagugcggugcgugugucgcgacaacuggaagggcuccaauagaccuauugucgauaucaacgugaaggacuacagcauuguuucuuccuaugugugcagcggccuggucggggacacaccccggaaaaaugauucuuucagcuccucucauugucucgacccgaacaaugaggaaggaggccacggggugaagggaugggcuuuugaugacggcaacgauguuuggauggggcgcaccaucagcgagaaacugagauccggauacgagaccuucaaggugaucgaaggcuggagcaaaccuaauucuaagcugcagacgaaccggcaggucauuguggagcgcggcaauagauccggguauagcggaaucuuuucugucgaaggcaaauccugcauuaaccgguguuucuacguggagcucaucagagggcgcaaggaagagacagagguuugguggaccagcaauuccauuguggucuuuugcggaaccucuggcacauaugggaccggcagcuggcccgacggagccgauaucaaccugaugccuauuuga

SEQ ID NO: 206798 - RNA, 1410 nt, Artificial Sequence; identical to SEQ ID NO: 206238
  derived and/or modified CDS sequence (opt5) from neuraminidase__InfluenzaA__ABC68063

SEQ ID NO: 206799 - RNA, 1410 nt, Artificial Sequence; identical to SEQ ID NO: 206238
  derived and/or modified CDS sequence (opt5) from neuraminidase__InfluenzaA__ABC68074

SEQ ID NO: 206800 - RNA, 1410 nt, Artificial Sequence; identical to SEQ ID NO: 206784
  derived and/or modified CDS sequence (opt5) from neuraminidase__InfluenzaA__ABC68085

SEQ ID NO: 206801 - RNA, 1410 nt, Artificial Sequence
  derived and/or modified CDS sequence (opt5) from neuraminidase__InfluenzaA__ABC68096
augaaccccaaucagaagaucauuaccaucggcagcgugucccugacaauugccacgaucugcuuccucaugcaaauugcuauccuggucaccacaguuacccuucacuuuaaacaguacgaguguaacucuccuccgaauaaccaggugaugcugugcgaacccacaaucauugagagaaauaucaccgaaauuguguaucucacaaacaccacgaucgagaaggaaauuuguccuaaacuggccgaguaccggaauuggagcaagccccagugcaacaucaccggguucgcgccuuuuuccaaagacaauucuauucgccuuagcgcuggaggcgauaucugggucacaagagagcccuauguguccugugacccugauaagugcuaccaauucgcccuggggcagggaaccacacucaacaauggccauucuaacgacaccguucacgaucggacgccguaucgcacacugcugaugaaugaacucggggugcccuuucaucugggaaccagacaggucuguaucgccuggagcuccagcucuugccacgacggcaaggcuuggcuucauguguguguuacaggcgaugacgagaacgccaccgcuuccuucauuuacaaugggcggcugguggauagcaucggaucuugguccaaaaagauucuccgcacccaggaaagcgagugcgucuguaucaacggcacaugcacgguggugaugaccgacgggucugccuccggaaaagcggauacaaagauucuguuuaucgaggaaggcaaaaucguccacauuagcacccuuuccgggucugcccaacacguugaggaaugcagcuguuauccuagauaccccggagugcggugcgugugucgcgacaacuggaagggcuccaauagaccuaucgucgauauuaacgugaaggacuacagcaucguuucuuccuaugugugcagcggccuggucggggacacaccccggaaaaaugauucuuucagcuccucucauugucucgacccgaacaaugaggaaggaggccacggggugaagggaugggcuuuugaugacggcaacgauguuuggauggggcgcaccauuagcgagaaacugagauccggauacgagacguucaaggugaucgaaggcuggagcaaaccuaauucuaagcugcauaucaaccggcaggucauuguggagcgcggcaauagauccggguauagcggaaucuuuucugucgaaggcaaauccugcauuaaccgguguuucuacguggagcucaucagagggcgcaaggaagagacagagguuugguggaccagcaauuccauuguggucuuuugcggaaccucuggcacauaugggaccggcagcuggcccgacggagccgauaucaaccugaugccuauuuga

SEQ ID NO: 206802 - RNA, 1410 nt, Artificial Sequence
  derived and/or modified CDS sequence (opt5) from neuraminidase__InfluenzaA__ABC68225
augaaccccaaucagaagaucauuaccaucggcagcgugucccugacaauugccacgaucugcuuccucaugcaaauugcuauccuggucaccacaguuacccuucacuuuaaacaguacgaguguaacucuccuccgaauaaccaggugaugcugugcgaacccacaaucauugagagaaauaucaccgaaauuguguaucucacaaacaccacgaucgagaaggaaauuuguccuaaacuggccgaguaccggaauuggagcaagccccagugcaacaucaccggguucgcgccuuuuuccaaagacaauucuauucgccuuagcgcuggaggcgauaucugggucacaagagagcccuauguguccugugacccugauaagugcuaccaauucgcccuggggcagggaaccacacucaacaauggccauucuaacgacaccguucacgaucggacgccguaucgcacacugcugaugaaugaacucggggugcccuuucaucugggaaccaagcaggucuguaucgccuggagcuccagcucuugccacgacggcaaagccuggcuucauguguguguuacaggcgaugacgagaacgcuaccgcuuccuucauuuacaaugggagacugguggauagcaucggaucuugguccaagaaaauucuccggacccaggaaagcgagugcgucuguaucaacggcacaugcacgguggugaugaccgacgggucugccuccggaaaggcggauacaaaaauucuguuuaucgaggaaggcaagaucguccacaccagcucccuuucugggagcgcccaacacguugaggaaugcuccuguuauccucgcuaccccggagugagaugcgugugucgggacaacuggaagggcagcaaucgcccuauugucgauaucaacgugaaagacuacucuauuguuuccagcuaugugugcucuggccuggucggggacacacccagaaagaaugauagcuccucuagcucccauugucucgacccgaacaaugaggaaggaggccacggggugaaaggaugggcuuucgaugacggcaacgauguuuggauggggcggaccaucagcgagaagcugcgcucuggauacgagacguuuaaagugauugaaggcugguccaagccuaauagcaaacugcagaucaacagacaggucaucguggaccggggcaaucgcucuggguauuccggaauuuucagcgucgaguccaagucuugcaucaacagauguuuuuacguggaacucauucggggcagaaagcaggagacagaaguucuguggaccagcaauuccaucguggucuucugcgggaccucuggaacauauggcaccgggagcuggcccgauggcgccgacauuaaccuuaugccuaucuga

SEQ ID NO: 206803 - RNA, 1410 nt, Artificial Sequence; identical to SEQ ID NO: 206591
  derived and/or modified CDS sequence (opt5) from neuraminidase__InfluenzaA__ABC68236

SEQ ID NO: 206804 - RNA, 1350 nt, Artificial Sequence
  derived and/or modified CDS sequence (opt5) from neuraminidase__InfluenzaA__ABC72646
augaaccccaauaagaaaaucauuaccaucggcagcauuugcauggugacagggauggucucccugaugcuccagaucggaaaccugauuucuaucuggguuagccacuccauccauacgggcaaucaacagaaggccgagccuauuucuaacaccaauuuccuuacagaaaaagcuguggccagcgugaagcuggcggggaacuccucucucuguccgaucaauggaugggcugucuacagcaaagacaacuccauuagaaucggcagcaagggggauguguuuguuauucgggagcccuucaucucuugcucccaccuggaaugucgcaccuuuuuccuuacacagggaagccugcucaaugacaagcauucuaacggcaccgugaaagauagauccccucaccggacacugaugagcugccccgucggcgaggccccuucucccuauaauucccgcuuugaaagcguggccugguccgcuucugccugucaugacgggaccagcuggcugacgauuggaaucuccggcccugauagcggggcuguugccgugcucaaguacaacggaaucauuaccgacacaaucaaaucuuggagaaauaacauucugcggacccaggaguccgagugcgcgugugucaauggcagcugcuucacagugaugaccgaugggccgucuaacggacaagccagccacaagaucuuuaaaauggacaagggcaagguggucaaauccguugaacuugaugcucccaacuaucacuacgaggaauguucuugcuauccugacgccggcgagauuacgugugugugccgcgauaauuggcaugggagcaacagacccuggguguccuucaaucagaaccuggaguaccagaucggauauaucugcagcggcgucuuuggggacacaccucggcccaaugauggaaccggcucuugugggccgguguccagcaacggaacauacggcguuaagggcuucucuuuuaaauacgggaauggaguguggauuggccgcaccaaguccaccaacagcagauccggguucgaaaugaucugggacccuaauggauggacagagacggacucuagcuuuuccgucaaacaggauauuguggcuaucaccgacuggucuggcuauagcggguccuucguucaacaccccgaacucacaggccuggauugcauucggccuuguuucuggguggagcuuauccgcggaagacccaaggaaagcaccaucuggacaucuggcuccagcauuucuuuuugcggggucaacuccgacaccgugggauggagcuggcccgauggcgccgagcugccuuucacgaucgacaaauga

SEQ ID NO: 206805 - RNA, 1410 nt, Artificial Sequence; identical to SEQ ID NO: 206167
  derived and/or modified CDS sequence (opt5) from neuraminidase__InfluenzaA__ABC84392

SEQ ID NO: 206806 - RNA, 1410 nt, Artificial Sequence; identical to SEQ ID NO: 206581
  derived and/or modified CDS sequence (opt5) from neuraminidase__InfluenzaA__ABC84403

SEQ ID NO: 206807 - RNA, 1410 nt, Artificial Sequence; identical to SEQ ID NO: 206586
  derived and/or modified CDS sequence (opt5) from neuraminidase__InfluenzaA__ABC84414

SEQ ID NO: 206808 - RNA, 1410 nt, Artificial Sequence
  derived and/or modified CDS sequence (opt5) from neuraminidase__InfluenzaA__ABC84425
augaaccccaaucagaagaucauuaccaucggcagcgugucccugacaauuucuacgaucugcuucuuuaugcaaauugccauccucaucaccacagucacccugcacuucaaacaguacgaguuuaacagcccuccgaauaaccagguuaugcuuugugaacccacaauuaucgagagaaauauuaccgaaaucguguaucugacaaacaccacgauugagaaggaaaucugcccuaaacucgcugaguaccggaauugguccaagccccagugugacauuaccggguucgccccuuuuucuaaagauaacagcauccgccuguccgcgggaggcgacaucugggugacaagagagcccuaugucucuugcgauccugacaaguguuaccaauucgcucuugggcagggaaccacacugaauaacgugcauagcaaugauaccguucacgaccggacgccguaucgcacacuccugaugaacgaacugggcgugcccuuucaucucgggaccaagcaggucugcauugccugguccucuagcuccugucacgauggaaaagccuggcugcaugugugcguuacaggcgacgauaagaaugcuaccgccagcuucaucuacaacggcagacuuguggacucuauugucuccuggagcaaagagauccugcggacccaggaaucugagugugugugcauuaaugggacauguacgguggucaugaccgauggauccgcuagcggcaaggccgacacaaaaauccucuuuaucgaggaagggaagauuguucacaccuccacacugucuggaagcgcgcaacacguggaggaaugcuccugcuauccucgcuaccccggcgugagaugugucugccgggauaacuggaaggggagcaaccgcccuaucguggacauuaauaucaaagacuacucuauuguuuccagcuauguguguucuggacuugucggcgauacccccagaaagaacgacagcuccucuagcucccauugccuggauccgaauaacgaggaaggcgggcacggagugaaaggcugggccuucgacgaugggaaugacguuuggaugggacggacgaucagcgagaagcuccgcucuggcuacgagacauuuaaagugaucgaagggugguccaacccuaauagcaagcugcagauuaacagacaggucaucguggaucggggaaaucgcucuggcuauuccggcauuuucagcgucgaggggaaaaacuguaucaauagaugcuuuuacguggaacugauucggggaagaaaggaggaaaccgagguucucuggaccuccaacucuaucguggucuucuguggcacaagcgggaccuauggaacaggcuccuggcccgacggggcugauauuaaucugaugccuaucuga

SEQ ID NO: 206809 - RNA, 1410 nt, Artificial Sequence; identical to SEQ ID NO: 206399
  derived and/or modified CDS sequence (opt5) from neuraminidase__InfluenzaA__ABC84436

SEQ ID NO: 206810 - RNA, 1410 nt, Artificial Sequence
  derived and/or modified CDS sequence (opt5) from neuraminidase__InfluenzaA__ABC84447
augaaccccaaucagaagaucauuaccaucggcagcgugucccugacaauugccacgaucugcuuccucaugcaaauugcuauccuggucaccacaguuacccuucacuuuaaacaguacgaguguaacucuccuccgaauaaccaggugaugcugugcgaacccacaaucauugagagaaauaucaccgaaauugugcaucucacaaacaccacgaucgagaaggaaauuuguccuaaacuggccgaguaucggaauuggagcaagccccagugcaacaucaccggguucgcgccuuuuuccaaagacaauucuauucgccuuagcgcuggaggcgauaucugggucacaagagagcccuacguguccugugacccugauaagugcuaucaauucgcccuggggcagggaaccacacucaacaauggccacucuaacgacaccguucaugaucggacgccguaccgcacacugcugaugaaugaacucggggugcccuuucaccugggaaccagacaggucuguaucgccuggagcuccagcucuugccaugacggcaaggcuuggcuucacguguguguuacaggcgaugacgagaacgccaccgcuuccuucauuuauaaugggcggcugguggauagcaucggaucuugguccaaaaagauucuccgcacccaggaaagcgagugcgucuguaucaacggcacaugcacgguggugaugaccgacgggucugccuccggaaaagcggauacaaagauucuguuuaucgaggaaggcaaaaucguccacauuagcacccuuuccgggucugcccaacauguugaggaaugcagcuguuacccuagauaucccggagugcggugcgugugucgcgacaacuggaagggcuccaauagaccuaucgucgauauuaacgugaaggacuacagcaucguuucuuccuacgugugcagcggccuggucggggacacaccccggaaaaaugauucuuucagcuccucucacugucucgacccgaacaaugaggaaggaggccauggggugaagggaugggcuuuugaugacggcaacgauguuuggauggggcgcaccauuagcgagaaacugagauccggauaugagacguucaaggugaucgaaggcuggagcaaaccuaauucuaagcugcagacaaaccggcaggucaucguggagcgcggcaauagauccggguacagcggaaucuuuucugucgaaggcaaauccugcauuaaccgguguuucuauguggagcucauuagagggcgcaaggaagagaccgagguuugguggaccagcaauuccaucguggucuuuugcggaacaucuggcaccuacgggacaggcagcuggcccgacggagccgauauuaaccugaugccuaucuga

SEQ ID NO: 206811 - RNA, 1410 nt, Artificial Sequence; identical to SEQ ID NO: 206786
  derived and/or modified CDS sequence (opt5) from neuraminidase__InfluenzaA__ABC84501

SEQ ID NO: 206812 - RNA, 1410 nt, Artificial Sequence; identical to SEQ ID NO: 206786
  derived and/or modified CDS sequence (opt5) from neuraminidase__InfluenzaA__ABC84512

SEQ ID NO: 206813 - RNA, 1410 nt, Artificial Sequence
  derived and/or modified CDS sequence (opt5) from neuraminidase__InfluenzaA__ABC84523
augaaccccaaucagaagaucauuaccaucggcagcgugucccugacaauuucuacgaucugcuucuuuaugcaaauugccauccucaucaccacagucacccugcacuucaaacaguacgaguuuaacagcccuccgaauaaccagguuaugcuuugugaacccacaauuaucgagagaaauauuaccgaaaucguguaucugacaaacaccacgauugagaaggaaaucugcccuaaacucgcugaguaccggaauugguccaagccccaguguaacauuaccggguucgccccuuuuucuaaagacaauagcauccgccuguccgcgggaggcgauaucugggugacaagagagcccuaugucucuugcgacccugauaaguguuaccaauucgcucuugggcagggaaccacacugaacaaugugcauagcaacgacaccguucacgaucggacgccguaucgcacacuccugaugaaugaacugggcgugcccuuucaucucgggaccaagcaggucugcauugccugguccucuagcuccugucacgacggaaaagccuggcugcaugugugcguuacaggcgaugacaagaacgcuaccgccagcuucaucuacaauggcagacuugcugauucuauuguguccuggagcaaagagauccugcggacccaggaaucugagugugucugcauuaacgggacauguacgguggugaugaccgacggauccgccagcggcaaggcggauacaaaaauccucuuuaucgaggaagggaagauuguccacaccuccacacugucuggaagcgcccaacacguugaggaaugcuccugcuauccucgcuaccccggcgugagaugugugugccgggacaacuggaaggggagcaaucgcccuaucgucgauauuaacaucaaagacuacucuauuguguccagcuauguuuguucuggacuugugggcgacacccccagaaagaaugauagcuccucuagcucccauugccuggacccgaacaaugaggaaggcgggcacggagucaaaggcugggcuuucgaugacgggaacgauguguggaugggacggacgaucagcgagaagcuccgcucuggcuacgagacauuuaaaguuaucgaagggugguccaauccuaacagcaagcugcagauuaauagacaggugaucgucgaccggggaaaccgcucuggcuauuccggcauuuucagcguggaggggaaauccuguaucaauagaugcuuuuacgucgaacugauucggggaagaaaggaggaaaccgaggugcucuggaccucuaacagcaucguuguguucuguggcacauccgggaccuauggaacaggcucuuggcccgauggggccgacauuaaucugaugccuaucuga

SEQ ID NO: 206814 - RNA, 1410 nt, Artificial Sequence
  derived and/or modified CDS sequence (opt5) from neuraminidase__InfluenzaA__ABC84545
augaaccccaaucagaagaucauuaccaucggcagcgugucccugacaauugccacgaucugcuuccucaugcaaauugcuauccuggucaccacaguuacccuucacuuuaaacaguacgagugugacucuccugccaacaaucaggugaugccgugcgaacccaucauuaucgagagaaacauuacagaaaucguguaucugaccaauacaaccauugagaaggaaaucuguccuaaacucgucgaguaccggaacuggagcaagccccagugcaaaauuacgggguucgcgccuuuuuccaaggauaauucuauccgccugagcgcuggaggcgacaucugggugaccagagagcccuauguuuccugugauccugggaagugcuaccaauucgcccuuggacagggcacaacccuggacaacaaacauucuaaugauacaauucacgaccggaccccgcaucgcacgcuccugaugaacgaacugggggugcccuuucaccucggaacaagacaggucuguaucgccuggagcuccagcucuugccaugauggcaaggcuuggcugcacguguguguuaccggcuaugacaaaaaugccacagcuuccuucauuuacgaugggcggcuuguggacagcaucggaucuuggucccagaacauucugcgcacccaagagagcgaaugcgucuguaucaaugggaccugcacaguggugaugacggauggcucugccuccggaagcgcggacaccaagauccucuuuauugaggagggcaaaaucguccacauuuccccucugucugggagcgcccagcauguugaagagugcuccuguuaucccagauacccuggagugcggugcaucugucgcgauaacuggaagggcagcaauagacccguggucgacauuaacgugaaggaccacucuaucgauuccagcuacguuugcucuggccuugugggggacacaccgcggaacaaugaucgcagcuccaacucuuauuguagaaauccuaacaaugaaaaaggaaaccauggcgucaaggggugggcuuucgacgauggaaaugacguguggaugggccggaccaucagcgaggauucccgcagcggguacgaaacauuuaaaguuauuggaggcuggucuacccccaacuccaagcugcagaucaauagacaggugauugucgacagcgauaaccggucuggcuauuccgggaucuucagcguggagggaaaauccugcauuaauagauguuuuuacgucgagcucauccgcggccgggaacaagagacgagagugugguggacaucuaacagcauuguuguguucugcgggaccuccggaaccuauggcacagggucuuggccugacggcgccgauaucaaucugaugcccaucuga

SEQ ID NO: 206815 - RNA, 1410 nt, Artificial Sequence; identical to SEQ ID NO: 206802
  derived and/or modified CDS sequence (opt5) from neuraminidase__InfluenzaA__ABC84574

SEQ ID NO: 206816 - RNA, 1410 nt, Artificial Sequence; identical to SEQ ID NO: 206802
  derived and/or modified CDS sequence (opt5) from neuraminidase__InfluenzaA__ABC85757

SEQ ID NO: 206817 - RNA, 1410 nt, Artificial Sequence; identical to SEQ ID NO: 206813
  derived and/or modified CDS sequence (opt5) from neuraminidase__InfluenzaA__ABC85768

SEQ ID NO: 206818 - RNA, 1410 nt, Artificial Sequence; identical to SEQ ID NO: 206802
  derived and/or modified CDS sequence (opt5) from neuraminidase__InfluenzaA__ABC85779

SEQ ID NO: 206819 - RNA, 1410 nt, Artificial Sequence; identical to SEQ ID NO: 206802
  derived and/or modified CDS sequence (opt5) from neuraminidase__InfluenzaA__ABC85790

SEQ ID NO: 206820 - RNA, 1410 nt, Artificial Sequence; identical to SEQ ID NO: 206786
  derived and/or modified CDS sequence (opt5) from neuraminidase__InfluenzaA__ABC85801

SEQ ID NO: 206821 - RNA, 1410 nt, Artificial Sequence; identical to SEQ ID NO: 206786
  derived and/or modified CDS sequence (opt5) from neuraminidase__InfluenzaA__ABC85812

SEQ ID NO: 206822 - RNA, 1410 nt, Artificial Sequence; identical to SEQ ID NO: 206813
  derived and/or modified CDS sequence (opt5) from neuraminidase__InfluenzaA__ABC85823

SEQ ID NO: 206823 - RNA, 1410 nt, Artificial Sequence; identical to SEQ ID NO: 206785
  derived and/or modified CDS sequence (opt5) from neuraminidase__InfluenzaA__ABC85834

SEQ ID NO: 206824 - RNA, 1410 nt, Artificial Sequence; identical to SEQ ID NO: 206786
  derived and/or modified CDS sequence (opt5) from neuraminidase__InfluenzaA__ABC85845

SEQ ID NO: 206825 - RNA, 1410 nt, Artificial Sequence; identical to SEQ ID NO: 206813
  derived and/or modified CDS sequence (opt5) from neuraminidase__InfluenzaA__ABC85856

SEQ ID NO: 206826 - RNA, 1410 nt, Artificial Sequence; identical to SEQ ID NO: 206785
  derived and/or modified CDS sequence (opt5) from neuraminidase__InfluenzaA__ABC85867

SEQ ID NO: 206827 - RNA, 1410 nt, Artificial Sequence; identical to SEQ ID NO: 206784
  derived and/or modified CDS sequence (opt5) from neuraminidase__InfluenzaA__ABC85900

SEQ ID NO: 206828 - RNA, 1410 nt, Artificial Sequence
  derived and/or modified CDS sequence (opt5) from neuraminidase__InfluenzaA__ABC85911
augaaccccaaucagaagaucauuaccaucggcagcgugucccugacaauugccacgaucugcuuccucaugcaaauugcuauccuggucaccacaguuacccuucacuuuaaacaguacgaguguaacucuccuccgaauaaccaggugaugcugugcgaacccacaaucauugagagaaauaucaccgaaauuguguaucucacaaacaccacgaucgagaaggaaauuuguccuaaacuggccgaguaccggaauuggagcaagccccagugcaacaucaccggguucgcgccuuuuuccaaagacaauucuauucgccuuagcgcuggaggcgauaucugggucacaagagagcccuauguguccugugacccugauaagugcuaccaauucgcccuggggcagggaaccacacucaacaauggccauucuaacgacaccguucacgaucggacgccguaucgcacacugcugaugaaugaacucggggugcccuuucaucugggaaccagacaggucuguaucgccuggagcuccagcucuugccacgacggcaaggcuuggcuucauguguguguuacaggcgaugacgagaacgccaccgcuuccuucauuuacaaugggcggcugguggauagcaucggaucuugguccaaaaagauucuccgcacccaggaaagcgagugcgucuguaucaacggcacaugcacgguggugaugaccgacgggucugccuccggaaaagcggauacaaagauucuguuuaucgaggaaggcaaaaucguccacauuagcacccuuuccgggucugcccaacacguugaggaaugcagcuguuauccuagauaccccggagugcggugcgugugucgcgacaacuggaagggcuccaauagaccuaucgucgauauuaacgugaaggacuacagcaucguuucuuccuaugugugcagcggccuggucggggacacaccccggaaaaaugauucuuucagcuccucucauugucucgacccgaacaaugaggaaggaggccacggggugaagggaugggcuuuugaugacggcaacgauauguggauggggcgcaccauuagcgagaaacugagauccggauacgagacguucaagguuaucgaaggcuggagcaaaccuaauucuaagcugcagacaaaccgccaggugaucgucgagcggggcaauagauccggguauagcggaaucuuuucuguggaaggcaaauccugcauuaaccgguguuucuacgucgagcucauuagagggcgcaaggaagagaccgaggugugguggaccagcaauuccaucguuguguuuugcggaacaucuggcaccuaugggacaggcagcuggcccgacggagccgauauuaaccugaugccuaucuga

SEQ ID NO: 206829 - RNA, 1410 nt, Artificial Sequence
  derived and/or modified CDS sequence (opt5) from neuraminidase__InfluenzaA__ABC85922
augaaccccaaucagaagaucauuaccaucggcagcgugucccugacaauugccacgaucugcuuccucaugcaaauugcuauccuggucaccacaguuacccuucacuuuaaacaguacgaguguaacucuccuccgaauaaccaggugaugcugugcgaacccacaaccaucgagagaaauauuacagaaaucguguaucucaccaacacgaccauugagaaggaaaucuguccuaaacuggccgaguaccggaauuggagcaagccccagugcaacauuacaggguucgcgccuuuuuccaaagacaauucuauccgccuuagcgcuggaggcgauauuugggucaccagagagcccuauguguccugugacucugauaagugcuaccaauucgcccuggggcagggaacaacccucaacaauggccauagcaacgacacgguucacgaucggacaccuuaucgcacccugcugaugaaugaacucggggugccguuucaucugggaacaagacaggucuguaucgccugguccuccucuuccugccacgacggcaaggcuuggcuucauguguguguuaccggcgaugacgagaacgccaccgcuagcuucaucuacaaugggcggcugguggauucuauuggauccuggagcaaaaagauccuccgcacacaggaaucugagugcgucuguauuaacggcacgugcaccguggugaugacagacggguccgccagcggaaaagcggauaccaagauccuguuuauugaggaaggcaaaaucguccacaucuccacacuuucugggagcgcccaacacguugaggaaugcuccuguuaucccagauacccuggagugcggugcgugugucgcgacaacuggaagggcagcaauagacccauugucgauaucaacgugaaggacuacucuauuguuuccagcuaugugugcucuggccuggucggggacaccccucggaaaaaugauagcuucuccucuagccauugucucgaccccaacaaugaggaaggaggccacggggugaagggaugggcuuuugaugacggcaacgauguuuggauggggcgcacgaucuccgagaaacugagaagcggauacgagacauucaaggugauugaaggcuggucuaaaccgaauagcaagcugcagaccaaccggcaggucaucguggagcgcggcaauagaagcggguauucuggaaucuuuuccgucgaaggcaaaagcugcauuaaccgguguuucuacguggagcucaucagagggcgcaaggaagagaccgagguuugguggacauccaauucuauuguggucuuuugcggaaccagcggcacauaugggacgggcuccuggccugacggagccgauaucaaccugaugcccauuuga

SEQ ID NO: 206830 - RNA, 1410 nt, Artificial Sequence; identical to SEQ ID NO: 206238
  derived and/or modified CDS sequence (opt5) from neuraminidase__InfluenzaA__ABC85933

SEQ ID NO: 206831 - RNA, 1410 nt, Artificial Sequence
  derived and/or modified CDS sequence (opt5) from neuraminidase__InfluenzaA__ABC85955
augaaccccaaucagaagaucauuaccaucggcagcgugucccugacaauugccacgaucugcuuccucaugcaaauugcuauccuggucaccacaguuacccuucacuuuaaacaguacgaguguaacucuccuccgaauaaccaggugaugcugugcgaacccacaaucauugagagaaauaucaccgaaauuguguaucucacaaacaccacgaucgagaaggaaauuuguccuaaacuggccgaguaccggaauuggagcaagccccagugcaacaucaccggguucgcgccuuuuuccaaagacaauucuauucgccuuagcgcuggaggcgauaucugggucacaagagagcccuauguguccugugacccugauaagugcuaccaauucgcccuggggcagggaaccacacucaacaauggccauucuaacgacaccguucacgaucggacgccguaucgcacacugcugaugaaugaacucggggugcccuuucaucugggaaccagacaggucuguaucgccuggagcuccagcucuugccacgacggcaaggcuuggcuucauguguguguuacaggcgaugacgagaacgccaccgcuuccuucauuuacaaugggcggcugguggauagcaucggaucuugguccaaaaagauucuccgcacccaggaaagcgagugcgucuguaucaacggcacaugcacgguggugaugaccgacgggucugccuccggaaaagcggauacaaagauucuguuuaucgaggaaggcaaaaucguccacauuagcacccuuuccgggucugcccaacacguugaggaaugcagcuguuauccuagauaccccggagugcggugcgugugucgcgacaacuggaagggcuccaauagaccuaucgucgauauuaacgugaaggacuacagcaucguuucuuccuaugugugcagcggccuggucggggacacaccccggaaaaaugauucuuucagcuccucucauugucucgacccgaacaaugaggaaggaggccacggggugaagggaugggcuuuugaugacggcaacgauguuuggauggggcgcaccauuagcgagaaacugagauccggauacgagacguucaaggugaucgaaggcuggagcaaaccuaauucuaagcugcagacaaaccggcaggucaucguggagcgcggcaauagauccggguauagcggaaucuuuucugucgaaggcaaauccugcauuaaccgguguuucuacguggagcucauuagagggcgcaaggaagagaccgagguuugguggaccagcaauuccaucguggucuuuugcggaacaucuggcaccuaugggacaggcagcuggcccgacggagccgauauuaaccggaugccuaucuga

SEQ ID NO: 206832 - RNA, 1410 nt, Artificial Sequence; identical to SEQ ID NO: 206238
  derived and/or modified CDS sequence (opt5) from neuraminidase__InfluenzaA__ABC85966

SEQ ID NO: 206833 - RNA, 1410 nt, Artificial Sequence; identical to SEQ ID NO: 206238
  derived and/or modified CDS sequence (opt5) from neuraminidase__InfluenzaA__ABC85977

SEQ ID NO: 206834 - RNA, 1410 nt, Artificial Sequence
  derived and/or modified CDS sequence (opt5) from neuraminidase__InfluenzaA__ABC85988
augaaccccaaucagaagaucauuaccaucggcagcgugucccugacaauugccacgaucugcuuccucaugcaaauugcuauccuggucaccacaguuacccuucacuuuaaacaguacgaguguaacucuccuccgaauaaccaggugaugcugugcgaacccacaaucauugagagaaauaucaccgaaauuguguaucucacaaacaccacgaucgagaaggggauuuguccuaaacuggccgaauaccggaauuggagcaagccccagugcaacaucaccggauucgcgccuuuuuccaaagacaauucuauucgccuuagcgcuggcggggauaucugggucacaagagagcccuauguguccugugacccugauaagugcuaccaauucgcccugggacagggcaccacacucaacaaugggcauucuaacgacaccguucacgaucggacgccguaucgcacacugcugaugaaugagcucggagugcccuuucaucugggcaccagacaggucuguaucgccuggagcuccagcucuugccacgacggcaaggcuuggcuucauguguguguuacaggggaugacgaaaacgccaccgcuuccuucauuuacaauggacggcugguggauagcaucggcucuugguccaaaaagauucuccgcacccaggagagcgaaugcgucuguaucaacgggacaugcacgguggugaugaccgacggaucugccuccggcaaagcggauacaaagauucuguuuaucgaggaggggaaaaucguccacauuagcacccuuuccggaucugcccaacacguugaagagugcagcuguuauccuagauaccccggcgugcggugcgugugucgcgacaacuggaagggcuccaauagaccuaucgucgauauuaacgugaaggacuacagcaucguuucuuccuaugugugcagcgggcuggucggagacacaccccggaaaaaugauucuuucagcuccucucauugucucgacccgaacaaugaagagggcgggcacggagugaagggcugggcuuuugaugacgggaacgauguuuggaugggacgcaccauuagcgaaaaacugagauccggcuacgagacguucaaggugaucgagggcuggagcaaaccuaauucuaagcugcagacaaaccggcaggucaucguggaacgcgggaauagauccggauauagcggcaucuuuucugucgaggggaaauccugcauuaaccgguguuucuacguggaacucauuagaggacgcaaggaggaaaccgagguuugguggaccagcaauuccaucguggucuuuugcggcacaucugggaccuauggcacaggaagcuggcccgacggcgccgauauuaaccugaugccuaucuga

SEQ ID NO: 206835 - RNA, 1410 nt, Artificial Sequence; identical to SEQ ID NO: 206399
  derived and/or modified CDS sequence (opt5) from neuraminidase__InfluenzaA__ABC85999

SEQ ID NO: 206836 - RNA, 1410 nt, Artificial Sequence; identical to SEQ ID NO: 206399
  derived and/or modified CDS sequence (opt5) from neuraminidase__InfluenzaA__ABC86010

SEQ ID NO: 206837 - RNA, 1410 nt, Artificial Sequence
  derived and/or modified CDS sequence (opt5) from neuraminidase__InfluenzaA__ABC86021
augaaccccaaucagaagaucauuaccaucggcagcgugucccugacaauuucuacgaucugcuucuuuaugcaaauugccauccucaucaccacagucacccugcacuucaaacaguacgaguuuaacagcccuccgaauaaccagguuaugcuuugugaacccacaauuaucgagagaaauauuaccgaaaucguguaucugacaaacaccacgauugagaaggaaaucugcccuaaacucgcugaguaccggaauugguccaagccccagugugacauuaccggguucgccccuuuuucuaaagauaacagcauccgccuguccgcgggaggcgacaucugggugacaagagagcccuaugucucuugcgauccugacaaguguuaccaauucgcucuugggcagggaaccacacugaauaacgugcauagcaaugauaccguucacgaccggacgccguaucgcacacuccugaugaacgaacugggcgugcccuuucaucucgggaccaagcaggucugcauugccugguccucuagcuccugucacgauggaaaagccuggcugcaugugugcguuacaggcgacgauaagaaugcuaccgccagcuucaucuacaacggcagacuuguggacucuauugucuccuggagcaaagagauccugcggacccaggaaucugagugugugugcauuaaugggacauguacgguggucaugaccgauggauccgcuagcggcaaggccgacacaaaaauccucuuuaucgaggaagggaagauuguucacaccuccacacugucuggaagcgcgcaacacguggaggaaugcuccugcuauccucgcuaccccggcgugagaugugucugccgggauaacuggaaggggagcaaccgcccuaucguggacauuaauaucaaagacuacucuauuguuuccagcuauguguguucuggacuugucggcgauacccccagaaagaacgacagcuccucuagcucccauugccuggauccgaauaacgaggaaggcgggcacggagugaaaggcugggccuucgacgaugggaaugacguuuggaugggacggacgaucagcgagaagcuccgcucuggcuacgagacauuuaaagugaucgaagggugguccaacccuaauagcaagcugcagauuaacagacaggucaucguggaucggggaaaucgcucuggcuauuccggcauuuucagcgucgaggggaaauccuguaucaacagaugcuuuuacguggaacugauucggggaagaaaggaggaaaccgagguucucuggaccucuaauagcaucguggucuucuguggcacauccgggaccuauggaacaggcucuuggcccgacggggcuaacauuaaucugaugccuaucuga

SEQ ID NO: 206838 - RNA, 1410 nt, Artificial Sequence; identical to SEQ ID NO: 206663
  derived and/or modified CDS sequence (opt5) from neuraminidase__InfluenzaA__ABC86127

SEQ ID NO: 206839 - RNA, 1410 nt, Artificial Sequence; identical to SEQ ID NO: 206746
  derived and/or modified CDS sequence (opt5) from neuraminidase__InfluenzaA__ABC86140

SEQ ID NO: 206840 - RNA, 1410 nt, Artificial Sequence; identical to SEQ ID NO: 206556
  derived and/or modified CDS sequence (opt5) from neuraminidase__InfluenzaA__ABC86151

SEQ ID NO: 206841 - RNA, 1413 nt, Artificial Sequence
  derived and/or modified CDS sequence (opt5) from neuraminidase__InfluenzaA__ABC86240
augaaccccaaucagaagaucauuaccaucggcagcauuuccguggccaucgggauuaucucucugauccuccaaauuggaaacaucauuagcaucugggcuucccacucuauucagacaggcagccagaauuacacggggaucugcaaccagaaaauuaucaccuaugagaauagaacaugggucaaccaaaccuacguuaauaucaacaauacaaacgugguggccggaaaggacaaaaccuccaugacacuggcgggcaauucuagccuuuguccuauucgggggugggcuaucuauaccaaggauaacuccauucgcaucggaagcaaaggcgacgucuucgugauuagagaaccguuuaucucuugcucccaucuggagugucggacguucuuucucacccagggcgcccugcuuaaugauaagcacagcaacgggacaaucaaggaccgcucucccuucagagcccugauguccugcccucucggagaagcucccagcccuuacaauucucgguuugaguccguugccuggagcgcuuccgccugucaugauggccugggguggcugaccauuggaaucucuggccccgacaacggggcgguggccguccucaaauauaacggaauuaucacagaaaccauuaagagcuggaaaaagcagauccugcgcacgcaggaguccgagugcguguguguuaauggcagcugcuucacaaucaugaccgauggcccuucuaacagagcugccuccuaccggauuuuuaaaaucgaaaaggggcgcgugacaaagagcauugagcuugacgcuccgaauuaucacuacgaagaguguucuugcuaccccgauaccggaaccgucaugugugugugcagagacaacuggcauggcagcaaucggccuuggguguccuucaaccaaaaucuggauuaucagaucggguacauuugcucuggagucuuuggcgacaacccccgcccuaaagauggggagggaagcuguaaucccguuacaguggacggcgccgacggcgugaagggguucuccuauagauacggaaacggcgucuggaucgggcggacgaaaagcaaucgccucagaaagggauuugaaaugauuugggauccgaacggcuggaccgacacagauucugacuucuccaugaaacaggaugugguugcgaugaccgacuggagcggguauucuggcuccuuugugcagcacccugagcugacaggacuugauugcaugcggcccuguuucugggucgaacuggugagaggccucccucgcgagaauaccacgaucuggacaagcggguccucuaucagcuucugcggaguuaacuccgaaaccgccaauuggucuuggcccgacggcgcugagcugcccuuuaccauugauaaguga

SEQ ID NO: 206842 - RNA, 1410 nt, Artificial Sequence
  derived and/or modified CDS sequence (opt5) from neuraminidase__InfluenzaA__ABC97377
augaaccccaaucagaagaucauuaccaucggcagcgugucccugacaauugccacgaucugcuuccucaugcaaauugcuauccuggucaccacaguuacccuucacuuuaaacaguacgagugugacucuccugccaacaaucaggugaugccgugcgaacccaucauuaucgagagaaacauuacagaaaucguguaucugaccaauacaaccauugagaaggaaaucuguccuaaacucgucgaguaccggaacuggagcaagccccagugcaaaauuacgggguucgcgccuuuuuccaaggauaauucuauccgccugagcgcuggaggcgacaucugggugaccagagagcccuauguuuccugugauccugggaagugcuaccaauucgcccuuggacagggcacaacccuggacaacaaacauucuaaugauacaauucacgaccggaccccgcaucgcacgcuccugaugaacgaacugggggugcccuuucaccucggaacaagacaggucuguaucgccuggagcuccagcucuugccaugauggcaaggcuuggcugcacguguguguuaccggcuaugacaaaaaugccacagcuuccuucauuuacgaugggcggcuuguggacagcaucggaucuuggucccagaacauucugcgcacccaagagagcgaaugcgucuguaucaaugggaccugcacaguggugaugacggauggcucugccuccggaagcgcggacaccaagauccucuuuauugaggagggcaaaaucguccacauuuccccucugucugggagcgcccagcauguugaagagugcuccuguuaucccagauacccuggagugcggugcaucugucgcgauaacuggaagggcagcaauagacccguggucgacauuaacgugaaggacuacucuaucgauuccagcuauguuugcucuggccuugugggggacacaccgcggaacaaugaucgcagcuccaacucuuacuguagaaauccuaacaaugaaaaaggaaaccacggcgucaaggggugggcuuucgacgauggaaaugacguguggaugggccggaccaucagcgaggauucccgcagcggguaugaaacauuuaaaguuauuggaggcuggucuacccccaacuccaagcugcagaucaauagacaggugauugucgacagcgauaaccggucuggcuacuccgggaucuucagcguggagggaaaauccugcauuaauagauguuuuuaugucgagcucauccgcggccgggaacaagagacgagagugugguggacaucuaacagcauuguuguguucugcgggaccuccggaaccuacggcacagggucuuggccugacggcgccgauaucaaucugaugcccaucuga

SEQ ID NO: 206843 - RNA, 1410 nt, Artificial Sequence; identical to SEQ ID NO: 206209
  derived and/or modified CDS sequence (opt5) from neuraminidase__InfluenzaA__ABD15452

SEQ ID NO: 206844 - RNA, 1410 nt, Artificial Sequence; identical to SEQ ID NO: 206297
  derived and/or modified CDS sequence (opt5) from neuraminidase__InfluenzaA__ABD15463

SEQ ID NO: 206845 - RNA, 1410 nt, Artificial Sequence; identical to SEQ ID NO: 206217
  derived and/or modified CDS sequence (opt5) from neuraminidase__InfluenzaA__ABD15474

SEQ ID NO: 206846 - RNA, 1410 nt, Artificial Sequence
  derived and/or modified CDS sequence (opt5) from neuraminidase__InfluenzaA__ABD15485
augaaccccaaucagaagaucauuaccaucggcagcgugucccugacaauugccacgaucugcuuccucaugcaaauugcuauccuggucaccacaguuacccuucacuuuaaacagcaugaguguaacucuccuccgaauaaccaggugaugcugugcgaacccacaaucauugagagaaauaucaccgaaauuguguaccucacaaacaccacgaucgagaaggaaauuuguccuaaacuggccgaguaucggaauuggagcaagccccagugcaacaucaccggguucgcgccuuuuuccaaagacaauucuauucgccuuagcgcuggaggcgauaucugggucacaagagagcccuacguguccugugacccugauaagugcuaucaauucgcccuggggcagggaaccacacucaacaauggccacucuaacgacaccguucaugaucggacgccguaccgcacacugcugaugaaugaacucggggugcccuuucaccugggaaccagacaggucuguaucgccuggagcuccagcucuugccaugacggcaaggcuuggcuucacguguguguuacaggcgaugacaaaaacgccaccgcuuccuucauuuauaaugggcggcugguggauagcaucggaucuugguccaagaaaauucuccgcacccaggagagcgaaugcgucuguaucaacggcacaugcacgguggugaugaccgacgggucugccuccggaaaggcggauacaaaaauucuguuuaucgaggagggcaagaucguccacauuagcacccuuuccgggucugcccaacauguugaagagugcagcuguuacccuagauaucccggagugcggugcgugugucgcgacaacuggaagggcuccaauagaccuaucgucgauauuaacgugaaagacuacagcaucguuucuuccuacgugugcagcggccuggucggggacacaccccggaagaaugauucuuucagcuccucucacugucucgacccgaacaaugaagagggaggccauggggugaaaggaugggcuuuugaugacggcaacgauguuuggauggggcgcaccauuagcgaaaagcugagauccggauaugagacguucaaagugaucgagggcuggagcaagccuaauucuaaacugcagaucaaccggcaggucauuguggaacgcggcaauagauccggguacagcggaaucuuuucugucgagggcaaguccugcauuaaccgguguuucuauguggaacucaucagagggcgcaaggaggaaacagagguuugguggaccagcaauuccauuguggucuuuugcggaaccucuggcacauacgggaccggcagcuggcccgacggagccaacaucaaucugaugccuauuuga

SEQ ID NO: 206847 - RNA, 1410 nt, Artificial Sequence; identical to SEQ ID NO: 206297
  derived and/or modified CDS sequence (opt5) from neuraminidase__InfluenzaA__ABD15496

SEQ ID NO: 206848 - RNA, 1410 nt, Artificial Sequence; identical to SEQ ID NO: 206217
  derived and/or modified CDS sequence (opt5) from neuraminidase__InfluenzaA__ABD15507

SEQ ID NO: 206849 - RNA, 1413 nt, Artificial Sequence
  derived and/or modified CDS sequence (opt5) from neuraminidase__InfluenzaA__ABD15518
augaaccccaaucagaagaucauuaccaucggcagcauuuccaucgccauugggaucaucucucugaugcuccaaauuggaaacaucauuagcaucugggcuucccacucuauucagacaggcagccagaaucauacggggaucugcaaccagagaauuaucaccuacgaaaauuccacaugggugaaccacaccuaugucaauaucaacaauacaaacguuguggccggaaaagacaagaccucugugacacuggcgggcaauagcucccuuuguagcauuucugggugggcuaucuacaccaaagauaacuccauucggaucggaagcaagggcgacgucuucgugauucgcgagccuuuuaucucuugcucccaucuggaguguagaacguucuuucucacccaaggcgcccugcuuaaugauaaacacagcaacgggacaguuaaggaccggucuccguaucgcgcccugauguccugcccccucggagaagcuccuagccccuacaauuccaaguucgagucuguggccuggagcgcuuccgccugucaugauggcaugggguggcugaccaucggaauuagcggcccugacaacggggcggucgccgugcugaaauauaacggaaucauuacagaaaccaucaagucuuggaaaaagcggauucucagaacgcaggaguccgagugcguuugugugaauggcagcugcuuuacaaucaugaccgauggccccucuaacgggggagcuagcuacaaaaucuucaagauugaaaagggcaaagucacaaaguccaucgagcugaaugccccuaacuuucacuaugaagaguguucuugcuacccggacaccgggaccgugaugugugugugccgcgauaauuggcacggaagcaacagacccugggucuccuucaaucagaaccuugacuaccagauuggcuauaucugcagcgggguuuuuggagauaauccucggcccaaagacggcaagggcucuuguaacccugugacaguggauggggcugacggagucaaaggcuucuccuacaaguaugggaauggaguguggauuggccgcacgaaaagcaacagacugcggaagggguuugagaugaucugggaccccaauggcuggaccgauacagacucugauuucuccguuaagcaagacguggucgccauuaccgauuggagcggauacuccggcucuuuugugcagcauccggaacucacagggcuggacugcauccgcccuuguuucuggguugagcuugugagaggacugccccgggaaaacaccacgaucuggacaagcggcuccucuauuagcuucugcggggucgauuccgacaccgcgaauuggagcuggccugauggagccgagcuccccuuuaccaucgacaaauga

SEQ ID NO: 206850 - RNA, 1410 nt, Artificial Sequence; identical to SEQ ID NO: 206399
  derived and/or modified CDS sequence (opt5) from neuraminidase__InfluenzaA__ABD15529

SEQ ID NO: 206851 - RNA, 1410 nt, Artificial Sequence; identical to SEQ ID NO: 206586
  derived and/or modified CDS sequence (opt5) from neuraminidase__InfluenzaA__ABD15551

SEQ ID NO: 206852 - RNA, 1410 nt, Artificial Sequence
  derived and/or modified CDS sequence (opt5) from neuraminidase__InfluenzaA__ABD15562
augaaccccaaucagaagaucauuaccaucggcagcgugucccugacaauugccacgaucugcuuccucaugcaaauugcuauccuggucaccacaguuacccuucacuuuaaacaguacgaguguucuagcccuccgaacaaucaggugaugcugugcgaacccacaaucauugagagaaacaucaccgaaauuguguaucucacaaauaccacgaucgagaaggaaauuuguccuaaacuggccgaguaccggaacugguccaagccccagugcaaaaucaccggguucgcgccuuuuucuaaggacaauagcauucgccuuuccgcuggaggcgauaucugggucacaagagagcccuaugugucuugugacccugauaagugcuaccaauucgcccuggggcagggaaccacacucaacaaucggcauagcaacgacaccguucacgaucgcacgccguauagaacacugcugaugaaugaacucggcgugcccuuucaucuggggaccaaacaggucuguaucgccugguccucuagcuccugccacgacggaaaggcuuggcuucauguguguguuacaggccacgaugagaacgccaccgcuagcuucauuuacgacggccggcugguggauucuaucggguccuggagcaaaaagauucuccgcacccaggaaucugagugcgucuguaucaauggaacaugcacgauugugaugaccgacggcuccgccagcgggagagcggauacaaaaauccuguuuaucgaggaaggaaagauugugcacaucuccccucuuucuggcagcgcccaacaugucgaggaaugcuccuguuauccccgguacccugggguucgcugcguguguagagacaacuggaagggaagcaaucggcccauuguggauaucaacgucaaagacuacucuauuguguccagcuauguuugcucuggccuggugggcgacaccccgcgcaagaacgauagcuccucuagcucccacugucucaauccuaacaaugaggaagggggacauggcgucaaagggugggcuuucgacgauggaaacgacguguggaugggcagaacaaucagcgagaaguuucggucuggguacgagaccuucaaaguuaucgaaggaugguccaagcccaauagcaaacugcagauuaaccgccaggugaucgucgauagaggcaaucggucuggcuauuccgggauuuuuagcguggagggaaaguccugcaucaacagauguuucuacgucgaacugauucgcggccggaagcaggagacggaagugugguggacaucuaauagcaucguuguguuuugcgggaccuccggaaccuauggcacagggucuuggccugacggcgccgauauuaaccucaugcccaucuga

SEQ ID NO: 206853 - RNA, 1410 nt, Artificial Sequence
  derived and/or modified CDS sequence (opt5) from neuraminidase__InfluenzaA__ABD15573
augaaccccaaucagaagaucauuaccaucggcagcgugucccugacaauugccacgaucugcuuccucaugcaaauugcuauccuggucaccacaguuacccuucacuuuaaacaguacgaguguaacucuccuccgaauaaccaggugaugcugugcgaacccacaaucauugagagaaauaucaccgaaauuguguaucucacaaacaccacgaucgagaaggaaauuuguccuaaacuggccgaguaccggaauuggagcaagccccagugcaaaaucaccggguucgcgccuuuuuccaaggacaacucuauucgccuuagcgcuggaggcgauaucugggucacaagagagcccuauguguccugugacccugauaagugcuaccaauucgcccuggggcagggaaccacacucaauaacggccauucuaaugacaccguucacgaucggacgccguaucgcacacugcugaugaacgaacucggggugcccuuucaucugggaaccaaacaggucuguauggccuggagcuccagcucuugccacgacggcaaggcuuggcuucauguguguguuacaggccacgaugagaaugccaccgcuuccuucaucuacgacgggagacugguggauagcauuggaucuugguccaaaaagauccuccggacccaggaaagcgagugcgucuguauuaacggcacaugcacgguggugaugaccgacgggucugccuccggacgcgcggauacaaaaauccuguuuauugaggaaggcaagaucguccacaucagccaacuuuccgggucugcccagcauguugaggaaugcagcuguuauccuagauaccccggagugcggugcgugugucgcgacaauuggaagggcuccaacagaccuauugucgauaucaacgugaaagaccacagcauuguuucuuccuacgugugcagcggccuggucggggacacaccccggaagaaugauucuagcuccucuagccauugucucaacccgaauaacgaggaaggaggccacggggugaaaggaugggcuuucgacgauggcaaugacguuuggauggggcgcaccaucuccgagaagcugagaagcggauaugagaccuuuaaagugauugaaggcuggucuaagccuaacuccaaacugcagaucaaucggcaggucaucguggaucgcggcaacagaagcggguacucuggaauuuucuccgucgagggcaagagcugcaucaaucgguguuuuuauguggaacucauuagagggcgcaagcaagagacggaaguuugguggacauccaacucuaucguggucuucugcggaaccagcggcaccuacgggacaggcuccuggcccgacggagccgauauuaaucugaugccuaucuga

SEQ ID NO: 206854 - RNA, 1410 nt, Artificial Sequence
  derived and/or modified CDS sequence (opt5) from neuraminidase__InfluenzaA__ABD15584
augaaccccaaucagaagaucauuaccaucggcagcgugucccugacaauugccacgaucugcuuccucaugcaaauugcuauccuggucaccacaguuacccuucacuuuaaacaguacgaguguucuagcccuccgaacaaucaggugaugcugugcgaacccacaaucauugagagaaacaucaccgaaauuguguaucucacaaauaccacgaucgagaaggaaauuuguccuaaacuggccgaguaccggaacugguccaagccccagugcaaaaucaccggguucgcgccuuuuucuaaggacaauagcauucgccuuuccgcuggaggcgauaucugggucacaagagagcccuaugugucuugugacccugauaagugcuaccaauucgcccuggggcagggaaccacacucaacaaucggcauagcaacgacaccguucacgaucgcacgccguauagaacacugcugaugaaugaacucggcgugcccuuucaucuggggaccaaacaggucuguaucgccugguccucuagcuccugccacgacggaaaggcuuggcuucauguguguguuacaggccacgaugagaacgccaccgcuagcuucauuuacgacggccggcugguggauucuaucggguccuggagcaaaaagauucuccgcacccaggaaucugagugcgucuguaucaauggaacaugcacgguggugaugaccgacggcuccgccagcgggagagcggauacaaaaauucuguuuaucgaggaaggaaagaucguccacauuuccccucuuucuggcagcgcccaacauguugaggaaugcuccuguuauccccgguacccuggggugcgcugcguguguagagacaacuggaagggaagcaaucggcccaucgucgauauuaacgugaaagacuacucuaucguuuccagcuaugugugcucuggccuggucggcgacaccccgcgcaagaacgauagcuccucuagcucccacugucucaauccuaacaaugaggaagggggacauggcgugaaagggugggcuuucgacgaugagaacgacguuuggaugggaagaacaauuagcgagaaguuucggucuggcuacgaaaccuucaaagugaucgaggggugguccaagcccaauagcaaacugcagaucaaccgccaggucauuguggauagaggaaaucggucuggcuauuccggcaucuuuagcgucgaagggaaguccugcauuaacagauguuucuacguggagcugauccgcggacggaagcaggaaacggagguuugguggacaucuaauagcauuaucguguuuugcggcaccuccgggaccuauggaacaggcucuuggccugacggggccgauauuaaccucaugcccaucuga

SEQ ID NO: 206855 - RNA, 1410 nt, Artificial Sequence; identical to SEQ ID NO: 206586
  derived and/or modified CDS sequence (opt5) from neuraminidase__InfluenzaA__ABD15595

SEQ ID NO: 206856 - RNA, 1410 nt, Artificial Sequence; identical to SEQ ID NO: 206586
  derived and/or modified CDS sequence (opt5) from neuraminidase__InfluenzaA__ABD15606

SEQ ID NO: 206857 - RNA, 1410 nt, Artificial Sequence; identical to SEQ ID NO: 206586
  derived and/or modified CDS sequence (opt5) from neuraminidase__InfluenzaA__ABD15617

SEQ ID NO: 206858 - RNA, 1410 nt, Artificial Sequence; identical to SEQ ID NO: 206645
  derived and/or modified CDS sequence (opt5) from neuraminidase__InfluenzaA__ABD15639

SEQ ID NO: 206859 - RNA, 1410 nt, Artificial Sequence; identical to SEQ ID NO: 206802
  derived and/or modified CDS sequence (opt5) from neuraminidase__InfluenzaA__ABD15650

SEQ ID NO: 206860 - RNA, 1410 nt, Artificial Sequence; identical to SEQ ID NO: 206325
  derived and/or modified CDS sequence (opt5) from neuraminidase__InfluenzaA__ABD15661

SEQ ID NO: 206861 - RNA, 1410 nt, Artificial Sequence; identical to SEQ ID NO: 206802
  derived and/or modified CDS sequence (opt5) from neuraminidase__InfluenzaA__ABD15683

SEQ ID NO: 206862 - RNA, 1410 nt, Artificial Sequence; identical to SEQ ID NO: 206325
  derived and/or modified CDS sequence (opt5) from neuraminidase__InfluenzaA__ABD15694

SEQ ID NO: 206863 - RNA, 1410 nt, Artificial Sequence; identical to SEQ ID NO: 206802
  derived and/or modified CDS sequence (opt5) from neuraminidase__InfluenzaA__ABD15705

SEQ ID NO: 206864 - RNA, 1410 nt, Artificial Sequence; identical to SEQ ID NO: 206802
  derived and/or modified CDS sequence (opt5) from neuraminidase__InfluenzaA__ABD15727

SEQ ID NO: 206865 - RNA, 1410 nt, Artificial Sequence
  derived and/or modified CDS sequence (opt5) from neuraminidase__InfluenzaA__ABD15749
augaaccccaaucagaagaucauuaccaucggcagcgugucccugacaauugccacgaucugcuuccucaugcaaauugcuguccugguuaccacagugacccuucacuuuaaacaguacgaguguaacucuccuccgaauaaccaggugaugcugugcgaacccacaaucaucgagagaaauauuaccgaaaucgucuaucucacaaacaccacgauugagaaggaaaucuguccuaaacuggccgaguaccggaauuggagcaagccccagugcaacauuaccggguucgcgccuuuuuccaaagacaauucuauccgccuuagcgcuggaggcgauauuugggugacaagagagcccuauguuuccugugacccugauaagugcuaccaauucgcccuggggcagggaaccacacucaacaauggccauucuaacgacaccgugcacgaucggacgccguaucgcacacugcugaugaaugaacucgggguccccuuucaucugggaaccaaacagguguguaucgccuggagcuccagcucuugccacgacggcaaggcuuggcuucauguuugugugacaggcgaugacgagaacgccaccgcuuccuucaucuacaaugggagacuggucgauagcauuggaucuugguccaagaaaauccuccggacccaggaaagcgagugcguguguauuaacggcacaugcacgguggucaugaccgacgggucugccuccggaaaggcggauacaaaaauccuguuuauugaggaaggcaagaucguucacaccagccuucuguccgggucugcccaacacguggaggaaugcagcuguuauccucgcuaccccggagugagaugcgucugucgggacaacuggaagggcuccaaucgcccuaucguggauauuaacguuaaagacuacagcaucgugucuuccuaugucugcagcggccucgugggggacacacccagaaagaaugauucuagcuccucuagccauugucuggacccgaacaaugaggaaggaggccacgggguuaaaggaugggcuuucgaugacggcaacgauguguggauggggcggaccauuuccgagaagcugcgcagcggauacgagacguuuaaagucaucgaaggcuggucuaagccuaauuccaaacuccagauuaacagacaggugaucgucgaccggggcaaucgcagcggguauucuggaaucuucuccguggagggcaagagcugcauuaacagauguuuuuacguugaacugauccgggggagaaagcaggagacagaagugcuuuggaccuccaauucuauugucguguucugcggaaccagcggcacauaugggaccggcuccuggcccgauggagccgacaucaaccugaugccuauuuga

SEQ ID NO: 206866 - RNA, 1410 nt, Artificial Sequence; identical to SEQ ID NO: 206865
  derived and/or modified CDS sequence (opt5) from neuraminidase__InfluenzaA__ABD15760

SEQ ID NO: 206867 - RNA, 1410 nt, Artificial Sequence; identical to SEQ ID NO: 206802
  derived and/or modified CDS sequence (opt5) from neuraminidase__InfluenzaA__ABD15771

SEQ ID NO: 206868 - RNA, 1410 nt, Artificial Sequence; identical to SEQ ID NO: 206802
  derived and/or modified CDS sequence (opt5) from neuraminidase__InfluenzaA__ABD15782

SEQ ID NO: 206869 - RNA, 1410 nt, Artificial Sequence; identical to SEQ ID NO: 206802
  derived and/or modified CDS sequence (opt5) from neuraminidase__InfluenzaA__ABD15793

SEQ ID NO: 206870 - RNA, 1410 nt, Artificial Sequence; identical to SEQ ID NO: 206786
  derived and/or modified CDS sequence (opt5) from neuraminidase__InfluenzaA__ABD16306

SEQ ID NO: 206871 - RNA, 1410 nt, Artificial Sequence
  derived and/or modified CDS sequence (opt5) from neuraminidase__InfluenzaA__ABD16317
augaaccccaaucagaagaucauuaccaucggcagcgugucccugacaauuucuacgaucugcuucuuuaugcaaauugccauccucaucaccacagucacccugcacuucaaacaguacgaguuuaacagcccuccgaauaaccagguuaugcuuugugaacccacaauuaucgagagaaauauuaccgaaaucguguaucugacaaacaccacgauugagaaggaaaucugcccuaaacucgcugaguaccggaauugguccaagccccaguguaacauuaccggguucgccccuuuuucuaaagacaauagcauccgccuguccgcgggaggcgauaucugggugacaagagagcccuaugucucuugcgacccugauaaguguuaccaauucgcucuugggcagggaaccacacugaacaaugugcauagcaacgacaccguucgggaucgcacgccguauagaacacuccugaugaaugaacugggcgugcccuuucaccucgggaccaagcaggucugcauugccugguccucuagcuccugucaugacggaaaagccuggcugcacgugugcguuacaggcgaugacaagaacgcuaccgccagcuucaucuacaauggccggcuuguggauucuauugucuccuggagcaaagagauccugcgcacccaggaaucugagugugugugcauuaacgggacauguacgguggucaugaccgacggauccgcuagcggcaaggccgauacaaaaauccucuuuaucgaggaagggaagauuguucauaccuccacacugucuggaagcgcgcaacacguggaggaaugcuccugcuauccuagauaccccggcgugcggugugucugccgcgacaacuggaaggggagcaauagaccuaucguggauauuaacaucaaagacuacucuauuguuuccagcuauguguguucuggacuugucggcgacacgccccggaagaaugauagcuccucuagcucccacugccuggacccgaacaaugaggaaggcgggcauggagugaaaggcugggccuucgaugacgggaacgauguuuggaugggacgcaccaucagcgagaagcucagaucuggcuacgagacauuuaaagugaucgaagggugguccaauccuaacagcaagcugcagauuaaucggcaggucaucguggaccgcggaaacagaucuggcuauuccggcauuuucagcgucgaggggaaauccuguaucaaucggugcuuuuacguggaacugauuagaggacgcaaggaggaaaccgagguucucuggaccucuaacagcaucguggucuucuguggcacauccgggaccuauggaacaggcucuuggcccgauggggcugacauuaaucugaugccuaucuga

SEQ ID NO: 206872 - RNA, 1410 nt, Artificial Sequence; identical to SEQ ID NO: 206786
  derived and/or modified CDS sequence (opt5) from neuraminidase__InfluenzaA__ABD16328

SEQ ID NO: 206873 - RNA, 1410 nt, Artificial Sequence
  derived and/or modified CDS sequence (opt5) from neuraminidase__InfluenzaA__ABD16339
augaaccccaaucagaagaucauuaccaucggcagcgugucccugacaauuucuacgaucugcuucuuuaugcaaauugccauccucaucaccacagucacccugcacuucaaacaguacgaguuuaacagcccuccgaauaaccagguuaugcuuugugaacccacaauuaucgagagaaauauuaccgaaaucguguaucugacaaacaccacgauugagaaggaaaucugcccuaaacucgcugaguaccggaauugguccaagccccagugugacauuaccggguucgccccuuuuucuaaagauaacagcauccgccuguccgcgggaggcgacaucugggugacaagagagcccuaugucucuugcgauccugacaaguguuaccaauucgcucuugggcagggaaccacacugaauaacgugcauagcaaugauaccguucacgaccggacgccguaucgcacacuccugaugaacgaacugggcgugcccuuucaucucgggaccaagcaggucugcauugccugguccucuagcuccugucacgauggaaaagccuggcugcaugugugcguuacaggcgacgauaagaaugcuaccgccagcuucaucuacaacggcagacuuguggacucuauugucuccuggagcaaaaagauccugcggacccaggagucugaaugugugugcauuaaugggacauguacgguggucaugaccgauggauccgcuagcggcaaagccgacacaaagauccucuuuaucgaggaggggaagauuguucacaccuccacacugucuggaagcgcgcaacacguggaagagugcuccugcuauccucgcuaccccggcgugagaugugucugccgggauaacuggaaagggagcaaccgcccuaucguggacauuaauaucaaggacuacucuauuguuuccagcuauguguguucuggacuugucggcgauacccccagaaagaacgacagcuccucuagcggccauugccuggauccgaauaacgaagaagggggacacggcgugaaagggugggccuucgacgauggaaaugacguuuggaugggccggacgaucuccgagaaacuccgcagcggguacgagacauuuaaggugaucgagggauggucuaacccuaauuccaaacugcagauuaacagacaggucaucguggaucggggcaaucgcagcggcuauucugggauuuucuccgucgaaggaaagagcuguaucaacagaugcuuuuacguggagcugauucggggcagaaaggaagagaccgaaguucucuggaccuccaauucuaucguggucuucugugggacaagcggaaccuauggcacaggguccuggcccgacggcgcugauauuaaccugaugccuaucuga

SEQ ID NO: 206874 - RNA, 1410 nt, Artificial Sequence
  derived and/or modified CDS sequence (opt5) from neuraminidase__InfluenzaA__ABD16361
augaaccccaaucagaagaucauuaccaucggcagcgugucccugacaauuucuacgaucugcuucuuuaugcaaauugccauccucaucaccacagucacccugcacuucaaacaguacgaguuuaacagcccuccgaauaaccagguuaugcuuugugaacccacaauuaucgagagaaauauuaccgaaaucguguaucugacaaacaccacgauugagaaggaaaucugcccuaaacucgcugaguaccggaauugguccaagccccagugugacauuaccggguucgccccuuuuucuaaagauaacagcauccgccuguccgcgggaggcgacaucugggugacaagagagcccuaugucucuugcgauccugacaaguguuaccaauucgcucuugggcagggaaccacacugaauaacgugcauagcaaugauaccguucacgaccggacgccguaucgcacacuccugaugaacgaacugggcgugcccuuucaucucgggaccaagcaggucugcauugccugguccucuagcuccugucacgauggaaaagccuggcugcaugugugcguuacaggcgacgauaagaaugcuaccgccagcuucaucuacaacggcaaacuuguggacucuauugucuccuggagcaagaaaauccugagaacccaggagucugaaugugugugcauuaaugggacauguacgguggucaugaccgauggauccgcuagcggcaaggccgacacaaagauccucuuuaucgaggaggggaaaauuguucacaccuccacacugucuggaagcgcgcaacacguggaagagugcuccugcuauccucgguaccccggcgugcgcugugucugcagagauaacuggaaggggagcaaccggccuaucguggacauuaauaucaaagacuacucuauuguuuccagcuauguguguucuggacuugucggcgauacgccccgcaagaacgacagcuccucuagcucccauugccuggauccgaauaacgaagagggcgggcacggagugaaaggcugggccuucgacgaugggaaugacguuuggaugggaagaaccaucagcgaaaagcuccggucuggcuacgagacauuuaaagugaucgaggggugguccaacccuaauagcaagcugcagauuaaccgccaggucaucguggauagaggaaaucggucuggcuauuccggcauuuucagcgucgaagggaaguccuguaucaaccgcugcuuuuacguggagcugauuagaggacggaaagaagagaccgaaguucucuggaccucuaauagcaucguggucuucuguggcacauccgggaccuauggaacaggcucuuggcccgacggggcugauauuaaccugaugccuaucuga

SEQ ID NO: 206875 - RNA, 1410 nt, Artificial Sequence; identical to SEQ ID NO: 206786
  derived and/or modified CDS sequence (opt5) from neuraminidase__InfluenzaA__ABD16475

SEQ ID NO: 206876 - RNA, 1410 nt, Artificial Sequence; identical to SEQ ID NO: 206786
  derived and/or modified CDS sequence (opt5) from neuraminidase__InfluenzaA__ABD16486

SEQ ID NO: 206877 - RNA, 1410 nt, Artificial Sequence; identical to SEQ ID NO: 206813
  derived and/or modified CDS sequence (opt5) from neuraminidase__InfluenzaA__ABD16497

SEQ ID NO: 206878 - RNA, 1410 nt, Artificial Sequence; identical to SEQ ID NO: 206786
  derived and/or modified CDS sequence (opt5) from neuraminidase__InfluenzaA__ABD16508

SEQ ID NO: 206879 - RNA, 1410 nt, Artificial Sequence
  derived and/or modified CDS sequence (opt5) from neuraminidase__InfluenzaA__ABD16519
augaaccccaaucagaagaucauuaccaucggcagcgugucccugacaauuucuacgaucugcuucuuuaugcaaauugccauccucaucaccacagucacccugcacuucaaacaguacgaguuuaacagcccuccgaauaaccagguuaugcuuugugaacccacaauuaucgagagaaauauuaccgaaaucguguaucugacaaacaccacgauugagaaggaaaucugcccuaaacucgcugaguaccggaauugguccaagccccagugugacauuaccggguucgccccuuuuucuaaagauaacagcauccgccuguccgcgggaggcgacaucugggugacaagagagcccuaugucucuugcgauccugacaaguguuaccaauucgcucuugggcagggaaccacacugaauaacgugcauagcaaugauaccguucacgaccggacgccguaucgcacacuccugaugaacgaacugggcgugcccuuucaucucgggaccaagcaggucugcauugccugguccucuagcuccugucacgauggaaaagccuggcugcaugugugcguuacaggcgacgauaagaaugcuaccgccagcuucaucuacaacggcagacuuguggacucuauugucuccuggagcaaagauauccugcggacccaggagucugaaugugugugcauuaaugggacauguacgguggucaugaccgacggauccgcuagcggcaaggccgauacaaaaauccucuuuaucgaggaggggaagauuguucacaccuccacacugucuggaagcgcgcaacacguggaagagugcuccugcuauccucgcuaccccggcgugagaugugucugccgggacaacuggaaggggagcaaccgcccuaucguggacauuaauaucaaagauuacucuauuguuuccagcuauguguguucuggacuugucggcgacacccccagaaagacggauagcuccucuagcucccauugccuggacccgaacaaugaagagggcgggcacggagugaaaggcugggccuucgaugacgggaacgauguuuggaugggacggacaaucagcgaaaagcuccgccugggcuacgagaccuuuaaagugaucgagggguggucuaauccuaacuccaagcugcagauuaauagacaggucaucguggaccggggaaaccgcagcggcuauucuggcauuuucuccgucgaagggaaaagcuguaucaauagaugcuuuuacguggagcucauucggggaagaaaggaagagaccgaaguucuguggacauccaacucuaucguggucuucuguggcaccagcgggacauauggaacgggcuccuggcccgauggggcugacauuaaucuuaugccuaucuga

SEQ ID NO: 206880 - RNA, 1410 nt, Artificial Sequence
  derived and/or modified CDS sequence (opt5) from neuraminidase__InfluenzaA__ABD16530
augaaccccaaucagaagaucauuaccaucggcagcgugucccugacaauugccacgaucugcuuccucaugcaaauugcuauccuggucaccacaguuacccuucacuuuaaacagcaugaguguaacucuccuccgaauaaccaggugaugcugugcgaacccacaaucauugagagaaauaucaccgaaauuguguaccucacaaacaccacgaucgagaaggaaauuuguccuaaacuggucgaguaucggaauuggagcaagccccagugcaacaucaccggguucgccccuuuuuccaaagacaauucuauucgccuuagcgcgggaggcgauaucugggugacaagagagcccuacguuuccugugacccugauaagugcuaucaauucgcucuggggcagggaaccacacucaacaauggccacucuaacgacaccgugcaugaucggacgccguaccgcacacugcugaugaaugaacucgggguccccuuucaccugggaaccagacagguguguaucgccuggagcuccagcucuugccaugacggcaaggccuggcuucacguuugugugacaggcgaugacaaaaacgcuaccgccuccuucauuuauaaugggcggcuggucgauagcaucggaucuugguccaagaaaauucuccgcacccaggagagcgaaugcguguguaucaacggcacaugcacgguggucaugaccgacgggucugcuuccggaaaggccgauacaaaaauucuguuuaucgaggagggcaagaucguucacauuagcacccuuuccgggucugcgcaacauguggaagagugcagcuguuacccuagauaucccggagugcggugcgucugucgcgacaacuggaagggcuccaauagaccuaucguggauauuaacguuaaagacuacagcaucgugucuuccuacgucugcagcggccuggugggggacacaccccggaagaaugauucuuucagcuccucucacugucucgacccgaacaaugaagagggaggccaugggguuaaaggaugggccuuugaugacggcaacgauguguggauggggcgcaccauuagcgaaaagcugagauccggauaugagacguucaaagucaucgagggcuggagcaagccuaauucuaaacugcagaucaaccgccaggugauugucgaacggggcaauagauccggguacagcggaaucuuuucuguggagggcaagcggugcauuaacagauguuucuauguugaacucauccgcgggcggaaggaggaaacagaggugugguggaccuccaauagcauugucguguuuugcggaaccuccggcacauacgggaccggcucuuggcccgacggagcugauaucaaccugaugccuauuuga

SEQ ID NO: 206881 - RNA, 1410 nt, Artificial Sequence; identical to SEQ ID NO: 206663
  derived and/or modified CDS sequence (opt5) from neuraminidase__InfluenzaA__ABD16541

SEQ ID NO: 206882 - RNA, 1410 nt, Artificial Sequence; identical to SEQ ID NO: 206786
  derived and/or modified CDS sequence (opt5) from neuraminidase__InfluenzaA__ABD16552

SEQ ID NO: 206883 - RNA, 1410 nt, Artificial Sequence; identical to SEQ ID NO: 206785
  derived and/or modified CDS sequence (opt5) from neuraminidase__InfluenzaA__ABD16563

SEQ ID NO: 206884 - RNA, 1410 nt, Artificial Sequence
  derived and/or modified CDS sequence (opt5) from neuraminidase__InfluenzaA__ABD16574
augaaccccaaucagaagaucauuaccaucggcagcgugucccugacaauugccacgaucugcuuccucaugcaaauugcuauccuggucaccacaguuacccuucacuuuaaacaguacgaguguucuagcccuccgaacaaucaggugaugcccugcgaaccuacaaucauugagagaaacaucaccgaaauuguguaucugacaaauaccacgaucgagaaggaaauuugucccaaacucgucgaguaccggaacugguccaagccucagugcaaaaucaccggguucgcccccuuuucuaaggacaauagcauucgccuguccgcgggaggcgauaucugggugacaagagagccuuauguuucuugugacccggggaagugcuaccaauucgcucuuggacagggcaccacacugaacaaucggcauagcaacgauaccgugcacgaccgcacgcccuauagaacacuccugaugaaugaacugggggucccuuuucaucucggaaccaaacagguguguaucgccugguccuccucuuccugccacgauggcaaggccuggcugcauguuugugugacaggccacgacgagaacgcuaccgccagcuucauuuacgaugggcggcuugucgacucuaucggauccuggagcaaaaauauucugcgcacccaggaaucugagugcguguguaucaacggcacaugcacgguggucaugaccgauggguccgcuagcgagagagccgacacaaagauucucuuuaucgaagagggaaaaaucguucacauuagcccccugucuggcagcgcgcaacauguggaagagugcuccuguuauccucgguaccccggggugcgcugcgucuguagagauaauuggaagggaagcaaccggccgaucguggacauuaacguuaaggauuacucuaucguguccagcuaugucugcucuggccuugugggcgacaccccucgcaaaaaugacagaagcuccucuagcuacugucggaaccccaauaacgaaaaggggucccacggaguuaaaggcugggccuucgaugacgggaaugauguguggaugggacgcacaauuggcgaggagcugagaagcggguaugaaaccuuuaaggucaucggaggcuggucuacgccuaacuccaaacuccagaucaauagacaggugauugucgacagcggcaacagaucuggguacuccggaaucuucagcguggagggcaaguccugcauuaaucgcuguuuuuauguugaacugauccgggggcggaaaaaggagacacgcgugugguggaccucuaacagcauugucguguucugcggaaccuccggcacauacgggaccggcucuuggcccgauggagcugacaucaaucugaugcccauuuga

SEQ ID NO: 206885 - RNA, 1410 nt, Artificial Sequence
  derived and/or modified CDS sequence (opt5) from neuraminidase__InfluenzaA__ABD16585
augaaccccaaucagaagaucauuaccaucggcagcgugucccugacaauugccacgaucugcuuccucaugcaaauugcuauccuggucaccacaguuacccuucacuuuaaacaguacgaguguucuagcccuccgaacaaucaggugaugcccugcgaaccuacaaucauugagagaaacaucaccgaaauuguguaucugacaaauaccacgaucgagaaggaaauuugucccaaacucgucgaguaccggaacugguccaagccucagugcaaaaucaccggguucgcccccuuuucuaaggacaauagcauucgccuguccgcgggaggcgauaucugggugacaagagagccuuauguuucuugugacccggggaagugcuaccaauucgcucuuggacagggcaccacacugaacaaucggcauagcaacgauaccgugcacgaccgcacgcccuauagaacacuccugaugaaugaacugggggucccuuuucaucucggaaccaaacagguguguaucgccugguccuccucuuccugccacgauggcaaggccuggcugcauguuugugugacaggccacgacaaaaacgcuaccgccagcuucauuuacgaugggcggcuugucgacucuaucggauccuggagcaagaauauucugcgcacccaggagucugaaugcguguguaucaacggcacaugcacgguggucaugaccgauggguccgcuagcgagagagccgacacaaaaauucucuuuaucgaggaaggaaagaucguucacauuagcccccugucuggcagcgcgcaacauguggaggaaugcuccuguuauccucgguaccccggggugcgcugcgucuguagagauaauuggaagggaagcaaccggccgaucguggacauuaacguuaaagauuacucuaucguguccagcuaugucugcucuggccuugugggcgacaccccucgcaagaaugacagaagcuccucuagcuacugucggaaccccaauaacgagaaagggucccacggaguuaagggcugggccuucgaugacgggaaugauguguggaugggacgcacaauuggcgaggaacugagaagcggguaugagaccuuuaaagucaucggaggcuggucuacgccuaacuccaagcuccagaucaauagacaggugauugucgacagcggcaaccggucuggguacuccggaaucuucagcguggaaggcaaauccugcauuaaucgcuguuuuuauguugagcugauccgggggagagaacaggagacacgcgugugguggaccucuaacagcauugucguguucugcggaaccuccggcacauacgggaccggcucuuggcccgauggagcugacaucaaucugaugcccauuuga

SEQ ID NO: 206886 - RNA, 1410 nt, Artificial Sequence
  derived and/or modified CDS sequence (opt5) from neuraminidase__InfluenzaA__ABD16721
augaaccccaaucagaagaucauuaccaucggcagcgugucccugacaauugccacgaucugcuuccucaugcaaauugcuauccuggucaccacaguuacccuucacuuuaaacaguacgaguguucuagcccuccgaacaaucaggugaugcccugcgaaccuaucauuaucgagagaaacauuacaaagaucguguaucugaccaauacaaccauugaaaaagagaucugucccaagcucgucgaauaccggaacugguccaaaccucagugcaagauuacgggguucgcccccuuuucuaaggacaauagcauccgccuguccgcgggaggcgauaucugggugaccagagagccuuauguuucuugugacccggggaaaugcuaccaauucgcucuuggacagggcacaacccugaacaauaagcauagcaacgauacaauucacgaccggacccccuaucgcacgcuccugaugaaugagcugggggugccuuuucaucucggaacaaaacaggucuguaucgccugguccuccucuuccugccacgauggcaaggccuggcugcauguguguguuaccggccacgacaaaaacgcuacagccagcuucauuuacgaugggagacuuguggacucuaucggauccuggagcaagaauauucugcggacccaggaaucugagugcgucuguaucaacgggaccugcacaguggugaugacggauggcuccgcuagcgaacgcgccgacaccaagauccucuuuauugaggagggaaaaaucguccacauuagcccccugucuggcagcgcgcaacauguugaagagugcuccuguuauccuagauaccccggggugcggugcgugugucgcgauaauuggaagggaagcaacagaccgaucgucgacauuaacgugaaagauuacucuaucguuuccagcuaugugugcucuggccuugucggcgacacaccucggaagaaugaccgcagcuccucuagcuacugucagaaccccaauaacgaaaaagggaaucacggagugaagggcugggccuucgaugacgggaacgauguuuggaugggaagaaccaucggcgaggaacugcgguccggguaugagacauuuaaagugauuggaggcuggagcaccccuaauucuaagcuccagaucaaccgccaggucauuguggacuccaagaauagaagcggcuacucugggaucuucuccgucgagggaaaaagcugcauuaaccgguguuuuuauguggaacugaucagaggccgcgagcaagaaacgcggguuugguggacauccaauucuauuguggucuucugcgggaccagcggaaccuacggcacaggguccuggcccgauggcgcugacaucaaccugaugcccaucuga

SEQ ID NO: 206887 - RNA, 1410 nt, Artificial Sequence; identical to SEQ ID NO: 206556
  derived and/or modified CDS sequence (opt5) from neuraminidase__InfluenzaA__ABD16732

SEQ ID NO: 206888 - RNA, 1410 nt, Artificial Sequence
  derived and/or modified CDS sequence (opt5) from neuraminidase__InfluenzaA__ABD16743
augaaccccaaucagaagaucauuaccaucggcagcgugucccugacaauugccacgaucugcuuccucaugcaaauugcuauccuggucaccacaguuacccuucacuuuaaacaguacgagugugacucuccugccaacaaucaggugaugccgugcgaacccaucauuaucgagagaaacauuacagaaaucguguaucugaccaauacaaccauugagaaggaaaucuguccuaaacucgucgaguaccggaacuggagcaagccccagugcaaaauuacgggguucgcgccuuuuuccaaggauaauucuauccgccugagcgcuggaggcgacaucugggugaccagagagcccuauguuuccugugauccugggaagugcuaccaauucgcccuuggacagggcacaacccuggacaacaaacauucuaaugauacaauucacgaccggaccccgcaucgcacgcuccugaugaacgaacugggggugcccuuucaccucggaacaagacaggucuguaucgccuggagcuccagcucuugccaugauggcaaggcuuggcugcacguguguguuaccggcuaugacaaaaaugccacagcuuccuucauuuacgaugggcggcuuguggacagcaucggaucuuggucccagaacauucugcgcacccaagagagcgaaugcgucuguaucaauggaaccugcacaguggugaugacggaugggucugccuccggcagagcggacaccaagauccucuuuauugaggagggcaaaaucguccacacaagcccucuguccgggucugcccagcauguugaagagugcagcuguuauccccgguacccuggagugcgcugcauuuguagagauaacuggaagggcuccaaucggcccguggucgacaucaacgugaaggacuacagcauugauucuuccuauguuugcagcggccuugugggggacaccccgcgcaacaaugauagaucuagcuccucuuacugucggaacccuaauaacgaaaaaggaacacacggcgucaaggggugggcuuucgacgauggaaaugacguguggaugggccgcaccaucagcgaggauuccagaagcggguaugaaacguuuaaaguuaucggaggcuggucuacacccaacuccaagcugcagaugaauagacaggugauugucgacagcgauaaccggucuggcuacuccgggaucuucagcguggagggaaaauccugcauuaaucgcuguuuuuaugucgagcucauccggggcagagaacaagagacccgcgugugguggaccucuaacagcauuguuguguucugcgggacauccggaaccuacggcacagggucuuggccugacggcgccgauaucaaucugaugcccauuuga

SEQ ID NO: 206889 - RNA, 1410 nt, Artificial Sequence; identical to SEQ ID NO: 206648
  derived and/or modified CDS sequence (opt5) from neuraminidase__InfluenzaA__ABD16754

SEQ ID NO: 206890 - RNA, 1410 nt, Artificial Sequence; identical to SEQ ID NO: 206746
  derived and/or modified CDS sequence (opt5) from neuraminidase__InfluenzaA__ABD16765

SEQ ID NO: 206891 - RNA, 1410 nt, Artificial Sequence; identical to SEQ ID NO: 206190
  derived and/or modified CDS sequence (opt5) from neuraminidase__InfluenzaA__ABD17326

SEQ ID NO: 206892 - RNA, 1410 nt, Artificial Sequence
  derived and/or modified CDS sequence (opt5) from neuraminidase__InfluenzaA__ABD38137
augaaccccaaucagaagaucauuaccaucggcagcgugucccugacaauugccacgaucugcuuccucaugcaaauugcuauccuggucaccacaguuacccuucacuuuaaacaguacgaguguaacucuccuccgaauaaccaggugaugcugugcgaacccacaaucauugagagaaauaucaccgaaauuguguaucucacaaacaccacgaucgagaaggaaauuuguccuaaacuggccgaguaccggaauuggagcaagccccagugcaacaucaccggguucgcgccuuuuuccaaagacaauucuauucgccuuagcgcuggaggcgauaucugggucacaagagagcccuauguguccugugacccugauaagugcuaccaauucgcccuggggcagggaaccacacucaacaauggccauucuaacgacaccguucacgaucggacgccguaucgcacacugcugaugaaugaacucggggugcccuuucaucugggaaccagacaggucuguaucgccuggagcuccagcucuugccacgacggcaaggcuuggcuucauguguguguuacaggcgaugacgagaacgccaccgcuuccuucauuuacaaugggcggcugguggauagcaucggaucuugguccaaaaagauucuccgcacccaggaaagcgagugcgucuguaucaacggcacaugcacgguggugaugaccgacgggucugccuccggaaaagcggauacaaagauucuguuuaucgaggaaggcaaaaucguccacauuagcacccuuuccgggucugcccaacacguugaggaaugcagcuguuauccuagauaccccggagugcggugcgugugucgcgacaacuggaagggcuccaauagaccuaucauugauaucaacgucaaggacuacagcauugugucuuccuauguuugcagcggccuggugggggacacaccccggaaaaaugauucuuucagcuccucucauugucucgacccgaacaaugaggaaggaggccacggggucaagggaugggcuuuugaugacggcaacgauguguggauggggcgcaccaucagcgagaaacugagauccggauacgagacguucaagguuaucgaaggcuggagcaaaccuaauucuaagcugcagacaaaccgccaggugauugucgagcggggcaauagauccggguauagcggaaucuuuucuguggaaggcaaauccugcauuaaccgguguuucuacgucgagcucaucagagggcgcaaggaggaacccgaggugugguggaccagcaauuccauuguuguguuuugcggaaccccuggcacauaugggaccggcucuuggcccgacggagccgauaucaaccugaugcccauuuga

SEQ ID NO: 206893 - RNA, 1413 nt, Artificial Sequence; identical to SEQ ID NO: 206458
  derived and/or modified CDS sequence (opt5) from neuraminidase__InfluenzaA__ABD60782

SEQ ID NO: 206894 - RNA, 1410 nt, Artificial Sequence
  derived and/or modified CDS sequence (opt5) from neuraminidase__InfluenzaA__ABD60793
augaaccccaaucagaagaucauuaccaucggcagcgugucccugacaauugccacgaucugcuuccucaugcaaauugcuauccuggucaccacaguuacccuucacuuuaaacaguacgagugugacucuccugugaacaaucaggugaugccgugcgaacccaucauuaucgagagaaacauuacagaaaucgucuaucugaccaauacaaccauugagaaggaaaucuguccuaaacucguggaguaccggaacuggagcaagccccagugcaaaauuacgggguucgccccuuuuuccaaggauaauucuauccgccugagcgcgggaggcgacaucuggguuaccagagagcccuauguguccugugauccugggaagugcuaccaauucgcucuuggacagggcacaacccuggacaacaaacauucuaaugauacaauucacgaccggaccccgcaucgcacgcuccugaugaacgaacuggggguccccuuucaccucggaacaagacagguguguaucgccuggagcuccagcucuugccaugauggcaaggccuggcugcacguuugugugaccggcuaugacaaaaaugcuacagccuccuucauuuacgaugggcggcuugucgacagcaucgugucuuggucccagaacauucugcgcacccaagagagcgaaugcguguguaucaauggaaccugcacagucguuaugacggauggcucugcuuccgagagagccgacaccaagauccucuuuauugaggaagggaaaaucgugcacauuagcccucuguccggaucugcgcagcauguggaggaaugcagcuguuauccccgguacccuggcguccgcugcaucuguagagauaacuggaagggguccaaucggcccgugguugacauuaacgugaaggacuacagcaucgauucuuccuaugucugcagcggacuugugggcgacacaccgcgcaacaaugauagaucuagcaacuccuacugucggaauccuaacaaugagaaaggcaaccacgggguuaagggaugggccuucgacgauggcaaugaccuguggauggggcgcaccaucucugaagauagcagauccggauaugagacauuuaaagugauuggcggguggagcacccccaacucuaagcuccagaucaaucggcaggucauuguggacuccgauaacagaagcggauacucuggcaucuucuccgucgagggcaaaagcugcauuaaucgcuguuuuuauguggaacugauccgggggagagagcaagaaacgcgcguuugguggacauccaacucuauuaucguguucugcggaaccagcggcaccuacgggacaggauccuggccugacggcgcugauaucaaucugaugcccauuuga

SEQ ID NO: 206895 - RNA, 1410 nt, Artificial Sequence; identical to SEQ ID NO: 206591
  derived and/or modified CDS sequence (opt5) from neuraminidase__InfluenzaA__ABD60804

SEQ ID NO: 206896 - RNA, 1410 nt, Artificial Sequence; identical to SEQ ID NO: 206784
  derived and/or modified CDS sequence (opt5) from neuraminidase__InfluenzaA__ABD60815

SEQ ID NO: 206897 - RNA, 1410 nt, Artificial Sequence; identical to SEQ ID NO: 206786
  derived and/or modified CDS sequence (opt5) from neuraminidase__InfluenzaA__ABD60826

SEQ ID NO: 206898 - RNA, 1410 nt, Artificial Sequence; identical to SEQ ID NO: 206865
  derived and/or modified CDS sequence (opt5) from neuraminidase__InfluenzaA__ABD60837

SEQ ID NO: 206899 - RNA, 1410 nt, Artificial Sequence
  derived and/or modified CDS sequence (opt5) from neuraminidase__InfluenzaA__ABD60848
augaaccccaaucagaagaucauuaccaucggcagcgugucccugacaauugccacgaucugcuuccucaugcaagucgcuauucugguuaccacagugacccuucacuuuaaacaguacgaguguaacucuccuccgaauaaccaggugaugcugugcgaacccacaaucaucgagagaaauauuaccgaaaucgucuaucucacaaacaccacgauugagaaggaaaucuguccuaaacuggccgaguaccggaauuggagcaagccccagugcaacauuaccggguucgcgccuuuuuccaaagacaauucuauccgccuuagcgcuggaggcgauauuugggugacaagagagcccuauguuuccugugacccugauaagugcuaccaauucgcccuggggcagggaaccacacucaacaauggccauucuaacgacaccgugcacgaucggacgccguaucgcacacugcugaugaaugaacucgggguccccuuucaucugggaaccaaacagguguguaucgccuggagcuccagcucuugccacgacggcaaggcuuggcuucauguuugugugacaggcgaugacgagaacgccaccgcuuccuucaucuacaaugggagacuggucgauagcauuggaucuugguccaagaaaauccuccggacccaggaaagcgagugcguguguauuaacggcacaugcacgguggucaugaccgacgggucugccuccggaaaggcggauacaaaaauccuguuuauugaggaaggcaagaucguucacaccagccuucuguccgggucugcccaacacguggaggaaugcagcuguuauccucgcuaccccggagugagaugcgucugucgggacaacuggaagggcuccaaucgcccuaucguggauauuaacguuaaagacuacagcaucgugucuuccuaugucugcagcggccucgugggggacacacccagaaagaaugauucuagcuccucuagccauugucuggacccgaacaaugaggaaggaggccacgggguuaaaggaugggcuuucgaugacggcaacgauguguggauggggcggaccauuuccgagaagcugcgcagcggauacgagacguuuaaagucaucgaaggcuggucuaagccuaauuccaaacuccagauuaacagacaggugaucgucgaccggggcaaucgcagcggguauucuggaaucuucuccguggagggcaagagcugcauuaacagauguuuuuacguugaacugauccgggggagaaagcaggagacagaagugcuuuggaccuccaauucuauugucguguucugcggaaccagcggcacauaugggaccggcuccuggcccgauggagccgacaucaaccugaugccuauuuga

SEQ ID NO: 206900 - RNA, 1413 nt, Artificial Sequence
  derived and/or modified CDS sequence (opt5) from neuraminidase__InfluenzaA__ABD60881
augaaccccaaucagaagaucauuaccaucggcagcauuuccaucgccauugggaucaucucucugaugcuccaaauuggaaacaucauuagcaucugggcuucccacucuauucagacaggcagccagaaucauacggggaucugcaaccagagaauuaucaccuacgagaauagcacaugggugaaccacaccuaugucaauaucaacaauacaaacguuguggccggaaaagacaagaccucugugacacuggcgggcaauagcucccuuuguagcauuucugggugggcuaucuacaccaaagauaacuccauucggaucggaagcaagggcgacgucuucgugauucgcgaaccuuuuaucucuugcucccaucuggaguguagaacguucuuucucacccaaggcgcccugcuuaaugauaaacacagcaacgggacaguuaaggaccggucuccguaucgcgcccugauguccugcccccucggagaagcuccuagccccuacaauuccaaguucgagucuguggccuggagcgcuuccgccugucaugauggcaugggguggcugaccaucggaauuagcggcccugacaacggggcggucgccgugcugaaauauaacggaaucauuacagaaaccaucaagucuuggaaaaagcggauucucagaacgcaggaguccgagugcguuugugugaauggcagcugcuuuacaaucaugaccgauggccccucuaacggggcugccagcuacaaaaucuucaagauugaaaagggaaaagucacaaaguccaucgagcugaaugcuccuaacuuucacuaugaagaguguucuugcuacccggacaccggcaccgugaugugugugugccgcgauaauuggcacgggagcaacagacccugggucuccuucaaucagaaccuugacuaccagauuggauauaucugcagcggcguuuuuggggauaauccucggcccaaagacggagagggcucuuguaacccugugacaguggauggcgccgacggggucaagggauucuccuacaaauauggcaaugggguguggauuggacgcacgaaguccaacagacugcggaaaggcuuugaaaugaucugggaccccaauggguggaccgauacagacucuaacuucuccguuaagcaagauguggucgcgauuaccgacuggagcggcuacuccggaucuuuugugcagcauccggagcucacaggccuggauugcauccgcccuuguuucuggguugaacuugugagagggcugccccgggagaauaccacgaucuggacaagcggauccucuauuagcuucugcggcgucaacuccgacaccgccaacuggagcuggccugauggggcugaacuccccuuuaccaucgacaaguga

SEQ ID NO: 206901 - RNA, 1413 nt, Artificial Sequence
  derived and/or modified CDS sequence (opt5) from neuraminidase__InfluenzaA__ABD60892
augaaccccaaucagaagaucauuaccaucggcagcauuuccaucgccauugggaucaucucucugaugcuccaaauuggaaacaucauuagcaucugggcuucccacucuauucagacaggcagccagaaucauacggggaucugcaaccagagagugauuaccuacgagaauagcacaugggucaaccacaccuauguuaauaucaacaauacaaacgugguggccggaaaagacaagaccucugucacacuggcgggcaauagcucccuuuguagcaucucugggugggcuauuuacaccaaagauaacuccauccggauuggaagcaagggcgacguguucguuauccgcgaaccuuuuauuucuugcucccaucuggaguguagaacguucuuucucacccaaggcgcccugcuuaaugauaaacacagcaacgggacagugaaggaccggucuccguaucgcgcccugauguccugcccccucggagaagcuccuagccccuacaauuccaaguucgagucugucgccuggagcgcuuccgccugucaugauggcaugggguggcugaccaucggaaucagcggcccugacaacggggcgguggccguucugaaauauaacggaauuaucacagaaaccauuaagucuuggaaaaagagaauccuccggacgcaggaguccgagugcgugugugucaauggcagcugcuuuacaauuaugaccgauggccccucuaacggggcugccagcuacaaaaucuucaagaucgaaaagggaaaagugacaaaguccauugagcugaaugcuccuaacuuucacuaugaagaguguucuugcuacccggacaccggcaccgugaugugugucugccgcgauaauuggcacgggagcaacagacccuggguuuccuucaaucagaaccuugacuaccagaucggauauauuugcagcggcguguuuggggauaauccucggcccaaagacggagagggcucuuguaacccugugacagucgauggcgccgacggggugaagggauucuccuacaaauauggcaaugggguuuggaucggacgcacgaaguccaacagacugcggaaaggcuuugaaaugauuugggaccccaauggguggaccgauacagacucuaacuucuccgugaagcaagaugucguggcgaucaccgacuggagcggcuacuccggaucuuuuguucagcauccggagcucacaggccuggauugcauucgcccuuguuucuggguggaacuugucagagggcugccccgggagaauaccacgaucuggacaagcggauccucuaucagcuucugcggcgugaacuccgacaccgccaacuggagcuggccugauggggcugaacuccccuuuaccauugacaaguga

SEQ ID NO: 206902 - RNA, 1413 nt, Artificial Sequence; identical to SEQ ID NO: 206900
  derived and/or modified CDS sequence (opt5) from neuraminidase__InfluenzaA__ABD60903

SEQ ID NO: 206903 - RNA, 1413 nt, Artificial Sequence; identical to SEQ ID NO: 206487
  derived and/or modified CDS sequence (opt5) from neuraminidase__InfluenzaA__ABD60914

SEQ ID NO: 206904 - RNA, 1410 nt, Artificial Sequence
  derived and/or modified CDS sequence (opt5) from neuraminidase__InfluenzaA__ABD60925
augaaccccaaucagaagaucauuaccaucggcagcgugucccugacaauugccacgaucugcuuccucaugcaaauugcuauccuggucaccacaguuacccuucacuuuaaacagcaugaguguaacucuccuccgaauaaccaggugaugcugugcgaacccacaaucauugagagaaauaucaccgaaauuguguaccucacaaacaccacgaucgagaaggaaauuuguccuaaacuggccgaguaucggaauuggagcaagccccagugcaacaucaccggguucgcgccuuuuuccaaagacaauucuauucgccuuagcgcuggaggcgauaucugggucacaagagagcccuacguguccugugacccugauaagugcuaucaauucgcccuggggcagggaaccacacucaacaauggccacucuaacgacaccguucaugaucggacgccguaccgcacacugcugaugaaugaacucggggugcccuuucaccugggaaccagacaggucuguaucgccuggagcuccagcucuugccaugacggcaaggcuuggcuucacguguguguuacaggcgaugacaaaaacgccaccgcuuccuucauuuauaaugggcggcugguggauagcaucggaucuugguccaagaaaauucuccgcacccaggagagcgaaugcgucuguaucaacggcacaugcacgguggugaugaccgacgggucugccuccggaaaggcggauacaaaaauucuguuuaucgaggagggcaagaucguccacauuagcacccuuuccgggucugcccaacauguugaagagugcagcuguuacccuagauaucccggagugcggugcgugugucgcgacaacuggaagggcuccaauagaccuaucgucgauauuaacaucaaagacuacagcauugugucuuccuacguuugcagcggccuggugggggacacaccccggaagaaugauucuuucagcuccucucacugucucgacccgaacaaugaagagggaggccauggggucaaaggaugggcuuuugaugacggcaacgauguguggauggggcgcaccaucagcgaaaagcugagauccggauaugagacguucaaaguuaucgagggcuggagcaagccuaauucuaaacugcagauuaaccgccaggugaucgucgaacggggcaauagauccggguacagcggaaucuuuucuguggagggcaaguccugcauuaaccgguguuucuaugucgaacucauuagagggcgcaaggaggaaacagaggugugguggaccagcaauuccaucguuguguuuugcggaaccucuggcacauacgggaccggcagcuggcccgacggagccgauauuaaccugaugccuaucuga

SEQ ID NO: 206905 - RNA, 1413 nt, Artificial Sequence
  derived and/or modified CDS sequence (opt5) from neuraminidase__InfluenzaA__ABD60947
augaaccccaaucagaagaucauuaccaucggcagcauuugcauggccaucgggauuaucucccugauccuccaaauuggaaacaucauuucuaucugggugagccacuccauucagacaggcucucagaaucauacggggaucuguaaccagagaauuaucaccuacgagaauagcacaugggucaaccaaaccuauguuaauaucuccaacacaaaugugguggcuggaaaagacaccacaucuaugacccuggccggcaacagcucccuuugcccuauucgggggugggcgaucuacagcaaggauaauucuauucgcaucggauccaaaggcgacgucuucgugauuagagaaccguuuaucagcuguucucaccuggagugccggacguucuuucucacccagggcgcucugcuuaacgauaagcauuccaaugggacaaucaaagaccgcagccccuauagagcccugaugucuuguccuauuggagaagcccccuccccuuacaacagccgguucgaguccguugcuuggucugccagcgcuugccacgauggcaugggguggcucaccaucggaauuuccggccccgacgauggggccguggcgguccugaaguauaauggaaucauuacagaaaccaucaagagcuggcgcaaacagauccugagaacgcaggagucugagugugugugcguuaacggcuccuguuuuacaauuaugaccgacggcccuagcgaugggccggccucuuaccggaucuucaagauugaaaaaggaaagaucacaaaaagcauugagcucgacgcucccaacucccauuaugaagagugcucuuguuacccugauaccggcaccgugaugugcgucugccgcgacaauuggcacgggagcaacagacccuggguguccuuuaaucaaaaccuggauuaccagaucggauauauuuguagcggcguguucggggacaauccucggcccaaggacggaaagggcucuugcgauccggucaacguugacggcgccgauggggugaaaggauuuuccuaccgcuauggcaaugggguguggaucggaagaacaaagagcaacucuucccggaaaggcuucgagaugaucugggacccuaauggguggacggauaccgacagcaacuuucuugucaagcaggaugugguugcuaugacagacugguccggcuacucuggcagcuucgugcagcaccccgaacugaccggacucgauuguaugcgcccuugcuuuugggucgagcugauuagagggcggcccagagagaaaacaaccaucuggacguccggaucuagcauuuccuucuguggcgugaauagcgacacaguuaacuggucuuggcccgauggggccgaacuuccuuucaccaucgacaaguga

SEQ ID NO: 206906 - RNA, 1410 nt, Artificial Sequence
  derived and/or modified CDS sequence (opt5) from neuraminidase__InfluenzaA__ABD61263
augaaccccaaucagaagaucauuaccaucggcagcgugucccugacaauugccacgaucugcuuccucaugcaaauugcuauccuggucaccacaguuacccuucacuuuaaacagcaugaguguaacucuccuccgaauaaccaggugaugcugugcgaacccacaaucauugagagaaauaucaccgaaauuguguaccucacaaacaccacgaucgagaaggaaauuuguccuaaacuggccgaguaucggaauuggagcaagccccagugcaacaucaccggguucgcgccuuuuuccaaagacaauucuauucgccuuagcgcuggaggcgauaucugggucacaagagagcccuacguguccugugacccugauaagugcuaucaauucgcccuggggcagggaaccacacucaacaauggccacucuaacgacaccguucaugaucggacgccguaccgcacacugcugaugaaugaacucggggugcccuuucaccugggaaccagacaggucuguaucgccuggagcuccagcucuugccaugacggcaaggcuuggcuucacguguguguuacaggcgaugacaaaaacgccaccgcuuccuucauuuauaaugggcggcugguggauagcaucggaucuugguccaagaaaauucuccgcacccaggagagcgaaugcgucuguaucaacggcacaugcacgguggugaugaccgacgggucugccuccggaaaggcggauacaaaaauucuguuuaucgaggagggcaagaucguccacauuagcacccuuuccgggucugcccaacauguugaagagugcagcuguuacccuagauaucccggagugcggugcgugugucgcgacaacuggaagggcuccaauagaccuaucgucgauauuaacgugaaagacuacagcaucguuucuuccuacgugugcagcggccuggucggggacacaccccggaagaaugauucuuucagcuccucucacugucucgacccgaacaaugaagagggaggccaugggaugaaaggaugggcuuuugaugacggcaacgauguguggauggggcgcaccauuagcgaaaagcugagauccggauaugagacguucaaaguuaucgagggcuggagcaagccuaauucuaaacuccaggugaaccggcaggucaucguggaacgcggcaauagauccggguacagcggaaucuuuucugucgagggcaaguccugcauuaaccgguguuucuauguggaacugauuagagggcgcaaggaggaaacagagguuugguggaccagcaauuccaucguggucuuuugcggaaccucuggcacauacgggaccggcagcuggcccgacggagccgauauuaaccugaugccuaucuga

SEQ ID NO: 206907 - RNA, 1410 nt, Artificial Sequence; identical to SEQ ID NO: 206217
  derived and/or modified CDS sequence (opt5) from neuraminidase__InfluenzaA__ABD61274

SEQ ID NO: 206908 - RNA, 1410 nt, Artificial Sequence
  derived and/or modified CDS sequence (opt5) from neuraminidase__InfluenzaA__ABD61285
augaaccccaaucagaagaucauuaccaucggcagcgugucccugacaauuucuacgaucugcuucuuuaugcaaauugccauccucaucaccacagucacccugcacuucaaacaguacgaguuuaacagcccuccgaauaaccagguuaugcuuugugaacccacaauuaucgagagaaauauuaccgaaaucguguaucugacaaacaccacgauugagaaggaaaucugcccuaaacucgcugaguaccggaauugguccaagccccagugugacauuaccggguucgccccuuuuucuaaagauaacagcauccgccuguccgcgggaggcgacaucugggugacaagagagcccuaugucucuugcgauccugacaaguguuaccaauucgcucuugggcagggaaccacacugaauaacgugcauagcaaugauaccguucacgaccggacgccguaucgcacacuccugaugaacgaacugggcgugcccuuucaucucgggaccaagcaggucugcauugccugguccucuagcuccugucacgauggaaaagccuggcugcaugugugcguuacaggcgacgauaagaaugcuaccgccagcuucaucuacaacggcagacuuguggacucuauugucuccuggagcaaagagauccugcggacccaggaaucugagugugugugcauuaaugggacauguacgguggucaugaccgauggaaacgcuuccggcaaggccgacacaaaaauccucuuuaucgaggaagggaagauuguucacaccagcacacuguccggaucugcgcaacacguggaggaaugcagcugcuauccucgcuaccccggcgugagaugugucugccgggauaacuggaagggguccaaucgcccuaucguggacauuaacaucaaagacuacagcauuguuucuuccuauguguguagcggacuugucggcgauacccccagaaagaaugacucuagcuccucuagccauugccuggauccgaacaaugaggaaggcgggcacggagugaaaggcugggccuucgacgaugggaacgacguuuggaugggacggacgaucuccgagaagcuccgcagcggcuacgagacauuuaaagugaucgaaggguggucuaauccuaacuccaagcugcagauuaauagacaggucaucguggaucggggaaaccgcagcggcuauucuggcauuuucuccgucgaggggaaaagcuguaucaauagaugcuuuuacguggaacugauucggggaagaaaggaggaaaccgagguucucuggaccuccaacucuaucguggucuucuguggcacaagcgggaccuauggaacaggcuccuggcccgacggggcugauauuaaucugaugccuaucuga

SEQ ID NO: 206909 - RNA, 1410 nt, Artificial Sequence; identical to SEQ ID NO: 206663
  derived and/or modified CDS sequence (opt5) from neuraminidase__InfluenzaA__ABD61296

SEQ ID NO: 206910 - RNA, 1410 nt, Artificial Sequence; identical to SEQ ID NO: 206784
  derived and/or modified CDS sequence (opt5) from neuraminidase__InfluenzaA__ABD61307

SEQ ID NO: 206911 - RNA, 1410 nt, Artificial Sequence; identical to SEQ ID NO: 206802
  derived and/or modified CDS sequence (opt5) from neuraminidase__InfluenzaA__ABD61318

SEQ ID NO: 206912 - RNA, 1410 nt, Artificial Sequence; identical to SEQ ID NO: 206133
  derived and/or modified CDS sequence (opt5) from neuraminidase__InfluenzaA__ABD61340

SEQ ID NO: 206913 - RNA, 1410 nt, Artificial Sequence; identical to SEQ ID NO: 206133
  derived and/or modified CDS sequence (opt5) from neuraminidase__InfluenzaA__ABD61351

SEQ ID NO: 206914 - RNA, 1410 nt, Artificial Sequence
  derived and/or modified CDS sequence (opt5) from neuraminidase__InfluenzaA__ABD61362
augaaccccaaucagaagaucauuaccaucggcagcgugucccugacaauugccacgaucugcuuccucaugcaaauugcuauccuggucaccacaguuacccuucacuuuaaacaguacgaguguaacucuccuccgaauaaccaggugaugcugugcgaacccacaaucauugagagaaauaucaccgaaauuguguaucucacaaacaccacgaucgagaaggaagucuguccuaaacuggccgaguaccggaauuggagcaagccccagugcaacauuaccggguucgcgccuuuuuccaaagacaauucuauccgccuuagcgcuggaggcgauauuugggugacaagagagcccuauguuuccugugacccugauaagugcuaccaauucgcccuggggcagggaaccacacucaacaauggccauucuaacgacaccgugcacgaucggacgccguaucgcacacugcugaugaaugaacucgggguccccuuucaucugggaaccaaacagguguguaucgccuggagcuccagcucuugccacgacggcaaggcuuggcuucauguuugugugacaggcgaugacgagaacgccaccgcuuccuucaucuacaaugggagacuggucgauagcauuggaucuugguccaagaaaauccuccggacccaggaaagcgagugcguguguauuaacggcacaugcacgguggucaugaccgacgggucugccuccggaaaggcggauacaaaaauccuguuuauugaggaaggcaagaucguucacaccagcucccuuucugggagcgcccaacacguggaggaaugcuccuguuauccucgcuaccccggagugagaugcgucugucgggacaacuggaagggcagcaaucgcccuaucguggauauuaacguuaaagacuacucuaucguguccagcuaugucugcucuggccuggugggggacacacccagaaagaaugauagcuccucuagcucccauugucucgacccgaacaaugaggaaggaggccacgggguuaaaggaugggcuuucgaugacggcaacgauguguggauggggcggaccauuagcgagaagcugcgcucuggauacgagacguuuaaagucaucgaaggcugguccaagccuaauagcaaacugcagauuaacagacaggugaucgucgaccggggcaaucgcucuggguauuccggaaucuucagcguggagggcaaguccugcauuaacagauguuuuuacguugaacucauccgggggagaaagcaggagacagaagugcuguggaccucuaauagcauugucguguucugcggaaccuccggcacauaugggaccggcucuuggcccgauggagccgacaucgaucuuaugccuauuuga

SEQ ID NO: 206915 - RNA, 1410 nt, Artificial Sequence; identical to SEQ ID NO: 206865
  derived and/or modified CDS sequence (opt5) from neuraminidase__InfluenzaA__ABD61373

SEQ ID NO: 206916 - RNA, 1410 nt, Artificial Sequence
  derived and/or modified CDS sequence (opt5) from neuraminidase__InfluenzaA__ABD61384
augaaccccaaucagaagaucauuaccaucggcagcgugucccugacaauugccacgaucugcuuccucaugcaaauugcuauccuggucaccacaguuacccuucacuuuaaacaguacgaguguaacucuccuccgaauaaccaggugaugcugugcgaacccacaaucauugagagaaauaucaccgaaauuguguaucucacaaacaccacgaucgagaaggaaauuuguccuaaacuggccgaguaccggaauuggagcaagccccagugcaacaucaccggguucgcgccuuuuuccaaagacaauucuauucgccuuagcgcuggaggcgauaucugggucacaagagagcccuauguguccugugacccugauaagugcuaccaauucgcccuggggcagggaaccacacucaacaauggccauucuaacgacaccguucacgaucggacgccguaucgcacacugcugaugaaugaacucggggugcccuuucaucugggaaccaagcaggucuguaucgccuggagcuccagcucuugccacgacggcaaagccuggcuucauguguguguuacaggcgaugacgagaacgcuaccgcuuccuucauuuacaaugggagacugguggauagcaucggaucuugguccaagaaaauucuccggacccaggaaagcgagugcgucuguaucaacggcacaugcacgguggugaugaccgacgggucugccuccggaaaggcggauacaaaaauucuguuuaucgaggaaggcaagaucguccacaccagcucccuuucugggagcgcccaacacguugaggaaugcuccuguuauccucgcuaccccggagugagaugcgugugucgggacaacuggaagggcagcaaucgcccuauugucgauaucaacauuaaagacuacucuaucguguccagcuauguuugcucuggccuggugggggacacacccagaaagaaugauagcuccucuagcucccauugucucgacccgaacaaugaggaaggaggccacggggucaaaggaugggcuuucgaugacggcaacgauguguggauggggcggaccauuagcgagaagcugcgcucuggauacgagacguuuaaaguuaucgaaggcugguccaagccuaauagcaaacugcagaucaacagacaggugauugucgaccggggcaaucgcucuggguauuccggaaucuucagcguggaguccaagucuugcauuaacagauguuuuuacgucgaacucauccggggcagaaagcaggagacagaagugcuguggaccagcaauuccauuguuguguucugcgggaccucuggaacauauggcaccgggagcuggcccgauggcgccgacaucaaccuuaugccuauuuga

SEQ ID NO: 206917 - RNA, 1410 nt, Artificial Sequence; identical to SEQ ID NO: 206802
  derived and/or modified CDS sequence (opt5) from neuraminidase__InfluenzaA__ABD61395

SEQ ID NO: 206918 - RNA, 1410 nt, Artificial Sequence; identical to SEQ ID NO: 206899
  derived and/or modified CDS sequence (opt5) from neuraminidase__InfluenzaA__ABD61406

SEQ ID NO: 206919 - RNA, 1413 nt, Artificial Sequence; identical to SEQ ID NO: 206900
  derived and/or modified CDS sequence (opt5) from neuraminidase__InfluenzaA__ABD61521

SEQ ID NO: 206920 - RNA, 1410 nt, Artificial Sequence
  derived and/or modified CDS sequence (opt5) from neuraminidase__InfluenzaA__ABD61532
augaaccccaaucagaagaucauuaccaucggcagcgugucccugacaauugccacgaucugcuuccucaugcaaauugcuauccuggucaccacaguuacccuucacuuuaaacaguacgaguguucuagcccuccgaacaaucaggugaugcccugcgaaccuaucauuaucgagagaaacauuacagaaaucguguaucugaccaauacaaccauugagaaggaaaucugucccaaacucgucgaguaccggaacugguccaagccucagugcaaaauuacgggguucgcccccuuuucuaaggacaauagcauccgccuguccgcgggaggcgauaucugggugaccagagagccuuauguuucuugugacccggggaagugcuaccaauucgcucuuggacagggcacaacccugaacaauaaacauagcaacgauacaauucacgaccggacccccuaucgcacgcuccugaugaaugaacugggggugccuuuucaucucggaacaaagcaggucuguaucgccugguccuccucuuccugccacgauggcaaagccuggcugcauguguguguuaccggccacgacaagaacgcuacagccagcuucauuuacgaugggagacuuguggacucuaucggauccuggagcaaaaauauucugcggacccaggagucugaaugcgucuguaucaacgggaccugcacaguggugaugacggauggcuccgcuagcgagcgcgccgacaccaagauccucuuuauugaggaaggaaagaucguccacauuagcccccugucuggcagcgcgcaacauguugaggaaugcuccuguuauccuagauaccccggggugcggugcgugugucgcgauaauuggaaaggaagcaacagaccgaucgucgacauuaacgugaaggauuacucuaucguuuccagcuaugugugcucuggccuugucggcgacacaccucggaaaaaugaccgcagcuccucuagcuacuguagaaaccccaauaacgagaaggggaaucacggagugaaaggcugggccuucgaugacgggaacgauguuuggaugggacggaccaucggcgaggaacugcgcuccggguaugagacauuuaaggugauuggaggcuggagcaccccuaauucuaaacuccagaucaacagacaggucauuguggacuccgaaaaucggagcggcuacucugggaucuucuccgucgagggaaagagcugcauuaacagauguuuuuauguggaacugauccgcggccgggagcaggaaacgagaguuugguggacauccaauucuauuguggucuucugcgggaccagcggaaccuacggcacaggguccuggcccgauggcgcugacaucucucugaugcccaucuga

SEQ ID NO: 206921 - RNA, 1413 nt, Artificial Sequence
  derived and/or modified CDS sequence (opt5) from neuraminidase__InfluenzaA__ABD61543
augaaccccaaucagaagaucauuaccaucggcagcauuuccaucgccauugggaucaucucucugaugcuccaaauuggaaacaucauuagcaucugggcuucccacucuauucagacaggcagccagaaucauacggggaucugcaaccagagaauuaucaccuacgagaauagcacaugggugaaccacaccuaugucaauaucaacaauacaaacguuguggccggaaaagacaagaccucugugacacuggcgggcaauagcucccuuuguagcauuucugggugggcuaucuacaccaaagauaacuccauucggaucggaagcaagggcgacgucuucgugauucgcgaaccuuuuaucucuugcucccaucuggaguguagaacguucuuucucacccaaggcgcccugcuuaaugauaaacacagcaacgggacaguuaaggaccggucuccguaucgcgcccugauguccugcccccucggagaagcuccuagccccuacaauuccaaguucgagucuguggccuggagcgcuuccgccugucaugauggcaugggguggcugaccaucggaauuagcggcccugacaacggggcggucgccgugcugaaauauaacggaaucauuacagaaaccaucaagucuuggaaaaagcggauucucagaacgcaggaguccgagugcguuugugugaauggcagcugcuuuacaaucaugaccgauggccccucuaacggggcugccagcuacaaaaucuucaagauugaaaagggaaaagucacaaaguccaucgagcugaaugcuccuaacuuucacuaugaagaguguucuugcuacccggacaccggcaccgugaugugugugugccgcgauaauuggcacgggagcaacagacccugggucuccuucaaucagaaccuugacuaccagauuggauauaucugcagcggcguuuuuggggauaauccucggcccaaagacggagagggcucuuguaacccugugacaguggauggcgccgacggggucaagggauucuccuacaaauauggcaaugggguguggauuggacgcacgaaguccaacagacugcggaaaggcuuugaaaugaucugggaccccaauggguggaccgauacagacucuaacuucuccguuaagcaagauguggucgcgauuaccgacuggagcggcuacuccggaaauuuugugcagcauccggagcucacaggccuggauugcauccgcccuuguuucuggguugaacuugugagagggcugccccgggagaacaccacgaucuggacaucuggaagcuccauuucuuucugcggcgucaacagcgacaccgccaauugguccuggccugauggggcugaacuccccuuuaccaucgacaaguga

SEQ ID NO: 206922 - RNA, 1413 nt, Artificial Sequence; identical to SEQ ID NO: 206900
  derived and/or modified CDS sequence (opt5) from neuraminidase__InfluenzaA__ABD63066

SEQ ID NO: 206923 - RNA, 1410 nt, Artificial Sequence; identical to SEQ ID NO: 206325
  derived and/or modified CDS sequence (opt5) from neuraminidase__InfluenzaA__ABD77601

SEQ ID NO: 206924 - RNA, 1410 nt, Artificial Sequence
  derived and/or modified CDS sequence (opt5) from neuraminidase__InfluenzaA__ABD77612
augaaccccaaucagaagaucauuaccaucggcagcgugucccugacaauugccacgaucugcuuccucaugcaaauugcuauccuggucaccacaguuacccuucacuuuaaacaguacgaguguaacucuccuccgaauaaccaggugaugcugugcgaacccacaaucauugagagaaauaucaccgaaauuguguaucucacaaacaccacgaucgagaaggaaauguguccuaaacuggccgaguaccggaauuggcuuaagccccagugcaacauuaccggguucgcgccuuuuagcaaagacaauuccauccgccugucugcuggaggcgauauuugggucacaagagagcccuaugugagcugugacccugauaagugcuaccaauucgcccucgggcagggaaccacacugaacaauggccauuccaacgacaccguucacgaucggacgccguaucgcacacugcucaugaaugaacugggggugcccuuucaucuuggaaccaagcaggucuguaucgccuggucuagcuccagcugccacgacggcaaagccuggcugcauguguguguuacaggcgaugacgagaacgcuaccgcuucuaucauuuacaaugggagacucguggauuccaucggaagcuggucuaagaaaauucugcggacccaggaauccgagugcgucuguaucaacggcacaugcacgguggugaugaccgacgggagcgccucuggaaaggcggauacaaaaauucuuuucaucaaggagggcaagaucguccacaccuccagccuguccgggucugcccaacacguugaagagugcagcuguuauccucgcuaccccggagugagaugcgugugucgggacaacuggaaaggcuccaaucgcccuauugucgauaucaacgugaaggacuacagcauuguuucuuccuaugugugcagcggccucgucggggacacaccccggaaaaaugauucuagcuccucuagccauugucuggacccgaacaaugaagagggaggccacggggugaagggaugggcuuuugaugacggcaacgauguuuggauggggagaaccaucuccgaaaaacugcgcagcggauacgagacguucaaggugauugagggcuggucuaaagccaauuccaagcuccagaucaacagacaggucaucguggaccggggcaaucgcagcggguauucuggaaucuuuuccgucgaaagcaaguccugcauuaacagauguuucuacguggagcugauucggggcagaaaacaggaaacagagguucuuuggaccucuaauagcaucguggucuuuugcgggaccuccggaacauauggcaccgggucuuggccugauggcgcugacauuaaccugaugcccaucuga

SEQ ID NO: 206925 - RNA, 1410 nt, Artificial Sequence
  derived and/or modified CDS sequence (opt5) from neuraminidase__InfluenzaA__ABD77634
augaaccccaaucagaagaucauuaccaucggcagcgugucccugacaauugccacgaucugcuuccucaugcaaauugcuauccuggucaccacaguuacccuucacuuuaaacaguacgaguguaacucuccuccgaauaaccaggugaugcugugcgaacccacaaucauugagagaaauaucaccgaaauuguguaucucacaaacaccacgaucgagaaggaaauguguccuaaacuggccgaguaccggaauuggagcaagccccagugcaacauuaccggguucgcgccuuuuuccaaagacaauucuauccgccuuagcgcuggaggcgauauuugggucacaagagagcccuauguguccugugacccugauaagugcuaccaauucgcccuggggcagggaaccacacucaacaauggccauucuaacgacaccguucacgaucggacgccguaucgcacacugcugaugaaugaacucggggugcccuuucaucugggaaccaagcaggucuguaucgccuggagcuccagcucuugccacgacggcaaagccuggcuucauguguguguuacaggcgaugacgagaacgcuaccgcuuccaucauuuacaaugggagacugguggauagcaucggaucuugguccaagaaaauucuccggacccaggaaagcgagugcgucuguaucaacggcacaugcacgguggugaugaccgacgggucugccuccggaaaggcggauacaaaaauucuguucaucaaggagggcaagaucguccacaccagcucccuuucugggagcgcccaacacguugaagagugcuccuguuauccucgcuaccccggagugagaugcgugugucgggacaacuggaaaggcagcaaucgcccuauugucgauaucaacgugaaggacuacucuauuguuuccagcuaugugugcucuggccuggucggggacacaccccggaaaaaugauagcuccucuagcucccauugucucgacccgaacaaugaagagggaggccacggggugaagggaugggcuuuugaugacggcaacgauguuuggauggggagaaccaucagcgaaaaacugcgcucuggauacgagacguucaaggugauugagggcugguccaaagccaauagcaagcugcagaucaacagacaggucaucguggaccggggcaaucgcucuggguauuccggaauuuuuagcgucgaauccaagucuugcaucaacagauguuucuacguggagcucauucggggcagaaaacaggaaacagagguucuguggaccagcaauuccaucguggucuuuugcgggaccucuggaacauauggcaccgggagcuggccugauggcgcugacauuaaccuuaugcccaucuga

SEQ ID NO: 206926 - RNA, 1410 nt, Artificial Sequence; identical to SEQ ID NO: 206925
  derived and/or modified CDS sequence (opt5) from neuraminidase__InfluenzaA__ABD77645

SEQ ID NO: 206927 - RNA, 1410 nt, Artificial Sequence; identical to SEQ ID NO: 206925
  derived and/or modified CDS sequence (opt5) from neuraminidase__InfluenzaA__ABD77656

SEQ ID NO: 206928 - RNA, 1410 nt, Artificial Sequence; identical to SEQ ID NO: 206198
  derived and/or modified CDS sequence (opt5) from neuraminidase__InfluenzaA__ABD77700

SEQ ID NO: 206929 - RNA, 1413 nt, Artificial Sequence; identical to SEQ ID NO: 206900
  derived and/or modified CDS sequence (opt5) from neuraminidase__InfluenzaA__ABD77722

SEQ ID NO: 206930 - RNA, 1413 nt, Artificial Sequence; identical to SEQ ID NO: 206900
  derived and/or modified CDS sequence (opt5) from neuraminidase__InfluenzaA__ABD77733

SEQ ID NO: 206931 - RNA, 1410 nt, Artificial Sequence
  derived and/or modified CDS sequence (opt5) from neuraminidase__InfluenzaA__ABD77744
augaaccccaaucagaagaucauuaccaucggcagcgugucccugacaauugccacgaucugcuuccucaugcaaauugucauccugguuaccacagugacccuucacuuuaaacaguacgaguguaacucuccuccgaauaaccaggugaugcugugcgaacccacaaucauugagagaaauaucaccgaaauugucuaucucacaaacaccacgaucgagaaggaaauuuguccuaaacuggcugaguaccggaauuggagcaagccccagugcaacaucaccggguucgccccuuuuuccaaagacaauucuauucgccuuagcgcgggaggcgauaucugggugacaagagagcccuauguuuccugugacccugauaagugcuaccaauucgcucuggggcagggaaccacacucaacaauggccauucuaacgacaccgugcacgaucggacgccguaucgcacacugcugaugaaugaacucgggguccccuuucaucugggaaccaaacagguguguaucgccuggagcuccagcucuugccacgacggcaaggccuggcuucauguuugugugacaggcgaugacgagaacgcuaccgccuccuucauuuacaaugggagacuggucgauagcaucggaucuugguccaagaaaauucuccggacccaggaaagcgagugcguguguaucaacggcacaugcacgguggucaugaccgacgggucugcuuccggaaaggccgauacaaaaauucuguuuaucgaggaaggcaagaucguucacaccagccuucuguccgggucugcgcaacacguggaggaaugcagcuguuauccucgcuaccccggagugagaugcgucugucgggacaacuggaagggcuccaaucgcccuauuguggauaucaacguuaaagacuacagcauugugucuuccuaugucugcagcggccucgugggggacacacccagaaagaaugauucuagcuccucuagccauugucuggacccgaacaaugaggaaggaggccacgggguuaaaggaugggccuucgaugacggcaacgauguguggauggggcggaccaucuccgagaagcugcgcagcggauacgagacguuuaaagucauugaaggcuggucuaagccuaauuccaaacuccagaucaacagacaggugaucgucgaccggggcaaucgcagcggguauucuggaauuuucuccguggagggcaagagcugcaucaacagauguuuuuacguugaacugauucgggggagaaagcaggagacagaagugcuuuggaccuccaauucuaucgucguguucugcggaaccagcggcacauaugggaccggcuccuggcccgauggagcugacauuaaccugaugccuaucuga

SEQ ID NO: 206932 - RNA, 1410 nt, Artificial Sequence; identical to SEQ ID NO: 206925
  derived and/or modified CDS sequence (opt5) from neuraminidase__InfluenzaA__ABD77755

SEQ ID NO: 206933 - RNA, 1410 nt, Artificial Sequence; identical to SEQ ID NO: 206925
  derived and/or modified CDS sequence (opt5) from neuraminidase__InfluenzaA__ABD77766

SEQ ID NO: 206934 - RNA, 1410 nt, Artificial Sequence
  derived and/or modified CDS sequence (opt5) from neuraminidase__InfluenzaA__ABD77777
augaaccccaaucagaagaucauuaccaucggcagcgugucccugacaauugccacgaucugcuuccucaugcaaauugucauccugguuaccacagugacccuucacuuuaaacaguacgaguguaacucuccuccgaauaaccaggugaugcccugcgaaccuacaaucauugagagaaauaucaccgaaauugucuaucugacaaacaccacgaucgagaaggaaauuugucccaaacucgcugaguaccggaauuggagcaagccucagugcaacaucaccggguucgcccccuuuuccaaagacaauucuauucgccugagcgcgggaggcgauaucugggugacaagagagccuuauguuuccugugacccggauaagugcuaccaauucgcucuugggcagggaaccacacugaacaauggccauucuaacgacaccgugcacgaucggacgcccuaucgcacacuccugaugaaugaacugggggucccuuuucaucucggaaccaaacagguguguaucgccuggagcuccagcucuugccacgacggcaaggccuggcugcauguuugugugacaggcgaugacgagaacgcuaccgccuccuucauuuacaaugggagacuugucgauagcaucggaucuugguccaagaaaauucugcggacccaggaaagcgagugcguguguaucaacggcacaugcacgguggucaugaccgacgggucugcuuccggaaaggccgauacaaaaauucucuuuaucgaggaaggcaagaucguucacaccagccugcuuuccgggucugcgcaacacguggaggaaugcagcuguuauccccgcuacccuggagugagaugcgucugucgggacaacuggaagggcuccaaucgccccauuguggauaucaacguuaaagacuacagcauugugucuuccuaugucugcagcggccuggugggggacacaccgagaaagaaugauucuagcuccucuagccauugucucgacccuaacaaugaggaaggaggccacgggguuaaaggaugggccuucgaugacggcaacgauguguggauggggcggaccaucuccgagaagcugcgcagcggauacgagacguuuaaagucauugaaggcuggucuaagcccaauuccaaacugcagaucaacagacaggugaucgucgaccggggcaaucgcagcggguauucuggaauuuucuccguggagggcaagagcugcaucaacagauguuuuuacguugaacucauucgggggagaaagcaggagacagaagugcuguggaccuccaauucuaucgucguguucugcggaaccagcggcacauaugggaccggcuccuggccugauggagcugacauuaaccuuaugcccaucuga

SEQ ID NO: 206935 - RNA, 1410 nt, Artificial Sequence; identical to SEQ ID NO: 206934
  derived and/or modified CDS sequence (opt5) from neuraminidase__InfluenzaA__ABD77788

SEQ ID NO: 206936 - RNA, 1362 nt, Artificial Sequence
  derived and/or modified CDS sequence (opt5) from neuraminidase__InfluenzaA__ABD77799
augaaccccaaucagaagaucauuaccaucggcagcauuugcaugguggucgggaucauuucccugauccuccaaaucggaaacauuaucucuauuuggaucagccacuccauucagacaggcaaucagaaccauacggggaucuguaaucagggaauuaucaccuacaacguuguggccggccaagacucuacaagcgugauccugaccggaaauuccucucuuugcccuauuagagggugggcuauccacagcaaagauaacggcauucggaucggcuccaagggggacgucuucgugauucgcgagccguuuaucagcuguucucaucuggaaugcagaacauucuuucucacccagggagcccugcuuaaugauaaacacuccaacggcacaguuaaggaccggagccccuaucgcgcgcugaugucuuguccugugggggaggcucccuccccuuacaauagcagauucgaaucugucgccugguccgccagcgcuugccaugauggaaugggcuggcucaccaucgggauuuccggacccgacaacggcgccguggcuguucugaaauauaauggcaucauuacggagaccaucaagucuuggcggaagaaaauucugcgcacacaggaaagcgaguguaccugcgugaacggguccuguuuuacaaucaugaccgauggaccuagcaauggccucgccucuuacaagaucuucaaaauugagaaggggaaagucacgaaguccaucgaacugaacgcgccgaacagccacuaugaggaaugcucuuguuaccccgacacaggaaaggugaugugcgugugcagagauaauuggcacggcagcaaccggccuugggucuccuuugaccagaaucuugauuaucaaauuggguacaucuguucuggaguuuucggcgacaacccccgcccuaaagauggcaccgggagcugcggacccguguccgccgacggcgcuaauggggugaagggauuuagcuacagauauggcaacggggucuggauuggccggacaaaaucugacuccagccgccauggauucgagaugaucugggauccgaauggcuggaccgagaccgacucuagauuuuccgugcggcaggauguuguggccaugacagaccgcagcggguacuccggaucuuucguccagcacccugaacugacgggccucgauuguaugagacccugcuuuuggguggagcugauucgggggagaccugaagaggaaaccaucuggacaagcggauccaucauuucuuucuguggcguuaacagcgacaccguggauugguccuggcccgacggggcugagcuucccuucacaaucgauaaguga

SEQ ID NO: 206937 - RNA, 1410 nt, Artificial Sequence
  derived and/or modified CDS sequence (opt5) from neuraminidase__InfluenzaA__ABD77810
augaaccccaaucagaagaucauuaccaucggcagcauuugcaugguggucgggaucauuucccugauccuccaaaucggaaacauuguuucuaucuggauuagccacuccauccagacaggcaaucagaaccauacggggaccuguaaucagucuauuaucacauacaaaaacagcaccugggugaaucaaacauaugugaacauuuccaauaccaacgucguggccggaaaggacacaaccucuguuauccuggcuggcaauagcucccuuugcccuaucagagggugggccauuuacagcaaagauaacggagugcggaucggcucuaagggcgacgucuucgugauucgcgagccguuuaucuccuguagccaccuggaaugcagaacguucuuucucacccagggggcgcugcuuaaugauaaacauucuaacggaacaguuaaggaccggucccccuaucgcgcucugaugagcuguccugugggcgaggcccccucuccuuacaauuccagauucgaaagcgucgccugguccgcuucugccugccacgaugggaugggauggcucaccauuggcaucagcgggcccgacgauggagcuguggccgugcugaaguauaacggcaucauuacagagaccaucaaauccuggcggaaggaaauucugcgcacgcaggagagcgagugugucugcguuaacggcucuuguuuuacaaucaugaccgacgggccuuccggaggcccggcgagcuacaaaauuuucaagaucgaaaaagggaaggugacaaagucuaucgagcucgaugcccccaauagccauuaugaagagugcuccuguuacccugacaccucuaaagugaugugcgucugcagagauaacuggcacggaagcaaucggcccuggguguccuuugaccagaaccuggauuaccaaaugggcuauauuuguagcgggguuuucggagacaauccucgccccaaggacggcaaaggcucuugcgggccgguguacgucgauggagcuaacggcgugaagggguuuuccuauagauacggaaauggcguuuggaucgggcggaccaaaagcaacucuucccgccagggcuucgagaugauuugggacccuaauggauggacagaaacggauagcaacuuuuucaccaagcaggacguggucgccgugacagauugguccggcuauucugggagcuuuguccagcaccccgagcuuaccggacuggacuguaugagaccuugcuucuggguggaacucauccggggccgccccaaagagaauacaauuuggaccuccgggucuagcaucuccuucuguggaguuaacagcgauacgguggacuggucuuggcccgauggcgcugaacugccuuuuacaauugacaaguga

SEQ ID NO: 206938 - RNA, 1410 nt, Artificial Sequence
  derived and/or modified CDS sequence (opt5) from neuraminidase__InfluenzaA__ABD77832
augaaccccaaucagaagaucauuaccaucggcagcgugucccugacaauugccacgaucugcuuccucaugcaaauugcuauccuggucaccacaguuacccuucacuuuaaacaguacgaguguaacucuccuccgaauaaccaggugaugcugugcgaacccacaaucauugagagaaauaucaccgaaauuguguaucucacaaacaccacgaucgagaaggaaauuuguccuaaacuggccgaguaccggaauuggagcaagccccagugcaaaaucaccggguucgcgccuuuuuccaaggacaacucuauucgccuuagcgcuggaggcgauaucugggucacaagagagcccuauguguccugugacccugauaagugcuaccaauucgcccuggggcagggaaccacacucaauaaccggcauucuaaugacaccguucacgaucgcacgccguauagaacacugcugaugaacgaacucggcgugcccuuucaucuggggaccaaacaggucuguaucgccuggagcuccagcucuugccacgacggaaaggcuuggcuucauguguguguuacaggccacgaugagaaugccaccgcuuccuucauuuacggcgggcggcugguggacagcaucggaucuugguccaaaaagauucuccgcacccaggaaagcgagugcgucuguaucaacggcacaugcacgguggugaugaccgaugggucugccuccggacgcgcggacacaaaaauucuguuuaucgaggaaggcaagaucguccacauuagcccucuuuccgggucugcccaacauguugaggaaugcagcuguuauccccgguacuccggagugcgcugcguguguagagauaauuggaagggcagcaaccggccuaucgucgacauuaacgugaaagauuacucuaucguuuccagcuaugugugcucuggccuggucggggacacccccagaaagaaugacagcuccucuagcucccacugucucaacccgaauaacgaggaaggaggccauggggugaaaggaugggcuuucgaugacggcaaugauguuuggauggggagaacaauuagcgagaaguuucggucuggauacgagaccuucaaagugaucggcggcugguccaagccuaacagcaaacugcagaucaaucgccaggucauuguggacagagggaaccggucuggauauuccggcaucuuuagcgucgaagggaaguccugcauuaauagauguuucuacguggagcugauccgcggacggaagcaggaaacggagguuugguggacaucuaacagcauuguggucuuuugcggcaccuccgggaccuauggcacaggaucuuggcccgauggcgccgacaucaaucucaugccuauuuga

SEQ ID NO: 206939 - RNA, 1410 nt, Artificial Sequence
  derived and/or modified CDS sequence (opt5) from neuraminidase__InfluenzaA__ABD77876
augaaccccaaucagaagaucauuaccaucggcagcgugucccugacaauugccacgaucugcuuccucaugcaaauugcuauccuggucaccacaguuacccuucacuuuaaacaguacgaguguaacucuccuccgaauaaccaggugaugcugugcgaacccacaaucauugagagaaauaucaccgaaauuguguaucucacaaacaccacgaucgagaaggaaauuuguccuaaacuggccgaguaccggaauuggagcaagccccagugcaaaaucaccggguucgcgccuuuuuccaaggacaacucuauucgccuuagcgcuggaggcgauaucugggucacaagagagcccuauguguccugugacccugauaagugcuaccaauucgcccuggggcagggaaccacacucaauaaccggcauucuaaugacaccguucacgaucgcacgccguauagaacacugcugaugaacgaacucggcgugcccuuucaucuggggaccaaacaggucuguaucgccuggagcuccagcucuugccacgacggaaaggcuuggcuucauguguguguuacaggccacgaugagaaugccaccgcuuccuucauuuacgacggccggcugguggauagcaucgggucuugguccaaaaagauucuccgcacccaggaaagcgagugcgucuguaucaacggaacaugcacgguggugaugaccgacggcucugccuccgggagagcggauacaaaaauucuguuuaucgaggaaggaaagaucguccacauuagcccucuuuccggcucugcccaacauguugaggaaugcagcuguuauccccgguacuccggggugcgcugcguguguagagacaauuggaagggaagcaaccggccuaucgucgauauuaacgugaaagacuacucuaucguuuccagcuaugugugcucuggccuggucggcgacacaccccgcaagaaugauagcuccucuagcucccacugucucaacccgaauaacgaggaagggggacauggcgugaaagggugggcuuucgacgauggaaaugacguuuggaugggcagaaccauuagcgagaagcugcggucuggguacgagaccuuuaaagugaucgaaggaugguccaagccuaacagcaaacugcagaucaaucgccaggucauuguggauagaggcaaccggucuggcuauuccgggaucuucagcgucgagggaaaguccugcauuaauagauguuuuuacguggaacucauccgcggccggaagcaggagacggaaguuugguggacaucuaacagcauuguggucuucugcgggaccuccggaaccuauggcacagggucuuggcccgacggcgccgauaucaaucugaugccuauuuga

SEQ ID NO: 206940 - RNA, 1410 nt, Artificial Sequence; identical to SEQ ID NO: 206198
  derived and/or modified CDS sequence (opt5) from neuraminidase__InfluenzaA__ABD77887

SEQ ID NO: 206941 - RNA, 1410 nt, Artificial Sequence
  derived and/or modified CDS sequence (opt5) from neuraminidase__InfluenzaA__ABD77898
augaaccccaaucagaagaucauuaccaucggcagcgugucccugacaauugccacgaucugcuuccucaugcaaauugcuauccuggucaccacaguuacccuucacuuuaaacaguacgaguguaacucuccuccgaauaaccaggugaugcugugcgaacccacaaucauugagagaaauaucaccgaaauuguguaucucacaaacaccacgaucgagaaggaaauuuguccuaaacuggccgaguaccggaauuggagcaagccccagugcaaaaucaccggguucgcgccuuuuuccaaggacaacucuauucgccuuagcgcuggaggcgauaucugggucacaagagagcccuauguguccugugacccugauaagugcuaccaauucgcccuggggcagggaaccacacucaauaaccggcauucuaaugacaccguucacgaucgcacgccguauagaacacugcugaugaacgaacucggcgugcccuuucaucuggggaccaaacaggucuguaucgccuggagcuccagcucuugccacgacggaaaggcuuggcuucauguguguguuacaggccacgaugagaaugccaccgcuuccuucauuuacgacggccggcugguggauagcaucgggucuugguccaaaaagauucuccgcacccaggaaagcgagugcgucuguaucaacggaacaugcacgguggugaugaccgacggcucugccuccgggagagcggauacaaaaauucuguuuaucgaggaaggaaagaucauucacaucagcccucuuuccggcucugcccaacaugucgaggaaugcagcuguuauccccgguacccugggguucgcugcguguguagagacaauuggaagggauccaaccggcccauuguggauaucaacgucaaagacuacagcauugugucuuccuauguuugcagcggccuggugggcgacaccccgcgcaagaaugauucuagcuccucuagccacugucucaacccuaauaacgaggaagggggacauggcgucaaagggugggcuuucgacgauggauccgacguguggaugggcagaacaaucagcgagaagcugcggucuggguacgagaccuuuaaaguuaucgaaggaugguccaagcccaauagcaaacugcagauuaaccgccaggugaucgucgauagaggcaaucggucuggcuauuccgggauuuucagcguggagggaaaguccugcaucaacagauguuuuuacgucgaacucauucgcggccggaagcaggagacggaagugugguggacaucuaauagcaucguuguguucugcgggaccuccggaaccuauggcacagggucuuggccugacggcgccgauauuaaccugaugcccaucuga

SEQ ID NO: 206942 - RNA, 1410 nt, Artificial Sequence
  derived and/or modified CDS sequence (opt5) from neuraminidase__InfluenzaA__ABD77909
augaaccccaaucagaagaucauuaccaucggcagcgugucccugacaauugccacgaucugcuuccucaugcaaauugcuauccuggucaccacaguuacccuucacuuuaaacaguacgaguguaacucuccuccgaauaaccaggugaugcugugcgaacccacaaucauugagagaaauaucaccgaaauuguguaucucacaaacaccacgaucgagaaggaaauuuguccuaaacuggccgaguaccggaauuggagcaagccccagugcaaaaucaccggguucgcgccuuuuuccaaggacaacucuauucgccuuagcgcuggaggcgauaucugggucacaagagagcccuauguguccugugacccugauaagugcuaccaauucgcccuggggcagggaaccacacucaauaaccggcauucuaaugacaccguucacgaucgcacgccguauagaacacugcugaugaacgaacucggcgugcccuuucaucuggggaccaaacaggucuguaucgccuggagcuccagcucuugccacgacggaaaggcuuggcuucauguguguguuacaggccacgaugagaaugccaccgcuuccuucauuuacgacggccggcugguggauagcaucgggucuugguccaaaaagauucuccgcacccaggaaagcgagugcgucuguaucaacggaacaugcacgguggugaugaccgacggcucugccuccgggagagcggauacaaaaauucuguuuaucgaggaaggaaagaucguccacauuagcccucuuuccggcucugcccaacauguugaggaaugcagcuguuauccccgguacccuggggugcgcugcguguguagagacaauuggaagggauccaaccggcccaucgucgauauuaacgugaaagacuacagcaucguuucuuccuaugugugcagcggccuggucggcgacaccccgcgcaagaaugauucuagcuccucuagccacugucucaacccuaauaacgaggaagggggacauggcgugaaagggugggcuuucgacgauggaaaugacguuuggaugggcagaacaauuuccgagaagcugcggagcggguacgagaccuuuaaagugaucgaaggauggucuaagcccaacuccaaacugcagaucaaucgccaggucauuguggauagaggcaacagcucuggcuauuccgggaucuucagcgucgagggaaaguccugcauuaaucgguguuuuuacguggaacucaucagaggccgcaagcaggagacggaaguuugguggacaucuaacagcauuguggucuucugcgggaccuccggaaccuauggcacagggucuuggccugacggcgccgauaucaaucugaugcccauuuga

SEQ ID NO: 206943 - RNA, 1413 nt, Artificial Sequence; identical to SEQ ID NO: 206900
  derived and/or modified CDS sequence (opt5) from neuraminidase__InfluenzaA__ABD77920

SEQ ID NO: 206944 - RNA, 1413 nt, Artificial Sequence; identical to SEQ ID NO: 206900
  derived and/or modified CDS sequence (opt5) from neuraminidase__InfluenzaA__ABD77931

SEQ ID NO: 206945 - RNA, 1413 nt, Artificial Sequence; identical to SEQ ID NO: 206900
  derived and/or modified CDS sequence (opt5) from neuraminidase__InfluenzaA__ABD77942

SEQ ID NO: 206946 - RNA, 1413 nt, Artificial Sequence
  derived and/or modified CDS sequence (opt5) from neuraminidase__InfluenzaA__ABD77953
augaaccccaaucagaagaucauuaccaucggcagcauuuccaucgccauugggaucaucucucugaugcuccaaauuggaaacaucauuagcaucugggcuucccacucuauucagacaggcagccagaaucauacggggaucugcaaccagagaauuaucaccuacgagaauagcacaugggugaaccacaccuaugucaauaucaacaauacaaacguuguggccggaaaagacaagaccucugugacacuggcgggcaauagcucccuuuguagcauuucugggugggcuaucuacaccaaagauaacuccauucggaucggaagcaagggcgacgucuucgugauucgcgaaccuuuuaucucuugcucccaucuggaguguagaacguucuuucucacccaaggcgcccugcuuaaugauaaacacagcaacgggacaguuaaggaccggucuccguaucgcgcccugauguccugcccccucggagaagcuccuagccccuacaauuccaaguucgagucuguggccuggagcgcuuccgccugucaugauggcaugggguggcugaccaucggaauuagcggcccugacaacggggcggucgccgugcugaaauauaacggaaucauuacagaaaccaucaagucuuggaaaaagcggauucucagaacgcaggaguccgagugcguuugugugaauggcagcugcuuuacaaucaugaccgauggccccucuaacggggcugccagcuacaaaaucuucaagauugaaaagggaaaagucacaaaguccaucgagcugaaugcuccuaacuuucacuaugaagaguguucuugcuacccggacaccggcaccgugaugugugugugccgcgauaauuggcacgggagcaacagacccugggucuccuucaaucagaaccuugacuaccagauuggauauaucugcagcggcguuuuuggggauaauccucggcccaaagacggagagggcucuuguaacccugugacaguggauggcgccgacggggucaagggauucuccuacaaauauggcaaugggguguggauuggacgcacgaaguccaacagacugcggaaaggcuuugaaaugaucugggaccccaauggguggaccgauacagacucuaacuucuccguuaagcaagauguggucgcgauuaccgacuggagcggcuacuccggaucuuuugugcagcauccggagcucacaggccuggauugcauccgcccuuguuuccuuguugaacuggugagagggcucccccgggagaauaccacgaucuggacaagcggauccucuauuagcuucugcggcgucaacuccgacaccgccaacuggagcuggccugauggggcugaacugcccuuuaccaucgacaaguga

SEQ ID NO: 206947 - RNA, 1413 nt, Artificial Sequence
  derived and/or modified CDS sequence (opt5) from neuraminidase__InfluenzaA__ABD77964
augaaccccaaucagaagaucauuaccaucggcagcauuuccaucgccauugggaucaucucucugaugcuccaaauuggaaacaucauuagcaucugggcuucccacucuauucagacaagaagccagaaucauacgggcaucugcaaccagcggauuaucaccuacgagaauagcacaugggugaaccacaccuaugucaauaucaacaauacaaacguuguggccgggaaagacaagaccucugugacacuggcgggaaauagcucccuuuguagcauuucuggcugggcuaucuacaccaaagauaacuccauucgcaucgggagcaagggagacgucuucgugauuagagaaccuuuuaucucuugcucccaucuggagugucggacguucuuucucacccaaggcgcccugcuuaaugauaaacacagcaacggcacaguuaaggaccgcucuccguauagagcccugauguccugcccccucggggaagcuccuagccccuacaauuccaaguucgagucuguggccuggagcgcuuccgccugucaugauggaaugggcuggcugaccaucgggauuagcggaccugacaacggcgcggucgccgugcugaaauauaacgggaucauuacagaaaccaucaagucuuggaaaaagcggauucuccgcacgcaggaguccgagugcguuugugugaauggaagcugcuuuacaaucaugaccgauggccccucuaacggcgcugccagcuacaaaaucuucaagauugaaaaggggaaagucacaaaguccaucgagcugaaugcuccuaacuuucacuaugaagaguguucuugcuacccggacaccggaaccgugaugugugugugcagagauaauuggcacggcagcaaccggcccugggucuccuucaaucagaaccuugacuaccagauuggguauaucugcagcggaguuuuuggcgauaauccucgccccaaagacggggagggaucuuguaacccugugacaguggauggcgccgacggcgucaagggguucuccuacaaauauggaaauggcguguggauugggagaacgaaguccaaccggcugcgcaaaggauuugaaaugaucugggaccccaauggcuggaccgauacagacucuaacuucuccguuaagcaagauguggucgcgauuaccgacuggagcggguacuccggcucuuuugugcagcauccggagcucacaggacuggauugcaucagaccuuguuucuggguugaacuugugcggggccugccccgcgagaauaccacgaucuggacaagcggguccucuauuagcuucugcggagucaacuccgacaccgccaacuggagcuggccugauggcgcugaacuccccuuuaccaucgacaaguga

SEQ ID NO: 206948 - RNA, 1413 nt, Artificial Sequence; identical to SEQ ID NO: 206900
  derived and/or modified CDS sequence (opt5) from neuraminidase__InfluenzaA__ABD77975

SEQ ID NO: 206949 - RNA, 1413 nt, Artificial Sequence; identical to SEQ ID NO: 206900
  derived and/or modified CDS sequence (opt5) from neuraminidase__InfluenzaA__ABD77986

SEQ ID NO: 206950 - RNA, 1413 nt, Artificial Sequence
  derived and/or modified CDS sequence (opt5) from neuraminidase__InfluenzaA__ABD77997
augaaccccaaucagaagaucauuaccaucggcagcauuuccaucgccauugggauccugucucucaugcugcaaaucggaaacauuaucagcauuugggcuucccacucuauccagacaggcagccagaaucauacggggauuugcaaccagagaaucauuaccuacgagaauagcacaugggugaaccacaccuaugucaauaucaacaauacaaacguuguggccggaaaagacaagaccucugugacacuugcgggcaauagcucccuguguagcaucucugggugggcuauuuacaccaaagauaacuccauccggauuggaagcaagggcgacgucuucgugauccgcgaaccuuuuauuucuugcucccaucucgaguguagaacguucuuucugacccaaggcgcccuucugaaugauaaacacagcaacgggacaguuaaggaccggucuccguaucgcgcccucauguccugcccccugggagaagcuccuagccccuacaauuccaaguucgagucuguggccuggagcgcuuccgccugucaugauggcaugggguggcugaccaucggaaucagcggcccugacaacggggcggucgccgugcucaaauauaacggaauuaucacagaaaccauuaagucuuggaaaaagagaauccugcggacgcaggaguccgagugcguuugugugaauggcagcugcuuuacaauuaugaccgauggccccucuaacggggcugccagcuacaaaaucuucaagaucgaaaagggaaaagucacaaaguccauugagcuuaaugcuccuaacuuucacuaugaagaguguucuugcuacccggacaccggcaccgugaugugugugugccgcgauaauuggcacgggagcaacagacccugggucuccuucaaucagaaccuggacuaccagaucggauauauuugcagcggcguuuuuggggauaauccucggcccaaagacggagagggcucuuguaacccugugacaguggauggcgccgacggggucaagggauucuccuacaaauauggcaaugggguguggaucggacgcacgaaguccaacagacuccggaaaggcuuugaaaugauuugggaccccaauggguggaccgauacagacaacaauuucucuguuaagcaagauguggucgcgaucaccgacugguccggcuacagcggauccuuugugcagcauccggagcugacaggccuugauugcauucgcccuuguuucuggguugaacuggugagagggcucccccgggagaacaccacgaucuggacaucuggaagcuccaucucuuucugcggcgucaacagcgacaccgccaauugguccuggccugauggggcugaacugcccuuuaccauugacaaguga

SEQ ID NO: 206951 - RNA, 1413 nt, Artificial Sequence; identical to SEQ ID NO: 206900
  derived and/or modified CDS sequence (opt5) from neuraminidase__InfluenzaA__ABD78008

SEQ ID NO: 206952 - RNA, 1413 nt, Artificial Sequence; identical to SEQ ID NO: 206900
  derived and/or modified CDS sequence (opt5) from neuraminidase__InfluenzaA__ABD78019

SEQ ID NO: 206953 - RNA, 1413 nt, Artificial Sequence
  derived and/or modified CDS sequence (opt5) from neuraminidase__InfluenzaA__ABD78030
augaaccccaaucagaagaucauuaccaucggcagcauuuccaucgccauugggaucaucucucugaugcuccaaauuggaaacaucauuagcaucugggcuucccacucuauucagacaggcagccagaaucauacggggaucugcaaccagagaauuaucaccuacgaaaauuccacaugggugaaccacaccuaugucaauaucaacaauacaaacguuguggccggaaaagacaagaccucugugacacuggcgggcaauagcucccuuuguagcauuucugggugggcuaucuacaccaaagauaacuccauucggaucggaagcaagggcgacgucuucgugauucgcgagccuuuuaucucuugcucccaucuggaguguagaacguucuuucucacccaaggcgcccugcuuaaugauaaacacagcaaccggacaguuaaggaccgcucuccguauagagcccugauguccugcccccucggggaagcuccuagccccuacaauuccaaguucgagucuguggccuggagcgcuuccgccugucaugauggaaugggcuggcugaccaucgggauuagcggaccugacaacggcgcggucgccgugcugaaauauaacgggaucauuacagaaaccaucaagucuuggaaaaagcggauucuccgcacgcaggaguccgagugcguuugugugaauggaagcugcuuuacaaucaugaccgauggccccaacaauggcgcugccucuuacaaaaucuucaagauugaaaaggggaaagucacaaagagcaucgagcugaacgcuccuaauuuucacuaugaagaguguuccugcuacccggacaccggaaccgugaugugugugugcagagauaacuggcacggcucuaaucggcccugggucagcuucaaccagaaucuugacuaccagauuggguauaucugcuccggaguuuuuggcgauaacccucgccccaaagacggggagggaagcuguaauccugugacaguggauggcgccgacggcgucaagggguucucuuacaaauauggaaacggcguguggauugggagaacgaaguccaaucggcugcgcaaaggauuugaaaugaucugggaccccaacggcuggaccgauacagacagcaauuucucuguuaagcaagauguggucgcgauuaccgacugguccggguacagcggcuccuuugugcagcauccggagcucacaggacuggauugcaucagaccuuguuucuggguugaacuugugcggggccugccccgcgagaacaccacgaucuggacaucugggagcuccauuucuuucugcggagucaacagcgacaccgccaauugguccuggccugauggcgcugaacuccccuuuaccaucgacaaguga

SEQ ID NO: 206954 - RNA, 1413 nt, Artificial Sequence
  derived and/or modified CDS sequence (opt5) from neuraminidase__InfluenzaA__ABD78041
augaaccccaaucagaagaucauuaccaucggcagcauuuccaucgccauugggaucaucucucugaugcuccaaauuggaaacaucauuagcaucugggcuucccacucuauucagacaggcagccagaaucauacggggaucugcaaccagagaauuaucaccuacgaaaauuccacaugggugaaccacaccuaugucaauaucaacaauacaaacguuguggccggaaaagacaagaccucugugacacuggcgggcaauagcucccuuuguagcauuucugggugggcuaucuacaccaaagauaacuccauucggaucggaagcaagggcgacgucuucgugauucgcgagccuuuuaucucuugcucccaucuggaguguagaacguucuuucucacccaaggcgcccugcuuaaugauaaacacagcaacgggacaguuaaggaccggucuccguaucgcgcccugauguccugcccccucggagaagcuccuagccccuacaauuccaaguucgagucuguggccuggagcgcuuccgccugucaugauggcaugggguggcugaccaucggaauuagcggcccugacaacggggcggucgccgugcugaaauauaacggaaucauuacagaaaccaucaagucuuggaaaaagcggauucucagaacgcaggaguccgagugcguuugugugaauggcagcugcuuuacaaucaugaccgauggccccucuaacggggcugccagcuacaaaaucuucaagauugaaaagggaaaagucacaaaguccaucgagcugaaugcuccuaacuuucacuaugaagaguguucuugcuacccggacaccagcaccgugaugugugugugccgcgauaauuggcacggcuccaacagacccugggucagcuucaaucagaaccuugacuaccagauuggguauaucugcucuggaguuuuuggcgauaauccucggcccaaagacggggagggauccuguaacccugugacaguggauggcgccgacggcgucaagggguucagcuacaaauauggaaauggcguguggauugggcgcacgaagucuaacagacugcggaaaggauuugaaaugaucugggaccccaauggcuggaccgauacagacuccaacuucagcguuaagcaagauguggucgcgauuaccgacugguccggguacucuggcagcuuugugcagcauccggagcucacaggacuggauugcauccgcccuuguuucuggguugaacuugugagaggccugccccgggagaauaccacgaucuggacauccgggucuagcauuuccuucugcggagucaacagcgacaccgccaacuggucuuggccugauggcgcugaacuccccuuuaccaucgacaaguga

SEQ ID NO: 206955 - RNA, 1410 nt, Artificial Sequence; identical to SEQ ID NO: 206934
  derived and/or modified CDS sequence (opt5) from neuraminidase__InfluenzaA__ABD78052

SEQ ID NO: 206956 - RNA, 1413 nt, Artificial Sequence; identical to SEQ ID NO: 206468
  derived and/or modified CDS sequence (opt5) from neuraminidase__InfluenzaA__ABD78063

SEQ ID NO: 206957 - RNA, 1413 nt, Artificial Sequence; identical to SEQ ID NO: 206468
  derived and/or modified CDS sequence (opt5) from neuraminidase__InfluenzaA__ABD78074

SEQ ID NO: 206958 - RNA, 1413 nt, Artificial Sequence; identical to SEQ ID NO: 206468
  derived and/or modified CDS sequence (opt5) from neuraminidase__InfluenzaA__ABD78085

SEQ ID NO: 206959 - RNA, 1413 nt, Artificial Sequence; identical to SEQ ID NO: 206468
  derived and/or modified CDS sequence (opt5) from neuraminidase__InfluenzaA__ABD78096

SEQ ID NO: 206960 - RNA, 1410 nt, Artificial Sequence
  derived and/or modified CDS sequence (opt5) from neuraminidase__InfluenzaA__ABD78118
augaaccccaaucagaagaucauuaccaucggcagcgugucccugacaauugccacgaucugcuuccucaugcaaauugcuauccuggucaccacaguuacccuucacuuuaaacaguacgaguguaacucuccuccgaauaaccaggugaugcugugcgaacccacaaucauugagagaaauaucaccgaaauuguguaucucacaaacaccacgaucgagaaggaaauguguccuaaacuggccgaguaccggaauuggagcaagccccagugcaaaauuaccggguucgcgccuuuuuccaaggacaacucuauccgccuuagcgcuggaggcgauauuugggucacaagagagcccuauguguccugugacccugauaagugcuaccaauucgcccuggggcagggaaccacacucaauaaccggcauucuaaugacaccguucacgaucgcacgccguauagaacacugcugaugaacgaacucggcgugcccuuucaucuggggaccaaacaggucuguaucgccuggagcuccagcucuugccacgacggaaaggcuuggcuucauguguguguuacaggccacgaugagaaugccaccgcuuccuucaucuacgacggccggcugguggauagcauugggucuugguccaaaaagauccuccgcacccaggaaagcgagugcgucuguauuaacggaacaugcacgguggugaugaccgacggcucugccuccgggagagcggauacaaaaauccuguuuauugaggaaggaaagaucguccacaucagcccucuuuccggcucugcccaacauguugaggaaugcagcuguuauccccgguacuccggggugcgcugcguguguagagacaauuggaagggaagcaaccggccuauugucgauaucaacgugaaagacuacucuauuguuuccagcuaugugugcucuggccuggucggcgacacaccccgcaagaaugauagcuccucuagcucccacugucucaacccgaauaacgaggaagggggacauggcgugaaagggugggcuuucgacgauggaaaugacguuuggaugggcagaaccaucagcgagaaguuucggucuggguacgagaccuucaaagugauuggaggcugguccaagccuaacagcaaacugcagaucaaucgccaggucaucguggauagaggcaaccggucuggguauuccggaauuuuuagcgucgaaggcaaguccugcaucaauagauguuucuacguggagcugauucgcgggcggaagcaggaaacggagguuugguggacaucuaacagcaucguggucuuuugcggaaccuccggcaccuaugggacaggcucuuggcccgacggagccgauauuaaucucaugccuaucuga

SEQ ID NO: 206961 - RNA, 1410 nt, Artificial Sequence; identical to SEQ ID NO: 206960
  derived and/or modified CDS sequence (opt5) from neuraminidase__InfluenzaA__ABD78129

SEQ ID NO: 206962 - RNA, 1410 nt, Artificial Sequence; identical to SEQ ID NO: 206190
  derived and/or modified CDS sequence (opt5) from neuraminidase__InfluenzaA__ABD79035

SEQ ID NO: 206963 - RNA, 1353 nt, Artificial Sequence
  derived and/or modified CDS sequence (opt5) from neuraminidase__InfluenzaA__ABD79115
augaaccccaaucagaagaucauuaccaucggcagcauuugcaugguggucgggaucauuucccugaucuuccaaaucggaaacauuguuucuaucuggauuagccacuccaucacaggcacguguaauagaucuauuuacgugaacaucagcaauaccaacguggucgccgggaaagacacaaccuccgugauucucgcuggaaauucuagccugugcccuauccggggcugggccaucuauuccaaggauaacgggguucgcauuggaagcaaaggcgacguguuugucaucagagagccguucauuucuuguucccaucuugaaugccggacauuuuuccugacccagggcgcgcuccugaaugauaagcacagcaacgggacagugaaagaccgcucucccuacagaacccuuauguccuguccuguuggagaggcucccagcccuuauaauucucgguuugaauccguggccuggagcgccuccgcuugccaugauggcaugggguggcugacgaucggaauuucuggccccgacgauggggccgucgcugugcucaaguacaacggaaucaucaccggcacaauuaagagcuggcgcaaagagauccugagaacccaggaauccgagugugugugcgucaauggcagcuguuucacaauuaugaccgacgggccuucuggaggcccggccuccuauaagaucuuuaaaauugagaaggggaaaguuacgaagucuaucgaacuggaugcgcccaacucucacuacgaggaaugcagcuguuauccugacacauccaaggugaugugcgugugccgggauaauuggcauggaucuaaccgccccugggucagcuucgaccagaaccucgauuaccaaaugggcuacaucuguuccgggguguuuggagacaauccuagacccaaagacggcaagggcagcugcgggccgguuuauguggauggagccaacggcgucaaaggguucucuuaccgguauggaaauggcguguggauugggcgcaccaaguccagcagcuccagacagggcuuugagaugaucugggacccuaacggauggacagagaccgauagcaauuucuuuaugaaacaggacguuguggcugucaccgauugguccggcuacucugggagcuucgugcagcaccccgaacugacaggacuugacuguaugcggccuugcuucugggucgagcugauucgcggcagacccaaggaaaacacgaucuggaccuccgggucuagcauuuccuuuuguggagugaauagcgauacaguugacuggucuuggcccgauggcgccgagcucccuuucaccaucgacaaauga

SEQ ID NO: 206964 - RNA, 1410 nt, Artificial Sequence
  derived and/or modified CDS sequence (opt5) from neuraminidase__InfluenzaA__ABD79126
augaaccccaaucagaagaucauuaccaucggcagcgugucccugacaauuacgaccaucugcuuccucaugcaaauugccauccuggucaucacaguuacccuucacuuuaaacagugugagugcaacucuccuccgaauaaccaggugaugcugugugaacccacaauuaucgagagaaauauuaccgaaaucguguaccucacaaacaccacgauugagaaggaaaucugcccuaaacuggcugaguaucggaauuggagcaagccccaguguaaaauuaccggguucgccccuuuuuccaaggacaacucuauccgccuuagcgcgggaggcgauaucugggucacaagagagcccuacguguccugcgacccugggaaguguuaucaauucgcucugggacagggcaccacacucaauaaccggcauucuaaugauaccguucacgaccgcacgccguacagaacacugcugaugaacgaacucggggugcccuuucaucugggaaccaaacaggucugcauugccuggagcuccagcucuugucacgauggcaaggccuggcuucaugugugcguuacaggccacaaugagaacgcuaccgccuccuucaucuaugacgggcggcugguggauagcauuggaucuugguccaaaaauauccuccgcacccaggaaagcgagugugucugcauuaacggcacaugcacgguggugaugaccgacgggucugcuuccgggagagccgauacaaagauccuguuuaucgaggaaggcaaaauuguccacaucagcccucuuuccgggucugcgcaacauguugaggaauguagcugcuacccccgguauccuggagugcgcugugugugcagagacaacuggaagggcuccaaucggcccauugucgauaucaacgugaaggacuacagcauuguuucuuccuacguguguagcggccuggucggggauaccccgcgcaaaaaugacucuagcuccucuagcuauugccucgacccuaacaaugaggaaggaggccacggggugaagggaugggccuucgaugacggcaacgauguuuggauggggagaacaaucuccgagaaacugcggagcggauacgagaccuuuaaggugaucggcggcuggucuaaacccaauuccaagcugcagauuaaccgccaggucaucguggacaaagggaauagaagcggauauucuggcauuuucuccgucgaaggaaagagcuguaucaaccggugcuuuuacguggagcucauuagaggacgcaagcaggaaacggagguuugguggacauccaauucuaucguggucuucuguggcaccagcgggaccuauggcacaggauccuggccugauggcgcugacauuaaccugaugcccaucuga

SEQ ID NO: 206965 - RNA, 1410 nt, Artificial Sequence; identical to SEQ ID NO: 206964
  derived and/or modified CDS sequence (opt5) from neuraminidase__InfluenzaA__ABD79137

SEQ ID NO: 206966 - RNA, 1410 nt, Artificial Sequence; identical to SEQ ID NO: 206964
  derived and/or modified CDS sequence (opt5) from neuraminidase__InfluenzaA__ABD79148

SEQ ID NO: 206967 - RNA, 1410 nt, Artificial Sequence; identical to SEQ ID NO: 206964
  derived and/or modified CDS sequence (opt5) from neuraminidase__InfluenzaA__ABD79159

SEQ ID NO: 206968 - RNA, 1410 nt, Artificial Sequence
  derived and/or modified CDS sequence (opt5) from neuraminidase__InfluenzaA__ABD79170
augaaccccaaucagaagaucauuaccaucggcagcgugucccugacaauuacgaccaucugcuuccucaugcaaauugccauccuggucaucacaguuacccuucacuuuaaacagugugagugcaacucuccuccgaauaaccaggugaugcugugugaacccacaauuaucgagagaaauauuaccgaaaucguguaccucacaaacaccacgauugagaaggaaaucugcccuaaacuggcugaguaucggaauuggagcaagccccaguguaaaauuaccggguucgccccuuuuuccaaggacaacucuauccgccuuagcgcgggaggcgauaucugggucacaagagagcccuacguguccugcgacccugggaaguguuaucaauucgcucugggacagggcaccacacucaauaaccggcauucuaauaacaccguucacgaucgcacgccguacagaacacugcugaugaaugaacucggggugcccuuucaucugggaaccaaacaggucugcauugccuggagcuccagcucuugucacgacggcaaggccuggcuucaugugugcguuacaggccacaacgagaaugcuaccgccuccuucaucuaugaugggcggcugguggacagcauuggaucuugguccaaaaacauccuccgcacccaggaaagcgagugugucugcauuaacggcacaugcacgguggugaugaccgaugggucugcuuccgggagagccgacacaaagauccuguuuaucaaagagggcaagauuguccacguuagcccucuuuccgggucugcgcaacauguggaagaguguagcugcuacccccgguauccuggagugcgcugugucugcagagauaauuggaagggcuccaaccggcccaucguggacauuaauguuaaagauuacagcaucgugucuuccuacgucuguagcggccuggugggggacaccccgcgcaagaacgauucuagcuccucuagcuauugccucgacccuaauaacgaagagggaggccacgggguuaaaggaugggccuucgacgauggcaaugacguguggauggggagaacaauuuccgaaaagcugcggagcggauacgagaccuuuaaagucaucggcggcuggucuaagcccaacuccaaacugcagaucaaucgccaggugauugucgauaaggggaacagaagcggauauucuggcaucuucuccguggagggaaagagcuguauuaaucggugcuuuuacguugaacucaucagaggacgcaaacaggagacggaagugugguggacauccaacucuauugucguguucuguggcaccagcgggaccuauggcacaggauccuggccugacggcgcugauaucaaucugaugcccauuuga

SEQ ID NO: 206969 - RNA, 1410 nt, Artificial Sequence; identical to SEQ ID NO: 206964
  derived and/or modified CDS sequence (opt5) from neuraminidase__InfluenzaA__ABD79181

SEQ ID NO: 206970 - RNA, 1410 nt, Artificial Sequence; identical to SEQ ID NO: 206964
  derived and/or modified CDS sequence (opt5) from neuraminidase__InfluenzaA__ABD79192

SEQ ID NO: 206971 - RNA, 1410 nt, Artificial Sequence
  derived and/or modified CDS sequence (opt5) from neuraminidase__InfluenzaA__ABD79203
augaaccccaaucagaagaucauuaccaucggcagcgugucccugacaauuacgaccaucugcuuccucaugcaaauugccauccuggucaucacaguuacccuucacuuuaaacagugugagugcaacucuccuccgaauaaccaggugaugcugugugaacccacaauuaucgagagaaauauuaccgaaaucguguaccucacaaacaccacgauugagaaggaaaaaugcccuaagcuggcugaguaucggaauuggagcaaaccccaguguaagaucaccggguucgccccuuuuuccaaggacaacucuauucgccuuagcgcgggaggcgauaucugggucacaagagagcccuacguguccugcgacccugggaaauguuaucaauucgcucugggacagggcaccacacucaauaaccggcauucuaaugauaccguucacgaccgcacgccguacagaacacugcugaugaacgaacucggggugcccuuucaucugggaaccaagcaggucugcaucgccuggagcuccagcucuugucacgauggcaaagccuggcuucaugugugcguuacaggccacaaugagaacgcuaccgccuccuucauuuaugacgggcggcugguggauagcaucggaucuugguccaagaauauucuccgcacccaggaaagcgagugugucugcaucaacggcacaugcacgguggugaugaccgacgggucugcuuccgggagagccgauacaaaaauucuguuuaucgaggaaggcaagaucguccacauuagcccucuuuccgggucugcgcaacauguugaggaauguagcugcuacccccgguauccuggagugcgcugugugugcagagacaacuggaagggcuccaaucggcccaucgucgauauuaacaugaaagacuacagcaucgugucuuccuacguuuguagcggccuggugggggauaccccgcgcaagaaugacucuagcuccucuagcuauugccucgacccuaacaaugaggaaggaggccacggggucaaaggaugggccuucgaugacggcaacgauguguggauggggagaacaauuuccgagaagcugcggagcggauacgagaccuuuaaaguuaucggcggcuggucuaagcccaauuccaaacugcagaucaaccgccaggugauugucgacaaggggaauagaagcggauauucuggcaucuucuccguggaaggaaagagcuguauuaaccggugcuuuuacgucgagcucaucagaggacgcaaacaggaaacggaggugugguggacauccaauucuauuguuguguucuguggcaccagcgggaccuauggcacaggauccuggccugauggcgcugacaucaaccugaugcccauuuga

SEQ ID NO: 206972 - RNA, 1410 nt, Artificial Sequence; identical to SEQ ID NO: 206964
  derived and/or modified CDS sequence (opt5) from neuraminidase__InfluenzaA__ABD79214

SEQ ID NO: 206973 - RNA, 1410 nt, Artificial Sequence
  derived and/or modified CDS sequence (opt5) from neuraminidase__InfluenzaA__ABD79236
augaaccccaaucagaagaucauuaccaucggcagcgugucccugacaauuacgaccaucugcuuccucaugcaaauugccauccuggucaucacaguuacccuucacuuuaaacagugugagugcaacucuccuccgaauaaccaggugaugcugugugaacccacaauuaucgagagaaauauuaccgaaaucguguaccucacaaacaccacgauugagaaggaaaucugcccuaaacuggcugaguaucggaauuggagcaagccccaguguaaaauuaccggguucgccccuuuuuccaaggacaacucuauccgccuuagcgcgggaggcgauaucugggucacaagagagcccuacguguccugcgacccugggaaguguuaucaauucgcucugggacagggcaccacacucaauaaccggcauucuaauaacaccgcccacgaucgcacgccguacagaacacugcugaugaaugaacucgggguucccuuucaucugggaaccaaacaggugugcauugccuggagcuccagcucuugucacgacggcaaggcuuggcuucaugucugcgugacaggccacaacgagaaugccaccgcuuccuucaucuaugaugggcggcugguugacagcauuggaucuugguccaaaaacauccuccgcacccaggaaagcgagugugugugcauuaacggcacaugcacggucgugaugaccgaugggucugccuccgggagagcggacacaaagauccuguuuaucaaagagggcaagauugugcacaucagcccucuuuccgggucugcccaacaugucgaagaguguagcugcuacccccgguauccuggaguucgcugugugugcagagauaauuggaagggcuccaaccggcccauuguggacaucaaugucaaagauuacagcauugugucuuccuacguuuguagcggccuggugggggacaccccgcgcaagaacgauucuagcuccucuagcuauugccucgacccuaauaacgaagagggaggccacggggucaaaggaugggcuuucgacgauggcaaugacguguggauggggagaacaaucuccgaaaagcugcggagcggauacgagaccuuuaaaguuaucggcggcuggucuaagcccaacuccaaacugcagauuaaucgccaggugaucgucgauaaggggaacagaagcggauauucuggcauuuucuccguggagggaaagagcuguaucaaucggugcuuuuacgucgaacucauuagaggacgcaaacaggagacggaagugugguggacauccaacucuaucguuguguucuguggcaccagcgggaccuauggcacaggauccuggccugacggcgccgauauuaaucugaugcccaucuga

SEQ ID NO: 206974 - RNA, 1410 nt, Artificial Sequence
  derived and/or modified CDS sequence (opt5) from neuraminidase__InfluenzaA__ABD79247
augaaccccaaucagaagaucauuaccaucggcagcgugucccugacaauuacgaccaucugcuuccucaugcaaauugccauccuggucaucacaguuacccuucacuuuaaacagugugagugcaacccuccgcccaauaaccaggugaugcugugugaaccuacaauuaucgagagaaauauuaccgaaaucguguaccucacaaacaccacgauugagaaggaaaucugccccaaacuggcugaguaucggaauuggucuaagccucaguguaaaauuaccggguucgcccccuuuagcaaggacaacuccauccgccuuucugcgggaggcgauaucugggucacaagagagccuuacgugagcugcgacccggggaaguguuaucaauucgcucugggacagggcaccacacucaauaaccggcauuccaaugauaccguucacgaccgcacgcccuacagaacacugcugaugaacgaacucggggugccuuuucaucugggaaccaaacaggucugcauugccuggucuagcuccagcugucacgauggcaaggccuggcuucaugugugcguuacaggccacaaugagaacgcuaccgccucuuucaucuaugacgggcggcugguggauuccauuggaagcuggucuaaaaauauccuccgcacccaggaauccgagugugucugcauuaacggcacaugcacgguggugaugaccgacgggagcgcuucuggcagagccgauacaaagauccuguuuaucgaggaaggaaaaauuguccacaucagcccccuuuccggguccgcgcaacauguugaggaauguucuugcuacccucgguaucccggagugcgcugugugugcagagacaacuggaagggcagcaaucggccgauugucgauaucaacgugaaggacuacuccauuguuagcucuuacguguguuccggccuggucggggauaccccucgcaaaaaugacagcucuagcuccucuuauugccucgaccccaacaaugaggaaggaggccacggggugaagggaugggccuucgaugacggcaacgauguuuggauggggagaacaaucagcgagaaacugcgguccggauacgagaccuuuaaggugaugggcggcuggagcaaaccuaauucuaagcugcagaucaaccgccaggucauuguggacagagggaaucgguccggauauagcggcaucuucucugucgaagggaaauccuguauuaacagaugcuuuuacguggagcucauccgcggacggaagcaggaaacggagguuugguggacaagcaauuccauuguggucuucuguggcaccucugggaccuauggcacaggaagcuggcccgauggcgcugacaucaaccugaugcccauuuga

SEQ ID NO: 206975 - RNA, 1410 nt, Artificial Sequence; identical to SEQ ID NO: 206399
  derived and/or modified CDS sequence (opt5) from neuraminidase__InfluenzaA__ABD94737

SEQ ID NO: 206976 - RNA, 1410 nt, Artificial Sequence; identical to SEQ ID NO: 206784
  derived and/or modified CDS sequence (opt5) from neuraminidase__InfluenzaA__ABD94748

SEQ ID NO: 206977 - RNA, 1413 nt, Artificial Sequence; identical to SEQ ID NO: 206900
  derived and/or modified CDS sequence (opt5) from neuraminidase__InfluenzaA__ABD94759

SEQ ID NO: 206978 - RNA, 1410 nt, Artificial Sequence; identical to SEQ ID NO: 206133
  derived and/or modified CDS sequence (opt5) from neuraminidase__InfluenzaA__ABD94770

SEQ ID NO: 206979 - RNA, 1413 nt, Artificial Sequence; identical to SEQ ID NO: 206468
  derived and/or modified CDS sequence (opt5) from neuraminidase__InfluenzaA__ABD94792

SEQ ID NO: 206980 - RNA, 1413 nt, Artificial Sequence; identical to SEQ ID NO: 206468
  derived and/or modified CDS sequence (opt5) from neuraminidase__InfluenzaA__ABD94803

SEQ ID NO: 206981 - RNA, 1413 nt, Artificial Sequence; identical to SEQ ID NO: 206468
  derived and/or modified CDS sequence (opt5) from neuraminidase__InfluenzaA__ABD94814

SEQ ID NO: 206982 - RNA, 1410 nt, Artificial Sequence; identical to SEQ ID NO: 206645
  derived and/or modified CDS sequence (opt5) from neuraminidase__InfluenzaA__ABD94825

SEQ ID NO: 206983 - RNA, 1410 nt, Artificial Sequence
  derived and/or modified CDS sequence (opt5) from neuraminidase__InfluenzaA__ABD94847
augaaccccaaucagaagaucauuaccaucggcagcgugucccugacaauugccacgaucugcuuccucaugcaaauugcuauccuggucaccacaguuacccuucacuuuaaacaguacgaguguaacucuccuccgaauaaccaggugaugcugugcgaacccaagaucauugagagaaauaucacagaaauuguguaucucaccaacacaaccaucgagaaagaaauuuguccuaagcuggccgaguaccggaauuggagcaaaccccagugcaagaucacgggguucgcgccuuuuuccaaggacaacucuauucgccuuagcgcuggaggcgauaucugggucaccagagagcccuauguguccugugacccugauaaaugcuaccaauucgcccuggggcagggaacaacccucaauaaccggcauucuaaugacacaguucacgaucgcaccccguauagaacgcugcugaugaacgaacucggcgugcccuuucaucuggggacaaagcaggucuguaucgccuggagcuccagcucuugccacgacggaaaagccuggcuucauguguguguuaccggccacgaugagaaugcuacagcuuccuucauuuacgacggccggcugguggauagcaucgggucuugguccaagaaaauucuccgcacccaggaaagcgagugcgucuguaucaacggaaccugcacaguggugaugacggacggcucugccuccgggagagcggucaccaagauucuguuuaucgaggaaggaaagaucguucacauuagcccucuucugggcuccgcccaacauguggaggaaugcucuuguuauccccgguacccuggggugcgcugcgucuguagagauaauuggaaaggaagcaaccggcccaucguggacauuaacguuaaggauuacuccaucgugagcucuuaugucugcuccggccucgugggcgacacaccgcgcaaaaaugacagcucuagcuccucucacugucugaacccuaauaacgaggaagggggacauggcguuaaggggugggcuuucgaugacggaaaugauguguggaugggcagaaccauuagcgagaaacugcgguccggguacgagacauuuaaggucaucgaaggauggagcaaacccaacucuaagcuccagaucaaucgccaggugauugucgacagaggcaaccgguccggcuauagcgggaucuucucuguggagggaaaguccugcauuaauagauguuuuuacguugaacugauccgcggccggaaacaggagaccgaagugugguggacgagcaacuccauugucguguucugcgggacaucuggaaccuauggcaccgggagcuggccugauggcgccgacaucaaucuuaugcccauuuga

SEQ ID NO: 206984 - RNA, 1410 nt, Artificial Sequence; identical to SEQ ID NO: 206198
  derived and/or modified CDS sequence (opt5) from neuraminidase__InfluenzaA__ABD94858

SEQ ID NO: 206985 - RNA, 1410 nt, Artificial Sequence; identical to SEQ ID NO: 206198
  derived and/or modified CDS sequence (opt5) from neuraminidase__InfluenzaA__ABD94880

SEQ ID NO: 206986 - RNA, 1410 nt, Artificial Sequence
  derived and/or modified CDS sequence (opt5) from neuraminidase__InfluenzaA__ABD94891
augaaccccaaucagaagaucauuaccaucggcagcgugucccugacaauuacgaccaucugcuuccucaugcaaauugccauccuggucaucacaguuacccuucacuuuaaacagugugagugcaacucuccuccgaauaaccaggugaugcugugugaacccacaauuaucgagagaaauauuaccgaaaucguguaccucacaaacaccacgauugagaaggaaaucugcccuaaacuggcugaguaucggaauuggagcaagccccaguguaaaauuaccggguucgccccuuuuuccaaggacaacucuauccgccuuagcgcgggaggcgauaucugggucacaagagagcccuacguguccugcgacccugggaaguguuaucaauucgcucugggacagggcaccacacucaauaaccggcauucuaaugauaccguucacgaccgcacgccguacagaacacugcugaugaacgaacucggggugcccuuucaucugggaaccaaacaggucugcauugccuggagcuccagcucuugucacgauggcaaggccuggcuucaugugugcguuacaggccacaaugagaacgcuaccgccuccuucaucuaugacgggcggcugguggauagcauuggaucuugguccaaaaauauccuccgcacccaggaaagcgagugugucugcauuaacggcacaugcacgguggugaugaccgacgggucugcuuccggcagagccgauacaaagguccuguuuaucgaggaaggaaaaaucguucacauuagccaacuuuccgggucugcgcagcauguggaggaauguagcugcuacccucgguaucccggagugcgcugugucugcagagacaacuggaagggcuccaaucggccuaucguggauauuaacguuaaggacuacagcaucgugucuuccuacgucuguagcggccuggugggggauacaccccgcaaaaaugacucuagcuccucuagcuauugccucgacccgaacaaugaggaaggaggccacgggguuaagggaugggccuucgaugacggcaacgauguguggauggggagaaccauuuccgagaaacugcggagcggauacgagaccuuuaaggucaucggcggcuggucuaaaccuaauuccaagcugcagaucaaccgccaggugauugucgacagagggaaucggagcggauauucuggcaucuucuccguggaagggaaaagcuguauuaacagaugcuuuuacguugagcucauccgcggacggaagcaagaaacggaggugugguggacauccaauucuauugucguguucuguggcaccagcgggaccuauggcacaggauccuggcccgauggcgcugacaucaaccugaugccuauuuga

SEQ ID NO: 206987 - RNA, 1410 nt, Artificial Sequence; identical to SEQ ID NO: 206964
  derived and/or modified CDS sequence (opt5) from neuraminidase__InfluenzaA__ABD94902

SEQ ID NO: 206988 - RNA, 1410 nt, Artificial Sequence
  derived and/or modified CDS sequence (opt5) from neuraminidase__InfluenzaA__ABD94924
augaaccccaaucagaagaucauuaccaucggcagcgugucccugacaauugccacgaucugccuccugaugcaaauugcuauccuugucaccacaguuacccugcacuucaaacaguacgaguguaacucuccuccgaauaaccaggugaugcucugcgaacccacaaucauugagagaaauaucaccgaaauuguguaucugacaaacaccacgaucgagaaggaaauuuguccuaaacuugccgaguaccggaauuggagcaagccccagugcaaaaucaccggguuugcgccuuucuccaaggacaacucuauucgccugagcgcuggaggcgauaucugggucacaagagagcccuauguguccugugacccugauaagugcuaccaauuugcccucgggcagggaaccacacugaauaaccggcauucuaaugacaccguucacgaucgcacgccguauagaacacugcucaugaacgaacugggcgugcccuuccaucuugggaccaaacaggucuguaucgccuggagcuccagcucuugccacgacggaaaggcuuggcugcauguguguguuacaggccacgaugagaaugccaccgcuuccuuuauuuacgacggccggcucguggauagcaucgggucuugguccaaaaagauucugcgcacccaggaaagcgagugcgucuguaucaacggaacaugcacgguggugaugaccgacggcucugccuccgggagagcggauacaaaaauucuuuucaucgaggaaggaaagaucguccacauuagccaacugcucggcuccgcccagcauguugaggaaugcucuuguuauccucgguaccccggggugcgcugcguguguagagacaauuggaagggaagcaaccggccuaucgucgauauuaacgugaaagacuacuccaucguuagcucuuaugugugcuccggccuggucggcgacacaccccgcaagaaugauagcucuagcuccucucacugucugaacccgaauaacgaggaagggggacauggcgugaaagggugggcuuuugacgauggaaaugacguuuggaugggcagaaccauuagcgagaagcuccgguccggguacgagaccuucaaagugaucgaaggauggagcaagccuaacucuaaacugcagaucaaucgccaggucauuguggauagaggcaaccgguccggcuauagcgggaucuuuucugucgagggaaaguccugcauuaauagauguuucuacguggaacuuauccgcggccggaagcaagagacggaaguuugguggacaagcaacuccauuguggucuuuugcgggaccucuggaaccuauggcacagggagcuggcccgacggcgccgauaucaaucugaugccuauuuga

SEQ ID NO: 206989 - RNA, 1410 nt, Artificial Sequence
  derived and/or modified CDS sequence (opt5) from neuraminidase__InfluenzaA__ABD94946
augaaccccaaucagaagaucauuaccaucggcagcgugucccugacaauugccacgaucugcuuccucacccaaauugcuauccuggucacaaccguuacacuucacuuuaaacaguacgaguguaacucuccuccgaauaaccaggugaugcugugcgaacccaccaucauugagagaaauaucacagaaauuguguaucucaccaacacgaccaucgagaaggaaauuuguccuaaacuggccgaguaccggaauuggagcaagccccagugcaacaucacaggguucgcgccuuuuuccaaagacaauucuauucgccuuagcgcuggaggcgauaucugggucaccagagagcccuauguguccugugacccugauaagugcuaccaauucgcccuggggcagggaacaacccucaacaauggccauucuaacgacacgguucacgaucggacaccguaucgcacccugcugaugaaugaacucggggugcccuuucaucugggaacaaagcaggucuguaucgccuggagcuccagcucuugccacgacggcaaggcuuggcuucauguguguguuaccggcgaugacaaaaacgccaccgcuuccuucauuuacaaugggagacugguggauagcaucggaucuugguccaaaaagauucuccggacacaggagagcgaaugcgucuguaucaacggcacgugcaccguggugaugacagacgggucugccuccggaaaagcggauaccaagauucuguuuaucgaggagggcaagaucguccacacaagccuucuguccgggucugcccaacacguugaagagugcagcuguuauccucgcuaccccggagugagaugcgugugucgggacaacuggaaaggcuccaaucgcccuauugucgauaucaacgugaaggacuacagcauuguuucuuccuaugugugcagcggccucgucggggacacccccagaaagaaugaucggucuagcuccucucauugucuggacccgaacaaugaagagggaggccacggggugaaaggaugggcuuucgaugacggcaacgauguuuggauggggcgcacgaucagcgaaaaacugagauccggauacgagacauuuaaggugauugagggcuggagcaaaccuaauucuaagcuccagaucaaccggcaggucaucguggaccgcgauaauagauccggcuauagcgggauuuucucugucgaaggaaaguccugcaucaaccgguguuuuuacguggagcugauuagaggccgcaaucaggaaaccgagguucuuuggaccagcaacuccaucguggucuucugcgggacaucuggaaccuauggcacagggagcuggcccgacggcgccgauauuaaucugaugccuaucuga

SEQ ID NO: 206990 - RNA, 1410 nt, Artificial Sequence
  derived and/or modified CDS sequence (opt5) from neuraminidase__InfluenzaA__ABD94957
augaaccccaaucagaagaucauuaccaucggcagcgugucccugacaauuucuacgaucugcuucuuuaugcaaauugccauccucaucaccacagucacccugcacuucaaacaguacgaguuuaacagcccuccgaauaaccagguuaugcuuugugaacccacaauuaucgagagaaauauuaccgaaaucguguaucugacaaacaccacgauugagaaggaaaucugcccuaaacucgcugaguaccggaauugguccaagccccagugugacauuaccggguucgccccuuuuucuaaagauaacagcauccgccuguccgcgggaggcgacaucugggugacaagagagcccuaugucucuugcgauccugacaaguguuaccaauucgcucuugggcagggaaccacacugaauaacgugcauagcaaugauaccguucacgaccggacgccguaucgcacacuccugaugaacgaacugggcgugcccuuucaucucgggaccaagcaggucugcauugccugguccucuagcuccugucacgauggaaaagccuggcugcaugugugcguuacaggcgacgauaagaaugcuaccgccagcuucaucuacaacggcagacuuguggacucuauugucuccuggagcaaaaagauccugcggacccaggagucugaaugugugugcauuaaugggacauguacgguggucaugaccgauggauccgcuagcggcaaagccgacacaaagauccucuuuaucgaggaggggaagauuguucacaccuccacacugucuggaagcgcgcaacacguggaagagugcuccugcuauccucgcuaccccggcgugagaugugucugccgggauaacuggaaagggagcaaccgcccuaucguggacauuaauaucaaggacuacucuauuguuuccagcuauguguguucuggacuugucggcgauacccccagaaagaacgacagcuccucuagcucccauugccuggauccgaauaacgaagagggcgggcacggagugaaaggcugggccuucgacgaugggaaugacguuuggaugggacggacgaucagcgaaaaacuccgcucuggcuacgagacauuuaaggugaucgaggggugguccaacccuaauagcaaacugcagauuaacagacaggucaucguggaucggggaaaucgcucuggcuauuccggcauuuucagcgucgaauccaagucuuguaucaacagaugcuuuuacguggagcugauucgggggagaaaggaagagaccgaaguucucuggaccagcaauuccaucguggucuucuguggaacaucuggcaccuaugggacaggaagcuggcccgacggcgcugauauuaaccugaugccuaucuga

SEQ ID NO: 206991 - RNA, 1413 nt, Artificial Sequence; identical to SEQ ID NO: 206900
  derived and/or modified CDS sequence (opt5) from neuraminidase__InfluenzaA__ABD94968

SEQ ID NO: 206992 - RNA, 1413 nt, Artificial Sequence; identical to SEQ ID NO: 206900
  derived and/or modified CDS sequence (opt5) from neuraminidase__InfluenzaA__ABD94990

SEQ ID NO: 206993 - RNA, 1413 nt, Artificial Sequence
  derived and/or modified CDS sequence (opt5) from neuraminidase__InfluenzaA__ABD95001
augaaccccaaucagaagaucauuaccaucggcagcauuuccaucgccauugggaucaucucucugaugcuccaaauuggaaacaucauuagcaucugggcuucccacucuauucagacaggcagccagaaucauacggggaucugcaaccagagaauuaucaccuacgagaauagcacaugggugaaccacaccuaugugaauauccauaacacaaauguuguggccggaaaagacaagaccucugugacacuggcgggcaacagcucccuuuguagcauuucugggugggcuaucuacaccaaagauaauuccauucggaucggaagcaagggcgacgucuucgugauucgcgaaccuuuuaucucuugcucccaccuggaguguagaacguucuuucucacccaaggcgcccugcuuaacgauaaacauagcaaugggacaguuaaggaccggucuccguaucgcgcccugauguccugcccccucggagaagcuccuagccccuacaacuccaaguucgagucuguggccuggagcgcuuccgccugucacgauggcaugggguggcugaccaucggaauuagcggcccugacaauggggcggucgccgugcugaaauauaacggaaucauuacagaaaccaucaagucuuggaaaaagcggauucucagaacgcaggaguccgagugcguuugugugaacggcagcugcuuuacaaucaugaccgauggccccucuaauggggcugccagcuacaaaaucuucaagauugaaaagggaaaagucacaaaguccaucgagcugaacgcuccuaauuuucacuaugaagaguguucuugcuacccggacaccggcaccgugaugugugugugccgcgauaacuggcaugggagcaauagacccugggucuccuucaaccagaaucuugacuaccagauuggauauaucugcagcggcguuuuuggggauaacccucggcccaaagacggagagggcucuuguaauccugugacaguggauggcgccgacggggucaagggauucuccuacaaauauggcaacgggguguggauuggacgcacgaaguccaauagacugcggaaaggcuuugaaaugaucugggaccccaacggguggaccgauacagacucuaauuucuccaugaagcaagauguuguggcgauuaccgacuggagcggcuacuccggaucuuuuguccagcacccggagcucacaggccuggauugcauccgcccuuguuucuggguggaacuuguuagagggcugccccgggagaacaccacgaucuggacaagcggauccucuauuagcuucugcggcgucaauuccgacaccgccaacuggagcuggccugauggggcugaacuccccuuuaccaucgacaaguga

SEQ ID NO: 206994 - RNA, 1413 nt, Artificial Sequence
  derived and/or modified CDS sequence (opt5) from neuraminidase__InfluenzaA__ABD95012
augaaccccaaucagaagaucauuaccaucggcagcauuuccaucgccauugggaucaucucucugaugcuccaaauuggaaacaucauuagcaucugggcuucccacucuauucagacaggcagccagaaucauacggggaucugcaaccagagaauuaucaccuacgagaauagcacaugggugaaccacaccuaugucaauaucaacaauacaaacguuguggccggaaaagacaagaccucugugacacuggcgggcaauagcucccuuuguagcauuucugggugggcuaucuacaccaaagauaacuccauucggaucggaagcaagggcgacgucuucgugauucgcgaaccuuuuaucucuugcucccaucuggaguguagaacguucuuucucacccaaggcgcccugcuuaaugauaaacacagcaacgggacaguuaaggaccggucuccguaucgcgcccugauguccugcccccucggagaagcuccuagccccuacaauuccaaguucgagucuguggccuggagcgcuuccgccugucaugauggcaugggguggcugaccaucggaauuagcggcccugacaacggggcggucgccgugcugaaauauaacggaaucauuacagaaaccaucaagucuuggaaaaagcggauucucagaacgcaggaguccgagugcguuugugugaauggcagcugcuuuacaaucaugaccgauggccccucuaacggggcugccagcuacaaaaucuucaagauugaaaagggaaaagucacaaaguccaucgagcugaaugcuccuaacuuucacuaugaagaguguucuugcuacccggacaccggcaccgugaugugugugugccgcgauaauuggcacgggagcaacagacccugggucuccuucaaucagaaccuugacuaccagauuggauauaucugcagcggcguuuuuggggauaauccucggcccaaagacggagagggcucuuguaacccugugacaguggauggcgccgacggggucaagggauucuccuacaaauauggcaaugggguguggauuggacgcacgaaguccaacagacugcggaaaggcuuugaaaugaucugggaccccaauggguggaccaacacagauucuaauuucuccguuaagcaagacguggucgcgauuaccgauuggagcggcuacuccggaucuuuugugcagcauccggagcucacaggccuggacugcauccgcccuuguuucuggguugaacuugugagagggcugccccgggagaacaccacgaucuggacaagcggauccucuauuagcuucugcggcgucaacuccgauaccgccaauuggagcuggccugacggggcugaacuccccuuuaccaucgauaaguga

SEQ ID NO: 206995 - RNA, 1413 nt, Artificial Sequence; identical to SEQ ID NO: 206900
  derived and/or modified CDS sequence (opt5) from neuraminidase__InfluenzaA__ABD95023

SEQ ID NO: 206996 - RNA, 1413 nt, Artificial Sequence
  derived and/or modified CDS sequence (opt5) from neuraminidase__InfluenzaA__ABD95034
augaaccccaaucagaagaucauuaccaucggcagcauuuccaucgccauugggaucaucucucugaugcuccaaauuggaaacaucauuagcaucugggcuucccacucuauucagacaggcagccagaaucauacggggaucugcaaccagagaauuaucaccuacgagaauagcacaugggugaaccacaccuaugucaauaucaacaauacaaacguuguggccggaaaagacaagaccucugugacacuggcgggcaauagcucccuuuguagcauuucugggugggcuaucuacaccaaagauaacuccauucggaucggaagcaagggcgacgucuucgugauucgcgaaccuuuuaucucuugcucccaucuggaguguagaacguucuuucucacccaaggcgcccugcuuaaugauaaacacagcaacgggacaguuaaggaccggucuccguaucgcgcccugauguccugcccccucggagaagcuccuagccccuacaauuccaaguucgagucuguggccuggagcgcuuccgccugucaugauggcaugggguggcugaccaucggaauuagcggcccugacaacggggcggucgccgugcugaaauauaacggaaucauuacagaaaccaucaagucuuggaaaaagcggauucucagaacgcaggaguccgagugcguuugugugaauggcagcugcuuuacaaucaugaccgauggccccucuaacggggcugccagcuacaaaaucuucaagauugaaaagggaaaagucacaaaguccaucgagcugaaugcuccuaacuuucacuaugaagaguguucuugcuacccggacaccggcaccgugaugugugugugccgcgauaauuggcacgggagcaacagacccugggucuccuucaaucagaaccuugacuaccagauuggauauaucugcagcggcguuuuuggggauaauccucggcccaaagacggagagggcucuuguaacccugugacaguggauggcgccgacggggucaagggauucuccuacaaauauggcaaugggguguggauuggacgcacgaaguccaacagacugcggaaaggcuuugaaaugaucugggaccccaauggguggaccgauacagacucuaacuucuccguuaagcaagauguggucgcgauuaccgacuggagcggcuacuccggaucuuuuauccagcauccggagcucacaggccuggauugcauccgcccuuguuucuggguggaacuuguuagagggcugccccgggagaauaccacgauuuggacaagcggauccucuaucagcuucugcggcgugaacuccgacaccgccaacuggagcuggccugauggggcugaacuccccuuuaccauugacaaguga

SEQ ID NO: 206997 - RNA, 1413 nt, Artificial Sequence
  derived and/or modified CDS sequence (opt5) from neuraminidase__InfluenzaA__ABD95056
augaaccccaaucagaagaucauuaccaucggcagcauuuccaucgccauugggaucaucucucugaugcuccaaauuggaaacaucauuagcaucugggcuucccacucuauucagacaggcagccagaaucauacgggggugugcaaccagagaaucauuaccuacgagaauagcacaugggucaaccacaccuauguuaauaucaacaauacaaacgugaucgccggaaaagacaagaccucugugacacuggcgggcaauagcucccuuuguagcauuucugggugggcuaucuacaccaaagauaacuccauucggaucggaagcaagggcgacgucuucgugauucgcgaaccuuuuaucucuugcucccaucuggaguguagaacguucuuucucacccaaggcgcccugcuuaaugauaaacacagcaacgggacaguuaaggaccggucuccguaucgcgcccugauguccugcccccucggagaagcuccuagccccuacaauuccaaguucgagucuguggccuggagcgcuuccgccugucaugauggcaugggguggcugaccaucggaauuagcggcccugacaacggggcggucgccgugcugaaauauaacggaaucauuacagaaaccaucaagucuuggaaaaagcagauucucagaacgcaggaguccgagugcguuugugugaauggcagcugcuuuacaaucaugaccgauggccccucuaacggggcugccagcuacaaaaucuucaagauugaaaagggaaaaaucacaaaguccauugagcugaaugcuccuaacuuucacuaugaagaguguucuugcuacccggacaccggcaccgucaugugugugugccgggauaauuggcacgggagcaaccgccccuggguguccuucaaucagaaccuugacuaccaaaucggauauauuugcagcggcgucuuuggggauaauccuagacccaaagacggagagggcucuuguaacccuguuacaguggauggcgccaauggggugaagggauucuccuacaaauauggcaacggggucuggaucggacggacgaaguccaaucgccugagaaaaggcuuugaaaugauuugggaccccaacggguggaccgacacagauucugacuucuccgugaagcaggauguuguggcgaucaccgacuggagcggcuacuccggaucuuuuguccagcauccggagcucacaggccugaauugcauccggccuuguuucuggguggaacuuguucgcgggcugcccaaggagaacaccacgauuuggacaagcggauccucuaucagcuucugcggcgugaacuccgauaccgccaauuggagcuggccugacggggcugaacuccccuuuaccauugauaaauga

SEQ ID NO: 206998 - RNA, 1413 nt, Artificial Sequence; identical to SEQ ID NO: 206468
  derived and/or modified CDS sequence (opt5) from neuraminidase__InfluenzaA__ABD95067

SEQ ID NO: 206999 - RNA, 1413 nt, Artificial Sequence; identical to SEQ ID NO: 206468
  derived and/or modified CDS sequence (opt5) from neuraminidase__InfluenzaA__ABD95078

SEQ ID NO: 207000 - RNA, 1413 nt, Artificial Sequence; identical to SEQ ID NO: 206997
  derived and/or modified CDS sequence (opt5) from neuraminidase__InfluenzaA__ABD95089

SEQ ID NO: 207001 - RNA, 1413 nt, Artificial Sequence; identical to SEQ ID NO: 206468
  derived and/or modified CDS sequence (opt5) from neuraminidase__InfluenzaA__ABD95100

SEQ ID NO: 207002 - RNA, 1413 nt, Artificial Sequence
  derived and/or modified CDS sequence (opt5) from neuraminidase__InfluenzaA__ABD95111
augaaccccaaucagaagaucauuaccaucggcagcauuuccaucgccauugggaugaucucucugaugcuccaaaucggaaacauuaucagcauuugggcuucccacucuauccagacaggcagccagaaucauacgggggugugcaaccagagaauuaucaccuacgagaauagcacaugggucaaccacaccuauguuaauauuaacaauacaaacgugaucgccggaaaagacaagaccucugugacacuggcgggcaauagcucccuuuguagcaucucugggugggcuauuuacaccaaagauaacuccauccggauuggaagcaagggcgacgucuucgugauccgcgaaccuuuuauuucuugcucccaucuggaguguagaacguucuuucucacccaaggcgcccugcuuaaugauaaacacagcaacgggacaguuaaggaccggucuccguaucgcgcccugauguccugcccccucggagaagcuccuagccccuacaauuccaaguucgagucuguggccuggagcgcuuccgccugucaugauggcaugggguggcugaccaucggaaucagcggcccugacaacggggcggucgccgugcugaaauauaacggaauuaucacagaaaccauuaagucuuggaaaaagcagauccucagaacgcaggaguccgagugcguuugugugaauggcagcugcuuuacaauuaugaccgauggccccucuaacggggcugccagcuacaaaaucuucaagaucgaaaagggaaaagucacaaaguccauugagcugaaugcuccuaacuuucacuaugaagaguguucuugcuacccggacaccggcaccgugaugugugugugccgggauaauuggcacgggagcaaccgccccugggucuccuucaaucagaaccuugacuaccaaaucggauauauuugcagcggcguuuuuggggauaauccuagacccaaagacggagagggcucuuguaacccugugacaguggauggcgccaauggggucaagggauucuccuacaaauauggcaacgggguguggaucggacggacgaaguccaaucgccugagaaaaggcuuugaaaugauuugggaccccaacggguggaccgacacagauucugacuucuccguuaagcaggauguggucgcgaucaccgacuggagcggcuacuccggaucuuuugugcagcauccggagcucacaggccuggauugcauucggccuuguuucuggguugaacuugugcgcgggcugcccaaggagaauaccacgaucuggacaagcggauccucuaucagcuucugcggcgucaacuccgacaccgccaacuggagcuggccugauggggcugaacuccccuuuaccauugacaaauga

SEQ ID NO: 207003 - RNA, 1413 nt, Artificial Sequence; identical to SEQ ID NO: 207002
  derived and/or modified CDS sequence (opt5) from neuraminidase__InfluenzaA__ABD95122

SEQ ID NO: 207004 - RNA, 1413 nt, Artificial Sequence; identical to SEQ ID NO: 206468
  derived and/or modified CDS sequence (opt5) from neuraminidase__InfluenzaA__ABD95144

SEQ ID NO: 207005 - RNA, 1413 nt, Artificial Sequence; identical to SEQ ID NO: 206468
  derived and/or modified CDS sequence (opt5) from neuraminidase__InfluenzaA__ABD95155

SEQ ID NO: 207006 - RNA, 1413 nt, Artificial Sequence
  derived and/or modified CDS sequence (opt5) from neuraminidase__InfluenzaA__ABD95166
augaaccccaaucagaagaucauuaccaucggcagcauuuccaucgccauugggaugaucucucugaugcuccaaaucggaaacauuaucagcauuugggcuucccacucuauccagacaggcagccagaaucauacgggggugugcaaccagagaauuaucaccuacgagaauagcacaugggucaaccacaccuauguuaauauuaacaauacaaacgugaucgccgaaaaagacaagaccucugugacacuggcgggaaauagcucccuuuguagcaucucuggcugggcuauuuacaccaaagauaacuccauccggauugggagcaagggagacgucuucgugauccgcgagccuuuuauuucuugcucccaucuggaauguagaacguucuuucucacccaaggcgcccugcuuaaugauaaacacagcaacggcacaguuaaggaccggucuccguaucgcgcccugauguccugcccccucggggaggcuccuagccccuacaauuccaaguucgaaucuguggccuggagcgcuuccgccugucaugauggaaugggcuggcugaccaucgggaucagcggaccugacaacggcgcggucgccgugcugaaauauaacgggauuaucacagagaccauuaagucuuggaaaaagcagauccucagaacgcaggaguccgaaugcguuugugugaauggaagcugcuuuacaauuaugaccgauggccccucuaacggcgcugccagcuacaaaaucuucaagaucgagaaggggaaagucacaaaguccauugaacugaaugcuccuaacuuucacuaugaggaguguucuugcuacccggacaccggaaccgugaugugugugugccgggauaauuggcacggcagcaaccgccccugggucuccuucaaucagaaccuugacuaccaaaucggguauauuugcagcggaguuuuuggcgauaauccuagacccaaagacggggaaggaucuuguaacccugugacaguggauggcgccaauggcgucaagggguucuccuacaaauauggaaacggcguguggaucgggcggacgaaguccaaucgccugagaaaaggauuugagaugauuugggaccccaacggcuggaccgacacagauucugacuucuccguuaagcaggauguggucgcgaucaccgacuggagcggguacuccggcucuuuugugcagcauccggaacucacaggacuggauugcauucggccuuguuucuggguugagcuugugcgcggccugcccaaggaaaauaccacgaucuggacaagcggguccucuaucagcuucugcggagucaacuccgacaccgccaacuggagcuggccugauggcgcugagcuccccuuuaccauugacaaauga

SEQ ID NO: 207007 - RNA, 1413 nt, Artificial Sequence; identical to SEQ ID NO: 206997
  derived and/or modified CDS sequence (opt5) from neuraminidase__InfluenzaA__ABD95177

SEQ ID NO: 207008 - RNA, 1413 nt, Artificial Sequence
  derived and/or modified CDS sequence (opt5) from neuraminidase__InfluenzaA__ABD95188
augaaccccaaucagaagaucauuaccaucggcagcauuuccacaacgaucgggauuaucucucugaugcuccaaaucggaaacauuaucagcauuugggccucccacucuauccagaccggcagccagaaucauacaggggugugcaaccagagaauuaucaccuacgaaaauuccacaugggucaaccacaccuauguuaauauuaacaauacaaacgugaucgcuggaaaagacaagaccucugugacgcuggccggcaauagcucccuuuguagcaucucugggugggcgauuuacaccaaagauaacuccauccggauuggaagcaagggcgacgucuucgugauccgcgagccuuuuauuucuugcucccaucuggaguguagaacauucuuucucacccaaggcgcucugcuuaaugauaaacacagcaacgggacaguuaaggaccggucuccguaucgcgcccugauguccugcccccucggagaagccccuagccccuacaauuccaaguucgagucuguggcuuggagcgccuccgcuugucaugauggcaugggguggcugaccaucggaaucagcggcccugacaacggggccgucgcggugcugaaauauaacggaauuaucacggaaacaauuaagucuuggaaaaagcagauccucagaacccaggaguccgagugcguuugugugaauggcagcugcuuuacaauuaugaccgauggccccucuaacggggccgcuagcuacaaaaucuucaagaucgaaaagggaaaagucaccaaguccauugagcugaaugccccuaacuuucacuaugaagaguguucuugcuacccggacacaggcacggugaugugugugugccgggauaauuggcacgggagcaaccgccccugggucuccuucaaucagaaccuugacuaccaaaucggauauauuugcagcggcguuuuuggggauaauccuagacccaaagacggagagggcucuuguaacccugugaccguggauggcgcuaauggggucaagggauucuccuacaaauauggcaacgggguguggaucggacggacaaagagcaaucgccugagaaaaggcuuugaaaugauuugggaccccaacggguggaccgacacagauucugacuucuccguuaagcaggauguggucgccaucaccgacuggagcggcuacuccggaucuuuugugcagcauccggagcucacgggccuggauugcauucggccuuguuucuggguugaacuugugcgcgggcugcccaaggagaauacaaccaucuggaccagcggauccucuaucagcuucugcggcgucaacuccgacacagcgaacuggagcuggccugauggggccgaacuccccuuuaccauugacaaauga

SEQ ID NO: 207009 - RNA, 1413 nt, Artificial Sequence; identical to SEQ ID NO: 206997
  derived and/or modified CDS sequence (opt5) from neuraminidase__InfluenzaA__ABD95199

SEQ ID NO: 207010 - RNA, 1413 nt, Artificial Sequence; identical to SEQ ID NO: 206487
  derived and/or modified CDS sequence (opt5) from neuraminidase__InfluenzaA__ABD95210

SEQ ID NO: 207011 - RNA, 1413 nt, Artificial Sequence
  derived and/or modified CDS sequence (opt5) from neuraminidase__InfluenzaA__ABD95221
augaaccccaaucagaagaucauuaccaucggcagcauuuccaucgccauugggaugaucucucugaugcuccaaaucggaaacauuaucagcauuugggcuucccacucuauccagacaggcagccagaaucauacgggggugugcaaccagagaauuaucaccuacgagaauagcacaugggucaaccacaccuauguuaauauuaacaauacaaacgugaucgccggaaaagacaagaccucugugacacuggcgggcaauagcucccuuuguagcaucucugggugggcuauuuacaccaaagauaacuccauccggauuggaagcaagggcgacgucuucgugauccgcgaaccuuuuauuucuugcucccaucuggaguguagaacguucuuucucacccaaggcgcccugcuuaaugauaaacacagcaacgggacaguuaaggaccggucuccguaucgcgcccugauguccugcccccucggagaagcuccuagccccuacaauuccaaguucgagucuguggccuggagcgcuuccgccugucaugauggcaugggguggcugaccaucggaaucagcggcccugacaacggggcggucgccgugcugaaauauaacggaauuaucacagaaaccauuaagucuuggaaaaagcagauccucagaacgcaggaguccgagugcguuugugugaauggcagcugcuuuacaauuaugaccgauggccccucuaacggggcugccagcuacaaaaucuucaagaucgaaaagggaaaagucacaaaguccauugagcugaaugcuccuaacucucacuaugaagaguguagcugcuacccggacaccggcaccgugaugugugugugccgggauaauuggcacggguccaaccgccccugggucagcuuuaaucagaaccuugacuaccaaaucggauauauuugcucuggcguuuucggggauaauccuagacccaaagacggagagggcuccuguaacccugugacaguggauggcgccaauggggucaagggauuuagcuacaaauauggcaacgggguguggaucggacggacgaagucuaaucgccugagaaaaggcuucgaaaugauuugggaccccaacggguggaccgacacagauuccgacuuuagcguuaagcaggauguggucgcgaucaccgacugguccggcuacucuggauccuucgugcagcauccggagcucacaggccuggauugcauucggccuuguuuuuggguugaacuugugcgcgggcugcccaaggagaauaccacgaucuggacauccggaucuagcaucuccuucugcggcgucaacagcgacaccgccaacuggucuuggccugauggggcugaacuccccuucaccauugacaaauga

SEQ ID NO: 207012 - RNA, 1413 nt, Artificial Sequence; identical to SEQ ID NO: 207002
  derived and/or modified CDS sequence (opt5) from neuraminidase__InfluenzaA__ABD95232

SEQ ID NO: 207013 - RNA, 1413 nt, Artificial Sequence; identical to SEQ ID NO: 206468
  derived and/or modified CDS sequence (opt5) from neuraminidase__InfluenzaA__ABD95243

SEQ ID NO: 207014 - RNA, 1413 nt, Artificial Sequence; identical to SEQ ID NO: 207002
  derived and/or modified CDS sequence (opt5) from neuraminidase__InfluenzaA__ABD95254

SEQ ID NO: 207015 - RNA, 1413 nt, Artificial Sequence; identical to SEQ ID NO: 206487
  derived and/or modified CDS sequence (opt5) from neuraminidase__InfluenzaA__ABD95265

SEQ ID NO: 207016 - RNA, 1413 nt, Artificial Sequence; identical to SEQ ID NO: 206468
  derived and/or modified CDS sequence (opt5) from neuraminidase__InfluenzaA__ABD95276

SEQ ID NO: 207017 - RNA, 1413 nt, Artificial Sequence
  derived and/or modified CDS sequence (opt5) from neuraminidase__InfluenzaA__ABD95287
augaaccccaaucagaagaucauuaccaucggcagcauuuccguggccaucgggauuaucucucugaugcuccaaaucggaaacauuaucagcauuugggcuucccacucuauccagacaggcagccagaaucauacgggggucugcaaccagagaauuaucaccuacgagaauagcacauggguuaaccacaccuaugugaauauuaacaauacaaacgugaucgccggaaaagacaagaccucugucacacuggcgggcaauagcucccuuuguagcaucucugggugggcuauuuacaccaaagauaacuccauccggauuggaagcaagggcgacguguucguuauccgcgaaccuuuuauuucuugcucccaucuggaguguagaacguucuuucucacccaaggcgcccugcuuaaugauaaacacagcaacgggacagugaaggaccggucuccguaucgcgcccugauguccugcccccucggagaagcuccuagccccuacaauuccaaguucgagucugucgccuggagcgcuuccgccugucaugauggcaugggguggcugaccaucggaaucagcggcccugacaacggggcgguggccguucugaaauauaacggaauuaucacagaaaccauuaagucuuggaaaaagcagauccucagaacgcaggaguccgagugcgugugugucaauggcagcugcuuuacaauuaugaccgauggccccucuaacggggcugccagcuacaaaaucuucaagaucgaaaagggaaaagugacaaaguccauugagcugaaugcuccuaacuuucacuaugaagaguguucuugcuacccggacaccggcaccgugaugugugucugccgggauaauuggcacgggagcaaccgccccuggguuuccuucaaucagaaccuugacuaccaaaucggauauauuugcagcggcguguuuggggauaauccuagacccaaagacggagagggcucuuguaacccugugacagucgauggcgccaauggggugaagggauucuccuacaaauauggcaacgggguuuggaucggacggacgaaguccaaucgccugagaaaaggcuuugaaaugauuugggaccccaacggguggaccgacacagauucugacuucuccgugaagcaggaugucguggcgaucaccgacuggagcggcuacuccggaucuuuuguucagcauccggagcucacaggccuggauugcauucggccuuguuucuggguggaacuuguccgcgggcugcccaaggagaauaccacgaucuggacaagcggauccucuaucagcuucugcggcgugaacuccgacaccgccaacuggagcuggccugauggggcugaacuccccuuuaccauugacaaauga

SEQ ID NO: 207018 - RNA, 1413 nt, Artificial Sequence; identical to SEQ ID NO: 206468
  derived and/or modified CDS sequence (opt5) from neuraminidase__InfluenzaA__ABD95298

SEQ ID NO: 207019 - RNA, 1413 nt, Artificial Sequence
  derived and/or modified CDS sequence (opt5) from neuraminidase__InfluenzaA__ABD95309
augaaccccaaucagaagaucauuaccaucggcagcauuuccaucgccauugggaugaucucucugaugcuccaaaucggaaacauuaucagcauuugggcuucccacucuauccagacaggcagccagaaucauacgggggugugcaaccagagaauuaucaccuacgaaaauuccacaugggucaaccacaccuauguuaauauuaacaauacaaacgugaucgccggaaaagacaagaccucugugacacuggcgggcaauagcucccuuuguagcaucucugggugggcuauuuacaccaaagauaacuccauccggauuggaagcaagggcgacgucuucgugauccgcgagccuuuuauuucuugcucccaucuggaguguagaacguucuuucucacccaaggcgcccugcuuaaugauaaacacagcaacgggacaguuaaggaccggucuccguaucgcgcccugauguccugcccccucggagaagcuccuagccccuacaauuccaaguucgagucuguggccuggagcgcuuccgccugucaugauggcaugggguggcugaccaucggaaucagcggcccugacaacggggcggucgccgugcugaaauauaacggaauuaucacagaaaccauuaagucuuggaaaaagcagauccucagaacgcaggaguccgagugcguuugugugaauggcagcugcuuuacaauuaugaccgauggccccucuaacggggcugccagcuacaaaaucuucaagaucgaaaagggaaaagucacaaaguccauugagcugaaugcuccuaacuuucacuaugaagaguguucuugcuacccggacaccggcaccgugaugugugugugccgggauaauuggcacgggagcaaccgccccugggucuccuucaaucagaaccuugacuaccaaaucggauauauuugcagcggcguuuuuggggauaauccuagacccaaagacggagagggcucuuguaacccugugacaguggauggcgccaauggggucaagggauucuccuacaaauauggcaacgggguguggaucggacggacgaagugcaaucgccugagaaaaggcuuugaaaugauuugggaccccaacggguggaccgacacagauagcgacuucucuguuaagcaggauguggucgcgaucaccgacugguccggcuacagcggauccuuugugcagcauccggagcucacaggccuggauuguauucggccuugcuucuggguugaacuugugcgcgggcugcccaaggagaauaccacgaucuggacaucuggaagcuccaucucuuucuguggcgucaacagcgacaccgccaacugguccuggccugauggggcugaacuccccuuuaccauugacaaauga

SEQ ID NO: 207020 - RNA, 1413 nt, Artificial Sequence; identical to SEQ ID NO: 206468
  derived and/or modified CDS sequence (opt5) from neuraminidase__InfluenzaA__ABD95320

SEQ ID NO: 207021 - RNA, 1413 nt, Artificial Sequence; identical to SEQ ID NO: 206997
  derived and/or modified CDS sequence (opt5) from neuraminidase__InfluenzaA__ABD95331

SEQ ID NO: 207022 - RNA, 1413 nt, Artificial Sequence
  derived and/or modified CDS sequence (opt5) from neuraminidase__InfluenzaA__ABD95342
augaaccccaaucagaagaucauuaccaucggcagcauuugcauggccaucgggauuaucucccugauccuccaaauuggaaacaucauuucuaucugggugagccacuccauucagacaggcucucagaaucauacggggaucuguaaccagagaauuaucaccuacgagaauagcacaugggucaaccaaaccuauguuaauaucaacaauacaaacgugguggcuggaaaagacaccacauccgucacccuggccggcaauucuagccuuugcccugugcgggggugggcgauuuacuccaaggauaacagcauccgcauuggaucuaaaggcgacguuuucgugaucagagaaccguuuauuuccuguagccaccuggagugccggacguucuuucucacccagggcgcucugcuuaaugauaagcauucuaacgggacagucaaagaccgcucccccuauagagcccugaugagcuguccuaucggagaagcccccucuccuuacaauucccgguucgagagcguggcuugguccgccucugcuugccacgauggcaugggguggcucaccaucggaauuagcggccccgacgauggggccguugcggugcugaaguauaacggaaucauuacagaaaccaucaaguccuggcgcaaacggauucugagaacgcaggagagcgagugugucugcaucaacggcucuuguuuuacaaucaugaccgacggcccuuccaaugggccggccagcuaccgcauuuucaagaucgaaaaaggaaagauuacaaaaucuaucgagcucgaugcucccaacagccauuaugaagagugcuccuguuacccugacaccggcaccgugaugugcgugugcagagauaauuggcacgggucuaaccggcccugggucagcuuuaaucagaaccuggacuaccaaauuggauauaucuguuccggcguuuucggggauaauccucgccccaaggacggaaagggcagcugcggcccggugacaguggacggggccgauggagucaaaggcuuuucuuacagauaugggaacggaguguggauuggccggacgaaguccaauagcucucgcaaaggguucgagaugaucugggacccuaacggcuggaccgauacagacuccaauuuucuuguuaagcaggauguggucgcuaugaccgacuggagcggauacuccggcucuuucgugcagcaccccgaacugacagggcucgauuguaugagaccuugcuuuuggguugagcugauccggggaagaccccgcgagaaaaccacgauuuggacaagcggcuccucuaucagcuucuguggggugaacuccgacaccgucaauuggagcuggcccgauggagccgaacuuccuuucaccauugacaaguga

SEQ ID NO: 207023 - RNA, 1413 nt, Artificial Sequence
  derived and/or modified CDS sequence (opt5) from neuraminidase__InfluenzaA__ABD95353
augaaccccaaucagaagaucauuaccaucggcagcauuugcauggccaucgggauuaucucccugauccuccaaauuggaaacaucauuucuaucugggugagccacuccauucagacaggcucucagaaucauacggggaucuguaaccagagaauuaucaccuacgagaauagcacaugggucaaccaaaccuauguuaauaucuccaacacaaaugugguggcuggaaaagacaccacaucuaugacccuggccggcaacagcucccuuugcccuauucgggggugggcgaucuacagcaaggauaauucuauucgcaucggauccaaaggcgacgucuucgugauuagagaaccguuuaucagcuguucucaccuggagugccggacguucuuucucacccagggcgcucugcuuaacgauaagcauuccaaugggacaguuaaagaccgcagccccuauagagcccugaugucuuguccuaucggagaagcccccuccccuuacaacagccgguucgaguccguggcuuggucugccagcgcuugccacgauggcaugggguggcucaccauuggaaucuccggccccgacgauggggccgucgcggugcugaaguauaauggaauuaucacagaaaccauuaagagcuggcgcaaacagauccugagaacgcaggagucugaguguguuugcgugaacggcuccuguuuuacaaucaugaccgacggcccuagcgaugggccggccucuuaccggauuuucaagaucgaaaaaggaaagauuacaaaaagcaucgagcucgacgcucccaacucccauuaugaagagugcucuuguuacccugauaccggcaccgucaugugcgugugccgcgacaauuggcacgggagcaacagacccuggguguccuuuaaucaaaaccuggauuaccagauuggauauaucuguagcggcgucuucggggacaauccucggcccaaggacggaaagggcucuugcgauccgguuaacguggacggcgccgauggggugaaaggauuuuccuaccgcuauggcaauggggucuggauuggaagaacaaagagcaacucuucccggaaaggcuucgagaugaucugggacccuaauggguggacggauaccgacagcaacuuucuugugaagcaggauguuguggcuaugacagacugguccggcuacucuggcagcuucguccagcaccccgaacugaccggacucgauuguaugcgcccuugcuuuuggguggagcugaucagagggcggcccagagagaaaacaaccauuuggacguccggaucuagcaucuccuucuguggcguuaauagcgacacagugaacuggucuuggcccgauggggccgaacuuccuuucaccauugacaaguga

SEQ ID NO: 207024 - RNA, 1413 nt, Artificial Sequence; identical to SEQ ID NO: 206900
  derived and/or modified CDS sequence (opt5) from neuraminidase__InfluenzaA__ABE11660

SEQ ID NO: 207025 - RNA, 1413 nt, Artificial Sequence
  derived and/or modified CDS sequence (opt5) from neuraminidase__InfluenzaA__ABE11671
augaaccccaaucagaagaucauuaccaucggcagcauuuccaucgccauugggaucaucucucugaugcuccaaauuggaaacaucauuagcaucugggcuucccacucuauucagacaggcagccagaaucauacgggggugugcaaccagagaaucauuaccuacgaaaauuccacaugggucaaccacaccuauguuaauaucaacaauacaaacgugguggccggaaaagacaagaccucugucacacuggcgggcaauagcucccuuuguagcaucucugggugggcuauuuacaccaaagauaacuccauccggauuggaagcaagggcgacguguucguuauccgcgagccuuuuauuucuugcucccaucuggaguguagaacguucuuucucacccaaggcgcccugcuuaaugauaaacacagcaacgggacagugaaggaccggucuccguaucgcgcccugauguccugcccccucggagaagcuccuagccccuacaauuccaaguucgagucugucgccuggagcgcuuccgccugucaugauggcaugggguggcugaccaucggaaucagcggcccugacaacggggcgguggccguucugaaauauaacggaauuaucacagaaaccauuaagucuuggaaaaagcagauccucagaacgcaggaguccgagugcgugugugucaauggcagcugcuuuacaauuaugaccgauggccccucuaacggggcugccagcuacaaaaucuucaagaucgaaaagggaaaagugaauaaguccauugagcugaacgcuccuaauuuucacuaugaagaguguucuugcuacccggacacaggcaccgugaugugugucugccgggauaacuggcacgggagcaaucgccccuggguuuccuucaaccagaaucuugacuaccaaaucggauauauuugcagcggcguguuuggggauaacccuagacccaaagacggagagggcucuuguaauccugugaccgucgauggcgccaacggggugaagggauucuccuacaaauauggcaaugggguuuggaucggacggacaaagagcaaccgccugagaaaaggcuuugaaaugauuugggaccccaauggguggacggacaccgauucugacuucuccgugaagcaggaugucguggcgaucacagacuggagcggcuacuccggaucuuuuguucagcauccggagcucaccggccuggauugcauucggccuuguuucuggguggaacuuguccgcgggcugcccagagagaacacaaccaucuggacgagcggauccucuaucagcuucugcggcgugaacuccgacacagccaauuggagcuggccugauggggcugaacuccccuuuaccauugacaaguga

SEQ ID NO: 207026 - RNA, 1413 nt, Artificial Sequence
  derived and/or modified CDS sequence (opt5) from neuraminidase__InfluenzaA__ABE11682
augaaccccaaucagaagaucauuaccaucggcagcauuuccaucgccauugggaucaucucucugaugcuccaaauuggaaacaucauuagcaucugggcuucccacucuauucagacaggcagccagaaucauacggggaucugcaaccagagaauuaucaccuacgaaaauuccacaugggugaaccacaccuaugucaauaucaacaauacaaacguuguggccggagaggacaaaaccucugugacacuggcgggcaauagcucccuuuguagcauuucugggugggcuaucuacaccaaggauaacuccauucggaucggaagcaaaggcgacgucuucgugauucgcgagccuuuuaucucuugcucccaucuggaauguagaacguucuuucucacccaaggcgcccugcuuaaugauaagcacagcaacgggacaguuaaagaccggucuccguaucgcgcccugauguccugcccccucggagaggcuccuagccccuacaauuccaaguucgaaucuguggccuggagcgcuuccgccugucaugauggcaugggguggcugaccaucggaauuagcggcccugacaacggggcggucgccgugcugaaguauaacggaaucauuacagagaccaucaaaucuuggaagaaacggauucucagaacgcaggaguccgaaugcguuugugugaauggcagcugcuuuacaaucaugaccgauggccccucuaacggggcugccagcuacaagaucuucaaaauugagaagggaaaggucacaaaauccaucgaacugaaugcuccuaacuuucacuaugaggaguguucuugcuacccggacaccggcaccgugaugugugugugccgcgauaauuggcacgggagcaacagacccugggucuccuucaaucagaaccuugacuaccagauuggauauaucugcagcggcguuuuuggggauaauccucggcccaaggacggagaaggcucuuguaacccugugacaguggauggcgccgacggggucaaaggauucuccuacaaguauggcaaugggguguggauuggacgcacgaaaagcaacagacugcggaagggcuuugagaugaucugggaccccaauggguggaccgauacagacucugauuucuccguuaaacaagacguggucgcgauuaccgauuggagcggcuacuccggaucuuuugugcagcauccggaacucacaggccuggacugcauccgcccuuguuucuggguugagcuugugagagggcugccccgggaaaacaccacgaucuggacaagcggauccucuauuagcuucugcggcgucaauuccgauaccgccaacuggagcuggccugacggggcugagcuccccuuuaccaucgauaaguga

SEQ ID NO: 207027 - RNA, 1413 nt, Artificial Sequence; identical to SEQ ID NO: 206468
  derived and/or modified CDS sequence (opt5) from neuraminidase__InfluenzaA__ABE11693

SEQ ID NO: 207028 - RNA, 1413 nt, Artificial Sequence; identical to SEQ ID NO: 206468
  derived and/or modified CDS sequence (opt5) from neuraminidase__InfluenzaA__ABE11704

SEQ ID NO: 207029 - RNA, 1413 nt, Artificial Sequence; identical to SEQ ID NO: 206468
  derived and/or modified CDS sequence (opt5) from neuraminidase__InfluenzaA__ABE11715

SEQ ID NO: 207030 - RNA, 1413 nt, Artificial Sequence; identical to SEQ ID NO: 206997
  derived and/or modified CDS sequence (opt5) from neuraminidase__InfluenzaA__ABE11726

SEQ ID NO: 207031 - RNA, 1413 nt, Artificial Sequence; identical to SEQ ID NO: 207002
  derived and/or modified CDS sequence (opt5) from neuraminidase__InfluenzaA__ABE11737

SEQ ID NO: 207032 - RNA, 1413 nt, Artificial Sequence; identical to SEQ ID NO: 206468
  derived and/or modified CDS sequence (opt5) from neuraminidase__InfluenzaA__ABE11815

SEQ ID NO: 207033 - RNA, 1413 nt, Artificial Sequence; identical to SEQ ID NO: 206997
  derived and/or modified CDS sequence (opt5) from neuraminidase__InfluenzaA__ABE11826

SEQ ID NO: 207034 - RNA, 1413 nt, Artificial Sequence; identical to SEQ ID NO: 206997
  derived and/or modified CDS sequence (opt5) from neuraminidase__InfluenzaA__ABE11837

SEQ ID NO: 207035 - RNA, 1413 nt, Artificial Sequence; identical to SEQ ID NO: 206997
  derived and/or modified CDS sequence (opt5) from neuraminidase__InfluenzaA__ABE11848

SEQ ID NO: 207036 - RNA, 1413 nt, Artificial Sequence; identical to SEQ ID NO: 207002
  derived and/or modified CDS sequence (opt5) from neuraminidase__InfluenzaA__ABE11859

SEQ ID NO: 207037 - RNA, 1413 nt, Artificial Sequence
  derived and/or modified CDS sequence (opt5) from neuraminidase__InfluenzaA__ABE11903
augaaccccaaucagaagaucauuaccaucggcagcauuuccauggccaucgggauuaucucucugauccuccaaauuggaaacaucauuagcaucugggcuucccacucuauucagacaggcagccagaauuacacggggaucugcaaccagagaauuaucaccuaugagaauagcacaugggugaaccaaaccuacgucaauaucaacaauacaaacguuguggccggaaaagacaagaccucuaugacacuggcgggcaauagcucccuuuguccuauucgggggugggcuaucuauaccaaagauaacagcauucgcaucggaucuaagggcgacguguucgucauuagagaaccguuuaucuccugcagccaucuggagugucggacguucuuucucacccagggcgcccugcuuaaugauaaacacucuaacgggacagugaaggaccgcucccccuacagagcccugaugagcugcccucucggagaagcucccucuccuuauaauucccgguucgagagcguugccugguccgcuucugccugucaugauggccugggguggcugaccaucggaauuagcggccccgacaacggggcgguggccguccucaaguacaacggaaucauuacagaaaccaucaaauccuggaagaaacagauucugcgcacgcaggagagcgagugcguguguguuaauggcucuugcuuuacaaucaugaccgauggcccuuccaacggggcugccagcuauagaaucuucaagauugaaaaaggacgggugacaaagucuaucgagcuugacgcuccgaauuaccacuacgaagaguguagcugcuaucccgauaccggcaccgucaugugugugugccgcgacaacuggcauggguccaauagaccuugggugucuuuuaaccaaaaucuggauuaccagauuggauauaucugcagcggcgucuucggggacaacccccggccuaaggauggagagggcuccuguaaucccguuacaguggacggcgccgacggggugaaaggauuuagcuaccgcuauggcaacggggucuggauuggaagaacgaagucuaaucggcuccgcaaaggcuucgaaaugaucugggauccgaacggguggaccgacacagauuccgacuuuagcaugaagcaggaugugguugcgaugaccgacuggucuggcuacuccggauccuucgugcagcacccugagcugacaggccuugauugcaugagacccuguuuuugggucgaacuggugcgggggcucccuagagagaauaccacgauuuggacauccggaucuagcaucuccuucugcggcguuaacucugaaaccgccaauuggagcuggcccgacggggcugagcugcccuucaccaucgauaaauga

SEQ ID NO: 207038 - RNA, 1413 nt, Artificial Sequence
  derived and/or modified CDS sequence (opt5) from neuraminidase__InfluenzaA__ABE11925
augaaccccaaucagaagaucauuaccaucggcagcauuuccaucgccauugggaucaucucucugauucuccaaaucggaaacauuaucagcauuugggcuucccacucuauccagacaggcagccagaaucauacggggauuugcaaccagagaaucaucaccuacgagaauagcacaugggugaaccaaaccuaugucaauauuaacaauacaaacguuguggccggaaaagacaagaccucuaugacacuggcgggcaauagcucccuuuguccuauccgggggugggcuauuuacaccaaagauaacagcauccgcauuggaucuaagggcgacguguucgucaucagagaaccguuuaucuccugcagccaccuggagugucggacguucuuucucacccagggcgcccugcuuaaugauaaacauucuaacgggacagugaaggaccgcucccccuauagagcccugaugagcugcccucucggagaagcucccucuccuuacaauucccgguucgagagcguugccugguccgcuucugccugucacgauggccugggguggcugaccauuggaaucagcggccccgacaacggggcgguggccguccucaaguauaacggaauuaucacagaaaccauuaaauccuggaagaaacgcauccugagaacgcaggagagcgagugcguguguaugaauggcucuugcuuuacaaucaugaccgauggcccuuccaacggggcugccagcuaccggauuuucaagaucgaaaaaggaaagguuacaaagucuauugagcuugacgcuccgaauuaucauuacgaagaguguagcugcuaccccgauaccggcaccgugaugugugucugccgcgacaacuggcacggguccaauagaccuugggugucuuuuaaccagaaucuggauuaucaaaucggauacauuugcagcggcguguucggggacaacccccggccuaaagauggagagggcuccuguaaucccgucacagccgacggcgcggacgggguuaagggauuuagcuaucgcuacggcaacgggguguggaucggaagaacgaaaucuaaucggcuccgcaagggcuucgaaaugauuugggauccgaacggguggaccgacacagauuccgacuuuagcaugaaacaggauaucguggccaugaccgacuggucuggcuauuccggauccuucguccagcacccugagcugacaggccuugauugcaugagacccuguuuuuggguggaacugguucgggggcucccuagagagaauaccacgaucuggacauccggaucuagcauuuccuucugcggcgugaacucugacaccgcuaauuggagcuggcccgauggggccgaacugcccuucaccaucgacaaguga

SEQ ID NO: 207039 - RNA, 1413 nt, Artificial Sequence
  derived and/or modified CDS sequence (opt5) from neuraminidase__InfluenzaA__ABE11952
augaaccccaaucagaagaucauuaccaucggcagcauuuccauggccaucgggauuaucucucugauccuccaaauuggaaacaucauuagcaucugggcuucccacucuauucagacaggcagccagaauuacacggggaucugcaaccagagaauuaucaccuaugagaauagcacaugggugaaccaaaccuacgucaauaucaacaauacaaacguuguggccggaaaagacaagaccucuaugacacuggcgggcaauagcucccuuuguccuauucgggggugggcuaucuauaccaaagauaacagcauucgcaucggaucuaagggcgacguguucgucauuagagaaccguuuaucuccugcagccaucuggagugucggacguucuuucucacccagggcgcccugcuuaaugauaaacacucuaacgggacagugaaggaccgcucccccuacagagcccugaugagcugcccucucggagaagcucccucuccuuauaauucccgguucgagagcguugccugguccgcuucugccugucaugauggccugggguggcugaccaucggaauuagcggccccgacaacggggcgguggccguccucaaguacaacggaaucauuacagaaaccaucaaauccuggaagaaacagauucugcgcacgcaggagagcgagugcguguguguuaauggcucuugcuuuacaaucaugaccgauggcccuuccaacggggcugccagcuauagaaucuucaagauugaaaaaggacgggugacaaagucuaucgagcuugacgcuccgaauuaccacuacgaagaguguagcugcuaucccgauaccggcaccgucaugugugugugccgcgacaacuggcauggguccaauagaccuugggugucuuuuaaccaaaaucuggauuaccagauuggauauaucugcagcggcgucuucggggacaacccccggccuaaggauggagagggcuccuguaaucccguuacaguggacggcgccgacggggugaaaggauuuagcuaccgcuauggcaacggggucuggauuggaagaacgaagucuaaucggcuccgcaaaggcuucgaaaugaucugggauccgaacggguggaccgacacagauuccgacuuuagcaugaagcaggaugugguugcgaugaccgacuggucuggcuacuccggauccuucgugcagcacccugagcugacaggccuugauugcaugagacccuguuuuugggucgaacuggugcgggggcucccuagagagaauaccacgauuuggacauccggaucuagcaucuccuucugcggcguuaacucugaaaccgccgacuggagcuggcccgauggggcugagcugcccuucaccaucgacaaauga

SEQ ID NO: 207040 - RNA, 1413 nt, Artificial Sequence
  derived and/or modified CDS sequence (opt5) from neuraminidase__InfluenzaA__ABE12035
augaaccccaaucagaagaucauuaccaucggcagcauuuccaucgccauugggaucaucucucugauucuccaaaucggaaacauuaucagcauuugggcuucccacucuauccagacaggcagccagaaucauacggggauuugcaaccagagaaucaucaccuacgagaauagcacaugggugaaccaaaccuaugucaauauuaacaauacaaacguuguggccggaaaagacaagaccucuaugacacuggcgggcaauagcucccuuuguccuauccgggggugggcuauuuacaccaaagauaacagcauccgcauuggaucuaagggcgacguguucgucaucagagaaccguuuaucuccugcagccaccuggagugucggacguucuuucucacccagggcgcccugcuuaaugauaaacauucuaacgggacagugaaggaccgcucccccuauagagcccugaugagcugcccucucggagaagcucccucuccuuacaauucccgguucgagagcguugccugguccgcuucugccugucacgauggccugggguggcugaccauuggaaucagcggccccgacaacggggcgguggccguccucaaguauaacggaauuaucacagaaaccauuaaauccuggaagaaacgcauccugagaacgcaggagagcgagugcguguguaugaauggcucuugcuuuacaaucaugaccgauggcccuuccaacggggcugccagcuaccggauuuucaagaucgaaaaaggacgcguuacaaagucuauugagcuugacgcuccgaauuaucauuacgaagaguguagcugcuaccccgauaccggcaccgugaugugugucugcagagacaacuggcacggguccaaucggccuugggugucuuuuaaccagaaucuggauuaucaaaucggauacauuugcagcggcguguucggggacaacccccgcccuaaggauggagagggcuccuguaaucccgucacaguugacggcgccgacggggugaaaggauuuagcuauagauacggcaacgggguguggaucggacggacgaagucuaaucgccucagaaaaggcuucgaaaugauuugggauccgaacggguggaccgacacagauuccgacuuuagcaugaagcaggauaucgucgcgaugaccgacuggucuggcuauuccggauccuucgugcagcacccugagcugacaggccuugauugcaugcggcccuguuuuuggguugaacuggugagagggcucccucgcgagaauaccacgaucuggacauccggaucuagcauuuccuucugcggcgucaacucugacaccgccaauuggagcuggcccgauggggcugaacugcccuucaccaucgacaaauga

SEQ ID NO: 207041 - RNA, 1410 nt, Artificial Sequence; identical to SEQ ID NO: 206802
  derived and/or modified CDS sequence (opt5) from neuraminidase__InfluenzaA__ABE12094

SEQ ID NO: 207042 - RNA, 1410 nt, Artificial Sequence; identical to SEQ ID NO: 206934
  derived and/or modified CDS sequence (opt5) from neuraminidase__InfluenzaA__ABE12126

SEQ ID NO: 207043 - RNA, 1413 nt, Artificial Sequence; identical to SEQ ID NO: 206468
  derived and/or modified CDS sequence (opt5) from neuraminidase__InfluenzaA__ABE12263

SEQ ID NO: 207044 - RNA, 1410 nt, Artificial Sequence
  derived and/or modified CDS sequence (opt5) from neuraminidase__InfluenzaA__ABE12626
augaaccccaaucagaagaucauuaccaucggcagcgugucccugacaauugccacgaucugcuuccucaugcaaauugcuauccuggucaccacaguuacccuucacuuuaaacaguacgagugugacucuccugccaacaaucaggugaugccgugcgaacccaucauuaucgagagaaacauuacagaaaucguguaucugaccaauacaaccauugagaaggaaaucuguccuaaacucgucgaguaccggaaguggagcaaaccccagugcaagauuacgggguucgcgccuuuuuccaaggauaacucuauccgccugagcgcuggaggcgacaucugggugaccagagagcccuauguuuccugugauccugggaaaugcuaccaauucgcccuuggacagggcacaacccuggacaauaagcauucuaacgauacaauucacgaccggaucccgcaucgcacccuccugaugaaugaacugggggugcccuuucaccucggaacgagacaggucuguauugccuggagcuccagcucuugccaugauggcaaggcuuggcugcacguguguguuacaggcgacgauaaaaacgccaccgcuuccuucaucuaugacgggcggcuuguggauagcauuggaucuuggucccagaauauccugcgcacacaagagagcgaaugcgucuguaucaacggaaccugcaccguggugaugacagacgggucugccuccggcagagcggauacgcggauucucuuuaucgaggagggcaaaauuguccacaucagcccucuguccgggucugcccagcauguugaagagugcagcuguuacccccgcuauccuggagugagaugcauuugucgggacaauuggaagggcuccaaccgccccguggucgacaucaaugugaaggauuacagcaucgacucuuccuacguuugcagcggccuugugggggauaccccgagaaacaacgaccggucuagcaauuccuauugucgcaacccuaauaacgaaagaggaaaucacggcgucaaagggugggcuuucgaugacggaaacgauguguggaugggccggacaauuucuaaggacagcagauccggguacgagaccuuuaaaguuaucggaggcuggagcacacccaauucuaagucccagauuaaccgccaggugaucgucgauagcgacaaucggucuggcuauuccgggauuuucagcguggaaggaaaauccugcaucaacagauguuuuuacgucgagcugauucgcggccgggagcaagaaaccagagugugguggacgucuaauagcaucguuguguucugcgggacauccggaaccuauggcaccgggucuuggccugauggcgccgacaucaaccucaugcccauuuga

SEQ ID NO: 207045 - RNA, 1410 nt, Artificial Sequence
  derived and/or modified CDS sequence (opt5) from neuraminidase__InfluenzaA__ABE12650
augaaccccaaucagaagaucauuaccaucggcagcgugucccugacaauugccacgaucugcuuccucaugcaaauugcuauccuggucaccacaguuacccuucacuuuaaacaguacgaguguaacucuccuccgaauaaccaggugaugcugugcgaacccacaaucauugagagaaauaucaccgaaauuguguaucucacaaacaccacgaucgagaaggaaauuuguccuaaacuggccgaguaccggaauuggagcaagccccagugcaaaaucaccggguucgcgccuuuuuccaaggacaacucuauucgccuuagcgcuggaggcgauaucugggucacaagagagcccuauguguccugugacccugauaagugcuaccaauucgcccuggggcagggaaccacacucaauaaccggcauucuaaugacaccguucacgaucgcacgccguauagaacacugcugaugaacgaacucggcgugcccuuucaucuggggaccaaacaggucuguaucgccuggagcuccagcucuugccacgacggaaaggcuuggcuucauguguguguuacaggccacgaugagaaugccaccgcuuccuucauuuacgacggccggcugguggauagcaucgggucuugguccaaaaagauucuccgcacccaggaaagcgagugcgucuguaucaacggaacaugcacgguggugaugaccgacggcucugccuccgggagagcggauacaaaaauucuguuuaucaaggagggaaagaucguccacauuagcccucuucugggcuccgcccaacauguugaagagugcucuuguuauccccgguacccuggggugcgcugcguguguagagacaauuggaaaggaagcaaccggcccaucgucgauauuaacgugaaggacuacuccaucguuagcucuuaugugugcuccggccucgucggcgacaccccgcgcaaaaaugauagcucuagcuccucucacugucugaacccuaauaacgaagaagggggacauggcgugaaggggugggcuuucgacgauggaaaugacguuuggaugggcagaacaauuagcgagaaacugcgguccggguacgagaccuuuaaggugaucgagggauggagcaaacccaacucuaagcuccagaucaaucgccaggucauuguggauagaggcaaccgguccggcuauagcgggaucuucucugucgaaggaaaguccugcauuaauagauguuuuuacguggagcugauccgcggccggaaacaggaaacggagguuugguggacaagcaacuccauuguggucuucugcgggaccucuggaaccuauggcacagggagcuggccugacggcgccgauaucaaucuuaugcccauuuga

SEQ ID NO: 207046 - RNA, 1410 nt, Artificial Sequence
  derived and/or modified CDS sequence (opt5) from neuraminidase__InfluenzaA__ABE13095
augaaccccaaucagaagaucauuaccaucggcagcgugucccugacaauuacgaccaucugcuuccucaugcaaauugccauccuggucaucacaguuacccuucacuuuaaacagugugagugcaacucuccuccgaauaaccaggugaugcugugugaacccacaauuaucgagagaaauauuaccgaaaucguguaccucacaaacaccacgauugagaaggaaaucugcccuaaacuggcugaguaucggaauuggagcaagccccaguguaaaauuaccggguucgccccuuuuuccaaggacaacucuauccgccuuagcgcgggaggcgauaucugggucacaagagagcccuacguguccugcgacccugggaaguguuaucaauucgcucugggacagggcaccacacucaauaaccggcauucuaaugauaccguucacgaccgcacgccguacagaacacugcugaugaacgaacucggggugcccuuucaucugggaaccaaacaggucugcauugccuggagcuccagcucuugucacgauggcaaggccuggcuucaugugugcguuacaggccacaaugagaacgcuaccgccuccuucaucuaugacgggcggcugguggauagcauuggaucuugguccaaaaauauccuccgcacccaggaaagcgagugugucugcauuaacggcacaugcacgguggugaugaccgacgggucugcuuccggcagagccgauacaaagauccuguuuaucgaggaaggaaaaauuguccacaucagcccucuuuccgggucugcgcaacauguugaggaauguagcugcuacccccgguauccuggagugcgcugugugugcagagacaacuggaagggcuccaaucggcccauugucgauaucaacgugaaggacuacagcauuguuucuuccuacguguguagcggccuggucggggauaccccgcgcaaaaaugacggaucuagcuccucuuauugccucgacccuaacaaugaggaaggcgggcacggagugaagggcugggccuucgaugacgggaacgauguuuggaugggaagaacaaucagcgagaaacugcgguccggcuacgagaccuuuaaggugaucggcggguggagcaaacccaauucuaagcugcagauuaaccgccaggucaucguggacaaaggaaauagauccggcuauagcgggauuuucucugucgaaggaaaguccuguaucaaccggugcuuuuacguggagcucauuagaggccgcaagcaggaaacggagguuugguggacaagcaauuccaucguggucuucugugggaccucuggcaccuauggaacaggcagcuggccugauggggcugacauuaaccugaugcccaucuga

SEQ ID NO: 207047 - RNA, 1410 nt, Artificial Sequence; identical to SEQ ID NO: 206198
  derived and/or modified CDS sequence (opt5) from neuraminidase__InfluenzaA__ABE13332

SEQ ID NO: 207048 - RNA, 1410 nt, Artificial Sequence; identical to SEQ ID NO: 206198
  derived and/or modified CDS sequence (opt5) from neuraminidase__InfluenzaA__ABE13558

SEQ ID NO: 207049 - RNA, 1410 nt, Artificial Sequence
  derived and/or modified CDS sequence (opt5) from neuraminidase__InfluenzaA__ABE13642
augaaccccaaucagaagaucauuaccaucggcagcgugucccugacaauugccacgaucugcuuccucaugcaaauugcuauccuggucaccacaguuacccuucacuuuaaacaguacgaguguaacucuccuccgaauaaccaggugaugcugugcgaacccacaaucauugagagaaauaucaccgaaauuguguaucucacaaacaccacgaucgagaaggaaauuuguccuaaacuggccgaguaccggaauuggagcaagccccagugcaaaaucaccggguucgcgccuuuuuccaaggacaacucuauucgccuuagcgcuggaggcgauaucugggucacaagagagcccuauguguccugugacccugggaagugcuaccaauucgcccugggacagggcaccacacucaauaaccggcauucuaaugauaccguucacgaacgcacgccguauagaacacugcugaugaacgagcucggggugcccuuucaucugggaaccaaacaggucuguaucgccuggagcuccagcucuugccacgacggcaaggcuuggcuucauguguguguuacaggccacgaugaaaaugccaccgcuuccuucauuuacaacgggcggcugguggacagcaucggaucuugguccaaaaauauucuccgcacccaggagagcgagugcgucuguaucaacggcacaugcacgguggugaugaccgaugggucugccuccggcagagcggacacaaagauucuguuuaucgaagagggaaaaaucguccacauuagcccucuuuccgggucugcccaacauguugaagagugcagcuguuauccccgguacccuggagugcgcugcguguguagagauaacuggaagggcuccaaucggcccaucgucgacauuaacgugaaggauuacagcaucguuucuuccuaugugugcagcggccuggucggggacaccccgcgcaaaaaugauucuagcuccucuagccacugucucaacccuaauaacgaagagggaggccauggggugaagggaugggcuuucgacgacggcaaugauguuuggauggggagaacaauuuccgagaaacugcggagcggauacgaaaccuuuaaggugaucggcggcuggucuaaacccaacuccaagcugcagaucaaucgccaggucauuguggacagagggaaccggagcggauauucuggcaucuucuccgucgaggggaaaagcugcauuaauagauguuuuuacguggaacucauccgcggacggaagcaggagacggaaguuugguggacauccaacucuauuguggucuucugcggcaccagcgggaccuauggcacaggauccuggccugauggcgccgacaucaaucugaugcccauuuga

SEQ ID NO: 207050 - RNA, 1410 nt, Artificial Sequence
  derived and/or modified CDS sequence (opt5) from neuraminidase__InfluenzaA__ABE13668
augaaccccaaucagaagaucauuaccaucggcagcgugucccugacaauugccacgaucugcuuccucaugcaaauugcuauccuggucaccacaguuacccuucacuuuaaacaguacgaguguaacucuccuccgaauaaccaggugaugcugugcgaacccacaaucauugagagaaauaucaccgaaauuguguaucucacaaacaccacgaucgagaaggaaauuuguccuaaacuggccgaguaccggaauuggagcaagccccagugcaaaaucaccggguucgcgccuuuuuccaaggacaacucuauucgccuuagcgcuggaggcgauaucugggucacaagagagcccuauguguccugugacccugggaagugcuaccaauucgcccugggacagggcaccacacucaauaaccggcauucuaaugauaccguucacgaccgcacgccguauagaacacugcugaugaacgaacucggggugcccuuucaucugggaaccaaacaggucuguaucgccuggagcuccagcucuugccacgauggcaaggcuuggcuucauguguguguuacaggccacgacgagaaugccaccgcuuccuucauuuacgaugggcggcugguggacagcaucggaucuugguccaaaaacauucuccgcacccaggaaagcgagugcgucuguaucaauggcacaugcacgguggugaugaccgaugggucugccuccggcagagcggacacaaagauucuguuuaucgaggaaggaaaaaucguccacauuagcccucuuuccgggucugcccaacauguugaggaaugcagcuguuauccccgguacccuggagugcgcugcguguguagagauaacuggaagggcuccaaccggcccaucgucgacauuaaugugaaggauuacagcaucguuucuuccuaugugugcagcggccuggucggggacaccccgcgcaaaaacgacucuagcuccucuagccacugucucaauccuaacaaugaggaaggaggccauggggugaagggaugggcuuucgaugacggcaacgauguuuggauggggagaacaauuuccgagaaacugcggagcggauacgagaccuuuaaggugaucggcggcuggucuaaacccaauuccaagcugcagaucaaccgccaggucauuguggacagagggaaucggagcggauauucuggcaucuucuccgucgaagggaaaagcugcauuaacagauguuuuuacguggagcucauccgcggacggaagcaggaaacggagguuugguggacauccaauucuauuguggucuucugcggcaccagcgggaccuauggcacaggauccuggccugauggcgccgacaucaaccugaugcccauuuga

SEQ ID NO: 207051 - RNA, 1410 nt, Artificial Sequence
  derived and/or modified CDS sequence (opt5) from neuraminidase__InfluenzaA__ABE13836
augaaccccaaucagaagaucauuaccaucggcagcgugucccugacaauugccacgaucugcuuccucaugcaaauugcuauccuggucaccacaguuacccuucacuuuaaacaguacgaguguaacucucugccuaauaaccaggugaugcucugcgaaccgacaaucauugagagaaauaucaccgaaauuguguaucugacaaacaccacgaucgagaaggaaauuugucccaaacuugccgaguaccggaauuggagcaagccucagugcaaaaucaccggguucgcgcccuuuuccaaggacaacucuauucgccugagcgcuggaggcgauaucugggucacaagagagccuuauguguccugugaccccgggaagugcuaccaauucgcccucggacagggcaccacacugaauaaccggcauucuaaugauaccguucacgaccgcacgccuuauagaacacugcucaugaacgaacugggggugccguuucaucuuggaaccaaacaggucuguaucgccuggagcuccagcucuugccacgauggcaaggcuuggcugcauguguguguuacaggccacgacgagaaugccaccgcuuccuucauuuacgaugggcggcucguggacagcaucggaucuugguccaaaaacauucugcgcacccaggaaagcgagugcgucuguaucaauggcacaugcacgguggugaugaccgaugggucugccuccggcagagcggacacaaagauucuuuuuaucgaggaaggaaaaaucguccacauuagcccccuguccgggucugcccaacauguugaggaaugcagcuguuauccucgguaccccggagugcgcugcguguguagagauaacuggaagggcuccaaccggccuaucgucgacauuaaugugaaggauuacagcaucguuucuuccuaugugugcagcggccucgucggggacacaccccgcaaaaacgacucuagcuccucuagccacugucugaauccgaacaaugaggaaggaggccauggggugaagggaugggcuuucgaugacggcaacgauguuuggauggggagaaccauuuccgagaaacugcggagcggauacgagaccuuuaaggugaucggcggcuggucuaaaccuaauuccaagcuccagaucaaccgccaggucauuguggacagagggaaucggagcggauauucuggcaucuucuccgucgaagggaaaagcugcauuaacagauguuuuuacguggagcugauccgcggacggaagcaggaaacggagguuugguggacauccaauucuauuguggucuucugcggcaccagcgggaccuauggcacaggauccuggcccgauggcgccgacaucaaccuuaugccuauuuga

SEQ ID NO: 207052 - RNA, 1410 nt, Artificial Sequence
  derived and/or modified CDS sequence (opt5) from neuraminidase__InfluenzaA__ABE14033
augaaccccaaucagaagaucauuaccaucggcagcgugucccugacaauugccacgaucugcuuccucaugcaaauugcuauccuggucaccacaguuacccuucacuuuaaacaguacgaguguaacucuccuccgaauaaccaggugaugcugugcgaacccacaaucauugagagaaauaucaccgaaauuguguaucucacaaacaccacgaucgagaaggaaauuuguccuaaacuggccgaguaccggaauuggagcaagccccagugcaaaaucaccggguucgcgccuuuuuccaaggacaacucuauucgccuuagcgcuggaggcgauaucugggucacaagagagcccuauguguccugugacccugggaagugcuaccaauucgcccugggacagggcaccacacucaauaaccggcauucuaaugauaccguucacgaccgcacgccguauagaacacugcugaugaacgaacucggggugcccuuucaucugggaaccaaacaggucuguaucgccuggagcuccagcucuugccacgauggcaaggcuuggcuucauguguguguuacaggccacgacgagaaugccaccgcuuccuucauuuacgaugggcggcugguggacagcaucggaucuugguccaaaaacauucuccgcacccaggaaagcgagugcgucuguaucaauggcacaugcacgguggugaugaccgaugggucugccuccggcagagcggacacaaagauucuguuuaucgaggaaggaaaaaucguccacauuagcccucuuuccgggucugcccaacauguugaggaaugcagcuguuauccccgguacccuggagugcgcugcguguguagagauaacuggaagggcuccaaccggcccaucgucgacauuaaugugaaggauuacagcaucguuucuuccuaugugugcagcggccuggucggggacaccccgcgcaaaaacgacucuagcuccucuagcuacugucucaauccuaacaaugaggaaggaggccacggggugaagggaugggcuuucgaugacggcaacgauguuuggauggggagaacaauuuccgagaaacugcggagcggauaugagaccuuuaaggugaucggcggcuggucuaaacccaauuccaagcugcagaucaaccgccaggucauuguggacagagggaaucggagcggauacucuggcaucuucuccgucgaagggaaaagcugcauuaacagauguuuuuauguggagcucauccgcggacggaagcaggaaacggagguuugguggacauccaauucuauuguggucuucugcggcaccagcgggaccuacggcacaggauccuggccugauggcgccgacaucaaccugaugcccauuuga

SEQ ID NO: 207053 - RNA, 1410 nt, Artificial Sequence
  derived and/or modified CDS sequence (opt5) from neuraminidase__InfluenzaA__ABE14055
augaaccccaaucagaagaucauuaccaucggcagcgugucccugacaauugccacgaucugcuuccucaugcaaauugcuauccuggucaccacaguuacccuucacuuuaaacaguacgaguguaacucuccuccgaauaaccaggugaugcugugcgaacccacaaucauugagagaaauaucaccgaaauuguguaucucacaaacaccacgaucgagaaggaaauuuguccuaaacuggccgaguaccggaauuggagcaagccccagugcaaaaucaccggguucgcgccuuuuuccaaggacaacucuauucgccuuagcgcuggaggcgauaucugggucacaagagagcccuauguguccugugacccugauaagugcuaccaauucgcccuggggcagggaaccacacucaauaaccggcauucuaaugacaccguucacgaucgcacgccguauagaacacugcugaugaacgaacucggcgugcccuuucaucuggggaccaaacaggucuguaucgccuggagcuccagcucuugccacgacggaaaggcuuggcuucauguguguguuacaggccacgaugagaaugccaccgcuuccuucauuuacgacggccggcugguggauagcaucucuuccuggagcaaaaacauucuccgcacccaggaaucugagugcgucuguaucaaugggacaugcacgguggugaugaccgacggauccagcuccggcagagccgauacaaagauucuguuuaucgaggaagggaaaaucguccacauuucuccucuuagcggauccgcgcaacauguugaggaaugcagcuguuauccccgguacccuggcgugcgcugcguguguagagacaacuggaaggggucuaaccggcccaucgucgauauuaaugugaaggacuacuccaucguuagcucuuaugugugcagcggacuggucggcgacaccccgcgcaaaaacgauuccucuagcuccagcuacugucucaauccuaacaaugaggaaggcgggcacggagugaagggcugggccuucgacgaugggaacgacguuuggaugggaagaacaauuucugagaaacugcgguccggcuaugagaccuuuaaggugaucgggggauggagcaaacccaauucuaagcugcagaucaaccgccaggucauuguggauagaggcaaucgguccggcuacagcgggaucuucuccgucgaaggaaaaucuugcgugaacagauguuuuuauguugagcucauucgcggccggaagcaggaaacggaggugugguggacaagcaauuccaucgucguguucugcgggaccucuggaaccuacggcacagggagcuggccugacggcgcugauauuaaccugaugcccaucuga

SEQ ID NO: 207054 - RNA, 1410 nt, Artificial Sequence
  derived and/or modified CDS sequence (opt5) from neuraminidase__InfluenzaA__ABE14857
augaaccccaaucagaagaucauuaccaucggcagcgugucccugacaauugccacgaucugcuuccucaugcaaauugcuauccuggucaccacaguuacccuucacuuuaaacaguacgaguguaacucuccuccgaauaaccaggugaugcugugcgaacccacaaucauugagagaaauaccacagaaaucguguaucucaccaacacgaccauugagaaggaaaucuguccuaaacuggccgaguaccggaauuggagcaagccccagugcaaaauuacaggguucgcgccuuuuuccaaggacaacucuauccgccuuagcgcuggaggcgauauuugggucaccagagagcccuauguguccugugacccugggaagugcuaccaauucgcccugggacagggcacaacccucaauaaccggcauucuaaugauacgguucacgaccgcacaccguauagaacccugcugaugaacgaacucggggugcccuuucaucugggaacaaaacaggucuguaucgccuggagcuccagcucuugccacgauggcaaggcuuggcuucauguguguguuaccggccacgacgagaaugccaccgcuuccuucaucuacgaugggcggcugguggacagcauuggaucuugguccaaaaacauccuccgcacacaggaaagcgagugcgucuguauuaauggcacgugcaccguggugaugacagaugggucugccuccggcagagcggacaccaagauccuguuuauugaggaaggaaaaaucguccacaucagcccucuuuccgggucugcccaacauguugaggaaugcagcuguuauccccgguacccuggagugcgcugcguguguagagauaacuggaagggcuccaaccggcccauugucgacaucaaugugaaggauuacagcauuguuucuuccuaugugugcagcggccuggucggggacacaccgcgcaaaaacgacucuagcuccucuagcuacugucucaauccuaacaaugaggaaggaggccacggggugaagggaugggcuuucgaugacggcaacgauguuuggauggggagaaccaucuccgagaaacugcggagcggauaugagacguuuaaggugauuggcggcuggucuaaacccaauuccaagcugcagaucaaccgccaggucaucguggacagagggaaucggagcggauacucuggcauuuucuccgucgaagggaaaagcugcaucaacagauguuuuuauguggagcucauucgcggacggaagcaggaaacagagguuugguggaccuccaauucuaucguggucuucugcggcaccagcgggacauacggcaccggauccuggccugauggcgccgacauuaaccugaugcccaucuga

SEQ ID NO: 207055 - RNA, 1410 nt, Artificial Sequence; identical to SEQ ID NO: 207052
  derived and/or modified CDS sequence (opt5) from neuraminidase__InfluenzaA__ABE15594

SEQ ID NO: 207056 - RNA, 1413 nt, Artificial Sequence
  derived and/or modified CDS sequence (opt5) from neuraminidase__InfluenzaA__ABE26994
augaaccccaaucagaagaucauuaccaucggcagcauuuccaucgccauugggaucaucucucugauucuccaaaucggaaacauuaucagcauuugggcuucccacucuauccagacaggcagccagaaucauacggggauuugcaaccagagaaucaucaccuacgaaaauuccacaugggugaaccaaaccuaugucaauauuaacaauacaaacguuguggccggaaaagacaagaccucuaugacacuggcgggcaauagcucccuuuguccuauccgggggugggcuauuuacaccaaagauaacagcauccgcauuggaucuaagggcgacguguucgucaucagagagccguuuaucuccugcagccaccuggagugucggacguucuuucucacccagggcgcccugcuuaaugauaaacauucuaacgggacagugaaggaccgcucccccuauagagcccugaugagcugcccucucggagaagcucccucuccuuacaauucccgguucgagagcguugccugguccgcuucugccugucacgauggccugggguggcugaccauuggaaucagcggccccgacaacggggcgguggccguccucaaguauaacggaauuaucacagaaaccauuaaauccuggaagaaacgcauccugagaacgcaggagagcgagugcguguguaugaauggcucuugcuuuacaaucaugaccgauggcccuuccaacggggcugccagcuaccggauuuucaagaucgaaaaaggacgcguuacaaagucuauugagcuugacgcuccgaauuaucauuacgaagaguguagcugcuaccccgauaccggcaccgugaugugugucugcagagacaacuggcacuccucuaaucggccuugggugagcuuuaaccagaaucuggauuaucaaaucggguacauuugcuccggaguguucggcgacaacccccgcccuaaggauggggagggaagcuguaaucccgucacaguugacggcgccgacggcgugaaaggguuuucuuauagauacggaaacggcguguggaucgggcggacgaaguccaaucgccucagaaaaggauucgaaaugauuugggauccgaacggcuggaccgacacagauagcgacuuuucuaugaagcaggauaucgucgcgaugaccgacugguccggguauagcggcuccuucgugcagcacccugagcugacaggacuugauugcaugcggcccuguuuuuggguugaacuggugagaggccucccucgcgagaauaccacgaucuggacaucugggagcuccauuucuuucugcggagucaacagcgacaccgccaauugguccuggcccgauggcgcugaacugcccuucaccaucgacaaauga

SEQ ID NO: 207057 - RNA, 1350 nt, Artificial Sequence
  derived and/or modified CDS sequence (opt5) from neuraminidase__InfluenzaA__ABE97641
augaaccccaaucagaagaucauuaccaucggcagcauuugcauggugaucgggauuaucucccugaugcuccaaaucggaaacaugauuucuaucugggucagccacuccauucagacauggaaucagcaucaggccgagucuaucagcaacacgaauccucugaccgaaaaagcuguugccuccgugacacuugcgggcaacucuagccuguguccgauuagagggugggcugugcacuccaaggacaauagcauccggauuggaucuaaaggcgaugucuucgugauccgcgagcccuuuaucuccugcagccaucucgaauguagaaccuucuuucugacacaaggggcccuucugaacgacaagcacucuaauggaaccguuaaagaucgguccccucaucgcacacucaugagcugccccgugggcgaggccccuucucccuacaacuccagauucgaaagcgucgcuugguccgccucugcuugucacgacggcaccagcuggcugacgauugggaucuccggaccugauaauggcgccguggcgguucugaaguauaacgggauuaucaccgacacaauuaagagcuggcggaauaacauccuccgcacccaggagucugagugcgccugugugaauggauccugcuuuacagucaugaccgauggcccgagcaacgggcaggcuucuuacaaaaucuucaagauggaaaaaggaaagguggugaaaagcgucgagcuggacgcccccaacuaucacuacgaagaguguuccugcuauccugaugcuggcgagauuacguguguuugcagagacaauuggcauggcucuaaccggcccuggaucagcuuuaaucagaaccuugaauaccaaauuggguauaucugcuccggaguguucggcgauaauccucgccccaacgacgggacaggaagcuguggcccgaugucuccuaauggggccuacggagugaagggcuuuuccuucaaguacggcaacggggucuggauuggaagaaccaaaagcacaaauucucgguccggcuuugagaugaucugggaucccaacggguggaucggaaccgacagcuccuucucugugaagcaggacauuguugcgaucaccgauuggagcggcuauuccgggucuuuugugcagcacccugaacugacaggccucgacugcauucgccccuguuucugggucgagcugaucagaggacggcccaaagaaagcacgauuuggaccuccggcagcucuaucuccuucugcggggugaauagcgauauuguuucuugguccuggccugacggagccgagcuuccguuuacaaucgauaaguga

SEQ ID NO: 207058 - RNA, 1350 nt, Artificial Sequence
  derived and/or modified CDS sequence (opt5) from neuraminidase__InfluenzaA__ABE97642
augaaccccaaucagaagaucauuaccaucggcagcauuugcauggugaucgggauggucucccugaugcuccaaauuggaaacaugaucucuaucuggcugagccacuccauucagacaggcaaucagcaucaggccgagucuaucagcaacaauaaccuucugacggaaaaugcuguugccuccgugacccucgcggggaacucuagccuguguccuauuagaggaugggcugugcacuccaaagacaauagcauccggauuggcucuaagggggaugucuucgugauccgcgagccguuuauuuccugcagccaucuugaauguagaacauucuuucugacccaaggagcccuccugaacgacaaacacucuaauggcacaguuaaggaucggagcccccaucgcacccugaugagcugcccugugggcgaggcccccucuccuuacaacuccagauucgaaagcgucgcuugguccgccucugcuugucacgacgggaucagcuggcucacaaucggaauuuccggccccgauaauggggccguggcgguucugaaauauaacggaaucauuaccgacacgaucaagagcuggcggaauaacauucuucgcacccaggagucugagugcgccugugugaacggcuccugcuuuacagucaugaccgaugggccuagcaauggacaggcuucuuacaagaucuucaaaauggaaaagggcaaaguggugaaguccgucgagcuggacgccccgaacuaucacuacgaagaguguuccugcuaucccgaugcuggcgagaucacauguguuugcagagacaauuggcaugggucuaaccggccuugggugagcuuuaaucagaaccucgaauaccaaauuggauauaucugcuccggcguguucggggauaauccccgcccuaacgacggaaccggcagcugugggcccaugucuccgaauggagccuacggcgucaaaggcuuuuccuucaaguacgggaacggaguguggauuggcagaacgaaaagcacaaauucucgguccggguuugagaugaucugggauccuaacggauggaccggcacagacagcuccuucucuguuaagcaggacauuguggcgaucaccgauuggagcggguauuccggcucuuuuguccagcaccccgaacugaccggacuugacugcauccgcccuuguuucuggguggagcugauuagaggccggcccaaggaaagcacaaucuggacguccgggagcucuauuuccuucugcggaguuaauggcgauaccgugagcuggucuuggcccgacggggccgagcucccuuuuaucauugauaaauga

SEQ ID NO: 207059 - RNA, 1350 nt, Artificial Sequence
  derived and/or modified CDS sequence (opt5) from neuraminidase__InfluenzaA__ABE97644
augaaccccaaucagaagaucauuaccaucggcagcauuugcauggugaucgggauugucucccugaugcuccaaaucggaaacaugaucucuauuuggguuagccacuccauccagacaggcaaucagcaucaggccgagucuauuagcaacacgaauccucugaccgaaaaagcuguggccuccgugacacuugcggggaacucuagccuguguccgaucagaggaugggcuguccacuccaaggacaauaacauucggaucggcagcaaaggggauguguucguuauucgcgagcccuuuaucucuugcucccaucucgaauguagaaccuucuuucugacacaaggagcccuucugaaugacaagcacagcaacggcaccgugaaagaucggucuccucaucgcacacucauguccugccccgucggcgaggccccuagccccuacaauucuagauucgaauccguggcuuggagcgccuccgcuugucacgacgggaccucuuggcugacgaucggaauuagcggcccugauaacggggccguugcggugcugaaguauaauggaaucauuaccgacacaaucaaguccuggcggaacaauauucuccgcacccaggagagcgagugcgccugugucaacggcucuugcuuuacagugaugaccgaugggccguccaacggacaggcuagcuacaaaaucuucaagauggaaaaaggcaagguggucaaaucuguugagcuggacgcccccaauuaucacuacgaagaguguagcugcuauccugaugcuggcgagaucacgugugugugcagagacaacuggcauggguccaaucggcccugggugucuuuuaaccagaaucuugaauaccaaauuggauauaucugcagcggcgucuucggggauaacccucgccccaaugacggaacaggcuccugugggccgaugagcccuaacggagccuacggcgugaagggcuuuucuuucaaguacgggaauggaguuuggauuggcagaaccaaauccacaaacagccggucuggguuugagaugaucugggaucccaauggauggaccggcaccgacuccagcuucuccgugaagcaggacauugucgcgcugacagauuggucuggguauagcggcuccuuugugcagcacccugaacucacgggacuggacugcauccgccccuguuucuggguugagcuuaucagaggccggcccaaagaaucuaccauuuggacaagcggguccagcaucucuuucugcggagugaacuccgauaccgucagcuggucuuggccugacggcgccgagcugccguuuacaauugauaaguga

SEQ ID NO: 207060 - RNA, 1350 nt, Artificial Sequence
  derived and/or modified CDS sequence (opt5) from neuraminidase__InfluenzaA__ABE97645
augaaccccaaucagaagaucauuaccaucggcagcauuugcauggugaucgggacagucucccugaugcuccaaauuggaaacaugaucucuaucuggguuagccacuccauucagacgggcaaucagcaucaggccgagccuaccucuagcacaaacccgcugaccgaaaaagcuguggccuccgugacacuugcgggaaauucuagccugugucccaucagagggugggcuauucacuccaaggacaacagcauccggauuggcucuaaaggggaugucuucgugauccgcgagccuuuuauuuccugcagccaucucgaauguagaaccuucuuucugacacaaggagcccuucugaaugacaagcacucuaacggcaccguuaaagaucggagcccccaucgcacgcucauguccugcccugugggcgaggcccccucuccuuacaauuccagauucgaaagcgucgcuugguccgccucugcuugucacgacgggaccagcuggcugacaaucggaaucuccggcccggauaacggggccguggcgguucugaaguauaauggaauuaucaccgacacaauuaagagcuggcggaacaauauccuccgcacccaggagucugagugcgccugugugaacggcuccugcuuuacggucaugacagaugggcccagcaauggacaggcuucuuacaaaauuuucaagauggaaaaaggcaagguggugaaaagcgucgagcuggacgccccuaacuaucacuacgaagaguguuccugcuaucccgaugcuggcgagaucaccuguguuugcagagacaacuggcaugggucuaaucggccuugggugagcuuuaaccagaaucuugaauaccaaaucggauauauuugcuccggcguguucggggauaacccccgcccgaaugacggaacaggcagcugugggccuaugucucccaacggagccuacggcgucaagggcuuugcguucaaguacgggaauggaguguggaucggcagaaccaaauccaccaacagccggucuggguuugagaugauuugggauccuaauggauggacaggccccgacuccagcuucuccguuaagcaggacaucguggccauuacggauuggucuggguauagcggcuccuuuguccagcaccccgaacugaccggacucgacugcauccgcccuuguuucuggguggagcugaucagaggccggccgaaagaaucuacaauuuggaccagcggguccagcaucucuuucugcggaguuaacuccgauacagugagcuggucuuggcccgacggcgcugagcuuccuuuuaccauugauaaguga

SEQ ID NO: 207061 - RNA, 1350 nt, Artificial Sequence
  derived and/or modified CDS sequence (opt5) from neuraminidase__InfluenzaA__ABE97646
augaaccccaaucagaagaucauuaccaucggcagcauuugcauggugaucgggauugucucccugaugcuccaaaucggaaacaugaucucuauuuggguuagccacuccauccagacagagaaucagcaucaggccgaaucuauuagcaacacgaauccuccgaccgagaaagcuguggccuccgugacacuggcgggcaacucuagccuuugucccaucagagggugggcuguccacuccaaggacaauagcauucggaucggaucuaaaggcgauguguucguuauucgcgaaccuuuuaucuccugcagccaucuggaguguagaaccuucuuucucacacaaggggcccugcuuaacgacaagcacucuaauggaaccgugaaagaucggucuccccaucgcacacugaugagcugcccugucggcgaagcccccucuccuuacaacuccagauucgagagcguggcuugguccgccucugcuugucacgacggcaccagcuggcucacgaucgggauuuccggaccggauaauggcgccguugcggugcugaaguauaacgggaucauuaccgacacaaucaagagcuggcggaauaacacccugcgcacacaggagucugaaugcgccugugucaauggauccugcuuuaccgugaugacggauggccccagcaacgggcaggcuucuuacaaaauuuucaagauggagaaaggaaagguggucaaaagcguugaacucgacgccccuaacuaucacuacgaggaguguuccugcuaucccgaugcuggcgaaaucacaugugugugcagagacaauuggcauggcucuaaccggccuugggugagcuuuaaucagaaccuggaguaccaaaucggguauauuugcuccggagucuucggcgauaauccccgcccgaacgacgggaccggaagcuguggcccuaugucucccaauggggccuacggagugaagggcuuuuccuucaaguacggcaacgggguuuggaucggaagaacaaaaagcaccaauucucgguccggcuuugaaaugauuugggauccuaacggguggaccggaacagacagcuccuucucugugaagcaggacaucgucagcauuacggauugguccggcuauucugggagcuuugugcagcaccccgagcuuaccggccuggacugcauccgccccuguuucuggguugaacucaucagaggacggccuaaagaguccacaauuuggaccagcggcuccuccaucagcuucugcggggucaauucugauacaguguccuggagcuggccggacggagcggagcugcccuuuaccauugauaaguga

SEQ ID NO: 207062 - RNA, 1350 nt, Artificial Sequence
  derived and/or modified CDS sequence (opt5) from neuraminidase__InfluenzaA__ABE97647
augaaccccaaucagaagaucauuaccaucggcagcauuugcauggugaucgggauugucucccugaugcuccaaaucggaaacaugaucucuauuuggguuagccacuccauccagacaggcaaucagcauagagccgagucuauuagcaacacgaauccucugaccgaaaaagcuguggccuccgugacacuugcggggaacucuagccuguguccgauccggggaugggcuguccacuccaaggacaauaacauucgcaucggcagcaaaggggauguguucguuauuagagagcccuuuaucucuugcucccaucucgaaugucggaccuucuuucugacacagggagcccuucugaaugacaagcacagcaacggcaccgugaaagaucgcucuccucauagaacacucauguccugccccgucggcgaggccccuagccccuacaauucucgguucgaauccguggcuuggagcgccuccgcuugucacgacgggaccucuuggcugacgaucggaauuagcggcccugauaacggggccguugcggugcugaaguauaauggaaucauuaccgacacaaucaaguccuggcgcaacaauauucucagaacccaagagagcgagugcgccugugucaacggcucuugcuuuacagugaugaccgaugggccguccaacggacaggcuagcuacaaaaucuucaagauggaaaaaggcaagguggucaaaucuguugagcuggacgcccccaauuaucacuacgaagaguguagcugcuauccugaugcuggcgagaucacgugugugugccgggacaacuggcauggguccaaucgccccugggugucuuuuaaccagaaucuugaauaccagauuggauauaucugcagcggcgucuucggggauaacccuagacccaaugacggaacaggcuccugugggccgaugagcccuaacggagccuacggcgugaagggcuuuucuuucaaguacgggaauggaguuuggauuggccggaccaaauccacaaacagccgcucuggguuugagaugaucugggaucccaauggauggaccggcaccgacuccagcuucuccgugaagcaagacauugucgcgaucacagauuggucuggguauagcggcuccuuugugcagcacccugaacugacgggacucgacugcaucagacccuguuucuggguugagcugauucggggccgccccaaagaaucuaccaucuggacaagcggguccagcauuucuuucugcggagugaacuccgauaccgucagcuggucuuggccugacggcgccgagcuuccguuuacaaucgauaaguga

SEQ ID NO: 207063 - RNA, 1350 nt, Artificial Sequence
  derived and/or modified CDS sequence (opt5) from neuraminidase__InfluenzaA__ABE97649
augaaccccaaucagaagaucauuaccaucggcagcauuugcauggugaucgggauugucucccugaugcuccaaaucggaaacaugaucucuauuuggguuagccacuccauccagacaggcaaucagcaucaggccgagucuauuagcaacacgaauccucugaccgaaaaagcuguggccuccgugacacuugcggggaacucuagccuguguccgaucagaggaugggcuguccacuccaaggacaauagcauucggaucggcucuaaaggggauguguucguuauucgcgagcccuuuaucuccugcagccaucucgaauguagaaccuucuuucugacacaaggagcccuucugaacgacaagcacucuaauggcaccgugaaagaucgguccccucaucgcacacucaugagcugccccgucggcgaggccccuucucccuacaacuccagauucgaaagcguggcuugguccgccucugcuugucacgacgggaccagcuggcugacgaucggaauuuccggcccugauaauggggccguugcggugcugaaguauaacggaaucauuaccgacacaaucaagagcuggcggaauaacauucuccgcacccaggagucugagugcgccugugucaauggcuccugcuuuacagugaugaccgaugggccgagcaacggacaggcuucuuacaaaaucuucaagauggaaaaaggcaagguggucaaaagcguugagcuggacgcccccaacuaucacuacgaagaguguuccugcuauccugaugcuggcgagaucacgugugugugcagagacaauuggcaugggucuaaccggcccugggugagcuuuaaucagaaccuugaauaccaaauuggauauaucugcuccggcgucuucggggauaauccucgccccaacgacggaacaggcagcugugggccgaugucuccuaauggagccuacggcgugaagggcuuuuccuucaaguacgggaacggaguuuggauuggcagaaccaaaagcacaaauucucgguccggguuugagaugaucugggaucccaacggauggaccggcaccgacagcuccuucucugugaagcaggacauugucgcgaucacagauuggagcggguauuccggcucuuuugugcagcacccugaacugacgggacucgacugcauccgccccuguuucuggguugagcugauuagaggccggcccaaagaaagcaccaucuggacauccgggagcucuauuuccuucugcggagugaauagcgauaccgucucuugguccuggccugacggcgccgagcuuccguuuacaaucgauaaguga

SEQ ID NO: 207064 - RNA, 1350 nt, Artificial Sequence; identical to SEQ ID NO: 207063
  derived and/or modified CDS sequence (opt5) from neuraminidase__InfluenzaA__ABE97651

SEQ ID NO: 207065 - RNA, 1350 nt, Artificial Sequence; identical to SEQ ID NO: 207063
  derived and/or modified CDS sequence (opt5) from neuraminidase__InfluenzaA__ABE97653

SEQ ID NO: 207066 - RNA, 1350 nt, Artificial Sequence; identical to SEQ ID NO: 207063
  derived and/or modified CDS sequence (opt5) from neuraminidase__InfluenzaA__ABE97654

SEQ ID NO: 207067 - RNA, 1350 nt, Artificial Sequence
  derived and/or modified CDS sequence (opt5) from neuraminidase__InfluenzaA__ABE97655
augaaccccaaucagaagaucauuaccaucggcagcauuugcauggccaucgggauugugucccugaugcuccaaaucggaaacaugaucucuauuugggucagccacuccauccagacaggcaaucagcaucaggcugagucuacgagcaacaccaauccucugacagaaaaagccguugcguccgugacccuugcugggaacucuagccuguguccgauuagaggaugggccauccacuccaaggacaauagcauucggaucggcucuaaaggggauguguucgucauucgcgagcccuuuaucuccugcagccaucucgaauguagaacauucuuucugacccaaggagcccuucugaacgacaagcacucuaauggcacagugaaagaucgguccccucaucgcacccucaugagcugccccguuggcgaggcuccuucucccuacaacuccagauucgaaagcguggccugguccgcuucugccugucacgacgggacgagcuggcugaccaucggaauuuccggcccugauaauggggcggucgccgugcugaaguauaacggaaucauuacagacaccaucaagagcuggcggaauaacauucuccgcacacaggagucugagugcgcuuguguuaauggcuccugcuuuaccgugaugacggaugggccgagcaacggacaggccucuuacaaaaucuucaagauggaaaaaggcaaggucgugaaaagcguggagcuggacgcucccaacuaucacuacgaagaguguuccugcuauccugaugccggcgagaucacaugugucugcagagacaauuggcaugggucuaaccggcccuggguuagcuuuaaucagaaccuugaauaccaaauuggauauaucugcuccggcguguucggggauaauccucgccccaacgacggaaccggcagcugugggccgaugucuccuaauggagcguacggcgugaagggcuuugccuucaaguacgggaacggagucuggauuggcagaacaaaauccaccaauagccggucuggguuugagaugaucugggaucccaacggauggaccggcccugacuccagcuucuccgugaagcaggacauuguugcuaucacagauuggucuggguauagcggcuccuuugugcagcaccccgaacugacgggacucgacugcauccgccccuguuucugggucgagcugauuagaggccggccuaaagaaucuaccaucuggacaagcggguccagcauuucuuucugcggaguuaauuccgauaccgugagcuggucuuggccggacggcgccgagcuucccuuuacaaucgauaaguga

SEQ ID NO: 207068 - RNA, 1350 nt, Artificial Sequence
  derived and/or modified CDS sequence (opt5) from neuraminidase__InfluenzaA__ABE97657
augaaccccaaucagaagaucauuaccaucggcagcauuugcauggugaucgggacagucucccugguucuccaaauuggaaacaugaucucuaucugggugagccacuccauucagacgggcaaucagcaucaggccgagucuaucagcaacaccaauccucugacagaaaaagcuguggccuccgucacccuugcggggaacucuagccuguguccgauuagaggaugggcugugcacuccaaggacaauagcauccggauuggcucuaaaggggauguuuucgugauccgcgagcccuuuauuuccugcagccaucucgaauguagaacauucuuucugacccaaggagcccuucugaacgacaagcacucuaauggcacagucaaagaucgguccccucaucgcacccucaugagcugccccgugggcgaggccccuucucccuacaacuccagauucgaaagcguugcuugguccgccucugcuugucacgacgggacgagcuggcugaccaucggaaucuccggcccugauaauggggccguggcgguccugaaguauaacggaauuaucacagacaccauuaagagcuggcgggauaauauccuccgcacacaggagucugagugcgccugugugaacggcuccugcuuuaccgugaugacggacgggccgagcaauggacaggcuucuuacaaaauuuucaagauggaaaaaggcaaggucguuaaaagcguggagcuggaugcccccaacuaucacuacgaagaguguuccugcuauccugacgcuggcgagaucacaugugugugcagagauaacuggcaugggucuaaucggcccugggucagcuuuaaccagaaucuugaauaccaaaucggauauauuugcuccggcguguucggggacaacccucgccccaaugauggaaccggcagcugugggccgaugucuuccaacggagccuacggcguuaagggcuuuagcuucaaguacgggaauggaguguggaucggcagaacaaaaucuaccaacucccggagcggguuugagaugauuugggacccuaauggauggaccggcacagacuccucuuucagcgucaagcaggauaucguggcgauuacggacugguccggguauucuggcagcuuuguucagcaccccgaacugaccggacucgauugcauccgcccuuguuucuggguggagcugaucagaggccggcccaaagaauccacaauuuggaccagcgggucuuccaucagcuucugcggagucaacucugacacaguguccuggagcuggcccgauggcgccgagcuuccuuuuaccauugacaaguga

SEQ ID NO: 207069 - RNA, 1350 nt, Artificial Sequence
  derived and/or modified CDS sequence (opt5) from neuraminidase__InfluenzaA__ABE97658
augaaccccaaucagaagaucauuaccaucggcagcauuugcauggugaucgggacaauuucccugaugcuccaaaucggaaacaugaucucuauuugggucagccacuccauccagacgggcaaucagcaucagaccgagucuauuagcaacacaaauccucugaccgaaaaagccguugcuuccgugacacuugccgggaacucuagccuguguuccaucagaggaugggcggugcacagcaaggacaauucuauucggaucggcuccaaaggggaugucuucgugauucgcgagccguuuaucagcugcucucaucucgaauguagaaccuucuuucugacacaaggagcccuucugaacgacaagcacuccaauggcaccguuaaagaucggagcccccaucgcacgcucaugucuugcccugugggcgaggcucccuccccuuacaacagcagauucgaauccgucgccuggucugcuagcgccugucacgacgggaccuccuggcugacaaucggaauuagcggccccgauaauggggcuguggccguucugaaguauaacggaaucauuaccgacacaaucaagucuuggcgggauaauauucuccgcacccaggaguccgagugcgcgugugugaacggcagcugcuuuacggucaugacagacgggccuucuaauggacaggccagcuacaaaaucuucaagauggaaaaaggcaagguggugaaauccgucgagcuggaugcuccgaacuaucacuacgaagaguguucuugcuaucccgacgccggcgagaucaccuguguuugcagagauaacuggcaugggagcaaucggccuuggguguccuuuaaccagaaucuugaauaccaaauuggauauaucugcagcggcguguucggggacaacccccgcccuaaugauggaacaggcucuugugggcccauguccagcaacggagcucacggcgucaagggcuuuucuuucaaguacgggaauggaguguggauuggcagaaccaaauccaccaacagccgguccggguuugagaugaucugggacccgaauggauggacaggcacggacucuagcuucuccguuaagcaggauauuguggccaucaccgacuggucuggguacagcggcuccuuuguccagcauccugaacugacaggacucgauugcauccgccccuguuucuggguggagcugauuagaggccggccuaaagaaagcaccaucuggacaucuggguccagcauuucuuucugcggaguuaacuccgacaccgugagcuggucuuggcccgauggcgcggagcuucccuuuacgaucgacaaguga

SEQ ID NO: 207070 - RNA, 1350 nt, Artificial Sequence
  derived and/or modified CDS sequence (opt5) from neuraminidase__InfluenzaA__ABE97659
augaaccccaaucagaagaucauuaccaucggcagcauuugcauggugaucgggauugucucccugaugcuccaaaucggaaacaugaucucuauuuggguuagccacuccauccagacaggcaaucagcaucaggccgagucuauuagcaacacgaauccucugaccgaaaaagcuguggccuccgugacacuugcggggaacucuagccuguguccgaucagaggaugggcuguccacuccaaggacaauagcauucggaucggcucuaaaggggauguguucguuauucgcgagcccuuuaucuccugcagccaucucgaauguagaaccuucuuucugacacaaggagcccuucugaacgacaagcacucuaaugagaccgugaaagaucgguccccucaucgcacacucaugagcugccccgucggcgaagccccuucucccuacaacuccagauucgagagcguggcuugguccgccucugcuugucacgacggcaccagcuggcugacgaucgggauuuccggaccugauaauggcgccguugcggugcugaaguauaacgggaucauuaccgacacaaucaagagcuggcgggauaauauucuccgcacccaggagucugaaugcgccugugucaacggauccugcuuuacagugaugaccgacggcccgagcaaugggcaggcuucuuacaaaaucuucaagauggagaaaggaaagguggucaaaagcguugaacuggaugcccccaacuaucacuacgaggaguguuccugcuauccugacgcuggcgaaaucacgugugugugcagagauaacuggcauggcucuaaucggcccugggugagcuuuaaccagaaucuugaguaccaaauuggguauaucugcuccggagucuucggcgacaacccucgccccaaugaugggacaggaagcuguggcccgaugucuuccaacggggccuacggagugaagggcuuuagcuucaaguacggcaaugggguuuggauuggaagaaccaaaucuacaaacucccggagcggcuuugaaaugaucugggacccuaauggguggaccggaaccgacuccucuuucagcgugaagcaggauauugucgcgaucacagacugguccggcuauucugggagcuuugugcagcaccccgagcugacgggccucgauugcauccgcccuuguuucuggguugaacugauuagaggacggcccaaagaguccaccaucuggacaagcgggucuuccauuagcuucugcggcgugaacucugacaccgucuccuggagcuggcccgauggagccgagcuuccuuuuacaaucgacaaguga

SEQ ID NO: 207071 - RNA, 1350 nt, Artificial Sequence
  derived and/or modified CDS sequence (opt5) from neuraminidase__InfluenzaA__ABE97660
augaaccccaaucagaagaucauuaccaucggcagcauuugcauggugaucgggacaauuucccugaugcuccaaaucggaaacaugaucucuauuugggucagccacuccauccagacgggcaaucagcaucaggccgagucuauuagcaacaccaauccucugacagaaaaagcuguugccuccgugacccuugcggggaacucuagccuguguccgaucagaggaugggcugugcacuccaaggacaauagcauucggaucggcucuaaaggggaugucuucgugauucgcgagcccuuuaucuccugcagccaucucgaauguagaacauucuuucugacccaaggagcccuucugaacgacaagcacucuaauggcacaguuaaagaucgguccccucaucgcacccucaugagcugccccgugggcgaggccccuucucccuacaacuccagauucgaaagcgucgcuugguccgccucugcuugucacgacgggacgagcuggcugaccaucggaauuuccggcccugauaauggggccguggcgguucugaaguauaacggaaucauuacagacaccaucaagagcuggcgggauaauauucuccgcacacaggagucugagugcgccugugugaacggcuccugcuuuaccgucaugacggacgggccgagcaauggacaggcuucuuacaaaaucuucaagauggaaaaaggcaagguggugaaaagcgucgagcuggaugcccccaacuaucacuacgaagaguguuccugcuauccugacgcuggcgagaucacauguguuugcagagauaacuggcaugggucuaaucggcccugggugagcuuuaaccagaaucuugaauaccaaauuggauauaucugcuccggcguguucggggacaacccucgccccaaugauggaaccggcagcugugggccgaugucuuccaacggagcccacggcgucaagggcuuuagcuucaaguacgggaauggaguguggauuggcagaacaaaaucuaccaacucccggagcggguuugagaugaucugggacccuaauggauggaccggcacagacuccucuuucagcguuaagcaggauauuguggcgaucacggacugguccggguacucuggcagcuuuguccagcaucccgaacugaccggacucgauugcauccgcccuuguuucuggguggagcugauuagaggccggcccaaagaauccacaaucuggaccagcgggucuuccauuagcuucugcggaguuaacucugacacaguguccuggagcuggcccgauggcgccgagcuuccuuuuaccaucgacaaguga

SEQ ID NO: 207072 - RNA, 1350 nt, Artificial Sequence
  derived and/or modified CDS sequence (opt5) from neuraminidase__InfluenzaA__ABE97661
augaaccccaaucagaagaucauuaccaucggcagcauuugcauggugaucgggacaauuucccugaugcuccaaaucggaaacaugaucucuauuugggucagccacuccauccagacgggcaaucagcaucagaccgagucuauuagcaacacaaauccucugaccgaaaaagccguugcuuccgugacacuugccgggaacucuagccuguguccgaucagaggaugggcggugcacuccaaggacaauagcauucggaucggcucuaaaggggaugucuucgugauucgcgagcccuuuaucuccugcagccaucucgaauguagaaccuucuuucugacacaaggagcccuucugaacgacaagcacucuaauggcaccguuaaagaucgguccccucaucgcacgcucaugagcugccccgugggcgaggcuccuucucccuacaacuccagauucgaaagcgucgccugguccgcuucugccugucacgacgggaccagcuggcugacaaucggaauuuccggcccugauaauggggcuguggccguucugaaguauaacggaaucauuaccgacacaaucaagagcuggcgggauaauauucuccgcacccaggagucugagugcgcgugugugaacggcuccugcuuuacggucaugacagacgggccgagcaauggacaggccucuuacaaaaucuucaagauggaaaaaggcaagguggugaaaagcgucgagcuggaugcucccaacuaucacuacgaagaguguuccugcuauccugacgccggcgagaucaccuguguuugcagagauaacuggcaugggucuaaucggcccugggugagcuuuaaccagaaucuugaauaccaaauuggauauaucugcuccggcguguucggggacaacccucgccccaaugauggaacaggcagcugugggccgaugucuuccaacggagcucacggcgucaagggcuuuagcuucaaguacgggaauggaguguggauuggcagaaccaaaucuaccaacucccggagcggguuugagaugaucugggacccuaauggauggacaggcacggacuccucuuucagcguuaagcaggauauuguggccaccacagacugguccggguacucuggcagcuuuguccagcaucccgaacugaccggacucgauugcauccgcccuuguuucuggguggagcugaucagaggccggcccaaagaauccacaguuuggaccagcgggucuuccauuagcuucugcggagugaacucugacacggucuccuggagcuggcccgauggcgcggagcuuccuuuuacaaucgacaaguga

SEQ ID NO: 207073 - RNA, 1350 nt, Artificial Sequence
  derived and/or modified CDS sequence (opt5) from neuraminidase__InfluenzaA__ABE97662
augaaccccaaucagaagaucauuaccaucggcagcauuugcauggugaucgggauugucucccugaugcuccaaaucggaaacaugaucucuauuuggguuagccacuccauccagacaggcaaucagcaucaggccgagucuauuagcaacacgaauccucugaccgaaaaagcuguggccuccgugacacuugcggggaacucuagccuguguccgaucagaggaugggcuguccacuccaaggacaauagcauucggaucggcucuaaaggggauguguucguuauucgcgagcccuuuaucuccugcagccaucucgaauguagaaccuucuuucugacacaaggagcccuucugaacgacaagcacucuaauggcaccgugaaagaucgguccccucaucgcacacucaugagcugccccgucggcgaggccccuucucccuacaacuccagauucgaaagcguggcuugguccgccucugcuugucacgacgggaccagcuggcugacgaucggaauuuccggcccugauaauggggccguugcggugcugaaguauaacggaaucauuaccgacacaaucaagagcuggcggaauaacauucuccgcacccaggagucugagugcgccugugucaauggcuccugcuuuacagugaugaccgaugggccgagcaacggacaggcuucuuacaaaaucuucaagaugagaaaaggcaagguggucaaaagcguugaacuggacgcccccaacuaucacuacgaggaauguuccugcuauccugaugcuggcgagaucacgugugugugccgggacaauuggcaugggucuaaccgccccugggugagcuuuaaucagaaccuugaguaccaaauuggauauaucugcuccggcgucuucggggauaauccuagacccaacgacggaacaggcagcugugggccgaugucuccuaauggagccuacggcgugaagggcuuuuccuucaaguacgggaacggaguuuggauuggccggaccaaaagcacaaauucucgcuccggguuugaaaugaucugggaucccaacggauggaccggcaccgacagcuccuucucugugaagcaggacauugucgcgaucacagauuggagcggguauuccggcucuuuugugcagcacccugagcugacgggacucgacugcaucagacccuguuucuggguugaacugauucggggccgccccaaagagagcaccaucuggacauccgggagcucuauuuccuucugcggagugaauagcgauaccgucucuugguccuggccugacggcgccgaacuuccguuuacaaucgauaaguga

SEQ ID NO: 207074 - RNA, 1350 nt, Artificial Sequence
  derived and/or modified CDS sequence (opt5) from neuraminidase__InfluenzaA__ABE97663
augaaccccaaucagaagaucauuaccaucggcagcauuugcauggugacagggaucgucucccugaugcuccaaauuggaaacaugaucucuaucuggguuagccacuccauucauacgggcaaucagcaccaggccgagccuaucucuaacaccaauuuccugacagaaaaagcuguggccagcgugaaacuugcggggaacuccucucuguguccgauuaauggaugggcugucuacagcaaggacaacuccaucagaauuggcagcaagggggauguguuuguuauccgggagcccuucauuucuugcucccaucucgaaugucgcaccuuuuuccugacacagggagcccuucugaaugacaaacacagcaacggcaccgugaaggauagaucuccucaucggacacucauguccugccccgucggcgaggccccuagccccuauaauucucgcuuugaauccguggcuuggagcgccuccgcuugucacgacgggaccucuuggcugacgaucggaaucagcggcccugauaacggggccguugcggugcugaaguacaauggaauuaucaccgacacaauuaaauccuggagaaacaauauccuccggacccaagagagcgagugcgccugugucaacggcucuugcuucacagugaugaccgaugggccguccaacggacaggcuagccacaagauuuuuaaaauggaaaagggcaaaguggucaagucuguugagcuggacgcccccaauuaucauuacgaagaguguagcugcuauccugaugcuggcgagaucacgugugugugccgcgacaacuggcacggguccaauagacccugggugucuuucaaccagaaucuugaauaccagaucggauauauuugcagcggcgucuuuggggauaacccucggcccaaugacggaacaggcuccugugggccggugagcucuaacggagccuacggcguuaagggcuucuccuuucgcuacgggaauggaguguggaucggcagaaccaaaagcacaaacucucgguccggguucgagaugauuugggauccuaauggauggaccgaaaccgacagcuccuuuucugucaagcaagacaucguggcgauuacagauuggagcggcuauuccgggucuuucguucagcaucccgagcugacgggccucgacugcauccgcccuuguuucuggguggaacugaucagaggacggcccaaagagagcaccauuuggacauccggcagcucuaucuccuuuugcggggucaacagcgauaccgugggauggucuuggcccgacggcgccgagcuuccuuucacaauugauaaguga

SEQ ID NO: 207075 - RNA, 1350 nt, Artificial Sequence
  derived and/or modified CDS sequence (opt5) from neuraminidase__InfluenzaA__ABE97665
augaaccccaaucagaagaucauuaccaucggcagcauuugcauggugacagggaucgucucccugaugcuccaaguuggaaacaugauuucuaucugggugagccacuccauccauacgggcaaucagcaccaggccgagccuauuucuaacaccaauuuccugacagaaaaagcuguggccagcgucaaacuugcggggaacuccucucuguguccgaucaauggaugggcuguguacagcaaggacaacuccauuagaaucggcagcaagggggauguuuuugugauucgggagcccuucaucucuugcucccaucucgaaugucgcaccuuuuuccugacacacggagcccuucugaaugacaaacauagcaacggcaccgucaaggauagaucuccucaccggacacucauguccugccccgugggcgaggccccuagccccuauaauucucgcuuugaauccguugcuuggagcgccuccgcuugucacgacgggaccucuuggcugacgauuggaaucagcggcccugauaacggggccguggcgguccugaaguacaauggaaucauuaccgacacaaucaaauccuggagaaacaauauucuccggacccaggagagcgagugcgccugugugaacggcucuugcuucacagugaugaccgaugggccguccaacggacaagcuagccauaagaucuuuaaaauggaaaagggcaaagucguuaagucuguggagcuggacgcccccaauuaucacuacgaagaguguagcugcuauccugaugcuggcgagauuacgugugugugccgcgacaacuggcauggguccaauagacccugggucucuuucaaccagaaucuugaauaccagaucggauauaucugcagcggcguguuuggggauaacccucggcccaaugacggaacaggcuccugugggccgguuagcucuaacggagccuacggcgugaagggcuucuccuuuaaauacgggaauggagucuggauuggccgcaccaagagcacaaacucuagauccggguucgagaugaucugggauccuaauggauggaccgaaaccgacagcuccuuuucugugaaacaggacauuguugcgaucacagauuggagcggcuauuccgggucuuucgugcaacaccccgagcugacgggccucgacugcauucggccuuguuucugggucgaacugauccgcggaagacccaaggagagcaccaucuggacauccggcagcucuauuuccuuuugcggggugaacagcgauaccgucggauggucuuggcccgacggcgccgagcuuccuuucacaaucgauaaauga

SEQ ID NO: 207076 - RNA, 1350 nt, Artificial Sequence
  derived and/or modified CDS sequence (opt5) from neuraminidase__InfluenzaA__ABE97666
augaaccccaaucagaagaucauuaccaucggcagcauuugcauggugacagggaucgucucccugaugcuccaaauuggaaacaugaucucuaucuggguuagccacuccauucauacgggcaaucagcaccagucugagccuaucagcaacaccaauuuccugacagaaaaagccguggcuuccgugaaacuugccgggaacucuccgcugugucccauuaauggaugggcggucuacagcaaggacaacuccaucagaauuggcagcaagggggauguguuuguuauccgggagccuuucauuucuugcucccaucucgaaugucgcaccuuuuuccugacacagggagcccuucugaaugacaaacacagcaacggcaccgugaaggauagaucuccccaucggacacucauguccugcccugucggcgaggcucccagcccuuauaauucucgcuuugaauccguggccuggagcgcuuccgccugucacgacgggaccucuuggcugacgaucggaaucagcggcccggauaacggggcuguugccgugcugaaguacaauggaauuaucaccgacacaauuaaauccuggagaaacaauauccuccggacccaagagagcgagugcgcgugugucaacggcucuugcuucacagugaugaccgaugggcccuccaacggacaggccagccacaagauuuuuaaaauggaaaagggcaaaguggucaagucuguugagcuggacgcuccuaauuaucauuacgaagaguguagcugcuaucccgaugccggcgagaucacgugugugugccgcgacaacuggcacggguccaauagaccuugggugucuuucaaccagaaucuugaauaccagaucggauauauuugcagcggcgucuuuggggauucuccccggccgaacgacggaacaggcagcugugggccugugucuuccaauggagcuuacggcguuaagggcuucagcuuuaaauacgggaacggaguguggaucggccgcaccaagucuacaaauuccagaagcggguucgagaugauuugggaucccaacggauggaccgaaaccgacuccucuuuuagcgucaaacaagacaucguggccauuacagauugguccggcuauucugggagcuucguucagcauccugagcugacgggccucgacugcauccggcccuguuucuggguggaacugauccgcggaagacccaaggaguccaccauuuggacaagcggcuccuccaucagcuuuugcggggucaauucugauaccgugggaugguccuggccugacggcgcggagcuuccguucacaauugauaaauga

SEQ ID NO: 207077 - RNA, 1350 nt, Artificial Sequence
  derived and/or modified CDS sequence (opt5) from neuraminidase__InfluenzaA__ABE97667
augaaccccaaucagaagaucauuaccaucggcagcauuugcauggugacagggaucgucucccugaugcuccaaauuggaaacaugaucucuaucuggggcagccacuccauucauacggggaaucagcaccagucugagccuaucagcaacaccaauuuccugacagaaaaagccguugcuuccgugaaacuugccggaaacucuagccuguguccgauuaauggcugggcgguguacuccaaggacaacagcaucagaauugggucuaagggagaugucuuugugauccgggagcccuucauuuccugcagccaucucgaaugucgcaccuuuuuccugacacagggcgcccuucugaaugacaaacacucuaacggcaccguuaaggauagauccccucaucggacacucaugagcugccccgugggggaggcuccuucucccuauaauucccgcuuugaaagcgucgccugguccgcuucugccugucacgacggaaccagcuggcugacgaucggcaucuccgggccugauaacggagcuguggccguugugaaguacaauggcauuaucaccgacacaauuaaaagcuggagaaacaauauccugcggacccaagagucugagugcgcgugugucaacggguccugcuucacagugaugaccgauggaccgagcaacggccaggccucucacaagauuuuuaaaauggaaaagggcaaaguggucaagagcguugagcucgacgcucccaauuaucauuacgaagaguguuccugcuauccugaugccgggaagaucacgugugugugccgcgacaacuggcacggaucuaauagacccugggugagcuucaaccagaaucuggaguaccagaucggcuauauuugcuccggggucuuuggagauaacccucggcccaaugacggcacagggagcuguggaccggugucuuccaacggcgcuuacggcguuaaaggguucagcuuuaaguacggaaauggcguguggaucgggcgcaccaaaucuacaaacuccagaagcggauucgaaaugauuugggauccuaauggcuggaccgagaccgacuccucuuuuagcgucaagcaagacaucguggccauuacagauugguccggguauucuggcagcuucguucagcaucccgaacuuacgggacuggacugcauccggccuuguuucuggguggagcucauccgcggcagacccaaagaauccaccauuuggacaagcgggucuuccaucagcuuuugcggagucaacucugauauugugggcugguccuggcccgacggggcggagcugccuuucaccaucgauaaguga

SEQ ID NO: 207078 - RNA, 1350 nt, Artificial Sequence
  derived and/or modified CDS sequence (opt5) from neuraminidase__InfluenzaA__ABE97669
augaaccccaaucagaagaucauuaccaucggcagcauuugcauggugacagggaucgucucccugaugcuccaaauuggaaacaugaucucuaucuggguuagccacuccauucauacgggcaaucagcaccagucugagccuaucagcaacaccaauuuccugacagaaaaagccguggcuuccgugaaacuugccgggaacucuagccuguguccgauuaauggaugggcggucuacuccaaggacaacagcaucagaauuggcucuaagggggauguguuuguuauccgggagcccuucauuuccugcagccaucucgaaugucgcaccuuuuuccugacacagggagcccuucugaaugacaaacacucuaacggcaccgugaaggauagauccccucaucggacacucaugagcugccccgucggcgaggcuccuucucccuauaauucccgcuuugaaagcguggccugguccgcuucugccugucacgacgggaccagcuggcugacgaucggaaucuccggcccugauaacggggcuguugccguggucaaguacaauggaauuaucaccgacacaauuaaaagcuggagaaacaauauccugcggacccaagagucugagugcgcgugugugaacggcuccugcuucacagugaugaccgaugggccgagcaacggacaggccucucacaagauuuuuaaaauggaaaagggcaaagucguuaagagcguggagcucgacgcucccaauuaucauuacgaagaguguuccugcuauccugaugccggcgagaucacgugugugugccgcgacaacuggcacgggucuaauagacccugggucagcuucaaccagaaucuggaauaccagaucggauauauuugcuccggcguguuuggggauaacccucggcccaaugacggaacaggcagcugugggccgguuucuuccaacggagcuuacggcgugaagggcuucagcuuuaaauacgggaauggagucuggaucggccgcaccaagucuacaaacuccagaagcggguucgagaugauuugggauccuaauggauggaccgaaaccgacuccucuuuuagcgugaaacaagacaucguugccauuacagauugguccggcuauucugggagcuucgugcagcaucccgagcuuacgggccuggacugcauccggccuuguuucugggucgaacucauccgcggaagacccaaggaguccaccauuuggacaagcgggucuuccaucagcuuuugcggcgugaacucugauaccgucggaugguccuggcccgacggcgcggagcugccuuucacaauugauaaauga

SEQ ID NO: 207079 - RNA, 1350 nt, Artificial Sequence
  derived and/or modified CDS sequence (opt5) from neuraminidase__InfluenzaA__ABE97670
augaaccccaaucagaagaucauuaccaucggcagcauuugcauggugacagggaucgucucccugaugcuccaaauuggaaacaugaucucuaucuggguuagccacuccauucauacgggcaaucagcaccagucugagccuaucagcaacaccaauuuccugacagaaaaagccguggcuuccgugaaacuugccgggaacucuagccuguguccgauuaauggaugggcggucuacuccaaggacaacagcaucagaauuggcucuaagggggauguguuuguuauccgggagcccuucauuuccugcagccaucucgaaugucgcaccuuuuuccugacacagggagcccuucugaaugacaaacacucuaacggcaccgugaaggauagauccccucaucggacacucaugagcugccccgucggcgaggcuccuucucccuauaauucccgcuuugaaagcguggccugguccgcuucugccugucacgacgggaccagcuggcugacgaucggaaucuccggcccugauaacggggcuguugccguggucaaguacaauggaauuaucaccgacacaauuaaaagcuggagaaacaauauccugcggacccaagagucugagugcgcgugugugaacggcuccugcuucacagugaugaccgaugggccgagcaacggacaggccucucacaagauuuuuaaaauggaaaagggcaaagucguuaagagcguggagcucgacacgcccaauuaucauuacgaagaguguuccugcuauccugaugcuggcgagaucacaugugugugccgcgacaacuggcacgggucuaauagacccugggucagcuucaaccagaaucuggaauaccagaucggauauauuugcuccggcguguuuggggauaacccucggcccaaugacggaaccggcagcugugggccgguuucuuccaacggagccuacggcgugaagggcuucagcuuuaaauacgggaauggagucuggaucggccgcacaaagucuaccaacuccagaagcggguucgagaugauuugggauccuaauggauggaccgaaacagacuccucuuuuagcgugaaacaagacaucguugcuauuacggauugguccggcuauucugggagcuucgugcagcaucccgagcuuaccggccuggacugcauccggccuuguuucugggucgaacucauccgcggaagacccaaggaguccacaauuuggaccagcgggucuuccaucagcuuuugcggcgugaacucugauacagucggaugguccuggcccgacggcgccgagcugccuuucaccauugauaaauga

SEQ ID NO: 207080 - RNA, 1350 nt, Artificial Sequence
  derived and/or modified CDS sequence (opt5) from neuraminidase__InfluenzaA__ABE97671
augaaccccaaucagaagaucauuaccaucggcagcauuugcauggugacagggaucgucucccugaugcuccaaauuggaaacaugaucucuaucuggguuagccacuccauucauacgggcaaucagcaccaggccgagccuaucucuaacaccaauuuccugacagaaaaagcuguggccagcgugaaacuugcggggaacuccucucuguguccgauuaauggaugggcugucuacagcaaggacaacuccaucagaauuggcagcaagggggauguguuuguuauccgggagcccuucauuucuugcucccaucucgaaugucgcaccuuuuuccugacacagggagcccuucugaaugacaaacacagcaacggcaccgugaaggauagaucuccucaucggacacucauguccugccccgucggcgaggccccuagccccuauaauucucgcuuugaauccguggcuuggagcgccuccgcuugucacgacgggaccucuuggcugacgaucggaaucagcggcccugauaacggggccguugcggugcugaaguacaauggaauuaucaccgacacaauuaaauccuggagaaacaauauccuccggacccaagagagcgagugcgccugugucaacggcucuugcuucacagugaugaccgaugggccguccaacggacaggcuagccacaagauuuuuaaaauggaaaagggcaaaguggucaagucuguugagcuggacgcccccaauuaucauuacgaagaguguagcugcuauccugaugcuggcgagaucacgugugugugccgcgacaacuggcacggguccaauagacccugggugucuuucaaccagaaucuugaauaccagaucggauauauuugcagcggcgucuuuggggauaacccucggcccaaugacggaacaggcuccugugggccggugagcucuaacggagccuacggcguuaagggcuucuccuuuaaauacgggaauggaguguggaucggccgcaccaagagcacaaacucuagauccggguucgagaugauuugggauccuaauggauggaccgaaaccgacagcuccuuuucugucaaacaagacaucguggcgauuacagauuggagcggcuauuccgggucuuucguucagcaucccgagcugacgggccucgacugcauccggccuuguuucuggguggaacugauccgcggaagacccaaggagagcaccauuuggacauccggcagcucuaucuccuuuugcggggucaacagcgauaccgugggauggucuuggcccgacggcgccgagcuuccuuucacaauugauaaauga

SEQ ID NO: 207081 - RNA, 1350 nt, Artificial Sequence
  derived and/or modified CDS sequence (opt5) from neuraminidase__InfluenzaA__ABE97672
augaaccccaaucagaagaucauuaccaucggcagcauuugcauggugacagggaucgucucccugaugcuccaaauuggaaacaugaucucuaucuggguuagccacuccauucauacgggcaaucagcaccaggccgagccuaucucuaacaccaauuuccugacagaaaaagcucuugccagcgugaagcuggcggggaacuccucucucuguccgauuaauggaugggcuguguacagcaaagacaacuccaucagaauuggcagcaagggggaugucuuugugauccgggagcccuucauuucuugcucccaucuggaaugucgcaccuuuuuccuuacacagggagcccugcucaaugacaaacacagcaacggcaccguuaaggauagaucuccucaucggacacugauguccugccccgugggcgaggccccuagccccuauaauucucgcuuugaauccgucgcuuggagcgccuccgcuugucacgacgggaccucuuggcugacgaucggaaucagcggcccugauaacggggccguggcgguucucaaguacaauggaauuaucaccgacacaauuaaauccuggagaaacaauauccugcggacccaagagagcgagugcgccugugugaacggcucuugcuucacagucaugaccgaugggccguccaacggacaggcuagccacaagauuuuuaaaauggaaaagggcaaaguggugaagucugucgagcuugacgcccccaauuaucauuacgaagaguguagcugcuauccugaugcuggcgagaucacguguguuugccgcgacaacuggcacggguccaauagacccugggugucuuucaaccagaaucuggaauaccagaucggauauauuugcagcggcguguuuggggauaacccucggcccaaugacggaacaggcuccugugggccggucagcucuaacggagccuacggcgugaagggcuucuccuuuaaauacgggaauggaguuuggaucggccgcaccaagagcacaaacucuagauccggguucgagaugauuugggauccuaauggauggaccgaaaccgacagcuccuuuucugugaaacaagacaucgucgcgauuacagauuggagcggcuauuccgggucuuucgugcagcaucccgagcucacgggccuggacugcauccggccuuguuucuggguugaacuuauccgcggaagacccaaggagagcaccauuuggacauccggcagcucuaucuccuuuugcggggugaacagcgauaccgucggauggucuuggcccgacggcgccgagcugccuuucacaauugauaaauga

SEQ ID NO: 207082 - RNA, 1350 nt, Artificial Sequence
  derived and/or modified CDS sequence (opt5) from neuraminidase__InfluenzaA__ABE97675
augaaccccaaucagaagaucauuaccaucggcagcauuugcauggugacagggaucgucucccugaugcuccaaguuggaaacaugauuucuaucugggugagccacuccauccauacgggcaaucagcaccaggccgagccuauuucuaacaccaauuuccugaucgaaaaagcuguggccagcgucaaacuugcggggaacuccucucuguguccgauuaauggaugggcuguguacagcaaggacaacuccaucagaauuggcagcaagggggauguuuuugugauccgggagcccuucauuucuugcucccaucucgaaugucgcacauuuuuccugacccagggagcccuucugaaugacaaacacagcaacggcacagucaaggauagaucuccucaucggacccucauguccugccccgugggcgaggccccuagccccuauaauucucgcuuugaauccguugcuuggagcgccuccgcuugucacgacgggacaucuuggcugaccaucggaaucagcggcccugauaacggggccguggcgguccugaaguacaauggaauuaucacggacaccauuaaauccuggagaaacaauauccuccggacacaagagagcgagugcgccugugugaacggcucuugcuucaccgugaugacagaugggccguccaacggacaggcuagccacaagauuuuuaaaaucgaaaagggcaaagucguuaagucuguggagcuggacgcccccaauuaucauuacgaagaguguagcugcuauccugaugcuggcgagaucaccugugugugccgcgacaacuggcacggguccaauagacccugggucucuuucaaccagaaucuugaauaccagauuggauauaucugcagcggcguguuuggggauaacccucggcccaaugacggaacgggcuccugugggccgguuagcucuaacggagccuacggcgugaagggcuucuccuuuaaauacgggaauggagucuggauuggccgcacaaagagcaccaacucuagauccggguucgagaugaucugggauccuaauggauggagcgaaacagacuccucuuuuagcgugaaacaagacauuguugcgaucaccgauugguccggcuauucugggagcuucgugcagcaucccgagcugaccggccucgacugcauccggccuuguuucugggucgaacugauucgcggaagacccaaggaguccacaaucuggacgagcgggucuuccauuagcuuuugcggcgugaacucugauaccgucggaugguccuggcccgacggcgccgagcuuccuuucacaaucgauaaauga

SEQ ID NO: 207083 - RNA, 1350 nt, Artificial Sequence
  derived and/or modified CDS sequence (opt5) from neuraminidase__InfluenzaA__ABE97676
augaaccccaaucagaagaucauuaccaucggcagcauuugcauggugacagggaucgucucccugaugcuccaaauuggaaacaugaucucuaucuggguuagccacuccauucauacgggcaaucagcaccaggccgagccuaucucuaacaccaauuuccugacagaaaaagcuguggccagcgugaaacuugcggggaacuccucucuguguccgauuaauggaugggcugucuacagcaaggacaacuccaucagaauuggcagcaagggggauguguuuguuauccgggagcccuucauuucuugcucccaucucgaaugucgcaccuuuuuccugacacagggagcccuucugaaugacaaacacagcaacggcaccgugaaggauagaucuccucaucggacacucauguccugccccgucggcgaggccccuagccccuauaauucucgcuuugaauccguggcuuggagcgccuccgcuugucacgacgggaccucuuggcugacgaucggaaucagcggcccugauaacggggccguugcggugcugaaguacaauggaauuaucaccgacacaauuaaauccuggagaaacaauauccuccggacccaagagagcgagugcgccugugucaacggcucuugcuucacagugaugaccgaugggccguccaacggacaggcuagccacaagauuuuuaaaauggaaaagggcaaaguggucaagucuguugagcuggacgcccccaauuaucauuacgaagaguguagcugcuauccugaugcuggcgagaucacgugugugugccgcgacaacuggcacggguccaauagacccugggugucuuucaaccagaaucuugaauaccagaucggauauauuugcagcggcgucuuuggggauaacccucggcccaaugacggaacaggcuccugugggccggugagcucuaacggagccuacggcguuaagggcuucuccuuuaaauacgggaauggaguguggaucggccgcaccaagagcacaaacucuagauccggguucgagaugauuugggauccuaauggauggaccgaaaccgacagcuccuuuucugucaaacaagacaucguggcgauuaacgauuggagcggcuauuccgggucuuucguucagcaucccgagcugacaggccucgacugcauccggccuuguuucuggguggaacugauccgcggaagacccaaggagagcacgauuuggaccuccggcagcucuaucuccuuuugcggggucaauagcgauacagugggauggucuuggcccgacggcgccgagcuuccuuucaccauugauaaauga

SEQ ID NO: 207084 - RNA, 1350 nt, Artificial Sequence
  derived and/or modified CDS sequence (opt5) from neuraminidase__InfluenzaA__ABE97677
augaaccccaaucagaagaucauuaccaucggcagcauuugcauggugacagggaucgucucccugaugcuccaaauuggaaacaucaucucuauuuggguuagacacagcauccauacgggcaaucagcaccaguccgagccuauuucuaacaccaauuuccugacagaaaaagccguggcuagcgugaaacuugccgggaacuccucucuguguccgaucaauggaugggcggucuacagcaaggacaacuccauucggaucggcagcaagggggauguguuuguuauucgcgagcccuucaucucuugcucccaucucgaauguagaaccuuuuuccugacacagggagcccuucugaaugacaaacacagcaacggcaccgugaaggaucggucuccucaucgcacacucauguccugccccgucggcgaggcuccuagccccuauaauucuagauuugaauccguggccuggagcgcuuccgccugucacgacgggaccucuuggcugacgaucggaauuagcggcccugauaacggggcuguugccguggucaaguacaauggaaucauuaccgacacaaucaaauccuggcggaacaauauucugcgcacccaagagagcgagugcgcgugugugaacggcucuugcuucacagugaugaccgaugggccguccaacggacaggccagccacaagaucuuuaaaauggaaaagggcaaagucguuaagucuguggagcucgacgcucccaauuaucauuacgaagaguguagcugcuauccugaugccggcgagaucacgugugugugcagagacaacuggcacggguccaaucggcccugggucucuuucaaccagaaucuggaauaccagauuggauauaucugcagcggcguguuuggggauaacccucgccccaaugacggaacaggcuccugugggccgguuagcucuaacggagcuuacggcgugaagggcuucuccuuuaaauacgggaauggagucuggauuggcagaaccaagagcacaaacucucgguccggguucgagaugaucugggauccuaauggauggaccgaaaccgacagcuccuuuucugugaaacaagacauuguugccaucacagauuggagcggcuauuccgggucuuucgugcagcaucccgagcuuacgggccuggacugcauccgcccuuguuucugggucgaacucauuagaggacggcccaaggagagcaccaucuggacauccggcagcucuauuuccuuuugcggggugaacagcgauaccgucggauggucuuggcccgacggcgcggagcugccuuucacaaucgauaaauga

SEQ ID NO: 207085 - RNA, 1350 nt, Artificial Sequence
  derived and/or modified CDS sequence (opt5) from neuraminidase__InfluenzaA__ABE97679
augaaccccaaucagaagaucauuaccaucggcagcauuugcauggugacagggaucgucucccugaugcuccaaauuggaaacaugaucucuaucuggguuagacacagcauucauacgggcaaucagcaccaguccgagccuaucucuaacaccaauuuccugacagaaaaagccguggcuagcgugaaacuugccgggaacuccucucuguguccgauuaauggaugggcggucuacagcaaggacaacuccauccggauuggcagcaagggggauguguuuguuauccgcgagcccuucauuucuugcucccaucucgaauguagaaccuuuuuccugacacagggagcccuucugaaugacaaacacagcaacggcaccgugaaggaucggucuccucaucgcacacucauguccugccccgucggcgaggcuccuagccccuauaauucuagauuugaauccguggccuggagcgcuuccgccugucacgacgggaccucuuggcugacgaucggaaucagcggcccugauaacggggcuguugccguggucaaguacaauggaauuaucaccgacacaauuaaauccuggcggaacaauauccugcgcacccaagagagcgagugcgcgugugugaacggcucuugcuucacagugaugaccgaugggccguccaacggacaggccagccacaagauuuuuaaaauggaaaagggcaaagucguuaagucuguggagcucgacgcucccaauuaucauuacgaagaguguagcugcuauccugaugccggcgagaucacgugugugugcagagacaacuggcacggguccaaucggcccugggucucuuucaaccagaaucuggaauaccagaucggauauauuugcagcggcguguuuggggauaacccucgccccaaugacggaacaggcuccugugggccgguuagcucuaacggagcuuacggcgugaagggcuucuccuuuaaauacgggaauggagucuggaucggcagaaccaagagcacaaacucucgguccggguucgagaugauuugggauccuaauggauggaccgaaaccgacagcuccuuuucugugaaacaagacaucguugccauuacagauuggagcggcuauuccgggucuuucgugcagcaucccgagcuuacgggccuggacugcauccgcccuuguuucugggucgaacucaucagaggacggcccaaggagagcaccauuuggacauccggcagcucuaucuccuuuugcggggugaacagcgauaccgucggauggucuuggcccgacggcgcggagcugccuuucacaauugauaaauga

SEQ ID NO: 207086 - RNA, 1350 nt, Artificial Sequence; identical to SEQ ID NO: 207078
  derived and/or modified CDS sequence (opt5) from neuraminidase__InfluenzaA__ABE97680

SEQ ID NO: 207087 - RNA, 1350 nt, Artificial Sequence; identical to SEQ ID NO: 207078
  derived and/or modified CDS sequence (opt5) from neuraminidase__InfluenzaA__ABE97681

SEQ ID NO: 207088 - RNA, 1350 nt, Artificial Sequence; identical to SEQ ID NO: 207078
  derived and/or modified CDS sequence (opt5) from neuraminidase__InfluenzaA__ABE97682

SEQ ID NO: 207089 - RNA, 1350 nt, Artificial Sequence
  derived and/or modified CDS sequence (opt5) from neuraminidase__InfluenzaA__ABE97684
augaaccccaaucagaagaucauuaccaucggcagcauuugcauggugacagggaucgucucccugaugcuccaaauuggaaacaugaucucuaucuggguuagccacuccauucauacgggcaaucagcaccaggccgagccuaucucuaacaccaauuuccugacagaaaaagcuguggccagcgugaaacuugcggggaacuccucucuguguccgauuaauggaugggcugucuacagcaaggacaacuccaucagaauuggcagcaagggggauguguuuguuauccgggagcccuucauuucuugcucccaucucgaaugucgcaccuuuuuccugacacagggagcccuucugaaugacaaacacagcaacggcaccgugaaggauagaucuccucaucggacacucauguccugccccgucggcgaggccccuagccccuauaauucucgcuuugaauccguggcuuggagcgccuccgcuugucacgacgggaccucuuggcugacgaucggaaucagcggcccugauaacggggccguugcggugcugaaguacaauggaauuaucaccgacacaauuaaauccuggagaaacaauauccuccggacccaagagagcgagugcgccugugucaacggcucuugcuucacagugaugaccgaugggccguccaacggacaggcuagccacaagauuuuuaaaauggaaaagggcaaaguggucaagucuguugagcuggacgcccccaauuaucauuacgaagaguguagcugcuauccugaugcuggcgagaucacgugugugugccgcgacaacuggcacggguccaauagacccugggugucuuucaaccagaaucuugaauaccagaucggauauauuugcagcggcgucuuuggggauaacccucggcccaaugacggaacaggcuccugugggccggugagcucuaacggagccuacggcguuaagggcuucuccuuuaaauacgggaauggaguguggaucggccgcaccaagagcacaaacucuagauccggguucgagaugauuugggauccuaauggauggaccgaaaccgacagcuccuuuucugucaaacaagacaucguggcgauuacagauuggagcggcuauuccgggucuuucguucagcaucccgagcugacgggccucgacugcauccggccuuguuucuggguggaacugauccgcggaagacccaaggagagcaccauuuggacauccggcagcucuaucuccuuuugcggggucaacagcggaaccgugggcuggucuuggcccgauggggccgagcuuccuuucacaauugacaaauga

SEQ ID NO: 207090 - RNA, 1350 nt, Artificial Sequence
  derived and/or modified CDS sequence (opt5) from neuraminidase__InfluenzaA__ABE97685
augaaccccaaucagaagaucauuaccaucggcagcauuugcauggugacagggaucgucucccugaugcuccaaauuggaaacaugaucucuaucuggguuagccacuccauucauacgggcaaucagcaccaggccgagccuaucucuaacaccaauuuccugacagaaaaagcuguggccagcgugaaacuugcggggaacuccucucuguguccgauuaauggaugggcugucuacagcaaggacaacuccaucagaauuggcagcaagggggauguguuuguuauccgggagcccuucauuucuugcucccaucucgaaugucgcaccuuuuuccugacacagggagcccuucugaaugacaaacacagcaacggcaccgugaaggauagaucuccucaucggacacucauguccugccccgucggcgaggccccuagccccuauaauucucgcuuugaauccguggcuuggagcgccuccgcuugucacgacgggaccucuuggcugacgaucggaaucagcggcccugauaacggggccguugcggugcugaaguacaauggaauuaucaccgacacaauuaaauccuggagaaacaauauccuccggacccaagagagcgagugcgccugugucaacggcucuugcuucacagugaugaccgaugggccguccaacggacaggcuagccacaagauuuuuaaaauggaaaagggcaaaguggucaagucuguugagcuggacgcccccaauuaucauuacgaagaguguagcugcuauccugaugcuggcgagaucacgugugugugccgcgacaacuggcacggguccaauagacccugggugucuuucaaccagaaucuugaauaccagaucggauauauuugcagcggcgucuuuggggauaacccucggcccaaugacggaacaggcuccugugggccggugagcucuaacggagccuacggcguuaagggcuucuccuuuaaauacgggaauggaguguggaucggccgcaccaagagcacaaacucuagauccggguucgagaugauuugggauccuaauggauggaccgaaaccgacagcuccuuuucugucaaacaagacaucguggcgauuacagauuggagcggcuauuccgggucuuucguucagcaucccgagcugacgggccucgacugcauccggccuuguuucuggguggaacugauccgcggaagacccaaggagagcaccauuuggacauccggcagcucuaucuccuuuugcggggucaacagcgauaccggaggcuggucuuggcccgacggggccgagcuuccuuucacaauugauaaauga

SEQ ID NO: 207091 - RNA, 1350 nt, Artificial Sequence; identical to SEQ ID NO: 207080
  derived and/or modified CDS sequence (opt5) from neuraminidase__InfluenzaA__ABE97686

SEQ ID NO: 207092 - RNA, 1350 nt, Artificial Sequence
  derived and/or modified CDS sequence (opt5) from neuraminidase__InfluenzaA__ABE97687
augaaccccaaucagaagaucauuaccaucggcagcauuugcauggugacagggaucgucucccugaugcuccaaguuggaaacaugauuucuaucugggugagccacuccauccauacgggcaaucagcaccaggccgagccuauuucuaacaccaauuuccugacagaaaaagcuguggccagcgucaaacuugcggggaacuccucucuguguccgaucaauggaugggcuguguacagcaaggacaacuccauuagaaucggcagcaagggggauguuuuugugauucgggagcccuucaucucuugcucccaucucgaaugucgcaccuuuuuccugacacagggagcccuucugaaugacaaacacagcaacggcaccgucaaggauagaucuccucaucggacacucauguccugccccgugggcgaggccccuagccccuauaauucucgcuuugaauccguugcuuggagcgccuccgcuugucacgacgggaccucuuggcugacgauuggaaucagcggcccugauaacggggccguggcgguccugaaguacaauggaaucauuaccgacacaaucaaauccuggagaaacaauauucuccggacccaagagagcgagugcgccugugugaacggcucuugcuucacagugaugaccgaugggccguccaacggacaggcuagccacaagaucuuuaaaauggaaaagggcaaagucguuaagucuguggagcuggacgcccccaauuaucauuacgaagaguguagcugcuauccugaugcuggcgagauuacgugugugugccgcgacaacuggcacggguccaauagacccugggucucuuucaaccagaaucuugaauaccagaucggauauaucugcagcggcguguuuggggauaacccucggcccaaugacggaacaggcuccugugggccgguuagcucuaacggagccuacggcgugaagggcuucuccuuuaaauacgggaauggagucuggauuggccgcaccaagagcacaaacucuagauccggguucgagaugaucugggauccuaauggauggaccgaaaccgacagcuccuuuucugugaaacaagacauuguugcgaucacagauuggagcggcuauuccgggucuuucgugcagcaucccgagcugacgggccucgacugcauucggccuuguuucugggucgaacugauccgcggaagacccaaggagagcaccaucuggacauccggcagcucuauuuccuuuugcggggugaacagcgauaccgucggauggucuuggcccgacggcgccgagcuuccuuucacaaucgauaaauga

SEQ ID NO: 207093 - RNA, 1350 nt, Artificial Sequence
  derived and/or modified CDS sequence (opt5) from neuraminidase__InfluenzaA__ABE97688
augaaccccaaucagaagaucauuaccaucggcagcauuugcauggugacagggaucgucucccugaugcuccaaguuggaaacaugauuucuaucugggugagccacuccauccauacgggcaaucagcaccaggccgagccuauuucuaacaccaauuuccugacagaaaaagcuguggccagcgucaaacuugcggggaacuccucucuguguccgaucaauggaugggcuguguacagcaaggacaacuccauuagaaucggcagcaagggggauguuuuugugauucgggagcccuucaucucuugcucccaucucgaaugucgcaccuuuuuccugacacagggagcccuucugaaugacaaacacagcaacggcaccgucaaggauagaucuccucaucggacacucauguccugccccgugggcgaggccccuagccccuauaauucucgcuuugaauccguugcuuggagcgccuccgcuugucacgacgggaccucuuggcugacgauuggaaucagcggcccugauaacggggccguggcgguccugaaguacaauggaaucauuaccgacacaaucaaauccuggagaaacaauauucuccggacccaagagagcgagugcgccugugugaacggcucuugcuucacagugaugaccgaugggccguccaacggacaggcuagccacaagaucuuuaaaauggaaaagggcaaagucauuaagucuguugagcuggacgcccccaauuaucauuacgaagaguguagcugcuauccugaugcuggcgagaucacgugugugugccgcgacaacuggcacggguccaauagacccugggugucuuucaaccagaaucuugaauaccagaucggauauauuugcagcggcgucuuuggggauaacccucggcccaaugacggaacaggcuccugugggccggugagcucuaacggagccuacggcguuaagggcuucuccuuuaaauacgggaauggagugugggucggccgcaccaagagcacaaacucuagauccggguucgagaugaucugggauccuaauggauggaccgaaaccgacagcuccuuuucugugaaacaagacauuguugcgaucacagauuggagcggcuauuccgggucuuucgugcagcaucccgagcugacgggccucgacugcauucggccuuguuucugggucgaacugauccgcggaagacccaaggagagcaccaucuggacauccggcagcucuauuuccuuuugcggggugaacagcgauaccgucggauggucuuggcccgacggcgccgagcuuccuuucaucauugauaaauga

SEQ ID NO: 207094 - RNA, 1350 nt, Artificial Sequence
  derived and/or modified CDS sequence (opt5) from neuraminidase__InfluenzaA__ABE97690
augaaccccaaucagaagaucauuaccaucggcagcauuugcauggugacagggaucgucucccugaugcuccaaguuggaaacaugauuucuaucugggugagccacuccauccauacgggcaaucagcaccaggccgagccuauuucuaacaccaauuuccugacagaaaaagcuguggccagcgucaaacuugcggggaacuccucucuguguccgaucaauggaugggcuguguacagcaaggacaacuccauuagaaucggcagcaagggggauguuuuugugauucgggagcccuucaucucuugcucccaucucgaaugucgcaccuuuuuccugacacagggagcccuucugaaugacaaacacagcaacggcaccgucaaggauagaucuccucaucggucccucaugagcugccccgugggcgaggccccuucucccuauaauucccgcuuugaaagcguugcuugguccgccucugcuugucacgacgggacaagcuggcugaccauuggaaucuccggcccugauaacggggccguggcgguccugaaguacaauggaaucauuacggacaccaucaaaagcuggagaaacaauauucuccggacacaagagucugagugcgccugugugaacggcuccugcuucaccgugaugacagaugggccgagcaacggacaggcuucucacaagaucuuuaaaaugaagaaaggcaaggucguuaagagcguggaacuggacgcccccaauuaucauuacgaggaauguuccugcuauccugaugcuggcgagauuaccugugugugccgcgacaacuggcacgggucuaauagacccugggucagcuucaaccagaaucuugaguaccagaucggauauaucugcuccggcguguuuggggauaacccucggcccaaugacggaacgggcagcugugggccgguuucuuccaacggagccuacggcgugaaaggcuucagcuuuaaguacgggaauggagucuggauuggccgcacaaaaucuaccaacuccagaagcggguucgaaaugaucugggauccuaauggauggacagagaccgacuccucuuuuagcgugaagcaagacauuguugcgaucaccgauugguccggcuauucugggagcuucgugcagcaucccgaacugacaggccucgacugcauucggccuuguuucugggucgagcugauccgcggaagacccaaagaauccacgaucuggaccagcgggucuuccauuagcuuuugcggcgugaacucugauacagucggaugguccuggcccgacggcgccgagcuuccuuucaccaucgauaaguga

SEQ ID NO: 207095 - RNA, 1350 nt, Artificial Sequence
  derived and/or modified CDS sequence (opt5) from neuraminidase__InfluenzaA__ABE97691
augaaccccaaucagaagaucauuaccaucggcagcauuugcauggugacagggaucgucucccugaugcuccaaguuggaaacaugauuucuaucugggugagccacuccauccauacgggcaaucagcaccaggccgagccuauuucuaacaccaauuuccugacagaaaaagcuguggccagcgucaaacuugcggggaacuccucucuguguccgaucaauggaugggcuguguacagcaaggacaacuccauuagaaucggcagcaagggggauguuuuugugaaacgggagcccugcauuucuuguucccaucucaagugccgcaccuucuuucugacacagggagcccuucugaaugacaagcacagcaacggcaccgucaaagauagaucuccucaucggacacucauguccugucccgugggcgaagccccuagccccuauaauucucgcuucgaguccguugcuuggagcgccuccgcuugccacgacgggaccucuuggcugacgaucggaauuagcggcccugauaacggggccguggcgguccugaaguacaauggaaucaucaccgacacaauuaaauccuggagaaacaauauccuccggacccaagaaagcgagugugccugcgugaacggcucuuguuuuacagugaugaccgaugggccguccaacggacaggcuagccacaagauuuucaaaauggagaagggcaaggucguuaaaucuguggaacuggacgcccccaauuaucauuacgaggaaugcagcuguuauccugaugcuggcgagaucacgugcgugugccgcgacaacuggcacggguccaauagacccugggucucuuuuaaccagaaucuugaguaccagauuggauauaucuguagcggcguguucggggauaacccucggcccaaugacggaacaggcuccugcgggccgguuagcucuaacggagccuacggcgugaagggcuuuuccuucaaauacgggaauggagucuggaucggccgcaccaagagcacaaacucuagauccggguuugaaaugauuugggauccuaauggauggaccgagaccgacagcuccuucucugugaaacaagacaucguugcgauuacagauuggagcggcuauuccgggucuuuugugcagcaucccgaacugacgggccucgacuguauccggccuugcuucugggucgagcugauucgcggaagacccaaggaaagcaccaucuggacauccggcagcucuaucuccuucuguggggugaacagcgauaccgucggauggucuuggcccgacggcgccgagcuuccuuuuacaauugauaaauga

SEQ ID NO: 207096 - RNA, 1350 nt, Artificial Sequence
  derived and/or modified CDS sequence (opt5) from neuraminidase__InfluenzaA__ABE97694
augaaccccaaucagaagaucaugaccauuggcagcaucugcauggugacagggauugucucccugaugcuccaaguuggaaacaugaucucuauuugggugagccacuccauccauacgggcaaucagcaccaggccgagccuaucucuaacaccaauuuccugacagaaaaagcuguggacagcgucaaacuugccgggaacuccucucuguguccgauuaauggaugggcgguguacagcaaggauaacuccaucagaauuggcagcaagggggacguuuuugugauccgggagcccucugucuccugcagccaucucgaaugucgcaccuucuuucugacacagggagcccuucugaaugauaaacacucuaacggcaccgugaaggacagauccccucaucggacacucaugagcugccccguuggcgaggcuccuucucccuauaauucccgcuucgaaagcguggccugguccgcuucugccugucacgaugggaccagcuggcugacgauuggaaucuccggcccugacaacggggcugucgccgugcugaaguacaauggaauuaucaccgauacaaucaaaagcuggagaaacaauauucuccggacccaagagucugagugcgcgugugugaacggcuccugcuuuacagucaugaccgacgggccgagcaacggacaggccucucacaagaucuucaaaauggaaaagggcaaaguugugaagucuguggagcuggaugcucccaauuaucauuacgaagaguguuccugcuauccugacgccggcgagauuacgugugucugccgcgauaacuggcacgggucuaauagacccugggugagcuuuaaccagaaucuugaauaccagaucggauauauuugcuccggcguuuucggggacaacccucggcccaaugauggaacaggcagcugugggccggugucuuccaacggagcuuacggcgucaagggcuuuagcuucaaauacgggaauggaguguggaucggccgcaccaagucuacaaacuccagaagcggguuugagaugaucugggacccuaauggauggaccgaaaccgacuccucuuucagcguuaaacaagauguggucgccauuacagacugguccggcuauucugggagcuuugugcagcaucccgagcugacgggccucgauugcauccggccuuguuucugggucgaacugauucgcggaagacccaaggaguccaccaucuggacaagcggcagcuccauuagcuucugcggggugaacucugacaccguuggaugguccuggcccgauggcgcggagcuuccuuuuacaaucgacaaauga

SEQ ID NO: 207097 - RNA, 1350 nt, Artificial Sequence
  derived and/or modified CDS sequence (opt5) from neuraminidase__InfluenzaA__ABE97696
augaaccccaaucagaagaucauuaccaucggcagcauuugcauggugacagggaucgucucccugaugcuccaaguuggaaacaugauuucuaucugggugagccacuccauccauacgggcaaucagcaccaggccgagccuauuucuaacaccaauuuccugacagaaaaagcuguggccagcgucaaacuugcggggaacuccucucuguguccgaucaauggaugggcuguguacagcaaggacaacuccauuagaaucggcagcaagggggauguuuuugugauucgggagcccuucaucucuugcucccaucucgaaugucgcaccuuuuuccugacacagggagcccuucugaaugacaaacacagcaacggcucugucaaggauagauccccucaucggacccucaugagcugcucugugggcgaggcccccuccccuuauaauagccgcuuugaauccguugcuuggucugccagcgcuugucacgacgggacauccuggcugaccauuggaaucagcggccccgauaacggggccguggcgguccugaaguacaauggaaucauuacggacaccaucaaaucuuggagaaacaauauucuccggacacaagaguccgagugcgccugugugaacggcagcugcuucaccgugaugacagaugggccuucuaacggacaggcuagccacaagaucuuuaaaauggaaaagggcaaagucguuaaguccguggagcuggacgccccgaauuaucauuacgaagaguguucuugcuaucccgaugcuggcgagauuaccugugugugccgcgacaacuggcacgggagcaauagaccuugggucuccuucaaccagaaucuugaauaccagaucggauauaucugcagcggcguguuuggggauaacccccggccuaaugacggaacgggcucuugugggcccguuuccagcaacggagccuacggcgugaagggcuucucuuuuaaauacgggaauggagucuggauuggccgcacaaaguccaccaacagcagauccggguucgagaugaucugggauccgaauggauggacagaaaccgacucuagcuuuuccgugaaacaagacauuguugcgaucaccgauuggucuggcuauagcggguccuucgugcagcauccugagcugacaggccucgacugcauucggcccuguuucugggucgaacugauccgcggaagaccuaaggagagcacgaucuggaccucuggcuccagcauuucuuuuugcggggugaacuccgauacagucggauggagcuggcccgacggcgccgagcuucccuucaccaucgauaaauga

SEQ ID NO: 207098 - RNA, 1350 nt, Artificial Sequence
  derived and/or modified CDS sequence (opt5) from neuraminidase__InfluenzaA__ABE97697
augaaccccaaucagaagaucauuaccaucggcagcauuugcauggugacagggaucgucucccugaugcuccaaguuggaaacaugauuucuaucugggugagccacuccauccauacgggcaaucagcaccaggccgagccuauuucuaacaccaauuuccugaacgaaaaagcuguggccagcgucaaacuugcgggaaauuccucucuguguccgaucaacgggugggcuguguacagcaaggacaauuccauuagaaucggcagcaagggggauguuuuugugauucgggagcccuucaucucuugcucccaucucgaaugucgcacauuuuuccugacccagggagcccuucugaacgacaaacacagcaauggcacagucaaggauagaucuccucaucggacccucauguccugccccgugggcgaggccccuagccccuauaacucucgcuuugaauccguugcuuggagcgccuccgcuugucacgacgggacaucuuggcugaccauuggaaucagcggcccugauaauggggccguggcgguccugaaguacaacggaaucauuacggacaccaucaaauccuggagaaauaacauucuccggacacaagagagcgagugcgccugugugaacggcucuugcuucaccgugaugacagaugggccguccaauggacaggcuagccacaagaucuuuaaaauggaaaagggcaaagucguuaagucuguggagcuggacgcccccaacuaucauuacgaagaguguagcugcuauccugaugcuggcgagauuaccugugugugccgcgacaauuggcacggguccaacagacccugggucucuuucaaucagaaccuugaauaccagaucggauauaucugcagcggcguguuuggggauaauccucggcccaacgacgagacgggauccuguggcccgguuagcucuaauggggccuacggagugaagggcuucuccuuuaaauacggcaacggggucuggauuggacgcacaaagagcaccaauucuagauccggcuucgaaaugaucugggauccuaacggguggacagagaccgacagcuccuuuucugugaaacaagacauuguugcgaucaccgauuggagcggauauuccggcucuuucgugcagcaucccgaacugacagggcucgacugcauucggccuuguuucugggucgagcugauccgcggcagacccaaggagagcacgaucuggaccuccggaagcucuauuuccuuuugcggcgugaauagcgauacagucggguggucuuggcccgacggagccgaacuuccuuucaccaucgauaaauga

SEQ ID NO: 207099 - RNA, 1350 nt, Artificial Sequence
  derived and/or modified CDS sequence (opt5) from neuraminidase__InfluenzaA__ABE97702
augaaccccaaucagaagaucauuaccaucggcagcauuugcauggugacagggaucgucucccugaugcuccaaguuggaaacaugauuucuaucugggugagccacuccauccauacgggcaaucagcaccaggccgagccuauuucuaacaccaauuuccugacagaaaaagcuguggccagcgucaaacuugcggggaacuccucucuguguccgaucaauggaugggcuguguacagcaaggacaacuccauuagaaucggcagcaagggggauguuuuugugauucgggagcccuucaucucuugcucccaucucgaaugucgcaccuuuuuccugacacagggagcccuucugaaugacaaacacagcaacggcaccgucaaggauagaucuccucaucggacacucauguccugccccgugggcgaggccccuagccccuauaauucucgcuuugaauccguugcuuggagcgccuccgcuugucacgacgggaccucuuggcugacgauuggaaucagcggcccugauaacggggccguggcgguccugaaguacaauggaaucauuaccgacacaaucaaauccuggagaaacaauauucuccggacccaagagagcgagugcgccugugugaacggcucuugcuucacagugaugaccgaugggccguccaacggacaggcuagccacaagaucuuuaaaauggaaaagggcaaagucguuaagucuguggagcuggacgcccccuauuaccauuaugaagaguguagcugcuacccugaugcuggcgagauuacgugugugugccgcgacaauuggcacggguccaacagacccugggucucuuucaaucagaaccuugaauaucagaucggauacaucugcagcggcguguuuggggauaauccucggcccaacgacggaacaggcuccugugggccgguuagcucuaauggagccuacggcgugaagggcuucuccuuuaaauaugggaacggagucuggauuggccgcaccaagagcacaaauucuagauccggguucgagaugaucugggauccuaacggauggaccgaaaccgacagcuccuuuucugugaaacaagacauuguuagcaucacagauugguccggcuacucugggagcuucgugcagcaucccgagcugacgggccucgacugcauucggccuuguuucugggucgaacugauccgcggaagacccaaggaguccaccaucuggacaagcgggucuuccauuagcuuuugcggcgucaauucugauaccgugggaugguccuggcccgacggcgcggagcuuccuuucacaaccgauaaauga

SEQ ID NO: 207100 - RNA, 1350 nt, Artificial Sequence; identical to SEQ ID NO: 207092
  derived and/or modified CDS sequence (opt5) from neuraminidase__InfluenzaA__ABE97703

SEQ ID NO: 207101 - RNA, 1350 nt, Artificial Sequence; identical to SEQ ID NO: 207092
  derived and/or modified CDS sequence (opt5) from neuraminidase__InfluenzaA__ABE97705

SEQ ID NO: 207102 - RNA, 1350 nt, Artificial Sequence
  derived and/or modified CDS sequence (opt5) from neuraminidase__InfluenzaA__ABE97706
augaaccccaaucagaagaucauuaccaucggcagcauuugcauggugacagggaucgucucccugaugcuccaaguuggaaacaugauuucucugugggugagccacuccauccauacgggcaaucagcaccaggccgagccuaucucuaacaccaauuuccuuacagaaagagcuguggccagcgucaaacuggcggggaacuccucucucuguccgauuaauggaugggcuguguacagcaaggacaacuccauccggauuggcagcaaaggggauguuuuugugauccgcgagcccuucauuucuugcucccaucuggaauguagaaccuuuuuccuuacacagggagcccugcucaaugacaagcacagcaacggcaccgucaaagaucggucuccucaucgcacacugauguccugccccgugggcgaggccccuagccccuauaauucuagauuugaauccguugcuuggagcgccuccgcuugucacgacgggaccucuuggcugacgaucggaauuagcggcccugauaacggggccguggcgguccucaaguacaauggaaucaucaccgacacaauuaaguccuggcggaacaauauccugcgcacccaagagagcgagugcgccugugugaacggcucuugcuucacagugaugaccgaugggccguccaacggacaggcuagccacaaaauuuuuaagauggaaaaaggcaaggucguuaaaucuguggagcuugacgcccccaauuaucauuacgaagaguguagcugcuauccugaugcuggcgagaucacgugugugugcagagacaacuggcacggguccaaucggcccugggucucuuucaaccagaaucuggaauaccagauuggauauaucugcagcggcguguuuggggauaacccucgccccaaugacggaacaggcuccugugggccgguuagcucuaacggagccuacggcgugaagggcuucuccuuuaaguacgggaauggagucuggaucggcagaaccaaaagcacaucuucccggagcggguucgagaugauuugggauccuaacggauggaccgaaaccgacuccucuuuuagcgugaagcaagacaucguugcgauuacagauugguccggcuauucugggagcuucgugcagcaucccgagcucacgggccuggacugcauccgcccuuguuucugggucgaacuuauuagaggacggcccaaagaguccaccaucugggccagcgggucuuccaucagcuuuugcggcgucaauucugauacagugggaugguccuggcccgacggcgcugagcugccuuucaccauugauaaguga

SEQ ID NO: 207103 - RNA, 1350 nt, Artificial Sequence
  derived and/or modified CDS sequence (opt5) from neuraminidase__InfluenzaA__ABE97707
augaaccccaaucagaagaucauuaccaucggcagcauuugcauggugacagggaucgucucccugaugcuccaaguuggaaacaugauuucuaucugggugagccacuccauccauacgggcaaucagcaccaggccgagccuauuucuaacaccaauuuccugacagaaaaagcuguggccagcgucaaacuugcggggaacuccucucuguguccgaucaagggaugggcuguguacagcaaggacaauuccauuagaaucggcagcaaaggggauguuuuugugauucgggagcccuucaucucuugcucccaucucgaaugucgcaccuuuuuccugacacagggagcccuucugaacgacaagcacagcaauggcaccgucaaggauagaucuccucaucggacacucauguccugccccgugggcgaggccccuagccccuauaacucucgcuuugaauccguugcuuggagcgccuccgcuugucacgacgggaccucuuggcugacgauuggaaucagcggcccugauaauggggccguggcgguccugaaauacaacggaaucauuaccgacacaaucaaguccuggagaaauaacauucuccggacccaagagagcgagugcgccugugugaauggcucuugcuucacagugaugaccgaugggccguccaacggacaggcuagccacaaaaucuuuaagauggaaaaaggcaaggucguuaagucuguggagcuggacgcccccaacuaucauuacgaagaguguagcugcuauccugaugcuggcgagauuacgugugugugccgcgacaauuggcacggguccaacagacccugggucucuuucaaucagaaccuugaauaccagaucggauauaucugcagcggcguguuuggggauaauccucggcccaacgacggaacaggcuccugugggccgguuagcucuaauggagccuacggcgugaaaggcuucuccuuuaaguacgggaacggagucuggauuggccgcaccaaaagcacaaauucuagauccggguucgagaugaucugggauccuaacggauggaccgaaaccgacagcuccuuuucugugaagcaagacauuguugcgaucacagauuggagcggcuauuccgggucuuucgugcagcaucccgagcugacgggccucgacugcauucggccuuguuucugggucgaacugauccgcggaagacccaaagagagcaccaucuggacauccggcagcucuauuuccuuuugcggggugaauagcgauaccgucggauggucuuggcccgacggcgccgagcuuccuuucacaaucgauaaguga

SEQ ID NO: 207104 - RNA, 1350 nt, Artificial Sequence
  derived and/or modified CDS sequence (opt5) from neuraminidase__InfluenzaA__ABE97708
augaaccccaaucagaagaucauuaccaucggcagcauuugcauggugacagggaucgucucccugaugcuccaaguuggaaacaugauuucuaucugggugagccacuccauccauacgggcaaucagcaccaggccgagccuauuucuaacaccaauuuccugacagaaaaagcuguggccagcgucaaacuugcggggaacuccucucuguguccgaucaauggaugggcuguguacagcaaggacaacuccauuagaaucggcagcaagggggauguuuuugugauucgggagcccuucaucucuugcucccaucucgaaugucgcaccuuuuuccugacacacggagcccuucugaaugacaaacauagcaacggcaccgucaaggauagaucuccucaccggacacucauguccugccccgugggcgaggccccuagccccuauaauucucgcuuugaauccguugcuuggagcgccuccgcuugucacgacgggaccucuuggcugacgauuggaaucagcggcccugauaacggggccguggcgguccugaaguacaauggaaucauuaccgacacaaucaaauccuggagaaacaauauucuccggacccaggagagcgagugcgccugugugaacggcucuugcuucacagugaugaccgaugggccguccaacggacaagcuagccauaagaucuuuaaaaugaagaaaggcaaggucguuaagucuguggaacuggacgcccccaauuaucacuacgaggaauguagcugcuauccugaugcuggcgagauuacgugugugugccgcgacaacuggcauggguccaauagacccugggucucuuucaaccagaaucuugaguaccagaucggauauaucugcagcggcguguuuggggauaacccucggcccaaugacggaacaggcuccugugggccgguuagcucuaacggagccuacggcgugaaaggcuucuccuuuaaguacgggaauggagucuggauuggccgcaccaaaagcacaaacucuagauccggguucgaaaugaucugggauccuaauggauggaccgagaccgacagcuccuuuucugugaagcaggacauuguugcgaucacagauuggagcggcuauuccgggucuuucgugcaacaccccgaacugacgggccucgacugcauucggccuuguuucugggucgagcugauccgcggaagacccaaagaaagcaccaucuggacauccggcagcucuauuuccuuuugcggggugaacagcgauaccgucggauggucuuggcccgacggcgccgagcuuccuuucacaaucgauaaguga

SEQ ID NO: 207105 - RNA, 1350 nt, Artificial Sequence
  derived and/or modified CDS sequence (opt5) from neuraminidase__InfluenzaA__ABE97710
augaaccccaaucagaagaucauuaccaucggcagcauuugcauggugacagggaucgucucccugaugcuccaaguuggaaacaugauuucuaucugggugagccacuccauccauacgggcaaucagcaccaggccgagccuauuucuaacaccaauuuccugacagaaaaagcuguggccagcgucaaacuugcggggaacuccucucuguguccgaucaauggaugggcuguguacagcaaggacaacuccauuagaaucggcagcaagggggauguuuuugugauucgggagcccuucaucucuugcucccaucucgaaugucgcaccuuuuuccugacacagggagcccuucugaaugacaaacacagcaacggcaccgucaaggauagaucuccucaucggacacucauguccugccccgugggcgaggccccuagccccuauaauucucgcuuugaauccguugcuuggagcgccuccgcuugucacgacgggaccucuuggcugacgauuggaaucagcggcccugauaacggggccguggcgguccugaaguacaauggaaucauuaccgacacaaucaaauccuggagaaacaauauucuccggacccaagagagcgagugcgccugugugaacggcucuugcuucacagugaugaccgaugggccguccaacggacaggcuagccacaagaucuuuaaaauggaaaagggcaaagucguuaagucuguggagcugaaugcccccaacuaucauuacgaagaguguagcugcuauccugacgcuggcgagauuacgugugugugccgcgauaauuggcacggguccaacagacccugggucucuuucaaucagaaccuugaauaccagaucggauauaucugcagcggcguguuuggggacaauccucggcccaacgauggaacaggcuccugugggccgguuagcucuaauggagccuacggcgugaagggcuucuccuuuaaauacgggaacggagucuggauuggccgcaccaagagcacaaauucuagauccggguucgagaugaucugggacccuaacggauggaccgaaaccgauagcuccuuuucucugaaacaagacauuguggcgaucacagacuggagcggcuauuccgggucuuucguucagcaucccgagcucacgggccuggauugcauucggccuuguuucuggguggaacuuauccgcggaagacccaaggagagcaccaucuggacauccggcagcucuauuuccuuuugcggggucaauagcgacaccgugggauggucuuggcccgauggcgccgagcugccuuucacaaucgacaaauga

SEQ ID NO: 207106 - RNA, 1350 nt, Artificial Sequence
  derived and/or modified CDS sequence (opt5) from neuraminidase__InfluenzaA__ABE97711
augaaccccaaucagaagaucauuaccaucggcagcauuugcauggugacagggaucgucucccugaugcuccaaguuggaaacaugauuucuaucugggugagccacuccauccauacgggcaaucagcaccaggccgagccuauuucuaacaccaauuuccugacagaaaaagcuguggccagcgucaaacuugcggggaacuccucucuguguccgaucaauggaugggcuguguacagcaaggacaacuccauuagaaucggcagcaagggggauguuuuugugauucgggagcccuucaucucuugcucccaucucgaaugucgcaccuuuuuccugacacagggagcccuucugaaugacaaacacagcaacggcaccgucaaggauagaucuccucaucggacacucauguccugccccgugggcgaggccccuagccccuauaauucucgcuuugaauccguugcuuggagcgccuccgcuugucacgacgggaccucuuggcugacgauuggaaucagcggcccugauaacggggccguggcgguccugaaguacaauggaaucauuaccgacacaaucaaauccuggagaaacaauauucuccggacccaagagagcgagugcgccugugugaacggcucuugcuucacagugaugaccgaugggccguccgacggacaggcuagccacaagaucuuuaaaauggaaaagggcaaagucguuaagucuguggagcuggaugcccccaacuaucauuacgaagaguguagcugcuauccugacgcuggcgagauuacgugugugugccgcgauaauuggcacggguccaacagacccugggucucuuucaaucagaaccuugaauaccagaucggauauaucugcagcggcguguuuggggacaauccucggcccaacgauggaacaggcuccugugggccgguuagcucuaauggagccuacggcgugaagggcuucuccuuuaaauacgggaacggagucuggauuggccgcaccaagagcacaaauucuagauccggguucgagauggugugggacccuaacggauggaccgaaaccgacagcuccuuuucuguuaaacaagauaucguggcgauuacagacuggagcggcuauuccgggucuuucguccagcaucccgagcugacgggccucgauugcauccggccuuguuucuggguggaacugauucgcggaagacccaaggagagcaccaucuggacauccggcagcucuaucuccuuuugcggggucaauagcgacaccgugggauggucuuggcccgauggcgccgagcuuccuuucacaauugacaaauga

SEQ ID NO: 207107 - RNA, 1350 nt, Artificial Sequence; identical to SEQ ID NO: 207092
  derived and/or modified CDS sequence (opt5) from neuraminidase__InfluenzaA__ABE97712

SEQ ID NO: 207108 - RNA, 1350 nt, Artificial Sequence; identical to SEQ ID NO: 207092
  derived and/or modified CDS sequence (opt5) from neuraminidase__InfluenzaA__ABE97713

SEQ ID NO: 207109 - RNA, 1350 nt, Artificial Sequence; identical to SEQ ID NO: 207092
  derived and/or modified CDS sequence (opt5) from neuraminidase__InfluenzaA__ABE97715

SEQ ID NO: 207110 - RNA, 1350 nt, Artificial Sequence
  derived and/or modified CDS sequence (opt5) from neuraminidase__InfluenzaA__ABE97717
augaaccccaaucagaagaucauuaccaucggcagcauuugcauggugacagggaucgucaaccugaugcuccaaguuggaaauaugauuuccaucugggugucucacagcauccauacgggcaaccagcaccaggccgagccuauuuccaauaccaacuuccugacagaaaaagcuguggccucugucaaacuugcggggaauagcucccuguguccgaucaacggaugggcuguguacucuaaggacaauagcauuagaaucggcuccaagggggauguuuuugugauucgggagcccuucaucagcugcucucaucucgaaugucgcaccuuuuuccugacacagggagcccuucugaacgacaaacacuccaauggcaccgucaaggauagaagcccucaucggacacucaugucuugccccgugggcgaggccccuucccccuauaacagccgcuuugaaucuguugcuugguccgccagcgcuugucacgacgggaccuccuggcugacgauuggaaucucuggcccugauaauggggccguggcgguccugaaguacaacggaaucauuaccgacacaaucaaaagcuggagaaauaacauucuccggacccaagaguccgagugcgccugugugaacggcagcugcuucacagugaugaccgaugggccgucuaauggacaggcuucccacaagaucuuuaaaauggaaaagggcaaagucguuaagagcguggagcuggacgcccccaacuaucauuacgaagaguguucuugcuauccugaugcuggcgagauuacgugugugugccgcgacaauuggcacgggagcaacagacccugggucuccuucaaucagaaccuugaauaccagaucggauauaucugcucuggcguguuuggggauaauccucggcccaacgacggaacaggcagcugugggccgguuccuuccaauggagccuacggcgugaagggcuucagcuuuaaauacgggaacggagucuggauuggccgcaccaagucuacaaauuccagaagcggguucgagaugaucugggaucccaacggauggaccgaaaccgacucuuccuuuagcgugaaacaagacauuguugcgaucacagauugguccggcuauucugggagcuucgugcagcauccugagcugacgggccucgacugcauucggcccuguuucugggucgaacugauccgcggaagacccaaggaguccaccaucuggacaucuggcagcuccauuagcuuuugcggggucaauucugauaccgugggaugguccuggccugacggcgccgagcuuccguucacaaucgauaaauga

SEQ ID NO: 207111 - RNA, 1350 nt, Artificial Sequence
  derived and/or modified CDS sequence (opt5) from neuraminidase__InfluenzaA__ABE97718
augaaccccaaucagaagaucauuaccaucggcagcauuugcauggugacagggaucgucucccugaugcuccaaguuggaaacaugauuucuaucugggugagccacuccauccauacgggcaaucagcaccaggccgagccuauuucuaacaccaauuuccugacagaaaaagcuguggccagcgucaaacuugcggggaacuccucucuguguccgaucaauggaugggcuguguacagcaaggacaacuccauuagaaucggcagcaagggggauguuuuugugauucgggagcccuucaucucuugcucccaucucgaaugucgcaccuuuuuccugacacagggagcccuucugaaugacaaacacagcaacggcaccgucaaggauagaucuccucaucggacacucauguccugccccgugggcgaggccccuagccccuauaauucucgcuuugaauccguugcuuggagcgccuccgcuugucacgacgggaccucuuggcugacgauuggaaucagcggcccugauaacggggccguggcgguccugaaguacaauggaaucauuaccgacacaaucaaauccuggagaaacaauauucuccggacccaagagagcgagugcgccugugugaacggcucuugcuucacagugaugaccgaugggccguccaacggacaggcuagccacaagaucuuuaaaauggaaaagggcaaagucguuaagucuguggagcuggacgcccccaauuaucauuacgaagaguguagcugcuauccugaugcuggcgagauuacgugugugugccgcgacaacuggcacggguccaauagacccugggucucuuucaaccagaaucuugaauaccagaucggauauaucugcagcggcguguuuggggauaacccucggcccaaugacggaacaggcuccugugggccgguuagcucuaacggagccuacggcgugaagggcuucuccuuuaaauacgggaauggagucuggauuggccgcaccaagagcacaaacucuagauccggguucgagaugaucugggauccuaauggauggaccgaaaccgacagcuccuuuucugugaaacaagacauuguugcgaucacagauuggagcggcuauuccgggucuuucgugcagcaucccgagcugacgggccucgacugcauucggccuuguuucugggucgaacugauccgcggaagacccaaggagagcaccaucuggacauccggcagcucuauuuccuuuugcgggguggauagcgacaccgucggauggucuuggcccgauggcgccgagcuuccuuucacaaucgacaaauga

SEQ ID NO: 207112 - RNA, 1350 nt, Artificial Sequence
  derived and/or modified CDS sequence (opt5) from neuraminidase__InfluenzaA__ABE97719
augaaccccaaucagaagaucauuaccaucggcagcauuugcauggugacagggaucgucucccugaugcuccaaguuggaaacaugauuucuaucugggugagccacuccauccauacgggcaaucagcaccaggccgagccuauuucuaacaccaauuuccugacagaaaaagcuguggccagcgucaaacuugcggggaacuccucucuguguccgaucaauggaugggcuguguacagcaaggacaacuccauuagaaucggcagcaagggggauguuuuugugauucgggagcccuucaucucuugcucccaucucgaaugucgcaccuuuuuccugacacagggagcccuucugaaugacaaacacagcaacggcaccgucaaggauagaucuccucaucggacacucauguccugccccgugggcgaggccccuagccccuauaauucucgcuuugaauccguugcuuggagcgccuccgcuugucacgacgggaccucuuggcugacgauuggaaucagcggcccugauaacggggccguggcgguccugaaguacaauggaaucauuaccgacacaaucaaauccuggagaaacaauauucuccggacccaagagagcgagugcgccugugugaacggcucuugcuucacagugaugaccgaugggccguccaacggacaggcuagccacaagaucuuuaaaaugaagaaaggcaaggucguuaagucuguggaacuggacgcccccaauuaucauuacgaggaauguagcugcuauccugaugcuggcgagauuacgugugugugccgcgacaacuggcacggguccaauagacccugggucucuuucaaccagaaucuugaguaccagaucggauauaucugcagcggcguguuuggggauaacccucggcccaaugacggaacaggcuccugugggccgguuagcucuaacggagccuacggcgugaaaggcuucuccuuuaaguacgggaauggagucuggauuggccgcaccaaaagcacaaacucuagauccggguucgaaaugaucugggauccuaauggauggaccgagaccgacagcuccuuuucugugaagcaagacauuguugcgaucacagauuggagcggcuauuccgggucuuucgugcagcaucccgaacugacgggccucgacugcauucggccuuguuucugggucgagcugauccgcggaagacccaaagaaagcaccaucuggacauccggcagcucuauuuccuuuugcggggugaacagcgauaccgucggauggucuuggcccgacggcgccgagcuuccuuucacaaucgauaaguga

SEQ ID NO: 207113 - RNA, 1350 nt, Artificial Sequence
  derived and/or modified CDS sequence (opt5) from neuraminidase__InfluenzaA__ABE97720
augaaccccaaucagaagaucauuaccaucggcagcauuugcauggugacagggaucgucucccugaugcuccaaguuggaaacaugauuucuaucugggugagccacuccauccauacgggcaaucagcaccaggccgagccuauuucuaacgcuaauuuccugaccgaaaaagccguggcgagcgucaaacuugcugggaacuccucucuguguccgaucaauggaugggccguguacagcaaggacaacuccauuagaaucggcagcaagggggauguuuuugugauucgggagcccuucaucucuugcucccaucucgaaugucgcacauuuuuccugacccagggagcccuucugaaugacaaacacagcaacggcacagucaaggauagaucuccucaucggacccucauguccugccccgugggcgaggcuccuagccccuauaauucucgcuuugaauccguugccuggagcgcuuccgccugucacgacgggacaucuuggcugaccauuggaaucagcggcccugauaacggggcgguggccguccugaaguacaauggaaucauuacggacaccaucaaauccuggagaaacaauauucuccggacacaagagagcgagugcgcuugugugaacggcucuugcuucaccgugaugacagaugggccguccaacggacaggccagccacaagaucuuuaaaauggaaaagggcaaagucguuaagucuguggagcuggacgcucccaauuaucauuacgaagaguguagcugcuauccugaugccggcgagauuaccugugugugccgcgacaacuggcacggguccaauagacccugggucucuuucaaccagaaucuugaauaccagaucggauauaucugcagcggcguguuuggggauacgccucggcccaacgacggaacaggcuccugugggccgguuagcucuaauggagcguacggcgugaagggcuucuccuuuaaauacgggaacggagucuggauuggccgcaccaagagcacaaauucuagauccggguucgagaugaucugggauccuaacggauggaccgaaaccgacagcuccuuuucugugaaacaagacauuguugccaucacagauuggagcggcuauuccgggucuuucgugcagcaucccgagcugacgggccucgacugcauucggccuuguuucugggucgaacugauccgcggaagacccaaggagagcaccaucuggacauccggcagcucuauuuccuuuugcggggugaauagcgauaccgucggauggucuuggcccgacggcgcugagcuuccuuucacaaucgauaaauga

SEQ ID NO: 207114 - RNA, 1410 nt, Artificial Sequence; identical to SEQ ID NO: 206885
  derived and/or modified CDS sequence (opt5) from neuraminidase__InfluenzaA__ABF47553

SEQ ID NO: 207115 - RNA, 1413 nt, Artificial Sequence; identical to SEQ ID NO: 206468
  derived and/or modified CDS sequence (opt5) from neuraminidase__InfluenzaA__ABF47564
